United States Patent Application Publication US 2021/0061914 A1 - sequence listing, part 4

SEQ ID NO: 66478 - protein, 9 aa, Homo sapiens
  Table A; Target 66478; HLA-B*37:01; PMEL; ENSG00000185664; TAA
KQDFSVPQL

SEQ ID NO: 66479 - protein, 9 aa, Homo sapiens
  Table A; Target 66479; HLA-B*38:01; PMEL; ENSG00000185664; TAA
KQDFSVPQL

SEQ ID NO: 66480 - protein, 9 aa, Homo sapiens
  Table A; Target 66480; HLA-B*39:01; PMEL; ENSG00000185664; TAA
KQDFSVPQL

SEQ ID NO: 66481 - protein, 9 aa, Homo sapiens
  Table A; Target 66481; HLA-B*40:01; PMEL; ENSG00000185664; TAA
KQDFSVPQL

SEQ ID NO: 66482 - protein, 9 aa, Homo sapiens
  Table A; Target 66482; HLA-B*40:02; PMEL; ENSG00000185664; TAA
KQDFSVPQL

SEQ ID NO: 66483 - protein, 9 aa, Homo sapiens
  Table A; Target 66483; HLA-B*55:01; PMEL; ENSG00000185664; TAA
KQDFSVPQL

SEQ ID NO: 66484 - protein, 9 aa, Homo sapiens
  Table A; Target 66484; HLA-C*04:01; PMEL; ENSG00000185664; TAA
KQDFSVPQL

SEQ ID NO: 66485 - protein, 9 aa, Homo sapiens
  Table A; Target 66485; HLA-C*05:01; PMEL; ENSG00000185664; TAA
KQDFSVPQL

SEQ ID NO: 66486 - protein, 9 aa, Homo sapiens
  Table A; Target 66486; HLA-C*07:04; PMEL; ENSG00000185664; TAA
KQDFSVPQL

SEQ ID NO: 66487 - protein, 11 aa, Homo sapiens
  Table A; Target 66487; HLA-A*03:01; PMEL; ENSG00000185664; TAA
KQDFSVPQLPH

SEQ ID NO: 66488 - protein, 9 aa, Homo sapiens
  Table A; Target 66488; HLA-A*02:01; PMEL; ENSG00000185664; TAA
KTWGQYWQV

SEQ ID NO: 66489 - protein, 9 aa, Homo sapiens
  Table A; Target 66489; HLA-A*02:04; PMEL; ENSG00000185664; TAA
KTWGQYWQV

SEQ ID NO: 66490 - protein, 9 aa, Homo sapiens
  Table A; Target 66490; HLA-A*02:07; PMEL; ENSG00000185664; TAA
KTWGQYWQV

SEQ ID NO: 66491 - protein, 10 aa, Homo sapiens
  Table A; Target 66491; HLA-A*31:01; PMEL; ENSG00000185664; TAA
KTWGQYWQVL

SEQ ID NO: 66492 - protein, 9 aa, Homo sapiens
  Table A; Target 66492; HLA-A*23:01; PMEL; ENSG00000185664; TAA
KVLPDGQVI

SEQ ID NO: 66493 - protein, 9 aa, Homo sapiens
  Table A; Target 66493; HLA-A*24:02; PMEL; ENSG00000185664; TAA
KVLPDGQVI

SEQ ID NO: 66494 - protein, 9 aa, Homo sapiens
  Table A; Target 66494; HLA-A*32:01; PMEL; ENSG00000185664; TAA
KVLPDGQVI

SEQ ID NO: 66495 - protein, 9 aa, Homo sapiens
  Table A; Target 66495; HLA-B*13:02; PMEL; ENSG00000185664; TAA
KVLPDGQVI

SEQ ID NO: 66496 - protein, 9 aa, Homo sapiens
  Table A; Target 66496; HLA-B*15:01; PMEL; ENSG00000185664; TAA
KVLPDGQVI

SEQ ID NO: 66497 - protein, 9 aa, Homo sapiens
  Table A; Target 66497; HLA-B*37:01; PMEL; ENSG00000185664; TAA
KVLPDGQVI

SEQ ID NO: 66498 - protein, 9 aa, Homo sapiens
  Table A; Target 66498; HLA-B*40:02; PMEL; ENSG00000185664; TAA
KVLPDGQVI

SEQ ID NO: 66499 - protein, 9 aa, Homo sapiens
  Table A; Target 66499; HLA-B*57:01; PMEL; ENSG00000185664; TAA
KVLPDGQVI

SEQ ID NO: 66500 - protein, 9 aa, Homo sapiens
  Table A; Target 66500; HLA-B*58:01; PMEL; ENSG00000185664; TAA
KVLPDGQVI

SEQ ID NO: 66501 - protein, 10 aa, Homo sapiens
  Table A; Target 66501; HLA-A*24:02; PMEL; ENSG00000185664; TAA
KVLPDGQVIW

SEQ ID NO: 66502 - protein, 10 aa, Homo sapiens
  Table A; Target 66502; HLA-A*25:01; PMEL; ENSG00000185664; TAA
KVLPDGQVIW

SEQ ID NO: 66503 - protein, 10 aa, Homo sapiens
  Table A; Target 66503; HLA-A*32:01; PMEL; ENSG00000185664; TAA
KVLPDGQVIW

SEQ ID NO: 66504 - protein, 10 aa, Homo sapiens
  Table A; Target 66504; HLA-B*44:02; PMEL; ENSG00000185664; TAA
KVLPDGQVIW

SEQ ID NO: 66505 - protein, 10 aa, Homo sapiens
  Table A; Target 66505; HLA-B*57:01; PMEL; ENSG00000185664; TAA
KVLPDGQVIW

SEQ ID NO: 66506 - protein, 10 aa, Homo sapiens
  Table A; Target 66506; HLA-B*58:01; PMEL; ENSG00000185664; TAA
KVLPDGQVIW

SEQ ID NO: 66507 - protein, 11 aa, Homo sapiens
  Table A; Target 66507; HLA-A*02:01; PMEL; ENSG00000185664; TAA
KVLPDGQVIWV

SEQ ID NO: 66508 - protein, 11 aa, Homo sapiens
  Table A; Target 66508; HLA-A*02:04; PMEL; ENSG00000185664; TAA
KVLPDGQVIWV

SEQ ID NO: 66509 - protein, 11 aa, Homo sapiens
  Table A; Target 66509; HLA-A*02:07; PMEL; ENSG00000185664; TAA
KVLPDGQVIWV

SEQ ID NO: 66510 - protein, 8 aa, Homo sapiens
  Table A; Target 66510; HLA-B*08:01; PMEL; ENSG00000185664; TAA
KVPVSEVM

SEQ ID NO: 66511 - protein, 8 aa, Homo sapiens
  Table A; Target 66511; HLA-C*01:02; PMEL; ENSG00000185664; TAA
KVPVSEVM

SEQ ID NO: 66512 - protein, 9 aa, Homo sapiens
  Table A; Target 66512; HLA-A*02:01; PMEL; ENSG00000185664; TAA
KVSNDGPTL

SEQ ID NO: 66513 - protein, 9 aa, Homo sapiens
  Table A; Target 66513; HLA-A*02:03; PMEL; ENSG00000185664; TAA
KVSNDGPTL

SEQ ID NO: 66514 - protein, 9 aa, Homo sapiens
  Table A; Target 66514; HLA-A*02:04; PMEL; ENSG00000185664; TAA
KVSNDGPTL

SEQ ID NO: 66515 - protein, 9 aa, Homo sapiens
  Table A; Target 66515; HLA-A*02:07; PMEL; ENSG00000185664; TAA
KVSNDGPTL

SEQ ID NO: 66516 - protein, 9 aa, Homo sapiens
  Table A; Target 66516; HLA-A*23:01; PMEL; ENSG00000185664; TAA
KVSNDGPTL

SEQ ID NO: 66517 - protein, 9 aa, Homo sapiens
  Table A; Target 66517; HLA-A*24:02; PMEL; ENSG00000185664; TAA
KVSNDGPTL

SEQ ID NO: 66518 - protein, 9 aa, Homo sapiens
  Table A; Target 66518; HLA-A*25:01; PMEL; ENSG00000185664; TAA
KVSNDGPTL

SEQ ID NO: 66519 - protein, 9 aa, Homo sapiens
  Table A; Target 66519; HLA-A*30:01; PMEL; ENSG00000185664; TAA
KVSNDGPTL

SEQ ID NO: 66520 - protein, 9 aa, Homo sapiens
  Table A; Target 66520; HLA-A*32:01; PMEL; ENSG00000185664; TAA
KVSNDGPTL

SEQ ID NO: 66521 - protein, 9 aa, Homo sapiens
  Table A; Target 66521; HLA-B*07:02; PMEL; ENSG00000185664; TAA
KVSNDGPTL

SEQ ID NO: 66522 - protein, 9 aa, Homo sapiens
  Table A; Target 66522; HLA-B*13:02; PMEL; ENSG00000185664; TAA
KVSNDGPTL

SEQ ID NO: 66523 - protein, 9 aa, Homo sapiens
  Table A; Target 66523; HLA-B*15:01; PMEL; ENSG00000185664; TAA
KVSNDGPTL

SEQ ID NO: 66524 - protein, 9 aa, Homo sapiens
  Table A; Target 66524; HLA-B*15:03; PMEL; ENSG00000185664; TAA
KVSNDGPTL

SEQ ID NO: 66525 - protein, 9 aa, Homo sapiens
  Table A; Target 66525; HLA-B*27:05; PMEL; ENSG00000185664; TAA
KVSNDGPTL

SEQ ID NO: 66526 - protein, 9 aa, Homo sapiens
  Table A; Target 66526; HLA-B*35:03; PMEL; ENSG00000185664; TAA
KVSNDGPTL

SEQ ID NO: 66527 - protein, 9 aa, Homo sapiens
  Table A; Target 66527; HLA-B*37:01; PMEL; ENSG00000185664; TAA
KVSNDGPTL

SEQ ID NO: 66528 - protein, 9 aa, Homo sapiens
  Table A; Target 66528; HLA-B*38:01; PMEL; ENSG00000185664; TAA
KVSNDGPTL

SEQ ID NO: 66529 - protein, 9 aa, Homo sapiens
  Table A; Target 66529; HLA-B*39:01; PMEL; ENSG00000185664; TAA
KVSNDGPTL

SEQ ID NO: 66530 - protein, 9 aa, Homo sapiens
  Table A; Target 66530; HLA-B*40:01; PMEL; ENSG00000185664; TAA
KVSNDGPTL

SEQ ID NO: 66531 - protein, 9 aa, Homo sapiens
  Table A; Target 66531; HLA-B*40:02; PMEL; ENSG00000185664; TAA
KVSNDGPTL

SEQ ID NO: 66532 - protein, 9 aa, Homo sapiens
  Table A; Target 66532; HLA-B*55:01; PMEL; ENSG00000185664; TAA
KVSNDGPTL

SEQ ID NO: 66533 - protein, 9 aa, Homo sapiens
  Table A; Target 66533; HLA-B*58:01; PMEL; ENSG00000185664; TAA
KVSNDGPTL

SEQ ID NO: 66534 - protein, 9 aa, Homo sapiens
  Table A; Target 66534; HLA-C*01:02; PMEL; ENSG00000185664; TAA
KVSNDGPTL

SEQ ID NO: 66535 - protein, 9 aa, Homo sapiens
  Table A; Target 66535; HLA-C*02:02; PMEL; ENSG00000185664; TAA
KVSNDGPTL

SEQ ID NO: 66536 - protein, 9 aa, Homo sapiens
  Table A; Target 66536; HLA-C*03:03; PMEL; ENSG00000185664; TAA
KVSNDGPTL

SEQ ID NO: 66537 - protein, 9 aa, Homo sapiens
  Table A; Target 66537; HLA-C*03:04; PMEL; ENSG00000185664; TAA
KVSNDGPTL

SEQ ID NO: 66538 - protein, 9 aa, Homo sapiens
  Table A; Target 66538; HLA-C*05:01; PMEL; ENSG00000185664; TAA
KVSNDGPTL

SEQ ID NO: 66539 - protein, 9 aa, Homo sapiens
  Table A; Target 66539; HLA-C*06:02; PMEL; ENSG00000185664; TAA
KVSNDGPTL

SEQ ID NO: 66540 - protein, 9 aa, Homo sapiens
  Table A; Target 66540; HLA-C*07:02; PMEL; ENSG00000185664; TAA
KVSNDGPTL

SEQ ID NO: 66541 - protein, 9 aa, Homo sapiens
  Table A; Target 66541; HLA-C*07:04; PMEL; ENSG00000185664; TAA
KVSNDGPTL

SEQ ID NO: 66542 - protein, 9 aa, Homo sapiens
  Table A; Target 66542; HLA-C*12:03; PMEL; ENSG00000185664; TAA
KVSNDGPTL

SEQ ID NO: 66543 - protein, 9 aa, Homo sapiens
  Table A; Target 66543; HLA-C*14:02; PMEL; ENSG00000185664; TAA
KVSNDGPTL

SEQ ID NO: 66544 - protein, 9 aa, Homo sapiens
  Table A; Target 66544; HLA-C*16:01; PMEL; ENSG00000185664; TAA
KVSNDGPTL

SEQ ID NO: 66545 - protein, 9 aa, Homo sapiens
  Table A; Target 66545; HLA-C*16:02; PMEL; ENSG00000185664; TAA
KVSNDGPTL

SEQ ID NO: 66546 - protein, 9 aa, Homo sapiens
  Table A; Target 66546; HLA-C*16:04; PMEL; ENSG00000185664; TAA
KVSNDGPTL

SEQ ID NO: 66547 - protein, 10 aa, Homo sapiens
  Table A; Target 66547; HLA-B*58:01; PMEL; ENSG00000185664; TAA
KVSNDGPTLI

SEQ ID NO: 66548 - protein, 8 aa, Homo sapiens
  Table A; Target 66548; HLA-C*05:01; PMEL; ENSG00000185664; TAA
LADTNSLA

SEQ ID NO: 66549 - protein, 9 aa, Homo sapiens
  Table A; Target 66549; HLA-A*01:01; PMEL; ENSG00000185664; TAA
LADTNSLAV

SEQ ID NO: 66550 - protein, 9 aa, Homo sapiens
  Table A; Target 66550; HLA-A*02:01; PMEL; ENSG00000185664; TAA
LADTNSLAV

SEQ ID NO: 66551 - protein, 9 aa, Homo sapiens
  Table A; Target 66551; HLA-A*02:07; PMEL; ENSG00000185664; TAA
LADTNSLAV

SEQ ID NO: 66552 - protein, 9 aa, Homo sapiens
  Table A; Target 66552; HLA-B*13:02; PMEL; ENSG00000185664; TAA
LADTNSLAV

SEQ ID NO: 66553 - protein, 9 aa, Homo sapiens
  Table A; Target 66553; HLA-B*27:05; PMEL; ENSG00000185664; TAA
LADTNSLAV

SEQ ID NO: 66554 - protein, 9 aa, Homo sapiens
  Table A; Target 66554; HLA-B*35:03; PMEL; ENSG00000185664; TAA
LADTNSLAV

SEQ ID NO: 66555 - protein, 9 aa, Homo sapiens
  Table A; Target 66555; HLA-B*38:01; PMEL; ENSG00000185664; TAA
LADTNSLAV

SEQ ID NO: 66556 - protein, 9 aa, Homo sapiens
  Table A; Target 66556; HLA-B*39:01; PMEL; ENSG00000185664; TAA
LADTNSLAV

SEQ ID NO: 66557 - protein, 9 aa, Homo sapiens
  Table A; Target 66557; HLA-B*51:01; PMEL; ENSG00000185664; TAA
LADTNSLAV

SEQ ID NO: 66558 - protein, 9 aa, Homo sapiens
  Table A; Target 66558; HLA-B*54:01; PMEL; ENSG00000185664; TAA
LADTNSLAV

SEQ ID NO: 66559 - protein, 9 aa, Homo sapiens
  Table A; Target 66559; HLA-B*55:01; PMEL; ENSG00000185664; TAA
LADTNSLAV

SEQ ID NO: 66560 - protein, 9 aa, Homo sapiens
  Table A; Target 66560; HLA-C*02:02; PMEL; ENSG00000185664; TAA
LADTNSLAV

SEQ ID NO: 66561 - protein, 9 aa, Homo sapiens
  Table A; Target 66561; HLA-C*03:03; PMEL; ENSG00000185664; TAA
LADTNSLAV

SEQ ID NO: 66562 - protein, 9 aa, Homo sapiens
  Table A; Target 66562; HLA-C*03:04; PMEL; ENSG00000185664; TAA
LADTNSLAV

SEQ ID NO: 66563 - protein, 9 aa, Homo sapiens
  Table A; Target 66563; HLA-C*05:01; PMEL; ENSG00000185664; TAA
LADTNSLAV

SEQ ID NO: 66564 - protein, 9 aa, Homo sapiens
  Table A; Target 66564; HLA-C*12:03; PMEL; ENSG00000185664; TAA
LADTNSLAV

SEQ ID NO: 66565 - protein, 9 aa, Homo sapiens
  Table A; Target 66565; HLA-C*16:02; PMEL; ENSG00000185664; TAA
LADTNSLAV

SEQ ID NO: 66566 - protein, 9 aa, Homo sapiens
  Table A; Target 66566; HLA-C*16:04; PMEL; ENSG00000185664; TAA
LADTNSLAV

SEQ ID NO: 66567 - protein, 10 aa, Homo sapiens
  Table A; Target 66567; HLA-A*01:01; PMEL; ENSG00000185664; TAA
LADTNSLAVV

SEQ ID NO: 66568 - protein, 10 aa, Homo sapiens
  Table A; Target 66568; HLA-C*05:01; PMEL; ENSG00000185664; TAA
LADTNSLAVV

SEQ ID NO: 66569 - protein, 8 aa, Homo sapiens
  Table A; Target 66569; HLA-A*01:01; PMEL; ENSG00000185664; TAA
LAEADLSY

SEQ ID NO: 66570 - protein, 10 aa, Homo sapiens
  Table A; Target 66570; HLA-B*27:02; PMEL; ENSG00000185664; TAA
LAEADLSYTW

SEQ ID NO: 66571 - protein, 10 aa, Homo sapiens
  Table A; Target 66571; HLA-B*57:01; PMEL; ENSG00000185664; TAA
LAEADLSYTW

SEQ ID NO: 66572 - protein, 9 aa, Homo sapiens
  Table A; Target 66572; HLA-B*54:01; PMEL; ENSG00000185664; TAA
LAEMSTPEA

SEQ ID NO: 66573 - protein, 9 aa, Homo sapiens
  Table A; Target 66573; HLA-C*03:03; PMEL; ENSG00000185664; TAA
LAEMSTPEA

SEQ ID NO: 66574 - protein, 9 aa, Homo sapiens
  Table A; Target 66574; HLA-C*03:04; PMEL; ENSG00000185664; TAA
LAEMSTPEA

SEQ ID NO: 66575 - protein, 8 aa, Homo sapiens
  Table A; Target 66575; HLA-A*32:01; PMEL; ENSG00000185664; TAA
LAHSSSAF

SEQ ID NO: 66576 - protein, 8 aa, Homo sapiens
  Table A; Target 66576; HLA-B*08:01; PMEL; ENSG00000185664; TAA
LAHSSSAF

SEQ ID NO: 66577 - protein, 8 aa, Homo sapiens
  Table A; Target 66577; HLA-B*15:01; PMEL; ENSG00000185664; TAA
LAHSSSAF

SEQ ID NO: 66578 - protein, 8 aa, Homo sapiens
  Table A; Target 66578; HLA-B*15:03; PMEL; ENSG00000185664; TAA
LAHSSSAF

SEQ ID NO: 66579 - protein, 8 aa, Homo sapiens
  Table A; Target 66579; HLA-B*35:01; PMEL; ENSG00000185664; TAA
LAHSSSAF

SEQ ID NO: 66580 - protein, 8 aa, Homo sapiens
  Table A; Target 66580; HLA-B*37:01; PMEL; ENSG00000185664; TAA
LAHSSSAF

SEQ ID NO: 66581 - protein, 8 aa, Homo sapiens
  Table A; Target 66581; HLA-B*39:01; PMEL; ENSG00000185664; TAA
LAHSSSAF

SEQ ID NO: 66582 - protein, 8 aa, Homo sapiens
  Table A; Target 66582; HLA-B*46:01; PMEL; ENSG00000185664; TAA
LAHSSSAF

SEQ ID NO: 66583 - protein, 8 aa, Homo sapiens
  Table A; Target 66583; HLA-B*58:01; PMEL; ENSG00000185664; TAA
LAHSSSAF

SEQ ID NO: 66584 - protein, 8 aa, Homo sapiens
  Table A; Target 66584; HLA-C*01:02; PMEL; ENSG00000185664; TAA
LAHSSSAF

SEQ ID NO: 66585 - protein, 8 aa, Homo sapiens
  Table A; Target 66585; HLA-C*02:02; PMEL; ENSG00000185664; TAA
LAHSSSAF

SEQ ID NO: 66586 - protein, 8 aa, Homo sapiens
  Table A; Target 66586; HLA-C*03:03; PMEL; ENSG00000185664; TAA
LAHSSSAF

SEQ ID NO: 66587 - protein, 8 aa, Homo sapiens
  Table A; Target 66587; HLA-C*03:04; PMEL; ENSG00000185664; TAA
LAHSSSAF

SEQ ID NO: 66588 - protein, 8 aa, Homo sapiens
  Table A; Target 66588; HLA-C*04:01; PMEL; ENSG00000185664; TAA
LAHSSSAF

SEQ ID NO: 66589 - protein, 8 aa, Homo sapiens
  Table A; Target 66589; HLA-C*05:01; PMEL; ENSG00000185664; TAA
LAHSSSAF

SEQ ID NO: 66590 - protein, 8 aa, Homo sapiens
  Table A; Target 66590; HLA-C*07:01; PMEL; ENSG00000185664; TAA
LAHSSSAF

SEQ ID NO: 66591 - protein, 8 aa, Homo sapiens
  Table A; Target 66591; HLA-C*07:02; PMEL; ENSG00000185664; TAA
LAHSSSAF

SEQ ID NO: 66592 - protein, 8 aa, Homo sapiens
  Table A; Target 66592; HLA-C*12:03; PMEL; ENSG00000185664; TAA
LAHSSSAF

SEQ ID NO: 66593 - protein, 8 aa, Homo sapiens
  Table A; Target 66593; HLA-C*14:02; PMEL; ENSG00000185664; TAA
LAHSSSAF

SEQ ID NO: 66594 - protein, 8 aa, Homo sapiens
  Table A; Target 66594; HLA-C*16:01; PMEL; ENSG00000185664; TAA
LAHSSSAF

SEQ ID NO: 66595 - protein, 8 aa, Homo sapiens
  Table A; Target 66595; HLA-C*16:02; PMEL; ENSG00000185664; TAA
LAHSSSAF

SEQ ID NO: 66596 - protein, 8 aa, Homo sapiens
  Table A; Target 66596; HLA-C*16:04; PMEL; ENSG00000185664; TAA
LAHSSSAF

SEQ ID NO: 66597 - protein, 8 aa, Homo sapiens
  Table A; Target 66597; HLA-B*51:01; PMEL; ENSG00000185664; TAA
LAVGATKV

SEQ ID NO: 66598 - protein, 8 aa, Homo sapiens
  Table A; Target 66598; HLA-C*02:02; PMEL; ENSG00000185664; TAA
LAVGATKV

SEQ ID NO: 66599 - protein, 8 aa, Homo sapiens
  Table A; Target 66599; HLA-C*12:03; PMEL; ENSG00000185664; TAA
LAVGATKV

SEQ ID NO: 66600 - protein, 8 aa, Homo sapiens
  Table A; Target 66600; HLA-C*16:02; PMEL; ENSG00000185664; TAA
LAVGATKV

SEQ ID NO: 66601 - protein, 9 aa, Homo sapiens
  Table A; Target 66601; HLA-C*06:02; PMEL; ENSG00000185664; TAA
LAVGATKVP

SEQ ID NO: 66602 - protein, 9 aa, Homo sapiens
  Table A; Target 66602; HLA-C*07:01; PMEL; ENSG00000185664; TAA
LAVGATKVP

SEQ ID NO: 66603 - protein, 9 aa, Homo sapiens
  Table A; Target 66603; HLA-C*12:03; PMEL; ENSG00000185664; TAA
LAVGATKVP

SEQ ID NO: 66604 - protein, 9 aa, Homo sapiens
  Table A; Target 66604; HLA-C*16:02; PMEL; ENSG00000185664; TAA
LAVGATKVP

SEQ ID NO: 66605 - protein, 10 aa, Homo sapiens
  Table A; Target 66605; HLA-A*31:01; PMEL; ENSG00000185664; TAA
LAVGATKVPR

SEQ ID NO: 66606 - protein, 10 aa, Homo sapiens
  Table A; Target 66606; HLA-A*33:01; PMEL; ENSG00000185664; TAA
LAVGATKVPR

SEQ ID NO: 66607 - protein, 10 aa, Homo sapiens
  Table A; Target 66607; HLA-A*33:03; PMEL; ENSG00000185664; TAA
LAVGATKVPR

SEQ ID NO: 66608 - protein, 10 aa, Homo sapiens
  Table A; Target 66608; HLA-A*68:01; PMEL; ENSG00000185664; TAA
LAVGATKVPR

SEQ ID NO: 66609 - protein, 10 aa, Homo sapiens
  Table A; Target 66609; HLA-C*07:06; PMEL; ENSG00000185664; TAA
LAVGATKVPR

SEQ ID NO: 66610 - protein, 8 aa, Homo sapiens
  Table A; Target 66610; HLA-B*08:01; PMEL; ENSG00000185664; TAA
LAVIGALL

SEQ ID NO: 66611 - protein, 8 aa, Homo sapiens
  Table A; Target 66611; HLA-B*35:03; PMEL; ENSG00000185664; TAA
LAVIGALL

SEQ ID NO: 66612 - protein, 8 aa, Homo sapiens
  Table A; Target 66612; HLA-B*38:01; PMEL; ENSG00000185664; TAA
LAVIGALL

SEQ ID NO: 66613 - protein, 8 aa, Homo sapiens
  Table A; Target 66613; HLA-B*40:01; PMEL; ENSG00000185664; TAA
LAVIGALL

SEQ ID NO: 66614 - protein, 8 aa, Homo sapiens
  Table A; Target 66614; HLA-B*46:01; PMEL; ENSG00000185664; TAA
LAVIGALL

SEQ ID NO: 66615 - protein, 8 aa, Homo sapiens
  Table A; Target 66615; HLA-B*51:01; PMEL; ENSG00000185664; TAA
LAVIGALL

SEQ ID NO: 66616 - protein, 8 aa, Homo sapiens
  Table A; Target 66616; HLA-B*58:01; PMEL; ENSG00000185664; TAA
LAVIGALL

SEQ ID NO: 66617 - protein, 8 aa, Homo sapiens
  Table A; Target 66617; HLA-C*01:02; PMEL; ENSG00000185664; TAA
LAVIGALL

SEQ ID NO: 66618 - protein, 8 aa, Homo sapiens
  Table A; Target 66618; HLA-C*02:02; PMEL; ENSG00000185664; TAA
LAVIGALL

SEQ ID NO: 66619 - protein, 8 aa, Homo sapiens
  Table A; Target 66619; HLA-C*03:03; PMEL; ENSG00000185664; TAA
LAVIGALL

SEQ ID NO: 66620 - protein, 8 aa, Homo sapiens
  Table A; Target 66620; HLA-C*03:04; PMEL; ENSG00000185664; TAA
LAVIGALL

SEQ ID NO: 66621 - protein, 8 aa, Homo sapiens
  Table A; Target 66621; HLA-C*04:01; PMEL; ENSG00000185664; TAA
LAVIGALL

SEQ ID NO: 66622 - protein, 8 aa, Homo sapiens
  Table A; Target 66622; HLA-C*05:01; PMEL; ENSG00000185664; TAA
LAVIGALL

SEQ ID NO: 66623 - protein, 8 aa, Homo sapiens
  Table A; Target 66623; HLA-C*07:01; PMEL; ENSG00000185664; TAA
LAVIGALL

SEQ ID NO: 66624 - protein, 8 aa, Homo sapiens
  Table A; Target 66624; HLA-C*12:03; PMEL; ENSG00000185664; TAA
LAVIGALL

SEQ ID NO: 66625 - protein, 9 aa, Homo sapiens
  Table A; Target 66625; HLA-B*54:01; PMEL; ENSG00000185664; TAA
LAVIGALLA

SEQ ID NO: 66626 - protein, 9 aa, Homo sapiens
  Table A; Target 66626; HLA-B*56:01; PMEL; ENSG00000185664; TAA
LAVIGALLA

SEQ ID NO: 66627 - protein, 10 aa, Homo sapiens
  Table A; Target 66627; HLA-B*54:01; PMEL; ENSG00000185664; TAA
LAVIGALLAV

SEQ ID NO: 66628 - protein, 8 aa, Homo sapiens
  Table A; Target 66628; HLA-A*30:01; PMEL; ENSG00000185664; TAA
LAVVSTQL

SEQ ID NO: 66629 - protein, 8 aa, Homo sapiens
  Table A; Target 66629; HLA-B*08:01; PMEL; ENSG00000185664; TAA
LAVVSTQL

SEQ ID NO: 66630 - protein, 8 aa, Homo sapiens
  Table A; Target 66630; HLA-B*15:01; PMEL; ENSG00000185664; TAA
LAVVSTQL

SEQ ID NO: 66631 - protein, 8 aa, Homo sapiens
  Table A; Target 66631; HLA-B*15:03; PMEL; ENSG00000185664; TAA
LAVVSTQL

SEQ ID NO: 66632 - protein, 8 aa, Homo sapiens
  Table A; Target 66632; HLA-B*35:01; PMEL; ENSG00000185664; TAA
LAVVSTQL

SEQ ID NO: 66633 - protein, 8 aa, Homo sapiens
  Table A; Target 66633; HLA-B*35:03; PMEL; ENSG00000185664; TAA
LAVVSTQL

SEQ ID NO: 66634 - protein, 8 aa, Homo sapiens
  Table A; Target 66634; HLA-B*46:01; PMEL; ENSG00000185664; TAA
LAVVSTQL

SEQ ID NO: 66635 - protein, 8 aa, Homo sapiens
  Table A; Target 66635; HLA-B*51:01; PMEL; ENSG00000185664; TAA
LAVVSTQL

SEQ ID NO: 66636 - protein, 8 aa, Homo sapiens
  Table A; Target 66636; HLA-B*58:01; PMEL; ENSG00000185664; TAA
LAVVSTQL

SEQ ID NO: 66637 - protein, 8 aa, Homo sapiens
  Table A; Target 66637; HLA-C*01:02; PMEL; ENSG00000185664; TAA
LAVVSTQL

SEQ ID NO: 66638 - protein, 8 aa, Homo sapiens
  Table A; Target 66638; HLA-C*02:02; PMEL; ENSG00000185664; TAA
LAVVSTQL

SEQ ID NO: 66639 - protein, 8 aa, Homo sapiens
  Table A; Target 66639; HLA-C*03:03; PMEL; ENSG00000185664; TAA
LAVVSTQL

SEQ ID NO: 66640 - protein, 8 aa, Homo sapiens
  Table A; Target 66640; HLA-C*03:04; PMEL; ENSG00000185664; TAA
LAVVSTQL

SEQ ID NO: 66641 - protein, 8 aa, Homo sapiens
  Table A; Target 66641; HLA-C*05:01; PMEL; ENSG00000185664; TAA
LAVVSTQL

SEQ ID NO: 66642 - protein, 8 aa, Homo sapiens
  Table A; Target 66642; HLA-C*14:02; PMEL; ENSG00000185664; TAA
LAVVSTQL

SEQ ID NO: 66643 - protein, 8 aa, Homo sapiens
  Table A; Target 66643; HLA-C*16:01; PMEL; ENSG00000185664; TAA
LAVVSTQL

SEQ ID NO: 66644 - protein, 8 aa, Homo sapiens
  Table A; Target 66644; HLA-C*16:04; PMEL; ENSG00000185664; TAA
LAVVSTQL

SEQ ID NO: 66645 - protein, 9 aa, Homo sapiens
  Table A; Target 66645; HLA-A*23:01; PMEL; ENSG00000185664; TAA
LAVVSTQLI

SEQ ID NO: 66646 - protein, 9 aa, Homo sapiens
  Table A; Target 66646; HLA-A*24:02; PMEL; ENSG00000185664; TAA
LAVVSTQLI

SEQ ID NO: 66647 - protein, 9 aa, Homo sapiens
  Table A; Target 66647; HLA-B*49:01; PMEL; ENSG00000185664; TAA
LAVVSTQLI

SEQ ID NO: 66648 - protein, 9 aa, Homo sapiens
  Table A; Target 66648; HLA-B*51:01; PMEL; ENSG00000185664; TAA
LAVVSTQLI

SEQ ID NO: 66649 - protein, 9 aa, Homo sapiens
  Table A; Target 66649; HLA-B*58:01; PMEL; ENSG00000185664; TAA
LAVVSTQLI

SEQ ID NO: 66650 - protein, 9 aa, Homo sapiens
  Table A; Target 66650; HLA-C*02:02; PMEL; ENSG00000185664; TAA
LAVVSTQLI

SEQ ID NO: 66651 - protein, 9 aa, Homo sapiens
  Table A; Target 66651; HLA-C*03:04; PMEL; ENSG00000185664; TAA
LAVVSTQLI

SEQ ID NO: 66652 - protein, 9 aa, Homo sapiens
  Table A; Target 66652; HLA-C*12:03; PMEL; ENSG00000185664; TAA
LAVVSTQLI

SEQ ID NO: 66653 - protein, 8 aa, Homo sapiens
  Table A; Target 66653; HLA-C*07:01; PMEL; ENSG00000185664; TAA
LDGGNKHF

SEQ ID NO: 66654 - protein, 8 aa, Homo sapiens
  Table A; Target 66654; HLA-C*12:03; PMEL; ENSG00000185664; TAA
LDGGNKHF

SEQ ID NO: 66655 - protein, 9 aa, Homo sapiens
  Table A; Target 66655; HLA-C*07:01; PMEL; ENSG00000185664; TAA
LDGGNKHFL

SEQ ID NO: 66656 - protein, 8 aa, Homo sapiens
  Table A; Target 66656; HLA-B*27:02; PMEL; ENSG00000185664; TAA
LDGTATLR

SEQ ID NO: 66657 - protein, 8 aa, Homo sapiens
  Table A; Target 66657; HLA-B*39:01; PMEL; ENSG00000185664; TAA
LEPGPVTA

SEQ ID NO: 66658 - protein, 9 aa, Homo sapiens
  Table A; Target 66658; HLA-B*07:02; PMEL; ENSG00000185664; TAA
LEPGPVTAQ

SEQ ID NO: 66659 - protein, 9 aa, Homo sapiens
  Table A; Target 66659; HLA-B*27:05; PMEL; ENSG00000185664; TAA
LEPGPVTAQ

SEQ ID NO: 66660 - protein, 9 aa, Homo sapiens
  Table A; Target 66660; HLA-B*37:01; PMEL; ENSG00000185664; TAA
LEPGPVTAQ

SEQ ID NO: 66661 - protein, 9 aa, Homo sapiens
  Table A; Target 66661; HLA-B*40:02; PMEL; ENSG00000185664; TAA
LEPGPVTAQ

SEQ ID NO: 66662 - protein, 9 aa, Homo sapiens
  Table A; Target 66662; HLA-C*04:01; PMEL; ENSG00000185664; TAA
LEPGPVTAQ

SEQ ID NO: 66663 - protein, 9 aa, Homo sapiens
  Table A; Target 66663; HLA-C*06:02; PMEL; ENSG00000185664; TAA
LEPGPVTAQ

SEQ ID NO: 66664 - protein, 9 aa, Homo sapiens
  Table A; Target 66664; HLA-C*07:01; PMEL; ENSG00000185664; TAA
LEPGPVTAQ

SEQ ID NO: 66665 - protein, 9 aa, Homo sapiens
  Table A; Target 66665; HLA-C*07:02; PMEL; ENSG00000185664; TAA
LEPGPVTAQ

SEQ ID NO: 66666 - protein, 9 aa, Homo sapiens
  Table A; Target 66666; HLA-C*12:03; PMEL; ENSG00000185664; TAA
LEPGPVTAQ

SEQ ID NO: 66667 - protein, 10 aa, Homo sapiens
  Table A; Target 66667; HLA-A*02:07; PMEL; ENSG00000185664; TAA
LEPGPVTAQV

SEQ ID NO: 66668 - protein, 10 aa, Homo sapiens
  Table A; Target 66668; HLA-A*30:01; PMEL; ENSG00000185664; TAA
LEPGPVTAQV

SEQ ID NO: 66669 - protein, 10 aa, Homo sapiens
  Table A; Target 66669; HLA-A*68:02; PMEL; ENSG00000185664; TAA
LEPGPVTAQV

SEQ ID NO: 66670 - protein, 10 aa, Homo sapiens
  Table A; Target 66670; HLA-B*40:01; PMEL; ENSG00000185664; TAA
LEPGPVTAQV

SEQ ID NO: 66671 - protein, 10 aa, Homo sapiens
  Table A; Target 66671; HLA-B*40:02; PMEL; ENSG00000185664; TAA
LEPGPVTAQV

SEQ ID NO: 66672 - protein, 10 aa, Homo sapiens
  Table A; Target 66672; HLA-B*49:01; PMEL; ENSG00000185664; TAA
LEPGPVTAQV

SEQ ID NO: 66673 - protein, 10 aa, Homo sapiens
  Table A; Target 66673; HLA-C*04:01; PMEL; ENSG00000185664; TAA
LEPGPVTAQV

SEQ ID NO: 66674 - protein, 10 aa, Homo sapiens
  Table A; Target 66674; HLA-C*07:02; PMEL; ENSG00000185664; TAA
LEPGPVTAQV

SEQ ID NO: 66675 - protein, 11 aa, Homo sapiens
  Table A; Target 66675; HLA-A*30:01; PMEL; ENSG00000185664; TAA
LEPGPVTAQVV

SEQ ID NO: 66676 - protein, 11 aa, Homo sapiens
  Table A; Target 66676; HLA-B*49:01; PMEL; ENSG00000185664; TAA
LEPGPVTAQVV

SEQ ID NO: 66677 - protein, 11 aa, Homo sapiens
  Table A; Target 66677; HLA-C*04:01; PMEL; ENSG00000185664; TAA
LEPGPVTAQVV

SEQ ID NO: 66678 - protein, 11 aa, Homo sapiens
  Table A; Target 66678; HLA-C*07:02; PMEL; ENSG00000185664; TAA
LEPGPVTAQVV

SEQ ID NO: 66679 - protein, 8 aa, Homo sapiens
  Table A; Target 66679; HLA-A*02:03; PMEL; ENSG00000185664; TAA
LGGPVSGL

SEQ ID NO: 66680 - protein, 8 aa, Homo sapiens
  Table A; Target 66680; HLA-A*32:01; PMEL; ENSG00000185664; TAA
LGGPVSGL

SEQ ID NO: 66681 - protein, 8 aa, Homo sapiens
  Table A; Target 66681; HLA-B*07:02; PMEL; ENSG00000185664; TAA
LGGPVSGL

SEQ ID NO: 66682 - protein, 8 aa, Homo sapiens
  Table A; Target 66682; HLA-B*08:01; PMEL; ENSG00000185664; TAA
LGGPVSGL

SEQ ID NO: 66683 - protein, 8 aa, Homo sapiens
  Table A; Target 66683; HLA-B*15:01; PMEL; ENSG00000185664; TAA
LGGPVSGL

SEQ ID NO: 66684 - protein, 8 aa, Homo sapiens
  Table A; Target 66684; HLA-B*27:05; PMEL; ENSG00000185664; TAA
LGGPVSGL

SEQ ID NO: 66685 - protein, 8 aa, Homo sapiens
  Table A; Target 66685; HLA-B*40:02; PMEL; ENSG00000185664; TAA
LGGPVSGL

SEQ ID NO: 66686 - protein, 8 aa, Homo sapiens
  Table A; Target 66686; HLA-B*46:01; PMEL; ENSG00000185664; TAA
LGGPVSGL

SEQ ID NO: 66687 - protein, 8 aa, Homo sapiens
  Table A; Target 66687; HLA-B*51:01; PMEL; ENSG00000185664; TAA
LGGPVSGL

SEQ ID NO: 66688 - protein, 8 aa, Homo sapiens
  Table A; Target 66688; HLA-B*58:01; PMEL; ENSG00000185664; TAA
LGGPVSGL

SEQ ID NO: 66689 - protein, 8 aa, Homo sapiens
  Table A; Target 66689; HLA-C*01:02; PMEL; ENSG00000185664; TAA
LGGPVSGL

SEQ ID NO: 66690 - protein, 8 aa, Homo sapiens
  Table A; Target 66690; HLA-C*03:03; PMEL; ENSG00000185664; TAA
LGGPVSGL

SEQ ID NO: 66691 - protein, 8 aa, Homo sapiens
  Table A; Target 66691; HLA-C*03:04; PMEL; ENSG00000185664; TAA
LGGPVSGL

SEQ ID NO: 66692 - protein, 8 aa, Homo sapiens
  Table A; Target 66692; HLA-C*04:01; PMEL; ENSG00000185664; TAA
LGGPVSGL

SEQ ID NO: 66693 - protein, 8 aa, Homo sapiens
  Table A; Target 66693; HLA-C*05:01; PMEL; ENSG00000185664; TAA
LGGPVSGL

SEQ ID NO: 66694 - protein, 8 aa, Homo sapiens
  Table A; Target 66694; HLA-C*06:02; PMEL; ENSG00000185664; TAA
LGGPVSGL

SEQ ID NO: 66695 - protein, 8 aa, Homo sapiens
  Table A; Target 66695; HLA-C*07:01; PMEL; ENSG00000185664; TAA
LGGPVSGL

SEQ ID NO: 66696 - protein, 8 aa, Homo sapiens
  Table A; Target 66696; HLA-C*07:02; PMEL; ENSG00000185664; TAA
LGGPVSGL

SEQ ID NO: 66697 - protein, 8 aa, Homo sapiens
  Table A; Target 66697; HLA-C*07:04; PMEL; ENSG00000185664; TAA
LGGPVSGL

SEQ ID NO: 66698 - protein, 8 aa, Homo sapiens
  Table A; Target 66698; HLA-C*12:03; PMEL; ENSG00000185664; TAA
LGGPVSGL

SEQ ID NO: 66699 - protein, 8 aa, Homo sapiens
  Table A; Target 66699; HLA-C*14:02; PMEL; ENSG00000185664; TAA
LGGPVSGL

SEQ ID NO: 66700 - protein, 8 aa, Homo sapiens
  Table A; Target 66700; HLA-C*16:02; PMEL; ENSG00000185664; TAA
LGGPVSGL

SEQ ID NO: 66701 - protein, 10 aa, Homo sapiens
  Table A; Target 66701; HLA-B*13:02; PMEL; ENSG00000185664; TAA
LGGPVSGLSI

SEQ ID NO: 66702 - protein, 10 aa, Homo sapiens
  Table A; Target 66702; HLA-B*40:02; PMEL; ENSG00000185664; TAA
LGGPVSGLSI

SEQ ID NO: 66703 - protein, 10 aa, Homo sapiens
  Table A; Target 66703; HLA-B*51:01; PMEL; ENSG00000185664; TAA
LGGPVSGLSI

SEQ ID NO: 66704 - protein, 10 aa, Homo sapiens
  Table A; Target 66704; HLA-C*03:03; PMEL; ENSG00000185664; TAA
LGGPVSGLSI

SEQ ID NO: 66705 - protein, 10 aa, Homo sapiens
  Table A; Target 66705; HLA-C*03:04; PMEL; ENSG00000185664; TAA
LGGPVSGLSI

SEQ ID NO: 66706 - protein, 10 aa, Homo sapiens
  Table A; Target 66706; HLA-C*04:01; PMEL; ENSG00000185664; TAA
LGGPVSGLSI

SEQ ID NO: 66707 - protein, 10 aa, Homo sapiens
  Table A; Target 66707; HLA-C*06:02; PMEL; ENSG00000185664; TAA
LGGPVSGLSI

SEQ ID NO: 66708 - protein, 10 aa, Homo sapiens
  Table A; Target 66708; HLA-C*07:01; PMEL; ENSG00000185664; TAA
LGGPVSGLSI

SEQ ID NO: 66709 - protein, 10 aa, Homo sapiens
  Table A; Target 66709; HLA-C*07:02; PMEL; ENSG00000185664; TAA
LGGPVSGLSI

SEQ ID NO: 66710 - protein, 11 aa, Homo sapiens
  Table A; Target 66710; HLA-C*01:02; PMEL; ENSG00000185664; TAA
LGPLLDGTATL

SEQ ID NO: 66711 - protein, 11 aa, Homo sapiens
  Table A; Target 66711; HLA-C*04:01; PMEL; ENSG00000185664; TAA
LGPLLDGTATL

SEQ ID NO: 66712 - protein, 11 aa, Homo sapiens
  Table A; Target 66712; HLA-C*07:01; PMEL; ENSG00000185664; TAA
LGPLLDGTATL

SEQ ID NO: 66713 - protein, 11 aa, Homo sapiens
  Table A; Target 66713; HLA-C*07:02; PMEL; ENSG00000185664; TAA
LGPLLDGTATL

SEQ ID NO: 66714 - protein, 8 aa, Homo sapiens
  Table A; Target 66714; HLA-C*12:03; PMEL; ENSG00000185664; TAA
LGQVPLIV

SEQ ID NO: 66715 - protein, 8 aa, Homo sapiens
  Table A; Target 66715; HLA-B*51:01; PMEL; ENSG00000185664; TAA
LGTHTMEV

SEQ ID NO: 66716 - protein, 8 aa, Homo sapiens
  Table A; Target 66716; HLA-C*03:04; PMEL; ENSG00000185664; TAA
LGTHTMEV

SEQ ID NO: 66717 - protein, 8 aa, Homo sapiens
  Table A; Target 66717; HLA-C*06:02; PMEL; ENSG00000185664; TAA
LGTHTMEV

SEQ ID NO: 66718 - protein, 8 aa, Homo sapiens
  Table A; Target 66718; HLA-C*12:03; PMEL; ENSG00000185664; TAA
LGTHTMEV

SEQ ID NO: 66719 - protein, 8 aa, Homo sapiens
  Table A; Target 66719; HLA-C*16:01; PMEL; ENSG00000185664; TAA
LGTHTMEV

SEQ ID NO: 66720 - protein, 8 aa, Homo sapiens
  Table A; Target 66720; HLA-C*16:02; PMEL; ENSG00000185664; TAA
LGTHTMEV

SEQ ID NO: 66721 - protein, 8 aa, Homo sapiens
  Table A; Target 66721; HLA-B*38:01; PMEL; ENSG00000185664; TAA
LHDPSGYL

SEQ ID NO: 66722 - protein, 8 aa, Homo sapiens
  Table A; Target 66722; HLA-B*39:01; PMEL; ENSG00000185664; TAA
LHDPSGYL

SEQ ID NO: 66723 - protein, 8 aa, Homo sapiens
  Table A; Target 66723; HLA-C*04:01; PMEL; ENSG00000185664; TAA
LHDPSGYL

SEQ ID NO: 66724 - protein, 8 aa, Homo sapiens
  Table A; Target 66724; HLA-C*05:01; PMEL; ENSG00000185664; TAA
LHDPSGYL

SEQ ID NO: 66725 - protein, 9 aa, Homo sapiens
  Table A; Target 66725; HLA-B*27:05; PMEL; ENSG00000185664; TAA
LHDPSGYLA

SEQ ID NO: 66726 - protein, 9 aa, Homo sapiens
  Table A; Target 66726; HLA-B*38:01; PMEL; ENSG00000185664; TAA
LHDPSGYLA

SEQ ID NO: 66727 - protein, 9 aa, Homo sapiens
  Table A; Target 66727; HLA-B*39:01; PMEL; ENSG00000185664; TAA
LHDPSGYLA

SEQ ID NO: 66728 - protein, 9 aa, Homo sapiens
  Table A; Target 66728; HLA-B*38:01; PMEL; ENSG00000185664; TAA
LHLAVIGAL

SEQ ID NO: 66729 - protein, 9 aa, Homo sapiens
  Table A; Target 66729; HLA-B*39:01; PMEL; ENSG00000185664; TAA
LHLAVIGAL

SEQ ID NO: 66730 - protein, 10 aa, Homo sapiens
  Table A; Target 66730; HLA-B*38:01; PMEL; ENSG00000185664; TAA
LHLAVIGALL

SEQ ID NO: 66731 - protein, 8 aa, Homo sapiens
  Table A; Target 66731; HLA-B*39:01; PMEL; ENSG00000185664; TAA
LIMPGQEA

SEQ ID NO: 66732 - protein, 8 aa, Homo sapiens
  Table A; Target 66732; HLA-B*46:01; PMEL; ENSG00000185664; TAA
LIMPGQEA

SEQ ID NO: 66733 - protein, 8 aa, Homo sapiens
  Table A; Target 66733; HLA-B*54:01; PMEL; ENSG00000185664; TAA
LIMPGQEA

SEQ ID NO: 66734 - protein, 8 aa, Homo sapiens
  Table A; Target 66734; HLA-C*03:03; PMEL; ENSG00000185664; TAA
LIMPGQEA

SEQ ID NO: 66735 - protein, 8 aa, Homo sapiens
  Table A; Target 66735; HLA-C*03:04; PMEL; ENSG00000185664; TAA
LIMPGQEA

SEQ ID NO: 66736 - protein, 8 aa, Homo sapiens
  Table A; Target 66736; HLA-C*14:02; PMEL; ENSG00000185664; TAA
LIMPGQEA

SEQ ID NO: 66737 - protein, 10 aa, Homo sapiens
  Table A; Target 66737; HLA-A*02:01; PMEL; ENSG00000185664; TAA
LIMPGQEAGL

SEQ ID NO: 66738 - protein, 10 aa, Homo sapiens
  Table A; Target 66738; HLA-A*02:03; PMEL; ENSG00000185664; TAA
LIMPGQEAGL

SEQ ID NO: 66739 - protein, 10 aa, Homo sapiens
  Table A; Target 66739; HLA-A*02:04; PMEL; ENSG00000185664; TAA
LIMPGQEAGL

SEQ ID NO: 66740 - protein, 10 aa, Homo sapiens
  Table A; Target 66740; HLA-A*02:07; PMEL; ENSG00000185664; TAA
LIMPGQEAGL

SEQ ID NO: 66741 - protein, 10 aa, Homo sapiens
  Table A; Target 66741; HLA-A*32:01; PMEL; ENSG00000185664; TAA
LIMPGQEAGL

SEQ ID NO: 66742 - protein, 10 aa, Homo sapiens
  Table A; Target 66742; HLA-B*15:01; PMEL; ENSG00000185664; TAA
LIMPGQEAGL

SEQ ID NO: 66743 - protein, 10 aa, Homo sapiens
  Table A; Target 66743; HLA-B*27:05; PMEL; ENSG00000185664; TAA
LIMPGQEAGL

SEQ ID NO: 66744 - protein, 10 aa, Homo sapiens
  Table A; Target 66744; HLA-B*58:01; PMEL; ENSG00000185664; TAA
LIMPGQEAGL

SEQ ID NO: 66745 - protein, 10 aa, Homo sapiens
  Table A; Target 66745; HLA-C*01:02; PMEL; ENSG00000185664; TAA
LIMPGQEAGL

SEQ ID NO: 66746 - protein, 10 aa, Homo sapiens
  Table A; Target 66746; HLA-C*03:03; PMEL; ENSG00000185664; TAA
LIMPGQEAGL

SEQ ID NO: 66747 - protein, 10 aa, Homo sapiens
  Table A; Target 66747; HLA-C*03:04; PMEL; ENSG00000185664; TAA
LIMPGQEAGL

SEQ ID NO: 66748 - protein, 10 aa, Homo sapiens
  Table A; Target 66748; HLA-C*07:04; PMEL; ENSG00000185664; TAA
LIMPGQEAGL

SEQ ID NO: 66749 - protein, 9 aa, Homo sapiens
  Table A; Target 66749; HLA-A*02:04; PMEL; ENSG00000185664; TAA
LIVGILLVL

SEQ ID NO: 66750 - protein, 9 aa, Homo sapiens
  Table A; Target 66750; HLA-A*02:07; PMEL; ENSG00000185664; TAA
LIVGILLVL

SEQ ID NO: 66751 - protein, 8 aa, Homo sapiens
  Table A; Target 66751; HLA-B*15:03; PMEL; ENSG00000185664; TAA
LKGGSGTY

SEQ ID NO: 66752 - protein, 8 aa, Homo sapiens
  Table A; Target 66752; HLA-B*39:01; PMEL; ENSG00000185664; TAA
LKGGSGTY

SEQ ID NO: 66753 - protein, 8 aa, Homo sapiens
  Table A; Target 66753; HLA-C*04:01; PMEL; ENSG00000185664; TAA
LKGGSGTY

SEQ ID NO: 66754 - protein, 8 aa, Homo sapiens
  Table A; Target 66754; HLA-C*07:01; PMEL; ENSG00000185664; TAA
LKGGSGTY

SEQ ID NO: 66755 - protein, 8 aa, Homo sapiens
  Table A; Target 66755; HLA-C*12:03; PMEL; ENSG00000185664; TAA
LKGGSGTY

SEQ ID NO: 66756 - protein, 10 aa, Homo sapiens
  Table A; Target 66756; HLA-B*15:03; PMEL; ENSG00000185664; TAA
LKVSNDGPTL

SEQ ID NO: 66757 - protein, 10 aa, Homo sapiens
  Table A; Target 66757; HLA-B*38:01; PMEL; ENSG00000185664; TAA
LKVSNDGPTL

SEQ ID NO: 66758 - protein, 8 aa, Homo sapiens
  Table A; Target 66758; HLA-A*03:01; PMEL; ENSG00000185664; TAA
LLAVGATK

SEQ ID NO: 66759 - protein, 8 aa, Homo sapiens
  Table A; Target 66759; HLA-A*03:02; PMEL; ENSG00000185664; TAA
LLAVGATK

SEQ ID NO: 66760 - protein, 9 aa, Homo sapiens
  Table A; Target 66760; HLA-A*02:01; PMEL; ENSG00000185664; TAA
LLAVGATKV

SEQ ID NO: 66761 - protein, 9 aa, Homo sapiens
  Table A; Target 66761; HLA-A*02:03; PMEL; ENSG00000185664; TAA
LLAVGATKV

SEQ ID NO: 66762 - protein, 9 aa, Homo sapiens
  Table A; Target 66762; HLA-A*02:04; PMEL; ENSG00000185664; TAA
LLAVGATKV

SEQ ID NO: 66763 - protein, 9 aa, Homo sapiens
  Table A; Target 66763; HLA-A*02:07; PMEL; ENSG00000185664; TAA
LLAVGATKV

SEQ ID NO: 66764 - protein, 9 aa, Homo sapiens
  Table A; Target 66764; HLA-B*13:02; PMEL; ENSG00000185664; TAA
LLAVGATKV

SEQ ID NO: 66765 - protein, 9 aa, Homo sapiens
  Table A; Target 66765; HLA-B*55:01; PMEL; ENSG00000185664; TAA
LLAVGATKV

SEQ ID NO: 66766 - protein, 11 aa, Homo sapiens
  Table A; Target 66766; HLA-A*31:01; PMEL; ENSG00000185664; TAA
LLAVGATKVPR

SEQ ID NO: 66767 - protein, 8 aa, Homo sapiens
  Table A; Target 66767; HLA-A*02:01; PMEL; ENSG00000185664; TAA
LLDGTATL

SEQ ID NO: 66768 - protein, 8 aa, Homo sapiens
  Table A; Target 66768; HLA-A*02:07; PMEL; ENSG00000185664; TAA
LLDGTATL

SEQ ID NO: 66769 - protein, 8 aa, Homo sapiens
  Table A; Target 66769; HLA-B*35:03; PMEL; ENSG00000185664; TAA
LLDGTATL

SEQ ID NO: 66770 - protein, 8 aa, Homo sapiens
  Table A; Target 66770; HLA-C*05:01; PMEL; ENSG00000185664; TAA
LLDGTATL

SEQ ID NO: 66771 - protein, 8 aa, Homo sapiens
  Table A; Target 66771; HLA-C*07:04; PMEL; ENSG00000185664; TAA
LLDGTATL

SEQ ID NO: 66772 - protein, 9 aa, Homo sapiens
  Table A; Target 66772; HLA-A*01:01; PMEL; ENSG00000185664; TAA
LLDGTATLR

SEQ ID NO: 66773 - protein, 9 aa, Homo sapiens
  Table A; Target 66773; HLA-A*03:02; PMEL; ENSG00000185664; TAA
LLDGTATLR

SEQ ID NO: 66774 - protein, 10 aa, Homo sapiens
  Table A; Target 66774; HLA-A*01:01; PMEL; ENSG00000185664; TAA
LLDGTATLRL

SEQ ID NO: 66775 - protein, 10 aa, Homo sapiens
  Table A; Target 66775; HLA-A*02:01; PMEL; ENSG00000185664; TAA
LLDGTATLRL

SEQ ID NO: 66776 - protein, 10 aa, Homo sapiens
  Table A; Target 66776; HLA-A*02:04; PMEL; ENSG00000185664; TAA
LLDGTATLRL

SEQ ID NO: 66777 - protein, 10 aa, Homo sapiens
  Table A; Target 66777; HLA-A*02:07; PMEL; ENSG00000185664; TAA
LLDGTATLRL

SEQ ID NO: 66778 - protein, 10 aa, Homo sapiens
  Table A; Target 66778; HLA-B*38:01; PMEL; ENSG00000185664; TAA
LLDGTATLRL

SEQ ID NO: 66779 - protein, 11 aa, Homo sapiens
  Table A; Target 66779; HLA-A*01:01; PMEL; ENSG00000185664; TAA
LLDGTATLRLV

SEQ ID NO: 66780 - protein, 11 aa, Homo sapiens
  Table A; Target 66780; HLA-A*02:01; PMEL; ENSG00000185664; TAA
LLDGTATLRLV

SEQ ID NO: 66781 - protein, 11 aa, Homo sapiens
  Table A; Target 66781; HLA-A*02:03; PMEL; ENSG00000185664; TAA
LLDGTATLRLV

SEQ ID NO: 66782 - protein, 11 aa, Homo sapiens
  Table A; Target 66782; HLA-A*02:04; PMEL; ENSG00000185664; TAA
LLDGTATLRLV

SEQ ID NO: 66783 - protein, 11 aa, Homo sapiens
  Table A; Target 66783; HLA-A*02:07; PMEL; ENSG00000185664; TAA
LLDGTATLRLV

SEQ ID NO: 66784 - protein, 11 aa, Homo sapiens
  Table A; Target 66784; HLA-B*55:01; PMEL; ENSG00000185664; TAA
LLDGTATLRLV

SEQ ID NO: 66785 - protein, 9 aa, Homo sapiens
  Table A; Target 66785; HLA-A*02:01; PMEL; ENSG00000185664; TAA
LLHLAVIGA

SEQ ID NO: 66786 - protein, 9 aa, Homo sapiens
  Table A; Target 66786; HLA-A*02:03; PMEL; ENSG00000185664; TAA
LLHLAVIGA

SEQ ID NO: 66787 - protein, 9 aa, Homo sapiens
  Table A; Target 66787; HLA-A*02:04; PMEL; ENSG00000185664; TAA
LLHLAVIGA

SEQ ID NO: 66788 - protein, 9 aa, Homo sapiens
  Table A; Target 66788; HLA-A*02:07; PMEL; ENSG00000185664; TAA
LLHLAVIGA

SEQ ID NO: 66789 - protein, 11 aa, Homo sapiens
  Table A; Target 66789; HLA-A*02:04; PMEL; ENSG00000185664; TAA
LLHLAVIGALL

SEQ ID NO: 66790 - protein, 9 aa, Homo sapiens
  Table A; Target 66790; HLA-A*02:03; PMEL; ENSG00000185664; TAA
LMAVVLASL

SEQ ID NO: 66791 - protein, 9 aa, Homo sapiens
  Table A; Target 66791; HLA-B*46:01; PMEL; ENSG00000185664; TAA
LMAVVLASL

SEQ ID NO: 66792 - protein, 8 aa, Homo sapiens
  Table A; Target 66792; HLA-B*08:01; PMEL; ENSG00000185664; TAA
LMKQDFSV

SEQ ID NO: 66793 - protein, 8 aa, Homo sapiens
  Table A; Target 66793; HLA-A*03:01; PMEL; ENSG00000185664; TAA
LNFPGSQK

SEQ ID NO: 66794 - protein, 8 aa, Homo sapiens
  Table A; Target 66794; HLA-A*03:02; PMEL; ENSG00000185664; TAA
LNFPGSQK

SEQ ID NO: 66795 - protein, 8 aa, Homo sapiens
  Table A; Target 66795; HLA-A*11:01; PMEL; ENSG00000185664; TAA
LNFPGSQK

SEQ ID NO: 66796 - protein, 8 aa, Homo sapiens
  Table A; Target 66796; HLA-B*27:02; PMEL; ENSG00000185664; TAA
LNFPGSQK

SEQ ID NO: 66797 - protein, 8 aa, Homo sapiens
  Table A; Target 66797; HLA-B*27:05; PMEL; ENSG00000185664; TAA
LNFPGSQK

SEQ ID NO: 66798 - protein, 8 aa, Homo sapiens
  Table A; Target 66798; HLA-C*04:01; PMEL; ENSG00000185664; TAA
LNFPGSQK

SEQ ID NO: 66799 - protein, 9 aa, Homo sapiens
  Table A; Target 66799; HLA-A*02:03; PMEL; ENSG00000185664; TAA
LNFPGSQKV

SEQ ID NO: 66800 - protein, 9 aa, Homo sapiens
  Table A; Target 66800; HLA-A*68:02; PMEL; ENSG00000185664; TAA
LNFPGSQKV

SEQ ID NO: 66801 - protein, 9 aa, Homo sapiens
  Table A; Target 66801; HLA-B*13:02; PMEL; ENSG00000185664; TAA
LNFPGSQKV

SEQ ID NO: 66802 - protein, 9 aa, Homo sapiens
  Table A; Target 66802; HLA-B*49:01; PMEL; ENSG00000185664; TAA
LNFPGSQKV

SEQ ID NO: 66803 - protein, 9 aa, Homo sapiens
  Table A; Target 66803; HLA-B*51:01; PMEL; ENSG00000185664; TAA
LNFPGSQKV

SEQ ID NO: 66804 - protein, 9 aa, Homo sapiens
  Table A; Target 66804; HLA-C*02:02; PMEL; ENSG00000185664; TAA
LNFPGSQKV

SEQ ID NO: 66805 - protein, 9 aa, Homo sapiens
  Table A; Target 66805; HLA-C*06:02; PMEL; ENSG00000185664; TAA
LNFPGSQKV

SEQ ID NO: 66806 - protein, 9 aa, Homo sapiens
  Table A; Target 66806; HLA-C*12:03; PMEL; ENSG00000185664; TAA
LNFPGSQKV

SEQ ID NO: 66807 - protein, 9 aa, Homo sapiens
  Table A; Target 66807; HLA-C*16:02; PMEL; ENSG00000185664; TAA
LNFPGSQKV

SEQ ID NO: 66808 - protein, 10 aa, Homo sapiens
  Table A; Target 66808; HLA-C*12:03; PMEL; ENSG00000185664; TAA
LNFPGSQKVL

SEQ ID NO: 66809 - protein, 9 aa, Homo sapiens
  Table A; Target 66809; HLA-B*51:01; PMEL; ENSG00000185664; TAA
LPDGQVIWV

SEQ ID NO: 66810 - protein, 9 aa, Homo sapiens
  Table A; Target 66810; HLA-B*35:03; PMEL; ENSG00000185664; TAA
LPIPEPEGP

SEQ ID NO: 66811 - protein, 9 aa, Homo sapiens
  Table A; Target 66811; HLA-B*54:01; PMEL; ENSG00000185664; TAA
LPIPEPEGP

SEQ ID NO: 66812 - protein, 9 aa, Homo sapiens
  Table A; Target 66812; HLA-B*55:01; PMEL; ENSG00000185664; TAA
LPIPEPEGP

SEQ ID NO: 66813 - protein, 9 aa, Homo sapiens
  Table A; Target 66813; HLA-B*56:01; PMEL; ENSG00000185664; TAA
LPIPEPEGP

SEQ ID NO: 66814 - protein, 11 aa, Homo sapiens
  Table A; Target 66814; HLA-B*35:01; PMEL; ENSG00000185664; TAA
LPIPEPEGPDA

SEQ ID NO: 66815 - protein, 11 aa, Homo sapiens
  Table A; Target 66815; HLA-B*35:03; PMEL; ENSG00000185664; TAA
LPIPEPEGPDA

SEQ ID NO: 66816 - protein, 11 aa, Homo sapiens
  Table A; Target 66816; HLA-B*54:01; PMEL; ENSG00000185664; TAA
LPIPEPEGPDA

SEQ ID NO: 66817 - protein, 11 aa, Homo sapiens
  Table A; Target 66817; HLA-B*55:01; PMEL; ENSG00000185664; TAA
LPIPEPEGPDA

SEQ ID NO: 66818 - protein, 11 aa, Homo sapiens
  Table A; Target 66818; HLA-B*56:01; PMEL; ENSG00000185664; TAA
LPIPEPEGPDA

SEQ ID NO: 66819 - protein, 9 aa, Homo sapiens
  Table A; Target 66819; HLA-B*07:02; PMEL; ENSG00000185664; TAA
LPKEACMEI

SEQ ID NO: 66820 - protein, 9 aa, Homo sapiens
  Table A; Target 66820; HLA-B*08:01; PMEL; ENSG00000185664; TAA
LPKEACMEI

SEQ ID NO: 66821 - protein, 9 aa, Homo sapiens
  Table A; Target 66821; HLA-B*40:02; PMEL; ENSG00000185664; TAA
LPKEACMEI

SEQ ID NO: 66822 - protein, 9 aa, Homo sapiens
  Table A; Target 66822; HLA-B*51:01; PMEL; ENSG00000185664; TAA
LPKEACMEI

SEQ ID NO: 66823 - protein, 9 aa, Homo sapiens
  Table A; Target 66823; HLA-B*54:01; PMEL; ENSG00000185664; TAA
LPKEACMEI

SEQ ID NO: 66824 - protein, 9 aa, Homo sapiens
  Table A; Target 66824; HLA-B*55:01; PMEL; ENSG00000185664; TAA
LPKEACMEI

SEQ ID NO: 66825 - protein, 9 aa, Homo sapiens
  Table A; Target 66825; HLA-B*56:01; PMEL; ENSG00000185664; TAA
LPKEACMEI

SEQ ID NO: 66826 - protein, 9 aa, Homo sapiens
  Table A; Target 66826; HLA-C*07:02; PMEL; ENSG00000185664; TAA
LPKEACMEI

SEQ ID NO: 66827 - protein, 8 aa, Homo sapiens
  Table A; Target 66827; HLA-B*07:02; PMEL; ENSG00000185664; TAA
LPSPACQL

SEQ ID NO: 66828 - protein, 8 aa, Homo sapiens
  Table A; Target 66828; HLA-B*08:01; PMEL; ENSG00000185664; TAA
LPSPACQL

SEQ ID NO: 66829 - protein, 8 aa, Homo sapiens
  Table A; Target 66829; HLA-B*35:01; PMEL; ENSG00000185664; TAA
LPSPACQL

SEQ ID NO: 66830 - protein, 8 aa, Homo sapiens
  Table A; Target 66830; HLA-B*35:03; PMEL; ENSG00000185664; TAA
LPSPACQL

SEQ ID NO: 66831 - protein, 8 aa, Homo sapiens
  Table A; Target 66831; HLA-B*51:01; PMEL; ENSG00000185664; TAA
LPSPACQL

SEQ ID NO: 66832 - protein, 8 aa, Homo sapiens
  Table A; Target 66832; HLA-C*07:02; PMEL; ENSG00000185664; TAA
LPSPACQL

SEQ ID NO: 66833 - protein, 9 aa, Homo sapiens
  Table A; Target 66833; HLA-B*35:03; PMEL; ENSG00000185664; TAA
LPSPACQLV

SEQ ID NO: 66834 - protein, 9 aa, Homo sapiens
  Table A; Target 66834; HLA-B*51:01; PMEL; ENSG00000185664; TAA
LPSPACQLV

SEQ ID NO: 66835 - protein, 9 aa, Homo sapiens
  Table A; Target 66835; HLA-B*54:01; PMEL; ENSG00000185664; TAA
LPSPACQLV

SEQ ID NO: 66836 - protein, 9 aa, Homo sapiens
  Table A; Target 66836; HLA-B*55:01; PMEL; ENSG00000185664; TAA
LPSPACQLV

SEQ ID NO: 66837 - protein, 9 aa, Homo sapiens
  Table A; Target 66837; HLA-B*56:01; PMEL; ENSG00000185664; TAA
LPSPACQLV

SEQ ID NO: 66838 - protein, 10 aa, Homo sapiens
  Table A; Target 66838; HLA-B*07:02; PMEL; ENSG00000185664; TAA
LPSPACQLVL

SEQ ID NO: 66839 - protein, 10 aa, Homo sapiens
  Table A; Target 66839; HLA-B*35:01; PMEL; ENSG00000185664; TAA
LPSPACQLVL

SEQ ID NO: 66840 - protein, 10 aa, Homo sapiens
  Table A; Target 66840; HLA-B*35:03; PMEL; ENSG00000185664; TAA
LPSPACQLVL

SEQ ID NO: 66841 - protein, 10 aa, Homo sapiens
  Table A; Target 66841; HLA-B*51:01; PMEL; ENSG00000185664; TAA
LPSPACQLVL

SEQ ID NO: 66842 - protein, 9 aa, Homo sapiens
  Table A; Target 66842; HLA-B*13:02; PMEL; ENSG00000185664; TAA
LQAAIPLTS

SEQ ID NO: 66843 - protein, 9 aa, Homo sapiens
  Table A; Target 66843; HLA-B*27:05; PMEL; ENSG00000185664; TAA
LQAAIPLTS

SEQ ID NO: 66844 - protein, 10 aa, Homo sapiens
  Table A; Target 66844; HLA-A*02:03; PMEL; ENSG00000185664; TAA
LQAAIPLTSC

SEQ ID NO: 66845 - protein, 9 aa, Homo sapiens
  Table A; Target 66845; HLA-A*01:01; PMEL; ENSG00000185664; TAA
LQLHDPSGY

SEQ ID NO: 66846 - protein, 9 aa, Homo sapiens
  Table A; Target 66846; HLA-A*29:02; PMEL; ENSG00000185664; TAA
LQLHDPSGY

SEQ ID NO: 66847 - protein, 9 aa, Homo sapiens
  Table A; Target 66847; HLA-A*30:02; PMEL; ENSG00000185664; TAA
LQLHDPSGY

SEQ ID NO: 66848 - protein, 9 aa, Homo sapiens
  Table A; Target 66848; HLA-A*32:01; PMEL; ENSG00000185664; TAA
LQLHDPSGY

SEQ ID NO: 66849 - protein, 9 aa, Homo sapiens
  Table A; Target 66849; HLA-B*15:01; PMEL; ENSG00000185664; TAA
LQLHDPSGY

SEQ ID NO: 66850 - protein, 9 aa, Homo sapiens
  Table A; Target 66850; HLA-B*15:03; PMEL; ENSG00000185664; TAA
LQLHDPSGY

SEQ ID NO: 66851 - protein, 9 aa, Homo sapiens
  Table A; Target 66851; HLA-B*27:05; PMEL; ENSG00000185664; TAA
LQLHDPSGY

SEQ ID NO: 66852 - protein, 9 aa, Homo sapiens
  Table A; Target 66852; HLA-B*39:01; PMEL; ENSG00000185664; TAA
LQLHDPSGY

SEQ ID NO: 66853 - protein, 9 aa, Homo sapiens
  Table A; Target 66853; HLA-C*07:01; PMEL; ENSG00000185664; TAA
LQLHDPSGY

SEQ ID NO: 66854 - protein, 9 aa, Homo sapiens
  Table A; Target 66854; HLA-C*07:04; PMEL; ENSG00000185664; TAA
LQLHDPSGY

SEQ ID NO: 66855 - protein, 9 aa, Homo sapiens
  Table A; Target 66855; HLA-C*14:02; PMEL; ENSG00000185664; TAA
LQLHDPSGY

SEQ ID NO: 66856 - protein, 9 aa, Homo sapiens
  Table A; Target 66856; HLA-C*16:04; PMEL; ENSG00000185664; TAA
LQLHDPSGY

SEQ ID NO: 66857 - protein, 8 aa, Homo sapiens
  Table A; Target 66857; HLA-C*16:04; PMEL; ENSG00000185664; TAA
LRNQPLTF

SEQ ID NO: 66858 - protein, 9 aa, Homo sapiens
  Table A; Target 66858; HLA-A*32:01; PMEL; ENSG00000185664; TAA
LSIGTGRAM

SEQ ID NO: 66859 - protein, 9 aa, Homo sapiens
  Table A; Target 66859; HLA-B*15:01; PMEL; ENSG00000185664; TAA
LSIGTGRAM

SEQ ID NO: 66860 - protein, 9 aa, Homo sapiens
  Table A; Target 66860; HLA-B*15:03; PMEL; ENSG00000185664; TAA
LSIGTGRAM

SEQ ID NO: 66861 - protein, 9 aa, Homo sapiens
  Table A; Target 66861; HLA-B*27:05; PMEL; ENSG00000185664; TAA
LSIGTGRAM

SEQ ID NO: 66862 - protein, 9 aa, Homo sapiens
  Table A; Target 66862; HLA-B*40:02; PMEL; ENSG00000185664; TAA
LSIGTGRAM

SEQ ID NO: 66863 - protein, 9 aa, Homo sapiens
  Table A; Target 66863; HLA-B*46:01; PMEL; ENSG00000185664; TAA
LSIGTGRAM

SEQ ID NO: 66864 - protein, 9 aa, Homo sapiens
  Table A; Target 66864; HLA-B*57:01; PMEL; ENSG00000185664; TAA
LSIGTGRAM

SEQ ID NO: 66865 - protein, 9 aa, Homo sapiens
  Table A; Target 66865; HLA-B*58:01; PMEL; ENSG00000185664; TAA
LSIGTGRAM

SEQ ID NO: 66866 - protein, 9 aa, Homo sapiens
  Table A; Target 66866; HLA-C*01:02; PMEL; ENSG00000185664; TAA
LSIGTGRAM

SEQ ID NO: 66867 - protein, 9 aa, Homo sapiens
  Table A; Target 66867; HLA-C*02:02; PMEL; ENSG00000185664; TAA
LSIGTGRAM

SEQ ID NO: 66868 - protein, 9 aa, Homo sapiens
  Table A; Target 66868; HLA-C*03:03; PMEL; ENSG00000185664; TAA
LSIGTGRAM

SEQ ID NO: 66869 - protein, 9 aa, Homo sapiens
  Table A; Target 66869; HLA-C*03:04; PMEL; ENSG00000185664; TAA
LSIGTGRAM

SEQ ID NO: 66870 - protein, 9 aa, Homo sapiens
  Table A; Target 66870; HLA-C*06:02; PMEL; ENSG00000185664; TAA
LSIGTGRAM

SEQ ID NO: 66871 - protein, 9 aa, Homo sapiens
  Table A; Target 66871; HLA-C*07:04; PMEL; ENSG00000185664; TAA
LSIGTGRAM

SEQ ID NO: 66872 - protein, 9 aa, Homo sapiens
  Table A; Target 66872; HLA-C*12:03; PMEL; ENSG00000185664; TAA
LSIGTGRAM

SEQ ID NO: 66873 - protein, 9 aa, Homo sapiens
  Table A; Target 66873; HLA-C*14:02; PMEL; ENSG00000185664; TAA
LSIGTGRAM

SEQ ID NO: 66874 - protein, 9 aa, Homo sapiens
  Table A; Target 66874; HLA-C*16:01; PMEL; ENSG00000185664; TAA
LSIGTGRAM

SEQ ID NO: 66875 - protein, 9 aa, Homo sapiens
  Table A; Target 66875; HLA-C*16:02; PMEL; ENSG00000185664; TAA
LSIGTGRAM

SEQ ID NO: 66876 - protein, 10 aa, Homo sapiens
  Table A; Target 66876; HLA-B*07:02; PMEL; ENSG00000185664; TAA
LSIGTGRAML

SEQ ID NO: 66877 - protein, 8 aa, Homo sapiens
  Table A; Target 66877; HLA-B*08:01; PMEL; ENSG00000185664; TAA
LVKRQVPL

SEQ ID NO: 66878 - protein, 8 aa, Homo sapiens
  Table A; Target 66878; HLA-C*07:04; PMEL; ENSG00000185664; TAA
LVLMAVVL

SEQ ID NO: 66879 - protein, 8 aa, Homo sapiens
  Table A; Target 66879; HLA-C*12:03; PMEL; ENSG00000185664; TAA
LVLMAVVL

SEQ ID NO: 66880 - protein, 8 aa, Homo sapiens
  Table A; Target 66880; HLA-B*08:01; PMEL; ENSG00000185664; TAA
LVVTHTYL

SEQ ID NO: 66881 - protein, 8 aa, Homo sapiens
  Table A; Target 66881; HLA-B*27:05; PMEL; ENSG00000185664; TAA
LVVTHTYL

SEQ ID NO: 66882 - protein, 8 aa, Homo sapiens
  Table A; Target 66882; HLA-C*03:04; PMEL; ENSG00000185664; TAA
LVVTHTYL

SEQ ID NO: 66883 - protein, 8 aa, Homo sapiens
  Table A; Target 66883; HLA-C*07:01; PMEL; ENSG00000185664; TAA
LVVTHTYL

SEQ ID NO: 66884 - protein, 8 aa, Homo sapiens
  Table A; Target 66884; HLA-C*07:04; PMEL; ENSG00000185664; TAA
LVVTHTYL

SEQ ID NO: 66885 - protein, 8 aa, Homo sapiens
  Table A; Target 66885; HLA-C*12:03; PMEL; ENSG00000185664; TAA
LVVTHTYL

SEQ ID NO: 66886 - protein, 8 aa, Homo sapiens
  Table A; Target 66886; HLA-C*16:01; PMEL; ENSG00000185664; TAA
LVVTHTYL

SEQ ID NO: 66887 - protein, 11 aa, Homo sapiens
  Table A; Target 66887; HLA-A*24:02; PMEL; ENSG00000185664; TAA
LYPEWTEAQRL

SEQ ID NO: 66888 - protein, 8 aa, Homo sapiens
  Table A; Target 66888; HLA-A*25:01; PMEL; ENSG00000185664; TAA
MAVVLASL

SEQ ID NO: 66889 - protein, 8 aa, Homo sapiens
  Table A; Target 66889; HLA-B*08:01; PMEL; ENSG00000185664; TAA
MAVVLASL

SEQ ID NO: 66890 - protein, 8 aa, Homo sapiens
  Table A; Target 66890; HLA-B*35:01; PMEL; ENSG00000185664; TAA
MAVVLASL

SEQ ID NO: 66891 - protein, 8 aa, Homo sapiens
  Table A; Target 66891; HLA-B*35:03; PMEL; ENSG00000185664; TAA
MAVVLASL

SEQ ID NO: 66892 - protein, 8 aa, Homo sapiens
  Table A; Target 66892; HLA-B*46:01; PMEL; ENSG00000185664; TAA
MAVVLASL

SEQ ID NO: 66893 - protein, 8 aa, Homo sapiens
  Table A; Target 66893; HLA-B*51:01; PMEL; ENSG00000185664; TAA
MAVVLASL

SEQ ID NO: 66894 - protein, 8 aa, Homo sapiens
  Table A; Target 66894; HLA-B*54:01; PMEL; ENSG00000185664; TAA
MAVVLASL

SEQ ID NO: 66895 - protein, 8 aa, Homo sapiens
  Table A; Target 66895; HLA-C*03:03; PMEL; ENSG00000185664; TAA
MAVVLASL

SEQ ID NO: 66896 - protein, 8 aa, Homo sapiens
  Table A; Target 66896; HLA-C*03:04; PMEL; ENSG00000185664; TAA
MAVVLASL

SEQ ID NO: 66897 - protein, 8 aa, Homo sapiens
  Table A; Target 66897; HLA-C*14:02; PMEL; ENSG00000185664; TAA
MAVVLASL

SEQ ID NO: 66898 - protein, 9 aa, Homo sapiens
  Table A; Target 66898; HLA-A*68:02; PMEL; ENSG00000185664; TAA
MAVVLASLI

SEQ ID NO: 66899 - protein, 9 aa, Homo sapiens
  Table A; Target 66899; HLA-B*13:02; PMEL; ENSG00000185664; TAA
MAVVLASLI

SEQ ID NO: 66900 - protein, 9 aa, Homo sapiens
  Table A; Target 66900; HLA-B*49:01; PMEL; ENSG00000185664; TAA
MAVVLASLI

SEQ ID NO: 66901 - protein, 9 aa, Homo sapiens
  Table A; Target 66901; HLA-B*51:01; PMEL; ENSG00000185664; TAA
MAVVLASLI

SEQ ID NO: 66902 - protein, 9 aa, Homo sapiens
  Table A; Target 66902; HLA-B*54:01; PMEL; ENSG00000185664; TAA
MAVVLASLI

SEQ ID NO: 66903 - protein, 9 aa, Homo sapiens
  Table A; Target 66903; HLA-C*02:02; PMEL; ENSG00000185664; TAA
MAVVLASLI

SEQ ID NO: 66904 - protein, 9 aa, Homo sapiens
  Table A; Target 66904; HLA-C*04:01; PMEL; ENSG00000185664; TAA
MAVVLASLI

SEQ ID NO: 66905 - protein, 9 aa, Homo sapiens
  Table A; Target 66905; HLA-C*07:01; PMEL; ENSG00000185664; TAA
MAVVLASLI

SEQ ID NO: 66906 - protein, 9 aa, Homo sapiens
  Table A; Target 66906; HLA-C*07:04; PMEL; ENSG00000185664; TAA
MAVVLASLI

SEQ ID NO: 66907 - protein, 9 aa, Homo sapiens
  Table A; Target 66907; HLA-C*12:03; PMEL; ENSG00000185664; TAA
MAVVLASLI

SEQ ID NO: 66908 - protein, 10 aa, Homo sapiens
  Table A; Target 66908; HLA-A*29:02; PMEL; ENSG00000185664; TAA
MAVVLASLIY

SEQ ID NO: 66909 - protein, 10 aa, Homo sapiens
  Table A; Target 66909; HLA-B*35:01; PMEL; ENSG00000185664; TAA
MAVVLASLIY

SEQ ID NO: 66910 - protein, 10 aa, Homo sapiens
  Table A; Target 66910; HLA-C*07:01; PMEL; ENSG00000185664; TAA
MAVVLASLIY

SEQ ID NO: 66911 - protein, 11 aa, Homo sapiens
  Table A; Target 66911; HLA-A*31:01; PMEL; ENSG00000185664; TAA
MAVVLASLIYR

SEQ ID NO: 66912 - protein, 11 aa, Homo sapiens
  Table A; Target 66912; HLA-A*33:01; PMEL; ENSG00000185664; TAA
MAVVLASLIYR

SEQ ID NO: 66913 - protein, 11 aa, Homo sapiens
  Table A; Target 66913; HLA-A*33:03; PMEL; ENSG00000185664; TAA
MAVVLASLIYR

SEQ ID NO: 66914 - protein, 11 aa, Homo sapiens
  Table A; Target 66914; HLA-A*68:01; PMEL; ENSG00000185664; TAA
MAVVLASLIYR

SEQ ID NO: 66915 - protein, 11 aa, Homo sapiens
  Table A; Target 66915; HLA-A*68:02; PMEL; ENSG00000185664; TAA
MAVVLASLIYR

SEQ ID NO: 66916 - protein, 11 aa, Homo sapiens
  Table A; Target 66916; HLA-B*27:02; PMEL; ENSG00000185664; TAA
MAVVLASLIYR

SEQ ID NO: 66917 - protein, 11 aa, Homo sapiens
  Table A; Target 66917; HLA-C*07:06; PMEL; ENSG00000185664; TAA
MAVVLASLIYR

SEQ ID NO: 66918 - protein, 8 aa, Homo sapiens
  Table A; Target 66918; HLA-B*18:01; PMEL; ENSG00000185664; TAA
MEISSPGC

SEQ ID NO: 66919 - protein, 8 aa, Homo sapiens
  Table A; Target 66919; HLA-B*49:01; PMEL; ENSG00000185664; TAA
MEISSPGC

SEQ ID NO: 66920 - protein, 10 aa, Homo sapiens
  Table A; Target 66920; HLA-A*30:01; PMEL; ENSG00000185664; TAA
MEISSPGCQP

SEQ ID NO: 66921 - protein, 10 aa, Homo sapiens
  Table A; Target 66921; HLA-B*40:02; PMEL; ENSG00000185664; TAA
MEISSPGCQP

SEQ ID NO: 66922 - protein, 10 aa, Homo sapiens
  Table A; Target 66922; HLA-B*49:01; PMEL; ENSG00000185664; TAA
MEISSPGCQP

SEQ ID NO: 66923 - protein, 11 aa, Homo sapiens
  Table A; Target 66923; HLA-C*04:01; PMEL; ENSG00000185664; TAA
MEISSPGCQPP

SEQ ID NO: 66924 - protein, 11 aa, Homo sapiens
  Table A; Target 66924; HLA-C*07:01; PMEL; ENSG00000185664; TAA
MEISSPGCQPP

SEQ ID NO: 66925 - protein, 8 aa, Homo sapiens
  Table A; Target 66925; HLA-A*33:03; PMEL; ENSG00000185664; TAA
MEVTVYHR

SEQ ID NO: 66926 - protein, 8 aa, Homo sapiens
  Table A; Target 66926; HLA-B*18:01; PMEL; ENSG00000185664; TAA
MEVTVYHR

SEQ ID NO: 66927 - protein, 8 aa, Homo sapiens
  Table A; Target 66927; HLA-B*27:02; PMEL; ENSG00000185664; TAA
MEVTVYHR

SEQ ID NO: 66928 - protein, 8 aa, Homo sapiens
  Table A; Target 66928; HLA-B*57:01; PMEL; ENSG00000185664; TAA
MEVTVYHR

SEQ ID NO: 66929 - protein, 8 aa, Homo sapiens
  Table A; Target 66929; HLA-C*07:01; PMEL; ENSG00000185664; TAA
MEVTVYHR

SEQ ID NO: 66930 - protein, 9 aa, Homo sapiens
  Table A; Target 66930; HLA-B*44:02; PMEL; ENSG00000185664; TAA
MEVTVYHRR

SEQ ID NO: 66931 - protein, 9 aa, Homo sapiens
  Table A; Target 66931; HLA-B*44:03; PMEL; ENSG00000185664; TAA
MEVTVYHRR

SEQ ID NO: 66932 - protein, 8 aa, Homo sapiens
  Table A; Target 66932; HLA-B*18:01; PMEL; ENSG00000185664; TAA
MGTTLAEM

SEQ ID NO: 66933 - protein, 8 aa, Homo sapiens
  Table A; Target 66933; HLA-B*35:01; PMEL; ENSG00000185664; TAA
MGTTLAEM

SEQ ID NO: 66934 - protein, 8 aa, Homo sapiens
  Table A; Target 66934; HLA-B*35:03; PMEL; ENSG00000185664; TAA
MGTTLAEM

SEQ ID NO: 66935 - protein, 8 aa, Homo sapiens
  Table A; Target 66935; HLA-B*46:01; PMEL; ENSG00000185664; TAA
MGTTLAEM

SEQ ID NO: 66936 - protein, 8 aa, Homo sapiens
  Table A; Target 66936; HLA-B*51:01; PMEL; ENSG00000185664; TAA
MGTTLAEM

SEQ ID NO: 66937 - protein, 8 aa, Homo sapiens
  Table A; Target 66937; HLA-B*54:01; PMEL; ENSG00000185664; TAA
MGTTLAEM

SEQ ID NO: 66938 - protein, 8 aa, Homo sapiens
  Table A; Target 66938; HLA-B*55:01; PMEL; ENSG00000185664; TAA
MGTTLAEM

SEQ ID NO: 66939 - protein, 8 aa, Homo sapiens
  Table A; Target 66939; HLA-C*03:03; PMEL; ENSG00000185664; TAA
MGTTLAEM

SEQ ID NO: 66940 - protein, 8 aa, Homo sapiens
  Table A; Target 66940; HLA-C*03:04; PMEL; ENSG00000185664; TAA
MGTTLAEM

SEQ ID NO: 66941 - protein, 8 aa, Homo sapiens
  Table A; Target 66941; HLA-C*04:01; PMEL; ENSG00000185664; TAA
MGTTLAEM

SEQ ID NO: 66942 - protein, 8 aa, Homo sapiens
  Table A; Target 66942; HLA-C*05:01; PMEL; ENSG00000185664; TAA
MGTTLAEM

SEQ ID NO: 66943 - protein, 8 aa, Homo sapiens
  Table A; Target 66943; HLA-C*07:02; PMEL; ENSG00000185664; TAA
MGTTLAEM

SEQ ID NO: 66944 - protein, 8 aa, Homo sapiens
  Table A; Target 66944; HLA-C*07:04; PMEL; ENSG00000185664; TAA
MGTTLAEM

SEQ ID NO: 66945 - protein, 8 aa, Homo sapiens
  Table A; Target 66945; HLA-C*14:02; PMEL; ENSG00000185664; TAA
MGTTLAEM

SEQ ID NO: 66946 - protein, 8 aa, Homo sapiens
  Table A; Target 66946; HLA-C*16:01; PMEL; ENSG00000185664; TAA
MGTTLAEM

SEQ ID NO: 66947 - protein, 8 aa, Homo sapiens
  Table A; Target 66947; HLA-C*16:02; PMEL; ENSG00000185664; TAA
MGTTLAEM

SEQ ID NO: 66948 - protein, 9 aa, Homo sapiens
  Table A; Target 66948; HLA-A*01:01; PMEL; ENSG00000185664; TAA
MLGTHTMEV

SEQ ID NO: 66949 - protein, 9 aa, Homo sapiens
  Table A; Target 66949; HLA-A*02:01; PMEL; ENSG00000185664; TAA
MLGTHTMEV

SEQ ID NO: 66950 - protein, 9 aa, Homo sapiens
  Table A; Target 66950; HLA-A*02:03; PMEL; ENSG00000185664; TAA
MLGTHTMEV

SEQ ID NO: 66951 - protein, 9 aa, Homo sapiens
  Table A; Target 66951; HLA-A*02:04; PMEL; ENSG00000185664; TAA
MLGTHTMEV

SEQ ID NO: 66952 - protein, 9 aa, Homo sapiens
  Table A; Target 66952; HLA-A*02:07; PMEL; ENSG00000185664; TAA
MLGTHTMEV

SEQ ID NO: 66953 - protein, 9 aa, Homo sapiens
  Table A; Target 66953; HLA-B*08:01; PMEL; ENSG00000185664; TAA
MLGTHTMEV

SEQ ID NO: 66954 - protein, 9 aa, Homo sapiens
  Table A; Target 66954; HLA-B*13:02; PMEL; ENSG00000185664; TAA
MLGTHTMEV

SEQ ID NO: 66955 - protein, 9 aa, Homo sapiens
  Table A; Target 66955; HLA-B*46:01; PMEL; ENSG00000185664; TAA
MLGTHTMEV

SEQ ID NO: 66956 - protein, 9 aa, Homo sapiens
  Table A; Target 66956; HLA-B*51:01; PMEL; ENSG00000185664; TAA
MLGTHTMEV

SEQ ID NO: 66957 - protein, 9 aa, Homo sapiens
  Table A; Target 66957; HLA-B*54:01; PMEL; ENSG00000185664; TAA
MLGTHTMEV

SEQ ID NO: 66958 - protein, 9 aa, Homo sapiens
  Table A; Target 66958; HLA-B*55:01; PMEL; ENSG00000185664; TAA
MLGTHTMEV

SEQ ID NO: 66959 - protein, 9 aa, Homo sapiens
  Table A; Target 66959; HLA-C*02:02; PMEL; ENSG00000185664; TAA
MLGTHTMEV

SEQ ID NO: 66960 - protein, 9 aa, Homo sapiens
  Table A; Target 66960; HLA-C*04:01; PMEL; ENSG00000185664; TAA
MLGTHTMEV

SEQ ID NO: 66961 - protein, 9 aa, Homo sapiens
  Table A; Target 66961; HLA-C*06:02; PMEL; ENSG00000185664; TAA
MLGTHTMEV

SEQ ID NO: 66962 - protein, 9 aa, Homo sapiens
  Table A; Target 66962; HLA-C*07:04; PMEL; ENSG00000185664; TAA
MLGTHTMEV

SEQ ID NO: 66963 - protein, 9 aa, Homo sapiens
  Table A; Target 66963; HLA-C*12:03; PMEL; ENSG00000185664; TAA
MLGTHTMEV

SEQ ID NO: 66964 - protein, 9 aa, Homo sapiens
  Table A; Target 66964; HLA-C*16:02; PMEL; ENSG00000185664; TAA
MLGTHTMEV

SEQ ID NO: 66965 - protein, 10 aa, Homo sapiens
  Table A; Target 66965; HLA-C*07:01; PMEL; ENSG00000185664; TAA
MLGTHTMEVT

SEQ ID NO: 66966 - protein, 11 aa, Homo sapiens
  Table A; Target 66966; HLA-A*02:01; PMEL; ENSG00000185664; TAA
MLGTHTMEVTV

SEQ ID NO: 66967 - protein, 8 aa, Homo sapiens
  Table A; Target 66967; HLA-B*07:02; PMEL; ENSG00000185664; TAA
MPGQEAGL

SEQ ID NO: 66968 - protein, 8 aa, Homo sapiens
  Table A; Target 66968; HLA-B*08:01; PMEL; ENSG00000185664; TAA
MPGQEAGL

SEQ ID NO: 66969 - protein, 8 aa, Homo sapiens
  Table A; Target 66969; HLA-B*35:01; PMEL; ENSG00000185664; TAA
MPGQEAGL

SEQ ID NO: 66970 - protein, 8 aa, Homo sapiens
  Table A; Target 66970; HLA-B*35:03; PMEL; ENSG00000185664; TAA
MPGQEAGL

SEQ ID NO: 66971 - protein, 8 aa, Homo sapiens
  Table A; Target 66971; HLA-B*55:01; PMEL; ENSG00000185664; TAA
MPGQEAGL

SEQ ID NO: 66972 - protein, 9 aa, Homo sapiens
  Table A; Target 66972; HLA-B*07:02; PMEL; ENSG00000185664; TAA
MPTAESTGM

SEQ ID NO: 66973 - protein, 9 aa, Homo sapiens
  Table A; Target 66973; HLA-B*35:01; PMEL; ENSG00000185664; TAA
MPTAESTGM

SEQ ID NO: 66974 - protein, 9 aa, Homo sapiens
  Table A; Target 66974; HLA-B*35:03; PMEL; ENSG00000185664; TAA
MPTAESTGM

SEQ ID NO: 66975 - protein, 9 aa, Homo sapiens
  Table A; Target 66975; HLA-B*51:01; PMEL; ENSG00000185664; TAA
MPTAESTGM

SEQ ID NO: 66976 - protein, 9 aa, Homo sapiens
  Table A; Target 66976; HLA-B*54:01; PMEL; ENSG00000185664; TAA
MPTAESTGM

SEQ ID NO: 66977 - protein, 9 aa, Homo sapiens
  Table A; Target 66977; HLA-B*55:01; PMEL; ENSG00000185664; TAA
MPTAESTGM

SEQ ID NO: 66978 - protein, 9 aa, Homo sapiens
  Table A; Target 66978; HLA-B*56:01; PMEL; ENSG00000185664; TAA
MPTAESTGM

SEQ ID NO: 66979 - protein, 9 aa, Homo sapiens
  Table A; Target 66979; HLA-C*03:03; PMEL; ENSG00000185664; TAA
MPTAESTGM

SEQ ID NO: 66980 - protein, 9 aa, Homo sapiens
  Table A; Target 66980; HLA-C*07:02; PMEL; ENSG00000185664; TAA
MPTAESTGM

SEQ ID NO: 66981 - protein, 11 aa, Homo sapiens
  Table A; Target 66981; HLA-B*35:01; PMEL; ENSG00000185664; TAA
MPTAESTGMTP

SEQ ID NO: 66982 - protein, 11 aa, Homo sapiens
  Table A; Target 66982; HLA-B*35:03; PMEL; ENSG00000185664; TAA
MPTAESTGMTP

SEQ ID NO: 66983 - protein, 11 aa, Homo sapiens
  Table A; Target 66983; HLA-B*54:01; PMEL; ENSG00000185664; TAA
MPTAESTGMTP

SEQ ID NO: 66984 - protein, 11 aa, Homo sapiens
  Table A; Target 66984; HLA-B*55:01; PMEL; ENSG00000185664; TAA
MPTAESTGMTP

SEQ ID NO: 66985 - protein, 11 aa, Homo sapiens
  Table A; Target 66985; HLA-B*56:01; PMEL; ENSG00000185664; TAA
MPTAESTGMTP

SEQ ID NO: 66986 - protein, 10 aa, Homo sapiens
  Table A; Target 66986; HLA-B*07:02; PMEL; ENSG00000185664; TAA
MSTESITGSL

SEQ ID NO: 66987 - protein, 10 aa, Homo sapiens
  Table A; Target 66987; HLA-B*40:01; PMEL; ENSG00000185664; TAA
MSTESITGSL

SEQ ID NO: 66988 - protein, 10 aa, Homo sapiens
  Table A; Target 66988; HLA-C*03:03; PMEL; ENSG00000185664; TAA
MSTESITGSL

SEQ ID NO: 66989 - protein, 10 aa, Homo sapiens
  Table A; Target 66989; HLA-C*03:04; PMEL; ENSG00000185664; TAA
MSTESITGSL

SEQ ID NO: 66990 - protein, 10 aa, Homo sapiens
  Table A; Target 66990; HLA-C*07:02; PMEL; ENSG00000185664; TAA
MSTESITGSL

SEQ ID NO: 66991 - protein, 10 aa, Homo sapiens
  Table A; Target 66991; HLA-C*07:06; PMEL; ENSG00000185664; TAA
MSTESITGSL

SEQ ID NO: 66992 - protein, 9 aa, Homo sapiens
  Table A; Target 66992; HLA-B*27:05; PMEL; ENSG00000185664; TAA
MSTPEATGM

SEQ ID NO: 66993 - protein, 9 aa, Homo sapiens
  Table A; Target 66993; HLA-B*35:01; PMEL; ENSG00000185664; TAA
MSTPEATGM

SEQ ID NO: 66994 - protein, 9 aa, Homo sapiens
  Table A; Target 66994; HLA-B*35:03; PMEL; ENSG00000185664; TAA
MSTPEATGM

SEQ ID NO: 66995 - protein, 9 aa, Homo sapiens
  Table A; Target 66995; HLA-B*39:01; PMEL; ENSG00000185664; TAA
MSTPEATGM

SEQ ID NO: 66996 - protein, 9 aa, Homo sapiens
  Table A; Target 66996; HLA-B*55:01; PMEL; ENSG00000185664; TAA
MSTPEATGM

SEQ ID NO: 66997 - protein, 9 aa, Homo sapiens
  Table A; Target 66997; HLA-B*58:01; PMEL; ENSG00000185664; TAA
MSTPEATGM

SEQ ID NO: 66998 - protein, 9 aa, Homo sapiens
  Table A; Target 66998; HLA-C*03:03; PMEL; ENSG00000185664; TAA
MSTPEATGM

SEQ ID NO: 66999 - protein, 9 aa, Homo sapiens
  Table A; Target 66999; HLA-C*03:04; PMEL; ENSG00000185664; TAA
MSTPEATGM

SEQ ID NO: 67000 - protein, 9 aa, Homo sapiens
  Table A; Target 67000; HLA-C*04:01; PMEL; ENSG00000185664; TAA
MSTPEATGM

SEQ ID NO: 67001 - protein, 9 aa, Homo sapiens
  Table A; Target 67001; HLA-C*05:01; PMEL; ENSG00000185664; TAA
MSTPEATGM

SEQ ID NO: 67002 - protein, 9 aa, Homo sapiens
  Table A; Target 67002; HLA-C*07:01; PMEL; ENSG00000185664; TAA
MSTPEATGM

SEQ ID NO: 67003 - protein, 9 aa, Homo sapiens
  Table A; Target 67003; HLA-C*07:04; PMEL; ENSG00000185664; TAA
MSTPEATGM

SEQ ID NO: 67004 - protein, 9 aa, Homo sapiens
  Table A; Target 67004; HLA-C*16:01; PMEL; ENSG00000185664; TAA
MSTPEATGM

SEQ ID NO: 67005 - protein, 9 aa, Homo sapiens
  Table A; Target 67005; HLA-C*16:02; PMEL; ENSG00000185664; TAA
MSTPEATGM

SEQ ID NO: 67006 - protein, 11 aa, Homo sapiens
  Table A; Target 67006; HLA-C*04:01; PMEL; ENSG00000185664; TAA
MSTPEATGMTP

SEQ ID NO: 67007 - protein, 8 aa, Homo sapiens
  Table A; Target 67007; HLA-B*51:01; PMEL; ENSG00000185664; TAA
MTPAEVSI

SEQ ID NO: 67008 - protein, 9 aa, Homo sapiens
  Table A; Target 67008; HLA-A*02:07; PMEL; ENSG00000185664; TAA
MTPAEVSIV

SEQ ID NO: 67009 - protein, 9 aa, Homo sapiens
  Table A; Target 67009; HLA-A*68:02; PMEL; ENSG00000185664; TAA
MTPAEVSIV

SEQ ID NO: 67010 - protein, 9 aa, Homo sapiens
  Table A; Target 67010; HLA-C*01:02; PMEL; ENSG00000185664; TAA
MTPAEVSIV

SEQ ID NO: 67011 - protein, 9 aa, Homo sapiens
  Table A; Target 67011; HLA-C*07:01; PMEL; ENSG00000185664; TAA
MTPAEVSIV

SEQ ID NO: 67012 - protein, 9 aa, Homo sapiens
  Table A; Target 67012; HLA-C*12:03; PMEL; ENSG00000185664; TAA
MTPAEVSIV

SEQ ID NO: 67013 - protein, 10 aa, Homo sapiens
  Table A; Target 67013; HLA-A*68:02; PMEL; ENSG00000185664; TAA
MTPAEVSIVV

SEQ ID NO: 67014 - protein, 10 aa, Homo sapiens
  Table A; Target 67014; HLA-C*07:02; PMEL; ENSG00000185664; TAA
MTPAEVSIVV

SEQ ID NO: 67015 - protein, 11 aa, Homo sapiens
  Table A; Target 67015; HLA-A*02:07; PMEL; ENSG00000185664; TAA
MTPAEVSIVVL

SEQ ID NO: 67016 - protein, 11 aa, Homo sapiens
  Table A; Target 67016; HLA-A*31:01; PMEL; ENSG00000185664; TAA
MTPAEVSIVVL

SEQ ID NO: 67017 - protein, 11 aa, Homo sapiens
  Table A; Target 67017; HLA-A*33:03; PMEL; ENSG00000185664; TAA
MTPAEVSIVVL

SEQ ID NO: 67018 - protein, 11 aa, Homo sapiens
  Table A; Target 67018; HLA-A*68:01; PMEL; ENSG00000185664; TAA
MTPAEVSIVVL

SEQ ID NO: 67019 - protein, 11 aa, Homo sapiens
  Table A; Target 67019; HLA-A*68:02; PMEL; ENSG00000185664; TAA
MTPAEVSIVVL

SEQ ID NO: 67020 - protein, 11 aa, Homo sapiens
  Table A; Target 67020; HLA-B*35:03; PMEL; ENSG00000185664; TAA
MTPAEVSIVVL

SEQ ID NO: 67021 - protein, 11 aa, Homo sapiens
  Table A; Target 67021; HLA-C*04:01; PMEL; ENSG00000185664; TAA
MTPAEVSIVVL

SEQ ID NO: 67022 - protein, 11 aa, Homo sapiens
  Table A; Target 67022; HLA-C*07:01; PMEL; ENSG00000185664; TAA
MTPAEVSIVVL

SEQ ID NO: 67023 - protein, 11 aa, Homo sapiens
  Table A; Target 67023; HLA-C*07:02; PMEL; ENSG00000185664; TAA
MTPAEVSIVVL

SEQ ID NO: 67024 - protein, 11 aa, Homo sapiens
  Table A; Target 67024; HLA-C*07:04; PMEL; ENSG00000185664; TAA
MTPAEVSIVVL

SEQ ID NO: 67025 - protein, 11 aa, Homo sapiens
  Table A; Target 67025; HLA-C*12:03; PMEL; ENSG00000185664; TAA
MTPAEVSIVVL

SEQ ID NO: 67026 - protein, 8 aa, Homo sapiens
  Table A; Target 67026; HLA-B*08:01; PMEL; ENSG00000185664; TAA
MTPEKVPV

SEQ ID NO: 67027 - protein, 10 aa, Homo sapiens
  Table A; Target 67027; HLA-C*07:02; PMEL; ENSG00000185664; TAA
MTPEKVPVSE

SEQ ID NO: 67028 - protein, 11 aa, Homo sapiens
  Table A; Target 67028; HLA-A*02:07; PMEL; ENSG00000185664; TAA
MTPEKVPVSEV

SEQ ID NO: 67029 - protein, 11 aa, Homo sapiens
  Table A; Target 67029; HLA-A*68:02; PMEL; ENSG00000185664; TAA
MTPEKVPVSEV

SEQ ID NO: 67030 - protein, 8 aa, Homo sapiens
  Table A; Target 67030; HLA-B*07:02; PMEL; ENSG00000185664; TAA
NASFSIAL

SEQ ID NO: 67031 - protein, 8 aa, Homo sapiens
  Table A; Target 67031; HLA-B*08:01; PMEL; ENSG00000185664; TAA
NASFSIAL

SEQ ID NO: 67032 - protein, 8 aa, Homo sapiens
  Table A; Target 67032; HLA-B*27:05; PMEL; ENSG00000185664; TAA
NASFSIAL

SEQ ID NO: 67033 - protein, 8 aa, Homo sapiens
  Table A; Target 67033; HLA-B*35:01; PMEL; ENSG00000185664; TAA
NASFSIAL

SEQ ID NO: 67034 - protein, 8 aa, Homo sapiens
  Table A; Target 67034; HLA-B*35:03; PMEL; ENSG00000185664; TAA
NASFSIAL

SEQ ID NO: 67035 - protein, 8 aa, Homo sapiens
  Table A; Target 67035; HLA-B*39:01; PMEL; ENSG00000185664; TAA
NASFSIAL

SEQ ID NO: 67036 - protein, 8 aa, Homo sapiens
  Table A; Target 67036; HLA-C*01:02; PMEL; ENSG00000185664; TAA
NASFSIAL

SEQ ID NO: 67037 - protein, 8 aa, Homo sapiens
  Table A; Target 67037; HLA-C*03:03; PMEL; ENSG00000185664; TAA
NASFSIAL

SEQ ID NO: 67038 - protein, 8 aa, Homo sapiens
  Table A; Target 67038; HLA-C*03:04; PMEL; ENSG00000185664; TAA
NASFSIAL

SEQ ID NO: 67039 - protein, 8 aa, Homo sapiens
  Table A; Target 67039; HLA-C*05:01; PMEL; ENSG00000185664; TAA
NASFSIAL

SEQ ID NO: 67040 - protein, 8 aa, Homo sapiens
  Table A; Target 67040; HLA-C*07:02; PMEL; ENSG00000185664; TAA
NASFSIAL

SEQ ID NO: 67041 - protein, 8 aa, Homo sapiens
  Table A; Target 67041; HLA-C*07:04; PMEL; ENSG00000185664; TAA
NASFSIAL

SEQ ID NO: 67042 - protein, 8 aa, Homo sapiens
  Table A; Target 67042; HLA-C*14:02; PMEL; ENSG00000185664; TAA
NASFSIAL

SEQ ID NO: 67043 - protein, 8 aa, Homo sapiens
  Table A; Target 67043; HLA-C*16:01; PMEL; ENSG00000185664; TAA
NASFSIAL

SEQ ID NO: 67044 - protein, 10 aa, Homo sapiens
  Table A; Target 67044; HLA-A*23:01; PMEL; ENSG00000185664; TAA
NASFSIALNF

SEQ ID NO: 67045 - protein, 10 aa, Homo sapiens
  Table A; Target 67045; HLA-A*24:02; PMEL; ENSG00000185664; TAA
NASFSIALNF

SEQ ID NO: 67046 - protein, 10 aa, Homo sapiens
  Table A; Target 67046; HLA-A*29:02; PMEL; ENSG00000185664; TAA
NASFSIALNF

SEQ ID NO: 67047 - protein, 10 aa, Homo sapiens
  Table A; Target 67047; HLA-A*68:02; PMEL; ENSG00000185664; TAA
NASFSIALNF

SEQ ID NO: 67048 - protein, 10 aa, Homo sapiens
  Table A; Target 67048; HLA-B*27:02; PMEL; ENSG00000185664; TAA
NASFSIALNF

SEQ ID NO: 67049 - protein, 10 aa, Homo sapiens
  Table A; Target 67049; HLA-B*35:01; PMEL; ENSG00000185664; TAA
NASFSIALNF

SEQ ID NO: 67050 - protein, 8 aa, Homo sapiens
  Table A; Target 67050; HLA-C*07:01; PMEL; ENSG00000185664; TAA
NDGPTLIG

SEQ ID NO: 67051 - protein, 8 aa, Homo sapiens
  Table A; Target 67051; HLA-C*12:03; PMEL; ENSG00000185664; TAA
NDGPTLIG

SEQ ID NO: 67052 - protein, 10 aa, Homo sapiens
  Table A; Target 67052; HLA-C*07:01; PMEL; ENSG00000185664; TAA
NDGPTLIGAN

SEQ ID NO: 67053 - protein, 9 aa, Homo sapiens
  Table A; Target 67053; HLA-C*01:02; PMEL; ENSG00000185664; TAA
NFPGSQKVL

SEQ ID NO: 67054 - protein, 9 aa, Homo sapiens
  Table A; Target 67054; HLA-A*31:01; PMEL; ENSG00000185664; TAA
NQDWLGVSR

SEQ ID NO: 67055 - protein, 8 aa, Homo sapiens
  Table A; Target 67055; HLA-A*02:07; PMEL; ENSG00000185664; TAA
NQPLTFAL

SEQ ID NO: 67056 - protein, 8 aa, Homo sapiens
  Table A; Target 67056; HLA-B*07:02; PMEL; ENSG00000185664; TAA
NQPLTFAL

SEQ ID NO: 67057 - protein, 8 aa, Homo sapiens
  Table A; Target 67057; HLA-B*08:01; PMEL; ENSG00000185664; TAA
NQPLTFAL

SEQ ID NO: 67058 - protein, 8 aa, Homo sapiens
  Table A; Target 67058; HLA-B*13:02; PMEL; ENSG00000185664; TAA
NQPLTFAL

SEQ ID NO: 67059 - protein, 8 aa, Homo sapiens
  Table A; Target 67059; HLA-B*37:01; PMEL; ENSG00000185664; TAA
NQPLTFAL

SEQ ID NO: 67060 - protein, 8 aa, Homo sapiens
  Table A; Target 67060; HLA-C*01:02; PMEL; ENSG00000185664; TAA
NQPLTFAL

SEQ ID NO: 67061 - protein, 8 aa, Homo sapiens
  Table A; Target 67061; HLA-C*14:02; PMEL; ENSG00000185664; TAA
NQPLTFAL

SEQ ID NO: 67062 - protein, 9 aa, Homo sapiens
  Table A; Target 67062; HLA-A*24:02; PMEL; ENSG00000185664; TAA
NQPLTFALQ

SEQ ID NO: 67063 - protein, 9 aa, Homo sapiens
  Table A; Target 67063; HLA-A*33:01; PMEL; ENSG00000185664; TAA
NSLAVVSTQ

SEQ ID NO: 67064 - protein, 9 aa, Homo sapiens
  Table A; Target 67064; HLA-C*07:01; PMEL; ENSG00000185664; TAA
NSLAVVSTQ

SEQ ID NO: 67065 - protein, 10 aa, Homo sapiens
  Table A; Target 67065; HLA-C*01:02; PMEL; ENSG00000185664; TAA
NSPLLSGQQV

SEQ ID NO: 67066 - protein, 10 aa, Homo sapiens
  Table A; Target 67066; HLA-C*07:01; PMEL; ENSG00000185664; TAA
NSPLLSGQQV

SEQ ID NO: 67067 - protein, 10 aa, Homo sapiens
  Table A; Target 67067; HLA-C*07:02; PMEL; ENSG00000185664; TAA
NSPLLSGQQV

SEQ ID NO: 67068 - protein, 9 aa, Homo sapiens
  Table A; Target 67068; HLA-A*02:03; PMEL; ENSG00000185664; TAA
NTIINGSQV

SEQ ID NO: 67069 - protein, 9 aa, Homo sapiens
  Table A; Target 67069; HLA-A*26:01; PMEL; ENSG00000185664; TAA
NTIINGSQV

SEQ ID NO: 67070 - protein, 9 aa, Homo sapiens
  Table A; Target 67070; HLA-A*68:02; PMEL; ENSG00000185664; TAA
NTIINGSQV

SEQ ID NO: 67071 - protein, 9 aa, Homo sapiens
  Table A; Target 67071; HLA-C*01:02; PMEL; ENSG00000185664; TAA
NTIINGSQV

SEQ ID NO: 67072 - protein, 9 aa, Homo sapiens
  Table A; Target 67072; HLA-C*03:03; PMEL; ENSG00000185664; TAA
NTIINGSQV

SEQ ID NO: 67073 - protein, 9 aa, Homo sapiens
  Table A; Target 67073; HLA-C*03:04; PMEL; ENSG00000185664; TAA
NTIINGSQV

SEQ ID NO: 67074 - protein, 9 aa, Homo sapiens
  Table A; Target 67074; HLA-C*16:02; PMEL; ENSG00000185664; TAA
NTIINGSQV

SEQ ID NO: 67075 - protein, 10 aa, Homo sapiens
  Table A; Target 67075; HLA-A*01:01; PMEL; ENSG00000185664; TAA
NTIINGSQVW

SEQ ID NO: 67076 - protein, 10 aa, Homo sapiens
  Table A; Target 67076; HLA-A*24:02; PMEL; ENSG00000185664; TAA
NTIINGSQVW

SEQ ID NO: 67077 - protein, 10 aa, Homo sapiens
  Table A; Target 67077; HLA-A*25:01; PMEL; ENSG00000185664; TAA
NTIINGSQVW

SEQ ID NO: 67078 - protein, 10 aa, Homo sapiens
  Table A; Target 67078; HLA-A*26:01; PMEL; ENSG00000185664; TAA
NTIINGSQVW

SEQ ID NO: 67079 - protein, 10 aa, Homo sapiens
  Table A; Target 67079; HLA-A*32:01; PMEL; ENSG00000185664; TAA
NTIINGSQVW

SEQ ID NO: 67080 - protein, 10 aa, Homo sapiens
  Table A; Target 67080; HLA-B*44:02; PMEL; ENSG00000185664; TAA
NTIINGSQVW

SEQ ID NO: 67081 - protein, 10 aa, Homo sapiens
  Table A; Target 67081; HLA-B*44:03; PMEL; ENSG00000185664; TAA
NTIINGSQVW

SEQ ID NO: 67082 - protein, 10 aa, Homo sapiens
  Table A; Target 67082; HLA-B*57:01; PMEL; ENSG00000185664; TAA
NTIINGSQVW

SEQ ID NO: 67083 - protein, 10 aa, Homo sapiens
  Table A; Target 67083; HLA-B*58:01; PMEL; ENSG00000185664; TAA
NTIINGSQVW

SEQ ID NO: 67084 - protein, 10 aa, Homo sapiens
  Table A; Target 67084; HLA-C*16:04; PMEL; ENSG00000185664; TAA
NTIINGSQVW

SEQ ID NO: 67085 - protein, 10 aa, Homo sapiens
  Table A; Target 67085; HLA-B*07:02; PMEL; ENSG00000185664; TAA
NVSLADTNSL

SEQ ID NO: 67086 - protein, 10 aa, Homo sapiens
  Table A; Target 67086; HLA-B*35:03; PMEL; ENSG00000185664; TAA
NVSLADTNSL

SEQ ID NO: 67087 - protein, 10 aa, Homo sapiens
  Table A; Target 67087; HLA-B*38:01; PMEL; ENSG00000185664; TAA
NVSLADTNSL

SEQ ID NO: 67088 - protein, 10 aa, Homo sapiens
  Table A; Target 67088; HLA-B*39:01; PMEL; ENSG00000185664; TAA
NVSLADTNSL

SEQ ID NO: 67089 - protein, 10 aa, Homo sapiens
  Table A; Target 67089; HLA-C*01:02; PMEL; ENSG00000185664; TAA
NVSLADTNSL

SEQ ID NO: 67090 - protein, 9 aa, Homo sapiens
  Table A; Target 67090; HLA-B*35:03; PMEL; ENSG00000185664; TAA
PAEVSIVVL

SEQ ID NO: 67091 - protein, 9 aa, Homo sapiens
  Table A; Target 67091; HLA-C*04:01; PMEL; ENSG00000185664; TAA
PAEVSIVVL

SEQ ID NO: 67092 - protein, 9 aa, Homo sapiens
  Table A; Target 67092; HLA-C*05:01; PMEL; ENSG00000185664; TAA
PAEVSIVVL

SEQ ID NO: 67093 - protein, 9 aa, Homo sapiens
  Table A; Target 67093; HLA-C*07:04; PMEL; ENSG00000185664; TAA
PAEVSIVVL

SEQ ID NO: 67094 - protein, 8 aa, Homo sapiens
  Table A; Target 67094; HLA-C*07:04; PMEL; ENSG00000185664; TAA
PEATGMTP

SEQ ID NO: 67095 - protein, 9 aa, Homo sapiens
  Table A; Target 67095; HLA-B*49:01; PMEL; ENSG00000185664; TAA
PEGPDASSI

SEQ ID NO: 67096 - protein, 9 aa, Homo sapiens
  Table A; Target 67096; HLA-B*40:02; PMEL; ENSG00000185664; TAA
PEKVPVSEV

SEQ ID NO: 67097 - protein, 9 aa, Homo sapiens
  Table A; Target 67097; HLA-B*49:01; PMEL; ENSG00000185664; TAA
PEKVPVSEV

SEQ ID NO: 67098 - protein, 10 aa, Homo sapiens
  Table A; Target 67098; HLA-C*07:02; PMEL; ENSG00000185664; TAA
PEKVPVSEVM

SEQ ID NO: 67099 - protein, 11 aa, Homo sapiens
  Table A; Target 67099; HLA-C*07:02; PMEL; ENSG00000185664; TAA
PEKVPVSEVMG

SEQ ID NO: 67100 - protein, 9 aa, Homo sapiens
  Table A; Target 67100; HLA-A*30:01; PMEL; ENSG00000185664; TAA
PEWTEAQRL

SEQ ID NO: 67101 - protein, 9 aa, Homo sapiens
  Table A; Target 67101; HLA-B*40:01; PMEL; ENSG00000185664; TAA
PEWTEAQRL

SEQ ID NO: 67102 - protein, 9 aa, Homo sapiens
  Table A; Target 67102; HLA-B*44:02; PMEL; ENSG00000185664; TAA
PEWTEAQRL

SEQ ID NO: 67103 - protein, 9 aa, Homo sapiens
  Table A; Target 67103; HLA-B*44:03; PMEL; ENSG00000185664; TAA
PEWTEAQRL

SEQ ID NO: 67104 - protein, 9 aa, Homo sapiens
  Table A; Target 67104; HLA-C*04:01; PMEL; ENSG00000185664; TAA
PFSVSVSQL

SEQ ID NO: 67105 - protein, 9 aa, Homo sapiens
  Table A; Target 67105; HLA-C*14:02; PMEL; ENSG00000185664; TAA
PFSVSVSQL

SEQ ID NO: 67106 - protein, 8 aa, Homo sapiens
  Table A; Target 67106; HLA-C*04:01; PMEL; ENSG00000185664; TAA
PGPVTAQV

SEQ ID NO: 67107 - protein, 10 aa, Homo sapiens
  Table A; Target 67107; HLA-C*07:02; PMEL; ENSG00000185664; TAA
PGPVTAQVVL

SEQ ID NO: 67108 - protein, 9 aa, Homo sapiens
  Table A; Target 67108; HLA-A*24:02; PMEL; ENSG00000185664; TAA
PIGENSPLL

SEQ ID NO: 67109 - protein, 9 aa, Homo sapiens
  Table A; Target 67109; HLA-C*06:02; PMEL; ENSG00000185664; TAA
PIGENSPLL

SEQ ID NO: 67110 - protein, 10 aa, Homo sapiens
  Table A; Target 67110; HLA-C*07:02; PMEL; ENSG00000185664; TAA
PIGENSPLLS

SEQ ID NO: 67111 - protein, 9 aa, Homo sapiens
  Table A; Target 67111; HLA-B*15:01; PMEL; ENSG00000185664; TAA
PLAHSSSAF

SEQ ID NO: 67112 - protein, 9 aa, Homo sapiens
  Table A; Target 67112; HLA-C*07:04; PMEL; ENSG00000185664; TAA
PLAHSSSAF

SEQ ID NO: 67113 - protein, 9 aa, Homo sapiens
  Table A; Target 67113; HLA-A*01:01; PMEL; ENSG00000185664; TAA
PLDCVLYRY

SEQ ID NO: 67114 - protein, 9 aa, Homo sapiens
  Table A; Target 67114; HLA-A*02:03; PMEL; ENSG00000185664; TAA
PLIVGILLV

SEQ ID NO: 67115 - protein, 9 aa, Homo sapiens
  Table A; Target 67115; HLA-A*02:01; PMEL; ENSG00000185664; TAA
PLLDGTATL

SEQ ID NO: 67116 - protein, 9 aa, Homo sapiens
  Table A; Target 67116; HLA-A*02:03; PMEL; ENSG00000185664; TAA
PLLDGTATL

SEQ ID NO: 67117 - protein, 9 aa, Homo sapiens
  Table A; Target 67117; HLA-A*02:04; PMEL; ENSG00000185664; TAA
PLLDGTATL

SEQ ID NO: 67118 - protein, 9 aa, Homo sapiens
  Table A; Target 67118; HLA-A*02:07; PMEL; ENSG00000185664; TAA
PLLDGTATL

SEQ ID NO: 67119 - protein, 9 aa, Homo sapiens
  Table A; Target 67119; HLA-A*23:01; PMEL; ENSG00000185664; TAA
PLLDGTATL

SEQ ID NO: 67120 - protein, 9 aa, Homo sapiens
  Table A; Target 67120; HLA-A*24:02; PMEL; ENSG00000185664; TAA
PLLDGTATL

SEQ ID NO: 67121 - protein, 9 aa, Homo sapiens
  Table A; Target 67121; HLA-B*15:01; PMEL; ENSG00000185664; TAA
PLLDGTATL

SEQ ID NO: 67122 - protein, 9 aa, Homo sapiens
  Table A; Target 67122; HLA-B*55:01; PMEL; ENSG00000185664; TAA
PLLDGTATL

SEQ ID NO: 67123 - protein, 9 aa, Homo sapiens
  Table A; Target 67123; HLA-C*01:02; PMEL; ENSG00000185664; TAA
PLLDGTATL

SEQ ID NO: 67124 - protein, 9 aa, Homo sapiens
  Table A; Target 67124; HLA-C*14:02; PMEL; ENSG00000185664; TAA
PLLDGTATL

SEQ ID NO: 67125 - protein, 11 aa, Homo sapiens
  Table A; Target 67125; HLA-A*02:01; PMEL; ENSG00000185664; TAA
PLLDGTATLRL

SEQ ID NO: 67126 - protein, 11 aa, Homo sapiens
  Table A; Target 67126; HLA-A*02:04; PMEL; ENSG00000185664; TAA
PLLDGTATLRL

SEQ ID NO: 67127 - protein, 11 aa, Homo sapiens
  Table A; Target 67127; HLA-A*24:02; PMEL; ENSG00000185664; TAA
PLLDGTATLRL

SEQ ID NO: 67128 - protein, 8 aa, Homo sapiens
  Table A; Target 67128; HLA-C*04:01; PMEL; ENSG00000185664; TAA
PLLSGQQV

SEQ ID NO: 67129 - protein, 8 aa, Homo sapiens
  Table A; Target 67129; HLA-C*06:02; PMEL; ENSG00000185664; TAA
PLLSGQQV

SEQ ID NO: 67130 - protein, 8 aa, Homo sapiens
  Table A; Target 67130; HLA-C*07:04; PMEL; ENSG00000185664; TAA
PNTTAGQV

SEQ ID NO: 67131 - protein, 8 aa, Homo sapiens
  Table A; Target 67131; HLA-C*12:03; PMEL; ENSG00000185664; TAA
PSGTTSVQ

SEQ ID NO: 67132 - protein, 9 aa, Homo sapiens
  Table A; Target 67132; HLA-C*07:02; PMEL; ENSG00000185664; TAA
PSPACQLVL

SEQ ID NO: 67133 - protein, 8 aa, Homo sapiens
  Table A; Target 67133; HLA-C*05:01; PMEL; ENSG00000185664; TAA
PTAESTGM

SEQ ID NO: 67134 - protein, 10 aa, Homo sapiens
  Table A; Target 67134; HLA-A*23:01; PMEL; ENSG00000185664; TAA
PTLIGANASF

SEQ ID NO: 67135 - protein, 10 aa, Homo sapiens
  Table A; Target 67135; HLA-A*24:02; PMEL; ENSG00000185664; TAA
PTLIGANASF

SEQ ID NO: 67136 - protein, 10 aa, Homo sapiens
  Table A; Target 67136; HLA-C*04:01; PMEL; ENSG00000185664; TAA
PTLIGANASF

SEQ ID NO: 67137 - protein, 10 aa, Homo sapiens
  Table A; Target 67137; HLA-C*06:02; PMEL; ENSG00000185664; TAA
PTLIGANASF

SEQ ID NO: 67138 - protein, 10 aa, Homo sapiens
  Table A; Target 67138; HLA-C*07:01; PMEL; ENSG00000185664; TAA
PTLIGANASF

SEQ ID NO: 67139 - protein, 10 aa, Homo sapiens
  Table A; Target 67139; HLA-C*07:02; PMEL; ENSG00000185664; TAA
PTLIGANASF

SEQ ID NO: 67140 - protein, 10 aa, Homo sapiens
  Table A; Target 67140; HLA-C*07:02; PMEL; ENSG00000185664; TAA
PVLPSPACQL

SEQ ID NO: 67141 - protein, 10 aa, Homo sapiens
  Table A; Target 67141; HLA-A*68:02; PMEL; ENSG00000185664; TAA
PVSEVMGTTL

SEQ ID NO: 67142 - protein, 10 aa, Homo sapiens
  Table A; Target 67142; HLA-B*07:02; PMEL; ENSG00000185664; TAA
PVSEVMGTTL

SEQ ID NO: 67143 - protein, 10 aa, Homo sapiens
  Table A; Target 67143; HLA-B*27:05; PMEL; ENSG00000185664; TAA
PVSEVMGTTL

SEQ ID NO: 67144 - protein, 10 aa, Homo sapiens
  Table A; Target 67144; HLA-B*39:01; PMEL; ENSG00000185664; TAA
PVSEVMGTTL

SEQ ID NO: 67145 - protein, 10 aa, Homo sapiens
  Table A; Target 67145; HLA-C*04:01; PMEL; ENSG00000185664; TAA
PVSEVMGTTL

SEQ ID NO: 67146 - protein, 10 aa, Homo sapiens
  Table A; Target 67146; HLA-C*06:02; PMEL; ENSG00000185664; TAA
PVSEVMGTTL

SEQ ID NO: 67147 - protein, 10 aa, Homo sapiens
  Table A; Target 67147; HLA-C*07:02; PMEL; ENSG00000185664; TAA
PVSEVMGTTL

SEQ ID NO: 67148 - protein, 10 aa, Homo sapiens
  Table A; Target 67148; HLA-B*07:02; PMEL; ENSG00000185664; TAA
PVSGLSIGTG

SEQ ID NO: 67149 - protein, 10 aa, Homo sapiens
  Table A; Target 67149; HLA-C*04:01; PMEL; ENSG00000185664; TAA
PVSGLSIGTG

SEQ ID NO: 67150 - protein, 10 aa, Homo sapiens
  Table A; Target 67150; HLA-C*07:02; PMEL; ENSG00000185664; TAA
PVSGLSIGTG

SEQ ID NO: 67151 - protein, 10 aa, Homo sapiens
  Table A; Target 67151; HLA-C*12:03; PMEL; ENSG00000185664; TAA
PVSGLSIGTG

SEQ ID NO: 67152 - protein, 11 aa, Homo sapiens
  Table A; Target 67152; HLA-A*31:01; PMEL; ENSG00000185664; TAA
PVSGLSIGTGR

SEQ ID NO: 67153 - protein, 11 aa, Homo sapiens
  Table A; Target 67153; HLA-A*68:01; PMEL; ENSG00000185664; TAA
PVSGLSIGTGR

SEQ ID NO: 67154 - protein, 8 aa, Homo sapiens
  Table A; Target 67154; HLA-C*07:02; PMEL; ENSG00000185664; TAA
PVTAQVVL

SEQ ID NO: 67155 - protein, 8 aa, Homo sapiens
  Table A; Target 67155; HLA-C*07:04; PMEL; ENSG00000185664; TAA
PVTAQVVL

SEQ ID NO: 67156 - protein, 9 aa, Homo sapiens
  Table A; Target 67156; HLA-A*32:01; PMEL; ENSG00000185664; TAA
QAAIPLTSC

SEQ ID NO: 67157 - protein, 9 aa, Homo sapiens
  Table A; Target 67157; HLA-B*07:02; PMEL; ENSG00000185664; TAA
QAAIPLTSC

SEQ ID NO: 67158 - protein, 9 aa, Homo sapiens
  Table A; Target 67158; HLA-B*15:01; PMEL; ENSG00000185664; TAA
QAAIPLTSC

SEQ ID NO: 67159 - protein, 9 aa, Homo sapiens
  Table A; Target 67159; HLA-B*15:03; PMEL; ENSG00000185664; TAA
QAAIPLTSC

SEQ ID NO: 67160 - protein, 9 aa, Homo sapiens
  Table A; Target 67160; HLA-B*27:05; PMEL; ENSG00000185664; TAA
QAAIPLTSC

SEQ ID NO: 67161 - protein, 9 aa, Homo sapiens
  Table A; Target 67161; HLA-B*35:01; PMEL; ENSG00000185664; TAA
QAAIPLTSC

SEQ ID NO: 67162 - protein, 9 aa, Homo sapiens
  Table A; Target 67162; HLA-B*35:03; PMEL; ENSG00000185664; TAA
QAAIPLTSC

SEQ ID NO: 67163 - protein, 9 aa, Homo sapiens
  Table A; Target 67163; HLA-B*40:02; PMEL; ENSG00000185664; TAA
QAAIPLTSC

SEQ ID NO: 67164 - protein, 9 aa, Homo sapiens
  Table A; Target 67164; HLA-B*46:01; PMEL; ENSG00000185664; TAA
QAAIPLTSC

SEQ ID NO: 67165 - protein, 9 aa, Homo sapiens
  Table A; Target 67165; HLA-B*51:01; PMEL; ENSG00000185664; TAA
QAAIPLTSC

SEQ ID NO: 67166 - protein, 9 aa, Homo sapiens
  Table A; Target 67166; HLA-B*54:01; PMEL; ENSG00000185664; TAA
QAAIPLTSC

SEQ ID NO: 67167 - protein, 9 aa, Homo sapiens
  Table A; Target 67167; HLA-B*55:01; PMEL; ENSG00000185664; TAA
QAAIPLTSC

SEQ ID NO: 67168 - protein, 9 aa, Homo sapiens
  Table A; Target 67168; HLA-B*56:01; PMEL; ENSG00000185664; TAA
QAAIPLTSC

SEQ ID NO: 67169 - protein, 9 aa, Homo sapiens
  Table A; Target 67169; HLA-B*58:01; PMEL; ENSG00000185664; TAA
QAAIPLTSC

SEQ ID NO: 67170 - protein, 9 aa, Homo sapiens
  Table A; Target 67170; HLA-C*01:02; PMEL; ENSG00000185664; TAA
QAAIPLTSC

SEQ ID NO: 67171 - protein, 9 aa, Homo sapiens
  Table A; Target 67171; HLA-C*02:02; PMEL; ENSG00000185664; TAA
QAAIPLTSC

SEQ ID NO: 67172 - protein, 9 aa, Homo sapiens
  Table A; Target 67172; HLA-C*03:03; PMEL; ENSG00000185664; TAA
QAAIPLTSC

SEQ ID NO: 67173 - protein, 9 aa, Homo sapiens
  Table A; Target 67173; HLA-C*03:04; PMEL; ENSG00000185664; TAA
QAAIPLTSC

SEQ ID NO: 67174 - protein, 9 aa, Homo sapiens
  Table A; Target 67174; HLA-C*06:02; PMEL; ENSG00000185664; TAA
QAAIPLTSC

SEQ ID NO: 67175 - protein, 9 aa, Homo sapiens
  Table A; Target 67175; HLA-C*07:01; PMEL; ENSG00000185664; TAA
QAAIPLTSC

SEQ ID NO: 67176 - protein, 9 aa, Homo sapiens
  Table A; Target 67176; HLA-C*07:02; PMEL; ENSG00000185664; TAA
QAAIPLTSC

SEQ ID NO: 67177 - protein, 9 aa, Homo sapiens
  Table A; Target 67177; HLA-C*07:04; PMEL; ENSG00000185664; TAA
QAAIPLTSC

SEQ ID NO: 67178 - protein, 9 aa, Homo sapiens
  Table A; Target 67178; HLA-C*12:03; PMEL; ENSG00000185664; TAA
QAAIPLTSC

SEQ ID NO: 67179 - protein, 9 aa, Homo sapiens
  Table A; Target 67179; HLA-C*16:01; PMEL; ENSG00000185664; TAA
QAAIPLTSC

SEQ ID NO: 67180 - protein, 9 aa, Homo sapiens
  Table A; Target 67180; HLA-C*16:02; PMEL; ENSG00000185664; TAA
QAAIPLTSC

SEQ ID NO: 67181 - protein, 10 aa, Homo sapiens
  Table A; Target 67181; HLA-B*07:02; PMEL; ENSG00000185664; TAA
QAAIPLTSCG

SEQ ID NO: 67182 - protein, 10 aa, Homo sapiens
  Table A; Target 67182; HLA-B*27:05; PMEL; ENSG00000185664; TAA
QAAIPLTSCG

SEQ ID NO: 67183 - protein, 10 aa, Homo sapiens
  Table A; Target 67183; HLA-C*04:01; PMEL; ENSG00000185664; TAA
QAAIPLTSCG

SEQ ID NO: 67184 - protein, 10 aa, Homo sapiens
  Table A; Target 67184; HLA-C*06:02; PMEL; ENSG00000185664; TAA
QAAIPLTSCG

SEQ ID NO: 67185 - protein, 10 aa, Homo sapiens
  Table A; Target 67185; HLA-C*07:01; PMEL; ENSG00000185664; TAA
QAAIPLTSCG

SEQ ID NO: 67186 - protein, 10 aa, Homo sapiens
  Table A; Target 67186; HLA-C*07:02; PMEL; ENSG00000185664; TAA
QAAIPLTSCG

SEQ ID NO: 67187 - protein, 10 aa, Homo sapiens
  Table A; Target 67187; HLA-C*12:03; PMEL; ENSG00000185664; TAA
QAAIPLTSCG

SEQ ID NO: 67188 - protein, 11 aa, Homo sapiens
  Table A; Target 67188; HLA-C*06:02; PMEL; ENSG00000185664; TAA
QAAIPLTSCGS

SEQ ID NO: 67189 - protein, 11 aa, Homo sapiens
  Table A; Target 67189; HLA-C*07:01; PMEL; ENSG00000185664; TAA
QAAIPLTSCGS

SEQ ID NO: 67190 - protein, 9 aa, Homo sapiens
  Table A; Target 67190; HLA-C*01:02; PMEL; ENSG00000185664; TAA
QAPTAEPSG

SEQ ID NO: 67191 - protein, 11 aa, Homo sapiens
  Table A; Target 67191; HLA-C*07:01; PMEL; ENSG00000185664; TAA
QAPTAEPSGTT

SEQ ID NO: 67192 - protein, 11 aa, Homo sapiens
  Table A; Target 67192; HLA-A*23:01; PMEL; ENSG00000185664; TAA
QAVPSGEGDAF

SEQ ID NO: 67193 - protein, 11 aa, Homo sapiens
  Table A; Target 67193; HLA-A*25:01; PMEL; ENSG00000185664; TAA
QAVPSGEGDAF

SEQ ID NO: 67194 - protein, 11 aa, Homo sapiens
  Table A; Target 67194; HLA-B*15:01; PMEL; ENSG00000185664; TAA
QAVPSGEGDAF

SEQ ID NO: 67195 - protein, 11 aa, Homo sapiens
  Table A; Target 67195; HLA-B*15:03; PMEL; ENSG00000185664; TAA
QAVPSGEGDAF

SEQ ID NO: 67196 - protein, 11 aa, Homo sapiens
  Table A; Target 67196; HLA-B*27:02; PMEL; ENSG00000185664; TAA
QAVPSGEGDAF

SEQ ID NO: 67197 - protein, 11 aa, Homo sapiens
  Table A; Target 67197; HLA-B*27:05; PMEL; ENSG00000185664; TAA
QAVPSGEGDAF

SEQ ID NO: 67198 - protein, 11 aa, Homo sapiens
  Table A; Target 67198; HLA-B*35:01; PMEL; ENSG00000185664; TAA
QAVPSGEGDAF

SEQ ID NO: 67199 - protein, 11 aa, Homo sapiens
  Table A; Target 67199; HLA-B*35:03; PMEL; ENSG00000185664; TAA
QAVPSGEGDAF

SEQ ID NO: 67200 - protein, 11 aa, Homo sapiens
  Table A; Target 67200; HLA-B*38:01; PMEL; ENSG00000185664; TAA
QAVPSGEGDAF

SEQ ID NO: 67201 - protein, 11 aa, Homo sapiens
  Table A; Target 67201; HLA-B*39:01; PMEL; ENSG00000185664; TAA
QAVPSGEGDAF

SEQ ID NO: 67202 - protein, 11 aa, Homo sapiens
  Table A; Target 67202; HLA-B*46:01; PMEL; ENSG00000185664; TAA
QAVPSGEGDAF

SEQ ID NO: 67203 - protein, 11 aa, Homo sapiens
  Table A; Target 67203; HLA-B*55:01; PMEL; ENSG00000185664; TAA
QAVPSGEGDAF

SEQ ID NO: 67204 - protein, 11 aa, Homo sapiens
  Table A; Target 67204; HLA-B*57:01; PMEL; ENSG00000185664; TAA
QAVPSGEGDAF

SEQ ID NO: 67205 - protein, 11 aa, Homo sapiens
  Table A; Target 67205; HLA-B*58:01; PMEL; ENSG00000185664; TAA
QAVPSGEGDAF

SEQ ID NO: 67206 - protein, 11 aa, Homo sapiens
  Table A; Target 67206; HLA-C*02:02; PMEL; ENSG00000185664; TAA
QAVPSGEGDAF

SEQ ID NO: 67207 - protein, 11 aa, Homo sapiens
  Table A; Target 67207; HLA-C*03:03; PMEL; ENSG00000185664; TAA
QAVPSGEGDAF

SEQ ID NO: 67208 - protein, 11 aa, Homo sapiens
  Table A; Target 67208; HLA-C*03:04; PMEL; ENSG00000185664; TAA
QAVPSGEGDAF

SEQ ID NO: 67209 - protein, 11 aa, Homo sapiens
  Table A; Target 67209; HLA-C*04:01; PMEL; ENSG00000185664; TAA
QAVPSGEGDAF

SEQ ID NO: 67210 - protein, 11 aa, Homo sapiens
  Table A; Target 67210; HLA-C*05:01; PMEL; ENSG00000185664; TAA
QAVPSGEGDAF

SEQ ID NO: 67211 - protein, 11 aa, Homo sapiens
  Table A; Target 67211; HLA-C*07:04; PMEL; ENSG00000185664; TAA
QAVPSGEGDAF

SEQ ID NO: 67212 - protein, 11 aa, Homo sapiens
  Table A; Target 67212; HLA-C*07:06; PMEL; ENSG00000185664; TAA
QAVPSGEGDAF

SEQ ID NO: 67213 - protein, 11 aa, Homo sapiens
  Table A; Target 67213; HLA-C*14:02; PMEL; ENSG00000185664; TAA
QAVPSGEGDAF

SEQ ID NO: 67214 - protein, 11 aa, Homo sapiens
  Table A; Target 67214; HLA-C*16:01; PMEL; ENSG00000185664; TAA
QAVPSGEGDAF

SEQ ID NO: 67215 - protein, 11 aa, Homo sapiens
  Table A; Target 67215; HLA-C*16:02; PMEL; ENSG00000185664; TAA
QAVPSGEGDAF

SEQ ID NO: 67216 - protein, 11 aa, Homo sapiens
  Table A; Target 67216; HLA-C*16:04; PMEL; ENSG00000185664; TAA
QAVPSGEGDAF

SEQ ID NO: 67217 - protein, 8 aa, Homo sapiens
  Table A; Target 67217; HLA-A*30:01; PMEL; ENSG00000185664; TAA
QDFSVPQL

SEQ ID NO: 67218 - protein, 8 aa, Homo sapiens
  Table A; Target 67218; HLA-B*18:01; PMEL; ENSG00000185664; TAA
QDFSVPQL

SEQ ID NO: 67219 - protein, 8 aa, Homo sapiens
  Table A; Target 67219; HLA-B*37:01; PMEL; ENSG00000185664; TAA
QDFSVPQL

SEQ ID NO: 67220 - protein, 8 aa, Homo sapiens
  Table A; Target 67220; HLA-B*40:01; PMEL; ENSG00000185664; TAA
QDFSVPQL

SEQ ID NO: 67221 - protein, 8 aa, Homo sapiens
  Table A; Target 67221; HLA-B*40:02; PMEL; ENSG00000185664; TAA
QDFSVPQL

SEQ ID NO: 67222 - protein, 8 aa, Homo sapiens
  Table A; Target 67222; HLA-B*44:03; PMEL; ENSG00000185664; TAA
QDFSVPQL

SEQ ID NO: 67223 - protein, 8 aa, Homo sapiens
  Table A; Target 67223; HLA-B*51:01; PMEL; ENSG00000185664; TAA
QDFSVPQL

SEQ ID NO: 67224 - protein, 8 aa, Homo sapiens
  Table A; Target 67224; HLA-C*06:02; PMEL; ENSG00000185664; TAA
QDFSVPQL

SEQ ID NO: 67225 - protein, 8 aa, Homo sapiens
  Table A; Target 67225; HLA-C*07:01; PMEL; ENSG00000185664; TAA
QDFSVPQL

SEQ ID NO: 67226 - protein, 8 aa, Homo sapiens
  Table A; Target 67226; HLA-C*12:03; PMEL; ENSG00000185664; TAA
QDFSVPQL

SEQ ID NO: 67227 - protein, 8 aa, Homo sapiens
  Table A; Target 67227; HLA-C*16:02; PMEL; ENSG00000185664; TAA
QDFSVPQL

SEQ ID NO: 67228 - protein, 10 aa, Homo sapiens
  Table A; Target 67228; HLA-A*30:01; PMEL; ENSG00000185664; TAA
QDWLGVSRQL

SEQ ID NO: 67229 - protein, 8 aa, Homo sapiens
  Table A; Target 67229; HLA-B*49:01; PMEL; ENSG00000185664; TAA
QEAGLGQV

SEQ ID NO: 67230 - protein, 10 aa, Homo sapiens
  Table A; Target 67230; HLA-A*30:01; PMEL; ENSG00000185664; TAA
QEAGLGQVPL

SEQ ID NO: 67231 - protein, 10 aa, Homo sapiens
  Table A; Target 67231; HLA-B*40:01; PMEL; ENSG00000185664; TAA
QEAGLGQVPL

SEQ ID NO: 67232 - protein, 10 aa, Homo sapiens
  Table A; Target 67232; HLA-B*40:02; PMEL; ENSG00000185664; TAA
QEAGLGQVPL

SEQ ID NO: 67233 - protein, 10 aa, Homo sapiens
  Table A; Target 67233; HLA-B*44:02; PMEL; ENSG00000185664; TAA
QEAGLGQVPL

SEQ ID NO: 67234 - protein, 10 aa, Homo sapiens
  Table A; Target 67234; HLA-B*44:03; PMEL; ENSG00000185664; TAA
QEAGLGQVPL

SEQ ID NO: 67235 - protein, 11 aa, Homo sapiens
  Table A; Target 67235; HLA-B*44:02; PMEL; ENSG00000185664; TAA
QEAGLGQVPLI

SEQ ID NO: 67236 - protein, 11 aa, Homo sapiens
  Table A; Target 67236; HLA-B*44:03; PMEL; ENSG00000185664; TAA
QEAGLGQVPLI

SEQ ID NO: 67237 - protein, 11 aa, Homo sapiens
  Table A; Target 67237; HLA-B*49:01; PMEL; ENSG00000185664; TAA
QEAGLGQVPLI

SEQ ID NO: 67238 - protein, 9 aa, Homo sapiens
  Table A; Target 67238; HLA-A*30:01; PMEL; ENSG00000185664; TAA
QETDDACIF

SEQ ID NO: 67239 - protein, 9 aa, Homo sapiens
  Table A; Target 67239; HLA-B*18:01; PMEL; ENSG00000185664; TAA
QETDDACIF

SEQ ID NO: 67240 - protein, 9 aa, Homo sapiens
  Table A; Target 67240; HLA-B*27:02; PMEL; ENSG00000185664; TAA
QETDDACIF

SEQ ID NO: 67241 - protein, 9 aa, Homo sapiens
  Table A; Target 67241; HLA-B*37:01; PMEL; ENSG00000185664; TAA
QETDDACIF

SEQ ID NO: 67242 - protein, 9 aa, Homo sapiens
  Table A; Target 67242; HLA-B*38:01; PMEL; ENSG00000185664; TAA
QETDDACIF

SEQ ID NO: 67243 - protein, 9 aa, Homo sapiens
  Table A; Target 67243; HLA-B*40:01; PMEL; ENSG00000185664; TAA
QETDDACIF

SEQ ID NO: 67244 - protein, 9 aa, Homo sapiens
  Table A; Target 67244; HLA-B*44:02; PMEL; ENSG00000185664; TAA
QETDDACIF

SEQ ID NO: 67245 - protein, 9 aa, Homo sapiens
  Table A; Target 67245; HLA-B*44:03; PMEL; ENSG00000185664; TAA
QETDDACIF

SEQ ID NO: 67246 - protein, 10 aa, Homo sapiens
  Table A; Target 67246; HLA-C*07:02; PMEL; ENSG00000185664; TAA
QGGLPKEACM

SEQ ID NO: 67247 - protein, 8 aa, Homo sapiens
  Table A; Target 67247; HLA-B*51:01; PMEL; ENSG00000185664; TAA
QGIESAEI

SEQ ID NO: 67248 - protein, 9 aa, Homo sapiens
  Table A; Target 67248; HLA-A*30:01; PMEL; ENSG00000185664; TAA
QGIESAEIL

SEQ ID NO: 67249 - protein, 9 aa, Homo sapiens
  Table A; Target 67249; HLA-B*35:03; PMEL; ENSG00000185664; TAA
QGIESAEIL

SEQ ID NO: 67250 - protein, 9 aa, Homo sapiens
  Table A; Target 67250; HLA-B*40:01; PMEL; ENSG00000185664; TAA
QGIESAEIL

SEQ ID NO: 67251 - protein, 10 aa, Homo sapiens
  Table A; Target 67251; HLA-A*01:01; PMEL; ENSG00000185664; TAA
QILKGGSGTY

SEQ ID NO: 67252 - protein, 10 aa, Homo sapiens
  Table A; Target 67252; HLA-A*25:01; PMEL; ENSG00000185664; TAA
QILKGGSGTY

SEQ ID NO: 67253 - protein, 10 aa, Homo sapiens
  Table A; Target 67253; HLA-A*26:01; PMEL; ENSG00000185664; TAA
QILKGGSGTY

SEQ ID NO: 67254 - protein, 10 aa, Homo sapiens
  Table A; Target 67254; HLA-A*29:02; PMEL; ENSG00000185664; TAA
QILKGGSGTY

SEQ ID NO: 67255 - protein, 10 aa, Homo sapiens
  Table A; Target 67255; HLA-A*30:02; PMEL; ENSG00000185664; TAA
QILKGGSGTY

SEQ ID NO: 67256 - protein, 10 aa, Homo sapiens
  Table A; Target 67256; HLA-A*32:01; PMEL; ENSG00000185664; TAA
QILKGGSGTY

SEQ ID NO: 67257 - protein, 10 aa, Homo sapiens
  Table A; Target 67257; HLA-B*15:01; PMEL; ENSG00000185664; TAA
QILKGGSGTY

SEQ ID NO: 67258 - protein, 10 aa, Homo sapiens
  Table A; Target 67258; HLA-B*15:03; PMEL; ENSG00000185664; TAA
QILKGGSGTY

SEQ ID NO: 67259 - protein, 10 aa, Homo sapiens
  Table A; Target 67259; HLA-B*39:01; PMEL; ENSG00000185664; TAA
QILKGGSGTY

SEQ ID NO: 67260 - protein, 10 aa, Homo sapiens
  Table A; Target 67260; HLA-B*44:03; PMEL; ENSG00000185664; TAA
QILKGGSGTY

SEQ ID NO: 67261 - protein, 10 aa, Homo sapiens
  Table A; Target 67261; HLA-B*46:01; PMEL; ENSG00000185664; TAA
QILKGGSGTY

SEQ ID NO: 67262 - protein, 10 aa, Homo sapiens
  Table A; Target 67262; HLA-B*58:01; PMEL; ENSG00000185664; TAA
QILKGGSGTY

SEQ ID NO: 67263 - protein, 10 aa, Homo sapiens
  Table A; Target 67263; HLA-C*04:01; PMEL; ENSG00000185664; TAA
QILKGGSGTY

SEQ ID NO: 67264 - protein, 10 aa, Homo sapiens
  Table A; Target 67264; HLA-C*07:01; PMEL; ENSG00000185664; TAA
QILKGGSGTY

SEQ ID NO: 67265 - protein, 10 aa, Homo sapiens
  Table A; Target 67265; HLA-C*07:04; PMEL; ENSG00000185664; TAA
QILKGGSGTY

SEQ ID NO: 67266 - protein, 8 aa, Homo sapiens
  Table A; Target 67266; HLA-A*01:01; PMEL; ENSG00000185664; TAA
QLHDPSGY

SEQ ID NO: 67267 - protein, 8 aa, Homo sapiens
  Table A; Target 67267; HLA-A*30:02; PMEL; ENSG00000185664; TAA
QLHDPSGY

SEQ ID NO: 67268 - protein, 8 aa, Homo sapiens
  Table A; Target 67268; HLA-B*15:03; PMEL; ENSG00000185664; TAA
QLHDPSGY

SEQ ID NO: 67269 - protein, 8 aa, Homo sapiens
  Table A; Target 67269; HLA-B*46:01; PMEL; ENSG00000185664; TAA
QLHDPSGY

SEQ ID NO: 67270 - protein, 9 aa, Homo sapiens
  Table A; Target 67270; HLA-A*02:01; PMEL; ENSG00000185664; TAA
QLHDPSGYL

SEQ ID NO: 67271 - protein, 9 aa, Homo sapiens
  Table A; Target 67271; HLA-A*02:03; PMEL; ENSG00000185664; TAA
QLHDPSGYL

SEQ ID NO: 67272 - protein, 9 aa, Homo sapiens
  Table A; Target 67272; HLA-A*02:04; PMEL; ENSG00000185664; TAA
QLHDPSGYL

SEQ ID NO: 67273 - protein, 9 aa, Homo sapiens
  Table A; Target 67273; HLA-A*02:07; PMEL; ENSG00000185664; TAA
QLHDPSGYL

SEQ ID NO: 67274 - protein, 9 aa, Homo sapiens
  Table A; Target 67274; HLA-A*03:01; PMEL; ENSG00000185664; TAA
QLHDPSGYL

SEQ ID NO: 67275 - protein, 9 aa, Homo sapiens
  Table A; Target 67275; HLA-B*13:02; PMEL; ENSG00000185664; TAA
QLHDPSGYL

SEQ ID NO: 67276 - protein, 9 aa, Homo sapiens
  Table A; Target 67276; HLA-B*27:05; PMEL; ENSG00000185664; TAA
QLHDPSGYL

SEQ ID NO: 67277 - protein, 9 aa, Homo sapiens
  Table A; Target 67277; HLA-B*55:01; PMEL; ENSG00000185664; TAA
QLHDPSGYL

SEQ ID NO: 67278 - protein, 9 aa, Homo sapiens
  Table A; Target 67278; HLA-C*06:02; PMEL; ENSG00000185664; TAA
QLHDPSGYL

SEQ ID NO: 67279 - protein, 10 aa, Homo sapiens
  Table A; Target 67279; HLA-A*01:01; PMEL; ENSG00000185664; TAA
QLHDPSGYLA

SEQ ID NO: 67280 - protein, 10 aa, Homo sapiens
  Table A; Target 67280; HLA-A*02:01; PMEL; ENSG00000185664; TAA
QLHDPSGYLA

SEQ ID NO: 67281 - protein, 10 aa, Homo sapiens
  Table A; Target 67281; HLA-A*02:03; PMEL; ENSG00000185664; TAA
QLHDPSGYLA

SEQ ID NO: 67282 - protein, 10 aa, Homo sapiens
  Table A; Target 67282; HLA-A*02:04; PMEL; ENSG00000185664; TAA
QLHDPSGYLA

SEQ ID NO: 67283 - protein, 10 aa, Homo sapiens
  Table A; Target 67283; HLA-B*13:02; PMEL; ENSG00000185664; TAA
QLHDPSGYLA

SEQ ID NO: 67284 - protein, 10 aa, Homo sapiens
  Table A; Target 67284; HLA-B*27:05; PMEL; ENSG00000185664; TAA
QLHDPSGYLA

SEQ ID NO: 67285 - protein, 10 aa, Homo sapiens
  Table A; Target 67285; HLA-B*54:01; PMEL; ENSG00000185664; TAA
QLHDPSGYLA

SEQ ID NO: 67286 - protein, 10 aa, Homo sapiens
  Table A; Target 67286; HLA-C*06:02; PMEL; ENSG00000185664; TAA
QLHDPSGYLA

SEQ ID NO: 67287 - protein, 9 aa, Homo sapiens
  Table A; Target 67287; HLA-A*02:01; PMEL; ENSG00000185664; TAA
QLIMPGQEA

SEQ ID NO: 67288 - protein, 9 aa, Homo sapiens
  Table A; Target 67288; HLA-A*02:03; PMEL; ENSG00000185664; TAA
QLIMPGQEA

SEQ ID NO: 67289 - protein, 9 aa, Homo sapiens
  Table A; Target 67289; HLA-B*13:02; PMEL; ENSG00000185664; TAA
QLIMPGQEA

SEQ ID NO: 67290 - protein, 9 aa, Homo sapiens
  Table A; Target 67290; HLA-B*15:01; PMEL; ENSG00000185664; TAA
QLIMPGQEA

SEQ ID NO: 67291 - protein, 9 aa, Homo sapiens
  Table A; Target 67291; HLA-B*27:05; PMEL; ENSG00000185664; TAA
QLIMPGQEA

SEQ ID NO: 67292 - protein, 9 aa, Homo sapiens
  Table A; Target 67292; HLA-B*35:03; PMEL; ENSG00000185664; TAA
QLIMPGQEA

SEQ ID NO: 67293 - protein, 9 aa, Homo sapiens
  Table A; Target 67293; HLA-B*40:02; PMEL; ENSG00000185664; TAA
QLIMPGQEA

SEQ ID NO: 67294 - protein, 9 aa, Homo sapiens
  Table A; Target 67294; HLA-B*46:01; PMEL; ENSG00000185664; TAA
QLIMPGQEA

SEQ ID NO: 67295 - protein, 9 aa, Homo sapiens
  Table A; Target 67295; HLA-B*54:01; PMEL; ENSG00000185664; TAA
QLIMPGQEA

SEQ ID NO: 67296 - protein, 9 aa, Homo sapiens
  Table A; Target 67296; HLA-B*55:01; PMEL; ENSG00000185664; TAA
QLIMPGQEA

SEQ ID NO: 67297 - protein, 9 aa, Homo sapiens
  Table A; Target 67297; HLA-B*56:01; PMEL; ENSG00000185664; TAA
QLIMPGQEA

SEQ ID NO: 67298 - protein, 9 aa, Homo sapiens
  Table A; Target 67298; HLA-C*01:02; PMEL; ENSG00000185664; TAA
QLIMPGQEA

SEQ ID NO: 67299 - protein, 9 aa, Homo sapiens
  Table A; Target 67299; HLA-C*03:03; PMEL; ENSG00000185664; TAA
QLIMPGQEA

SEQ ID NO: 67300 - protein, 9 aa, Homo sapiens
  Table A; Target 67300; HLA-C*03:04; PMEL; ENSG00000185664; TAA
QLIMPGQEA

SEQ ID NO: 67301 - protein, 9 aa, Homo sapiens
  Table A; Target 67301; HLA-C*06:02; PMEL; ENSG00000185664; TAA
QLIMPGQEA

SEQ ID NO: 67302 - protein, 9 aa, Homo sapiens
  Table A; Target 67302; HLA-C*14:02; PMEL; ENSG00000185664; TAA
QLIMPGQEA

SEQ ID NO: 67303 - protein, 11 aa, Homo sapiens
  Table A; Target 67303; HLA-A*02:01; PMEL; ENSG00000185664; TAA
QLIMPGQEAGL

SEQ ID NO: 67304 - protein, 11 aa, Homo sapiens
  Table A; Target 67304; HLA-A*02:04; PMEL; ENSG00000185664; TAA
QLIMPGQEAGL

SEQ ID NO: 67305 - protein, 11 aa, Homo sapiens
  Table A; Target 67305; HLA-A*02:07; PMEL; ENSG00000185664; TAA
QLIMPGQEAGL

SEQ ID NO: 67306 - protein, 11 aa, Homo sapiens
  Table A; Target 67306; HLA-C*04:01; PMEL; ENSG00000185664; TAA
QLIMPGQEAGL

SEQ ID NO: 67307 - protein, 9 aa, Homo sapiens
  Table A; Target 67307; HLA-A*25:01; PMEL; ENSG00000185664; TAA
QLPHSSSHW

SEQ ID NO: 67308 - protein, 10 aa, Homo sapiens
  Table A; Target 67308; HLA-A*03:01; PMEL; ENSG00000185664; TAA
QLRALDGGNK

SEQ ID NO: 67309 - protein, 9 aa, Homo sapiens
  Table A; Target 67309; HLA-A*31:01; PMEL; ENSG00000185664; TAA
QLRTKAWNR

SEQ ID NO: 67310 - protein, 8 aa, Homo sapiens
  Table A; Target 67310; HLA-B*08:01; PMEL; ENSG00000185664; TAA
QLVLHQIL

SEQ ID NO: 67311 - protein, 8 aa, Homo sapiens
  Table A; Target 67311; HLA-C*07:01; PMEL; ENSG00000185664; TAA
QLVLHQIL

SEQ ID NO: 67312 - protein, 9 aa, Homo sapiens
  Table A; Target 67312; HLA-A*03:01; PMEL; ENSG00000185664; TAA
QLVLHQILK

SEQ ID NO: 67313 - protein, 9 aa, Homo sapiens
  Table A; Target 67313; HLA-A*02:01; PMEL; ENSG00000185664; TAA
QLYPEWTEA

SEQ ID NO: 67314 - protein, 9 aa, Homo sapiens
  Table A; Target 67314; HLA-A*02:03; PMEL; ENSG00000185664; TAA
QLYPEWTEA

SEQ ID NO: 67315 - protein, 9 aa, Homo sapiens
  Table A; Target 67315; HLA-A*02:04; PMEL; ENSG00000185664; TAA
QLYPEWTEA

SEQ ID NO: 67316 - protein, 9 aa, Homo sapiens
  Table A; Target 67316; HLA-A*02:07; PMEL; ENSG00000185664; TAA
QLYPEWTEA

SEQ ID NO: 67317 - protein, 9 aa, Homo sapiens
  Table A; Target 67317; HLA-B*55:01; PMEL; ENSG00000185664; TAA
QLYPEWTEA

SEQ ID NO: 67318 - protein, 10 aa, Homo sapiens
  Table A; Target 67318; HLA-C*01:02; PMEL; ENSG00000185664; TAA
QMPTAESTGM

SEQ ID NO: 67319 - protein, 11 aa, Homo sapiens
  Table A; Target 67319; HLA-C*07:01; PMEL; ENSG00000185664; TAA
QMPTAESTGMT

SEQ ID NO: 67320 - protein, 9 aa, Homo sapiens
  Table A; Target 67320; HLA-A*23:01; PMEL; ENSG00000185664; TAA
QPLTFALQL

SEQ ID NO: 67321 - protein, 9 aa, Homo sapiens
  Table A; Target 67321; HLA-B*07:02; PMEL; ENSG00000185664; TAA
QPLTFALQL

SEQ ID NO: 67322 - protein, 9 aa, Homo sapiens
  Table A; Target 67322; HLA-B*08:01; PMEL; ENSG00000185664; TAA
QPLTFALQL

SEQ ID NO: 67323 - protein, 9 aa, Homo sapiens
  Table A; Target 67323; HLA-B*35:01; PMEL; ENSG00000185664; TAA
QPLTFALQL

SEQ ID NO: 67324 - protein, 9 aa, Homo sapiens
  Table A; Target 67324; HLA-B*35:03; PMEL; ENSG00000185664; TAA
QPLTFALQL

SEQ ID NO: 67325 - protein, 9 aa, Homo sapiens
  Table A; Target 67325; HLA-B*51:01; PMEL; ENSG00000185664; TAA
QPLTFALQL

SEQ ID NO: 67326 - protein, 9 aa, Homo sapiens
  Table A; Target 67326; HLA-B*54:01; PMEL; ENSG00000185664; TAA
QPLTFALQL

SEQ ID NO: 67327 - protein, 9 aa, Homo sapiens
  Table A; Target 67327; HLA-B*56:01; PMEL; ENSG00000185664; TAA
QPLTFALQL

SEQ ID NO: 67328 - protein, 9 aa, Homo sapiens
  Table A; Target 67328; HLA-C*07:02; PMEL; ENSG00000185664; TAA
QPLTFALQL

SEQ ID NO: 67329 - protein, 8 aa, Homo sapiens
  Table A; Target 67329; HLA-B*54:01; PMEL; ENSG00000185664; TAA
QPVLPSPA

SEQ ID NO: 67330 - protein, 8 aa, Homo sapiens
  Table A; Target 67330; HLA-B*55:01; PMEL; ENSG00000185664; TAA
QPVLPSPA

SEQ ID NO: 67331 - protein, 8 aa, Homo sapiens
  Table A; Target 67331; HLA-B*56:01; PMEL; ENSG00000185664; TAA
QPVLPSPA

SEQ ID NO: 67332 - protein, 9 aa, Homo sapiens
  Table A; Target 67332; HLA-B*07:02; PMEL; ENSG00000185664; TAA
QPVLPSPAC

SEQ ID NO: 67333 - protein, 9 aa, Homo sapiens
  Table A; Target 67333; HLA-B*35:01; PMEL; ENSG00000185664; TAA
QPVLPSPAC

SEQ ID NO: 67334 - protein, 9 aa, Homo sapiens
  Table A; Target 67334; HLA-B*35:03; PMEL; ENSG00000185664; TAA
QPVLPSPAC

SEQ ID NO: 67335 - protein, 9 aa, Homo sapiens
  Table A; Target 67335; HLA-B*51:01; PMEL; ENSG00000185664; TAA
QPVLPSPAC

SEQ ID NO: 67336 - protein, 9 aa, Homo sapiens
  Table A; Target 67336; HLA-B*54:01; PMEL; ENSG00000185664; TAA
QPVLPSPAC

SEQ ID NO: 67337 - protein, 9 aa, Homo sapiens
  Table A; Target 67337; HLA-B*55:01; PMEL; ENSG00000185664; TAA
QPVLPSPAC

SEQ ID NO: 67338 - protein, 9 aa, Homo sapiens
  Table A; Target 67338; HLA-B*56:01; PMEL; ENSG00000185664; TAA
QPVLPSPAC

SEQ ID NO: 67339 - protein, 9 aa, Homo sapiens
  Table A; Target 67339; HLA-C*03:03; PMEL; ENSG00000185664; TAA
QPVLPSPAC

SEQ ID NO: 67340 - protein, 9 aa, Homo sapiens
  Table A; Target 67340; HLA-C*07:02; PMEL; ENSG00000185664; TAA
QPVLPSPAC

SEQ ID NO: 67341 - protein, 11 aa, Homo sapiens
  Table A; Target 67341; HLA-B*07:02; PMEL; ENSG00000185664; TAA
QPVLPSPACQL

SEQ ID NO: 67342 - protein, 11 aa, Homo sapiens
  Table A; Target 67342; HLA-B*35:03; PMEL; ENSG00000185664; TAA
QPVLPSPACQL

SEQ ID NO: 67343 - protein, 11 aa, Homo sapiens
  Table A; Target 67343; HLA-B*56:01; PMEL; ENSG00000185664; TAA
QPVYPQETDDA

SEQ ID NO: 67344 - protein, 9 aa, Homo sapiens
  Table A; Target 67344; HLA-A*68:02; PMEL; ENSG00000185664; TAA
QVIWVNNTI

SEQ ID NO: 67345 - protein, 9 aa, Homo sapiens
  Table A; Target 67345; HLA-B*13:02; PMEL; ENSG00000185664; TAA
QVIWVNNTI

SEQ ID NO: 67346 - protein, 9 aa, Homo sapiens
  Table A; Target 67346; HLA-B*58:01; PMEL; ENSG00000185664; TAA
QVIWVNNTI

SEQ ID NO: 67347 - protein, 10 aa, Homo sapiens
  Table A; Target 67347; HLA-A*68:02; PMEL; ENSG00000185664; TAA
QVIWVNNTII

SEQ ID NO: 67348 - protein, 10 aa, Homo sapiens
  Table A; Target 67348; HLA-A*02:01; PMEL; ENSG00000185664; TAA
QVLGGPVSGL

SEQ ID NO: 67349 - protein, 10 aa, Homo sapiens
  Table A; Target 67349; HLA-A*02:03; PMEL; ENSG00000185664; TAA
QVLGGPVSGL

SEQ ID NO: 67350 - protein, 10 aa, Homo sapiens
  Table A; Target 67350; HLA-A*02:04; PMEL; ENSG00000185664; TAA
QVLGGPVSGL

SEQ ID NO: 67351 - protein, 10 aa, Homo sapiens
  Table A; Target 67351; HLA-A*02:07; PMEL; ENSG00000185664; TAA
QVLGGPVSGL

SEQ ID NO: 67352 - protein, 10 aa, Homo sapiens
  Table A; Target 67352; HLA-A*03:01; PMEL; ENSG00000185664; TAA
QVLGGPVSGL

SEQ ID NO: 67353 - protein, 10 aa, Homo sapiens
  Table A; Target 67353; HLA-A*03:02; PMEL; ENSG00000185664; TAA
QVLGGPVSGL

SEQ ID NO: 67354 - protein, 10 aa, Homo sapiens
  Table A; Target 67354; HLA-A*11:01; PMEL; ENSG00000185664; TAA
QVLGGPVSGL

SEQ ID NO: 67355 - protein, 10 aa, Homo sapiens
  Table A; Target 67355; HLA-A*25:01; PMEL; ENSG00000185664; TAA
QVLGGPVSGL

SEQ ID NO: 67356 - protein, 10 aa, Homo sapiens
  Table A; Target 67356; HLA-A*26:01; PMEL; ENSG00000185664; TAA
QVLGGPVSGL

SEQ ID NO: 67357 - protein, 10 aa, Homo sapiens
  Table A; Target 67357; HLA-A*31:01; PMEL; ENSG00000185664; TAA
QVLGGPVSGL

SEQ ID NO: 67358 - protein, 10 aa, Homo sapiens
  Table A; Target 67358; HLA-A*32:01; PMEL; ENSG00000185664; TAA
QVLGGPVSGL

SEQ ID NO: 67359 - protein, 10 aa, Homo sapiens
  Table A; Target 67359; HLA-A*33:03; PMEL; ENSG00000185664; TAA
QVLGGPVSGL

SEQ ID NO: 67360 - protein, 10 aa, Homo sapiens
  Table A; Target 67360; HLA-A*68:01; PMEL; ENSG00000185664; TAA
QVLGGPVSGL

SEQ ID NO: 67361 - protein, 10 aa, Homo sapiens
  Table A; Target 67361; HLA-A*68:02; PMEL; ENSG00000185664; TAA
QVLGGPVSGL

SEQ ID NO: 67362 - protein, 10 aa, Homo sapiens
  Table A; Target 67362; HLA-B*27:05; PMEL; ENSG00000185664; TAA
QVLGGPVSGL

SEQ ID NO: 67363 - protein, 10 aa, Homo sapiens
  Table A; Target 67363; HLA-B*39:01; PMEL; ENSG00000185664; TAA
QVLGGPVSGL

SEQ ID NO: 67364 - protein, 10 aa, Homo sapiens
  Table A; Target 67364; HLA-B*55:01; PMEL; ENSG00000185664; TAA
QVLGGPVSGL

SEQ ID NO: 67365 - protein, 10 aa, Homo sapiens
  Table A; Target 67365; HLA-C*01:02; PMEL; ENSG00000185664; TAA
QVLGGPVSGL

SEQ ID NO: 67366 - protein, 10 aa, Homo sapiens
  Table A; Target 67366; HLA-C*04:01; PMEL; ENSG00000185664; TAA
QVLGGPVSGL

SEQ ID NO: 67367 - protein, 10 aa, Homo sapiens
  Table A; Target 67367; HLA-C*06:02; PMEL; ENSG00000185664; TAA
QVLGGPVSGL

SEQ ID NO: 67368 - protein, 10 aa, Homo sapiens
  Table A; Target 67368; HLA-C*07:02; PMEL; ENSG00000185664; TAA
QVLGGPVSGL

SEQ ID NO: 67369 - protein, 8 aa, Homo sapiens
  Table A; Target 67369; HLA-B*51:01; PMEL; ENSG00000185664; TAA
QVPFSVSV

SEQ ID NO: 67370 - protein, 8 aa, Homo sapiens
  Table A; Target 67370; HLA-C*01:02; PMEL; ENSG00000185664; TAA
QVPFSVSV

SEQ ID NO: 67371 - protein, 11 aa, Homo sapiens
  Table A; Target 67371; HLA-C*01:02; PMEL; ENSG00000185664; TAA
QVPFSVSVSQL

SEQ ID NO: 67372 - protein, 11 aa, Homo sapiens
  Table A; Target 67372; HLA-C*07:02; PMEL; ENSG00000185664; TAA
QVPFSVSVSQL

SEQ ID NO: 67373 - protein, 9 aa, Homo sapiens
  Table A; Target 67373; HLA-A*01:01; PMEL; ENSG00000185664; TAA
QVPLDCVLY

SEQ ID NO: 67374 - protein, 9 aa, Homo sapiens
  Table A; Target 67374; HLA-A*26:01; PMEL; ENSG00000185664; TAA
QVPLDCVLY

SEQ ID NO: 67375 - protein, 9 aa, Homo sapiens
  Table A; Target 67375; HLA-A*29:02; PMEL; ENSG00000185664; TAA
QVPLDCVLY

SEQ ID NO: 67376 - protein, 9 aa, Homo sapiens
  Table A; Target 67376; HLA-B*15:03; PMEL; ENSG00000185664; TAA
QVPLDCVLY

SEQ ID NO: 67377 - protein, 9 aa, Homo sapiens
  Table A; Target 67377; HLA-C*07:01; PMEL; ENSG00000185664; TAA
QVPLDCVLY

SEQ ID NO: 67378 - protein, 9 aa, Homo sapiens
  Table A; Target 67378; HLA-C*07:04; PMEL; ENSG00000185664; TAA
QVPLDCVLY

SEQ ID NO: 67379 - protein, 9 aa, Homo sapiens
  Table A; Target 67379; HLA-C*01:02; PMEL; ENSG00000185664; TAA
QVPLIVGIL

SEQ ID NO: 67380 - protein, 10 aa, Homo sapiens
  Table A; Target 67380; HLA-A*02:07; PMEL; ENSG00000185664; TAA
QVPLIVGILL

SEQ ID NO: 67381 - protein, 10 aa, Homo sapiens
  Table A; Target 67381; HLA-A*68:02; PMEL; ENSG00000185664; TAA
QVPLIVGILL

SEQ ID NO: 67382 - protein, 11 aa, Homo sapiens
  Table A; Target 67382; HLA-A*02:07; PMEL; ENSG00000185664; TAA
QVPLIVGILLV

SEQ ID NO: 67383 - protein, 11 aa, Homo sapiens
  Table A; Target 67383; HLA-A*68:02; PMEL; ENSG00000185664; TAA
QVPLIVGILLV

SEQ ID NO: 67384 - protein, 8 aa, Homo sapiens
  Table A; Target 67384; HLA-B*51:01; PMEL; ENSG00000185664; TAA
QVPTTEVI

SEQ ID NO: 67385 - protein, 11 aa, Homo sapiens
  Table A; Target 67385; HLA-A*02:07; PMEL; ENSG00000185664; TAA
QVPTTEVISTA

SEQ ID NO: 67386 - protein, 11 aa, Homo sapiens
  Table A; Target 67386; HLA-A*26:01; PMEL; ENSG00000185664; TAA
QVPTTEVISTA

SEQ ID NO: 67387 - protein, 11 aa, Homo sapiens
  Table A; Target 67387; HLA-A*68:02; PMEL; ENSG00000185664; TAA
QVPTTEVISTA

SEQ ID NO: 67388 - protein, 8 aa, Homo sapiens
  Table A; Target 67388; HLA-B*51:01; PMEL; ENSG00000185664; TAA
QVPTTEVV

SEQ ID NO: 67389 - protein, 11 aa, Homo sapiens
  Table A; Target 67389; HLA-C*06:02; PMEL; ENSG00000185664; TAA
QVPTTEVVGTT

SEQ ID NO: 67390 - protein, 11 aa, Homo sapiens
  Table A; Target 67390; HLA-C*07:01; PMEL; ENSG00000185664; TAA
QVPTTEVVGTT

SEQ ID NO: 67391 - protein, 11 aa, Homo sapiens
  Table A; Target 67391; HLA-C*07:02; PMEL; ENSG00000185664; TAA
QVPTTEVVGTT

SEQ ID NO: 67392 - protein, 8 aa, Homo sapiens
  Table A; Target 67392; HLA-B*13:02; PMEL; ENSG00000185664; TAA
QVVLQAAI

SEQ ID NO: 67393 - protein, 10 aa, Homo sapiens
  Table A; Target 67393; HLA-C*06:02; PMEL; ENSG00000185664; TAA
QVVLQAAIPL

SEQ ID NO: 67394 - protein, 10 aa, Homo sapiens
  Table A; Target 67394; HLA-C*07:01; PMEL; ENSG00000185664; TAA
QVVLQAAIPL

SEQ ID NO: 67395 - protein, 9 aa, Homo sapiens
  Table A; Target 67395; HLA-A*01:01; PMEL; ENSG00000185664; TAA
QVWGGQPVY

SEQ ID NO: 67396 - protein, 9 aa, Homo sapiens
  Table A; Target 67396; HLA-A*03:01; PMEL; ENSG00000185664; TAA
QVWGGQPVY

SEQ ID NO: 67397 - protein, 9 aa, Homo sapiens
  Table A; Target 67397; HLA-A*11:01; PMEL; ENSG00000185664; TAA
QVWGGQPVY

SEQ ID NO: 67398 - protein, 9 aa, Homo sapiens
  Table A; Target 67398; HLA-A*23:01; PMEL; ENSG00000185664; TAA
QVWGGQPVY

SEQ ID NO: 67399 - protein, 9 aa, Homo sapiens
  Table A; Target 67399; HLA-A*25:01; PMEL; ENSG00000185664; TAA
QVWGGQPVY

SEQ ID NO: 67400 - protein, 9 aa, Homo sapiens
  Table A; Target 67400; HLA-A*26:01; PMEL; ENSG00000185664; TAA
QVWGGQPVY

SEQ ID NO: 67401 - protein, 9 aa, Homo sapiens
  Table A; Target 67401; HLA-A*29:02; PMEL; ENSG00000185664; TAA
QVWGGQPVY

SEQ ID NO: 67402 - protein, 9 aa, Homo sapiens
  Table A; Target 67402; HLA-A*30:02; PMEL; ENSG00000185664; TAA
QVWGGQPVY

SEQ ID NO: 67403 - protein, 9 aa, Homo sapiens
  Table A; Target 67403; HLA-A*32:01; PMEL; ENSG00000185664; TAA
QVWGGQPVY

SEQ ID NO: 67404 - protein, 9 aa, Homo sapiens
  Table A; Target 67404; HLA-B*13:02; PMEL; ENSG00000185664; TAA
QVWGGQPVY

SEQ ID NO: 67405 - protein, 9 aa, Homo sapiens
  Table A; Target 67405; HLA-B*15:01; PMEL; ENSG00000185664; TAA
QVWGGQPVY

SEQ ID NO: 67406 - protein, 9 aa, Homo sapiens
  Table A; Target 67406; HLA-B*15:03; PMEL; ENSG00000185664; TAA
QVWGGQPVY

SEQ ID NO: 67407 - protein, 9 aa, Homo sapiens
  Table A; Target 67407; HLA-B*18:01; PMEL; ENSG00000185664; TAA
QVWGGQPVY

SEQ ID NO: 67408 - protein, 9 aa, Homo sapiens
  Table A; Target 67408; HLA-B*27:05; PMEL; ENSG00000185664; TAA
QVWGGQPVY

SEQ ID NO: 67409 - protein, 9 aa, Homo sapiens
  Table A; Target 67409; HLA-B*35:01; PMEL; ENSG00000185664; TAA
QVWGGQPVY

SEQ ID NO: 67410 - protein, 9 aa, Homo sapiens
  Table A; Target 67410; HLA-B*39:01; PMEL; ENSG00000185664; TAA
QVWGGQPVY

SEQ ID NO: 67411 - protein, 9 aa, Homo sapiens
  Table A; Target 67411; HLA-B*44:03; PMEL; ENSG00000185664; TAA
QVWGGQPVY

SEQ ID NO: 67412 - protein, 9 aa, Homo sapiens
  Table A; Target 67412; HLA-B*46:01; PMEL; ENSG00000185664; TAA
QVWGGQPVY

SEQ ID NO: 67413 - protein, 9 aa, Homo sapiens
  Table A; Target 67413; HLA-B*55:01; PMEL; ENSG00000185664; TAA
QVWGGQPVY

SEQ ID NO: 67414 - protein, 9 aa, Homo sapiens
  Table A; Target 67414; HLA-B*57:01; PMEL; ENSG00000185664; TAA
QVWGGQPVY

SEQ ID NO: 67415 - protein, 9 aa, Homo sapiens
  Table A; Target 67415; HLA-B*58:01; PMEL; ENSG00000185664; TAA
QVWGGQPVY

SEQ ID NO: 67416 - protein, 9 aa, Homo sapiens
  Table A; Target 67416; HLA-C*02:02; PMEL; ENSG00000185664; TAA
QVWGGQPVY

SEQ ID NO: 67417 - protein, 9 aa, Homo sapiens
  Table A; Target 67417; HLA-C*07:04; PMEL; ENSG00000185664; TAA
QVWGGQPVY

SEQ ID NO: 67418 - protein, 9 aa, Homo sapiens
  Table A; Target 67418; HLA-C*07:06; PMEL; ENSG00000185664; TAA
QVWGGQPVY

SEQ ID NO: 67419 - protein, 9 aa, Homo sapiens
  Table A; Target 67419; HLA-C*12:03; PMEL; ENSG00000185664; TAA
QVWGGQPVY

SEQ ID NO: 67420 - protein, 9 aa, Homo sapiens
  Table A; Target 67420; HLA-C*16:01; PMEL; ENSG00000185664; TAA
QVWGGQPVY

SEQ ID NO: 67421 - protein, 9 aa, Homo sapiens
  Table A; Target 67421; HLA-C*16:04; PMEL; ENSG00000185664; TAA
QVWGGQPVY

SEQ ID NO: 67422 - protein, 10 aa, Homo sapiens
  Table A; Target 67422; HLA-B*27:05; PMEL; ENSG00000185664; TAA
QVWGGQPVYP

SEQ ID NO: 67423 - protein, 10 aa, Homo sapiens
  Table A; Target 67423; HLA-C*04:01; PMEL; ENSG00000185664; TAA
QVWGGQPVYP

SEQ ID NO: 67424 - protein, 10 aa, Homo sapiens
  Table A; Target 67424; HLA-C*07:02; PMEL; ENSG00000185664; TAA
QVWGGQPVYP

SEQ ID NO: 67425 - protein, 10 aa, Homo sapiens
  Table A; Target 67425; HLA-B*57:01; PMEL; ENSG00000185664; TAA
RALDGGNKHF

SEQ ID NO: 67426 - protein, 10 aa, Homo sapiens
  Table A; Target 67426; HLA-B*58:01; PMEL; ENSG00000185664; TAA
RALDGGNKHF

SEQ ID NO: 67427 - protein, 11 aa, Homo sapiens
  Table A; Target 67427; HLA-A*02:01; PMEL; ENSG00000185664; TAA
RALDGGNKHFL

SEQ ID NO: 67428 - protein, 11 aa, Homo sapiens
  Table A; Target 67428; HLA-A*02:04; PMEL; ENSG00000185664; TAA
RALDGGNKHFL

SEQ ID NO: 67429 - protein, 11 aa, Homo sapiens
  Table A; Target 67429; HLA-A*24:02; PMEL; ENSG00000185664; TAA
RALDGGNKHFL

SEQ ID NO: 67430 - protein, 11 aa, Homo sapiens
  Table A; Target 67430; HLA-A*31:01; PMEL; ENSG00000185664; TAA
RALDGGNKHFL

SEQ ID NO: 67431 - protein, 11 aa, Homo sapiens
  Table A; Target 67431; HLA-B*57:01; PMEL; ENSG00000185664; TAA
RALDGGNKHFL

SEQ ID NO: 67432 - protein, 9 aa, Homo sapiens
  Table A; Target 67432; HLA-A*01:01; PMEL; ENSG00000185664; TAA
RALVVTHTY

SEQ ID NO: 67433 - protein, 9 aa, Homo sapiens
  Table A; Target 67433; HLA-A*03:01; PMEL; ENSG00000185664; TAA
RALVVTHTY

SEQ ID NO: 67434 - protein, 9 aa, Homo sapiens
  Table A; Target 67434; HLA-A*23:01; PMEL; ENSG00000185664; TAA
RALVVTHTY

SEQ ID NO: 67435 - protein, 9 aa, Homo sapiens
  Table A; Target 67435; HLA-A*24:02; PMEL; ENSG00000185664; TAA
RALVVTHTY

SEQ ID NO: 67436 - protein, 9 aa, Homo sapiens
  Table A; Target 67436; HLA-A*25:01; PMEL; ENSG00000185664; TAA
RALVVTHTY

SEQ ID NO: 67437 - protein, 9 aa, Homo sapiens
  Table A; Target 67437; HLA-A*26:01; PMEL; ENSG00000185664; TAA
RALVVTHTY

SEQ ID NO: 67438 - protein, 9 aa, Homo sapiens
  Table A; Target 67438; HLA-A*29:02; PMEL; ENSG00000185664; TAA
RALVVTHTY

SEQ ID NO: 67439 - protein, 9 aa, Homo sapiens
  Table A; Target 67439; HLA-A*30:02; PMEL; ENSG00000185664; TAA
RALVVTHTY

SEQ ID NO: 67440 - protein, 9 aa, Homo sapiens
  Table A; Target 67440; HLA-A*31:01; PMEL; ENSG00000185664; TAA
RALVVTHTY

SEQ ID NO: 67441 - protein, 9 aa, Homo sapiens
  Table A; Target 67441; HLA-A*32:01; PMEL; ENSG00000185664; TAA
RALVVTHTY

SEQ ID NO: 67442 - protein, 9 aa, Homo sapiens
  Table A; Target 67442; HLA-B*15:01; PMEL; ENSG00000185664; TAA
RALVVTHTY

SEQ ID NO: 67443 - protein, 9 aa, Homo sapiens
  Table A; Target 67443; HLA-B*15:03; PMEL; ENSG00000185664; TAA
RALVVTHTY

SEQ ID NO: 67444 - protein, 9 aa, Homo sapiens
  Table A; Target 67444; HLA-B*18:01; PMEL; ENSG00000185664; TAA
RALVVTHTY

SEQ ID NO: 67445 - protein, 9 aa, Homo sapiens
  Table A; Target 67445; HLA-B*27:02; PMEL; ENSG00000185664; TAA
RALVVTHTY

SEQ ID NO: 67446 - protein, 9 aa, Homo sapiens
  Table A; Target 67446; HLA-B*35:01; PMEL; ENSG00000185664; TAA
RALVVTHTY

SEQ ID NO: 67447 - protein, 9 aa, Homo sapiens
  Table A; Target 67447; HLA-B*37:01; PMEL; ENSG00000185664; TAA
RALVVTHTY

SEQ ID NO: 67448 - protein, 9 aa, Homo sapiens
  Table A; Target 67448; HLA-B*44:02; PMEL; ENSG00000185664; TAA
RALVVTHTY

SEQ ID NO: 67449 - protein, 9 aa, Homo sapiens
  Table A; Target 67449; HLA-B*44:03; PMEL; ENSG00000185664; TAA
RALVVTHTY

SEQ ID NO: 67450 - protein, 9 aa, Homo sapiens
  Table A; Target 67450; HLA-B*46:01; PMEL; ENSG00000185664; TAA
RALVVTHTY

SEQ ID NO: 67451 - protein, 9 aa, Homo sapiens
  Table A; Target 67451; HLA-B*57:01; PMEL; ENSG00000185664; TAA
RALVVTHTY

SEQ ID NO: 67452 - protein, 9 aa, Homo sapiens
  Table A; Target 67452; HLA-B*58:01; PMEL; ENSG00000185664; TAA
RALVVTHTY

SEQ ID NO: 67453 - protein, 9 aa, Homo sapiens
  Table A; Target 67453; HLA-C*01:02; PMEL; ENSG00000185664; TAA
RALVVTHTY

SEQ ID NO: 67454 - protein, 9 aa, Homo sapiens
  Table A; Target 67454; HLA-C*02:02; PMEL; ENSG00000185664; TAA
RALVVTHTY

SEQ ID NO: 67455 - protein, 9 aa, Homo sapiens
  Table A; Target 67455; HLA-C*03:03; PMEL; ENSG00000185664; TAA
RALVVTHTY

SEQ ID NO: 67456 - protein, 9 aa, Homo sapiens
  Table A; Target 67456; HLA-C*03:04; PMEL; ENSG00000185664; TAA
RALVVTHTY

SEQ ID NO: 67457 - protein, 9 aa, Homo sapiens
  Table A; Target 67457; HLA-C*07:06; PMEL; ENSG00000185664; TAA
RALVVTHTY

SEQ ID NO: 67458 - protein, 9 aa, Homo sapiens
  Table A; Target 67458; HLA-C*12:03; PMEL; ENSG00000185664; TAA
RALVVTHTY

SEQ ID NO: 67459 - protein, 9 aa, Homo sapiens
  Table A; Target 67459; HLA-C*16:01; PMEL; ENSG00000185664; TAA
RALVVTHTY

SEQ ID NO: 67460 - protein, 9 aa, Homo sapiens
  Table A; Target 67460; HLA-C*16:02; PMEL; ENSG00000185664; TAA
RALVVTHTY

SEQ ID NO: 67461 - protein, 9 aa, Homo sapiens
  Table A; Target 67461; HLA-C*16:04; PMEL; ENSG00000185664; TAA
RALVVTHTY

SEQ ID NO: 67462 - protein, 10 aa, Homo sapiens
  Table A; Target 67462; HLA-B*57:01; PMEL; ENSG00000185664; TAA
RALVVTHTYL

SEQ ID NO: 67463 - protein, 9 aa, Homo sapiens
  Table A; Target 67463; HLA-A*24:02; PMEL; ENSG00000185664; TAA
RAMLGTHTM

SEQ ID NO: 67464 - protein, 9 aa, Homo sapiens
  Table A; Target 67464; HLA-A*30:01; PMEL; ENSG00000185664; TAA
RAMLGTHTM

SEQ ID NO: 67465 - protein, 9 aa, Homo sapiens
  Table A; Target 67465; HLA-A*32:01; PMEL; ENSG00000185664; TAA
RAMLGTHTM

SEQ ID NO: 67466 - protein, 9 aa, Homo sapiens
  Table A; Target 67466; HLA-B*07:02; PMEL; ENSG00000185664; TAA
RAMLGTHTM

SEQ ID NO: 67467 - protein, 9 aa, Homo sapiens
  Table A; Target 67467; HLA-B*08:01; PMEL; ENSG00000185664; TAA
RAMLGTHTM

SEQ ID NO: 67468 - protein, 9 aa, Homo sapiens
  Table A; Target 67468; HLA-B*15:01; PMEL; ENSG00000185664; TAA
RAMLGTHTM

SEQ ID NO: 67469 - protein, 9 aa, Homo sapiens
  Table A; Target 67469; HLA-B*15:03; PMEL; ENSG00000185664; TAA
RAMLGTHTM

SEQ ID NO: 67470 - protein, 9 aa, Homo sapiens
  Table A; Target 67470; HLA-B*35:01; PMEL; ENSG00000185664; TAA
RAMLGTHTM

SEQ ID NO: 67471 - protein, 9 aa, Homo sapiens
  Table A; Target 67471; HLA-B*35:03; PMEL; ENSG00000185664; TAA
RAMLGTHTM

SEQ ID NO: 67472 - protein, 9 aa, Homo sapiens
  Table A; Target 67472; HLA-B*37:01; PMEL; ENSG00000185664; TAA
RAMLGTHTM

SEQ ID NO: 67473 - protein, 9 aa, Homo sapiens
  Table A; Target 67473; HLA-B*38:01; PMEL; ENSG00000185664; TAA
RAMLGTHTM

SEQ ID NO: 67474 - protein, 9 aa, Homo sapiens
  Table A; Target 67474; HLA-B*40:01; PMEL; ENSG00000185664; TAA
RAMLGTHTM

SEQ ID NO: 67475 - protein, 9 aa, Homo sapiens
  Table A; Target 67475; HLA-B*46:01; PMEL; ENSG00000185664; TAA
RAMLGTHTM

SEQ ID NO: 67476 - protein, 9 aa, Homo sapiens
  Table A; Target 67476; HLA-B*51:01; PMEL; ENSG00000185664; TAA
RAMLGTHTM

SEQ ID NO: 67477 - protein, 9 aa, Homo sapiens
  Table A; Target 67477; HLA-B*55:01; PMEL; ENSG00000185664; TAA
RAMLGTHTM

SEQ ID NO: 67478 - protein, 9 aa, Homo sapiens
  Table A; Target 67478; HLA-B*57:01; PMEL; ENSG00000185664; TAA
RAMLGTHTM

SEQ ID NO: 67479 - protein, 9 aa, Homo sapiens
  Table A; Target 67479; HLA-B*58:01; PMEL; ENSG00000185664; TAA
RAMLGTHTM

SEQ ID NO: 67480 - protein, 9 aa, Homo sapiens
  Table A; Target 67480; HLA-C*01:02; PMEL; ENSG00000185664; TAA
RAMLGTHTM

SEQ ID NO: 67481 - protein, 9 aa, Homo sapiens
  Table A; Target 67481; HLA-C*02:02; PMEL; ENSG00000185664; TAA
RAMLGTHTM

SEQ ID NO: 67482 - protein, 9 aa, Homo sapiens
  Table A; Target 67482; HLA-C*03:03; PMEL; ENSG00000185664; TAA
RAMLGTHTM

SEQ ID NO: 67483 - protein, 9 aa, Homo sapiens
  Table A; Target 67483; HLA-C*03:04; PMEL; ENSG00000185664; TAA
RAMLGTHTM

SEQ ID NO: 67484 - protein, 9 aa, Homo sapiens
  Table A; Target 67484; HLA-C*05:01; PMEL; ENSG00000185664; TAA
RAMLGTHTM

SEQ ID NO: 67485 - protein, 9 aa, Homo sapiens
  Table A; Target 67485; HLA-C*07:02; PMEL; ENSG00000185664; TAA
RAMLGTHTM

SEQ ID NO: 67486 - protein, 9 aa, Homo sapiens
  Table A; Target 67486; HLA-C*14:02; PMEL; ENSG00000185664; TAA
RAMLGTHTM

SEQ ID NO: 67487 - protein, 9 aa, Homo sapiens
  Table A; Target 67487; HLA-C*16:01; PMEL; ENSG00000185664; TAA
RAMLGTHTM

SEQ ID NO: 67488 - protein, 9 aa, Homo sapiens
  Table A; Target 67488; HLA-C*16:02; PMEL; ENSG00000185664; TAA
RAMLGTHTM

SEQ ID NO: 67489 - protein, 9 aa, Homo sapiens
  Table A; Target 67489; HLA-C*16:04; PMEL; ENSG00000185664; TAA
RAMLGTHTM

SEQ ID NO: 67490 - protein, 8 aa, Homo sapiens
  Table A; Target 67490; HLA-A*03:02; PMEL; ENSG00000185664; TAA
RGGQVSLK

SEQ ID NO: 67491 - protein, 9 aa, Homo sapiens
  Table A; Target 67491; HLA-B*13:02; PMEL; ENSG00000185664; TAA
RGGQVSLKV

SEQ ID NO: 67492 - protein, 9 aa, Homo sapiens
  Table A; Target 67492; HLA-C*06:02; PMEL; ENSG00000185664; TAA
RGGQVSLKV

SEQ ID NO: 67493 - protein, 9 aa, Homo sapiens
  Table A; Target 67493; HLA-A*02:01; PMEL; ENSG00000185664; TAA
RLMKQDFSV

SEQ ID NO: 67494 - protein, 9 aa, Homo sapiens
  Table A; Target 67494; HLA-A*02:03; PMEL; ENSG00000185664; TAA
RLMKQDFSV

SEQ ID NO: 67495 - protein, 9 aa, Homo sapiens
  Table A; Target 67495; HLA-A*02:04; PMEL; ENSG00000185664; TAA
RLMKQDFSV

SEQ ID NO: 67496 - protein, 9 aa, Homo sapiens
  Table A; Target 67496; HLA-A*02:07; PMEL; ENSG00000185664; TAA
RLMKQDFSV

SEQ ID NO: 67497 - protein, 9 aa, Homo sapiens
  Table A; Target 67497; HLA-B*13:02; PMEL; ENSG00000185664; TAA
RLMKQDFSV

SEQ ID NO: 67498 - protein, 9 aa, Homo sapiens
  Table A; Target 67498; HLA-B*55:01; PMEL; ENSG00000185664; TAA
RLMKQDFSV

SEQ ID NO: 67499 - protein, 10 aa, Homo sapiens
  Table A; Target 67499; HLA-A*31:01; PMEL; ENSG00000185664; TAA
RNQDWLGVSR

SEQ ID NO: 67500 - protein, 10 aa, Homo sapiens
  Table A; Target 67500; HLA-A*33:01; PMEL; ENSG00000185664; TAA
RNQDWLGVSR

SEQ ID NO: 67501 - protein, 10 aa, Homo sapiens
  Table A; Target 67501; HLA-A*33:03; PMEL; ENSG00000185664; TAA
RNQDWLGVSR

SEQ ID NO: 67502 - protein, 9 aa, Homo sapiens
  Table A; Target 67502; HLA-A*02:04; PMEL; ENSG00000185664; TAA
RNQPLTFAL

SEQ ID NO: 67503 - protein, 9 aa, Homo sapiens
  Table A; Target 67503; HLA-A*23:01; PMEL; ENSG00000185664; TAA
RNQPLTFAL

SEQ ID NO: 67504 - protein, 9 aa, Homo sapiens
  Table A; Target 67504; HLA-A*31:01; PMEL; ENSG00000185664; TAA
RNQPLTFAL

SEQ ID NO: 67505 - protein, 10 aa, Homo sapiens
  Table A; Target 67505; HLA-B*56:01; PMEL; ENSG00000185664; TAA
RPTAEAPNTT

SEQ ID NO: 67506 - protein, 11 aa, Homo sapiens
  Table A; Target 67506; HLA-B*07:02; PMEL; ENSG00000185664; TAA
RPTAEAPNTTA

SEQ ID NO: 67507 - protein, 11 aa, Homo sapiens
  Table A; Target 67507; HLA-B*54:01; PMEL; ENSG00000185664; TAA
RPTAEAPNTTA

SEQ ID NO: 67508 - protein, 11 aa, Homo sapiens
  Table A; Target 67508; HLA-B*55:01; PMEL; ENSG00000185664; TAA
RPTAEAPNTTA

SEQ ID NO: 67509 - protein, 11 aa, Homo sapiens
  Table A; Target 67509; HLA-B*56:01; PMEL; ENSG00000185664; TAA
RPTAEAPNTTA

SEQ ID NO: 67510 - protein, 10 aa, Homo sapiens
  Table A; Target 67510; HLA-A*31:01; PMEL; ENSG00000185664; TAA
RQLRTKAWNR

SEQ ID NO: 67511 - protein, 8 aa, Homo sapiens
  Table A; Target 67511; HLA-B*13:02; PMEL; ENSG00000185664; TAA
RQVPLDCV

SEQ ID NO: 67512 - protein, 9 aa, Homo sapiens
  Table A; Target 67512; HLA-B*13:02; PMEL; ENSG00000185664; TAA
RQVPLDCVL

SEQ ID NO: 67513 - protein, 9 aa, Homo sapiens
  Table A; Target 67513; HLA-B*15:01; PMEL; ENSG00000185664; TAA
RQVPLDCVL

SEQ ID NO: 67514 - protein, 9 aa, Homo sapiens
  Table A; Target 67514; HLA-B*15:03; PMEL; ENSG00000185664; TAA
RQVPLDCVL

SEQ ID NO: 67515 - protein, 9 aa, Homo sapiens
  Table A; Target 67515; HLA-B*27:05; PMEL; ENSG00000185664; TAA
RQVPLDCVL

SEQ ID NO: 67516 - protein, 9 aa, Homo sapiens
  Table A; Target 67516; HLA-B*38:01; PMEL; ENSG00000185664; TAA
RQVPLDCVL

SEQ ID NO: 67517 - protein, 9 aa, Homo sapiens
  Table A; Target 67517; HLA-B*39:01; PMEL; ENSG00000185664; TAA
RQVPLDCVL

SEQ ID NO: 67518 - protein, 10 aa, Homo sapiens
  Table A; Target 67518; HLA-A*30:02; PMEL; ENSG00000185664; TAA
RQVPLDCVLY

SEQ ID NO: 67519 - protein, 10 aa, Homo sapiens
  Table A; Target 67519; HLA-B*15:01; PMEL; ENSG00000185664; TAA
RQVPLDCVLY

SEQ ID NO: 67520 - protein, 10 aa, Homo sapiens
  Table A; Target 67520; HLA-B*15:03; PMEL; ENSG00000185664; TAA
RQVPLDCVLY

SEQ ID NO: 67521 - protein, 10 aa, Homo sapiens
  Table A; Target 67521; HLA-B*57:01; PMEL; ENSG00000185664; TAA
RQVPLDCVLY

SEQ ID NO: 67522 - protein, 10 aa, Homo sapiens
  Table A; Target 67522; HLA-C*07:01; PMEL; ENSG00000185664; TAA
RQVPLDCVLY

SEQ ID NO: 67523 - protein, 11 aa, Homo sapiens
  Table A; Target 67523; HLA-A*31:01; PMEL; ENSG00000185664; TAA
RQVPLDCVLYR

SEQ ID NO: 67524 - protein, 10 aa, Homo sapiens
  Table A; Target 67524; HLA-B*57:01; PMEL; ENSG00000185664; TAA
RSFVYVWKTW

SEQ ID NO: 67525 - protein, 8 aa, Homo sapiens
  Table A; Target 67525; HLA-A*03:01; PMEL; ENSG00000185664; TAA
RSYVPLAH

SEQ ID NO: 67526 - protein, 8 aa, Homo sapiens
  Table A; Target 67526; HLA-B*57:01; PMEL; ENSG00000185664; TAA
RSYVPLAH

SEQ ID NO: 67527 - protein, 9 aa, Homo sapiens
  Table A; Target 67527; HLA-A*31:01; PMEL; ENSG00000185664; TAA
RSYVPLAHS

SEQ ID NO: 67528 - protein, 10 aa, Homo sapiens
  Table A; Target 67528; HLA-B*57:01; PMEL; ENSG00000185664; TAA
RTKAWNRQLY

SEQ ID NO: 67529 - protein, 9 aa, Homo sapiens
  Table A; Target 67529; HLA-A*23:01; PMEL; ENSG00000185664; TAA
RYGSFSVTL

SEQ ID NO: 67530 - protein, 9 aa, Homo sapiens
  Table A; Target 67530; HLA-A*24:02; PMEL; ENSG00000185664; TAA
RYGSFSVTL

SEQ ID NO: 67531 - protein, 9 aa, Homo sapiens
  Table A; Target 67531; HLA-A*31:01; PMEL; ENSG00000185664; TAA
RYGSFSVTL

SEQ ID NO: 67532 - protein, 9 aa, Homo sapiens
  Table A; Target 67532; HLA-A*33:03; PMEL; ENSG00000185664; TAA
RYGSFSVTL

SEQ ID NO: 67533 - protein, 9 aa, Homo sapiens
  Table A; Target 67533; HLA-B*07:02; PMEL; ENSG00000185664; TAA
RYGSFSVTL

SEQ ID NO: 67534 - protein, 9 aa, Homo sapiens
  Table A; Target 67534; HLA-C*07:01; PMEL; ENSG00000185664; TAA
RYGSFSVTL

SEQ ID NO: 67535 - protein, 9 aa, Homo sapiens
  Table A; Target 67535; HLA-C*14:02; PMEL; ENSG00000185664; TAA
RYGSFSVTL

SEQ ID NO: 67536 - protein, 8 aa, Homo sapiens
  Table A; Target 67536; HLA-C*12:03; PMEL; ENSG00000185664; TAA
SAFTITDQ

SEQ ID NO: 67537 - protein, 9 aa, Homo sapiens
  Table A; Target 67537; HLA-A*02:01; PMEL; ENSG00000185664; TAA
SAFTITDQV

SEQ ID NO: 67538 - protein, 9 aa, Homo sapiens
  Table A; Target 67538; HLA-A*02:03; PMEL; ENSG00000185664; TAA
SAFTITDQV

SEQ ID NO: 67539 - protein, 9 aa, Homo sapiens
  Table A; Target 67539; HLA-A*02:04; PMEL; ENSG00000185664; TAA
SAFTITDQV

SEQ ID NO: 67540 - protein, 9 aa, Homo sapiens
  Table A; Target 67540; HLA-A*02:07; PMEL; ENSG00000185664; TAA
SAFTITDQV

SEQ ID NO: 67541 - protein, 9 aa, Homo sapiens
  Table A; Target 67541; HLA-A*26:01; PMEL; ENSG00000185664; TAA
SAFTITDQV

SEQ ID NO: 67542 - protein, 9 aa, Homo sapiens
  Table A; Target 67542; HLA-A*30:01; PMEL; ENSG00000185664; TAA
SAFTITDQV

SEQ ID NO: 67543 - protein, 9 aa, Homo sapiens
  Table A; Target 67543; HLA-A*32:01; PMEL; ENSG00000185664; TAA
SAFTITDQV

SEQ ID NO: 67544 - protein, 9 aa, Homo sapiens
  Table A; Target 67544; HLA-A*68:02; PMEL; ENSG00000185664; TAA
SAFTITDQV

SEQ ID NO: 67545 - protein, 9 aa, Homo sapiens
  Table A; Target 67545; HLA-B*13:02; PMEL; ENSG00000185664; TAA
SAFTITDQV

SEQ ID NO: 67546 - protein, 9 aa, Homo sapiens
  Table A; Target 67546; HLA-B*27:05; PMEL; ENSG00000185664; TAA
SAFTITDQV

SEQ ID NO: 67547 - protein, 9 aa, Homo sapiens
  Table A; Target 67547; HLA-B*35:03; PMEL; ENSG00000185664; TAA
SAFTITDQV

SEQ ID NO: 67548 - protein, 9 aa, Homo sapiens
  Table A; Target 67548; HLA-B*38:01; PMEL; ENSG00000185664; TAA
SAFTITDQV

SEQ ID NO: 67549 - protein, 9 aa, Homo sapiens
  Table A; Target 67549; HLA-B*39:01; PMEL; ENSG00000185664; TAA
SAFTITDQV

SEQ ID NO: 67550 - protein, 9 aa, Homo sapiens
  Table A; Target 67550; HLA-B*40:02; PMEL; ENSG00000185664; TAA
SAFTITDQV

SEQ ID NO: 67551 - protein, 9 aa, Homo sapiens
  Table A; Target 67551; HLA-B*46:01; PMEL; ENSG00000185664; TAA
SAFTITDQV

SEQ ID NO: 67552 - protein, 9 aa, Homo sapiens
  Table A; Target 67552; HLA-B*49:01; PMEL; ENSG00000185664; TAA
SAFTITDQV

SEQ ID NO: 67553 - protein, 9 aa, Homo sapiens
  Table A; Target 67553; HLA-B*51:01; PMEL; ENSG00000185664; TAA
SAFTITDQV

SEQ ID NO: 67554 - protein, 9 aa, Homo sapiens
  Table A; Target 67554; HLA-B*54:01; PMEL; ENSG00000185664; TAA
SAFTITDQV

SEQ ID NO: 67555 - protein, 9 aa, Homo sapiens
  Table A; Target 67555; HLA-B*55:01; PMEL; ENSG00000185664; TAA
SAFTITDQV

SEQ ID NO: 67556 - protein, 9 aa, Homo sapiens
  Table A; Target 67556; HLA-B*58:01; PMEL; ENSG00000185664; TAA
SAFTITDQV

SEQ ID NO: 67557 - protein, 9 aa, Homo sapiens
  Table A; Target 67557; HLA-C*01:02; PMEL; ENSG00000185664; TAA
SAFTITDQV

SEQ ID NO: 67558 - protein, 9 aa, Homo sapiens
  Table A; Target 67558; HLA-C*02:02; PMEL; ENSG00000185664; TAA
SAFTITDQV

SEQ ID NO: 67559 - protein, 9 aa, Homo sapiens
  Table A; Target 67559; HLA-C*03:03; PMEL; ENSG00000185664; TAA
SAFTITDQV

SEQ ID NO: 67560 - protein, 9 aa, Homo sapiens
  Table A; Target 67560; HLA-C*05:01; PMEL; ENSG00000185664; TAA
SAFTITDQV

SEQ ID NO: 67561 - protein, 9 aa, Homo sapiens
  Table A; Target 67561; HLA-C*06:02; PMEL; ENSG00000185664; TAA
SAFTITDQV

SEQ ID NO: 67562 - protein, 9 aa, Homo sapiens
  Table A; Target 67562; HLA-C*07:06; PMEL; ENSG00000185664; TAA
SAFTITDQV

SEQ ID NO: 67563 - protein, 9 aa, Homo sapiens
  Table A; Target 67563; HLA-C*12:03; PMEL; ENSG00000185664; TAA
SAFTITDQV

SEQ ID NO: 67564 - protein, 9 aa, Homo sapiens
  Table A; Target 67564; HLA-C*16:02; PMEL; ENSG00000185664; TAA
SAFTITDQV

SEQ ID NO: 67565 - protein, 9 aa, Homo sapiens
  Table A; Target 67565; HLA-C*16:04; PMEL; ENSG00000185664; TAA
SAFTITDQV

SEQ ID NO: 67566 - protein, 11 aa, Homo sapiens
  Table A; Target 67566; HLA-A*23:01; PMEL; ENSG00000185664; TAA
SAFTITDQVPF

SEQ ID NO: 67567 - protein, 11 aa, Homo sapiens
  Table A; Target 67567; HLA-A*31:01; PMEL; ENSG00000185664; TAA
SAFTITDQVPF

SEQ ID NO: 67568 - protein, 11 aa, Homo sapiens
  Table A; Target 67568; HLA-A*68:02; PMEL; ENSG00000185664; TAA
SAFTITDQVPF

SEQ ID NO: 67569 - protein, 11 aa, Homo sapiens
  Table A; Target 67569; HLA-B*35:01; PMEL; ENSG00000185664; TAA
SAFTITDQVPF

SEQ ID NO: 67570 - protein, 11 aa, Homo sapiens
  Table A; Target 67570; HLA-B*54:01; PMEL; ENSG00000185664; TAA
SAFTITDQVPF

SEQ ID NO: 67571 - protein, 11 aa, Homo sapiens
  Table A; Target 67571; HLA-B*57:01; PMEL; ENSG00000185664; TAA
SAFTITDQVPF

SEQ ID NO: 67572 - protein, 11 aa, Homo sapiens
  Table A; Target 67572; HLA-C*02:02; PMEL; ENSG00000185664; TAA
SAFTITDQVPF

SEQ ID NO: 67573 - protein, 11 aa, Homo sapiens
  Table A; Target 67573; HLA-C*07:01; PMEL; ENSG00000185664; TAA
SAFTITDQVPF

SEQ ID NO: 67574 - protein, 11 aa, Homo sapiens
  Table A; Target 67574; HLA-C*16:04; PMEL; ENSG00000185664; TAA
SAFTITDQVPF

SEQ ID NO: 67575 - protein, 10 aa, Homo sapiens
  Table A; Target 67575; HLA-C*01:02; PMEL; ENSG00000185664; TAA
SCPIGENSPL

SEQ ID NO: 67576 - protein, 8 aa, Homo sapiens
  Table A; Target 67576; HLA-A*30:01; PMEL; ENSG00000185664; TAA
SEVMGTTL

SEQ ID NO: 67577 - protein, 8 aa, Homo sapiens
  Table A; Target 67577; HLA-B*15:03; PMEL; ENSG00000185664; TAA
SEVMGTTL

SEQ ID NO: 67578 - protein, 8 aa, Homo sapiens
  Table A; Target 67578; HLA-B*18:01; PMEL; ENSG00000185664; TAA
SEVMGTTL

SEQ ID NO: 67579 - protein, 8 aa, Homo sapiens
  Table A; Target 67579; HLA-B*27:02; PMEL; ENSG00000185664; TAA
SEVMGTTL

SEQ ID NO: 67580 - protein, 8 aa, Homo sapiens
  Table A; Target 67580; HLA-B*37:01; PMEL; ENSG00000185664; TAA
SEVMGTTL

SEQ ID NO: 67581 - protein, 8 aa, Homo sapiens
  Table A; Target 67581; HLA-B*39:01; PMEL; ENSG00000185664; TAA
SEVMGTTL

SEQ ID NO: 67582 - protein, 8 aa, Homo sapiens
  Table A; Target 67582; HLA-B*40:01; PMEL; ENSG00000185664; TAA
SEVMGTTL

SEQ ID NO: 67583 - protein, 8 aa, Homo sapiens
  Table A; Target 67583; HLA-B*40:02; PMEL; ENSG00000185664; TAA
SEVMGTTL

SEQ ID NO: 67584 - protein, 8 aa, Homo sapiens
  Table A; Target 67584; HLA-B*44:02; PMEL; ENSG00000185664; TAA
SEVMGTTL

SEQ ID NO: 67585 - protein, 8 aa, Homo sapiens
  Table A; Target 67585; HLA-B*44:03; PMEL; ENSG00000185664; TAA
SEVMGTTL

SEQ ID NO: 67586 - protein, 8 aa, Homo sapiens
  Table A; Target 67586; HLA-B*49:01; PMEL; ENSG00000185664; TAA
SEVMGTTL

SEQ ID NO: 67587 - protein, 8 aa, Homo sapiens
  Table A; Target 67587; HLA-C*07:04; PMEL; ENSG00000185664; TAA
SEVMGTTL

SEQ ID NO: 67588 - protein, 8 aa, Homo sapiens
  Table A; Target 67588; HLA-C*16:04; PMEL; ENSG00000185664; TAA
SEVMGTTL

SEQ ID NO: 67589 - protein, 9 aa, Homo sapiens
  Table A; Target 67589; HLA-A*30:01; PMEL; ENSG00000185664; TAA
SEVMGTTLA

SEQ ID NO: 67590 - protein, 9 aa, Homo sapiens
  Table A; Target 67590; HLA-B*40:01; PMEL; ENSG00000185664; TAA
SEVMGTTLA

SEQ ID NO: 67591 - protein, 9 aa, Homo sapiens
  Table A; Target 67591; HLA-B*40:02; PMEL; ENSG00000185664; TAA
SEVMGTTLA

SEQ ID NO: 67592 - protein, 9 aa, Homo sapiens
  Table A; Target 67592; HLA-B*49:01; PMEL; ENSG00000185664; TAA
SEVMGTTLA

SEQ ID NO: 67593 - protein, 11 aa, Homo sapiens
  Table A; Target 67593; HLA-A*30:01; PMEL; ENSG00000185664; TAA
SEVMGTTLAEM

SEQ ID NO: 67594 - protein, 11 aa, Homo sapiens
  Table A; Target 67594; HLA-B*40:01; PMEL; ENSG00000185664; TAA
SEVMGTTLAEM

SEQ ID NO: 67595 - protein, 11 aa, Homo sapiens
  Table A; Target 67595; HLA-B*40:02; PMEL; ENSG00000185664; TAA
SEVMGTTLAEM

SEQ ID NO: 67596 - protein, 11 aa, Homo sapiens
  Table A; Target 67596; HLA-B*44:03; PMEL; ENSG00000185664; TAA
SEVMGTTLAEM

SEQ ID NO: 67597 - protein, 8 aa, Homo sapiens
  Table A; Target 67597; HLA-A*23:01; PMEL; ENSG00000185664; TAA
SFSIALNF

SEQ ID NO: 67598 - protein, 8 aa, Homo sapiens
  Table A; Target 67598; HLA-C*14:02; PMEL; ENSG00000185664; TAA
SFSIALNF

SEQ ID NO: 67599 - protein, 9 aa, Homo sapiens
  Table A; Target 67599; HLA-A*24:02; PMEL; ENSG00000185664; TAA
SFVYVWKTW

SEQ ID NO: 67600 - protein, 9 aa, Homo sapiens
  Table A; Target 67600; HLA-B*57:01; PMEL; ENSG00000185664; TAA
SFVYVWKTW

SEQ ID NO: 67601 - protein, 9 aa, Homo sapiens
  Table A; Target 67601; HLA-B*35:03; PMEL; ENSG00000185664; TAA
SGEGDAFEL

SEQ ID NO: 67602 - protein, 9 aa, Homo sapiens
  Table A; Target 67602; HLA-A*31:01; PMEL; ENSG00000185664; TAA
SGLSIGTGR

SEQ ID NO: 67603 - protein, 9 aa, Homo sapiens
  Table A; Target 67603; HLA-A*33:01; PMEL; ENSG00000185664; TAA
SGLSIGTGR

SEQ ID NO: 67604 - protein, 9 aa, Homo sapiens
  Table A; Target 67604; HLA-A*33:03; PMEL; ENSG00000185664; TAA
SGLSIGTGR

SEQ ID NO: 67605 - protein, 9 aa, Homo sapiens
  Table A; Target 67605; HLA-A*68:01; PMEL; ENSG00000185664; TAA
SGLSIGTGR

SEQ ID NO: 67606 - protein, 9 aa, Homo sapiens
  Table A; Target 67606; HLA-C*07:06; PMEL; ENSG00000185664; TAA
SGLSIGTGR

SEQ ID NO: 67607 - protein, 9 aa, Homo sapiens
  Table A; Target 67607; HLA-A*30:01; PMEL; ENSG00000185664; TAA
SGTLISRAL

SEQ ID NO: 67608 - protein, 9 aa, Homo sapiens
  Table A; Target 67608; HLA-B*07:02; PMEL; ENSG00000185664; TAA
SGTLISRAL

SEQ ID NO: 67609 - protein, 9 aa, Homo sapiens
  Table A; Target 67609; HLA-B*08:01; PMEL; ENSG00000185664; TAA
SGTLISRAL

SEQ ID NO: 67610 - protein, 9 aa, Homo sapiens
  Table A; Target 67610; HLA-B*15:03; PMEL; ENSG00000185664; TAA
SGTLISRAL

SEQ ID NO: 67611 - protein, 9 aa, Homo sapiens
  Table A; Target 67611; HLA-C*01:02; PMEL; ENSG00000185664; TAA
SGTLISRAL

SEQ ID NO: 67612 - protein, 9 aa, Homo sapiens
  Table A; Target 67612; HLA-C*03:03; PMEL; ENSG00000185664; TAA
SGTLISRAL

SEQ ID NO: 67613 - protein, 9 aa, Homo sapiens
  Table A; Target 67613; HLA-C*03:04; PMEL; ENSG00000185664; TAA
SGTLISRAL

SEQ ID NO: 67614 - protein, 9 aa, Homo sapiens
  Table A; Target 67614; HLA-C*06:02; PMEL; ENSG00000185664; TAA
SGTLISRAL

SEQ ID NO: 67615 - protein, 9 aa, Homo sapiens
  Table A; Target 67615; HLA-C*07:02; PMEL; ENSG00000185664; TAA
SGTLISRAL

SEQ ID NO: 67616 - protein, 9 aa, Homo sapiens
  Table A; Target 67616; HLA-C*14:02; PMEL; ENSG00000185664; TAA
SGTLISRAL

SEQ ID NO: 67617 - protein, 9 aa, Homo sapiens
  Table A; Target 67617; HLA-C*16:01; PMEL; ENSG00000185664; TAA
SGTLISRAL

SEQ ID NO: 67618 - protein, 9 aa, Homo sapiens
  Table A; Target 67618; HLA-C*16:02; PMEL; ENSG00000185664; TAA
SGTLISRAL

SEQ ID NO: 67619 - protein, 11 aa, Homo sapiens
  Table A; Target 67619; HLA-A*03:01; PMEL; ENSG00000185664; TAA
SIALNFPGSQK

SEQ ID NO: 67620 - protein, 11 aa, Homo sapiens
  Table A; Target 67620; HLA-A*03:02; PMEL; ENSG00000185664; TAA
SIALNFPGSQK

SEQ ID NO: 67621 - protein, 11 aa, Homo sapiens
  Table A; Target 67621; HLA-A*11:01; PMEL; ENSG00000185664; TAA
SIALNFPGSQK

SEQ ID NO: 67622 - protein, 11 aa, Homo sapiens
  Table A; Target 67622; HLA-A*68:01; PMEL; ENSG00000185664; TAA
SIALNFPGSQK

SEQ ID NO: 67623 - protein, 11 aa, Homo sapiens
  Table A; Target 67623; HLA-C*07:06; PMEL; ENSG00000185664; TAA
SIALNFPGSQK

SEQ ID NO: 67624 - protein, 8 aa, Homo sapiens
  Table A; Target 67624; HLA-B*07:02; PMEL; ENSG00000185664; TAA
SIGTGRAM

SEQ ID NO: 67625 - protein, 8 aa, Homo sapiens
  Table A; Target 67625; HLA-B*08:01; PMEL; ENSG00000185664; TAA
SIGTGRAM

SEQ ID NO: 67626 - protein, 8 aa, Homo sapiens
  Table A; Target 67626; HLA-C*01:02; PMEL; ENSG00000185664; TAA
SIGTGRAM

SEQ ID NO: 67627 - protein, 8 aa, Homo sapiens
  Table A; Target 67627; HLA-C*03:03; PMEL; ENSG00000185664; TAA
SIGTGRAM

SEQ ID NO: 67628 - protein, 8 aa, Homo sapiens
  Table A; Target 67628; HLA-C*14:02; PMEL; ENSG00000185664; TAA
SIGTGRAM

SEQ ID NO: 67629 - protein, 8 aa, Homo sapiens
  Table A; Target 67629; HLA-C*16:01; PMEL; ENSG00000185664; TAA
SIGTGRAM

SEQ ID NO: 67630 - protein, 9 aa, Homo sapiens
  Table A; Target 67630; HLA-B*07:02; PMEL; ENSG00000185664; TAA
SIGTGRAML

SEQ ID NO: 67631 - protein, 9 aa, Homo sapiens
  Table A; Target 67631; HLA-C*01:02; PMEL; ENSG00000185664; TAA
SIGTGRAML

SEQ ID NO: 67632 - protein, 9 aa, Homo sapiens
  Table A; Target 67632; HLA-C*07:02; PMEL; ENSG00000185664; TAA
SIGTGRAML

SEQ ID NO: 67633 - protein, 8 aa, Homo sapiens
  Table A; Target 67633; HLA-B*13:02; PMEL; ENSG00000185664; TAA
SIMSTESI

SEQ ID NO: 67634 - protein, 9 aa, Homo sapiens
  Table A; Target 67634; HLA-C*01:02; PMEL; ENSG00000185664; TAA
SITGSLGPL

SEQ ID NO: 67635 - protein, 8 aa, Homo sapiens
  Table A; Target 67635; HLA-A*02:01; PMEL; ENSG00000185664; TAA
SLADTNSL

SEQ ID NO: 67636 - protein, 8 aa, Homo sapiens
  Table A; Target 67636; HLA-A*02:03; PMEL; ENSG00000185664; TAA
SLADTNSL

SEQ ID NO: 67637 - protein, 8 aa, Homo sapiens
  Table A; Target 67637; HLA-B*37:01; PMEL; ENSG00000185664; TAA
SLADTNSL

SEQ ID NO: 67638 - protein, 8 aa, Homo sapiens
  Table A; Target 67638; HLA-C*01:02; PMEL; ENSG00000185664; TAA
SLADTNSL

SEQ ID NO: 67639 - protein, 8 aa, Homo sapiens
  Table A; Target 67639; HLA-C*14:02; PMEL; ENSG00000185664; TAA
SLADTNSL

SEQ ID NO: 67640 - protein, 9 aa, Homo sapiens
  Table A; Target 67640; HLA-A*02:01; PMEL; ENSG00000185664; TAA
SLADTNSLA

SEQ ID NO: 67641 - protein, 9 aa, Homo sapiens
  Table A; Target 67641; HLA-A*02:03; PMEL; ENSG00000185664; TAA
SLADTNSLA

SEQ ID NO: 67642 - protein, 9 aa, Homo sapiens
  Table A; Target 67642; HLA-B*13:02; PMEL; ENSG00000185664; TAA
SLADTNSLA

SEQ ID NO: 67643 - protein, 9 aa, Homo sapiens
  Table A; Target 67643; HLA-B*55:01; PMEL; ENSG00000185664; TAA
SLADTNSLA

SEQ ID NO: 67644 - protein, 10 aa, Homo sapiens
  Table A; Target 67644; HLA-A*02:01; PMEL; ENSG00000185664; TAA
SLADTNSLAV

SEQ ID NO: 67645 - protein, 10 aa, Homo sapiens
  Table A; Target 67645; HLA-A*02:03; PMEL; ENSG00000185664; TAA
SLADTNSLAV

SEQ ID NO: 67646 - protein, 10 aa, Homo sapiens
  Table A; Target 67646; HLA-B*13:02; PMEL; ENSG00000185664; TAA
SLADTNSLAV

SEQ ID NO: 67647 - protein, 10 aa, Homo sapiens
  Table A; Target 67647; HLA-B*55:01; PMEL; ENSG00000185664; TAA
SLADTNSLAV

SEQ ID NO: 67648 - protein, 10 aa, Homo sapiens
  Table A; Target 67648; HLA-C*01:02; PMEL; ENSG00000185664; TAA
SLADTNSLAV

SEQ ID NO: 67649 - protein, 11 aa, Homo sapiens
  Table A; Target 67649; HLA-A*02:01; PMEL; ENSG00000185664; TAA
SLADTNSLAVV

SEQ ID NO: 67650 - protein, 11 aa, Homo sapiens
  Table A; Target 67650; HLA-A*02:03; PMEL; ENSG00000185664; TAA
SLADTNSLAVV

SEQ ID NO: 67651 - protein, 11 aa, Homo sapiens
  Table A; Target 67651; HLA-A*02:04; PMEL; ENSG00000185664; TAA
SLADTNSLAVV

SEQ ID NO: 67652 - protein, 11 aa, Homo sapiens
  Table A; Target 67652; HLA-A*02:07; PMEL; ENSG00000185664; TAA
SLADTNSLAVV

SEQ ID NO: 67653 - protein, 11 aa, Homo sapiens
  Table A; Target 67653; HLA-A*68:02; PMEL; ENSG00000185664; TAA
SLADTNSLAVV

SEQ ID NO: 67654 - protein, 11 aa, Homo sapiens
  Table A; Target 67654; HLA-B*55:01; PMEL; ENSG00000185664; TAA
SLADTNSLAVV

SEQ ID NO: 67655 - protein, 11 aa, Homo sapiens
  Table A; Target 67655; HLA-C*01:02; PMEL; ENSG00000185664; TAA
SLADTNSLAVV

SEQ ID NO: 67656 - protein, 9 aa, Homo sapiens
  Table A; Target 67656; HLA-A*02:01; PMEL; ENSG00000185664; TAA
SLAVVSTQL

SEQ ID NO: 67657 - protein, 9 aa, Homo sapiens
  Table A; Target 67657; HLA-A*02:03; PMEL; ENSG00000185664; TAA
SLAVVSTQL

SEQ ID NO: 67658 - protein, 9 aa, Homo sapiens
  Table A; Target 67658; HLA-A*02:04; PMEL; ENSG00000185664; TAA
SLAVVSTQL

SEQ ID NO: 67659 - protein, 9 aa, Homo sapiens
  Table A; Target 67659; HLA-A*02:07; PMEL; ENSG00000185664; TAA
SLAVVSTQL

SEQ ID NO: 67660 - protein, 9 aa, Homo sapiens
  Table A; Target 67660; HLA-A*03:01; PMEL; ENSG00000185664; TAA
SLAVVSTQL

SEQ ID NO: 67661 - protein, 9 aa, Homo sapiens
  Table A; Target 67661; HLA-A*03:02; PMEL; ENSG00000185664; TAA
SLAVVSTQL

SEQ ID NO: 67662 - protein, 9 aa, Homo sapiens
  Table A; Target 67662; HLA-A*23:01; PMEL; ENSG00000185664; TAA
SLAVVSTQL

SEQ ID NO: 67663 - protein, 9 aa, Homo sapiens
  Table A; Target 67663; HLA-A*24:02; PMEL; ENSG00000185664; TAA
SLAVVSTQL

SEQ ID NO: 67664 - protein, 9 aa, Homo sapiens
  Table A; Target 67664; HLA-A*30:01; PMEL; ENSG00000185664; TAA
SLAVVSTQL

SEQ ID NO: 67665 - protein, 9 aa, Homo sapiens
  Table A; Target 67665; HLA-A*32:01; PMEL; ENSG00000185664; TAA
SLAVVSTQL

SEQ ID NO: 67666 - protein, 9 aa, Homo sapiens
  Table A; Target 67666; HLA-A*68:02; PMEL; ENSG00000185664; TAA
SLAVVSTQL

SEQ ID NO: 67667 - protein, 9 aa, Homo sapiens
  Table A; Target 67667; HLA-B*07:02; PMEL; ENSG00000185664; TAA
SLAVVSTQL

SEQ ID NO: 67668 - protein, 9 aa, Homo sapiens
  Table A; Target 67668; HLA-B*08:01; PMEL; ENSG00000185664; TAA
SLAVVSTQL

SEQ ID NO: 67669 - protein, 9 aa, Homo sapiens
  Table A; Target 67669; HLA-B*13:02; PMEL; ENSG00000185664; TAA
SLAVVSTQL

SEQ ID NO: 67670 - protein, 9 aa, Homo sapiens
  Table A; Target 67670; HLA-B*15:01; PMEL; ENSG00000185664; TAA
SLAVVSTQL

SEQ ID NO: 67671 - protein, 9 aa, Homo sapiens
  Table A; Target 67671; HLA-B*15:03; PMEL; ENSG00000185664; TAA
SLAVVSTQL

SEQ ID NO: 67672 - protein, 9 aa, Homo sapiens
  Table A; Target 67672; HLA-B*27:05; PMEL; ENSG00000185664; TAA
SLAVVSTQL

SEQ ID NO: 67673 - protein, 9 aa, Homo sapiens
  Table A; Target 67673; HLA-B*35:03; PMEL; ENSG00000185664; TAA
SLAVVSTQL

SEQ ID NO: 67674 - protein, 9 aa, Homo sapiens
  Table A; Target 67674; HLA-B*37:01; PMEL; ENSG00000185664; TAA
SLAVVSTQL

SEQ ID NO: 67675 - protein, 9 aa, Homo sapiens
  Table A; Target 67675; HLA-B*38:01; PMEL; ENSG00000185664; TAA
SLAVVSTQL

SEQ ID NO: 67676 - protein, 9 aa, Homo sapiens
  Table A; Target 67676; HLA-B*39:01; PMEL; ENSG00000185664; TAA
SLAVVSTQL

SEQ ID NO: 67677 - protein, 9 aa, Homo sapiens
  Table A; Target 67677; HLA-B*40:01; PMEL; ENSG00000185664; TAA
SLAVVSTQL

SEQ ID NO: 67678 - protein, 9 aa, Homo sapiens
  Table A; Target 67678; HLA-B*40:02; PMEL; ENSG00000185664; TAA
SLAVVSTQL

SEQ ID NO: 67679 - protein, 9 aa, Homo sapiens
  Table A; Target 67679; HLA-B*46:01; PMEL; ENSG00000185664; TAA
SLAVVSTQL

SEQ ID NO: 67680 - protein, 9 aa, Homo sapiens
  Table A; Target 67680; HLA-B*55:01; PMEL; ENSG00000185664; TAA
SLAVVSTQL

SEQ ID NO: 67681 - protein, 9 aa, Homo sapiens
  Table A; Target 67681; HLA-C*01:02; PMEL; ENSG00000185664; TAA
SLAVVSTQL

SEQ ID NO: 67682 - protein, 9 aa, Homo sapiens
  Table A; Target 67682; HLA-C*02:02; PMEL; ENSG00000185664; TAA
SLAVVSTQL

SEQ ID NO: 67683 - protein, 9 aa, Homo sapiens
  Table A; Target 67683; HLA-C*03:03; PMEL; ENSG00000185664; TAA
SLAVVSTQL

SEQ ID NO: 67684 - protein, 9 aa, Homo sapiens
  Table A; Target 67684; HLA-C*04:01; PMEL; ENSG00000185664; TAA
SLAVVSTQL

SEQ ID NO: 67685 - protein, 9 aa, Homo sapiens
  Table A; Target 67685; HLA-C*06:02; PMEL; ENSG00000185664; TAA
SLAVVSTQL

SEQ ID NO: 67686 - protein, 9 aa, Homo sapiens
  Table A; Target 67686; HLA-C*07:02; PMEL; ENSG00000185664; TAA
SLAVVSTQL

SEQ ID NO: 67687 - protein, 9 aa, Homo sapiens
  Table A; Target 67687; HLA-C*07:04; PMEL; ENSG00000185664; TAA
SLAVVSTQL

SEQ ID NO: 67688 - protein, 9 aa, Homo sapiens
  Table A; Target 67688; HLA-C*07:06; PMEL; ENSG00000185664; TAA
SLAVVSTQL

SEQ ID NO: 67689 - protein, 9 aa, Homo sapiens
  Table A; Target 67689; HLA-C*14:02; PMEL; ENSG00000185664; TAA
SLAVVSTQL

SEQ ID NO: 67690 - protein, 9 aa, Homo sapiens
  Table A; Target 67690; HLA-C*16:01; PMEL; ENSG00000185664; TAA
SLAVVSTQL

SEQ ID NO: 67691 - protein, 10 aa, Homo sapiens
  Table A; Target 67691; HLA-A*02:03; PMEL; ENSG00000185664; TAA
SLAVVSTQLI

SEQ ID NO: 67692 - protein, 8 aa, Homo sapiens
  Table A; Target 67692; HLA-C*04:01; PMEL; ENSG00000185664; TAA
SNDGPTLI

SEQ ID NO: 67693 - protein, 8 aa, Homo sapiens
  Table A; Target 67693; HLA-C*05:01; PMEL; ENSG00000185664; TAA
SNDGPTLI

SEQ ID NO: 67694 - protein, 9 aa, Homo sapiens
  Table A; Target 67694; HLA-B*27:05; PMEL; ENSG00000185664; TAA
SNDGPTLIG

SEQ ID NO: 67695 - protein, 8 aa, Homo sapiens
  Table A; Target 67695; HLA-B*07:02; PMEL; ENSG00000185664; TAA
SPACQLVL

SEQ ID NO: 67696 - protein, 10 aa, Homo sapiens
  Table A; Target 67696; HLA-A*68:01; PMEL; ENSG00000185664; TAA
SPGCQPPAQR

SEQ ID NO: 67697 - protein, 10 aa, Homo sapiens
  Table A; Target 67697; HLA-C*07:06; PMEL; ENSG00000185664; TAA
SPGCQPPAQR

SEQ ID NO: 67698 - protein, 9 aa, Homo sapiens
  Table A; Target 67698; HLA-A*02:01; PMEL; ENSG00000185664; TAA
SPLLSGQQV

SEQ ID NO: 67699 - protein, 9 aa, Homo sapiens
  Table A; Target 67699; HLA-B*07:02; PMEL; ENSG00000185664; TAA
SPLLSGQQV

SEQ ID NO: 67700 - protein, 9 aa, Homo sapiens
  Table A; Target 67700; HLA-B*08:01; PMEL; ENSG00000185664; TAA
SPLLSGQQV

SEQ ID NO: 67701 - protein, 9 aa, Homo sapiens
  Table A; Target 67701; HLA-B*13:02; PMEL; ENSG00000185664; TAA
SPLLSGQQV

SEQ ID NO: 67702 - protein, 9 aa, Homo sapiens
  Table A; Target 67702; HLA-B*35:01; PMEL; ENSG00000185664; TAA
SPLLSGQQV

SEQ ID NO: 67703 - protein, 9 aa, Homo sapiens
  Table A; Target 67703; HLA-B*35:03; PMEL; ENSG00000185664; TAA
SPLLSGQQV

SEQ ID NO: 67704 - protein, 9 aa, Homo sapiens
  Table A; Target 67704; HLA-B*38:01; PMEL; ENSG00000185664; TAA
SPLLSGQQV

SEQ ID NO: 67705 - protein, 9 aa, Homo sapiens
  Table A; Target 67705; HLA-B*40:02; PMEL; ENSG00000185664; TAA
SPLLSGQQV

SEQ ID NO: 67706 - protein, 9 aa, Homo sapiens
  Table A; Target 67706; HLA-B*51:01; PMEL; ENSG00000185664; TAA
SPLLSGQQV

SEQ ID NO: 67707 - protein, 9 aa, Homo sapiens
  Table A; Target 67707; HLA-B*54:01; PMEL; ENSG00000185664; TAA
SPLLSGQQV

SEQ ID NO: 67708 - protein, 9 aa, Homo sapiens
  Table A; Target 67708; HLA-B*55:01; PMEL; ENSG00000185664; TAA
SPLLSGQQV

SEQ ID NO: 67709 - protein, 9 aa, Homo sapiens
  Table A; Target 67709; HLA-B*56:01; PMEL; ENSG00000185664; TAA
SPLLSGQQV

SEQ ID NO: 67710 - protein, 9 aa, Homo sapiens
  Table A; Target 67710; HLA-C*01:02; PMEL; ENSG00000185664; TAA
SPLLSGQQV

SEQ ID NO: 67711 - protein, 9 aa, Homo sapiens
  Table A; Target 67711; HLA-C*03:03; PMEL; ENSG00000185664; TAA
SPLLSGQQV

SEQ ID NO: 67712 - protein, 9 aa, Homo sapiens
  Table A; Target 67712; HLA-C*03:04; PMEL; ENSG00000185664; TAA
SPLLSGQQV

SEQ ID NO: 67713 - protein, 9 aa, Homo sapiens
  Table A; Target 67713; HLA-C*04:01; PMEL; ENSG00000185664; TAA
SPLLSGQQV

SEQ ID NO: 67714 - protein, 9 aa, Homo sapiens
  Table A; Target 67714; HLA-C*06:02; PMEL; ENSG00000185664; TAA
SPLLSGQQV

SEQ ID NO: 67715 - protein, 9 aa, Homo sapiens
  Table A; Target 67715; HLA-C*07:01; PMEL; ENSG00000185664; TAA
SPLLSGQQV

SEQ ID NO: 67716 - protein, 9 aa, Homo sapiens
  Table A; Target 67716; HLA-C*07:02; PMEL; ENSG00000185664; TAA
SPLLSGQQV

SEQ ID NO: 67717 - protein, 9 aa, Homo sapiens
  Table A; Target 67717; HLA-C*14:02; PMEL; ENSG00000185664; TAA
SPLLSGQQV

SEQ ID NO: 67718 - protein, 9 aa, Homo sapiens
  Table A; Target 67718; HLA-B*56:01; PMEL; ENSG00000185664; TAA
SPVPGTTDG

SEQ ID NO: 67719 - protein, 11 aa, Homo sapiens
  Table A; Target 67719; HLA-A*68:01; PMEL; ENSG00000185664; TAA
SPVPGTTDGHR

SEQ ID NO: 67720 - protein, 8 aa, Homo sapiens
  Table A; Target 67720; HLA-A*30:02; PMEL; ENSG00000185664; TAA
SQKRSFVY

SEQ ID NO: 67721 - protein, 8 aa, Homo sapiens
  Table A; Target 67721; HLA-B*08:01; PMEL; ENSG00000185664; TAA
SQKRSFVY

SEQ ID NO: 67722 - protein, 8 aa, Homo sapiens
  Table A; Target 67722; HLA-B*15:01; PMEL; ENSG00000185664; TAA
SQKRSFVY

SEQ ID NO: 67723 - protein, 8 aa, Homo sapiens
  Table A; Target 67723; HLA-B*15:03; PMEL; ENSG00000185664; TAA
SQKRSFVY

SEQ ID NO: 67724 - protein, 8 aa, Homo sapiens
  Table A; Target 67724; HLA-C*07:01; PMEL; ENSG00000185664; TAA
SQKRSFVY

SEQ ID NO: 67725 - protein, 8 aa, Homo sapiens
  Table A; Target 67725; HLA-C*07:04; PMEL; ENSG00000185664; TAA
SQKRSFVY

SEQ ID NO: 67726 - protein, 9 aa, Homo sapiens
  Table A; Target 67726; HLA-A*02:03; PMEL; ENSG00000185664; TAA
SQKRSFVYV

SEQ ID NO: 67727 - protein, 11 aa, Homo sapiens
  Table A; Target 67727; HLA-A*30:01; PMEL; ENSG00000185664; TAA
SQKVLPDGQVI

SEQ ID NO: 67728 - protein, 9 aa, Homo sapiens
  Table A; Target 67728; HLA-B*13:02; PMEL; ENSG00000185664; TAA
SQVWGGQPV

SEQ ID NO: 67729 - protein, 10 aa, Homo sapiens
  Table A; Target 67729; HLA-A*30:02; PMEL; ENSG00000185664; TAA
SQVWGGQPVY

SEQ ID NO: 67730 - protein, 10 aa, Homo sapiens
  Table A; Target 67730; HLA-A*32:01; PMEL; ENSG00000185664; TAA
SQVWGGQPVY

SEQ ID NO: 67731 - protein, 10 aa, Homo sapiens
  Table A; Target 67731; HLA-B*15:01; PMEL; ENSG00000185664; TAA
SQVWGGQPVY

SEQ ID NO: 67732 - protein, 10 aa, Homo sapiens
  Table A; Target 67732; HLA-B*15:03; PMEL; ENSG00000185664; TAA
SQVWGGQPVY

SEQ ID NO: 67733 - protein, 10 aa, Homo sapiens
  Table A; Target 67733; HLA-B*27:05; PMEL; ENSG00000185664; TAA
SQVWGGQPVY

SEQ ID NO: 67734 - protein, 10 aa, Homo sapiens
  Table A; Target 67734; HLA-B*39:01; PMEL; ENSG00000185664; TAA
SQVWGGQPVY

SEQ ID NO: 67735 - protein, 10 aa, Homo sapiens
  Table A; Target 67735; HLA-C*07:04; PMEL; ENSG00000185664; TAA
SQVWGGQPVY

SEQ ID NO: 67736 - protein, 10 aa, Homo sapiens
  Table A; Target 67736; HLA-C*16:04; PMEL; ENSG00000185664; TAA
SQVWGGQPVY

SEQ ID NO: 67737 - protein, 8 aa, Homo sapiens
  Table A; Target 67737; HLA-B*27:05; PMEL; ENSG00000185664; TAA
SRALVVTH

SEQ ID NO: 67738 - protein, 9 aa, Homo sapiens
  Table A; Target 67738; HLA-B*27:05; PMEL; ENSG00000185664; TAA
SRALVVTHT

SEQ ID NO: 67739 - protein, 9 aa, Homo sapiens
  Table A; Target 67739; HLA-C*06:02; PMEL; ENSG00000185664; TAA
SRALVVTHT

SEQ ID NO: 67740 - protein, 10 aa, Homo sapiens
  Table A; Target 67740; HLA-A*30:02; PMEL; ENSG00000185664; TAA
SRALVVTHTY

SEQ ID NO: 67741 - protein, 10 aa, Homo sapiens
  Table A; Target 67741; HLA-B*27:02; PMEL; ENSG00000185664; TAA
SRALVVTHTY

SEQ ID NO: 67742 - protein, 10 aa, Homo sapiens
  Table A; Target 67742; HLA-B*27:05; PMEL; ENSG00000185664; TAA
SRALVVTHTY

SEQ ID NO: 67743 - protein, 10 aa, Homo sapiens
  Table A; Target 67743; HLA-B*44:02; PMEL; ENSG00000185664; TAA
SRALVVTHTY

SEQ ID NO: 67744 - protein, 10 aa, Homo sapiens
  Table A; Target 67744; HLA-B*44:03; PMEL; ENSG00000185664; TAA
SRALVVTHTY

SEQ ID NO: 67745 - protein, 10 aa, Homo sapiens
  Table A; Target 67745; HLA-C*16:04; PMEL; ENSG00000185664; TAA
SRALVVTHTY

SEQ ID NO: 67746 - protein, 9 aa, Homo sapiens
  Table A; Target 67746; HLA-B*27:05; PMEL; ENSG00000185664; TAA
SRSYVPLAH

SEQ ID NO: 67747 - protein, 9 aa, Homo sapiens
  Table A; Target 67747; HLA-C*06:02; PMEL; ENSG00000185664; TAA
SRSYVPLAH

SEQ ID NO: 67748 - protein, 10 aa, Homo sapiens
  Table A; Target 67748; HLA-A*68:02; PMEL; ENSG00000185664; TAA
SSAFTITDQV

SEQ ID NO: 67749 - protein, 8 aa, Homo sapiens
  Table A; Target 67749; HLA-A*11:01; PMEL; ENSG00000185664; TAA
SSGTLISR

SEQ ID NO: 67750 - protein, 8 aa, Homo sapiens
  Table A; Target 67750; HLA-A*31:01; PMEL; ENSG00000185664; TAA
SSGTLISR

SEQ ID NO: 67751 - protein, 8 aa, Homo sapiens
  Table A; Target 67751; HLA-A*33:01; PMEL; ENSG00000185664; TAA
SSGTLISR

SEQ ID NO: 67752 - protein, 8 aa, Homo sapiens
  Table A; Target 67752; HLA-A*33:03; PMEL; ENSG00000185664; TAA
SSGTLISR

SEQ ID NO: 67753 - protein, 8 aa, Homo sapiens
  Table A; Target 67753; HLA-A*68:01; PMEL; ENSG00000185664; TAA
SSGTLISR

SEQ ID NO: 67754 - protein, 8 aa, Homo sapiens
  Table A; Target 67754; HLA-C*07:06; PMEL; ENSG00000185664; TAA
SSGTLISR

SEQ ID NO: 67755 - protein, 9 aa, Homo sapiens
  Table A; Target 67755; HLA-A*25:01; PMEL; ENSG00000185664; TAA
SSIMSTESI

SEQ ID NO: 67756 - protein, 9 aa, Homo sapiens
  Table A; Target 67756; HLA-A*30:01; PMEL; ENSG00000185664; TAA
SSIMSTESI

SEQ ID NO: 67757 - protein, 9 aa, Homo sapiens
  Table A; Target 67757; HLA-B*13:02; PMEL; ENSG00000185664; TAA
SSIMSTESI

SEQ ID NO: 67758 - protein, 9 aa, Homo sapiens
  Table A; Target 67758; HLA-B*40:01; PMEL; ENSG00000185664; TAA
SSIMSTESI

SEQ ID NO: 67759 - protein, 9 aa, Homo sapiens
  Table A; Target 67759; HLA-B*40:02; PMEL; ENSG00000185664; TAA
SSIMSTESI

SEQ ID NO: 67760 - protein, 9 aa, Homo sapiens
  Table A; Target 67760; HLA-B*46:01; PMEL; ENSG00000185664; TAA
SSIMSTESI

SEQ ID NO: 67761 - protein, 9 aa, Homo sapiens
  Table A; Target 67761; HLA-B*49:01; PMEL; ENSG00000185664; TAA
SSIMSTESI

SEQ ID NO: 67762 - protein, 9 aa, Homo sapiens
  Table A; Target 67762; HLA-B*58:01; PMEL; ENSG00000185664; TAA
SSIMSTESI

SEQ ID NO: 67763 - protein, 9 aa, Homo sapiens
  Table A; Target 67763; HLA-C*01:02; PMEL; ENSG00000185664; TAA
SSIMSTESI

SEQ ID NO: 67764 - protein, 9 aa, Homo sapiens
  Table A; Target 67764; HLA-C*03:03; PMEL; ENSG00000185664; TAA
SSIMSTESI

SEQ ID NO: 67765 - protein, 9 aa, Homo sapiens
  Table A; Target 67765; HLA-C*03:04; PMEL; ENSG00000185664; TAA
SSIMSTESI

SEQ ID NO: 67766 - protein, 9 aa, Homo sapiens
  Table A; Target 67766; HLA-C*06:02; PMEL; ENSG00000185664; TAA
SSIMSTESI

SEQ ID NO: 67767 - protein, 9 aa, Homo sapiens
  Table A; Target 67767; HLA-C*14:02; PMEL; ENSG00000185664; TAA
SSIMSTESI

SEQ ID NO: 67768 - protein, 9 aa, Homo sapiens
  Table A; Target 67768; HLA-C*16:04; PMEL; ENSG00000185664; TAA
SSIMSTESI

SEQ ID NO: 67769 - protein, 11 aa, Homo sapiens
  Table A; Target 67769; HLA-A*68:02; PMEL; ENSG00000185664; TAA
SSSAFTITDQV

SEQ ID NO: 67770 - protein, 9 aa, Homo sapiens
  Table A; Target 67770; HLA-A*03:01; PMEL; ENSG00000185664; TAA
STAPVQMPT

SEQ ID NO: 67771 - protein, 9 aa, Homo sapiens
  Table A; Target 67771; HLA-A*03:02; PMEL; ENSG00000185664; TAA
STAPVQMPT

SEQ ID NO: 67772 - protein, 9 aa, Homo sapiens
  Table A; Target 67772; HLA-A*11:01; PMEL; ENSG00000185664; TAA
STAPVQMPT

SEQ ID NO: 67773 - protein, 9 aa, Homo sapiens
  Table A; Target 67773; HLA-A*31:01; PMEL; ENSG00000185664; TAA
STAPVQMPT

SEQ ID NO: 67774 - protein, 9 aa, Homo sapiens
  Table A; Target 67774; HLA-A*68:01; PMEL; ENSG00000185664; TAA
STAPVQMPT

SEQ ID NO: 67775 - protein, 9 aa, Homo sapiens
  Table A; Target 67775; HLA-A*68:02; PMEL; ENSG00000185664; TAA
STAPVQMPT

SEQ ID NO: 67776 - protein, 9 aa, Homo sapiens
  Table A; Target 67776; HLA-B*27:05; PMEL; ENSG00000185664; TAA
STAPVQMPT

SEQ ID NO: 67777 - protein, 9 aa, Homo sapiens
  Table A; Target 67777; HLA-B*40:02; PMEL; ENSG00000185664; TAA
STAPVQMPT

SEQ ID NO: 67778 - protein, 9 aa, Homo sapiens
  Table A; Target 67778; HLA-B*56:01; PMEL; ENSG00000185664; TAA
STAPVQMPT

SEQ ID NO: 67779 - protein, 9 aa, Homo sapiens
  Table A; Target 67779; HLA-B*58:01; PMEL; ENSG00000185664; TAA
STAPVQMPT

SEQ ID NO: 67780 - protein, 9 aa, Homo sapiens
  Table A; Target 67780; HLA-C*03:03; PMEL; ENSG00000185664; TAA
STAPVQMPT

SEQ ID NO: 67781 - protein, 9 aa, Homo sapiens
  Table A; Target 67781; HLA-C*03:04; PMEL; ENSG00000185664; TAA
STAPVQMPT

SEQ ID NO: 67782 - protein, 9 aa, Homo sapiens
  Table A; Target 67782; HLA-C*04:01; PMEL; ENSG00000185664; TAA
STAPVQMPT

SEQ ID NO: 67783 - protein, 9 aa, Homo sapiens
  Table A; Target 67783; HLA-C*06:02; PMEL; ENSG00000185664; TAA
STAPVQMPT

SEQ ID NO: 67784 - protein, 9 aa, Homo sapiens
  Table A; Target 67784; HLA-C*07:01; PMEL; ENSG00000185664; TAA
STAPVQMPT

SEQ ID NO: 67785 - protein, 9 aa, Homo sapiens
  Table A; Target 67785; HLA-C*07:02; PMEL; ENSG00000185664; TAA
STAPVQMPT

SEQ ID NO: 67786 - protein, 9 aa, Homo sapiens
  Table A; Target 67786; HLA-C*07:04; PMEL; ENSG00000185664; TAA
STAPVQMPT

SEQ ID NO: 67787 - protein, 9 aa, Homo sapiens
  Table A; Target 67787; HLA-C*07:06; PMEL; ENSG00000185664; TAA
STAPVQMPT

SEQ ID NO: 67788 - protein, 9 aa, Homo sapiens
  Table A; Target 67788; HLA-C*16:01; PMEL; ENSG00000185664; TAA
STAPVQMPT

SEQ ID NO: 67789 - protein, 9 aa, Homo sapiens
  Table A; Target 67789; HLA-C*16:02; PMEL; ENSG00000185664; TAA
STAPVQMPT

SEQ ID NO: 67790 - protein, 10 aa, Homo sapiens
  Table A; Target 67790; HLA-A*25:01; PMEL; ENSG00000185664; TAA
STAPVQMPTA

SEQ ID NO: 67791 - protein, 10 aa, Homo sapiens
  Table A; Target 67791; HLA-A*68:02; PMEL; ENSG00000185664; TAA
STAPVQMPTA

SEQ ID NO: 67792 - protein, 10 aa, Homo sapiens
  Table A; Target 67792; HLA-B*27:05; PMEL; ENSG00000185664; TAA
STAPVQMPTA

SEQ ID NO: 67793 - protein, 10 aa, Homo sapiens
  Table A; Target 67793; HLA-B*54:01; PMEL; ENSG00000185664; TAA
STAPVQMPTA

SEQ ID NO: 67794 - protein, 10 aa, Homo sapiens
  Table A; Target 67794; HLA-B*56:01; PMEL; ENSG00000185664; TAA
STAPVQMPTA

SEQ ID NO: 67795 - protein, 10 aa, Homo sapiens
  Table A; Target 67795; HLA-C*06:02; PMEL; ENSG00000185664; TAA
STAPVQMPTA

SEQ ID NO: 67796 - protein, 9 aa, Homo sapiens
  Table A; Target 67796; HLA-B*07:02; PMEL; ENSG00000185664; TAA
STESITGSL

SEQ ID NO: 67797 - protein, 9 aa, Homo sapiens
  Table A; Target 67797; HLA-C*01:02; PMEL; ENSG00000185664; TAA
STESITGSL

SEQ ID NO: 67798 - protein, 9 aa, Homo sapiens
  Table A; Target 67798; HLA-C*05:01; PMEL; ENSG00000185664; TAA
STESITGSL

SEQ ID NO: 67799 - protein, 11 aa, Homo sapiens
  Table A; Target 67799; HLA-A*01:01; PMEL; ENSG00000185664; TAA
STESITGSLGP

SEQ ID NO: 67800 - protein, 8 aa, Homo sapiens
  Table A; Target 67800; HLA-A*03:02; PMEL; ENSG00000185664; TAA
STGMTPEK

SEQ ID NO: 67801 - protein, 8 aa, Homo sapiens
  Table A; Target 67801; HLA-A*11:01; PMEL; ENSG00000185664; TAA
STGMTPEK

SEQ ID NO: 67802 - protein, 8 aa, Homo sapiens
  Table A; Target 67802; HLA-B*51:01; PMEL; ENSG00000185664; TAA
STPEATGM

SEQ ID NO: 67803 - protein, 8 aa, Homo sapiens
  Table A; Target 67803; HLA-C*01:02; PMEL; ENSG00000185664; TAA
STPEATGM

SEQ ID NO: 67804 - protein, 8 aa, Homo sapiens
  Table A; Target 67804; HLA-C*04:01; PMEL; ENSG00000185664; TAA
STPEATGM

SEQ ID NO: 67805 - protein, 8 aa, Homo sapiens
  Table A; Target 67805; HLA-C*05:01; PMEL; ENSG00000185664; TAA
STPEATGM

SEQ ID NO: 67806 - protein, 10 aa, Homo sapiens
  Table A; Target 67806; HLA-C*01:02; PMEL; ENSG00000185664; TAA
STPEATGMTP

SEQ ID NO: 67807 - protein, 11 aa, Homo sapiens
  Table A; Target 67807; HLA-B*56:01; PMEL; ENSG00000185664; TAA
STPEATGMTPA

SEQ ID NO: 67808 - protein, 9 aa, Homo sapiens
  Table A; Target 67808; HLA-C*06:02; PMEL; ENSG00000185664; TAA
STQLIMPGQ

SEQ ID NO: 67809 - protein, 9 aa, Homo sapiens
  Table A; Target 67809; HLA-A*02:01; PMEL; ENSG00000185664; TAA
SVQVPTTEV

SEQ ID NO: 67810 - protein, 9 aa, Homo sapiens
  Table A; Target 67810; HLA-A*02:03; PMEL; ENSG00000185664; TAA
SVQVPTTEV

SEQ ID NO: 67811 - protein, 9 aa, Homo sapiens
  Table A; Target 67811; HLA-A*26:01; PMEL; ENSG00000185664; TAA
SVQVPTTEV

SEQ ID NO: 67812 - protein, 9 aa, Homo sapiens
  Table A; Target 67812; HLA-A*32:01; PMEL; ENSG00000185664; TAA
SVQVPTTEV

SEQ ID NO: 67813 - protein, 9 aa, Homo sapiens
  Table A; Target 67813; HLA-B*13:02; PMEL; ENSG00000185664; TAA
SVQVPTTEV

SEQ ID NO: 67814 - protein, 9 aa, Homo sapiens
  Table A; Target 67814; HLA-B*15:01; PMEL; ENSG00000185664; TAA
SVQVPTTEV

SEQ ID NO: 67815 - protein, 9 aa, Homo sapiens
  Table A; Target 67815; HLA-B*46:01; PMEL; ENSG00000185664; TAA
SVQVPTTEV

SEQ ID NO: 67816 - protein, 9 aa, Homo sapiens
  Table A; Target 67816; HLA-B*55:01; PMEL; ENSG00000185664; TAA
SVQVPTTEV

SEQ ID NO: 67817 - protein, 9 aa, Homo sapiens
  Table A; Target 67817; HLA-C*01:02; PMEL; ENSG00000185664; TAA
SVQVPTTEV

SEQ ID NO: 67818 - protein, 9 aa, Homo sapiens
  Table A; Target 67818; HLA-C*03:03; PMEL; ENSG00000185664; TAA
SVQVPTTEV

SEQ ID NO: 67819 - protein, 9 aa, Homo sapiens
  Table A; Target 67819; HLA-C*03:04; PMEL; ENSG00000185664; TAA
SVQVPTTEV

SEQ ID NO: 67820 - protein, 9 aa, Homo sapiens
  Table A; Target 67820; HLA-C*05:01; PMEL; ENSG00000185664; TAA
SVQVPTTEV

SEQ ID NO: 67821 - protein, 9 aa, Homo sapiens
  Table A; Target 67821; HLA-C*14:02; PMEL; ENSG00000185664; TAA
SVQVPTTEV

SEQ ID NO: 67822 - protein, 8 aa, Homo sapiens
  Table A; Target 67822; HLA-B*07:02; PMEL; ENSG00000185664; TAA
SVSQLRAL

SEQ ID NO: 67823 - protein, 8 aa, Homo sapiens
  Table A; Target 67823; HLA-C*01:02; PMEL; ENSG00000185664; TAA
SVSQLRAL

SEQ ID NO: 67824 - protein, 8 aa, Homo sapiens
  Table A; Target 67824; HLA-C*16:01; PMEL; ENSG00000185664; TAA
SVSQLRAL

SEQ ID NO: 67825 - protein, 8 aa, Homo sapiens
  Table A; Target 67825; HLA-A*31:01; PMEL; ENSG00000185664; TAA
SVSVSQLR

SEQ ID NO: 67826 - protein, 8 aa, Homo sapiens
  Table A; Target 67826; HLA-C*07:06; PMEL; ENSG00000185664; TAA
SVSVSQLR

SEQ ID NO: 67827 - protein, 9 aa, Homo sapiens
  Table A; Target 67827; HLA-B*13:02; PMEL; ENSG00000185664; TAA
SVSVSQLRA

SEQ ID NO: 67828 - protein, 10 aa, Homo sapiens
  Table A; Target 67828; HLA-A*68:02; PMEL; ENSG00000185664; TAA
SVTLDIVQGI

SEQ ID NO: 67829 - protein, 10 aa, Homo sapiens
  Table A; Target 67829; HLA-B*13:02; PMEL; ENSG00000185664; TAA
SVTLDIVQGI

SEQ ID NO: 67830 - protein, 9 aa, Homo sapiens
  Table A; Target 67830; HLA-A*24:02; PMEL; ENSG00000185664; TAA
SYVPLAHSS

SEQ ID NO: 67831 - protein, 9 aa, Homo sapiens
  Table A; Target 67831; HLA-C*06:02; PMEL; ENSG00000185664; TAA
SYVPLAHSS

SEQ ID NO: 67832 - protein, 9 aa, Homo sapiens
  Table A; Target 67832; HLA-C*14:02; PMEL; ENSG00000185664; TAA
SYVPLAHSS

SEQ ID NO: 67833 - protein, 10 aa, Homo sapiens
  Table A; Target 67833; HLA-A*23:01; PMEL; ENSG00000185664; TAA
TAAQVTTTEW

SEQ ID NO: 67834 - protein, 10 aa, Homo sapiens
  Table A; Target 67834; HLA-A*25:01; PMEL; ENSG00000185664; TAA
TAAQVTTTEW

SEQ ID NO: 67835 - protein, 10 aa, Homo sapiens
  Table A; Target 67835; HLA-A*26:01; PMEL; ENSG00000185664; TAA
TAAQVTTTEW

SEQ ID NO: 67836 - protein, 10 aa, Homo sapiens
  Table A; Target 67836; HLA-A*32:01; PMEL; ENSG00000185664; TAA
TAAQVTTTEW

SEQ ID NO: 67837 - protein, 10 aa, Homo sapiens
  Table A; Target 67837; HLA-A*33:01; PMEL; ENSG00000185664; TAA
TAAQVTTTEW

SEQ ID NO: 67838 - protein, 10 aa, Homo sapiens
  Table A; Target 67838; HLA-A*33:03; PMEL; ENSG00000185664; TAA
TAAQVTTTEW

SEQ ID NO: 67839 - protein, 10 aa, Homo sapiens
  Table A; Target 67839; HLA-A*68:01; PMEL; ENSG00000185664; TAA
TAAQVTTTEW

SEQ ID NO: 67840 - protein, 10 aa, Homo sapiens
  Table A; Target 67840; HLA-A*68:02; PMEL; ENSG00000185664; TAA
TAAQVTTTEW

SEQ ID NO: 67841 - protein, 10 aa, Homo sapiens
  Table A; Target 67841; HLA-B*15:01; PMEL; ENSG00000185664; TAA
TAAQVTTTEW

SEQ ID NO: 67842 - protein, 10 aa, Homo sapiens
  Table A; Target 67842; HLA-B*27:02; PMEL; ENSG00000185664; TAA
TAAQVTTTEW

SEQ ID NO: 67843 - protein, 10 aa, Homo sapiens
  Table A; Target 67843; HLA-B*27:05; PMEL; ENSG00000185664; TAA
TAAQVTTTEW

SEQ ID NO: 67844 - protein, 10 aa, Homo sapiens
  Table A; Target 67844; HLA-B*35:01; PMEL; ENSG00000185664; TAA
TAAQVTTTEW

SEQ ID NO: 67845 - protein, 10 aa, Homo sapiens
  Table A; Target 67845; HLA-B*38:01; PMEL; ENSG00000185664; TAA
TAAQVTTTEW

SEQ ID NO: 67846 - protein, 10 aa, Homo sapiens
  Table A; Target 67846; HLA-B*39:01; PMEL; ENSG00000185664; TAA
TAAQVTTTEW

SEQ ID NO: 67847 - protein, 10 aa, Homo sapiens
  Table A; Target 67847; HLA-B*44:02; PMEL; ENSG00000185664; TAA
TAAQVTTTEW

SEQ ID NO: 67848 - protein, 10 aa, Homo sapiens
  Table A; Target 67848; HLA-B*44:03; PMEL; ENSG00000185664; TAA
TAAQVTTTEW

SEQ ID NO: 67849 - protein, 10 aa, Homo sapiens
  Table A; Target 67849; HLA-B*46:01; PMEL; ENSG00000185664; TAA
TAAQVTTTEW

SEQ ID NO: 67850 - protein, 10 aa, Homo sapiens
  Table A; Target 67850; HLA-B*57:01; PMEL; ENSG00000185664; TAA
TAAQVTTTEW

SEQ ID NO: 67851 - protein, 10 aa, Homo sapiens
  Table A; Target 67851; HLA-B*58:01; PMEL; ENSG00000185664; TAA
TAAQVTTTEW

SEQ ID NO: 67852 - protein, 10 aa, Homo sapiens
  Table A; Target 67852; HLA-C*01:02; PMEL; ENSG00000185664; TAA
TAAQVTTTEW

SEQ ID NO: 67853 - protein, 10 aa, Homo sapiens
  Table A; Target 67853; HLA-C*02:02; PMEL; ENSG00000185664; TAA
TAAQVTTTEW

SEQ ID NO: 67854 - protein, 10 aa, Homo sapiens
  Table A; Target 67854; HLA-C*03:03; PMEL; ENSG00000185664; TAA
TAAQVTTTEW

SEQ ID NO: 67855 - protein, 10 aa, Homo sapiens
  Table A; Target 67855; HLA-C*04:01; PMEL; ENSG00000185664; TAA
TAAQVTTTEW

SEQ ID NO: 67856 - protein, 10 aa, Homo sapiens
  Table A; Target 67856; HLA-C*07:06; PMEL; ENSG00000185664; TAA
TAAQVTTTEW

SEQ ID NO: 67857 - protein, 10 aa, Homo sapiens
  Table A; Target 67857; HLA-C*12:03; PMEL; ENSG00000185664; TAA
TAAQVTTTEW

SEQ ID NO: 67858 - protein, 10 aa, Homo sapiens
  Table A; Target 67858; HLA-C*16:04; PMEL; ENSG00000185664; TAA
TAAQVTTTEW

SEQ ID NO: 67859 - protein, 9 aa, Homo sapiens
  Table A; Target 67859; HLA-C*05:01; PMEL; ENSG00000185664; TAA
TAEAPNTTA

SEQ ID NO: 67860 - protein, 10 aa, Homo sapiens
  Table A; Target 67860; HLA-B*35:03; PMEL; ENSG00000185664; TAA
TAEPSGTTSV

SEQ ID NO: 67861 - protein, 10 aa, Homo sapiens
  Table A; Target 67861; HLA-B*38:01; PMEL; ENSG00000185664; TAA
TAEPSGTTSV

SEQ ID NO: 67862 - protein, 10 aa, Homo sapiens
  Table A; Target 67862; HLA-B*39:01; PMEL; ENSG00000185664; TAA
TAEPSGTTSV

SEQ ID NO: 67863 - protein, 10 aa, Homo sapiens
  Table A; Target 67863; HLA-B*49:01; PMEL; ENSG00000185664; TAA
TAEPSGTTSV

SEQ ID NO: 67864 - protein, 10 aa, Homo sapiens
  Table A; Target 67864; HLA-B*51:01; PMEL; ENSG00000185664; TAA
TAEPSGTTSV

SEQ ID NO: 67865 - protein, 10 aa, Homo sapiens
  Table A; Target 67865; HLA-C*03:03; PMEL; ENSG00000185664; TAA
TAEPSGTTSV

SEQ ID NO: 67866 - protein, 10 aa, Homo sapiens
  Table A; Target 67866; HLA-C*03:04; PMEL; ENSG00000185664; TAA
TAEPSGTTSV

SEQ ID NO: 67867 - protein, 10 aa, Homo sapiens
  Table A; Target 67867; HLA-C*05:01; PMEL; ENSG00000185664; TAA
TAEPSGTTSV

SEQ ID NO: 67868 - protein, 11 aa, Homo sapiens
  Table A; Target 67868; HLA-B*27:02; PMEL; ENSG00000185664; TAA
TAESTGMTPEK

SEQ ID NO: 67869 - protein, 8 aa, Homo sapiens
  Table A; Target 67869; HLA-B*51:01; PMEL; ENSG00000185664; TAA
TAGQVPTT

SEQ ID NO: 67870 - protein, 10 aa, Homo sapiens
  Table A; Target 67870; HLA-C*05:01; PMEL; ENSG00000185664; TAA
TAGQVPTTEV

SEQ ID NO: 67871 - protein, 9 aa, Homo sapiens
  Table A; Target 67871; HLA-A*02:07; PMEL; ENSG00000185664; TAA
TAPVQMPTA

SEQ ID NO: 67872 - protein, 9 aa, Homo sapiens
  Table A; Target 67872; HLA-B*46:01; PMEL; ENSG00000185664; TAA
TAPVQMPTA

SEQ ID NO: 67873 - protein, 9 aa, Homo sapiens
  Table A; Target 67873; HLA-B*51:01; PMEL; ENSG00000185664; TAA
TAPVQMPTA

SEQ ID NO: 67874 - protein, 9 aa, Homo sapiens
  Table A; Target 67874; HLA-B*54:01; PMEL; ENSG00000185664; TAA
TAPVQMPTA

SEQ ID NO: 67875 - protein, 9 aa, Homo sapiens
  Table A; Target 67875; HLA-B*56:01; PMEL; ENSG00000185664; TAA
TAPVQMPTA

SEQ ID NO: 67876 - protein, 9 aa, Homo sapiens
  Table A; Target 67876; HLA-C*01:02; PMEL; ENSG00000185664; TAA
TAPVQMPTA

SEQ ID NO: 67877 - protein, 9 aa, Homo sapiens
  Table A; Target 67877; HLA-C*03:03; PMEL; ENSG00000185664; TAA
TAPVQMPTA

SEQ ID NO: 67878 - protein, 9 aa, Homo sapiens
  Table A; Target 67878; HLA-B*54:01; PMEL; ENSG00000185664; TAA
TAQVVLQAA

SEQ ID NO: 67879 - protein, 9 aa, Homo sapiens
  Table A; Target 67879; HLA-B*56:01; PMEL; ENSG00000185664; TAA
TAQVVLQAA

SEQ ID NO: 67880 - protein, 8 aa, Homo sapiens
  Table A; Target 67880; HLA-B*08:01; PMEL; ENSG00000185664; TAA
TATLRLVK

SEQ ID NO: 67881 - protein, 8 aa, Homo sapiens
  Table A; Target 67881; HLA-C*06:02; PMEL; ENSG00000185664; TAA
TATLRLVK

SEQ ID NO: 67882 - protein, 8 aa, Homo sapiens
  Table A; Target 67882; HLA-C*07:01; PMEL; ENSG00000185664; TAA
TATLRLVK

SEQ ID NO: 67883 - protein, 8 aa, Homo sapiens
  Table A; Target 67883; HLA-C*16:01; PMEL; ENSG00000185664; TAA
TATLRLVK

SEQ ID NO: 67884 - protein, 9 aa, Homo sapiens
  Table A; Target 67884; HLA-A*31:01; PMEL; ENSG00000185664; TAA
TATLRLVKR

SEQ ID NO: 67885 - protein, 9 aa, Homo sapiens
  Table A; Target 67885; HLA-A*33:01; PMEL; ENSG00000185664; TAA
TATLRLVKR

SEQ ID NO: 67886 - protein, 9 aa, Homo sapiens
  Table A; Target 67886; HLA-A*33:03; PMEL; ENSG00000185664; TAA
TATLRLVKR

SEQ ID NO: 67887 - protein, 9 aa, Homo sapiens
  Table A; Target 67887; HLA-A*68:01; PMEL; ENSG00000185664; TAA
TATLRLVKR

SEQ ID NO: 67888 - protein, 9 aa, Homo sapiens
  Table A; Target 67888; HLA-C*16:01; PMEL; ENSG00000185664; TAA
TATLRLVKR

SEQ ID NO: 67889 - protein, 8 aa, Homo sapiens
  Table A; Target 67889; HLA-B*13:02; PMEL; ENSG00000185664; TAA
TDQVPFSV

SEQ ID NO: 67890 - protein, 8 aa, Homo sapiens
  Table A; Target 67890; HLA-B*18:01; PMEL; ENSG00000185664; TAA
TDQVPFSV

SEQ ID NO: 67891 - protein, 8 aa, Homo sapiens
  Table A; Target 67891; HLA-B*37:01; PMEL; ENSG00000185664; TAA
TDQVPFSV

SEQ ID NO: 67892 - protein, 8 aa, Homo sapiens
  Table A; Target 67892; HLA-B*40:02; PMEL; ENSG00000185664; TAA
TDQVPFSV

SEQ ID NO: 67893 - protein, 8 aa, Homo sapiens
  Table A; Target 67893; HLA-C*06:02; PMEL; ENSG00000185664; TAA
TDQVPFSV

SEQ ID NO: 67894 - protein, 8 aa, Homo sapiens
  Table A; Target 67894; HLA-C*07:01; PMEL; ENSG00000185664; TAA
TDQVPFSV

SEQ ID NO: 67895 - protein, 8 aa, Homo sapiens
  Table A; Target 67895; HLA-C*12:03; PMEL; ENSG00000185664; TAA
TDQVPFSV

SEQ ID NO: 67896 - protein, 8 aa, Homo sapiens
  Table A; Target 67896; HLA-C*16:02; PMEL; ENSG00000185664; TAA
TDQVPFSV

SEQ ID NO: 67897 - protein, 10 aa, Homo sapiens
  Table A; Target 67897; HLA-B*40:02; PMEL; ENSG00000185664; TAA
TDQVPFSVSV

SEQ ID NO: 67898 - protein, 9 aa, Homo sapiens
  Table A; Target 67898; HLA-B*18:01; PMEL; ENSG00000185664; TAA
TEAQRLDCW

SEQ ID NO: 67899 - protein, 9 aa, Homo sapiens
  Table A; Target 67899; HLA-B*27:02; PMEL; ENSG00000185664; TAA
TEAQRLDCW

SEQ ID NO: 67900 - protein, 9 aa, Homo sapiens
  Table A; Target 67900; HLA-B*37:01; PMEL; ENSG00000185664; TAA
TEAQRLDCW

SEQ ID NO: 67901 - protein, 9 aa, Homo sapiens
  Table A; Target 67901; HLA-B*40:02; PMEL; ENSG00000185664; TAA
TEAQRLDCW

SEQ ID NO: 67902 - protein, 9 aa, Homo sapiens
  Table A; Target 67902; HLA-B*44:02; PMEL; ENSG00000185664; TAA
TEAQRLDCW

SEQ ID NO: 67903 - protein, 9 aa, Homo sapiens
  Table A; Target 67903; HLA-B*44:03; PMEL; ENSG00000185664; TAA
TEAQRLDCW

SEQ ID NO: 67904 - protein, 9 aa, Homo sapiens
  Table A; Target 67904; HLA-B*57:01; PMEL; ENSG00000185664; TAA
TEAQRLDCW

SEQ ID NO: 67905 - protein, 9 aa, Homo sapiens
  Table A; Target 67905; HLA-C*16:04; PMEL; ENSG00000185664; TAA
TEAQRLDCW

SEQ ID NO: 67906 - protein, 8 aa, Homo sapiens
  Table A; Target 67906; HLA-A*30:01; PMEL; ENSG00000185664; TAA
TESITGSL

SEQ ID NO: 67907 - protein, 8 aa, Homo sapiens
  Table A; Target 67907; HLA-B*18:01; PMEL; ENSG00000185664; TAA
TESITGSL

SEQ ID NO: 67908 - protein, 8 aa, Homo sapiens
  Table A; Target 67908; HLA-B*37:01; PMEL; ENSG00000185664; TAA
TESITGSL

SEQ ID NO: 67909 - protein, 8 aa, Homo sapiens
  Table A; Target 67909; HLA-B*40:01; PMEL; ENSG00000185664; TAA
TESITGSL

SEQ ID NO: 67910 - protein, 8 aa, Homo sapiens
  Table A; Target 67910; HLA-B*40:02; PMEL; ENSG00000185664; TAA
TESITGSL

SEQ ID NO: 67911 - protein, 8 aa, Homo sapiens
  Table A; Target 67911; HLA-B*49:01; PMEL; ENSG00000185664; TAA
TESITGSL

SEQ ID NO: 67912 - protein, 9 aa, Homo sapiens
  Table A; Target 67912; HLA-B*49:01; PMEL; ENSG00000185664; TAA
TESITGSLG

SEQ ID NO: 67913 - protein, 11 aa, Homo sapiens
  Table A; Target 67913; HLA-B*40:01; PMEL; ENSG00000185664; TAA
TESITGSLGPL

SEQ ID NO: 67914 - protein, 11 aa, Homo sapiens
  Table A; Target 67914; HLA-B*40:02; PMEL; ENSG00000185664; TAA
TESITGSLGPL

SEQ ID NO: 67915 - protein, 11 aa, Homo sapiens
  Table A; Target 67915; HLA-C*06:02; PMEL; ENSG00000185664; TAA
TESITGSLGPL

SEQ ID NO: 67916 - protein, 11 aa, Homo sapiens
  Table A; Target 67916; HLA-C*07:01; PMEL; ENSG00000185664; TAA
TESITGSLGPL

SEQ ID NO: 67917 - protein, 8 aa, Homo sapiens
  Table A; Target 67917; HLA-B*18:01; PMEL; ENSG00000185664; TAA
TEVISTAP

SEQ ID NO: 67918 - protein, 9 aa, Homo sapiens
  Table A; Target 67918; HLA-A*30:01; PMEL; ENSG00000185664; TAA
TEVISTAPV

SEQ ID NO: 67919 - protein, 9 aa, Homo sapiens
  Table A; Target 67919; HLA-B*18:01; PMEL; ENSG00000185664; TAA
TEVISTAPV

SEQ ID NO: 67920 - protein, 9 aa, Homo sapiens
  Table A; Target 67920; HLA-B*40:01; PMEL; ENSG00000185664; TAA
TEVISTAPV

SEQ ID NO: 67921 - protein, 9 aa, Homo sapiens
  Table A; Target 67921; HLA-B*40:02; PMEL; ENSG00000185664; TAA
TEVISTAPV

SEQ ID NO: 67922 - protein, 9 aa, Homo sapiens
  Table A; Target 67922; HLA-B*49:01; PMEL; ENSG00000185664; TAA
TEVISTAPV

SEQ ID NO: 67923 - protein, 9 aa, Homo sapiens
  Table A; Target 67923; HLA-C*04:01; PMEL; ENSG00000185664; TAA
TEVISTAPV

SEQ ID NO: 67924 - protein, 11 aa, Homo sapiens
  Table A; Target 67924; HLA-A*30:01; PMEL; ENSG00000185664; TAA
TEVISTAPVQM

SEQ ID NO: 67925 - protein, 11 aa, Homo sapiens
  Table A; Target 67925; HLA-B*18:01; PMEL; ENSG00000185664; TAA
TEVISTAPVQM

SEQ ID NO: 67926 - protein, 11 aa, Homo sapiens
  Table A; Target 67926; HLA-B*40:01; PMEL; ENSG00000185664; TAA
TEVISTAPVQM

SEQ ID NO: 67927 - protein, 11 aa, Homo sapiens
  Table A; Target 67927; HLA-B*40:02; PMEL; ENSG00000185664; TAA
TEVISTAPVQM

SEQ ID NO: 67928 - protein, 11 aa, Homo sapiens
  Table A; Target 67928; HLA-B*44:03; PMEL; ENSG00000185664; TAA
TEVISTAPVQM

SEQ ID NO: 67929 - protein, 8 aa, Homo sapiens
  Table A; Target 67929; HLA-B*18:01; PMEL; ENSG00000185664; TAA
TEVVGTTP

SEQ ID NO: 67930 - protein, 8 aa, Homo sapiens
  Table A; Target 67930; HLA-B*40:02; PMEL; ENSG00000185664; TAA
TEVVGTTP

SEQ ID NO: 67931 - protein, 8 aa, Homo sapiens
  Table A; Target 67931; HLA-B*49:01; PMEL; ENSG00000185664; TAA
TEVVGTTP

SEQ ID NO: 67932 - protein, 9 aa, Homo sapiens
  Table A; Target 67932; HLA-B*40:02; PMEL; ENSG00000185664; TAA
TEVVGTTPG

SEQ ID NO: 67933 - protein, 9 aa, Homo sapiens
  Table A; Target 67933; HLA-B*49:01; PMEL; ENSG00000185664; TAA
TEVVGTTPG

SEQ ID NO: 67934 - protein, 10 aa, Homo sapiens
  Table A; Target 67934; HLA-B*44:03; PMEL; ENSG00000185664; TAA
TEVVGTTPGQ

SEQ ID NO: 67935 - protein, 10 aa, Homo sapiens
  Table A; Target 67935; HLA-C*06:02; PMEL; ENSG00000185664; TAA
TEVVGTTPGQ

SEQ ID NO: 67936 - protein, 10 aa, Homo sapiens
  Table A; Target 67936; HLA-C*07:01; PMEL; ENSG00000185664; TAA
TEVVGTTPGQ

SEQ ID NO: 67937 - protein, 8 aa, Homo sapiens
  Table A; Target 67937; HLA-A*30:01; PMEL; ENSG00000185664; TAA
TEWVETTA

SEQ ID NO: 67938 - protein, 8 aa, Homo sapiens
  Table A; Target 67938; HLA-B*18:01; PMEL; ENSG00000185664; TAA
TEWVETTA

SEQ ID NO: 67939 - protein, 8 aa, Homo sapiens
  Table A; Target 67939; HLA-B*40:02; PMEL; ENSG00000185664; TAA
TEWVETTA

SEQ ID NO: 67940 - protein, 8 aa, Homo sapiens
  Table A; Target 67940; HLA-B*49:01; PMEL; ENSG00000185664; TAA
TEWVETTA

SEQ ID NO: 67941 - protein, 9 aa, Homo sapiens
  Table A; Target 67941; HLA-A*30:01; PMEL; ENSG00000185664; TAA
TEWVETTAR

SEQ ID NO: 67942 - protein, 9 aa, Homo sapiens
  Table A; Target 67942; HLA-B*18:01; PMEL; ENSG00000185664; TAA
TEWVETTAR

SEQ ID NO: 67943 - protein, 9 aa, Homo sapiens
  Table A; Target 67943; HLA-B*27:05; PMEL; ENSG00000185664; TAA
TEWVETTAR

SEQ ID NO: 67944 - protein, 9 aa, Homo sapiens
  Table A; Target 67944; HLA-B*40:01; PMEL; ENSG00000185664; TAA
TEWVETTAR

SEQ ID NO: 67945 - protein, 9 aa, Homo sapiens
  Table A; Target 67945; HLA-B*49:01; PMEL; ENSG00000185664; TAA
TEWVETTAR

SEQ ID NO: 67946 - protein, 11 aa, Homo sapiens
  Table A; Target 67946; HLA-A*30:01; PMEL; ENSG00000185664; TAA
TEWVETTAREL

SEQ ID NO: 67947 - protein, 11 aa, Homo sapiens
  Table A; Target 67947; HLA-B*40:01; PMEL; ENSG00000185664; TAA
TEWVETTAREL

SEQ ID NO: 67948 - protein, 11 aa, Homo sapiens
  Table A; Target 67948; HLA-B*40:02; PMEL; ENSG00000185664; TAA
TEWVETTAREL

SEQ ID NO: 67949 - protein, 11 aa, Homo sapiens
  Table A; Target 67949; HLA-B*44:02; PMEL; ENSG00000185664; TAA
TEWVETTAREL

SEQ ID NO: 67950 - protein, 10 aa, Homo sapiens
  Table A; Target 67950; HLA-B*07:02; PMEL; ENSG00000185664; TAA
TGMTPEKVPV

SEQ ID NO: 67951 - protein, 10 aa, Homo sapiens
  Table A; Target 67951; HLA-B*40:02; PMEL; ENSG00000185664; TAA
TGMTPEKVPV

SEQ ID NO: 67952 - protein, 10 aa, Homo sapiens
  Table A; Target 67952; HLA-B*54:01; PMEL; ENSG00000185664; TAA
TGMTPEKVPV

SEQ ID NO: 67953 - protein, 10 aa, Homo sapiens
  Table A; Target 67953; HLA-B*55:01; PMEL; ENSG00000185664; TAA
TGMTPEKVPV

SEQ ID NO: 67954 - protein, 10 aa, Homo sapiens
  Table A; Target 67954; HLA-C*04:01; PMEL; ENSG00000185664; TAA
TGMTPEKVPV

SEQ ID NO: 67955 - protein, 10 aa, Homo sapiens
  Table A; Target 67955; HLA-C*06:02; PMEL; ENSG00000185664; TAA
TGMTPEKVPV

SEQ ID NO: 67956 - protein, 10 aa, Homo sapiens
  Table A; Target 67956; HLA-C*16:01; PMEL; ENSG00000185664; TAA
TGMTPEKVPV

SEQ ID NO: 67957 - protein, 10 aa, Homo sapiens
  Table A; Target 67957; HLA-C*16:02; PMEL; ENSG00000185664; TAA
TGMTPEKVPV

SEQ ID NO: 67958 - protein, 9 aa, Homo sapiens
  Table A; Target 67958; HLA-C*06:02; PMEL; ENSG00000185664; TAA
TGRAMLGTH

SEQ ID NO: 67959 - protein, 8 aa, Homo sapiens
  Table A; Target 67959; HLA-B*37:01; PMEL; ENSG00000185664; TAA
TGSLGPLL

SEQ ID NO: 67960 - protein, 8 aa, Homo sapiens
  Table A; Target 67960; HLA-C*01:02; PMEL; ENSG00000185664; TAA
TGSLGPLL

SEQ ID NO: 67961 - protein, 8 aa, Homo sapiens
  Table A; Target 67961; HLA-C*03:03; PMEL; ENSG00000185664; TAA
TGSLGPLL

SEQ ID NO: 67962 - protein, 8 aa, Homo sapiens
  Table A; Target 67962; HLA-C*03:04; PMEL; ENSG00000185664; TAA
TGSLGPLL

SEQ ID NO: 67963 - protein, 8 aa, Homo sapiens
  Table A; Target 67963; HLA-C*06:02; PMEL; ENSG00000185664; TAA
TGSLGPLL

SEQ ID NO: 67964 - protein, 8 aa, Homo sapiens
  Table A; Target 67964; HLA-C*07:04; PMEL; ENSG00000185664; TAA
TGSLGPLL

SEQ ID NO: 67965 - protein, 8 aa, Homo sapiens
  Table A; Target 67965; HLA-C*16:01; PMEL; ENSG00000185664; TAA
TGSLGPLL

SEQ ID NO: 67966 - protein, 8 aa, Homo sapiens
  Table A; Target 67966; HLA-B*38:01; PMEL; ENSG00000185664; TAA
THTMEVTV

SEQ ID NO: 67967 - protein, 8 aa, Homo sapiens
  Table A; Target 67967; HLA-B*39:01; PMEL; ENSG00000185664; TAA
THTMEVTV

SEQ ID NO: 67968 - protein, 8 aa, Homo sapiens
  Table A; Target 67968; HLA-C*07:04; PMEL; ENSG00000185664; TAA
THTMEVTV

SEQ ID NO: 67969 - protein, 9 aa, Homo sapiens
  Table A; Target 67969; HLA-B*15:01; PMEL; ENSG00000185664; TAA
THTMEVTVY

SEQ ID NO: 67970 - protein, 9 aa, Homo sapiens
  Table A; Target 67970; HLA-B*15:03; PMEL; ENSG00000185664; TAA
THTMEVTVY

SEQ ID NO: 67971 - protein, 9 aa, Homo sapiens
  Table A; Target 67971; HLA-B*27:05; PMEL; ENSG00000185664; TAA
THTMEVTVY

SEQ ID NO: 67972 - protein, 9 aa, Homo sapiens
  Table A; Target 67972; HLA-B*35:01; PMEL; ENSG00000185664; TAA
THTMEVTVY

SEQ ID NO: 67973 - protein, 9 aa, Homo sapiens
  Table A; Target 67973; HLA-B*38:01; PMEL; ENSG00000185664; TAA
THTMEVTVY

SEQ ID NO: 67974 - protein, 9 aa, Homo sapiens
  Table A; Target 67974; HLA-B*39:01; PMEL; ENSG00000185664; TAA
THTMEVTVY

SEQ ID NO: 67975 - protein, 9 aa, Homo sapiens
  Table A; Target 67975; HLA-C*04:01; PMEL; ENSG00000185664; TAA
THTMEVTVY

SEQ ID NO: 67976 - protein, 9 aa, Homo sapiens
  Table A; Target 67976; HLA-C*07:01; PMEL; ENSG00000185664; TAA
THTMEVTVY

SEQ ID NO: 67977 - protein, 9 aa, Homo sapiens
  Table A; Target 67977; HLA-C*07:04; PMEL; ENSG00000185664; TAA
THTMEVTVY

SEQ ID NO: 67978 - protein, 9 aa, Homo sapiens
  Table A; Target 67978; HLA-C*12:03; PMEL; ENSG00000185664; TAA
THTMEVTVY

SEQ ID NO: 67979 - protein, 9 aa, Homo sapiens
  Table A; Target 67979; HLA-C*16:02; PMEL; ENSG00000185664; TAA
THTMEVTVY

SEQ ID NO: 67980 - protein, 9 aa, Homo sapiens
  Table A; Target 67980; HLA-C*16:04; PMEL; ENSG00000185664; TAA
THTMEVTVY

SEQ ID NO: 67981 - protein, 10 aa, Homo sapiens
  Table A; Target 67981; HLA-C*07:01; PMEL; ENSG00000185664; TAA
THTMEVTVYH

SEQ ID NO: 67982 - protein, 8 aa, Homo sapiens
  Table A; Target 67982; HLA-B*39:01; PMEL; ENSG00000185664; TAA
TIINGSQV

SEQ ID NO: 67983 - protein, 8 aa, Homo sapiens
  Table A; Target 67983; HLA-C*01:02; PMEL; ENSG00000185664; TAA
TIINGSQV

SEQ ID NO: 67984 - protein, 8 aa, Homo sapiens
  Table A; Target 67984; HLA-C*03:03; PMEL; ENSG00000185664; TAA
TIINGSQV

SEQ ID NO: 67985 - protein, 8 aa, Homo sapiens
  Table A; Target 67985; HLA-C*03:04; PMEL; ENSG00000185664; TAA
TIINGSQV

SEQ ID NO: 67986 - protein, 8 aa, Homo sapiens
  Table A; Target 67986; HLA-C*04:01; PMEL; ENSG00000185664; TAA
TIINGSQV

SEQ ID NO: 67987 - protein, 8 aa, Homo sapiens
  Table A; Target 67987; HLA-C*05:01; PMEL; ENSG00000185664; TAA
TIINGSQV

SEQ ID NO: 67988 - protein, 8 aa, Homo sapiens
  Table A; Target 67988; HLA-C*06:02; PMEL; ENSG00000185664; TAA
TIINGSQV

SEQ ID NO: 67989 - protein, 8 aa, Homo sapiens
  Table A; Target 67989; HLA-C*14:02; PMEL; ENSG00000185664; TAA
TIINGSQV

SEQ ID NO: 67990 - protein, 8 aa, Homo sapiens
  Table A; Target 67990; HLA-C*16:02; PMEL; ENSG00000185664; TAA
TIINGSQV

SEQ ID NO: 67991 - protein, 9 aa, Homo sapiens
  Table A; Target 67991; HLA-A*23:01; PMEL; ENSG00000185664; TAA
TIINGSQVW

SEQ ID NO: 67992 - protein, 9 aa, Homo sapiens
  Table A; Target 67992; HLA-A*24:02; PMEL; ENSG00000185664; TAA
TIINGSQVW

SEQ ID NO: 67993 - protein, 9 aa, Homo sapiens
  Table A; Target 67993; HLA-A*25:01; PMEL; ENSG00000185664; TAA
TIINGSQVW

SEQ ID NO: 67994 - protein, 9 aa, Homo sapiens
  Table A; Target 67994; HLA-A*26:01; PMEL; ENSG00000185664; TAA
TIINGSQVW

SEQ ID NO: 67995 - protein, 9 aa, Homo sapiens
  Table A; Target 67995; HLA-A*32:01; PMEL; ENSG00000185664; TAA
TIINGSQVW

SEQ ID NO: 67996 - protein, 9 aa, Homo sapiens
  Table A; Target 67996; HLA-A*68:01; PMEL; ENSG00000185664; TAA
TIINGSQVW

SEQ ID NO: 67997 - protein, 9 aa, Homo sapiens
  Table A; Target 67997; HLA-B*15:01; PMEL; ENSG00000185664; TAA
TIINGSQVW

SEQ ID NO: 67998 - protein, 9 aa, Homo sapiens
  Table A; Target 67998; HLA-B*15:03; PMEL; ENSG00000185664; TAA
TIINGSQVW

SEQ ID NO: 67999 - protein, 9 aa, Homo sapiens
  Table A; Target 67999; HLA-B*27:02; PMEL; ENSG00000185664; TAA
TIINGSQVW

SEQ ID NO: 68000 - protein, 9 aa, Homo sapiens
  Table A; Target 68000; HLA-B*35:01; PMEL; ENSG00000185664; TAA
TIINGSQVW

SEQ ID NO: 68001 - protein, 9 aa, Homo sapiens
  Table A; Target 68001; HLA-B*38:01; PMEL; ENSG00000185664; TAA
TIINGSQVW

SEQ ID NO: 68002 - protein, 9 aa, Homo sapiens
  Table A; Target 68002; HLA-B*39:01; PMEL; ENSG00000185664; TAA
TIINGSQVW

SEQ ID NO: 68003 - protein, 9 aa, Homo sapiens
  Table A; Target 68003; HLA-B*44:02; PMEL; ENSG00000185664; TAA
TIINGSQVW

SEQ ID NO: 68004 - protein, 9 aa, Homo sapiens
  Table A; Target 68004; HLA-B*44:03; PMEL; ENSG00000185664; TAA
TIINGSQVW

SEQ ID NO: 68005 - protein, 9 aa, Homo sapiens
  Table A; Target 68005; HLA-B*46:01; PMEL; ENSG00000185664; TAA
TIINGSQVW

SEQ ID NO: 68006 - protein, 9 aa, Homo sapiens
  Table A; Target 68006; HLA-B*57:01; PMEL; ENSG00000185664; TAA
TIINGSQVW

SEQ ID NO: 68007 - protein, 9 aa, Homo sapiens
  Table A; Target 68007; HLA-B*58:01; PMEL; ENSG00000185664; TAA
TIINGSQVW

SEQ ID NO: 68008 - protein, 9 aa, Homo sapiens
  Table A; Target 68008; HLA-C*01:02; PMEL; ENSG00000185664; TAA
TIINGSQVW

SEQ ID NO: 68009 - protein, 9 aa, Homo sapiens
  Table A; Target 68009; HLA-C*02:02; PMEL; ENSG00000185664; TAA
TIINGSQVW

SEQ ID NO: 68010 - protein, 9 aa, Homo sapiens
  Table A; Target 68010; HLA-C*03:03; PMEL; ENSG00000185664; TAA
TIINGSQVW

SEQ ID NO: 68011 - protein, 9 aa, Homo sapiens
  Table A; Target 68011; HLA-C*03:04; PMEL; ENSG00000185664; TAA
TIINGSQVW

SEQ ID NO: 68012 - protein, 9 aa, Homo sapiens
  Table A; Target 68012; HLA-C*07:04; PMEL; ENSG00000185664; TAA
TIINGSQVW

SEQ ID NO: 68013 - protein, 9 aa, Homo sapiens
  Table A; Target 68013; HLA-C*07:06; PMEL; ENSG00000185664; TAA
TIINGSQVW

SEQ ID NO: 68014 - protein, 9 aa, Homo sapiens
  Table A; Target 68014; HLA-C*12:03; PMEL; ENSG00000185664; TAA
TIINGSQVW

SEQ ID NO: 68015 - protein, 9 aa, Homo sapiens
  Table A; Target 68015; HLA-C*16:01; PMEL; ENSG00000185664; TAA
TIINGSQVW

SEQ ID NO: 68016 - protein, 9 aa, Homo sapiens
  Table A; Target 68016; HLA-C*16:04; PMEL; ENSG00000185664; TAA
TIINGSQVW

SEQ ID NO: 68017 - protein, 8 aa, Homo sapiens
  Table A; Target 68017; HLA-B*37:01; PMEL; ENSG00000185664; TAA
TITDQVPF

SEQ ID NO: 68018 - protein, 8 aa, Homo sapiens
  Table A; Target 68018; HLA-B*39:01; PMEL; ENSG00000185664; TAA
TITDQVPF

SEQ ID NO: 68019 - protein, 8 aa, Homo sapiens
  Table A; Target 68019; HLA-C*04:01; PMEL; ENSG00000185664; TAA
TITDQVPF

SEQ ID NO: 68020 - protein, 8 aa, Homo sapiens
  Table A; Target 68020; HLA-C*07:04; PMEL; ENSG00000185664; TAA
TITDQVPF

SEQ ID NO: 68021 - protein, 10 aa, Homo sapiens
  Table A; Target 68021; HLA-A*02:01; PMEL; ENSG00000185664; TAA
TITDQVPFSV

SEQ ID NO: 68022 - protein, 10 aa, Homo sapiens
  Table A; Target 68022; HLA-A*02:03; PMEL; ENSG00000185664; TAA
TITDQVPFSV

SEQ ID NO: 68023 - protein, 10 aa, Homo sapiens
  Table A; Target 68023; HLA-A*02:04; PMEL; ENSG00000185664; TAA
TITDQVPFSV

SEQ ID NO: 68024 - protein, 10 aa, Homo sapiens
  Table A; Target 68024; HLA-A*02:07; PMEL; ENSG00000185664; TAA
TITDQVPFSV

SEQ ID NO: 68025 - protein, 10 aa, Homo sapiens
  Table A; Target 68025; HLA-A*30:01; PMEL; ENSG00000185664; TAA
TITDQVPFSV

SEQ ID NO: 68026 - protein, 10 aa, Homo sapiens
  Table A; Target 68026; HLA-A*68:02; PMEL; ENSG00000185664; TAA
TITDQVPFSV

SEQ ID NO: 68027 - protein, 10 aa, Homo sapiens
  Table A; Target 68027; HLA-B*13:02; PMEL; ENSG00000185664; TAA
TITDQVPFSV

SEQ ID NO: 68028 - protein, 10 aa, Homo sapiens
  Table A; Target 68028; HLA-B*55:01; PMEL; ENSG00000185664; TAA
TITDQVPFSV

SEQ ID NO: 68029 - protein, 10 aa, Homo sapiens
  Table A; Target 68029; HLA-C*06:02; PMEL; ENSG00000185664; TAA
TITDQVPFSV

SEQ ID NO: 68030 - protein, 10 aa, Homo sapiens
  Table A; Target 68030; HLA-C*12:03; PMEL; ENSG00000185664; TAA
TITDQVPFSV

SEQ ID NO: 68031 - protein, 10 aa, Homo sapiens
  Table A; Target 68031; HLA-A*02:01; PMEL; ENSG00000185664; TAA
TLAEMSTPEA

SEQ ID NO: 68032 - protein, 10 aa, Homo sapiens
  Table A; Target 68032; HLA-A*02:03; PMEL; ENSG00000185664; TAA
TLAEMSTPEA

SEQ ID NO: 68033 - protein, 10 aa, Homo sapiens
  Table A; Target 68033; HLA-B*55:01; PMEL; ENSG00000185664; TAA
TLAEMSTPEA

SEQ ID NO: 68034 - protein, 8 aa, Homo sapiens
  Table A; Target 68034; HLA-B*13:02; PMEL; ENSG00000185664; TAA
TLDIVQGI

SEQ ID NO: 68035 - protein, 8 aa, Homo sapiens
  Table A; Target 68035; HLA-B*38:01; PMEL; ENSG00000185664; TAA
TLDIVQGI

SEQ ID NO: 68036 - protein, 8 aa, Homo sapiens
  Table A; Target 68036; HLA-C*05:01; PMEL; ENSG00000185664; TAA
TLDIVQGI

SEQ ID NO: 68037 - protein, 9 aa, Homo sapiens
  Table A; Target 68037; HLA-A*23:01; PMEL; ENSG00000185664; TAA
TLIGANASF

SEQ ID NO: 68038 - protein, 9 aa, Homo sapiens
  Table A; Target 68038; HLA-A*24:02; PMEL; ENSG00000185664; TAA
TLIGANASF

SEQ ID NO: 68039 - protein, 9 aa, Homo sapiens
  Table A; Target 68039; HLA-A*25:01; PMEL; ENSG00000185664; TAA
TLIGANASF

SEQ ID NO: 68040 - protein, 9 aa, Homo sapiens
  Table A; Target 68040; HLA-A*26:01; PMEL; ENSG00000185664; TAA
TLIGANASF

SEQ ID NO: 68041 - protein, 9 aa, Homo sapiens
  Table A; Target 68041; HLA-A*30:02; PMEL; ENSG00000185664; TAA
TLIGANASF

SEQ ID NO: 68042 - protein, 9 aa, Homo sapiens
  Table A; Target 68042; HLA-A*32:01; PMEL; ENSG00000185664; TAA
TLIGANASF

SEQ ID NO: 68043 - protein, 9 aa, Homo sapiens
  Table A; Target 68043; HLA-B*07:02; PMEL; ENSG00000185664; TAA
TLIGANASF

SEQ ID NO: 68044 - protein, 9 aa, Homo sapiens
  Table A; Target 68044; HLA-B*15:01; PMEL; ENSG00000185664; TAA
TLIGANASF

SEQ ID NO: 68045 - protein, 9 aa, Homo sapiens
  Table A; Target 68045; HLA-B*15:03; PMEL; ENSG00000185664; TAA
TLIGANASF

SEQ ID NO: 68046 - protein, 9 aa, Homo sapiens
  Table A; Target 68046; HLA-B*35:01; PMEL; ENSG00000185664; TAA
TLIGANASF

SEQ ID NO: 68047 - protein, 9 aa, Homo sapiens
  Table A; Target 68047; HLA-B*35:03; PMEL; ENSG00000185664; TAA
TLIGANASF

SEQ ID NO: 68048 - protein, 9 aa, Homo sapiens
  Table A; Target 68048; HLA-B*38:01; PMEL; ENSG00000185664; TAA
TLIGANASF

SEQ ID NO: 68049 - protein, 9 aa, Homo sapiens
  Table A; Target 68049; HLA-B*39:01; PMEL; ENSG00000185664; TAA
TLIGANASF

SEQ ID NO: 68050 - protein, 9 aa, Homo sapiens
  Table A; Target 68050; HLA-B*44:02; PMEL; ENSG00000185664; TAA
TLIGANASF

SEQ ID NO: 68051 - protein, 9 aa, Homo sapiens
  Table A; Target 68051; HLA-B*44:03; PMEL; ENSG00000185664; TAA
TLIGANASF

SEQ ID NO: 68052 - protein, 9 aa, Homo sapiens
  Table A; Target 68052; HLA-B*46:01; PMEL; ENSG00000185664; TAA
TLIGANASF

SEQ ID NO: 68053 - protein, 9 aa, Homo sapiens
  Table A; Target 68053; HLA-B*55:01; PMEL; ENSG00000185664; TAA
TLIGANASF

SEQ ID NO: 68054 - protein, 9 aa, Homo sapiens
  Table A; Target 68054; HLA-B*58:01; PMEL; ENSG00000185664; TAA
TLIGANASF

SEQ ID NO: 68055 - protein, 9 aa, Homo sapiens
  Table A; Target 68055; HLA-C*01:02; PMEL; ENSG00000185664; TAA
TLIGANASF

SEQ ID NO: 68056 - protein, 9 aa, Homo sapiens
  Table A; Target 68056; HLA-C*02:02; PMEL; ENSG00000185664; TAA
TLIGANASF

SEQ ID NO: 68057 - protein, 9 aa, Homo sapiens
  Table A; Target 68057; HLA-C*03:03; PMEL; ENSG00000185664; TAA
TLIGANASF

SEQ ID NO: 68058 - protein, 9 aa, Homo sapiens
  Table A; Target 68058; HLA-C*03:04; PMEL; ENSG00000185664; TAA
TLIGANASF

SEQ ID NO: 68059 - protein, 9 aa, Homo sapiens
  Table A; Target 68059; HLA-C*07:04; PMEL; ENSG00000185664; TAA
TLIGANASF

SEQ ID NO: 68060 - protein, 9 aa, Homo sapiens
  Table A; Target 68060; HLA-C*14:02; PMEL; ENSG00000185664; TAA
TLIGANASF

SEQ ID NO: 68061 - protein, 9 aa, Homo sapiens
  Table A; Target 68061; HLA-C*16:04; PMEL; ENSG00000185664; TAA
TLIGANASF

SEQ ID NO: 68062 - protein, 9 aa, Homo sapiens
  Table A; Target 68062; HLA-A*02:01; PMEL; ENSG00000185664; TAA
TLISRALVV

SEQ ID NO: 68063 - protein, 9 aa, Homo sapiens
  Table A; Target 68063; HLA-A*02:03; PMEL; ENSG00000185664; TAA
TLISRALVV

SEQ ID NO: 68064 - protein, 9 aa, Homo sapiens
  Table A; Target 68064; HLA-A*02:04; PMEL; ENSG00000185664; TAA
TLISRALVV

SEQ ID NO: 68065 - protein, 9 aa, Homo sapiens
  Table A; Target 68065; HLA-A*02:07; PMEL; ENSG00000185664; TAA
TLISRALVV

SEQ ID NO: 68066 - protein, 9 aa, Homo sapiens
  Table A; Target 68066; HLA-A*30:01; PMEL; ENSG00000185664; TAA
TLISRALVV

SEQ ID NO: 68067 - protein, 9 aa, Homo sapiens
  Table A; Target 68067; HLA-A*68:02; PMEL; ENSG00000185664; TAA
TLISRALVV

SEQ ID NO: 68068 - protein, 9 aa, Homo sapiens
  Table A; Target 68068; HLA-B*07:02; PMEL; ENSG00000185664; TAA
TLISRALVV

SEQ ID NO: 68069 - protein, 9 aa, Homo sapiens
  Table A; Target 68069; HLA-B*08:01; PMEL; ENSG00000185664; TAA
TLISRALVV

SEQ ID NO: 68070 - protein, 9 aa, Homo sapiens
  Table A; Target 68070; HLA-B*13:02; PMEL; ENSG00000185664; TAA
TLISRALVV

SEQ ID NO: 68071 - protein, 9 aa, Homo sapiens
  Table A; Target 68071; HLA-B*37:01; PMEL; ENSG00000185664; TAA
TLISRALVV

SEQ ID NO: 68072 - protein, 9 aa, Homo sapiens
  Table A; Target 68072; HLA-B*51:01; PMEL; ENSG00000185664; TAA
TLISRALVV

SEQ ID NO: 68073 - protein, 9 aa, Homo sapiens
  Table A; Target 68073; HLA-B*54:01; PMEL; ENSG00000185664; TAA
TLISRALVV

SEQ ID NO: 68074 - protein, 9 aa, Homo sapiens
  Table A; Target 68074; HLA-B*55:01; PMEL; ENSG00000185664; TAA
TLISRALVV

SEQ ID NO: 68075 - protein, 9 aa, Homo sapiens
  Table A; Target 68075; HLA-C*01:02; PMEL; ENSG00000185664; TAA
TLISRALVV

SEQ ID NO: 68076 - protein, 9 aa, Homo sapiens
  Table A; Target 68076; HLA-C*02:02; PMEL; ENSG00000185664; TAA
TLISRALVV

SEQ ID NO: 68077 - protein, 9 aa, Homo sapiens
  Table A; Target 68077; HLA-C*03:04; PMEL; ENSG00000185664; TAA
TLISRALVV

SEQ ID NO: 68078 - protein, 9 aa, Homo sapiens
  Table A; Target 68078; HLA-C*07:02; PMEL; ENSG00000185664; TAA
TLISRALVV

SEQ ID NO: 68079 - protein, 9 aa, Homo sapiens
  Table A; Target 68079; HLA-C*12:03; PMEL; ENSG00000185664; TAA
TLISRALVV

SEQ ID NO: 68080 - protein, 9 aa, Homo sapiens
  Table A; Target 68080; HLA-C*16:01; PMEL; ENSG00000185664; TAA
TLISRALVV

SEQ ID NO: 68081 - protein, 9 aa, Homo sapiens
  Table A; Target 68081; HLA-C*16:02; PMEL; ENSG00000185664; TAA
TLISRALVV

SEQ ID NO: 68082 - protein, 10 aa, Homo sapiens
  Table A; Target 68082; HLA-C*04:01; PMEL; ENSG00000185664; TAA
TLISRALVVT

SEQ ID NO: 68083 - protein, 8 aa, Homo sapiens
  Table A; Target 68083; HLA-C*04:01; PMEL; ENSG00000185664; TAA
TMEVTVYH

SEQ ID NO: 68084 - protein, 8 aa, Homo sapiens
  Table A; Target 68084; HLA-C*07:01; PMEL; ENSG00000185664; TAA
TMEVTVYH

SEQ ID NO: 68085 - protein, 9 aa, Homo sapiens
  Table A; Target 68085; HLA-A*01:01; PMEL; ENSG00000185664; TAA
TMEVTVYHR

SEQ ID NO: 68086 - protein, 9 aa, Homo sapiens
  Table A; Target 68086; HLA-A*03:02; PMEL; ENSG00000185664; TAA
TMEVTVYHR

SEQ ID NO: 68087 - protein, 9 aa, Homo sapiens
  Table A; Target 68087; HLA-A*31:01; PMEL; ENSG00000185664; TAA
TMEVTVYHR

SEQ ID NO: 68088 - protein, 9 aa, Homo sapiens
  Table A; Target 68088; HLA-A*33:01; PMEL; ENSG00000185664; TAA
TMEVTVYHR

SEQ ID NO: 68089 - protein, 9 aa, Homo sapiens
  Table A; Target 68089; HLA-A*33:03; PMEL; ENSG00000185664; TAA
TMEVTVYHR

SEQ ID NO: 68090 - protein, 9 aa, Homo sapiens
  Table A; Target 68090; HLA-A*68:01; PMEL; ENSG00000185664; TAA
TMEVTVYHR

SEQ ID NO: 68091 - protein, 9 aa, Homo sapiens
  Table A; Target 68091; HLA-C*04:01; PMEL; ENSG00000185664; TAA
TMEVTVYHR

SEQ ID NO: 68092 - protein, 9 aa, Homo sapiens
  Table A; Target 68092; HLA-C*07:06; PMEL; ENSG00000185664; TAA
TMEVTVYHR

SEQ ID NO: 68093 - protein, 9 aa, Homo sapiens
  Table A; Target 68093; HLA-C*04:01; PMEL; ENSG00000185664; TAA
TNSLAVVST

SEQ ID NO: 68094 - protein, 8 aa, Homo sapiens
  Table A; Target 68094; HLA-B*35:03; PMEL; ENSG00000185664; TAA
TPAEVSIV

SEQ ID NO: 68095 - protein, 8 aa, Homo sapiens
  Table A; Target 68095; HLA-B*51:01; PMEL; ENSG00000185664; TAA
TPAEVSIV

SEQ ID NO: 68096 - protein, 8 aa, Homo sapiens
  Table A; Target 68096; HLA-B*55:01; PMEL; ENSG00000185664; TAA
TPAEVSIV

SEQ ID NO: 68097 - protein, 8 aa, Homo sapiens
  Table A; Target 68097; HLA-B*56:01; PMEL; ENSG00000185664; TAA
TPAEVSIV

SEQ ID NO: 68098 - protein, 8 aa, Homo sapiens
  Table A; Target 68098; HLA-C*12:03; PMEL; ENSG00000185664; TAA
TPAEVSIV

SEQ ID NO: 68099 - protein, 9 aa, Homo sapiens
  Table A; Target 68099; HLA-A*30:01; PMEL; ENSG00000185664; TAA
TPAEVSIVV

SEQ ID NO: 68100 - protein, 9 aa, Homo sapiens
  Table A; Target 68100; HLA-A*33:03; PMEL; ENSG00000185664; TAA
TPAEVSIVV

SEQ ID NO: 68101 - protein, 9 aa, Homo sapiens
  Table A; Target 68101; HLA-A*68:01; PMEL; ENSG00000185664; TAA
TPAEVSIVV

SEQ ID NO: 68102 - protein, 9 aa, Homo sapiens
  Table A; Target 68102; HLA-A*68:02; PMEL; ENSG00000185664; TAA
TPAEVSIVV

SEQ ID NO: 68103 - protein, 9 aa, Homo sapiens
  Table A; Target 68103; HLA-B*07:02; PMEL; ENSG00000185664; TAA
TPAEVSIVV

SEQ ID NO: 68104 - protein, 9 aa, Homo sapiens
  Table A; Target 68104; HLA-B*13:02; PMEL; ENSG00000185664; TAA
TPAEVSIVV

SEQ ID NO: 68105 - protein, 9 aa, Homo sapiens
  Table A; Target 68105; HLA-B*18:01; PMEL; ENSG00000185664; TAA
TPAEVSIVV

SEQ ID NO: 68106 - protein, 9 aa, Homo sapiens
  Table A; Target 68106; HLA-B*27:05; PMEL; ENSG00000185664; TAA
TPAEVSIVV

SEQ ID NO: 68107 - protein, 9 aa, Homo sapiens
  Table A; Target 68107; HLA-B*35:01; PMEL; ENSG00000185664; TAA
TPAEVSIVV

SEQ ID NO: 68108 - protein, 9 aa, Homo sapiens
  Table A; Target 68108; HLA-B*35:03; PMEL; ENSG00000185664; TAA
TPAEVSIVV

SEQ ID NO: 68109 - protein, 9 aa, Homo sapiens
  Table A; Target 68109; HLA-B*38:01; PMEL; ENSG00000185664; TAA
TPAEVSIVV

SEQ ID NO: 68110 - protein, 9 aa, Homo sapiens
  Table A; Target 68110; HLA-B*39:01; PMEL; ENSG00000185664; TAA
TPAEVSIVV

SEQ ID NO: 68111 - protein, 9 aa, Homo sapiens
  Table A; Target 68111; HLA-B*49:01; PMEL; ENSG00000185664; TAA
TPAEVSIVV

SEQ ID NO: 68112 - protein, 9 aa, Homo sapiens
  Table A; Target 68112; HLA-B*51:01; PMEL; ENSG00000185664; TAA
TPAEVSIVV

SEQ ID NO: 68113 - protein, 9 aa, Homo sapiens
  Table A; Target 68113; HLA-B*54:01; PMEL; ENSG00000185664; TAA
TPAEVSIVV

SEQ ID NO: 68114 - protein, 9 aa, Homo sapiens
  Table A; Target 68114; HLA-B*55:01; PMEL; ENSG00000185664; TAA
TPAEVSIVV

SEQ ID NO: 68115 - protein, 9 aa, Homo sapiens
  Table A; Target 68115; HLA-B*56:01; PMEL; ENSG00000185664; TAA
TPAEVSIVV

SEQ ID NO: 68116 - protein, 9 aa, Homo sapiens
  Table A; Target 68116; HLA-C*01:02; PMEL; ENSG00000185664; TAA
TPAEVSIVV

SEQ ID NO: 68117 - protein, 9 aa, Homo sapiens
  Table A; Target 68117; HLA-C*02:02; PMEL; ENSG00000185664; TAA
TPAEVSIVV

SEQ ID NO: 68118 - protein, 9 aa, Homo sapiens
  Table A; Target 68118; HLA-C*03:03; PMEL; ENSG00000185664; TAA
TPAEVSIVV

SEQ ID NO: 68119 - protein, 9 aa, Homo sapiens
  Table A; Target 68119; HLA-C*03:04; PMEL; ENSG00000185664; TAA
TPAEVSIVV

SEQ ID NO: 68120 - protein, 9 aa, Homo sapiens
  Table A; Target 68120; HLA-C*04:01; PMEL; ENSG00000185664; TAA
TPAEVSIVV

SEQ ID NO: 68121 - protein, 9 aa, Homo sapiens
  Table A; Target 68121; HLA-C*05:01; PMEL; ENSG00000185664; TAA
TPAEVSIVV

SEQ ID NO: 68122 - protein, 9 aa, Homo sapiens
  Table A; Target 68122; HLA-C*06:02; PMEL; ENSG00000185664; TAA
TPAEVSIVV

SEQ ID NO: 68123 - protein, 9 aa, Homo sapiens
  Table A; Target 68123; HLA-C*07:02; PMEL; ENSG00000185664; TAA
TPAEVSIVV

SEQ ID NO: 68124 - protein, 9 aa, Homo sapiens
  Table A; Target 68124; HLA-C*07:06; PMEL; ENSG00000185664; TAA
TPAEVSIVV

SEQ ID NO: 68125 - protein, 9 aa, Homo sapiens
  Table A; Target 68125; HLA-C*12:03; PMEL; ENSG00000185664; TAA
TPAEVSIVV

SEQ ID NO: 68126 - protein, 9 aa, Homo sapiens
  Table A; Target 68126; HLA-C*16:02; PMEL; ENSG00000185664; TAA
TPAEVSIVV

SEQ ID NO: 68127 - protein, 10 aa, Homo sapiens
  Table A; Target 68127; HLA-A*25:01; PMEL; ENSG00000185664; TAA
TPAEVSIVVL

SEQ ID NO: 68128 - protein, 10 aa, Homo sapiens
  Table A; Target 68128; HLA-A*30:01; PMEL; ENSG00000185664; TAA
TPAEVSIVVL

SEQ ID NO: 68129 - protein, 10 aa, Homo sapiens
  Table A; Target 68129; HLA-A*33:03; PMEL; ENSG00000185664; TAA
TPAEVSIVVL

SEQ ID NO: 68130 - protein, 10 aa, Homo sapiens
  Table A; Target 68130; HLA-A*68:01; PMEL; ENSG00000185664; TAA
TPAEVSIVVL

SEQ ID NO: 68131 - protein, 10 aa, Homo sapiens
  Table A; Target 68131; HLA-A*68:02; PMEL; ENSG00000185664; TAA
TPAEVSIVVL

SEQ ID NO: 68132 - protein, 10 aa, Homo sapiens
  Table A; Target 68132; HLA-B*07:02; PMEL; ENSG00000185664; TAA
TPAEVSIVVL

SEQ ID NO: 68133 - protein, 10 aa, Homo sapiens
  Table A; Target 68133; HLA-B*35:01; PMEL; ENSG00000185664; TAA
TPAEVSIVVL

SEQ ID NO: 68134 - protein, 10 aa, Homo sapiens
  Table A; Target 68134; HLA-B*35:03; PMEL; ENSG00000185664; TAA
TPAEVSIVVL

SEQ ID NO: 68135 - protein, 10 aa, Homo sapiens
  Table A; Target 68135; HLA-B*38:01; PMEL; ENSG00000185664; TAA
TPAEVSIVVL

SEQ ID NO: 68136 - protein, 10 aa, Homo sapiens
  Table A; Target 68136; HLA-B*39:01; PMEL; ENSG00000185664; TAA
TPAEVSIVVL

SEQ ID NO: 68137 - protein, 10 aa, Homo sapiens
  Table A; Target 68137; HLA-B*40:01; PMEL; ENSG00000185664; TAA
TPAEVSIVVL

SEQ ID NO: 68138 - protein, 10 aa, Homo sapiens
  Table A; Target 68138; HLA-B*51:01; PMEL; ENSG00000185664; TAA
TPAEVSIVVL

SEQ ID NO: 68139 - protein, 10 aa, Homo sapiens
  Table A; Target 68139; HLA-B*54:01; PMEL; ENSG00000185664; TAA
TPAEVSIVVL

SEQ ID NO: 68140 - protein, 10 aa, Homo sapiens
  Table A; Target 68140; HLA-B*55:01; PMEL; ENSG00000185664; TAA
TPAEVSIVVL

SEQ ID NO: 68141 - protein, 10 aa, Homo sapiens
  Table A; Target 68141; HLA-B*56:01; PMEL; ENSG00000185664; TAA
TPAEVSIVVL

SEQ ID NO: 68142 - protein, 10 aa, Homo sapiens
  Table A; Target 68142; HLA-C*03:03; PMEL; ENSG00000185664; TAA
TPAEVSIVVL

SEQ ID NO: 68143 - protein, 10 aa, Homo sapiens
  Table A; Target 68143; HLA-C*04:01; PMEL; ENSG00000185664; TAA
TPAEVSIVVL

SEQ ID NO: 68144 - protein, 10 aa, Homo sapiens
  Table A; Target 68144; HLA-C*07:02; PMEL; ENSG00000185664; TAA
TPAEVSIVVL

SEQ ID NO: 68145 - protein, 10 aa, Homo sapiens
  Table A; Target 68145; HLA-C*07:04; PMEL; ENSG00000185664; TAA
TPAEVSIVVL

SEQ ID NO: 68146 - protein, 10 aa, Homo sapiens
  Table A; Target 68146; HLA-C*07:06; PMEL; ENSG00000185664; TAA
TPAEVSIVVL

SEQ ID NO: 68147 - protein, 11 aa, Homo sapiens
  Table A; Target 68147; HLA-A*33:03; PMEL; ENSG00000185664; TAA
TPAEVSIVVLS

SEQ ID NO: 68148 - protein, 11 aa, Homo sapiens
  Table A; Target 68148; HLA-A*68:01; PMEL; ENSG00000185664; TAA
TPAEVSIVVLS

SEQ ID NO: 68149 - protein, 11 aa, Homo sapiens
  Table A; Target 68149; HLA-A*68:02; PMEL; ENSG00000185664; TAA
TPAEVSIVVLS

SEQ ID NO: 68150 - protein, 9 aa, Homo sapiens
  Table A; Target 68150; HLA-B*55:01; PMEL; ENSG00000185664; TAA
TPEATGMTP

SEQ ID NO: 68151 - protein, 10 aa, Homo sapiens
  Table A; Target 68151; HLA-B*35:01; PMEL; ENSG00000185664; TAA
TPEATGMTPA

SEQ ID NO: 68152 - protein, 10 aa, Homo sapiens
  Table A; Target 68152; HLA-B*35:03; PMEL; ENSG00000185664; TAA
TPEATGMTPA

SEQ ID NO: 68153 - protein, 10 aa, Homo sapiens
  Table A; Target 68153; HLA-B*54:01; PMEL; ENSG00000185664; TAA
TPEATGMTPA

SEQ ID NO: 68154 - protein, 10 aa, Homo sapiens
  Table A; Target 68154; HLA-B*55:01; PMEL; ENSG00000185664; TAA
TPEATGMTPA

SEQ ID NO: 68155 - protein, 10 aa, Homo sapiens
  Table A; Target 68155; HLA-B*56:01; PMEL; ENSG00000185664; TAA
TPEATGMTPA

SEQ ID NO: 68156 - protein, 10 aa, Homo sapiens
  Table A; Target 68156; HLA-C*04:01; PMEL; ENSG00000185664; TAA
TPEATGMTPA

SEQ ID NO: 68157 - protein, 11 aa, Homo sapiens
  Table A; Target 68157; HLA-B*35:01; PMEL; ENSG00000185664; TAA
TPEKVPVSEVM

SEQ ID NO: 68158 - protein, 11 aa, Homo sapiens
  Table A; Target 68158; HLA-B*35:03; PMEL; ENSG00000185664; TAA
TPEKVPVSEVM

SEQ ID NO: 68159 - protein, 11 aa, Homo sapiens
  Table A; Target 68159; HLA-B*55:01; PMEL; ENSG00000185664; TAA
TPEKVPVSEVM

SEQ ID NO: 68160 - protein, 11 aa, Homo sapiens
  Table A; Target 68160; HLA-C*03:03; PMEL; ENSG00000185664; TAA
TPEKVPVSEVM

SEQ ID NO: 68161 - protein, 8 aa, Homo sapiens
  Table A; Target 68161; HLA-B*51:01; PMEL; ENSG00000185664; TAA
TPGQAPTA

SEQ ID NO: 68162 - protein, 8 aa, Homo sapiens
  Table A; Target 68162; HLA-B*54:01; PMEL; ENSG00000185664; TAA
TPGQAPTA

SEQ ID NO: 68163 - protein, 8 aa, Homo sapiens
  Table A; Target 68163; HLA-B*55:01; PMEL; ENSG00000185664; TAA
TPGQAPTA

SEQ ID NO: 68164 - protein, 8 aa, Homo sapiens
  Table A; Target 68164; HLA-B*56:01; PMEL; ENSG00000185664; TAA
TPGQAPTA

SEQ ID NO: 68165 - protein, 8 aa, Homo sapiens
  Table A; Target 68165; HLA-C*06:02; PMEL; ENSG00000185664; TAA
TQLIMPGQ

SEQ ID NO: 68166 - protein, 9 aa, Homo sapiens
  Table A; Target 68166; HLA-C*04:01; PMEL; ENSG00000185664; TAA
TQLIMPGQE

SEQ ID NO: 68167 - protein, 10 aa, Homo sapiens
  Table A; Target 68167; HLA-B*13:02; PMEL; ENSG00000185664; TAA
TQLIMPGQEA

SEQ ID NO: 68168 - protein, 10 aa, Homo sapiens
  Table A; Target 68168; HLA-B*39:01; PMEL; ENSG00000185664; TAA
TQLIMPGQEA

SEQ ID NO: 68169 - protein, 10 aa, Homo sapiens
  Table A; Target 68169; HLA-A*68:02; PMEL; ENSG00000185664; TAA
TSVQVPTTEV

SEQ ID NO: 68170 - protein, 11 aa, Homo sapiens
  Table A; Target 68170; HLA-A*01:01; PMEL; ENSG00000185664; TAA
TTAAQVTTTEW

SEQ ID NO: 68171 - protein, 11 aa, Homo sapiens
  Table A; Target 68171; HLA-A*25:01; PMEL; ENSG00000185664; TAA
TTAAQVTTTEW

SEQ ID NO: 68172 - protein, 11 aa, Homo sapiens
  Table A; Target 68172; HLA-A*26:01; PMEL; ENSG00000185664; TAA
TTAAQVTTTEW

SEQ ID NO: 68173 - protein, 11 aa, Homo sapiens
  Table A; Target 68173; HLA-A*32:01; PMEL; ENSG00000185664; TAA
TTAAQVTTTEW

SEQ ID NO: 68174 - protein, 11 aa, Homo sapiens
  Table A; Target 68174; HLA-A*33:01; PMEL; ENSG00000185664; TAA
TTAAQVTTTEW

SEQ ID NO: 68175 - protein, 11 aa, Homo sapiens
  Table A; Target 68175; HLA-A*33:03; PMEL; ENSG00000185664; TAA
TTAAQVTTTEW

SEQ ID NO: 68176 - protein, 11 aa, Homo sapiens
  Table A; Target 68176; HLA-A*68:01; PMEL; ENSG00000185664; TAA
TTAAQVTTTEW

SEQ ID NO: 68177 - protein, 11 aa, Homo sapiens
  Table A; Target 68177; HLA-B*44:02; PMEL; ENSG00000185664; TAA
TTAAQVTTTEW

SEQ ID NO: 68178 - protein, 11 aa, Homo sapiens
  Table A; Target 68178; HLA-B*44:03; PMEL; ENSG00000185664; TAA
TTAAQVTTTEW

SEQ ID NO: 68179 - protein, 11 aa, Homo sapiens
  Table A; Target 68179; HLA-B*57:01; PMEL; ENSG00000185664; TAA
TTAAQVTTTEW

SEQ ID NO: 68180 - protein, 11 aa, Homo sapiens
  Table A; Target 68180; HLA-B*58:01; PMEL; ENSG00000185664; TAA
TTAAQVTTTEW

SEQ ID NO: 68181 - protein, 11 aa, Homo sapiens
  Table A; Target 68181; HLA-C*04:01; PMEL; ENSG00000185664; TAA
TTAAQVTTTEW

SEQ ID NO: 68182 - protein, 11 aa, Homo sapiens
  Table A; Target 68182; HLA-C*06:02; PMEL; ENSG00000185664; TAA
TTAAQVTTTEW

SEQ ID NO: 68183 - protein, 11 aa, Homo sapiens
  Table A; Target 68183; HLA-C*07:01; PMEL; ENSG00000185664; TAA
TTAAQVTTTEW

SEQ ID NO: 68184 - protein, 11 aa, Homo sapiens
  Table A; Target 68184; HLA-C*07:06; PMEL; ENSG00000185664; TAA
TTAAQVTTTEW

SEQ ID NO: 68185 - protein, 11 aa, Homo sapiens
  Table A; Target 68185; HLA-C*12:03; PMEL; ENSG00000185664; TAA
TTAAQVTTTEW

SEQ ID NO: 68186 - protein, 11 aa, Homo sapiens
  Table A; Target 68186; HLA-C*16:04; PMEL; ENSG00000185664; TAA
TTAAQVTTTEW

SEQ ID NO: 68187 - protein, 9 aa, Homo sapiens
  Table A; Target 68187; HLA-C*16:02; PMEL; ENSG00000185664; TAA
TTAGQVPTT

SEQ ID NO: 68188 - protein, 10 aa, Homo sapiens
  Table A; Target 68188; HLA-A*68:01; PMEL; ENSG00000185664; TAA
TTAGQVPTTE

SEQ ID NO: 68189 - protein, 10 aa, Homo sapiens
  Table A; Target 68189; HLA-C*06:02; PMEL; ENSG00000185664; TAA
TTAGQVPTTE

SEQ ID NO: 68190 - protein, 10 aa, Homo sapiens
  Table A; Target 68190; HLA-C*07:06; PMEL; ENSG00000185664; TAA
TTAGQVPTTE

SEQ ID NO: 68191 - protein, 11 aa, Homo sapiens
  Table A; Target 68191; HLA-A*02:03; PMEL; ENSG00000185664; TAA
TTAGQVPTTEV

SEQ ID NO: 68192 - protein, 11 aa, Homo sapiens
  Table A; Target 68192; HLA-A*68:02; PMEL; ENSG00000185664; TAA
TTAGQVPTTEV

SEQ ID NO: 68193 - protein, 11 aa, Homo sapiens
  Table A; Target 68193; HLA-C*06:02; PMEL; ENSG00000185664; TAA
TTAGQVPTTEV

SEQ ID NO: 68194 - protein, 10 aa, Homo sapiens
  Table A; Target 68194; HLA-A*68:01; PMEL; ENSG00000185664; TAA
TTEWVETTAR

SEQ ID NO: 68195 - protein, 10 aa, Homo sapiens
  Table A; Target 68195; HLA-C*07:06; PMEL; ENSG00000185664; TAA
TTEWVETTAR

SEQ ID NO: 68196 - protein, 10 aa, Homo sapiens
  Table A; Target 68196; HLA-C*06:02; PMEL; ENSG00000185664; TAA
TTLAEMSTPE

SEQ ID NO: 68197 - protein, 11 aa, Homo sapiens
  Table A; Target 68197; HLA-C*06:02; PMEL; ENSG00000185664; TAA
TTPGQAPTAEP

SEQ ID NO: 68198 - protein, 10 aa, Homo sapiens
  Table A; Target 68198; HLA-A*68:02; PMEL; ENSG00000185664; TAA
TTTEWVETTA

SEQ ID NO: 68199 - protein, 11 aa, Homo sapiens
  Table A; Target 68199; HLA-A*31:01; PMEL; ENSG00000185664; TAA
TTTEWVETTAR

SEQ ID NO: 68200 - protein, 11 aa, Homo sapiens
  Table A; Target 68200; HLA-A*33:01; PMEL; ENSG00000185664; TAA
TTTEWVETTAR

SEQ ID NO: 68201 - protein, 11 aa, Homo sapiens
  Table A; Target 68201; HLA-A*33:03; PMEL; ENSG00000185664; TAA
TTTEWVETTAR

SEQ ID NO: 68202 - protein, 11 aa, Homo sapiens
  Table A; Target 68202; HLA-A*68:01; PMEL; ENSG00000185664; TAA
TTTEWVETTAR

SEQ ID NO: 68203 - protein, 11 aa, Homo sapiens
  Table A; Target 68203; HLA-C*07:06; PMEL; ENSG00000185664; TAA
TTTEWVETTAR

SEQ ID NO: 68204 - protein, 10 aa, Homo sapiens
  Table A; Target 68204; HLA-A*03:01; PMEL; ENSG00000185664; TAA
TVSCQGGLPK

SEQ ID NO: 68205 - protein, 10 aa, Homo sapiens
  Table A; Target 68205; HLA-A*03:02; PMEL; ENSG00000185664; TAA
TVSCQGGLPK

SEQ ID NO: 68206 - protein, 10 aa, Homo sapiens
  Table A; Target 68206; HLA-A*11:01; PMEL; ENSG00000185664; TAA
TVSCQGGLPK

SEQ ID NO: 68207 - protein, 10 aa, Homo sapiens
  Table A; Target 68207; HLA-A*68:01; PMEL; ENSG00000185664; TAA
TVSCQGGLPK

SEQ ID NO: 68208 - protein, 10 aa, Homo sapiens
  Table A; Target 68208; HLA-C*04:01; PMEL; ENSG00000185664; TAA
TVSCQGGLPK

SEQ ID NO: 68209 - protein, 11 aa, Homo sapiens
  Table A; Target 68209; HLA-C*04:01; PMEL; ENSG00000185664; TAA
TWDFGDSSGTL

SEQ ID NO: 68210 - protein, 8 aa, Homo sapiens
  Table A; Target 68210; HLA-C*07:01; PMEL; ENSG00000185664; TAA
TYCLNVSL

SEQ ID NO: 68211 - protein, 8 aa, Homo sapiens
  Table A; Target 68211; HLA-C*14:02; PMEL; ENSG00000185664; TAA
TYCLNVSL

SEQ ID NO: 68212 - protein, 8 aa, Homo sapiens
  Table A; Target 68212; HLA-C*04:01; PMEL; ENSG00000185664; TAA
TYLEPGPV

SEQ ID NO: 68213 - protein, 8 aa, Homo sapiens
  Table A; Target 68213; HLA-C*14:02; PMEL; ENSG00000185664; TAA
TYLEPGPV

SEQ ID NO: 68214 - protein, 9 aa, Homo sapiens
  Table A; Target 68214; HLA-A*23:01; PMEL; ENSG00000185664; TAA
TYLEPGPVT

SEQ ID NO: 68215 - protein, 9 aa, Homo sapiens
  Table A; Target 68215; HLA-A*24:02; PMEL; ENSG00000185664; TAA
TYLEPGPVT

SEQ ID NO: 68216 - protein, 9 aa, Homo sapiens
  Table A; Target 68216; HLA-B*27:05; PMEL; ENSG00000185664; TAA
TYLEPGPVT

SEQ ID NO: 68217 - protein, 9 aa, Homo sapiens
  Table A; Target 68217; HLA-B*35:03; PMEL; ENSG00000185664; TAA
TYLEPGPVT

SEQ ID NO: 68218 - protein, 9 aa, Homo sapiens
  Table A; Target 68218; HLA-C*01:02; PMEL; ENSG00000185664; TAA
TYLEPGPVT

SEQ ID NO: 68219 - protein, 9 aa, Homo sapiens
  Table A; Target 68219; HLA-C*04:01; PMEL; ENSG00000185664; TAA
TYLEPGPVT

SEQ ID NO: 68220 - protein, 9 aa, Homo sapiens
  Table A; Target 68220; HLA-C*06:02; PMEL; ENSG00000185664; TAA
TYLEPGPVT

SEQ ID NO: 68221 - protein, 9 aa, Homo sapiens
  Table A; Target 68221; HLA-C*14:02; PMEL; ENSG00000185664; TAA
TYLEPGPVT

SEQ ID NO: 68222 - protein, 9 aa, Homo sapiens
  Table A; Target 68222; HLA-C*16:01; PMEL; ENSG00000185664; TAA
TYLEPGPVT

SEQ ID NO: 68223 - protein, 10 aa, Homo sapiens
  Table A; Target 68223; HLA-A*02:01; PMEL; ENSG00000185664; TAA
TYLEPGPVTA

SEQ ID NO: 68224 - protein, 10 aa, Homo sapiens
  Table A; Target 68224; HLA-A*23:01; PMEL; ENSG00000185664; TAA
TYLEPGPVTA

SEQ ID NO: 68225 - protein, 10 aa, Homo sapiens
  Table A; Target 68225; HLA-A*24:02; PMEL; ENSG00000185664; TAA
TYLEPGPVTA

SEQ ID NO: 68226 - protein, 10 aa, Homo sapiens
  Table A; Target 68226; HLA-A*31:01; PMEL; ENSG00000185664; TAA
TYLEPGPVTA

SEQ ID NO: 68227 - protein, 10 aa, Homo sapiens
  Table A; Target 68227; HLA-A*33:03; PMEL; ENSG00000185664; TAA
TYLEPGPVTA

SEQ ID NO: 68228 - protein, 10 aa, Homo sapiens
  Table A; Target 68228; HLA-B*27:05; PMEL; ENSG00000185664; TAA
TYLEPGPVTA

SEQ ID NO: 68229 - protein, 10 aa, Homo sapiens
  Table A; Target 68229; HLA-B*54:01; PMEL; ENSG00000185664; TAA
TYLEPGPVTA

SEQ ID NO: 68230 - protein, 10 aa, Homo sapiens
  Table A; Target 68230; HLA-C*01:02; PMEL; ENSG00000185664; TAA
TYLEPGPVTA

SEQ ID NO: 68231 - protein, 10 aa, Homo sapiens
  Table A; Target 68231; HLA-C*04:01; PMEL; ENSG00000185664; TAA
TYLEPGPVTA

SEQ ID NO: 68232 - protein, 10 aa, Homo sapiens
  Table A; Target 68232; HLA-C*06:02; PMEL; ENSG00000185664; TAA
TYLEPGPVTA

SEQ ID NO: 68233 - protein, 10 aa, Homo sapiens
  Table A; Target 68233; HLA-C*14:02; PMEL; ENSG00000185664; TAA
TYLEPGPVTA

SEQ ID NO: 68234 - protein, 8 aa, Homo sapiens
  Table A; Target 68234; HLA-A*30:01; PMEL; ENSG00000185664; TAA
VETTAREL

SEQ ID NO: 68235 - protein, 8 aa, Homo sapiens
  Table A; Target 68235; HLA-B*18:01; PMEL; ENSG00000185664; TAA
VETTAREL

SEQ ID NO: 68236 - protein, 8 aa, Homo sapiens
  Table A; Target 68236; HLA-B*37:01; PMEL; ENSG00000185664; TAA
VETTAREL

SEQ ID NO: 68237 - protein, 8 aa, Homo sapiens
  Table A; Target 68237; HLA-B*40:01; PMEL; ENSG00000185664; TAA
VETTAREL

SEQ ID NO: 68238 - protein, 8 aa, Homo sapiens
  Table A; Target 68238; HLA-B*40:02; PMEL; ENSG00000185664; TAA
VETTAREL

SEQ ID NO: 68239 - protein, 8 aa, Homo sapiens
  Table A; Target 68239; HLA-B*44:03; PMEL; ENSG00000185664; TAA
VETTAREL

SEQ ID NO: 68240 - protein, 8 aa, Homo sapiens
  Table A; Target 68240; HLA-B*49:01; PMEL; ENSG00000185664; TAA
VETTAREL

SEQ ID NO: 68241 - protein, 8 aa, Homo sapiens
  Table A; Target 68241; HLA-C*03:03; PMEL; ENSG00000185664; TAA
VETTAREL

SEQ ID NO: 68242 - protein, 8 aa, Homo sapiens
  Table A; Target 68242; HLA-C*03:04; PMEL; ENSG00000185664; TAA
VETTAREL

SEQ ID NO: 68243 - protein, 8 aa, Homo sapiens
  Table A; Target 68243; HLA-C*06:02; PMEL; ENSG00000185664; TAA
VETTAREL

SEQ ID NO: 68244 - protein, 8 aa, Homo sapiens
  Table A; Target 68244; HLA-C*12:03; PMEL; ENSG00000185664; TAA
VETTAREL

SEQ ID NO: 68245 - protein, 8 aa, Homo sapiens
  Table A; Target 68245; HLA-C*16:01; PMEL; ENSG00000185664; TAA
VETTAREL

SEQ ID NO: 68246 - protein, 8 aa, Homo sapiens
  Table A; Target 68246; HLA-C*16:02; PMEL; ENSG00000185664; TAA
VETTAREL

SEQ ID NO: 68247 - protein, 8 aa, Homo sapiens
  Table A; Target 68247; HLA-C*16:04; PMEL; ENSG00000185664; TAA
VETTAREL

SEQ ID NO: 68248 - protein, 9 aa, Homo sapiens
  Table A; Target 68248; HLA-B*40:02; PMEL; ENSG00000185664; TAA
VETTARELP

SEQ ID NO: 68249 - protein, 9 aa, Homo sapiens
  Table A; Target 68249; HLA-B*49:01; PMEL; ENSG00000185664; TAA
VETTARELP

SEQ ID NO: 68250 - protein, 10 aa, Homo sapiens
  Table A; Target 68250; HLA-B*37:01; PMEL; ENSG00000185664; TAA
VETTARELPI

SEQ ID NO: 68251 - protein, 10 aa, Homo sapiens
  Table A; Target 68251; HLA-B*49:01; PMEL; ENSG00000185664; TAA
VETTARELPI

SEQ ID NO: 68252 - protein, 8 aa, Homo sapiens
  Table A; Target 68252; HLA-C*16:01; PMEL; ENSG00000185664; TAA
VGATKVPR

SEQ ID NO: 68253 - protein, 9 aa, Homo sapiens
  Table A; Target 68253; HLA-C*03:03; PMEL; ENSG00000185664; TAA
VGTTPGQAP

SEQ ID NO: 68254 - protein, 9 aa, Homo sapiens
  Table A; Target 68254; HLA-C*03:04; PMEL; ENSG00000185664; TAA
VGTTPGQAP

SEQ ID NO: 68255 - protein, 8 aa, Homo sapiens
  Table A; Target 68255; HLA-A*02:01; PMEL; ENSG00000185664; TAA
VIGALLAV

SEQ ID NO: 68256 - protein, 8 aa, Homo sapiens
  Table A; Target 68256; HLA-A*02:03; PMEL; ENSG00000185664; TAA
VIGALLAV

SEQ ID NO: 68257 - protein, 8 aa, Homo sapiens
  Table A; Target 68257; HLA-B*13:02; PMEL; ENSG00000185664; TAA
VIGALLAV

SEQ ID NO: 68258 - protein, 8 aa, Homo sapiens
  Table A; Target 68258; HLA-B*51:01; PMEL; ENSG00000185664; TAA
VIGALLAV

SEQ ID NO: 68259 - protein, 8 aa, Homo sapiens
  Table A; Target 68259; HLA-C*06:02; PMEL; ENSG00000185664; TAA
VIGALLAV

SEQ ID NO: 68260 - protein, 8 aa, Homo sapiens
  Table A; Target 68260; HLA-C*12:03; PMEL; ENSG00000185664; TAA
VIGALLAV

SEQ ID NO: 68261 - protein, 8 aa, Homo sapiens
  Table A; Target 68261; HLA-C*16:01; PMEL; ENSG00000185664; TAA
VISTAPVQ

SEQ ID NO: 68262 - protein, 9 aa, Homo sapiens
  Table A; Target 68262; HLA-A*03:01; PMEL; ENSG00000185664; TAA
VISTAPVQM

SEQ ID NO: 68263 - protein, 9 aa, Homo sapiens
  Table A; Target 68263; HLA-A*03:02; PMEL; ENSG00000185664; TAA
VISTAPVQM

SEQ ID NO: 68264 - protein, 9 aa, Homo sapiens
  Table A; Target 68264; HLA-A*23:01; PMEL; ENSG00000185664; TAA
VISTAPVQM

SEQ ID NO: 68265 - protein, 9 aa, Homo sapiens
  Table A; Target 68265; HLA-A*32:01; PMEL; ENSG00000185664; TAA
VISTAPVQM

SEQ ID NO: 68266 - protein, 9 aa, Homo sapiens
  Table A; Target 68266; HLA-B*15:03; PMEL; ENSG00000185664; TAA
VISTAPVQM

SEQ ID NO: 68267 - protein, 9 aa, Homo sapiens
  Table A; Target 68267; HLA-B*27:05; PMEL; ENSG00000185664; TAA
VISTAPVQM

SEQ ID NO: 68268 - protein, 9 aa, Homo sapiens
  Table A; Target 68268; HLA-B*37:01; PMEL; ENSG00000185664; TAA
VISTAPVQM

SEQ ID NO: 68269 - protein, 9 aa, Homo sapiens
  Table A; Target 68269; HLA-B*46:01; PMEL; ENSG00000185664; TAA
VISTAPVQM

SEQ ID NO: 68270 - protein, 9 aa, Homo sapiens
  Table A; Target 68270; HLA-C*01:02; PMEL; ENSG00000185664; TAA
VISTAPVQM

SEQ ID NO: 68271 - protein, 9 aa, Homo sapiens
  Table A; Target 68271; HLA-C*02:02; PMEL; ENSG00000185664; TAA
VISTAPVQM

SEQ ID NO: 68272 - protein, 9 aa, Homo sapiens
  Table A; Target 68272; HLA-C*04:01; PMEL; ENSG00000185664; TAA
VISTAPVQM

SEQ ID NO: 68273 - protein, 9 aa, Homo sapiens
  Table A; Target 68273; HLA-C*05:01; PMEL; ENSG00000185664; TAA
VISTAPVQM

SEQ ID NO: 68274 - protein, 9 aa, Homo sapiens
  Table A; Target 68274; HLA-C*07:04; PMEL; ENSG00000185664; TAA
VISTAPVQM

SEQ ID NO: 68275 - protein, 9 aa, Homo sapiens
  Table A; Target 68275; HLA-C*07:06; PMEL; ENSG00000185664; TAA
VISTAPVQM

SEQ ID NO: 68276 - protein, 9 aa, Homo sapiens
  Table A; Target 68276; HLA-C*12:03; PMEL; ENSG00000185664; TAA
VISTAPVQM

SEQ ID NO: 68277 - protein, 9 aa, Homo sapiens
  Table A; Target 68277; HLA-C*14:02; PMEL; ENSG00000185664; TAA
VISTAPVQM

SEQ ID NO: 68278 - protein, 9 aa, Homo sapiens
  Table A; Target 68278; HLA-C*16:01; PMEL; ENSG00000185664; TAA
VISTAPVQM

SEQ ID NO: 68279 - protein, 11 aa, Homo sapiens
  Table A; Target 68279; HLA-C*06:02; PMEL; ENSG00000185664; TAA
VISTAPVQMPT

SEQ ID NO: 68280 - protein, 11 aa, Homo sapiens
  Table A; Target 68280; HLA-C*07:02; PMEL; ENSG00000185664; TAA
VISTAPVQMPT

SEQ ID NO: 68281 - protein, 8 aa, Homo sapiens
  Table A; Target 68281; HLA-A*03:01; PMEL; ENSG00000185664; TAA
VLASLIYR

SEQ ID NO: 68282 - protein, 8 aa, Homo sapiens
  Table A; Target 68282; HLA-A*31:01; PMEL; ENSG00000185664; TAA
VLASLIYR

SEQ ID NO: 68283 - protein, 9 aa, Homo sapiens
  Table A; Target 68283; HLA-A*02:03; PMEL; ENSG00000185664; TAA
VLASLIYRR

SEQ ID NO: 68284 - protein, 9 aa, Homo sapiens
  Table A; Target 68284; HLA-A*02:04; PMEL; ENSG00000185664; TAA
VLASLIYRR

SEQ ID NO: 68285 - protein, 9 aa, Homo sapiens
  Table A; Target 68285; HLA-A*02:07; PMEL; ENSG00000185664; TAA
VLASLIYRR

SEQ ID NO: 68286 - protein, 9 aa, Homo sapiens
  Table A; Target 68286; HLA-A*03:01; PMEL; ENSG00000185664; TAA
VLASLIYRR

SEQ ID NO: 68287 - protein, 9 aa, Homo sapiens
  Table A; Target 68287; HLA-A*29:02; PMEL; ENSG00000185664; TAA
VLASLIYRR

SEQ ID NO: 68288 - protein, 9 aa, Homo sapiens
  Table A; Target 68288; HLA-A*31:01; PMEL; ENSG00000185664; TAA
VLASLIYRR

SEQ ID NO: 68289 - protein, 9 aa, Homo sapiens
  Table A; Target 68289; HLA-A*33:01; PMEL; ENSG00000185664; TAA
VLASLIYRR

SEQ ID NO: 68290 - protein, 9 aa, Homo sapiens
  Table A; Target 68290; HLA-A*33:03; PMEL; ENSG00000185664; TAA
VLASLIYRR

SEQ ID NO: 68291 - protein, 9 aa, Homo sapiens
  Table A; Target 68291; HLA-A*68:02; PMEL; ENSG00000185664; TAA
VLASLIYRR

SEQ ID NO: 68292 - protein, 9 aa, Homo sapiens
  Table A; Target 68292; HLA-A*02:01; PMEL; ENSG00000185664; TAA
VLGGPVSGL

SEQ ID NO: 68293 - protein, 9 aa, Homo sapiens
  Table A; Target 68293; HLA-A*02:03; PMEL; ENSG00000185664; TAA
VLGGPVSGL

SEQ ID NO: 68294 - protein, 9 aa, Homo sapiens
  Table A; Target 68294; HLA-A*02:04; PMEL; ENSG00000185664; TAA
VLGGPVSGL

SEQ ID NO: 68295 - protein, 9 aa, Homo sapiens
  Table A; Target 68295; HLA-A*02:07; PMEL; ENSG00000185664; TAA
VLGGPVSGL

SEQ ID NO: 68296 - protein, 9 aa, Homo sapiens
  Table A; Target 68296; HLA-A*03:01; PMEL; ENSG00000185664; TAA
VLGGPVSGL

SEQ ID NO: 68297 - protein, 9 aa, Homo sapiens
  Table A; Target 68297; HLA-A*03:02; PMEL; ENSG00000185664; TAA
VLGGPVSGL

SEQ ID NO: 68298 - protein, 9 aa, Homo sapiens
  Table A; Target 68298; HLA-A*23:01; PMEL; ENSG00000185664; TAA
VLGGPVSGL

SEQ ID NO: 68299 - protein, 9 aa, Homo sapiens
  Table A; Target 68299; HLA-A*24:02; PMEL; ENSG00000185664; TAA
VLGGPVSGL

SEQ ID NO: 68300 - protein, 9 aa, Homo sapiens
  Table A; Target 68300; HLA-A*25:01; PMEL; ENSG00000185664; TAA
VLGGPVSGL

SEQ ID NO: 68301 - protein, 9 aa, Homo sapiens
  Table A; Target 68301; HLA-A*30:01; PMEL; ENSG00000185664; TAA
VLGGPVSGL

SEQ ID NO: 68302 - protein, 9 aa, Homo sapiens
  Table A; Target 68302; HLA-A*31:01; PMEL; ENSG00000185664; TAA
VLGGPVSGL

SEQ ID NO: 68303 - protein, 9 aa, Homo sapiens
  Table A; Target 68303; HLA-A*32:01; PMEL; ENSG00000185664; TAA
VLGGPVSGL

SEQ ID NO: 68304 - protein, 9 aa, Homo sapiens
  Table A; Target 68304; HLA-B*07:02; PMEL; ENSG00000185664; TAA
VLGGPVSGL

SEQ ID NO: 68305 - protein, 9 aa, Homo sapiens
  Table A; Target 68305; HLA-B*13:02; PMEL; ENSG00000185664; TAA
VLGGPVSGL

SEQ ID NO: 68306 - protein, 9 aa, Homo sapiens
  Table A; Target 68306; HLA-B*15:01; PMEL; ENSG00000185664; TAA
VLGGPVSGL

SEQ ID NO: 68307 - protein, 9 aa, Homo sapiens
  Table A; Target 68307; HLA-B*27:05; PMEL; ENSG00000185664; TAA
VLGGPVSGL

SEQ ID NO: 68308 - protein, 9 aa, Homo sapiens
  Table A; Target 68308; HLA-B*37:01; PMEL; ENSG00000185664; TAA
VLGGPVSGL

SEQ ID NO: 68309 - protein, 9 aa, Homo sapiens
  Table A; Target 68309; HLA-B*39:01; PMEL; ENSG00000185664; TAA
VLGGPVSGL

SEQ ID NO: 68310 - protein, 9 aa, Homo sapiens
  Table A; Target 68310; HLA-B*40:02; PMEL; ENSG00000185664; TAA
VLGGPVSGL

SEQ ID NO: 68311 - protein, 9 aa, Homo sapiens
  Table A; Target 68311; HLA-B*46:01; PMEL; ENSG00000185664; TAA
VLGGPVSGL

SEQ ID NO: 68312 - protein, 9 aa, Homo sapiens
  Table A; Target 68312; HLA-B*55:01; PMEL; ENSG00000185664; TAA
VLGGPVSGL

SEQ ID NO: 68313 - protein, 9 aa, Homo sapiens
  Table A; Target 68313; HLA-C*01:02; PMEL; ENSG00000185664; TAA
VLGGPVSGL

SEQ ID NO: 68314 - protein, 9 aa, Homo sapiens
  Table A; Target 68314; HLA-C*02:02; PMEL; ENSG00000185664; TAA
VLGGPVSGL

SEQ ID NO: 68315 - protein, 9 aa, Homo sapiens
  Table A; Target 68315; HLA-C*04:01; PMEL; ENSG00000185664; TAA
VLGGPVSGL

SEQ ID NO: 68316 - protein, 9 aa, Homo sapiens
  Table A; Target 68316; HLA-C*05:01; PMEL; ENSG00000185664; TAA
VLGGPVSGL

SEQ ID NO: 68317 - protein, 9 aa, Homo sapiens
  Table A; Target 68317; HLA-C*06:02; PMEL; ENSG00000185664; TAA
VLGGPVSGL

SEQ ID NO: 68318 - protein, 9 aa, Homo sapiens
  Table A; Target 68318; HLA-C*07:01; PMEL; ENSG00000185664; TAA
VLGGPVSGL

SEQ ID NO: 68319 - protein, 9 aa, Homo sapiens
  Table A; Target 68319; HLA-C*07:02; PMEL; ENSG00000185664; TAA
VLGGPVSGL

SEQ ID NO: 68320 - protein, 9 aa, Homo sapiens
  Table A; Target 68320; HLA-C*07:04; PMEL; ENSG00000185664; TAA
VLGGPVSGL

SEQ ID NO: 68321 - protein, 9 aa, Homo sapiens
  Table A; Target 68321; HLA-C*12:03; PMEL; ENSG00000185664; TAA
VLGGPVSGL

SEQ ID NO: 68322 - protein, 9 aa, Homo sapiens
  Table A; Target 68322; HLA-C*14:02; PMEL; ENSG00000185664; TAA
VLGGPVSGL

SEQ ID NO: 68323 - protein, 9 aa, Homo sapiens
  Table A; Target 68323; HLA-C*16:02; PMEL; ENSG00000185664; TAA
VLGGPVSGL

SEQ ID NO: 68324 - protein, 10 aa, Homo sapiens
  Table A; Target 68324; HLA-C*06:02; PMEL; ENSG00000185664; TAA
VLGGPVSGLS

SEQ ID NO: 68325 - protein, 10 aa, Homo sapiens
  Table A; Target 68325; HLA-C*07:01; PMEL; ENSG00000185664; TAA
VLGGPVSGLS

SEQ ID NO: 68326 - protein, 10 aa, Homo sapiens
  Table A; Target 68326; HLA-C*07:02; PMEL; ENSG00000185664; TAA
VLGGPVSGLS

SEQ ID NO: 68327 - protein, 11 aa, Homo sapiens
  Table A; Target 68327; HLA-A*02:03; PMEL; ENSG00000185664; TAA
VLGGPVSGLSI

SEQ ID NO: 68328 - protein, 11 aa, Homo sapiens
  Table A; Target 68328; HLA-B*13:02; PMEL; ENSG00000185664; TAA
VLGGPVSGLSI

SEQ ID NO: 68329 - protein, 11 aa, Homo sapiens
  Table A; Target 68329; HLA-C*01:02; PMEL; ENSG00000185664; TAA
VLGGPVSGLSI

SEQ ID NO: 68330 - protein, 8 aa, Homo sapiens
  Table A; Target 68330; HLA-C*06:02; PMEL; ENSG00000185664; TAA
VLHQILKG

SEQ ID NO: 68331 - protein, 8 aa, Homo sapiens
  Table A; Target 68331; HLA-A*02:01; PMEL; ENSG00000185664; TAA
VLMAVVLA

SEQ ID NO: 68332 - protein, 10 aa, Homo sapiens
  Table A; Target 68332; HLA-A*02:01; PMEL; ENSG00000185664; TAA
VLMAVVLASL

SEQ ID NO: 68333 - protein, 10 aa, Homo sapiens
  Table A; Target 68333; HLA-A*02:03; PMEL; ENSG00000185664; TAA
VLMAVVLASL

SEQ ID NO: 68334 - protein, 10 aa, Homo sapiens
  Table A; Target 68334; HLA-A*02:04; PMEL; ENSG00000185664; TAA
VLMAVVLASL

SEQ ID NO: 68335 - protein, 10 aa, Homo sapiens
  Table A; Target 68335; HLA-A*02:07; PMEL; ENSG00000185664; TAA
VLMAVVLASL

SEQ ID NO: 68336 - protein, 8 aa, Homo sapiens
  Table A; Target 68336; HLA-B*51:01; PMEL; ENSG00000185664; TAA
VLPDGQVI

SEQ ID NO: 68337 - protein, 8 aa, Homo sapiens
  Table A; Target 68337; HLA-C*01:02; PMEL; ENSG00000185664; TAA
VLPDGQVI

SEQ ID NO: 68338 - protein, 9 aa, Homo sapiens
  Table A; Target 68338; HLA-A*02:07; PMEL; ENSG00000185664; TAA
VLPDGQVIW

SEQ ID NO: 68339 - protein, 9 aa, Homo sapiens
  Table A; Target 68339; HLA-A*23:01; PMEL; ENSG00000185664; TAA
VLPDGQVIW

SEQ ID NO: 68340 - protein, 9 aa, Homo sapiens
  Table A; Target 68340; HLA-A*24:02; PMEL; ENSG00000185664; TAA
VLPDGQVIW

SEQ ID NO: 68341 - protein, 9 aa, Homo sapiens
  Table A; Target 68341; HLA-B*57:01; PMEL; ENSG00000185664; TAA
VLPDGQVIW

SEQ ID NO: 68342 - protein, 9 aa, Homo sapiens
  Table A; Target 68342; HLA-B*58:01; PMEL; ENSG00000185664; TAA
VLPDGQVIW

SEQ ID NO: 68343 - protein, 10 aa, Homo sapiens
  Table A; Target 68343; HLA-A*02:01; PMEL; ENSG00000185664; TAA
VLPDGQVIWV

SEQ ID NO: 68344 - protein, 10 aa, Homo sapiens
  Table A; Target 68344; HLA-A*02:03; PMEL; ENSG00000185664; TAA
VLPDGQVIWV

SEQ ID NO: 68345 - protein, 10 aa, Homo sapiens
  Table A; Target 68345; HLA-A*02:07; PMEL; ENSG00000185664; TAA
VLPDGQVIWV

SEQ ID NO: 68346 - protein, 9 aa, Homo sapiens
  Table A; Target 68346; HLA-A*02:07; PMEL; ENSG00000185664; TAA
VLPSPACQL

SEQ ID NO: 68347 - protein, 9 aa, Homo sapiens
  Table A; Target 68347; HLA-A*03:01; PMEL; ENSG00000185664; TAA
VLPSPACQL

SEQ ID NO: 68348 - protein, 9 aa, Homo sapiens
  Table A; Target 68348; HLA-A*23:01; PMEL; ENSG00000185664; TAA
VLPSPACQL

SEQ ID NO: 68349 - protein, 9 aa, Homo sapiens
  Table A; Target 68349; HLA-A*24:02; PMEL; ENSG00000185664; TAA
VLPSPACQL

SEQ ID NO: 68350 - protein, 9 aa, Homo sapiens
  Table A; Target 68350; HLA-B*46:01; PMEL; ENSG00000185664; TAA
VLPSPACQL

SEQ ID NO: 68351 - protein, 9 aa, Homo sapiens
  Table A; Target 68351; HLA-C*01:02; PMEL; ENSG00000185664; TAA
VLPSPACQL

SEQ ID NO: 68352 - protein, 9 aa, Homo sapiens
  Table A; Target 68352; HLA-C*14:02; PMEL; ENSG00000185664; TAA
VLPSPACQL

SEQ ID NO: 68353 - protein, 9 aa, Homo sapiens
  Table A; Target 68353; HLA-A*02:01; PMEL; ENSG00000185664; TAA
VLQAAIPLT

SEQ ID NO: 68354 - protein, 9 aa, Homo sapiens
  Table A; Target 68354; HLA-A*02:03; PMEL; ENSG00000185664; TAA
VLQAAIPLT

SEQ ID NO: 68355 - protein, 9 aa, Homo sapiens
  Table A; Target 68355; HLA-A*02:04; PMEL; ENSG00000185664; TAA
VLQAAIPLT

SEQ ID NO: 68356 - protein, 9 aa, Homo sapiens
  Table A; Target 68356; HLA-B*55:01; PMEL; ENSG00000185664; TAA
VLQAAIPLT

SEQ ID NO: 68357 - protein, 9 aa, Homo sapiens
  Table A; Target 68357; HLA-C*06:02; PMEL; ENSG00000185664; TAA
VLQAAIPLT

SEQ ID NO: 68358 - protein, 10 aa, Homo sapiens
  Table A; Target 68358; HLA-A*02:03; PMEL; ENSG00000185664; TAA
VLQAAIPLTS

SEQ ID NO: 68359 - protein, 10 aa, Homo sapiens
  Table A; Target 68359; HLA-C*06:02; PMEL; ENSG00000185664; TAA
VLQAAIPLTS

SEQ ID NO: 68360 - protein, 9 aa, Homo sapiens
  Table A; Target 68360; HLA-A*32:01; PMEL; ENSG00000185664; TAA
VLSGTTAAQ

SEQ ID NO: 68361 - protein, 9 aa, Homo sapiens
  Table A; Target 68361; HLA-C*01:02; PMEL; ENSG00000185664; TAA
VLSGTTAAQ

SEQ ID NO: 68362 - protein, 9 aa, Homo sapiens
  Table A; Target 68362; HLA-C*07:04; PMEL; ENSG00000185664; TAA
VLSGTTAAQ

SEQ ID NO: 68363 - protein, 9 aa, Homo sapiens
  Table A; Target 68363; HLA-C*14:02; PMEL; ENSG00000185664; TAA
VLSGTTAAQ

SEQ ID NO: 68364 - protein, 10 aa, Homo sapiens
  Table A; Target 68364; HLA-A*02:01; PMEL; ENSG00000185664; TAA
VLSGTTAAQV

SEQ ID NO: 68365 - protein, 10 aa, Homo sapiens
  Table A; Target 68365; HLA-A*02:03; PMEL; ENSG00000185664; TAA
VLSGTTAAQV

SEQ ID NO: 68366 - protein, 10 aa, Homo sapiens
  Table A; Target 68366; HLA-A*03:02; PMEL; ENSG00000185664; TAA
VLSGTTAAQV

SEQ ID NO: 68367 - protein, 10 aa, Homo sapiens
  Table A; Target 68367; HLA-B*13:02; PMEL; ENSG00000185664; TAA
VLSGTTAAQV

SEQ ID NO: 68368 - protein, 11 aa, Homo sapiens
  Table A; Target 68368; HLA-C*06:02; PMEL; ENSG00000185664; TAA
VLSGTTAAQVT

SEQ ID NO: 68369 - protein, 11 aa, Homo sapiens
  Table A; Target 68369; HLA-C*07:04; PMEL; ENSG00000185664; TAA
VLSGTTAAQVT

SEQ ID NO: 68370 - protein, 10 aa, Homo sapiens
  Table A; Target 68370; HLA-A*02:01; PMEL; ENSG00000185664; TAA
VLYRYGSFSV

SEQ ID NO: 68371 - protein, 10 aa, Homo sapiens
  Table A; Target 68371; HLA-A*02:03; PMEL; ENSG00000185664; TAA
VLYRYGSFSV

SEQ ID NO: 68372 - protein, 10 aa, Homo sapiens
  Table A; Target 68372; HLA-A*02:04; PMEL; ENSG00000185664; TAA
VLYRYGSFSV

SEQ ID NO: 68373 - protein, 9 aa, Homo sapiens
  Table A; Target 68373; HLA-A*02:01; PMEL; ENSG00000185664; TAA
VMGTTLAEM

SEQ ID NO: 68374 - protein, 9 aa, Homo sapiens
  Table A; Target 68374; HLA-B*46:01; PMEL; ENSG00000185664; TAA
VMGTTLAEM

SEQ ID NO: 68375 - protein, 9 aa, Homo sapiens
  Table A; Target 68375; HLA-B*55:01; PMEL; ENSG00000185664; TAA
VMGTTLAEM

SEQ ID NO: 68376 - protein, 9 aa, Homo sapiens
  Table A; Target 68376; HLA-C*01:02; PMEL; ENSG00000185664; TAA
VMGTTLAEM

SEQ ID NO: 68377 - protein, 9 aa, Homo sapiens
  Table A; Target 68377; HLA-C*04:01; PMEL; ENSG00000185664; TAA
VMGTTLAEM

SEQ ID NO: 68378 - protein, 9 aa, Homo sapiens
  Table A; Target 68378; HLA-C*07:04; PMEL; ENSG00000185664; TAA
VMGTTLAEM

SEQ ID NO: 68379 - protein, 9 aa, Homo sapiens
  Table A; Target 68379; HLA-C*14:02; PMEL; ENSG00000185664; TAA
VMGTTLAEM

SEQ ID NO: 68380 - protein, 9 aa, Homo sapiens
  Table A; Target 68380; HLA-B*07:02; PMEL; ENSG00000185664; TAA
VPFSVSVSQ

SEQ ID NO: 68381 - protein, 9 aa, Homo sapiens
  Table A; Target 68381; HLA-B*35:01; PMEL; ENSG00000185664; TAA
VPFSVSVSQ

SEQ ID NO: 68382 - protein, 9 aa, Homo sapiens
  Table A; Target 68382; HLA-B*35:03; PMEL; ENSG00000185664; TAA
VPFSVSVSQ

SEQ ID NO: 68383 - protein, 9 aa, Homo sapiens
  Table A; Target 68383; HLA-B*51:01; PMEL; ENSG00000185664; TAA
VPFSVSVSQ

SEQ ID NO: 68384 - protein, 9 aa, Homo sapiens
  Table A; Target 68384; HLA-B*54:01; PMEL; ENSG00000185664; TAA
VPFSVSVSQ

SEQ ID NO: 68385 - protein, 9 aa, Homo sapiens
  Table A; Target 68385; HLA-B*55:01; PMEL; ENSG00000185664; TAA
VPFSVSVSQ

SEQ ID NO: 68386 - protein, 9 aa, Homo sapiens
  Table A; Target 68386; HLA-B*56:01; PMEL; ENSG00000185664; TAA
VPFSVSVSQ

SEQ ID NO: 68387 - protein, 9 aa, Homo sapiens
  Table A; Target 68387; HLA-C*07:02; PMEL; ENSG00000185664; TAA
VPFSVSVSQ

SEQ ID NO: 68388 - protein, 10 aa, Homo sapiens
  Table A; Target 68388; HLA-A*25:01; PMEL; ENSG00000185664; TAA
VPFSVSVSQL

SEQ ID NO: 68389 - protein, 10 aa, Homo sapiens
  Table A; Target 68389; HLA-A*30:01; PMEL; ENSG00000185664; TAA
VPFSVSVSQL

SEQ ID NO: 68390 - protein, 10 aa, Homo sapiens
  Table A; Target 68390; HLA-A*68:01; PMEL; ENSG00000185664; TAA
VPFSVSVSQL

SEQ ID NO: 68391 - protein, 10 aa, Homo sapiens
  Table A; Target 68391; HLA-A*68:02; PMEL; ENSG00000185664; TAA
VPFSVSVSQL

SEQ ID NO: 68392 - protein, 10 aa, Homo sapiens
  Table A; Target 68392; HLA-B*07:02; PMEL; ENSG00000185664; TAA
VPFSVSVSQL

SEQ ID NO: 68393 - protein, 10 aa, Homo sapiens
  Table A; Target 68393; HLA-B*35:01; PMEL; ENSG00000185664; TAA
VPFSVSVSQL

SEQ ID NO: 68394 - protein, 10 aa, Homo sapiens
  Table A; Target 68394; HLA-B*35:03; PMEL; ENSG00000185664; TAA
VPFSVSVSQL

SEQ ID NO: 68395 - protein, 10 aa, Homo sapiens
  Table A; Target 68395; HLA-B*38:01; PMEL; ENSG00000185664; TAA
VPFSVSVSQL

SEQ ID NO: 68396 - protein, 10 aa, Homo sapiens
  Table A; Target 68396; HLA-B*40:01; PMEL; ENSG00000185664; TAA
VPFSVSVSQL

SEQ ID NO: 68397 - protein, 10 aa, Homo sapiens
  Table A; Target 68397; HLA-B*51:01; PMEL; ENSG00000185664; TAA
VPFSVSVSQL

SEQ ID NO: 68398 - protein, 10 aa, Homo sapiens
  Table A; Target 68398; HLA-B*56:01; PMEL; ENSG00000185664; TAA
VPFSVSVSQL

SEQ ID NO: 68399 - protein, 10 aa, Homo sapiens
  Table A; Target 68399; HLA-C*04:01; PMEL; ENSG00000185664; TAA
VPFSVSVSQL

SEQ ID NO: 68400 - protein, 10 aa, Homo sapiens
  Table A; Target 68400; HLA-C*05:01; PMEL; ENSG00000185664; TAA
VPFSVSVSQL

SEQ ID NO: 68401 - protein, 10 aa, Homo sapiens
  Table A; Target 68401; HLA-C*07:01; PMEL; ENSG00000185664; TAA
VPFSVSVSQL

SEQ ID NO: 68402 - protein, 10 aa, Homo sapiens
  Table A; Target 68402; HLA-C*07:02; PMEL; ENSG00000185664; TAA
VPFSVSVSQL

SEQ ID NO: 68403 - protein, 10 aa, Homo sapiens
  Table A; Target 68403; HLA-C*07:06; PMEL; ENSG00000185664; TAA
VPFSVSVSQL

SEQ ID NO: 68404 - protein, 10 aa, Homo sapiens
  Table A; Target 68404; HLA-C*14:02; PMEL; ENSG00000185664; TAA
VPFSVSVSQL

SEQ ID NO: 68405 - protein, 11 aa, Homo sapiens
  Table A; Target 68405; HLA-A*31:01; PMEL; ENSG00000185664; TAA
VPFSVSVSQLR

SEQ ID NO: 68406 - protein, 11 aa, Homo sapiens
  Table A; Target 68406; HLA-A*33:01; PMEL; ENSG00000185664; TAA
VPFSVSVSQLR

SEQ ID NO: 68407 - protein, 11 aa, Homo sapiens
  Table A; Target 68407; HLA-A*33:03; PMEL; ENSG00000185664; TAA
VPFSVSVSQLR

SEQ ID NO: 68408 - protein, 11 aa, Homo sapiens
  Table A; Target 68408; HLA-A*68:01; PMEL; ENSG00000185664; TAA
VPFSVSVSQLR

SEQ ID NO: 68409 - protein, 11 aa, Homo sapiens
  Table A; Target 68409; HLA-A*68:02; PMEL; ENSG00000185664; TAA
VPFSVSVSQLR

SEQ ID NO: 68410 - protein, 11 aa, Homo sapiens
  Table A; Target 68410; HLA-C*07:06; PMEL; ENSG00000185664; TAA
VPFSVSVSQLR

SEQ ID NO: 68411 - protein, 9 aa, Homo sapiens
  Table A; Target 68411; HLA-B*07:02; PMEL; ENSG00000185664; TAA
VPLAHSSSA

SEQ ID NO: 68412 - protein, 9 aa, Homo sapiens
  Table A; Target 68412; HLA-B*08:01; PMEL; ENSG00000185664; TAA
VPLAHSSSA

SEQ ID NO: 68413 - protein, 9 aa, Homo sapiens
  Table A; Target 68413; HLA-B*35:01; PMEL; ENSG00000185664; TAA
VPLAHSSSA

SEQ ID NO: 68414 - protein, 9 aa, Homo sapiens
  Table A; Target 68414; HLA-B*35:03; PMEL; ENSG00000185664; TAA
VPLAHSSSA

SEQ ID NO: 68415 - protein, 9 aa, Homo sapiens
  Table A; Target 68415; HLA-B*40:02; PMEL; ENSG00000185664; TAA
VPLAHSSSA

SEQ ID NO: 68416 - protein, 9 aa, Homo sapiens
  Table A; Target 68416; HLA-B*51:01; PMEL; ENSG00000185664; TAA
VPLAHSSSA

SEQ ID NO: 68417 - protein, 9 aa, Homo sapiens
  Table A; Target 68417; HLA-B*54:01; PMEL; ENSG00000185664; TAA
VPLAHSSSA

SEQ ID NO: 68418 - protein, 9 aa, Homo sapiens
  Table A; Target 68418; HLA-B*55:01; PMEL; ENSG00000185664; TAA
VPLAHSSSA

SEQ ID NO: 68419 - protein, 9 aa, Homo sapiens
  Table A; Target 68419; HLA-B*56:01; PMEL; ENSG00000185664; TAA
VPLAHSSSA

SEQ ID NO: 68420 - protein, 9 aa, Homo sapiens
  Table A; Target 68420; HLA-C*07:02; PMEL; ENSG00000185664; TAA
VPLAHSSSA

SEQ ID NO: 68421 - protein, 9 aa, Homo sapiens
  Table A; Target 68421; HLA-C*14:02; PMEL; ENSG00000185664; TAA
VPLAHSSSA

SEQ ID NO: 68422 - protein, 10 aa, Homo sapiens
  Table A; Target 68422; HLA-A*23:01; PMEL; ENSG00000185664; TAA
VPLAHSSSAF

SEQ ID NO: 68423 - protein, 10 aa, Homo sapiens
  Table A; Target 68423; HLA-A*24:02; PMEL; ENSG00000185664; TAA
VPLAHSSSAF

SEQ ID NO: 68424 - protein, 10 aa, Homo sapiens
  Table A; Target 68424; HLA-B*07:02; PMEL; ENSG00000185664; TAA
VPLAHSSSAF

SEQ ID NO: 68425 - protein, 10 aa, Homo sapiens
  Table A; Target 68425; HLA-B*15:01; PMEL; ENSG00000185664; TAA
VPLAHSSSAF

SEQ ID NO: 68426 - protein, 10 aa, Homo sapiens
  Table A; Target 68426; HLA-B*15:03; PMEL; ENSG00000185664; TAA
VPLAHSSSAF

SEQ ID NO: 68427 - protein, 10 aa, Homo sapiens
  Table A; Target 68427; HLA-B*35:01; PMEL; ENSG00000185664; TAA
VPLAHSSSAF

SEQ ID NO: 68428 - protein, 10 aa, Homo sapiens
  Table A; Target 68428; HLA-B*35:03; PMEL; ENSG00000185664; TAA
VPLAHSSSAF

SEQ ID NO: 68429 - protein, 10 aa, Homo sapiens
  Table A; Target 68429; HLA-B*46:01; PMEL; ENSG00000185664; TAA
VPLAHSSSAF

SEQ ID NO: 68430 - protein, 10 aa, Homo sapiens
  Table A; Target 68430; HLA-B*55:01; PMEL; ENSG00000185664; TAA
VPLAHSSSAF

SEQ ID NO: 68431 - protein, 10 aa, Homo sapiens
  Table A; Target 68431; HLA-B*56:01; PMEL; ENSG00000185664; TAA
VPLAHSSSAF

SEQ ID NO: 68432 - protein, 10 aa, Homo sapiens
  Table A; Target 68432; HLA-C*04:01; PMEL; ENSG00000185664; TAA
VPLAHSSSAF

SEQ ID NO: 68433 - protein, 10 aa, Homo sapiens
  Table A; Target 68433; HLA-C*07:01; PMEL; ENSG00000185664; TAA
VPLAHSSSAF

SEQ ID NO: 68434 - protein, 10 aa, Homo sapiens
  Table A; Target 68434; HLA-C*07:02; PMEL; ENSG00000185664; TAA
VPLAHSSSAF

SEQ ID NO: 68435 - protein, 10 aa, Homo sapiens
  Table A; Target 68435; HLA-C*14:02; PMEL; ENSG00000185664; TAA
VPLAHSSSAF

SEQ ID NO: 68436 - protein, 8 aa, Homo sapiens
  Table A; Target 68436; HLA-B*35:01; PMEL; ENSG00000185664; TAA
VPLDCVLY

SEQ ID NO: 68437 - protein, 8 aa, Homo sapiens
  Table A; Target 68437; HLA-B*55:01; PMEL; ENSG00000185664; TAA
VPLDCVLY

SEQ ID NO: 68438 - protein, 8 aa, Homo sapiens
  Table A; Target 68438; HLA-C*07:01; PMEL; ENSG00000185664; TAA
VPLDCVLY

SEQ ID NO: 68439 - protein, 9 aa, Homo sapiens
  Table A; Target 68439; HLA-A*33:01; PMEL; ENSG00000185664; TAA
VPLDCVLYR

SEQ ID NO: 68440 - protein, 9 aa, Homo sapiens
  Table A; Target 68440; HLA-A*33:03; PMEL; ENSG00000185664; TAA
VPLDCVLYR

SEQ ID NO: 68441 - protein, 10 aa, Homo sapiens
  Table A; Target 68441; HLA-A*29:02; PMEL; ENSG00000185664; TAA
VPLDCVLYRY

SEQ ID NO: 68442 - protein, 8 aa, Homo sapiens
  Table A; Target 68442; HLA-B*51:01; PMEL; ENSG00000185664; TAA
VPLIVGIL

SEQ ID NO: 68443 - protein, 9 aa, Homo sapiens
  Table A; Target 68443; HLA-A*23:01; PMEL; ENSG00000185664; TAA
VPLIVGILL

SEQ ID NO: 68444 - protein, 9 aa, Homo sapiens
  Table A; Target 68444; HLA-B*07:02; PMEL; ENSG00000185664; TAA
VPLIVGILL

SEQ ID NO: 68445 - protein, 9 aa, Homo sapiens
  Table A; Target 68445; HLA-B*35:01; PMEL; ENSG00000185664; TAA
VPLIVGILL

SEQ ID NO: 68446 - protein, 9 aa, Homo sapiens
  Table A; Target 68446; HLA-B*35:03; PMEL; ENSG00000185664; TAA
VPLIVGILL

SEQ ID NO: 68447 - protein, 9 aa, Homo sapiens
  Table A; Target 68447; HLA-B*51:01; PMEL; ENSG00000185664; TAA
VPLIVGILL

SEQ ID NO: 68448 - protein, 9 aa, Homo sapiens
  Table A; Target 68448; HLA-B*54:01; PMEL; ENSG00000185664; TAA
VPLIVGILL

SEQ ID NO: 68449 - protein, 10 aa, Homo sapiens
  Table A; Target 68449; HLA-B*51:01; PMEL; ENSG00000185664; TAA
VPLIVGILLV

SEQ ID NO: 68450 - protein, 9 aa, Homo sapiens
  Table A; Target 68450; HLA-B*07:02; PMEL; ENSG00000185664; TAA
VPQLPHSSS

SEQ ID NO: 68451 - protein, 9 aa, Homo sapiens
  Table A; Target 68451; HLA-B*54:01; PMEL; ENSG00000185664; TAA
VPQLPHSSS

SEQ ID NO: 68452 - protein, 9 aa, Homo sapiens
  Table A; Target 68452; HLA-B*55:01; PMEL; ENSG00000185664; TAA
VPQLPHSSS

SEQ ID NO: 68453 - protein, 9 aa, Homo sapiens
  Table A; Target 68453; HLA-B*56:01; PMEL; ENSG00000185664; TAA
VPQLPHSSS

SEQ ID NO: 68454 - protein, 9 aa, Homo sapiens
  Table A; Target 68454; HLA-C*07:02; PMEL; ENSG00000185664; TAA
VPQLPHSSS

SEQ ID NO: 68455 - protein, 10 aa, Homo sapiens
  Table A; Target 68455; HLA-B*07:02; PMEL; ENSG00000185664; TAA
VPQLPHSSSH

SEQ ID NO: 68456 - protein, 9 aa, Homo sapiens
  Table A; Target 68456; HLA-B*07:02; PMEL; ENSG00000185664; TAA
VPSGEGDAF

SEQ ID NO: 68457 - protein, 9 aa, Homo sapiens
  Table A; Target 68457; HLA-B*15:01; PMEL; ENSG00000185664; TAA
VPSGEGDAF

SEQ ID NO: 68458 - protein, 9 aa, Homo sapiens
  Table A; Target 68458; HLA-B*15:03; PMEL; ENSG00000185664; TAA
VPSGEGDAF

SEQ ID NO: 68459 - protein, 9 aa, Homo sapiens
  Table A; Target 68459; HLA-B*27:05; PMEL; ENSG00000185664; TAA
VPSGEGDAF

SEQ ID NO: 68460 - protein, 9 aa, Homo sapiens
  Table A; Target 68460; HLA-B*35:01; PMEL; ENSG00000185664; TAA
VPSGEGDAF

SEQ ID NO: 68461 - protein, 9 aa, Homo sapiens
  Table A; Target 68461; HLA-B*35:03; PMEL; ENSG00000185664; TAA
VPSGEGDAF

SEQ ID NO: 68462 - protein, 9 aa, Homo sapiens
  Table A; Target 68462; HLA-B*38:01; PMEL; ENSG00000185664; TAA
VPSGEGDAF

SEQ ID NO: 68463 - protein, 9 aa, Homo sapiens
  Table A; Target 68463; HLA-B*39:01; PMEL; ENSG00000185664; TAA
VPSGEGDAF

SEQ ID NO: 68464 - protein, 9 aa, Homo sapiens
  Table A; Target 68464; HLA-B*55:01; PMEL; ENSG00000185664; TAA
VPSGEGDAF

SEQ ID NO: 68465 - protein, 9 aa, Homo sapiens
  Table A; Target 68465; HLA-C*03:03; PMEL; ENSG00000185664; TAA
VPSGEGDAF

SEQ ID NO: 68466 - protein, 9 aa, Homo sapiens
  Table A; Target 68466; HLA-C*04:01; PMEL; ENSG00000185664; TAA
VPSGEGDAF

SEQ ID NO: 68467 - protein, 9 aa, Homo sapiens
  Table A; Target 68467; HLA-C*05:01; PMEL; ENSG00000185664; TAA
VPSGEGDAF

SEQ ID NO: 68468 - protein, 9 aa, Homo sapiens
  Table A; Target 68468; HLA-C*07:02; PMEL; ENSG00000185664; TAA
VPSGEGDAF

SEQ ID NO: 68469 - protein, 9 aa, Homo sapiens
  Table A; Target 68469; HLA-C*14:02; PMEL; ENSG00000185664; TAA
VPSGEGDAF

SEQ ID NO: 68470 - protein, 11 aa, Homo sapiens
  Table A; Target 68470; HLA-B*27:02; PMEL; ENSG00000185664; TAA
VPSGEGDAFEL

SEQ ID NO: 68471 - protein, 11 aa, Homo sapiens
  Table A; Target 68471; HLA-B*35:01; PMEL; ENSG00000185664; TAA
VPSGEGDAFEL

SEQ ID NO: 68472 - protein, 11 aa, Homo sapiens
  Table A; Target 68472; HLA-B*35:03; PMEL; ENSG00000185664; TAA
VPSGEGDAFEL

SEQ ID NO: 68473 - protein, 11 aa, Homo sapiens
  Table A; Target 68473; HLA-B*38:01; PMEL; ENSG00000185664; TAA
VPSGEGDAFEL

SEQ ID NO: 68474 - protein, 11 aa, Homo sapiens
  Table A; Target 68474; HLA-B*39:01; PMEL; ENSG00000185664; TAA
VPSGEGDAFEL

SEQ ID NO: 68475 - protein, 11 aa, Homo sapiens
  Table A; Target 68475; HLA-B*55:01; PMEL; ENSG00000185664; TAA
VPSGEGDAFEL

SEQ ID NO: 68476 - protein, 11 aa, Homo sapiens
  Table A; Target 68476; HLA-C*03:03; PMEL; ENSG00000185664; TAA
VPSGEGDAFEL

SEQ ID NO: 68477 - protein, 9 aa, Homo sapiens
  Table A; Target 68477; HLA-B*35:01; PMEL; ENSG00000185664; TAA
VPTTEVIST

SEQ ID NO: 68478 - protein, 9 aa, Homo sapiens
  Table A; Target 68478; HLA-B*35:03; PMEL; ENSG00000185664; TAA
VPTTEVIST

SEQ ID NO: 68479 - protein, 9 aa, Homo sapiens
  Table A; Target 68479; HLA-B*54:01; PMEL; ENSG00000185664; TAA
VPTTEVIST

SEQ ID NO: 68480 - protein, 9 aa, Homo sapiens
  Table A; Target 68480; HLA-B*55:01; PMEL; ENSG00000185664; TAA
VPTTEVIST

SEQ ID NO: 68481 - protein, 9 aa, Homo sapiens
  Table A; Target 68481; HLA-B*56:01; PMEL; ENSG00000185664; TAA
VPTTEVIST

SEQ ID NO: 68482 - protein, 10 aa, Homo sapiens
  Table A; Target 68482; HLA-B*07:02; PMEL; ENSG00000185664; TAA
VPTTEVISTA

SEQ ID NO: 68483 - protein, 10 aa, Homo sapiens
  Table A; Target 68483; HLA-B*35:03; PMEL; ENSG00000185664; TAA
VPTTEVISTA

SEQ ID NO: 68484 - protein, 10 aa, Homo sapiens
  Table A; Target 68484; HLA-B*54:01; PMEL; ENSG00000185664; TAA
VPTTEVISTA

SEQ ID NO: 68485 - protein, 10 aa, Homo sapiens
  Table A; Target 68485; HLA-B*55:01; PMEL; ENSG00000185664; TAA
VPTTEVISTA

SEQ ID NO: 68486 - protein, 10 aa, Homo sapiens
  Table A; Target 68486; HLA-B*56:01; PMEL; ENSG00000185664; TAA
VPTTEVISTA

SEQ ID NO: 68487 - protein, 9 aa, Homo sapiens
  Table A; Target 68487; HLA-B*55:01; PMEL; ENSG00000185664; TAA
VPTTEVVGT

SEQ ID NO: 68488 - protein, 9 aa, Homo sapiens
  Table A; Target 68488; HLA-B*56:01; PMEL; ENSG00000185664; TAA
VPTTEVVGT

SEQ ID NO: 68489 - protein, 9 aa, Homo sapiens
  Table A; Target 68489; HLA-B*35:03; PMEL; ENSG00000185664; TAA
VPVSEVMGT

SEQ ID NO: 68490 - protein, 9 aa, Homo sapiens
  Table A; Target 68490; HLA-B*55:01; PMEL; ENSG00000185664; TAA
VPVSEVMGT

SEQ ID NO: 68491 - protein, 9 aa, Homo sapiens
  Table A; Target 68491; HLA-B*56:01; PMEL; ENSG00000185664; TAA
VPVSEVMGT

SEQ ID NO: 68492 - protein, 10 aa, Homo sapiens
  Table A; Target 68492; HLA-B*56:01; PMEL; ENSG00000185664; TAA
VPVSEVMGTT

SEQ ID NO: 68493 - protein, 11 aa, Homo sapiens
  Table A; Target 68493; HLA-A*23:01; PMEL; ENSG00000185664; TAA
VPVSEVMGTTL

SEQ ID NO: 68494 - protein, 11 aa, Homo sapiens
  Table A; Target 68494; HLA-A*30:01; PMEL; ENSG00000185664; TAA
VPVSEVMGTTL

SEQ ID NO: 68495 - protein, 11 aa, Homo sapiens
  Table A; Target 68495; HLA-B*07:02; PMEL; ENSG00000185664; TAA
VPVSEVMGTTL

SEQ ID NO: 68496 - protein, 11 aa, Homo sapiens
  Table A; Target 68496; HLA-B*27:02; PMEL; ENSG00000185664; TAA
VPVSEVMGTTL

SEQ ID NO: 68497 - protein, 11 aa, Homo sapiens
  Table A; Target 68497; HLA-B*35:01; PMEL; ENSG00000185664; TAA
VPVSEVMGTTL

SEQ ID NO: 68498 - protein, 11 aa, Homo sapiens
  Table A; Target 68498; HLA-B*35:03; PMEL; ENSG00000185664; TAA
VPVSEVMGTTL

SEQ ID NO: 68499 - protein, 11 aa, Homo sapiens
  Table A; Target 68499; HLA-B*38:01; PMEL; ENSG00000185664; TAA
VPVSEVMGTTL

SEQ ID NO: 68500 - protein, 11 aa, Homo sapiens
  Table A; Target 68500; HLA-B*39:01; PMEL; ENSG00000185664; TAA
VPVSEVMGTTL

SEQ ID NO: 68501 - protein, 11 aa, Homo sapiens
  Table A; Target 68501; HLA-B*40:01; PMEL; ENSG00000185664; TAA
VPVSEVMGTTL

SEQ ID NO: 68502 - protein, 11 aa, Homo sapiens
  Table A; Target 68502; HLA-B*51:01; PMEL; ENSG00000185664; TAA
VPVSEVMGTTL

SEQ ID NO: 68503 - protein, 11 aa, Homo sapiens
  Table A; Target 68503; HLA-B*54:01; PMEL; ENSG00000185664; TAA
VPVSEVMGTTL

SEQ ID NO: 68504 - protein, 11 aa, Homo sapiens
  Table A; Target 68504; HLA-B*55:01; PMEL; ENSG00000185664; TAA
VPVSEVMGTTL

SEQ ID NO: 68505 - protein, 11 aa, Homo sapiens
  Table A; Target 68505; HLA-B*56:01; PMEL; ENSG00000185664; TAA
VPVSEVMGTTL

SEQ ID NO: 68506 - protein, 11 aa, Homo sapiens
  Table A; Target 68506; HLA-B*58:01; PMEL; ENSG00000185664; TAA
VPVSEVMGTTL

SEQ ID NO: 68507 - protein, 11 aa, Homo sapiens
  Table A; Target 68507; HLA-C*01:02; PMEL; ENSG00000185664; TAA
VPVSEVMGTTL

SEQ ID NO: 68508 - protein, 11 aa, Homo sapiens
  Table A; Target 68508; HLA-C*03:03; PMEL; ENSG00000185664; TAA
VPVSEVMGTTL

SEQ ID NO: 68509 - protein, 11 aa, Homo sapiens
  Table A; Target 68509; HLA-C*03:04; PMEL; ENSG00000185664; TAA
VPVSEVMGTTL

SEQ ID NO: 68510 - protein, 11 aa, Homo sapiens
  Table A; Target 68510; HLA-C*05:01; PMEL; ENSG00000185664; TAA
VPVSEVMGTTL

SEQ ID NO: 68511 - protein, 11 aa, Homo sapiens
  Table A; Target 68511; HLA-C*07:01; PMEL; ENSG00000185664; TAA
VPVSEVMGTTL

SEQ ID NO: 68512 - protein, 11 aa, Homo sapiens
  Table A; Target 68512; HLA-C*07:02; PMEL; ENSG00000185664; TAA
VPVSEVMGTTL

SEQ ID NO: 68513 - protein, 11 aa, Homo sapiens
  Table A; Target 68513; HLA-C*07:06; PMEL; ENSG00000185664; TAA
VPVSEVMGTTL

SEQ ID NO: 68514 - protein, 11 aa, Homo sapiens
  Table A; Target 68514; HLA-C*12:03; PMEL; ENSG00000185664; TAA
VPVSEVMGTTL

SEQ ID NO: 68515 - protein, 11 aa, Homo sapiens
  Table A; Target 68515; HLA-C*16:02; PMEL; ENSG00000185664; TAA
VPVSEVMGTTL

SEQ ID NO: 68516 - protein, 9 aa, Homo sapiens
  Table A; Target 68516; HLA-B*13:02; PMEL; ENSG00000185664; TAA
VQGIESAEI

SEQ ID NO: 68517 - protein, 9 aa, Homo sapiens
  Table A; Target 68517; HLA-B*38:01; PMEL; ENSG00000185664; TAA
VQGIESAEI

SEQ ID NO: 68518 - protein, 9 aa, Homo sapiens
  Table A; Target 68518; HLA-A*32:01; PMEL; ENSG00000185664; TAA
VQMPTAEST

SEQ ID NO: 68519 - protein, 9 aa, Homo sapiens
  Table A; Target 68519; HLA-B*13:02; PMEL; ENSG00000185664; TAA
VQMPTAEST

SEQ ID NO: 68520 - protein, 9 aa, Homo sapiens
  Table A; Target 68520; HLA-B*15:01; PMEL; ENSG00000185664; TAA
VQMPTAEST

SEQ ID NO: 68521 - protein, 9 aa, Homo sapiens
  Table A; Target 68521; HLA-B*15:03; PMEL; ENSG00000185664; TAA
VQMPTAEST

SEQ ID NO: 68522 - protein, 9 aa, Homo sapiens
  Table A; Target 68522; HLA-B*39:01; PMEL; ENSG00000185664; TAA
VQMPTAEST

SEQ ID NO: 68523 - protein, 9 aa, Homo sapiens
  Table A; Target 68523; HLA-C*07:04; PMEL; ENSG00000185664; TAA
VQMPTAEST

SEQ ID NO: 68524 - protein, 9 aa, Homo sapiens
  Table A; Target 68524; HLA-C*14:02; PMEL; ENSG00000185664; TAA
VQMPTAEST

SEQ ID NO: 68525 - protein, 9 aa, Homo sapiens
  Table A; Target 68525; HLA-C*16:04; PMEL; ENSG00000185664; TAA
VQMPTAEST

SEQ ID NO: 68526 - protein, 11 aa, Homo sapiens
  Table A; Target 68526; HLA-A*23:01; PMEL; ENSG00000185664; TAA
VQMPTAESTGM

SEQ ID NO: 68527 - protein, 11 aa, Homo sapiens
  Table A; Target 68527; HLA-A*32:01; PMEL; ENSG00000185664; TAA
VQMPTAESTGM

SEQ ID NO: 68528 - protein, 11 aa, Homo sapiens
  Table A; Target 68528; HLA-B*13:02; PMEL; ENSG00000185664; TAA
VQMPTAESTGM

SEQ ID NO: 68529 - protein, 11 aa, Homo sapiens
  Table A; Target 68529; HLA-B*15:01; PMEL; ENSG00000185664; TAA
VQMPTAESTGM

SEQ ID NO: 68530 - protein, 11 aa, Homo sapiens
  Table A; Target 68530; HLA-B*15:03; PMEL; ENSG00000185664; TAA
VQMPTAESTGM

SEQ ID NO: 68531 - protein, 11 aa, Homo sapiens
  Table A; Target 68531; HLA-B*27:02; PMEL; ENSG00000185664; TAA
VQMPTAESTGM

SEQ ID NO: 68532 - protein, 11 aa, Homo sapiens
  Table A; Target 68532; HLA-B*27:05; PMEL; ENSG00000185664; TAA
VQMPTAESTGM

SEQ ID NO: 68533 - protein, 11 aa, Homo sapiens
  Table A; Target 68533; HLA-B*38:01; PMEL; ENSG00000185664; TAA
VQMPTAESTGM

SEQ ID NO: 68534 - protein, 11 aa, Homo sapiens
  Table A; Target 68534; HLA-B*39:01; PMEL; ENSG00000185664; TAA
VQMPTAESTGM

SEQ ID NO: 68535 - protein, 11 aa, Homo sapiens
  Table A; Target 68535; HLA-B*46:01; PMEL; ENSG00000185664; TAA
VQMPTAESTGM

SEQ ID NO: 68536 - protein, 11 aa, Homo sapiens
  Table A; Target 68536; HLA-C*07:01; PMEL; ENSG00000185664; TAA
VQMPTAESTGM

SEQ ID NO: 68537 - protein, 11 aa, Homo sapiens
  Table A; Target 68537; HLA-C*07:04; PMEL; ENSG00000185664; TAA
VQMPTAESTGM

SEQ ID NO: 68538 - protein, 11 aa, Homo sapiens
  Table A; Target 68538; HLA-C*14:02; PMEL; ENSG00000185664; TAA
VQMPTAESTGM

SEQ ID NO: 68539 - protein, 11 aa, Homo sapiens
  Table A; Target 68539; HLA-C*16:04; PMEL; ENSG00000185664; TAA
VQMPTAESTGM

SEQ ID NO: 68540 - protein, 8 aa, Homo sapiens
  Table A; Target 68540; HLA-A*02:03; PMEL; ENSG00000185664; TAA
VQVPTTEV

SEQ ID NO: 68541 - protein, 8 aa, Homo sapiens
  Table A; Target 68541; HLA-A*30:01; PMEL; ENSG00000185664; TAA
VQVPTTEV

SEQ ID NO: 68542 - protein, 8 aa, Homo sapiens
  Table A; Target 68542; HLA-B*13:02; PMEL; ENSG00000185664; TAA
VQVPTTEV

SEQ ID NO: 68543 - protein, 8 aa, Homo sapiens
  Table A; Target 68543; HLA-B*15:01; PMEL; ENSG00000185664; TAA
VQVPTTEV

SEQ ID NO: 68544 - protein, 8 aa, Homo sapiens
  Table A; Target 68544; HLA-B*15:03; PMEL; ENSG00000185664; TAA
VQVPTTEV

SEQ ID NO: 68545 - protein, 8 aa, Homo sapiens
  Table A; Target 68545; HLA-B*27:05; PMEL; ENSG00000185664; TAA
VQVPTTEV

SEQ ID NO: 68546 - protein, 8 aa, Homo sapiens
  Table A; Target 68546; HLA-B*37:01; PMEL; ENSG00000185664; TAA
VQVPTTEV

SEQ ID NO: 68547 - protein, 8 aa, Homo sapiens
  Table A; Target 68547; HLA-B*39:01; PMEL; ENSG00000185664; TAA
VQVPTTEV

SEQ ID NO: 68548 - protein, 8 aa, Homo sapiens
  Table A; Target 68548; HLA-B*40:02; PMEL; ENSG00000185664; TAA
VQVPTTEV

SEQ ID NO: 68549 - protein, 8 aa, Homo sapiens
  Table A; Target 68549; HLA-B*46:01; PMEL; ENSG00000185664; TAA
VQVPTTEV

SEQ ID NO: 68550 - protein, 8 aa, Homo sapiens
  Table A; Target 68550; HLA-B*49:01; PMEL; ENSG00000185664; TAA
VQVPTTEV

SEQ ID NO: 68551 - protein, 8 aa, Homo sapiens
  Table A; Target 68551; HLA-C*02:02; PMEL; ENSG00000185664; TAA
VQVPTTEV

SEQ ID NO: 68552 - protein, 8 aa, Homo sapiens
  Table A; Target 68552; HLA-C*05:01; PMEL; ENSG00000185664; TAA
VQVPTTEV

SEQ ID NO: 68553 - protein, 8 aa, Homo sapiens
  Table A; Target 68553; HLA-C*06:02; PMEL; ENSG00000185664; TAA
VQVPTTEV

SEQ ID NO: 68554 - protein, 9 aa, Homo sapiens
  Table A; Target 68554; HLA-A*02:01; PMEL; ENSG00000185664; TAA
VQVPTTEVI

SEQ ID NO: 68555 - protein, 9 aa, Homo sapiens
  Table A; Target 68555; HLA-A*02:03; PMEL; ENSG00000185664; TAA
VQVPTTEVI

SEQ ID NO: 68556 - protein, 9 aa, Homo sapiens
  Table A; Target 68556; HLA-A*23:01; PMEL; ENSG00000185664; TAA
VQVPTTEVI

SEQ ID NO: 68557 - protein, 9 aa, Homo sapiens
  Table A; Target 68557; HLA-A*24:02; PMEL; ENSG00000185664; TAA
VQVPTTEVI

SEQ ID NO: 68558 - protein, 9 aa, Homo sapiens
  Table A; Target 68558; HLA-A*25:01; PMEL; ENSG00000185664; TAA
VQVPTTEVI

SEQ ID NO: 68559 - protein, 9 aa, Homo sapiens
  Table A; Target 68559; HLA-A*30:01; PMEL; ENSG00000185664; TAA
VQVPTTEVI

SEQ ID NO: 68560 - protein, 9 aa, Homo sapiens
  Table A; Target 68560; HLA-A*32:01; PMEL; ENSG00000185664; TAA
VQVPTTEVI

SEQ ID NO: 68561 - protein, 9 aa, Homo sapiens
  Table A; Target 68561; HLA-B*13:02; PMEL; ENSG00000185664; TAA
VQVPTTEVI

SEQ ID NO: 68562 - protein, 9 aa, Homo sapiens
  Table A; Target 68562; HLA-B*15:01; PMEL; ENSG00000185664; TAA
VQVPTTEVI

SEQ ID NO: 68563 - protein, 9 aa, Homo sapiens
  Table A; Target 68563; HLA-B*15:03; PMEL; ENSG00000185664; TAA
VQVPTTEVI

SEQ ID NO: 68564 - protein, 9 aa, Homo sapiens
  Table A; Target 68564; HLA-B*18:01; PMEL; ENSG00000185664; TAA
VQVPTTEVI

SEQ ID NO: 68565 - protein, 9 aa, Homo sapiens
  Table A; Target 68565; HLA-B*27:05; PMEL; ENSG00000185664; TAA
VQVPTTEVI

SEQ ID NO: 68566 - protein, 9 aa, Homo sapiens
  Table A; Target 68566; HLA-B*38:01; PMEL; ENSG00000185664; TAA
VQVPTTEVI

SEQ ID NO: 68567 - protein, 9 aa, Homo sapiens
  Table A; Target 68567; HLA-B*39:01; PMEL; ENSG00000185664; TAA
VQVPTTEVI

SEQ ID NO: 68568 - protein, 9 aa, Homo sapiens
  Table A; Target 68568; HLA-B*40:01; PMEL; ENSG00000185664; TAA
VQVPTTEVI

SEQ ID NO: 68569 - protein, 9 aa, Homo sapiens
  Table A; Target 68569; HLA-B*40:02; PMEL; ENSG00000185664; TAA
VQVPTTEVI

SEQ ID NO: 68570 - protein, 9 aa, Homo sapiens
  Table A; Target 68570; HLA-B*46:01; PMEL; ENSG00000185664; TAA
VQVPTTEVI

SEQ ID NO: 68571 - protein, 9 aa, Homo sapiens
  Table A; Target 68571; HLA-B*49:01; PMEL; ENSG00000185664; TAA
VQVPTTEVI

SEQ ID NO: 68572 - protein, 9 aa, Homo sapiens
  Table A; Target 68572; HLA-B*58:01; PMEL; ENSG00000185664; TAA
VQVPTTEVI

SEQ ID NO: 68573 - protein, 9 aa, Homo sapiens
  Table A; Target 68573; HLA-C*02:02; PMEL; ENSG00000185664; TAA
VQVPTTEVI

SEQ ID NO: 68574 - protein, 9 aa, Homo sapiens
  Table A; Target 68574; HLA-C*03:03; PMEL; ENSG00000185664; TAA
VQVPTTEVI

SEQ ID NO: 68575 - protein, 9 aa, Homo sapiens
  Table A; Target 68575; HLA-C*03:04; PMEL; ENSG00000185664; TAA
VQVPTTEVI

SEQ ID NO: 68576 - protein, 9 aa, Homo sapiens
  Table A; Target 68576; HLA-C*04:01; PMEL; ENSG00000185664; TAA
VQVPTTEVI

SEQ ID NO: 68577 - protein, 9 aa, Homo sapiens
  Table A; Target 68577; HLA-C*05:01; PMEL; ENSG00000185664; TAA
VQVPTTEVI

SEQ ID NO: 68578 - protein, 9 aa, Homo sapiens
  Table A; Target 68578; HLA-C*06:02; PMEL; ENSG00000185664; TAA
VQVPTTEVI

SEQ ID NO: 68579 - protein, 9 aa, Homo sapiens
  Table A; Target 68579; HLA-C*07:01; PMEL; ENSG00000185664; TAA
VQVPTTEVI

SEQ ID NO: 68580 - protein, 9 aa, Homo sapiens
  Table A; Target 68580; HLA-C*07:04; PMEL; ENSG00000185664; TAA
VQVPTTEVI

SEQ ID NO: 68581 - protein, 9 aa, Homo sapiens
  Table A; Target 68581; HLA-C*12:03; PMEL; ENSG00000185664; TAA
VQVPTTEVI

SEQ ID NO: 68582 - protein, 9 aa, Homo sapiens
  Table A; Target 68582; HLA-C*16:02; PMEL; ENSG00000185664; TAA
VQVPTTEVI

SEQ ID NO: 68583 - protein, 9 aa, Homo sapiens
  Table A; Target 68583; HLA-C*16:04; PMEL; ENSG00000185664; TAA
VQVPTTEVI

SEQ ID NO: 68584 - protein, 11 aa, Homo sapiens
  Table A; Target 68584; HLA-C*07:04; PMEL; ENSG00000185664; TAA
VQVPTTEVIST

SEQ ID NO: 68585 - protein, 9 aa, Homo sapiens
  Table A; Target 68585; HLA-A*03:01; PMEL; ENSG00000185664; TAA
VSCQGGLPK

SEQ ID NO: 68586 - protein, 9 aa, Homo sapiens
  Table A; Target 68586; HLA-A*03:02; PMEL; ENSG00000185664; TAA
VSCQGGLPK

SEQ ID NO: 68587 - protein, 9 aa, Homo sapiens
  Table A; Target 68587; HLA-A*11:01; PMEL; ENSG00000185664; TAA
VSCQGGLPK

SEQ ID NO: 68588 - protein, 9 aa, Homo sapiens
  Table A; Target 68588; HLA-B*39:01; PMEL; ENSG00000185664; TAA
VSEVMGTTL

SEQ ID NO: 68589 - protein, 9 aa, Homo sapiens
  Table A; Target 68589; HLA-B*40:01; PMEL; ENSG00000185664; TAA
VSEVMGTTL

SEQ ID NO: 68590 - protein, 9 aa, Homo sapiens
  Table A; Target 68590; HLA-B*58:01; PMEL; ENSG00000185664; TAA
VSEVMGTTL

SEQ ID NO: 68591 - protein, 9 aa, Homo sapiens
  Table A; Target 68591; HLA-C*01:02; PMEL; ENSG00000185664; TAA
VSEVMGTTL

SEQ ID NO: 68592 - protein, 9 aa, Homo sapiens
  Table A; Target 68592; HLA-C*03:03; PMEL; ENSG00000185664; TAA
VSEVMGTTL

SEQ ID NO: 68593 - protein, 9 aa, Homo sapiens
  Table A; Target 68593; HLA-C*03:04; PMEL; ENSG00000185664; TAA
VSEVMGTTL

SEQ ID NO: 68594 - protein, 9 aa, Homo sapiens
  Table A; Target 68594; HLA-C*04:01; PMEL; ENSG00000185664; TAA
VSEVMGTTL

SEQ ID NO: 68595 - protein, 9 aa, Homo sapiens
  Table A; Target 68595; HLA-C*05:01; PMEL; ENSG00000185664; TAA
VSEVMGTTL

SEQ ID NO: 68596 - protein, 9 aa, Homo sapiens
  Table A; Target 68596; HLA-C*07:04; PMEL; ENSG00000185664; TAA
VSEVMGTTL

SEQ ID NO: 68597 - protein, 10 aa, Homo sapiens
  Table A; Target 68597; HLA-A*01:01; PMEL; ENSG00000185664; TAA
VSEVMGTTLA

SEQ ID NO: 68598 - protein, 10 aa, Homo sapiens
  Table A; Target 68598; HLA-A*31:01; PMEL; ENSG00000185664; TAA
VSGLSIGTGR

SEQ ID NO: 68599 - protein, 10 aa, Homo sapiens
  Table A; Target 68599; HLA-A*33:03; PMEL; ENSG00000185664; TAA
VSGLSIGTGR

SEQ ID NO: 68600 - protein, 10 aa, Homo sapiens
  Table A; Target 68600; HLA-A*68:01; PMEL; ENSG00000185664; TAA
VSGLSIGTGR

SEQ ID NO: 68601 - protein, 10 aa, Homo sapiens
  Table A; Target 68601; HLA-C*07:06; PMEL; ENSG00000185664; TAA
VSGLSIGTGR

SEQ ID NO: 68602 - protein, 9 aa, Homo sapiens
  Table A; Target 68602; HLA-A*02:01; PMEL; ENSG00000185664; TAA
VSLADTNSL

SEQ ID NO: 68603 - protein, 9 aa, Homo sapiens
  Table A; Target 68603; HLA-A*23:01; PMEL; ENSG00000185664; TAA
VSLADTNSL

SEQ ID NO: 68604 - protein, 9 aa, Homo sapiens
  Table A; Target 68604; HLA-A*24:02; PMEL; ENSG00000185664; TAA
VSLADTNSL

SEQ ID NO: 68605 - protein, 9 aa, Homo sapiens
  Table A; Target 68605; HLA-A*30:01; PMEL; ENSG00000185664; TAA
VSLADTNSL

SEQ ID NO: 68606 - protein, 9 aa, Homo sapiens
  Table A; Target 68606; HLA-A*32:01; PMEL; ENSG00000185664; TAA
VSLADTNSL

SEQ ID NO: 68607 - protein, 9 aa, Homo sapiens
  Table A; Target 68607; HLA-B*15:01; PMEL; ENSG00000185664; TAA
VSLADTNSL

SEQ ID NO: 68608 - protein, 9 aa, Homo sapiens
  Table A; Target 68608; HLA-B*15:03; PMEL; ENSG00000185664; TAA
VSLADTNSL

SEQ ID NO: 68609 - protein, 9 aa, Homo sapiens
  Table A; Target 68609; HLA-B*27:05; PMEL; ENSG00000185664; TAA
VSLADTNSL

SEQ ID NO: 68610 - protein, 9 aa, Homo sapiens
  Table A; Target 68610; HLA-B*35:03; PMEL; ENSG00000185664; TAA
VSLADTNSL

SEQ ID NO: 68611 - protein, 9 aa, Homo sapiens
  Table A; Target 68611; HLA-B*38:01; PMEL; ENSG00000185664; TAA
VSLADTNSL

SEQ ID NO: 68612 - protein, 9 aa, Homo sapiens
  Table A; Target 68612; HLA-B*39:01; PMEL; ENSG00000185664; TAA
VSLADTNSL

SEQ ID NO: 68613 - protein, 9 aa, Homo sapiens
  Table A; Target 68613; HLA-B*40:01; PMEL; ENSG00000185664; TAA
VSLADTNSL

SEQ ID NO: 68614 - protein, 9 aa, Homo sapiens
  Table A; Target 68614; HLA-B*40:02; PMEL; ENSG00000185664; TAA
VSLADTNSL

SEQ ID NO: 68615 - protein, 9 aa, Homo sapiens
  Table A; Target 68615; HLA-B*46:01; PMEL; ENSG00000185664; TAA
VSLADTNSL

SEQ ID NO: 68616 - protein, 9 aa, Homo sapiens
  Table A; Target 68616; HLA-B*57:01; PMEL; ENSG00000185664; TAA
VSLADTNSL

SEQ ID NO: 68617 - protein, 9 aa, Homo sapiens
  Table A; Target 68617; HLA-B*58:01; PMEL; ENSG00000185664; TAA
VSLADTNSL

SEQ ID NO: 68618 - protein, 9 aa, Homo sapiens
  Table A; Target 68618; HLA-C*01:02; PMEL; ENSG00000185664; TAA
VSLADTNSL

SEQ ID NO: 68619 - protein, 9 aa, Homo sapiens
  Table A; Target 68619; HLA-C*03:03; PMEL; ENSG00000185664; TAA
VSLADTNSL

SEQ ID NO: 68620 - protein, 9 aa, Homo sapiens
  Table A; Target 68620; HLA-C*03:04; PMEL; ENSG00000185664; TAA
VSLADTNSL

SEQ ID NO: 68621 - protein, 9 aa, Homo sapiens
  Table A; Target 68621; HLA-C*05:01; PMEL; ENSG00000185664; TAA
VSLADTNSL

SEQ ID NO: 68622 - protein, 9 aa, Homo sapiens
  Table A; Target 68622; HLA-C*07:04; PMEL; ENSG00000185664; TAA
VSLADTNSL

SEQ ID NO: 68623 - protein, 9 aa, Homo sapiens
  Table A; Target 68623; HLA-C*14:02; PMEL; ENSG00000185664; TAA
VSLADTNSL

SEQ ID NO: 68624 - protein, 9 aa, Homo sapiens
  Table A; Target 68624; HLA-C*16:01; PMEL; ENSG00000185664; TAA
VSLADTNSL

SEQ ID NO: 68625 - protein, 9 aa, Homo sapiens
  Table A; Target 68625; HLA-C*16:02; PMEL; ENSG00000185664; TAA
VSLADTNSL

SEQ ID NO: 68626 - protein, 9 aa, Homo sapiens
  Table A; Target 68626; HLA-C*16:04; PMEL; ENSG00000185664; TAA
VSLADTNSL

SEQ ID NO: 68627 - protein, 8 aa, Homo sapiens
  Table A; Target 68627; HLA-A*23:01; PMEL; ENSG00000185664; TAA
VSNDGPTL

SEQ ID NO: 68628 - protein, 8 aa, Homo sapiens
  Table A; Target 68628; HLA-A*32:01; PMEL; ENSG00000185664; TAA
VSNDGPTL

SEQ ID NO: 68629 - protein, 8 aa, Homo sapiens
  Table A; Target 68629; HLA-B*07:02; PMEL; ENSG00000185664; TAA
VSNDGPTL

SEQ ID NO: 68630 - protein, 8 aa, Homo sapiens
  Table A; Target 68630; HLA-B*15:03; PMEL; ENSG00000185664; TAA
VSNDGPTL

SEQ ID NO: 68631 - protein, 8 aa, Homo sapiens
  Table A; Target 68631; HLA-B*39:01; PMEL; ENSG00000185664; TAA
VSNDGPTL

SEQ ID NO: 68632 - protein, 8 aa, Homo sapiens
  Table A; Target 68632; HLA-B*40:02; PMEL; ENSG00000185664; TAA
VSNDGPTL

SEQ ID NO: 68633 - protein, 8 aa, Homo sapiens
  Table A; Target 68633; HLA-B*46:01; PMEL; ENSG00000185664; TAA
VSNDGPTL

SEQ ID NO: 68634 - protein, 8 aa, Homo sapiens
  Table A; Target 68634; HLA-B*51:01; PMEL; ENSG00000185664; TAA
VSNDGPTL

SEQ ID NO: 68635 - protein, 8 aa, Homo sapiens
  Table A; Target 68635; HLA-B*58:01; PMEL; ENSG00000185664; TAA
VSNDGPTL

SEQ ID NO: 68636 - protein, 8 aa, Homo sapiens
  Table A; Target 68636; HLA-C*01:02; PMEL; ENSG00000185664; TAA
VSNDGPTL

SEQ ID NO: 68637 - protein, 8 aa, Homo sapiens
  Table A; Target 68637; HLA-C*02:02; PMEL; ENSG00000185664; TAA
VSNDGPTL

SEQ ID NO: 68638 - protein, 8 aa, Homo sapiens
  Table A; Target 68638; HLA-C*03:03; PMEL; ENSG00000185664; TAA
VSNDGPTL

SEQ ID NO: 68639 - protein, 8 aa, Homo sapiens
  Table A; Target 68639; HLA-C*03:04; PMEL; ENSG00000185664; TAA
VSNDGPTL

SEQ ID NO: 68640 - protein, 8 aa, Homo sapiens
  Table A; Target 68640; HLA-C*04:01; PMEL; ENSG00000185664; TAA
VSNDGPTL

SEQ ID NO: 68641 - protein, 8 aa, Homo sapiens
  Table A; Target 68641; HLA-C*05:01; PMEL; ENSG00000185664; TAA
VSNDGPTL

SEQ ID NO: 68642 - protein, 8 aa, Homo sapiens
  Table A; Target 68642; HLA-C*07:02; PMEL; ENSG00000185664; TAA
VSNDGPTL

SEQ ID NO: 68643 - protein, 8 aa, Homo sapiens
  Table A; Target 68643; HLA-C*07:04; PMEL; ENSG00000185664; TAA
VSNDGPTL

SEQ ID NO: 68644 - protein, 8 aa, Homo sapiens
  Table A; Target 68644; HLA-C*12:03; PMEL; ENSG00000185664; TAA
VSNDGPTL

SEQ ID NO: 68645 - protein, 8 aa, Homo sapiens
  Table A; Target 68645; HLA-C*14:02; PMEL; ENSG00000185664; TAA
VSNDGPTL

SEQ ID NO: 68646 - protein, 8 aa, Homo sapiens
  Table A; Target 68646; HLA-C*16:01; PMEL; ENSG00000185664; TAA
VSNDGPTL

SEQ ID NO: 68647 - protein, 8 aa, Homo sapiens
  Table A; Target 68647; HLA-C*16:02; PMEL; ENSG00000185664; TAA
VSNDGPTL

SEQ ID NO: 68648 - protein, 8 aa, Homo sapiens
  Table A; Target 68648; HLA-C*16:04; PMEL; ENSG00000185664; TAA
VSNDGPTL

SEQ ID NO: 68649 - protein, 9 aa, Homo sapiens
  Table A; Target 68649; HLA-A*01:01; PMEL; ENSG00000185664; TAA
VSNDGPTLI

SEQ ID NO: 68650 - protein, 9 aa, Homo sapiens
  Table A; Target 68650; HLA-A*02:03; PMEL; ENSG00000185664; TAA
VSNDGPTLI

SEQ ID NO: 68651 - protein, 9 aa, Homo sapiens
  Table A; Target 68651; HLA-A*23:01; PMEL; ENSG00000185664; TAA
VSNDGPTLI

SEQ ID NO: 68652 - protein, 9 aa, Homo sapiens
  Table A; Target 68652; HLA-A*24:02; PMEL; ENSG00000185664; TAA
VSNDGPTLI

SEQ ID NO: 68653 - protein, 9 aa, Homo sapiens
  Table A; Target 68653; HLA-A*32:01; PMEL; ENSG00000185664; TAA
VSNDGPTLI

SEQ ID NO: 68654 - protein, 9 aa, Homo sapiens
  Table A; Target 68654; HLA-B*13:02; PMEL; ENSG00000185664; TAA
VSNDGPTLI

SEQ ID NO: 68655 - protein, 9 aa, Homo sapiens
  Table A; Target 68655; HLA-B*38:01; PMEL; ENSG00000185664; TAA
VSNDGPTLI

SEQ ID NO: 68656 - protein, 9 aa, Homo sapiens
  Table A; Target 68656; HLA-B*49:01; PMEL; ENSG00000185664; TAA
VSNDGPTLI

SEQ ID NO: 68657 - protein, 9 aa, Homo sapiens
  Table A; Target 68657; HLA-B*51:01; PMEL; ENSG00000185664; TAA
VSNDGPTLI

SEQ ID NO: 68658 - protein, 9 aa, Homo sapiens
  Table A; Target 68658; HLA-B*58:01; PMEL; ENSG00000185664; TAA
VSNDGPTLI

SEQ ID NO: 68659 - protein, 9 aa, Homo sapiens
  Table A; Target 68659; HLA-C*01:02; PMEL; ENSG00000185664; TAA
VSNDGPTLI

SEQ ID NO: 68660 - protein, 9 aa, Homo sapiens
  Table A; Target 68660; HLA-C*02:02; PMEL; ENSG00000185664; TAA
VSNDGPTLI

SEQ ID NO: 68661 - protein, 9 aa, Homo sapiens
  Table A; Target 68661; HLA-C*05:01; PMEL; ENSG00000185664; TAA
VSNDGPTLI

SEQ ID NO: 68662 - protein, 9 aa, Homo sapiens
  Table A; Target 68662; HLA-C*06:02; PMEL; ENSG00000185664; TAA
VSNDGPTLI

SEQ ID NO: 68663 - protein, 9 aa, Homo sapiens
  Table A; Target 68663; HLA-C*12:03; PMEL; ENSG00000185664; TAA
VSNDGPTLI

SEQ ID NO: 68664 - protein, 9 aa, Homo sapiens
  Table A; Target 68664; HLA-C*16:02; PMEL; ENSG00000185664; TAA
VSNDGPTLI

SEQ ID NO: 68665 - protein, 9 aa, Homo sapiens
  Table A; Target 68665; HLA-C*16:04; PMEL; ENSG00000185664; TAA
VSNDGPTLI

SEQ ID NO: 68666 - protein, 10 aa, Homo sapiens
  Table A; Target 68666; HLA-A*01:01; PMEL; ENSG00000185664; TAA
VSNDGPTLIG

SEQ ID NO: 68667 - protein, 11 aa, Homo sapiens
  Table A; Target 68667; HLA-A*31:01; PMEL; ENSG00000185664; TAA
VSNDGPTLIGA

SEQ ID NO: 68668 - protein, 11 aa, Homo sapiens
  Table A; Target 68668; HLA-B*56:01; PMEL; ENSG00000185664; TAA
VSNDGPTLIGA

SEQ ID NO: 68669 - protein, 10 aa, Homo sapiens
  Table A; Target 68669; HLA-B*57:01; PMEL; ENSG00000185664; TAA
VSRQLRTKAW

SEQ ID NO: 68670 - protein, 9 aa, Homo sapiens
  Table A; Target 68670; HLA-A*32:01; PMEL; ENSG00000185664; TAA
VSVSQLRAL

SEQ ID NO: 68671 - protein, 9 aa, Homo sapiens
  Table A; Target 68671; HLA-B*07:02; PMEL; ENSG00000185664; TAA
VSVSQLRAL

SEQ ID NO: 68672 - protein, 9 aa, Homo sapiens
  Table A; Target 68672; HLA-B*40:02; PMEL; ENSG00000185664; TAA
VSVSQLRAL

SEQ ID NO: 68673 - protein, 9 aa, Homo sapiens
  Table A; Target 68673; HLA-B*46:01; PMEL; ENSG00000185664; TAA
VSVSQLRAL

SEQ ID NO: 68674 - protein, 9 aa, Homo sapiens
  Table A; Target 68674; HLA-B*57:01; PMEL; ENSG00000185664; TAA
VSVSQLRAL

SEQ ID NO: 68675 - protein, 9 aa, Homo sapiens
  Table A; Target 68675; HLA-B*58:01; PMEL; ENSG00000185664; TAA
VSVSQLRAL

SEQ ID NO: 68676 - protein, 9 aa, Homo sapiens
  Table A; Target 68676; HLA-C*01:02; PMEL; ENSG00000185664; TAA
VSVSQLRAL

SEQ ID NO: 68677 - protein, 9 aa, Homo sapiens
  Table A; Target 68677; HLA-C*02:02; PMEL; ENSG00000185664; TAA
VSVSQLRAL

SEQ ID NO: 68678 - protein, 9 aa, Homo sapiens
  Table A; Target 68678; HLA-C*03:03; PMEL; ENSG00000185664; TAA
VSVSQLRAL

SEQ ID NO: 68679 - protein, 9 aa, Homo sapiens
  Table A; Target 68679; HLA-C*03:04; PMEL; ENSG00000185664; TAA
VSVSQLRAL

SEQ ID NO: 68680 - protein, 9 aa, Homo sapiens
  Table A; Target 68680; HLA-C*06:02; PMEL; ENSG00000185664; TAA
VSVSQLRAL

SEQ ID NO: 68681 - protein, 9 aa, Homo sapiens
  Table A; Target 68681; HLA-C*07:01; PMEL; ENSG00000185664; TAA
VSVSQLRAL

SEQ ID NO: 68682 - protein, 9 aa, Homo sapiens
  Table A; Target 68682; HLA-C*07:02; PMEL; ENSG00000185664; TAA
VSVSQLRAL

SEQ ID NO: 68683 - protein, 9 aa, Homo sapiens
  Table A; Target 68683; HLA-C*12:03; PMEL; ENSG00000185664; TAA
VSVSQLRAL

SEQ ID NO: 68684 - protein, 9 aa, Homo sapiens
  Table A; Target 68684; HLA-C*14:02; PMEL; ENSG00000185664; TAA
VSVSQLRAL

SEQ ID NO: 68685 - protein, 9 aa, Homo sapiens
  Table A; Target 68685; HLA-C*16:01; PMEL; ENSG00000185664; TAA
VSVSQLRAL

SEQ ID NO: 68686 - protein, 9 aa, Homo sapiens
  Table A; Target 68686; HLA-C*16:02; PMEL; ENSG00000185664; TAA
VSVSQLRAL

SEQ ID NO: 68687 - protein, 9 aa, Homo sapiens
  Table A; Target 68687; HLA-A*01:01; PMEL; ENSG00000185664; TAA
VTAQVVLQA

SEQ ID NO: 68688 - protein, 9 aa, Homo sapiens
  Table A; Target 68688; HLA-A*02:03; PMEL; ENSG00000185664; TAA
VTAQVVLQA

SEQ ID NO: 68689 - protein, 9 aa, Homo sapiens
  Table A; Target 68689; HLA-A*11:01; PMEL; ENSG00000185664; TAA
VTAQVVLQA

SEQ ID NO: 68690 - protein, 9 aa, Homo sapiens
  Table A; Target 68690; HLA-A*68:02; PMEL; ENSG00000185664; TAA
VTAQVVLQA

SEQ ID NO: 68691 - protein, 9 aa, Homo sapiens
  Table A; Target 68691; HLA-B*13:02; PMEL; ENSG00000185664; TAA
VTAQVVLQA

SEQ ID NO: 68692 - protein, 11 aa, Homo sapiens
  Table A; Target 68692; HLA-A*01:01; PMEL; ENSG00000185664; TAA
VTHTYLEPGPV

SEQ ID NO: 68693 - protein, 9 aa, Homo sapiens
  Table A; Target 68693; HLA-A*02:01; PMEL; ENSG00000185664; TAA
VTLDIVQGI

SEQ ID NO: 68694 - protein, 9 aa, Homo sapiens
  Table A; Target 68694; HLA-A*02:03; PMEL; ENSG00000185664; TAA
VTLDIVQGI

SEQ ID NO: 68695 - protein, 9 aa, Homo sapiens
  Table A; Target 68695; HLA-A*02:04; PMEL; ENSG00000185664; TAA
VTLDIVQGI

SEQ ID NO: 68696 - protein, 9 aa, Homo sapiens
  Table A; Target 68696; HLA-A*02:07; PMEL; ENSG00000185664; TAA
VTLDIVQGI

SEQ ID NO: 68697 - protein, 9 aa, Homo sapiens
  Table A; Target 68697; HLA-A*11:01; PMEL; ENSG00000185664; TAA
VTLDIVQGI

SEQ ID NO: 68698 - protein, 9 aa, Homo sapiens
  Table A; Target 68698; HLA-A*23:01; PMEL; ENSG00000185664; TAA
VTLDIVQGI

SEQ ID NO: 68699 - protein, 9 aa, Homo sapiens
  Table A; Target 68699; HLA-A*24:02; PMEL; ENSG00000185664; TAA
VTLDIVQGI

SEQ ID NO: 68700 - protein, 9 aa, Homo sapiens
  Table A; Target 68700; HLA-A*25:01; PMEL; ENSG00000185664; TAA
VTLDIVQGI

SEQ ID NO: 68701 - protein, 9 aa, Homo sapiens
  Table A; Target 68701; HLA-A*26:01; PMEL; ENSG00000185664; TAA
VTLDIVQGI

SEQ ID NO: 68702 - protein, 9 aa, Homo sapiens
  Table A; Target 68702; HLA-A*30:01; PMEL; ENSG00000185664; TAA
VTLDIVQGI

SEQ ID NO: 68703 - protein, 9 aa, Homo sapiens
  Table A; Target 68703; HLA-A*31:01; PMEL; ENSG00000185664; TAA
VTLDIVQGI

SEQ ID NO: 68704 - protein, 9 aa, Homo sapiens
  Table A; Target 68704; HLA-A*32:01; PMEL; ENSG00000185664; TAA
VTLDIVQGI

SEQ ID NO: 68705 - protein, 9 aa, Homo sapiens
  Table A; Target 68705; HLA-A*33:01; PMEL; ENSG00000185664; TAA
VTLDIVQGI

SEQ ID NO: 68706 - protein, 9 aa, Homo sapiens
  Table A; Target 68706; HLA-A*33:03; PMEL; ENSG00000185664; TAA
VTLDIVQGI

SEQ ID NO: 68707 - protein, 9 aa, Homo sapiens
  Table A; Target 68707; HLA-A*68:02; PMEL; ENSG00000185664; TAA
VTLDIVQGI

SEQ ID NO: 68708 - protein, 9 aa, Homo sapiens
  Table A; Target 68708; HLA-B*13:02; PMEL; ENSG00000185664; TAA
VTLDIVQGI

SEQ ID NO: 68709 - protein, 9 aa, Homo sapiens
  Table A; Target 68709; HLA-B*27:05; PMEL; ENSG00000185664; TAA
VTLDIVQGI

SEQ ID NO: 68710 - protein, 9 aa, Homo sapiens
  Table A; Target 68710; HLA-B*40:02; PMEL; ENSG00000185664; TAA
VTLDIVQGI

SEQ ID NO: 68711 - protein, 9 aa, Homo sapiens
  Table A; Target 68711; HLA-B*51:01; PMEL; ENSG00000185664; TAA
VTLDIVQGI

SEQ ID NO: 68712 - protein, 9 aa, Homo sapiens
  Table A; Target 68712; HLA-B*55:01; PMEL; ENSG00000185664; TAA
VTLDIVQGI

SEQ ID NO: 68713 - protein, 9 aa, Homo sapiens
  Table A; Target 68713; HLA-B*57:01; PMEL; ENSG00000185664; TAA
VTLDIVQGI

SEQ ID NO: 68714 - protein, 9 aa, Homo sapiens
  Table A; Target 68714; HLA-B*58:01; PMEL; ENSG00000185664; TAA
VTLDIVQGI

SEQ ID NO: 68715 - protein, 9 aa, Homo sapiens
  Table A; Target 68715; HLA-C*01:02; PMEL; ENSG00000185664; TAA
VTLDIVQGI

SEQ ID NO: 68716 - protein, 9 aa, Homo sapiens
  Table A; Target 68716; HLA-C*04:01; PMEL; ENSG00000185664; TAA
VTLDIVQGI

SEQ ID NO: 68717 - protein, 9 aa, Homo sapiens
  Table A; Target 68717; HLA-C*06:02; PMEL; ENSG00000185664; TAA
VTLDIVQGI

SEQ ID NO: 68718 - protein, 9 aa, Homo sapiens
  Table A; Target 68718; HLA-C*07:04; PMEL; ENSG00000185664; TAA
VTLDIVQGI

SEQ ID NO: 68719 - protein, 9 aa, Homo sapiens
  Table A; Target 68719; HLA-C*12:03; PMEL; ENSG00000185664; TAA
VTLDIVQGI

SEQ ID NO: 68720 - protein, 9 aa, Homo sapiens
  Table A; Target 68720; HLA-C*16:02; PMEL; ENSG00000185664; TAA
VTLDIVQGI

SEQ ID NO: 68721 - protein, 9 aa, Homo sapiens
  Table A; Target 68721; HLA-C*16:04; PMEL; ENSG00000185664; TAA
VTLDIVQGI

SEQ ID NO: 68722 - protein, 8 aa, Homo sapiens
  Table A; Target 68722; HLA-B*07:02; PMEL; ENSG00000185664; TAA
VVGTTPGQ

SEQ ID NO: 68723 - protein, 8 aa, Homo sapiens
  Table A; Target 68723; HLA-C*07:01; PMEL; ENSG00000185664; TAA
VVGTTPGQ

SEQ ID NO: 68724 - protein, 8 aa, Homo sapiens
  Table A; Target 68724; HLA-A*29:02; PMEL; ENSG00000185664; TAA
VVLASLIY

SEQ ID NO: 68725 - protein, 8 aa, Homo sapiens
  Table A; Target 68725; HLA-B*35:01; PMEL; ENSG00000185664; TAA
VVLASLIY

SEQ ID NO: 68726 - protein, 8 aa, Homo sapiens
  Table A; Target 68726; HLA-C*07:01; PMEL; ENSG00000185664; TAA
VVLASLIY

SEQ ID NO: 68727 - protein, 9 aa, Homo sapiens
  Table A; Target 68727; HLA-A*03:01; PMEL; ENSG00000185664; TAA
VVLASLIYR

SEQ ID NO: 68728 - protein, 9 aa, Homo sapiens
  Table A; Target 68728; HLA-A*03:02; PMEL; ENSG00000185664; TAA
VVLASLIYR

SEQ ID NO: 68729 - protein, 9 aa, Homo sapiens
  Table A; Target 68729; HLA-A*11:01; PMEL; ENSG00000185664; TAA
VVLASLIYR

SEQ ID NO: 68730 - protein, 9 aa, Homo sapiens
  Table A; Target 68730; HLA-A*31:01; PMEL; ENSG00000185664; TAA
VVLASLIYR

SEQ ID NO: 68731 - protein, 9 aa, Homo sapiens
  Table A; Target 68731; HLA-A*33:01; PMEL; ENSG00000185664; TAA
VVLASLIYR

SEQ ID NO: 68732 - protein, 9 aa, Homo sapiens
  Table A; Target 68732; HLA-A*33:03; PMEL; ENSG00000185664; TAA
VVLASLIYR

SEQ ID NO: 68733 - protein, 9 aa, Homo sapiens
  Table A; Target 68733; HLA-A*68:01; PMEL; ENSG00000185664; TAA
VVLASLIYR

SEQ ID NO: 68734 - protein, 9 aa, Homo sapiens
  Table A; Target 68734; HLA-B*57:01; PMEL; ENSG00000185664; TAA
VVLASLIYR

SEQ ID NO: 68735 - protein, 9 aa, Homo sapiens
  Table A; Target 68735; HLA-C*07:06; PMEL; ENSG00000185664; TAA
VVLASLIYR

SEQ ID NO: 68736 - protein, 10 aa, Homo sapiens
  Table A; Target 68736; HLA-A*31:01; PMEL; ENSG00000185664; TAA
VVLASLIYRR

SEQ ID NO: 68737 - protein, 9 aa, Homo sapiens
  Table A; Target 68737; HLA-A*03:01; PMEL; ENSG00000185664; TAA
VVLQAAIPL

SEQ ID NO: 68738 - protein, 9 aa, Homo sapiens
  Table A; Target 68738; HLA-C*01:02; PMEL; ENSG00000185664; TAA
VVLQAAIPL

SEQ ID NO: 68739 - protein, 9 aa, Homo sapiens
  Table A; Target 68739; HLA-C*03:03; PMEL; ENSG00000185664; TAA
VVLQAAIPL

SEQ ID NO: 68740 - protein, 9 aa, Homo sapiens
  Table A; Target 68740; HLA-C*03:04; PMEL; ENSG00000185664; TAA
VVLQAAIPL

SEQ ID NO: 68741 - protein, 9 aa, Homo sapiens
  Table A; Target 68741; HLA-C*07:04; PMEL; ENSG00000185664; TAA
VVLQAAIPL

SEQ ID NO: 68742 - protein, 10 aa, Homo sapiens
  Table A; Target 68742; HLA-C*06:02; PMEL; ENSG00000185664; TAA
VVLQAAIPLT

SEQ ID NO: 68743 - protein, 8 aa, Homo sapiens
  Table A; Target 68743; HLA-A*32:01; PMEL; ENSG00000185664; TAA
VVLSGTTA

SEQ ID NO: 68744 - protein, 8 aa, Homo sapiens
  Table A; Target 68744; HLA-B*39:01; PMEL; ENSG00000185664; TAA
VVLSGTTA

SEQ ID NO: 68745 - protein, 8 aa, Homo sapiens
  Table A; Target 68745; HLA-B*56:01; PMEL; ENSG00000185664; TAA
VVLSGTTA

SEQ ID NO: 68746 - protein, 8 aa, Homo sapiens
  Table A; Target 68746; HLA-C*01:02; PMEL; ENSG00000185664; TAA
VVLSGTTA

SEQ ID NO: 68747 - protein, 8 aa, Homo sapiens
  Table A; Target 68747; HLA-C*14:02; PMEL; ENSG00000185664; TAA
VVLSGTTA

SEQ ID NO: 68748 - protein, 9 aa, Homo sapiens
  Table A; Target 68748; HLA-A*02:01; PMEL; ENSG00000185664; TAA
VVLSGTTAA

SEQ ID NO: 68749 - protein, 9 aa, Homo sapiens
  Table A; Target 68749; HLA-A*02:03; PMEL; ENSG00000185664; TAA
VVLSGTTAA

SEQ ID NO: 68750 - protein, 9 aa, Homo sapiens
  Table A; Target 68750; HLA-A*32:01; PMEL; ENSG00000185664; TAA
VVLSGTTAA

SEQ ID NO: 68751 - protein, 9 aa, Homo sapiens
  Table A; Target 68751; HLA-B*13:02; PMEL; ENSG00000185664; TAA
VVLSGTTAA

SEQ ID NO: 68752 - protein, 9 aa, Homo sapiens
  Table A; Target 68752; HLA-B*15:01; PMEL; ENSG00000185664; TAA
VVLSGTTAA

SEQ ID NO: 68753 - protein, 9 aa, Homo sapiens
  Table A; Target 68753; HLA-B*27:05; PMEL; ENSG00000185664; TAA
VVLSGTTAA

SEQ ID NO: 68754 - protein, 9 aa, Homo sapiens
  Table A; Target 68754; HLA-B*40:02; PMEL; ENSG00000185664; TAA
VVLSGTTAA

SEQ ID NO: 68755 - protein, 9 aa, Homo sapiens
  Table A; Target 68755; HLA-B*46:01; PMEL; ENSG00000185664; TAA
VVLSGTTAA

SEQ ID NO: 68756 - protein, 9 aa, Homo sapiens
  Table A; Target 68756; HLA-B*54:01; PMEL; ENSG00000185664; TAA
VVLSGTTAA

SEQ ID NO: 68757 - protein, 9 aa, Homo sapiens
  Table A; Target 68757; HLA-B*55:01; PMEL; ENSG00000185664; TAA
VVLSGTTAA

SEQ ID NO: 68758 - protein, 9 aa, Homo sapiens
  Table A; Target 68758; HLA-B*56:01; PMEL; ENSG00000185664; TAA
VVLSGTTAA

SEQ ID NO: 68759 - protein, 9 aa, Homo sapiens
  Table A; Target 68759; HLA-C*01:02; PMEL; ENSG00000185664; TAA
VVLSGTTAA

SEQ ID NO: 68760 - protein, 9 aa, Homo sapiens
  Table A; Target 68760; HLA-C*03:03; PMEL; ENSG00000185664; TAA
VVLSGTTAA

SEQ ID NO: 68761 - protein, 9 aa, Homo sapiens
  Table A; Target 68761; HLA-C*03:04; PMEL; ENSG00000185664; TAA
VVLSGTTAA

SEQ ID NO: 68762 - protein, 9 aa, Homo sapiens
  Table A; Target 68762; HLA-C*14:02; PMEL; ENSG00000185664; TAA
VVLSGTTAA

SEQ ID NO: 68763 - protein, 10 aa, Homo sapiens
  Table A; Target 68763; HLA-A*03:01; PMEL; ENSG00000185664; TAA
VVLSGTTAAQ

SEQ ID NO: 68764 - protein, 10 aa, Homo sapiens
  Table A; Target 68764; HLA-A*03:02; PMEL; ENSG00000185664; TAA
VVLSGTTAAQ

SEQ ID NO: 68765 - protein, 10 aa, Homo sapiens
  Table A; Target 68765; HLA-B*07:02; PMEL; ENSG00000185664; TAA
VVLSGTTAAQ

SEQ ID NO: 68766 - protein, 10 aa, Homo sapiens
  Table A; Target 68766; HLA-B*27:05; PMEL; ENSG00000185664; TAA
VVLSGTTAAQ

SEQ ID NO: 68767 - protein, 10 aa, Homo sapiens
  Table A; Target 68767; HLA-C*01:02; PMEL; ENSG00000185664; TAA
VVLSGTTAAQ

SEQ ID NO: 68768 - protein, 10 aa, Homo sapiens
  Table A; Target 68768; HLA-C*04:01; PMEL; ENSG00000185664; TAA
VVLSGTTAAQ

SEQ ID NO: 68769 - protein, 10 aa, Homo sapiens
  Table A; Target 68769; HLA-C*06:02; PMEL; ENSG00000185664; TAA
VVLSGTTAAQ

SEQ ID NO: 68770 - protein, 10 aa, Homo sapiens
  Table A; Target 68770; HLA-C*07:01; PMEL; ENSG00000185664; TAA
VVLSGTTAAQ

SEQ ID NO: 68771 - protein, 10 aa, Homo sapiens
  Table A; Target 68771; HLA-C*07:02; PMEL; ENSG00000185664; TAA
VVLSGTTAAQ

SEQ ID NO: 68772 - protein, 10 aa, Homo sapiens
  Table A; Target 68772; HLA-C*07:04; PMEL; ENSG00000185664; TAA
VVLSGTTAAQ

SEQ ID NO: 68773 - protein, 11 aa, Homo sapiens
  Table A; Target 68773; HLA-A*02:01; PMEL; ENSG00000185664; TAA
VVLSGTTAAQV

SEQ ID NO: 68774 - protein, 11 aa, Homo sapiens
  Table A; Target 68774; HLA-A*02:03; PMEL; ENSG00000185664; TAA
VVLSGTTAAQV

SEQ ID NO: 68775 - protein, 11 aa, Homo sapiens
  Table A; Target 68775; HLA-A*03:02; PMEL; ENSG00000185664; TAA
VVLSGTTAAQV

SEQ ID NO: 68776 - protein, 8 aa, Homo sapiens
  Table A; Target 68776; HLA-C*16:01; PMEL; ENSG00000185664; TAA
VVSTQLIM

SEQ ID NO: 68777 - protein, 10 aa, Homo sapiens
  Table A; Target 68777; HLA-C*04:01; PMEL; ENSG00000185664; TAA
VVSTQLIMPG

SEQ ID NO: 68778 - protein, 10 aa, Homo sapiens
  Table A; Target 68778; HLA-C*06:02; PMEL; ENSG00000185664; TAA
VVSTQLIMPG

SEQ ID NO: 68779 - protein, 10 aa, Homo sapiens
  Table A; Target 68779; HLA-C*07:01; PMEL; ENSG00000185664; TAA
VVSTQLIMPG

SEQ ID NO: 68780 - protein, 10 aa, Homo sapiens
  Table A; Target 68780; HLA-C*12:03; PMEL; ENSG00000185664; TAA
VVSTQLIMPG

SEQ ID NO: 68781 - protein, 8 aa, Homo sapiens
  Table A; Target 68781; HLA-C*07:01; PMEL; ENSG00000185664; TAA
VWGGQPVY

SEQ ID NO: 68782 - protein, 9 aa, Homo sapiens
  Table A; Target 68782; HLA-A*24:02; PMEL; ENSG00000185664; TAA
VWKTWGQYW

SEQ ID NO: 68783 - protein, 11 aa, Homo sapiens
  Table A; Target 68783; HLA-A*24:02; PMEL; ENSG00000185664; TAA
VYVWKTWGQYW

SEQ ID NO: 68784 - protein, 10 aa, Homo sapiens
  Table A; Target 68784; HLA-B*40:02; PMEL; ENSG00000185664; TAA
WDFGDSSGTL

SEQ ID NO: 68785 - protein, 11 aa, Homo sapiens
  Table A; Target 68785; HLA-B*38:01; PMEL; ENSG00000185664; TAA
WDFGDSSGTLI

SEQ ID NO: 68786 - protein, 8 aa, Homo sapiens
  Table A; Target 68786; HLA-C*07:01; PMEL; ENSG00000185664; TAA
WLGVSRQL

SEQ ID NO: 68787 - protein, 9 aa, Homo sapiens
  Table A; Target 68787; HLA-C*01:02; PMEL; ENSG00000185664; TAA
WVETTAREL

SEQ ID NO: 68788 - protein, 9 aa, Homo sapiens
  Table A; Target 68788; HLA-C*03:03; PMEL; ENSG00000185664; TAA
WVETTAREL

SEQ ID NO: 68789 - protein, 9 aa, Homo sapiens
  Table A; Target 68789; HLA-C*03:04; PMEL; ENSG00000185664; TAA
WVETTAREL

SEQ ID NO: 68790 - protein, 9 aa, Homo sapiens
  Table A; Target 68790; HLA-C*16:02; PMEL; ENSG00000185664; TAA
WVETTAREL

SEQ ID NO: 68791 - protein, 8 aa, Homo sapiens
  Table A; Target 68791; HLA-A*30:01; PMEL; ENSG00000185664; TAA
YGSFSVTL

SEQ ID NO: 68792 - protein, 8 aa, Homo sapiens
  Table A; Target 68792; HLA-B*08:01; PMEL; ENSG00000185664; TAA
YGSFSVTL

SEQ ID NO: 68793 - protein, 8 aa, Homo sapiens
  Table A; Target 68793; HLA-B*27:05; PMEL; ENSG00000185664; TAA
YGSFSVTL

SEQ ID NO: 68794 - protein, 8 aa, Homo sapiens
  Table A; Target 68794; HLA-B*35:03; PMEL; ENSG00000185664; TAA
YGSFSVTL

SEQ ID NO: 68795 - protein, 8 aa, Homo sapiens
  Table A; Target 68795; HLA-B*37:01; PMEL; ENSG00000185664; TAA
YGSFSVTL

SEQ ID NO: 68796 - protein, 8 aa, Homo sapiens
  Table A; Target 68796; HLA-B*39:01; PMEL; ENSG00000185664; TAA
YGSFSVTL

SEQ ID NO: 68797 - protein, 8 aa, Homo sapiens
  Table A; Target 68797; HLA-B*40:01; PMEL; ENSG00000185664; TAA
YGSFSVTL

SEQ ID NO: 68798 - protein, 8 aa, Homo sapiens
  Table A; Target 68798; HLA-C*02:02; PMEL; ENSG00000185664; TAA
YGSFSVTL

SEQ ID NO: 68799 - protein, 8 aa, Homo sapiens
  Table A; Target 68799; HLA-C*03:03; PMEL; ENSG00000185664; TAA
YGSFSVTL

SEQ ID NO: 68800 - protein, 8 aa, Homo sapiens
  Table A; Target 68800; HLA-C*03:04; PMEL; ENSG00000185664; TAA
YGSFSVTL

SEQ ID NO: 68801 - protein, 8 aa, Homo sapiens
  Table A; Target 68801; HLA-C*04:01; PMEL; ENSG00000185664; TAA
YGSFSVTL

SEQ ID NO: 68802 - protein, 8 aa, Homo sapiens
  Table A; Target 68802; HLA-C*05:01; PMEL; ENSG00000185664; TAA
YGSFSVTL

SEQ ID NO: 68803 - protein, 8 aa, Homo sapiens
  Table A; Target 68803; HLA-C*07:04; PMEL; ENSG00000185664; TAA
YGSFSVTL

SEQ ID NO: 68804 - protein, 8 aa, Homo sapiens
  Table A; Target 68804; HLA-C*12:03; PMEL; ENSG00000185664; TAA
YGSFSVTL

SEQ ID NO: 68805 - protein, 10 aa, Homo sapiens
  Table A; Target 68805; HLA-B*07:02; PMEL; ENSG00000185664; TAA
YGSFSVTLDI

SEQ ID NO: 68806 - protein, 9 aa, Homo sapiens
  Table A; Target 68806; HLA-A*01:01; PMEL; ENSG00000185664; TAA
YLAEADLSY

SEQ ID NO: 68807 - protein, 9 aa, Homo sapiens
  Table A; Target 68807; HLA-A*02:01; PMEL; ENSG00000185664; TAA
YLAEADLSY

SEQ ID NO: 68808 - protein, 9 aa, Homo sapiens
  Table A; Target 68808; HLA-A*02:03; PMEL; ENSG00000185664; TAA
YLAEADLSY

SEQ ID NO: 68809 - protein, 9 aa, Homo sapiens
  Table A; Target 68809; HLA-A*03:01; PMEL; ENSG00000185664; TAA
YLAEADLSY

SEQ ID NO: 68810 - protein, 9 aa, Homo sapiens
  Table A; Target 68810; HLA-A*25:01; PMEL; ENSG00000185664; TAA
YLAEADLSY

SEQ ID NO: 68811 - protein, 9 aa, Homo sapiens
  Table A; Target 68811; HLA-A*26:01; PMEL; ENSG00000185664; TAA
YLAEADLSY

SEQ ID NO: 68812 - protein, 9 aa, Homo sapiens
  Table A; Target 68812; HLA-A*29:02; PMEL; ENSG00000185664; TAA
YLAEADLSY

SEQ ID NO: 68813 - protein, 9 aa, Homo sapiens
  Table A; Target 68813; HLA-A*30:02; PMEL; ENSG00000185664; TAA
YLAEADLSY

SEQ ID NO: 68814 - protein, 9 aa, Homo sapiens
  Table A; Target 68814; HLA-A*32:01; PMEL; ENSG00000185664; TAA
YLAEADLSY

SEQ ID NO: 68815 - protein, 9 aa, Homo sapiens
  Table A; Target 68815; HLA-B*13:02; PMEL; ENSG00000185664; TAA
YLAEADLSY

SEQ ID NO: 68816 - protein, 9 aa, Homo sapiens
  Table A; Target 68816; HLA-B*15:01; PMEL; ENSG00000185664; TAA
YLAEADLSY

SEQ ID NO: 68817 - protein, 9 aa, Homo sapiens
  Table A; Target 68817; HLA-B*15:03; PMEL; ENSG00000185664; TAA
YLAEADLSY

SEQ ID NO: 68818 - protein, 9 aa, Homo sapiens
  Table A; Target 68818; HLA-B*18:01; PMEL; ENSG00000185664; TAA
YLAEADLSY

SEQ ID NO: 68819 - protein, 9 aa, Homo sapiens
  Table A; Target 68819; HLA-B*35:01; PMEL; ENSG00000185664; TAA
YLAEADLSY

SEQ ID NO: 68820 - protein, 9 aa, Homo sapiens
  Table A; Target 68820; HLA-B*35:03; PMEL; ENSG00000185664; TAA
YLAEADLSY

SEQ ID NO: 68821 - protein, 9 aa, Homo sapiens
  Table A; Target 68821; HLA-B*39:01; PMEL; ENSG00000185664; TAA
YLAEADLSY

SEQ ID NO: 68822 - protein, 9 aa, Homo sapiens
  Table A; Target 68822; HLA-B*44:03; PMEL; ENSG00000185664; TAA
YLAEADLSY

SEQ ID NO: 68823 - protein, 9 aa, Homo sapiens
  Table A; Target 68823; HLA-B*46:01; PMEL; ENSG00000185664; TAA
YLAEADLSY

SEQ ID NO: 68824 - protein, 9 aa, Homo sapiens
  Table A; Target 68824; HLA-B*55:01; PMEL; ENSG00000185664; TAA
YLAEADLSY

SEQ ID NO: 68825 - protein, 9 aa, Homo sapiens
  Table A; Target 68825; HLA-B*58:01; PMEL; ENSG00000185664; TAA
YLAEADLSY

SEQ ID NO: 68826 - protein, 9 aa, Homo sapiens
  Table A; Target 68826; HLA-C*01:02; PMEL; ENSG00000185664; TAA
YLAEADLSY

SEQ ID NO: 68827 - protein, 9 aa, Homo sapiens
  Table A; Target 68827; HLA-C*02:02; PMEL; ENSG00000185664; TAA
YLAEADLSY

SEQ ID NO: 68828 - protein, 9 aa, Homo sapiens
  Table A; Target 68828; HLA-C*03:03; PMEL; ENSG00000185664; TAA
YLAEADLSY

SEQ ID NO: 68829 - protein, 9 aa, Homo sapiens
  Table A; Target 68829; HLA-C*03:04; PMEL; ENSG00000185664; TAA
YLAEADLSY

SEQ ID NO: 68830 - protein, 9 aa, Homo sapiens
  Table A; Target 68830; HLA-C*05:01; PMEL; ENSG00000185664; TAA
YLAEADLSY

SEQ ID NO: 68831 - protein, 9 aa, Homo sapiens
  Table A; Target 68831; HLA-C*07:04; PMEL; ENSG00000185664; TAA
YLAEADLSY

SEQ ID NO: 68832 - protein, 9 aa, Homo sapiens
  Table A; Target 68832; HLA-C*07:06; PMEL; ENSG00000185664; TAA
YLAEADLSY

SEQ ID NO: 68833 - protein, 9 aa, Homo sapiens
  Table A; Target 68833; HLA-C*14:02; PMEL; ENSG00000185664; TAA
YLAEADLSY

SEQ ID NO: 68834 - protein, 9 aa, Homo sapiens
  Table A; Target 68834; HLA-C*16:01; PMEL; ENSG00000185664; TAA
YLAEADLSY

SEQ ID NO: 68835 - protein, 9 aa, Homo sapiens
  Table A; Target 68835; HLA-C*16:02; PMEL; ENSG00000185664; TAA
YLAEADLSY

SEQ ID NO: 68836 - protein, 9 aa, Homo sapiens
  Table A; Target 68836; HLA-C*16:04; PMEL; ENSG00000185664; TAA
YLAEADLSY

SEQ ID NO: 68837 - protein, 10 aa, Homo sapiens
  Table A; Target 68837; HLA-A*02:01; PMEL; ENSG00000185664; TAA
YLAEADLSYT

SEQ ID NO: 68838 - protein, 10 aa, Homo sapiens
  Table A; Target 68838; HLA-A*02:03; PMEL; ENSG00000185664; TAA
YLAEADLSYT

SEQ ID NO: 68839 - protein, 11 aa, Homo sapiens
  Table A; Target 68839; HLA-A*24:02; PMEL; ENSG00000185664; TAA
YLAEADLSYTW

SEQ ID NO: 68840 - protein, 11 aa, Homo sapiens
  Table A; Target 68840; HLA-A*25:01; PMEL; ENSG00000185664; TAA
YLAEADLSYTW

SEQ ID NO: 68841 - protein, 11 aa, Homo sapiens
  Table A; Target 68841; HLA-B*44:02; PMEL; ENSG00000185664; TAA
YLAEADLSYTW

SEQ ID NO: 68842 - protein, 8 aa, Homo sapiens
  Table A; Target 68842; HLA-B*39:01; PMEL; ENSG00000185664; TAA
YLEPGPVT

SEQ ID NO: 68843 - protein, 8 aa, Homo sapiens
  Table A; Target 68843; HLA-C*07:04; PMEL; ENSG00000185664; TAA
YLEPGPVT

SEQ ID NO: 68844 - protein, 9 aa, Homo sapiens
  Table A; Target 68844; HLA-A*01:01; PMEL; ENSG00000185664; TAA
YLEPGPVTA

SEQ ID NO: 68845 - protein, 9 aa, Homo sapiens
  Table A; Target 68845; HLA-A*02:01; PMEL; ENSG00000185664; TAA
YLEPGPVTA

SEQ ID NO: 68846 - protein, 9 aa, Homo sapiens
  Table A; Target 68846; HLA-A*02:03; PMEL; ENSG00000185664; TAA
YLEPGPVTA

SEQ ID NO: 68847 - protein, 9 aa, Homo sapiens
  Table A; Target 68847; HLA-A*02:04; PMEL; ENSG00000185664; TAA
YLEPGPVTA

SEQ ID NO: 68848 - protein, 9 aa, Homo sapiens
  Table A; Target 68848; HLA-A*02:07; PMEL; ENSG00000185664; TAA
YLEPGPVTA

SEQ ID NO: 68849 - protein, 9 aa, Homo sapiens
  Table A; Target 68849; HLA-B*13:02; PMEL; ENSG00000185664; TAA
YLEPGPVTA

SEQ ID NO: 68850 - protein, 9 aa, Homo sapiens
  Table A; Target 68850; HLA-B*27:05; PMEL; ENSG00000185664; TAA
YLEPGPVTA

SEQ ID NO: 68851 - protein, 9 aa, Homo sapiens
  Table A; Target 68851; HLA-B*35:03; PMEL; ENSG00000185664; TAA
YLEPGPVTA

SEQ ID NO: 68852 - protein, 9 aa, Homo sapiens
  Table A; Target 68852; HLA-B*38:01; PMEL; ENSG00000185664; TAA
YLEPGPVTA

SEQ ID NO: 68853 - protein, 9 aa, Homo sapiens
  Table A; Target 68853; HLA-B*39:01; PMEL; ENSG00000185664; TAA
YLEPGPVTA

SEQ ID NO: 68854 - protein, 9 aa, Homo sapiens
  Table A; Target 68854; HLA-B*54:01; PMEL; ENSG00000185664; TAA
YLEPGPVTA

SEQ ID NO: 68855 - protein, 9 aa, Homo sapiens
  Table A; Target 68855; HLA-B*55:01; PMEL; ENSG00000185664; TAA
YLEPGPVTA

SEQ ID NO: 68856 - protein, 9 aa, Homo sapiens
  Table A; Target 68856; HLA-C*02:02; PMEL; ENSG00000185664; TAA
YLEPGPVTA

SEQ ID NO: 68857 - protein, 9 aa, Homo sapiens
  Table A; Target 68857; HLA-C*03:03; PMEL; ENSG00000185664; TAA
YLEPGPVTA

SEQ ID NO: 68858 - protein, 9 aa, Homo sapiens
  Table A; Target 68858; HLA-C*03:04; PMEL; ENSG00000185664; TAA
YLEPGPVTA

SEQ ID NO: 68859 - protein, 9 aa, Homo sapiens
  Table A; Target 68859; HLA-C*05:01; PMEL; ENSG00000185664; TAA
YLEPGPVTA

SEQ ID NO: 68860 - protein, 9 aa, Homo sapiens
  Table A; Target 68860; HLA-C*07:04; PMEL; ENSG00000185664; TAA
YLEPGPVTA

SEQ ID NO: 68861 - protein, 9 aa, Homo sapiens
  Table A; Target 68861; HLA-C*12:03; PMEL; ENSG00000185664; TAA
YLEPGPVTA

SEQ ID NO: 68862 - protein, 10 aa, Homo sapiens
  Table A; Target 68862; HLA-A*01:01; PMEL; ENSG00000185664; TAA
YLEPGPVTAQ

SEQ ID NO: 68863 - protein, 10 aa, Homo sapiens
  Table A; Target 68863; HLA-A*02:03; PMEL; ENSG00000185664; TAA
YLEPGPVTAQ

SEQ ID NO: 68864 - protein, 10 aa, Homo sapiens
  Table A; Target 68864; HLA-C*01:02; PMEL; ENSG00000185664; TAA
YLEPGPVTAQ

SEQ ID NO: 68865 - protein, 10 aa, Homo sapiens
  Table A; Target 68865; HLA-C*07:01; PMEL; ENSG00000185664; TAA
YLEPGPVTAQ

SEQ ID NO: 68866 - protein, 10 aa, Homo sapiens
  Table A; Target 68866; HLA-C*07:02; PMEL; ENSG00000185664; TAA
YLEPGPVTAQ

SEQ ID NO: 68867 - protein, 10 aa, Homo sapiens
  Table A; Target 68867; HLA-C*07:04; PMEL; ENSG00000185664; TAA
YLEPGPVTAQ

SEQ ID NO: 68868 - protein, 11 aa, Homo sapiens
  Table A; Target 68868; HLA-A*01:01; PMEL; ENSG00000185664; TAA
YLEPGPVTAQV

SEQ ID NO: 68869 - protein, 11 aa, Homo sapiens
  Table A; Target 68869; HLA-A*02:01; PMEL; ENSG00000185664; TAA
YLEPGPVTAQV

SEQ ID NO: 68870 - protein, 11 aa, Homo sapiens
  Table A; Target 68870; HLA-A*02:03; PMEL; ENSG00000185664; TAA
YLEPGPVTAQV

SEQ ID NO: 68871 - protein, 11 aa, Homo sapiens
  Table A; Target 68871; HLA-A*02:04; PMEL; ENSG00000185664; TAA
YLEPGPVTAQV

SEQ ID NO: 68872 - protein, 11 aa, Homo sapiens
  Table A; Target 68872; HLA-A*02:07; PMEL; ENSG00000185664; TAA
YLEPGPVTAQV

SEQ ID NO: 68873 - protein, 11 aa, Homo sapiens
  Table A; Target 68873; HLA-A*68:02; PMEL; ENSG00000185664; TAA
YLEPGPVTAQV

SEQ ID NO: 68874 - protein, 11 aa, Homo sapiens
  Table A; Target 68874; HLA-B*38:01; PMEL; ENSG00000185664; TAA
YLEPGPVTAQV

SEQ ID NO: 68875 - protein, 10 aa, Homo sapiens
  Table A; Target 68875; HLA-B*35:03; PMEL; ENSG00000185664; TAA
YPEWTEAQRL

SEQ ID NO: 68876 - protein, 9 aa, Homo sapiens
  Table A; Target 68876; HLA-B*35:03; PMEL; ENSG00000185664; TAA
YPQETDDAC

SEQ ID NO: 68877 - protein, 9 aa, Homo sapiens
  Table A; Target 68877; HLA-B*55:01; PMEL; ENSG00000185664; TAA
YPQETDDAC

SEQ ID NO: 68878 - protein, 10 aa, Homo sapiens
  Table A; Target 68878; HLA-B*35:03; PMEL; ENSG00000185664; TAA
YPQETDDACI

SEQ ID NO: 68879 - protein, 11 aa, Homo sapiens
  Table A; Target 68879; HLA-B*35:01; PMEL; ENSG00000185664; TAA
YPQETDDACIF

SEQ ID NO: 68880 - protein, 11 aa, Homo sapiens
  Table A; Target 68880; HLA-B*35:03; PMEL; ENSG00000185664; TAA
YPQETDDACIF

SEQ ID NO: 68881 - protein, 11 aa, Homo sapiens
  Table A; Target 68881; HLA-B*55:01; PMEL; ENSG00000185664; TAA
YPQETDDACIF

SEQ ID NO: 68882 - protein, 11 aa, Homo sapiens
  Table A; Target 68882; HLA-C*03:03; PMEL; ENSG00000185664; TAA
YPQETDDACIF

SEQ ID NO: 68883 - protein, 8 aa, Homo sapiens
  Table A; Target 68883; HLA-C*16:04; PMEL; ENSG00000185664; TAA
YRYGSFSV

SEQ ID NO: 68884 - protein, 10 aa, Homo sapiens
  Table A; Target 68884; HLA-C*02:02; PMEL; ENSG00000185664; TAA
YRYGSFSVTL

SEQ ID NO: 68885 - protein, 10 aa, Homo sapiens
  Table A; Target 68885; HLA-C*07:01; PMEL; ENSG00000185664; TAA
YRYGSFSVTL

SEQ ID NO: 68886 - protein, 9 aa, Homo sapiens
  Table A; Target 68886; HLA-C*01:02; PMEL; ENSG00000185664; TAA
YVPLAHSSS

SEQ ID NO: 68887 - protein, 10 aa, Homo sapiens
  Table A; Target 68887; HLA-A*02:07; PMEL; ENSG00000185664; TAA
YVPLAHSSSA

SEQ ID NO: 68888 - protein, 10 aa, Homo sapiens
  Table A; Target 68888; HLA-B*46:01; PMEL; ENSG00000185664; TAA
YVPLAHSSSA

SEQ ID NO: 68889 - protein, 10 aa, Homo sapiens
  Table A; Target 68889; HLA-B*54:01; PMEL; ENSG00000185664; TAA
YVPLAHSSSA

SEQ ID NO: 68890 - protein, 10 aa, Homo sapiens
  Table A; Target 68890; HLA-B*56:01; PMEL; ENSG00000185664; TAA
YVPLAHSSSA

SEQ ID NO: 68891 - protein, 10 aa, Homo sapiens
  Table A; Target 68891; HLA-C*01:02; PMEL; ENSG00000185664; TAA
YVPLAHSSSA

SEQ ID NO: 68892 - protein, 11 aa, Homo sapiens
  Table A; Target 68892; HLA-A*02:07; PMEL; ENSG00000185664; TAA
YVPLAHSSSAF

SEQ ID NO: 68893 - protein, 11 aa, Homo sapiens
  Table A; Target 68893; HLA-A*24:02; PMEL; ENSG00000185664; TAA
YVPLAHSSSAF

SEQ ID NO: 68894 - protein, 11 aa, Homo sapiens
  Table A; Target 68894; HLA-A*25:01; PMEL; ENSG00000185664; TAA
YVPLAHSSSAF

SEQ ID NO: 68895 - protein, 11 aa, Homo sapiens
  Table A; Target 68895; HLA-A*26:01; PMEL; ENSG00000185664; TAA
YVPLAHSSSAF

SEQ ID NO: 68896 - protein, 11 aa, Homo sapiens
  Table A; Target 68896; HLA-B*15:01; PMEL; ENSG00000185664; TAA
YVPLAHSSSAF

SEQ ID NO: 68897 - protein, 11 aa, Homo sapiens
  Table A; Target 68897; HLA-B*46:01; PMEL; ENSG00000185664; TAA
YVPLAHSSSAF

SEQ ID NO: 68898 - protein, 11 aa, Homo sapiens
  Table A; Target 68898; HLA-C*01:02; PMEL; ENSG00000185664; TAA
YVPLAHSSSAF

SEQ ID NO: 68899 - protein, 11 aa, Homo sapiens
  Table A; Target 68899; HLA-C*07:04; PMEL; ENSG00000185664; TAA
YVPLAHSSSAF

SEQ ID NO: 68900 - protein, 9 aa, Homo sapiens
  Table A; Target 68900; HLA-A*29:02; PMEL; ENSG00000185664; TAA
YVWKTWGQY

SEQ ID NO: 68901 - protein, 10 aa, Homo sapiens
  Table A; Target 68901; HLA-A*24:02; PMEL; ENSG00000185664; TAA
YVWKTWGQYW

SEQ ID NO: 68902 - protein, 10 aa, Homo sapiens
  Table A; Target 68902; HLA-B*57:01; PMEL; ENSG00000185664; TAA
YVWKTWGQYW

SEQ ID NO: 68903 - protein, 9 aa, Homo sapiens
  Table A; Target 68903; HLA-C*12:03; PNLDC1; ENSG00000146453; TAA
AAYDAFLCG

SEQ ID NO: 68904 - protein, 10 aa, Homo sapiens
  Table A; Target 68904; HLA-A*23:01; PNLDC1; ENSG00000146453; TAA
AFLAGLDIEF

SEQ ID NO: 68905 - protein, 10 aa, Homo sapiens
  Table A; Target 68905; HLA-A*24:02; PNLDC1; ENSG00000146453; TAA
AFLAGLDIEF

SEQ ID NO: 68906 - protein, 10 aa, Homo sapiens
  Table A; Target 68906; HLA-A*29:02; PNLDC1; ENSG00000146453; TAA
AFLAGLDIEF

SEQ ID NO: 68907 - protein, 8 aa, Homo sapiens
  Table A; Target 68907; HLA-C*14:02; PNLDC1; ENSG00000146453; TAA
AFLCGSVL

SEQ ID NO: 68908 - protein, 9 aa, Homo sapiens
  Table A; Target 68908; HLA-A*23:01; PNLDC1; ENSG00000146453; TAA
AFLCGSVLL

SEQ ID NO: 68909 - protein, 9 aa, Homo sapiens
  Table A; Target 68909; HLA-A*24:02; PNLDC1; ENSG00000146453; TAA
AFLCGSVLL

SEQ ID NO: 68910 - protein, 10 aa, Homo sapiens
  Table A; Target 68910; HLA-A*02:04; PNLDC1; ENSG00000146453; TAA
AGLDIEFTGL

SEQ ID NO: 68911 - protein, 11 aa, Homo sapiens
  Table A; Target 68911; HLA-A*31:01; PNLDC1; ENSG00000146453; TAA
AGLDIEFTGLR

SEQ ID NO: 68912 - protein, 8 aa, Homo sapiens
  Table A; Target 68912; HLA-C*16:01; PNLDC1; ENSG00000146453; TAA
AGVPKINF

SEQ ID NO: 68913 - protein, 9 aa, Homo sapiens
  Table A; Target 68913; HLA-A*01:01; PNLDC1; ENSG00000146453; TAA
AIEGEANKY

SEQ ID NO: 68914 - protein, 9 aa, Homo sapiens
  Table A; Target 68914; HLA-A*26:01; PNLDC1; ENSG00000146453; TAA
AIEGEANKY

SEQ ID NO: 68915 - protein, 9 aa, Homo sapiens
  Table A; Target 68915; HLA-A*29:02; PNLDC1; ENSG00000146453; TAA
AIEGEANKY

SEQ ID NO: 68916 - protein, 9 aa, Homo sapiens
  Table A; Target 68916; HLA-A*30:02; PNLDC1; ENSG00000146453; TAA
AIEGEANKY

SEQ ID NO: 68917 - protein, 9 aa, Homo sapiens
  Table A; Target 68917; HLA-A*32:01; PNLDC1; ENSG00000146453; TAA
AIEGEANKY

SEQ ID NO: 68918 - protein, 9 aa, Homo sapiens
  Table A; Target 68918; HLA-B*15:01; PNLDC1; ENSG00000146453; TAA
AIEGEANKY

SEQ ID NO: 68919 - protein, 9 aa, Homo sapiens
  Table A; Target 68919; HLA-B*15:03; PNLDC1; ENSG00000146453; TAA
AIEGEANKY

SEQ ID NO: 68920 - protein, 9 aa, Homo sapiens
  Table A; Target 68920; HLA-B*58:01; PNLDC1; ENSG00000146453; TAA
AIEGEANKY

SEQ ID NO: 68921 - protein, 9 aa, Homo sapiens
  Table A; Target 68921; HLA-C*07:04; PNLDC1; ENSG00000146453; TAA
AIEGEANKY

SEQ ID NO: 68922 - protein, 9 aa, Homo sapiens
  Table A; Target 68922; HLA-C*16:02; PNLDC1; ENSG00000146453; TAA
AIEGEANKY

SEQ ID NO: 68923 - protein, 9 aa, Homo sapiens
  Table A; Target 68923; HLA-A*02:04; PNLDC1; ENSG00000146453; TAA
ALLAFILGR

SEQ ID NO: 68924 - protein, 9 aa, Homo sapiens
  Table A; Target 68924; HLA-A*03:01; PNLDC1; ENSG00000146453; TAA
ALLAFILGR

SEQ ID NO: 68925 - protein, 9 aa, Homo sapiens
  Table A; Target 68925; HLA-A*11:01; PNLDC1; ENSG00000146453; TAA
ALLAFILGR

SEQ ID NO: 68926 - protein, 9 aa, Homo sapiens
  Table A; Target 68926; HLA-A*29:02; PNLDC1; ENSG00000146453; TAA
ALLAFILGR

SEQ ID NO: 68927 - protein, 9 aa, Homo sapiens
  Table A; Target 68927; HLA-A*31:01; PNLDC1; ENSG00000146453; TAA
ALLAFILGR

SEQ ID NO: 68928 - protein, 8 aa, Homo sapiens
  Table A; Target 68928; HLA-A*02:01; PNLDC1; ENSG00000146453; TAA
ALPNIWTV

SEQ ID NO: 68929 - protein, 8 aa, Homo sapiens
  Table A; Target 68929; HLA-A*02:04; PNLDC1; ENSG00000146453; TAA
ALPNIWTV

SEQ ID NO: 68930 - protein, 8 aa, Homo sapiens
  Table A; Target 68930; HLA-A*02:07; PNLDC1; ENSG00000146453; TAA
ALPNIWTV

SEQ ID NO: 68931 - protein, 9 aa, Homo sapiens
  Table A; Target 68931; HLA-A*02:01; PNLDC1; ENSG00000146453; TAA
ALPNIWTVL

SEQ ID NO: 68932 - protein, 9 aa, Homo sapiens
  Table A; Target 68932; HLA-A*02:03; PNLDC1; ENSG00000146453; TAA
ALPNIWTVL

SEQ ID NO: 68933 - protein, 9 aa, Homo sapiens
  Table A; Target 68933; HLA-A*02:04; PNLDC1; ENSG00000146453; TAA
ALPNIWTVL

SEQ ID NO: 68934 - protein, 9 aa, Homo sapiens
  Table A; Target 68934; HLA-A*02:07; PNLDC1; ENSG00000146453; TAA
ALPNIWTVL

SEQ ID NO: 68935 - protein, 9 aa, Homo sapiens
  Table A; Target 68935; HLA-A*24:02; PNLDC1; ENSG00000146453; TAA
ALPNIWTVL

SEQ ID NO: 68936 - protein, 9 aa, Homo sapiens
  Table A; Target 68936; HLA-A*68:02; PNLDC1; ENSG00000146453; TAA
ALPNIWTVL

SEQ ID NO: 68937 - protein, 10 aa, Homo sapiens
  Table A; Target 68937; HLA-A*02:07; PNLDC1; ENSG00000146453; TAA
ALPNIWTVLK

SEQ ID NO: 68938 - protein, 10 aa, Homo sapiens
  Table A; Target 68938; HLA-A*03:01; PNLDC1; ENSG00000146453; TAA
ALPNIWTVLK

SEQ ID NO: 68939 - protein, 9 aa, Homo sapiens
  Table A; Target 68939; HLA-A*30:01; PNLDC1; ENSG00000146453; TAA
APYVNQVNL

SEQ ID NO: 68940 - protein, 9 aa, Homo sapiens
  Table A; Target 68940; HLA-B*07:02; PNLDC1; ENSG00000146453; TAA
APYVNQVNL

SEQ ID NO: 68941 - protein, 9 aa, Homo sapiens
  Table A; Target 68941; HLA-B*08:01; PNLDC1; ENSG00000146453; TAA
APYVNQVNL

SEQ ID NO: 68942 - protein, 9 aa, Homo sapiens
  Table A; Target 68942; HLA-B*35:01; PNLDC1; ENSG00000146453; TAA
APYVNQVNL

SEQ ID NO: 68943 - protein, 9 aa, Homo sapiens
  Table A; Target 68943; HLA-B*35:03; PNLDC1; ENSG00000146453; TAA
APYVNQVNL

SEQ ID NO: 68944 - protein, 9 aa, Homo sapiens
  Table A; Target 68944; HLA-B*39:01; PNLDC1; ENSG00000146453; TAA
APYVNQVNL

SEQ ID NO: 68945 - protein, 9 aa, Homo sapiens
  Table A; Target 68945; HLA-B*51:01; PNLDC1; ENSG00000146453; TAA
APYVNQVNL

SEQ ID NO: 68946 - protein, 9 aa, Homo sapiens
  Table A; Target 68946; HLA-B*54:01; PNLDC1; ENSG00000146453; TAA
APYVNQVNL

SEQ ID NO: 68947 - protein, 9 aa, Homo sapiens
  Table A; Target 68947; HLA-B*55:01; PNLDC1; ENSG00000146453; TAA
APYVNQVNL

SEQ ID NO: 68948 - protein, 9 aa, Homo sapiens
  Table A; Target 68948; HLA-B*56:01; PNLDC1; ENSG00000146453; TAA
APYVNQVNL

SEQ ID NO: 68949 - protein, 9 aa, Homo sapiens
  Table A; Target 68949; HLA-B*58:01; PNLDC1; ENSG00000146453; TAA
APYVNQVNL

SEQ ID NO: 68950 - protein, 9 aa, Homo sapiens
  Table A; Target 68950; HLA-C*01:02; PNLDC1; ENSG00000146453; TAA
APYVNQVNL

SEQ ID NO: 68951 - protein, 9 aa, Homo sapiens
  Table A; Target 68951; HLA-C*02:02; PNLDC1; ENSG00000146453; TAA
APYVNQVNL

SEQ ID NO: 68952 - protein, 9 aa, Homo sapiens
  Table A; Target 68952; HLA-C*07:02; PNLDC1; ENSG00000146453; TAA
APYVNQVNL

SEQ ID NO: 68953 - protein, 9 aa, Homo sapiens
  Table A; Target 68953; HLA-C*14:02; PNLDC1; ENSG00000146453; TAA
APYVNQVNL

SEQ ID NO: 68954 - protein, 9 aa, Homo sapiens
  Table A; Target 68954; HLA-C*16:02; PNLDC1; ENSG00000146453; TAA
APYVNQVNL

SEQ ID NO: 68955 - protein, 9 aa, Homo sapiens
  Table A; Target 68955; HLA-C*16:04; PNLDC1; ENSG00000146453; TAA
APYVNQVNL

SEQ ID NO: 68956 - protein, 10 aa, Homo sapiens
  Table A; Target 68956; HLA-B*07:02; PNLDC1; ENSG00000146453; TAA
APYVNQVNLI

SEQ ID NO: 68957 - protein, 10 aa, Homo sapiens
  Table A; Target 68957; HLA-B*49:01; PNLDC1; ENSG00000146453; TAA
APYVNQVNLI

SEQ ID NO: 68958 - protein, 10 aa, Homo sapiens
  Table A; Target 68958; HLA-B*51:01; PNLDC1; ENSG00000146453; TAA
APYVNQVNLI

SEQ ID NO: 68959 - protein, 10 aa, Homo sapiens
  Table A; Target 68959; HLA-B*56:01; PNLDC1; ENSG00000146453; TAA
APYVNQVNLI

SEQ ID NO: 68960 - protein, 8 aa, Homo sapiens
  Table A; Target 68960; HLA-A*32:01; PNLDC1; ENSG00000146453; TAA
AQKPLVGH

SEQ ID NO: 68961 - protein, 8 aa, Homo sapiens
  Table A; Target 68961; HLA-B*15:01; PNLDC1; ENSG00000146453; TAA
AQKPLVGH

SEQ ID NO: 68962 - protein, 10 aa, Homo sapiens
  Table A; Target 68962; HLA-A*30:02; PNLDC1; ENSG00000146453; TAA
AQKPLVGHNM

SEQ ID NO: 68963 - protein, 10 aa, Homo sapiens
  Table A; Target 68963; HLA-A*31:01; PNLDC1; ENSG00000146453; TAA
AQKPLVGHNM

SEQ ID NO: 68964 - protein, 10 aa, Homo sapiens
  Table A; Target 68964; HLA-A*32:01; PNLDC1; ENSG00000146453; TAA
AQKPLVGHNM

SEQ ID NO: 68965 - protein, 10 aa, Homo sapiens
  Table A; Target 68965; HLA-B*15:01; PNLDC1; ENSG00000146453; TAA
AQKPLVGHNM

SEQ ID NO: 68966 - protein, 8 aa, Homo sapiens
  Table A; Target 68966; HLA-C*16:04; PNLDC1; ENSG00000146453; TAA
ARNILKEY

SEQ ID NO: 68967 - protein, 9 aa, Homo sapiens
  Table A; Target 68967; HLA-B*27:05; PNLDC1; ENSG00000146453; TAA
ARNILKEYR

SEQ ID NO: 68968 - protein, 10 aa, Homo sapiens
  Table A; Target 68968; HLA-A*01:01; PNLDC1; ENSG00000146453; TAA
ASSVQFLNQY

SEQ ID NO: 68969 - protein, 10 aa, Homo sapiens
  Table A; Target 68969; HLA-A*30:02; PNLDC1; ENSG00000146453; TAA
ASSVQFLNQY

SEQ ID NO: 68970 - protein, 10 aa, Homo sapiens
  Table A; Target 68970; HLA-C*16:02; PNLDC1; ENSG00000146453; TAA
ASSVQFLNQY

SEQ ID NO: 68971 - protein, 10 aa, Homo sapiens
  Table A; Target 68971; HLA-B*35:01; PNLDC1; ENSG00000146453; TAA
CPHEAAYDAF

SEQ ID NO: 68972 - protein, 8 aa, Homo sapiens
  Table A; Target 68972; HLA-B*15:01; PNLDC1; ENSG00000146453; TAA
CQIGLSVF

SEQ ID NO: 68973 - protein, 8 aa, Homo sapiens
  Table A; Target 68973; HLA-B*15:03; PNLDC1; ENSG00000146453; TAA
CQIGLSVF

SEQ ID NO: 68974 - protein, 8 aa, Homo sapiens
  Table A; Target 68974; HLA-C*07:04; PNLDC1; ENSG00000146453; TAA
CQIGLSVF

SEQ ID NO: 68975 - protein, 8 aa, Homo sapiens
  Table A; Target 68975; HLA-C*12:03; PNLDC1; ENSG00000146453; TAA
CQIGLSVF

SEQ ID NO: 68976 - protein, 8 aa, Homo sapiens
  Table A; Target 68976; HLA-B*51:01; PNLDC1; ENSG00000146453; TAA
DAFLCGSV

SEQ ID NO: 68977 - protein, 8 aa, Homo sapiens
  Table A; Target 68977; HLA-C*12:03; PNLDC1; ENSG00000146453; TAA
DAFLCGSV

SEQ ID NO: 68978 - protein, 9 aa, Homo sapiens
  Table A; Target 68978; HLA-B*35:01; PNLDC1; ENSG00000146453; TAA
DAFLCGSVL

SEQ ID NO: 68979 - protein, 9 aa, Homo sapiens
  Table A; Target 68979; HLA-B*35:03; PNLDC1; ENSG00000146453; TAA
DAFLCGSVL

SEQ ID NO: 68980 - protein, 9 aa, Homo sapiens
  Table A; Target 68980; HLA-B*39:01; PNLDC1; ENSG00000146453; TAA
DAFLCGSVL

SEQ ID NO: 68981 - protein, 9 aa, Homo sapiens
  Table A; Target 68981; HLA-B*51:01; PNLDC1; ENSG00000146453; TAA
DAFLCGSVL

SEQ ID NO: 68982 - protein, 9 aa, Homo sapiens
  Table A; Target 68982; HLA-C*03:03; PNLDC1; ENSG00000146453; TAA
DAFLCGSVL

SEQ ID NO: 68983 - protein, 9 aa, Homo sapiens
  Table A; Target 68983; HLA-C*12:03; PNLDC1; ENSG00000146453; TAA
DAFLCGSVL

SEQ ID NO: 68984 - protein, 9 aa, Homo sapiens
  Table A; Target 68984; HLA-A*25:01; PNLDC1; ENSG00000146453; TAA
DARNILKEY

SEQ ID NO: 68985 - protein, 9 aa, Homo sapiens
  Table A; Target 68985; HLA-A*26:01; PNLDC1; ENSG00000146453; TAA
DARNILKEY

SEQ ID NO: 68986 - protein, 9 aa, Homo sapiens
  Table A; Target 68986; HLA-A*33:01; PNLDC1; ENSG00000146453; TAA
DARNILKEY

SEQ ID NO: 68987 - protein, 9 aa, Homo sapiens
  Table A; Target 68987; HLA-A*33:03; PNLDC1; ENSG00000146453; TAA
DARNILKEY

SEQ ID NO: 68988 - protein, 9 aa, Homo sapiens
  Table A; Target 68988; HLA-B*35:01; PNLDC1; ENSG00000146453; TAA
DARNILKEY

SEQ ID NO: 68989 - protein, 9 aa, Homo sapiens
  Table A; Target 68989; HLA-B*46:01; PNLDC1; ENSG00000146453; TAA
DARNILKEY

SEQ ID NO: 68990 - protein, 9 aa, Homo sapiens
  Table A; Target 68990; HLA-B*51:01; PNLDC1; ENSG00000146453; TAA
DARNILKEY

SEQ ID NO: 68991 - protein, 9 aa, Homo sapiens
  Table A; Target 68991; HLA-C*12:03; PNLDC1; ENSG00000146453; TAA
DARNILKEY

SEQ ID NO: 68992 - protein, 9 aa, Homo sapiens
  Table A; Target 68992; HLA-C*16:01; PNLDC1; ENSG00000146453; TAA
DARNILKEY

SEQ ID NO: 68993 - protein, 9 aa, Homo sapiens
  Table A; Target 68993; HLA-C*16:02; PNLDC1; ENSG00000146453; TAA
DARNILKEY

SEQ ID NO: 68994 - protein, 10 aa, Homo sapiens
  Table A; Target 68994; HLA-A*33:01; PNLDC1; ENSG00000146453; TAA
DARNILKEYR

SEQ ID NO: 68995 - protein, 10 aa, Homo sapiens
  Table A; Target 68995; HLA-A*33:03; PNLDC1; ENSG00000146453; TAA
DARNILKEYR

SEQ ID NO: 68996 - protein, 8 aa, Homo sapiens
  Table A; Target 68996; HLA-B*18:01; PNLDC1; ENSG00000146453; TAA
DEGVVVKK

SEQ ID NO: 68997 - protein, 9 aa, Homo sapiens
  Table A; Target 68997; HLA-B*18:01; PNLDC1; ENSG00000146453; TAA
DEGVVVKKV

SEQ ID NO: 68998 - protein, 9 aa, Homo sapiens
  Table A; Target 68998; HLA-B*40:02; PNLDC1; ENSG00000146453; TAA
DEGVVVKKV

SEQ ID NO: 68999 - protein, 9 aa, Homo sapiens
  Table A; Target 68999; HLA-B*44:02; PNLDC1; ENSG00000146453; TAA
DEGVVVKKV

SEQ ID NO: 69000 - protein, 9 aa, Homo sapiens
  Table A; Target 69000; HLA-B*44:03; PNLDC1; ENSG00000146453; TAA
DEGVVVKKV

SEQ ID NO: 69001 - protein, 9 aa, Homo sapiens
  Table A; Target 69001; HLA-B*49:01; PNLDC1; ENSG00000146453; TAA
DEGVVVKKV

SEQ ID NO: 69002 - protein, 9 aa, Homo sapiens
  Table A; Target 69002; HLA-C*16:04; PNLDC1; ENSG00000146453; TAA
DEGVVVKKV

SEQ ID NO: 69003 - protein, 9 aa, Homo sapiens
  Table A; Target 69003; HLA-B*18:01; PNLDC1; ENSG00000146453; TAA
DEVTRWLEL

SEQ ID NO: 69004 - protein, 9 aa, Homo sapiens
  Table A; Target 69004; HLA-B*39:01; PNLDC1; ENSG00000146453; TAA
DHPTLCISL

SEQ ID NO: 69005 - protein, 10 aa, Homo sapiens
  Table A; Target 69005; HLA-A*33:01; PNLDC1; ENSG00000146453; TAA
DILTGNWRVR

SEQ ID NO: 69006 - protein, 9 aa, Homo sapiens
  Table A; Target 69006; HLA-B*38:01; PNLDC1; ENSG00000146453; TAA
DKDQIKVVI

SEQ ID NO: 69007 - protein, 8 aa, Homo sapiens
  Table A; Target 69007; HLA-A*33:01; PNLDC1; ENSG00000146453; TAA
DLLHLHEK

SEQ ID NO: 69008 - protein, 9 aa, Homo sapiens
  Table A; Target 69008; HLA-A*33:01; PNLDC1; ENSG00000146453; TAA
DLLHLHEKF

SEQ ID NO: 69009 - protein, 8 aa, Homo sapiens
  Table A; Target 69009; HLA-B*35:01; PNLDC1; ENSG00000146453; TAA
DPVPESSF

SEQ ID NO: 69010 - protein, 8 aa, Homo sapiens
  Table A; Target 69010; HLA-B*35:03; PNLDC1; ENSG00000146453; TAA
DPVPESSF

SEQ ID NO: 69011 - protein, 11 aa, Homo sapiens
  Table A; Target 69011; HLA-A*25:01; PNLDC1; ENSG00000146453; TAA
DPVPESSFPQY

SEQ ID NO: 69012 - protein, 11 aa, Homo sapiens
  Table A; Target 69012; HLA-A*26:01; PNLDC1; ENSG00000146453; TAA
DPVPESSFPQY

SEQ ID NO: 69013 - protein, 11 aa, Homo sapiens
  Table A; Target 69013; HLA-A*68:01; PNLDC1; ENSG00000146453; TAA
DPVPESSFPQY

SEQ ID NO: 69014 - protein, 11 aa, Homo sapiens
  Table A; Target 69014; HLA-B*35:01; PNLDC1; ENSG00000146453; TAA
DPVPESSFPQY

SEQ ID NO: 69015 - protein, 11 aa, Homo sapiens
  Table A; Target 69015; HLA-B*55:01; PNLDC1; ENSG00000146453; TAA
DPVPESSFPQY

SEQ ID NO: 69016 - protein, 11 aa, Homo sapiens
  Table A; Target 69016; HLA-C*07:06; PNLDC1; ENSG00000146453; TAA
DPVPESSFPQY

SEQ ID NO: 69017 - protein, 10 aa, Homo sapiens
  Table A; Target 69017; HLA-A*25:01; PNLDC1; ENSG00000146453; TAA
DQFKQNIHSL

SEQ ID NO: 69018 - protein, 10 aa, Homo sapiens
  Table A; Target 69018; HLA-A*25:01; PNLDC1; ENSG00000146453; TAA
DTKSVTKDIW

SEQ ID NO: 69019 - protein, 11 aa, Homo sapiens
  Table A; Target 69019; HLA-A*33:01; PNLDC1; ENSG00000146453; TAA
DTKSVTKDIWK

SEQ ID NO: 69020 - protein, 9 aa, Homo sapiens
  Table A; Target 69020; HLA-A*33:01; PNLDC1; ENSG00000146453; TAA
DVLAPYVNQ

SEQ ID NO: 69021 - protein, 10 aa, Homo sapiens
  Table A; Target 69021; HLA-A*68:02; PNLDC1; ENSG00000146453; TAA
DVLAPYVNQV

SEQ ID NO: 69022 - protein, 8 aa, Homo sapiens
  Table A; Target 69022; HLA-B*51:01; PNLDC1; ENSG00000146453; TAA
DWMTLPGI

SEQ ID NO: 69023 - protein, 9 aa, Homo sapiens
  Table A; Target 69023; HLA-A*23:01; PNLDC1; ENSG00000146453; TAA
DYPSIRPPI

SEQ ID NO: 69024 - protein, 9 aa, Homo sapiens
  Table A; Target 69024; HLA-A*24:02; PNLDC1; ENSG00000146453; TAA
DYPSIRPPI

SEQ ID NO: 69025 - protein, 10 aa, Homo sapiens
  Table A; Target 69025; HLA-A*24:02; PNLDC1; ENSG00000146453; TAA
DYPSIRPPIL

SEQ ID NO: 69026 - protein, 11 aa, Homo sapiens
  Table A; Target 69026; HLA-A*24:02; PNLDC1; ENSG00000146453; TAA
DYPSIRPPILI

SEQ ID NO: 69027 - protein, 9 aa, Homo sapiens
  Table A; Target 69027; HLA-A*33:01; PNLDC1; ENSG00000146453; TAA
EANKYIAHS

SEQ ID NO: 69028 - protein, 9 aa, Homo sapiens
  Table A; Target 69028; HLA-A*33:03; PNLDC1; ENSG00000146453; TAA
EANKYIAHS

SEQ ID NO: 69029 - protein, 9 aa, Homo sapiens
  Table A; Target 69029; HLA-C*14:02; PNLDC1; ENSG00000146453; TAA
EFSFQASSV

SEQ ID NO: 69030 - protein, 11 aa, Homo sapiens
  Table A; Target 69030; HLA-A*23:01; PNLDC1; ENSG00000146453; TAA
EFSFQASSVQF

SEQ ID NO: 69031 - protein, 8 aa, Homo sapiens
  Table A; Target 69031; HLA-B*08:01; PNLDC1; ENSG00000146453; TAA
EGVVVKKV

SEQ ID NO: 69032 - protein, 8 aa, Homo sapiens
  Table A; Target 69032; HLA-B*40:02; PNLDC1; ENSG00000146453; TAA
EGVVVKKV

SEQ ID NO: 69033 - protein, 8 aa, Homo sapiens
  Table A; Target 69033; HLA-B*51:01; PNLDC1; ENSG00000146453; TAA
EGVVVKKV

SEQ ID NO: 69034 - protein, 8 aa, Homo sapiens
  Table A; Target 69034; HLA-C*04:01; PNLDC1; ENSG00000146453; TAA
EGVVVKKV

SEQ ID NO: 69035 - protein, 8 aa, Homo sapiens
  Table A; Target 69035; HLA-C*06:02; PNLDC1; ENSG00000146453; TAA
EGVVVKKV

SEQ ID NO: 69036 - protein, 8 aa, Homo sapiens
  Table A; Target 69036; HLA-C*12:03; PNLDC1; ENSG00000146453; TAA
EGVVVKKV

SEQ ID NO: 69037 - protein, 8 aa, Homo sapiens
  Table A; Target 69037; HLA-A*33:01; PNLDC1; ENSG00000146453; TAA
ENILLSAR

SEQ ID NO: 69038 - protein, 8 aa, Homo sapiens
  Table A; Target 69038; HLA-A*33:03; PNLDC1; ENSG00000146453; TAA
ENILLSAR

SEQ ID NO: 69039 - protein, 10 aa, Homo sapiens
  Table A; Target 69039; HLA-A*25:01; PNLDC1; ENSG00000146453; TAA
ESYDQFKQNI

SEQ ID NO: 69040 - protein, 10 aa, Homo sapiens
  Table A; Target 69040; HLA-A*01:01; PNLDC1; ENSG00000146453; TAA
ETKCPHEAAY

SEQ ID NO: 69041 - protein, 10 aa, Homo sapiens
  Table A; Target 69041; HLA-A*25:01; PNLDC1; ENSG00000146453; TAA
ETKCPHEAAY

SEQ ID NO: 69042 - protein, 10 aa, Homo sapiens
  Table A; Target 69042; HLA-A*26:01; PNLDC1; ENSG00000146453; TAA
ETKCPHEAAY

SEQ ID NO: 69043 - protein, 10 aa, Homo sapiens
  Table A; Target 69043; HLA-A*30:02; PNLDC1; ENSG00000146453; TAA
ETKCPHEAAY

SEQ ID NO: 69044 - protein, 11 aa, Homo sapiens
  Table A; Target 69044; HLA-A*03:02; PNLDC1; ENSG00000146453; TAA
EVLNSDLNPTK

SEQ ID NO: 69045 - protein, 11 aa, Homo sapiens
  Table A; Target 69045; HLA-A*11:01; PNLDC1; ENSG00000146453; TAA
EVLNSDLNPTK

SEQ ID NO: 69046 - protein, 11 aa, Homo sapiens
  Table A; Target 69046; HLA-A*26:01; PNLDC1; ENSG00000146453; TAA
EVLNSDLNPTK

SEQ ID NO: 69047 - protein, 11 aa, Homo sapiens
  Table A; Target 69047; HLA-A*33:01; PNLDC1; ENSG00000146453; TAA
EVLNSDLNPTK

SEQ ID NO: 69048 - protein, 11 aa, Homo sapiens
  Table A; Target 69048; HLA-A*33:03; PNLDC1; ENSG00000146453; TAA
EVLNSDLNPTK

SEQ ID NO: 69049 - protein, 11 aa, Homo sapiens
  Table A; Target 69049; HLA-A*68:01; PNLDC1; ENSG00000146453; TAA
EVLNSDLNPTK

SEQ ID NO: 69050 - protein, 11 aa, Homo sapiens
  Table A; Target 69050; HLA-B*27:02; PNLDC1; ENSG00000146453; TAA
EVLNSDLNPTK

SEQ ID NO: 69051 - protein, 11 aa, Homo sapiens
  Table A; Target 69051; HLA-B*27:05; PNLDC1; ENSG00000146453; TAA
EVLNSDLNPTK

SEQ ID NO: 69052 - protein, 11 aa, Homo sapiens
  Table A; Target 69052; HLA-C*07:06; PNLDC1; ENSG00000146453; TAA
EVLNSDLNPTK

SEQ ID NO: 69053 - protein, 10 aa, Homo sapiens
  Table A; Target 69053; HLA-A*25:01; PNLDC1; ENSG00000146453; TAA
EVQLVLRQAL

SEQ ID NO: 69054 - protein, 10 aa, Homo sapiens
  Table A; Target 69054; HLA-C*07:02; PNLDC1; ENSG00000146453; TAA
EVQLVLRQAL

SEQ ID NO: 69055 - protein, 9 aa, Homo sapiens
  Table A; Target 69055; HLA-A*68:02; PNLDC1; ENSG00000146453; TAA
EVTRWLELA

SEQ ID NO: 69056 - protein, 10 aa, Homo sapiens
  Table A; Target 69056; HLA-A*25:01; PNLDC1; ENSG00000146453; TAA
EVYEVLNSDL

SEQ ID NO: 69057 - protein, 10 aa, Homo sapiens
  Table A; Target 69057; HLA-A*26:01; PNLDC1; ENSG00000146453; TAA
EVYEVLNSDL

SEQ ID NO: 69058 - protein, 10 aa, Homo sapiens
  Table A; Target 69058; HLA-A*68:01; PNLDC1; ENSG00000146453; TAA
EVYEVLNSDL

SEQ ID NO: 69059 - protein, 10 aa, Homo sapiens
  Table A; Target 69059; HLA-A*68:02; PNLDC1; ENSG00000146453; TAA
EVYEVLNSDL

SEQ ID NO: 69060 - protein, 10 aa, Homo sapiens
  Table A; Target 69060; HLA-C*07:06; PNLDC1; ENSG00000146453; TAA
EVYEVLNSDL

SEQ ID NO: 69061 - protein, 9 aa, Homo sapiens
  Table A; Target 69061; HLA-B*51:01; PNLDC1; ENSG00000146453; TAA
FAFLAGLDI

SEQ ID NO: 69062 - protein, 9 aa, Homo sapiens
  Table A; Target 69062; HLA-B*54:01; PNLDC1; ENSG00000146453; TAA
FAFLAGLDI

SEQ ID NO: 69063 - protein, 9 aa, Homo sapiens
  Table A; Target 69063; HLA-C*03:03; PNLDC1; ENSG00000146453; TAA
FAFLAGLDI

SEQ ID NO: 69064 - protein, 9 aa, Homo sapiens
  Table A; Target 69064; HLA-C*03:04; PNLDC1; ENSG00000146453; TAA
FAFLAGLDI

SEQ ID NO: 69065 - protein, 11 aa, Homo sapiens
  Table A; Target 69065; HLA-B*27:02; PNLDC1; ENSG00000146453; TAA
FAFLAGLDIEF

SEQ ID NO: 69066 - protein, 11 aa, Homo sapiens
  Table A; Target 69066; HLA-B*35:01; PNLDC1; ENSG00000146453; TAA
FAFLAGLDIEF

SEQ ID NO: 69067 - protein, 11 aa, Homo sapiens
  Table A; Target 69067; HLA-B*35:03; PNLDC1; ENSG00000146453; TAA
FAFLAGLDIEF

SEQ ID NO: 69068 - protein, 11 aa, Homo sapiens
  Table A; Target 69068; HLA-B*54:01; PNLDC1; ENSG00000146453; TAA
FAFLAGLDIEF

SEQ ID NO: 69069 - protein, 11 aa, Homo sapiens
  Table A; Target 69069; HLA-B*57:01; PNLDC1; ENSG00000146453; TAA
FAFLAGLDIEF

SEQ ID NO: 69070 - protein, 11 aa, Homo sapiens
  Table A; Target 69070; HLA-C*02:02; PNLDC1; ENSG00000146453; TAA
FAFLAGLDIEF

SEQ ID NO: 69071 - protein, 8 aa, Homo sapiens
  Table A; Target 69071; HLA-C*07:01; PNLDC1; ENSG00000146453; TAA
FDLPSEWY

SEQ ID NO: 69072 - protein, 9 aa, Homo sapiens
  Table A; Target 69072; HLA-A*02:01; PNLDC1; ENSG00000146453; TAA
FDLPSEWYL

SEQ ID NO: 69073 - protein, 9 aa, Homo sapiens
  Table A; Target 69073; HLA-A*02:04; PNLDC1; ENSG00000146453; TAA
FDLPSEWYL

SEQ ID NO: 69074 - protein, 9 aa, Homo sapiens
  Table A; Target 69074; HLA-A*23:01; PNLDC1; ENSG00000146453; TAA
FFRPLPESY

SEQ ID NO: 69075 - protein, 9 aa, Homo sapiens
  Table A; Target 69075; HLA-A*24:02; PNLDC1; ENSG00000146453; TAA
FFRPLPESY

SEQ ID NO: 69076 - protein, 9 aa, Homo sapiens
  Table A; Target 69076; HLA-A*29:02; PNLDC1; ENSG00000146453; TAA
FFRPLPESY

SEQ ID NO: 69077 - protein, 9 aa, Homo sapiens
  Table A; Target 69077; HLA-A*30:02; PNLDC1; ENSG00000146453; TAA
FFRPLPESY

SEQ ID NO: 69078 - protein, 9 aa, Homo sapiens
  Table A; Target 69078; HLA-B*15:03; PNLDC1; ENSG00000146453; TAA
FFRPLPESY

SEQ ID NO: 69079 - protein, 9 aa, Homo sapiens
  Table A; Target 69079; HLA-B*46:01; PNLDC1; ENSG00000146453; TAA
FFRPLPESY

SEQ ID NO: 69080 - protein, 9 aa, Homo sapiens
  Table A; Target 69080; HLA-C*01:02; PNLDC1; ENSG00000146453; TAA
FFRPLPESY

SEQ ID NO: 69081 - protein, 9 aa, Homo sapiens
  Table A; Target 69081; HLA-C*14:02; PNLDC1; ENSG00000146453; TAA
FFRPLPESY

SEQ ID NO: 69082 - protein, 8 aa, Homo sapiens
  Table A; Target 69082; HLA-B*46:01; PNLDC1; ENSG00000146453; TAA
FGILDSEF

SEQ ID NO: 69083 - protein, 9 aa, Homo sapiens
  Table A; Target 69083; HLA-A*02:01; PNLDC1; ENSG00000146453; TAA
FLAGLDIEF

SEQ ID NO: 69084 - protein, 9 aa, Homo sapiens
  Table A; Target 69084; HLA-A*02:03; PNLDC1; ENSG00000146453; TAA
FLAGLDIEF

SEQ ID NO: 69085 - protein, 9 aa, Homo sapiens
  Table A; Target 69085; HLA-A*02:04; PNLDC1; ENSG00000146453; TAA
FLAGLDIEF

SEQ ID NO: 69086 - protein, 9 aa, Homo sapiens
  Table A; Target 69086; HLA-A*02:07; PNLDC1; ENSG00000146453; TAA
FLAGLDIEF

SEQ ID NO: 69087 - protein, 9 aa, Homo sapiens
  Table A; Target 69087; HLA-A*23:01; PNLDC1; ENSG00000146453; TAA
FLAGLDIEF

SEQ ID NO: 69088 - protein, 9 aa, Homo sapiens
  Table A; Target 69088; HLA-A*26:01; PNLDC1; ENSG00000146453; TAA
FLAGLDIEF

SEQ ID NO: 69089 - protein, 9 aa, Homo sapiens
  Table A; Target 69089; HLA-A*29:02; PNLDC1; ENSG00000146453; TAA
FLAGLDIEF

SEQ ID NO: 69090 - protein, 9 aa, Homo sapiens
  Table A; Target 69090; HLA-B*15:01; PNLDC1; ENSG00000146453; TAA
FLAGLDIEF

SEQ ID NO: 69091 - protein, 9 aa, Homo sapiens
  Table A; Target 69091; HLA-B*15:03; PNLDC1; ENSG00000146453; TAA
FLAGLDIEF

SEQ ID NO: 69092 - protein, 9 aa, Homo sapiens
  Table A; Target 69092; HLA-B*35:01; PNLDC1; ENSG00000146453; TAA
FLAGLDIEF

SEQ ID NO: 69093 - protein, 9 aa, Homo sapiens
  Table A; Target 69093; HLA-B*35:03; PNLDC1; ENSG00000146453; TAA
FLAGLDIEF

SEQ ID NO: 69094 - protein, 9 aa, Homo sapiens
  Table A; Target 69094; HLA-B*38:01; PNLDC1; ENSG00000146453; TAA
FLAGLDIEF

SEQ ID NO: 69095 - protein, 9 aa, Homo sapiens
  Table A; Target 69095; HLA-B*46:01; PNLDC1; ENSG00000146453; TAA
FLAGLDIEF

SEQ ID NO: 69096 - protein, 9 aa, Homo sapiens
  Table A; Target 69096; HLA-B*55:01; PNLDC1; ENSG00000146453; TAA
FLAGLDIEF

SEQ ID NO: 69097 - protein, 9 aa, Homo sapiens
  Table A; Target 69097; HLA-C*02:02; PNLDC1; ENSG00000146453; TAA
FLAGLDIEF

SEQ ID NO: 69098 - protein, 9 aa, Homo sapiens
  Table A; Target 69098; HLA-C*07:04; PNLDC1; ENSG00000146453; TAA
FLAGLDIEF

SEQ ID NO: 69099 - protein, 9 aa, Homo sapiens
  Table A; Target 69099; HLA-A*03:01; PNLDC1; ENSG00000146453; TAA
FLCGSVLLK

SEQ ID NO: 69100 - protein, 10 aa, Homo sapiens
  Table A; Target 69100; HLA-A*02:03; PNLDC1; ENSG00000146453; TAA
FLCGSVLLKV

SEQ ID NO: 69101 - protein, 10 aa, Homo sapiens
  Table A; Target 69101; HLA-A*02:04; PNLDC1; ENSG00000146453; TAA
FLCGSVLLKV

SEQ ID NO: 69102 - protein, 8 aa, Homo sapiens
  Table A; Target 69102; HLA-B*46:01; PNLDC1; ENSG00000146453; TAA
FLKNGIPY

SEQ ID NO: 69103 - protein, 9 aa, Homo sapiens
  Table A; Target 69103; HLA-A*02:01; PNLDC1; ENSG00000146453; TAA
FLKNGIPYM

SEQ ID NO: 69104 - protein, 9 aa, Homo sapiens
  Table A; Target 69104; HLA-A*02:03; PNLDC1; ENSG00000146453; TAA
FLKNGIPYM

SEQ ID NO: 69105 - protein, 9 aa, Homo sapiens
  Table A; Target 69105; HLA-A*02:04; PNLDC1; ENSG00000146453; TAA
FLKNGIPYM

SEQ ID NO: 69106 - protein, 9 aa, Homo sapiens
  Table A; Target 69106; HLA-A*02:07; PNLDC1; ENSG00000146453; TAA
FLKNGIPYM

SEQ ID NO: 69107 - protein, 9 aa, Homo sapiens
  Table A; Target 69107; HLA-A*23:01; PNLDC1; ENSG00000146453; TAA
FLKNGIPYM

SEQ ID NO: 69108 - protein, 9 aa, Homo sapiens
  Table A; Target 69108; HLA-A*26:01; PNLDC1; ENSG00000146453; TAA
FLKNGIPYM

SEQ ID NO: 69109 - protein, 9 aa, Homo sapiens
  Table A; Target 69109; HLA-B*08:01; PNLDC1; ENSG00000146453; TAA
FLKNGIPYM

SEQ ID NO: 69110 - protein, 9 aa, Homo sapiens
  Table A; Target 69110; HLA-B*46:01; PNLDC1; ENSG00000146453; TAA
FLKNGIPYM

SEQ ID NO: 69111 - protein, 9 aa, Homo sapiens
  Table A; Target 69111; HLA-C*02:02; PNLDC1; ENSG00000146453; TAA
FLKNGIPYM

SEQ ID NO: 69112 - protein, 9 aa, Homo sapiens
  Table A; Target 69112; HLA-C*16:01; PNLDC1; ENSG00000146453; TAA
FLKNGIPYM

SEQ ID NO: 69113 - protein, 9 aa, Homo sapiens
  Table A; Target 69113; HLA-A*01:01; PNLDC1; ENSG00000146453; TAA
FLNQYGFNY

SEQ ID NO: 69114 - protein, 9 aa, Homo sapiens
  Table A; Target 69114; HLA-A*03:01; PNLDC1; ENSG00000146453; TAA
FLNQYGFNY

SEQ ID NO: 69115 - protein, 9 aa, Homo sapiens
  Table A; Target 69115; HLA-A*29:02; PNLDC1; ENSG00000146453; TAA
FLNQYGFNY

SEQ ID NO: 69116 - protein, 9 aa, Homo sapiens
  Table A; Target 69116; HLA-A*30:02; PNLDC1; ENSG00000146453; TAA
FLNQYGFNY

SEQ ID NO: 69117 - protein, 9 aa, Homo sapiens
  Table A; Target 69117; HLA-B*46:01; PNLDC1; ENSG00000146453; TAA
FLNQYGFNY

SEQ ID NO: 69118 - protein, 9 aa, Homo sapiens
  Table A; Target 69118; HLA-C*02:02; PNLDC1; ENSG00000146453; TAA
FLNQYGFNY

SEQ ID NO: 69119 - protein, 9 aa, Homo sapiens
  Table A; Target 69119; HLA-C*07:04; PNLDC1; ENSG00000146453; TAA
FLNQYGFNY

SEQ ID NO: 69120 - protein, 9 aa, Homo sapiens
  Table A; Target 69120; HLA-C*14:02; PNLDC1; ENSG00000146453; TAA
FLNQYGFNY

SEQ ID NO: 69121 - protein, 8 aa, Homo sapiens
  Table A; Target 69121; HLA-B*35:01; PNLDC1; ENSG00000146453; TAA
FPQYLDVL

SEQ ID NO: 69122 - protein, 8 aa, Homo sapiens
  Table A; Target 69122; HLA-B*35:03; PNLDC1; ENSG00000146453; TAA
FPQYLDVL

SEQ ID NO: 69123 - protein, 8 aa, Homo sapiens
  Table A; Target 69123; HLA-B*54:01; PNLDC1; ENSG00000146453; TAA
FPQYLDVL

SEQ ID NO: 69124 - protein, 8 aa, Homo sapiens
  Table A; Target 69124; HLA-B*55:01; PNLDC1; ENSG00000146453; TAA
FPQYLDVL

SEQ ID NO: 69125 - protein, 8 aa, Homo sapiens
  Table A; Target 69125; HLA-B*56:01; PNLDC1; ENSG00000146453; TAA
FPQYLDVL

SEQ ID NO: 69126 - protein, 9 aa, Homo sapiens
  Table A; Target 69126; HLA-B*54:01; PNLDC1; ENSG00000146453; TAA
FPQYLDVLA

SEQ ID NO: 69127 - protein, 9 aa, Homo sapiens
  Table A; Target 69127; HLA-B*56:01; PNLDC1; ENSG00000146453; TAA
FPQYLDVLA

SEQ ID NO: 69128 - protein, 10 aa, Homo sapiens
  Table A; Target 69128; HLA-B*07:02; PNLDC1; ENSG00000146453; TAA
FPRVSNLSEV

SEQ ID NO: 69129 - protein, 10 aa, Homo sapiens
  Table A; Target 69129; HLA-B*54:01; PNLDC1; ENSG00000146453; TAA
FPRVSNLSEV

SEQ ID NO: 69130 - protein, 10 aa, Homo sapiens
  Table A; Target 69130; HLA-B*56:01; PNLDC1; ENSG00000146453; TAA
FPRVSNLSEV

SEQ ID NO: 69131 - protein, 11 aa, Homo sapiens
  Table A; Target 69131; HLA-B*35:01; PNLDC1; ENSG00000146453; TAA
FPRVSNLSEVY

SEQ ID NO: 69132 - protein, 11 aa, Homo sapiens
  Table A; Target 69132; HLA-B*55:01; PNLDC1; ENSG00000146453; TAA
FPRVSNLSEVY

SEQ ID NO: 69133 - protein, 8 aa, Homo sapiens
  Table A; Target 69133; HLA-B*07:02; PNLDC1; ENSG00000146453; TAA
FPTTFGIL

SEQ ID NO: 69134 - protein, 8 aa, Homo sapiens
  Table A; Target 69134; HLA-B*35:01; PNLDC1; ENSG00000146453; TAA
FPTTFGIL

SEQ ID NO: 69135 - protein, 8 aa, Homo sapiens
  Table A; Target 69135; HLA-B*35:03; PNLDC1; ENSG00000146453; TAA
FPTTFGIL

SEQ ID NO: 69136 - protein, 8 aa, Homo sapiens
  Table A; Target 69136; HLA-B*51:01; PNLDC1; ENSG00000146453; TAA
FPTTFGIL

SEQ ID NO: 69137 - protein, 8 aa, Homo sapiens
  Table A; Target 69137; HLA-C*03:03; PNLDC1; ENSG00000146453; TAA
FPTTFGIL

SEQ ID NO: 69138 - protein, 8 aa, Homo sapiens
  Table A; Target 69138; HLA-C*03:04; PNLDC1; ENSG00000146453; TAA
FPTTFGIL

SEQ ID NO: 69139 - protein, 8 aa, Homo sapiens
  Table A; Target 69139; HLA-B*27:02; PNLDC1; ENSG00000146453; TAA
FPVLIDTK

SEQ ID NO: 69140 - protein, 8 aa, Homo sapiens
  Table A; Target 69140; HLA-B*35:01; PNLDC1; ENSG00000146453; TAA
FPVLIDTK

SEQ ID NO: 69141 - protein, 8 aa, Homo sapiens
  Table A; Target 69141; HLA-B*35:03; PNLDC1; ENSG00000146453; TAA
FPVLIDTK

SEQ ID NO: 69142 - protein, 8 aa, Homo sapiens
  Table A; Target 69142; HLA-B*51:01; PNLDC1; ENSG00000146453; TAA
FPVLIDTK

SEQ ID NO: 69143 - protein, 8 aa, Homo sapiens
  Table A; Target 69143; HLA-B*54:01; PNLDC1; ENSG00000146453; TAA
FPVLIDTK

SEQ ID NO: 69144 - protein, 8 aa, Homo sapiens
  Table A; Target 69144; HLA-B*55:01; PNLDC1; ENSG00000146453; TAA
FPVLIDTK

SEQ ID NO: 69145 - protein, 8 aa, Homo sapiens
  Table A; Target 69145; HLA-B*56:01; PNLDC1; ENSG00000146453; TAA
FPVLIDTK

SEQ ID NO: 69146 - protein, 8 aa, Homo sapiens
  Table A; Target 69146; HLA-C*07:01; PNLDC1; ENSG00000146453; TAA
FPVLIDTK

SEQ ID NO: 69147 - protein, 9 aa, Homo sapiens
  Table A; Target 69147; HLA-B*54:01; PNLDC1; ENSG00000146453; TAA
FPVLIDTKS

SEQ ID NO: 69148 - protein, 9 aa, Homo sapiens
  Table A; Target 69148; HLA-B*56:01; PNLDC1; ENSG00000146453; TAA
FPVLIDTKS

SEQ ID NO: 69149 - protein, 10 aa, Homo sapiens
  Table A; Target 69149; HLA-A*68:02; PNLDC1; ENSG00000146453; TAA
FPVLIDTKSV

SEQ ID NO: 69150 - protein, 10 aa, Homo sapiens
  Table A; Target 69150; HLA-B*35:01; PNLDC1; ENSG00000146453; TAA
FPVLIDTKSV

SEQ ID NO: 69151 - protein, 10 aa, Homo sapiens
  Table A; Target 69151; HLA-B*35:03; PNLDC1; ENSG00000146453; TAA
FPVLIDTKSV

SEQ ID NO: 69152 - protein, 10 aa, Homo sapiens
  Table A; Target 69152; HLA-B*51:01; PNLDC1; ENSG00000146453; TAA
FPVLIDTKSV

SEQ ID NO: 69153 - protein, 10 aa, Homo sapiens
  Table A; Target 69153; HLA-B*54:01; PNLDC1; ENSG00000146453; TAA
FPVLIDTKSV

SEQ ID NO: 69154 - protein, 10 aa, Homo sapiens
  Table A; Target 69154; HLA-B*55:01; PNLDC1; ENSG00000146453; TAA
FPVLIDTKSV

SEQ ID NO: 69155 - protein, 10 aa, Homo sapiens
  Table A; Target 69155; HLA-B*56:01; PNLDC1; ENSG00000146453; TAA
FPVLIDTKSV

SEQ ID NO: 69156 - protein, 11 aa, Homo sapiens
  Table A; Target 69156; HLA-B*54:01; PNLDC1; ENSG00000146453; TAA
FPVLIDTKSVT

SEQ ID NO: 69157 - protein, 9 aa, Homo sapiens
  Table A; Target 69157; HLA-A*02:03; PNLDC1; ENSG00000146453; TAA
FQAFEVQLV

SEQ ID NO: 69158 - protein, 9 aa, Homo sapiens
  Table A; Target 69158; HLA-A*68:02; PNLDC1; ENSG00000146453; TAA
FQAFEVQLV

SEQ ID NO: 69159 - protein, 9 aa, Homo sapiens
  Table A; Target 69159; HLA-B*13:02; PNLDC1; ENSG00000146453; TAA
FQAFEVQLV

SEQ ID NO: 69160 - protein, 9 aa, Homo sapiens
  Table A; Target 69160; HLA-B*27:05; PNLDC1; ENSG00000146453; TAA
FQAFEVQLV

SEQ ID NO: 69161 - protein, 8 aa, Homo sapiens
  Table A; Target 69161; HLA-B*15:01; PNLDC1; ENSG00000146453; TAA
FQASSVQF

SEQ ID NO: 69162 - protein, 8 aa, Homo sapiens
  Table A; Target 69162; HLA-B*15:03; PNLDC1; ENSG00000146453; TAA
FQASSVQF

SEQ ID NO: 69163 - protein, 8 aa, Homo sapiens
  Table A; Target 69163; HLA-B*38:01; PNLDC1; ENSG00000146453; TAA
FQASSVQF

SEQ ID NO: 69164 - protein, 8 aa, Homo sapiens
  Table A; Target 69164; HLA-B*39:01; PNLDC1; ENSG00000146453; TAA
FQASSVQF

SEQ ID NO: 69165 - protein, 8 aa, Homo sapiens
  Table A; Target 69165; HLA-C*07:04; PNLDC1; ENSG00000146453; TAA
FQASSVQF

SEQ ID NO: 69166 - protein, 9 aa, Homo sapiens
  Table A; Target 69166; HLA-A*02:01; PNLDC1; ENSG00000146453; TAA
FQASSVQFL

SEQ ID NO: 69167 - protein, 9 aa, Homo sapiens
  Table A; Target 69167; HLA-A*02:03; PNLDC1; ENSG00000146453; TAA
FQASSVQFL

SEQ ID NO: 69168 - protein, 9 aa, Homo sapiens
  Table A; Target 69168; HLA-A*02:04; PNLDC1; ENSG00000146453; TAA
FQASSVQFL

SEQ ID NO: 69169 - protein, 9 aa, Homo sapiens
  Table A; Target 69169; HLA-A*02:07; PNLDC1; ENSG00000146453; TAA
FQASSVQFL

SEQ ID NO: 69170 - protein, 9 aa, Homo sapiens
  Table A; Target 69170; HLA-A*32:01; PNLDC1; ENSG00000146453; TAA
FQASSVQFL

SEQ ID NO: 69171 - protein, 9 aa, Homo sapiens
  Table A; Target 69171; HLA-A*68:02; PNLDC1; ENSG00000146453; TAA
FQASSVQFL

SEQ ID NO: 69172 - protein, 9 aa, Homo sapiens
  Table A; Target 69172; HLA-B*13:02; PNLDC1; ENSG00000146453; TAA
FQASSVQFL

SEQ ID NO: 69173 - protein, 9 aa, Homo sapiens
  Table A; Target 69173; HLA-B*15:01; PNLDC1; ENSG00000146453; TAA
FQASSVQFL

SEQ ID NO: 69174 - protein, 9 aa, Homo sapiens
  Table A; Target 69174; HLA-B*27:05; PNLDC1; ENSG00000146453; TAA
FQASSVQFL

SEQ ID NO: 69175 - protein, 9 aa, Homo sapiens
  Table A; Target 69175; HLA-B*38:01; PNLDC1; ENSG00000146453; TAA
FQASSVQFL

SEQ ID NO: 69176 - protein, 9 aa, Homo sapiens
  Table A; Target 69176; HLA-B*39:01; PNLDC1; ENSG00000146453; TAA
FQASSVQFL

SEQ ID NO: 69177 - protein, 9 aa, Homo sapiens
  Table A; Target 69177; HLA-B*58:01; PNLDC1; ENSG00000146453; TAA
FQASSVQFL

SEQ ID NO: 69178 - protein, 9 aa, Homo sapiens
  Table A; Target 69178; HLA-C*02:02; PNLDC1; ENSG00000146453; TAA
FQASSVQFL

SEQ ID NO: 69179 - protein, 9 aa, Homo sapiens
  Table A; Target 69179; HLA-C*07:04; PNLDC1; ENSG00000146453; TAA
FQASSVQFL

SEQ ID NO: 69180 - protein, 9 aa, Homo sapiens
  Table A; Target 69180; HLA-C*12:03; PNLDC1; ENSG00000146453; TAA
FQASSVQFL

SEQ ID NO: 69181 - protein, 11 aa, Homo sapiens
  Table A; Target 69181; HLA-A*01:01; PNLDC1; ENSG00000146453; TAA
FSAIEGEANKY

SEQ ID NO: 69182 - protein, 11 aa, Homo sapiens
  Table A; Target 69182; HLA-A*26:01; PNLDC1; ENSG00000146453; TAA
FSAIEGEANKY

SEQ ID NO: 69183 - protein, 11 aa, Homo sapiens
  Table A; Target 69183; HLA-A*29:02; PNLDC1; ENSG00000146453; TAA
FSAIEGEANKY

SEQ ID NO: 69184 - protein, 11 aa, Homo sapiens
  Table A; Target 69184; HLA-A*30:02; PNLDC1; ENSG00000146453; TAA
FSAIEGEANKY

SEQ ID NO: 69185 - protein, 11 aa, Homo sapiens
  Table A; Target 69185; HLA-B*15:01; PNLDC1; ENSG00000146453; TAA
FSAIEGEANKY

SEQ ID NO: 69186 - protein, 11 aa, Homo sapiens
  Table A; Target 69186; HLA-B*58:01; PNLDC1; ENSG00000146453; TAA
FSAIEGEANKY

SEQ ID NO: 69187 - protein, 11 aa, Homo sapiens
  Table A; Target 69187; HLA-C*07:01; PNLDC1; ENSG00000146453; TAA
FSAIEGEANKY

SEQ ID NO: 69188 - protein, 11 aa, Homo sapiens
  Table A; Target 69188; HLA-C*07:04; PNLDC1; ENSG00000146453; TAA
FSAIEGEANKY

SEQ ID NO: 69189 - protein, 11 aa, Homo sapiens
  Table A; Target 69189; HLA-C*12:03; PNLDC1; ENSG00000146453; TAA
FSAIEGEANKY

SEQ ID NO: 69190 - protein, 11 aa, Homo sapiens
  Table A; Target 69190; HLA-C*16:02; PNLDC1; ENSG00000146453; TAA
FSAIEGEANKY

SEQ ID NO: 69191 - protein, 8 aa, Homo sapiens
  Table A; Target 69191; HLA-B*13:02; PNLDC1; ENSG00000146453; TAA
FSFQASSV

SEQ ID NO: 69192 - protein, 8 aa, Homo sapiens
  Table A; Target 69192; HLA-B*40:02; PNLDC1; ENSG00000146453; TAA
FSFQASSV

SEQ ID NO: 69193 - protein, 8 aa, Homo sapiens
  Table A; Target 69193; HLA-B*46:01; PNLDC1; ENSG00000146453; TAA
FSFQASSV

SEQ ID NO: 69194 - protein, 8 aa, Homo sapiens
  Table A; Target 69194; HLA-B*51:01; PNLDC1; ENSG00000146453; TAA
FSFQASSV

SEQ ID NO: 69195 - protein, 8 aa, Homo sapiens
  Table A; Target 69195; HLA-B*54:01; PNLDC1; ENSG00000146453; TAA
FSFQASSV

SEQ ID NO: 69196 - protein, 8 aa, Homo sapiens
  Table A; Target 69196; HLA-C*02:02; PNLDC1; ENSG00000146453; TAA
FSFQASSV

SEQ ID NO: 69197 - protein, 8 aa, Homo sapiens
  Table A; Target 69197; HLA-C*03:03; PNLDC1; ENSG00000146453; TAA
FSFQASSV

SEQ ID NO: 69198 - protein, 8 aa, Homo sapiens
  Table A; Target 69198; HLA-C*03:04; PNLDC1; ENSG00000146453; TAA
FSFQASSV

SEQ ID NO: 69199 - protein, 8 aa, Homo sapiens
  Table A; Target 69199; HLA-C*12:03; PNLDC1; ENSG00000146453; TAA
FSFQASSV

SEQ ID NO: 69200 - protein, 8 aa, Homo sapiens
  Table A; Target 69200; HLA-C*14:02; PNLDC1; ENSG00000146453; TAA
FSFQASSV

SEQ ID NO: 69201 - protein, 8 aa, Homo sapiens
  Table A; Target 69201; HLA-C*16:04; PNLDC1; ENSG00000146453; TAA
FSFQASSV

SEQ ID NO: 69202 - protein, 10 aa, Homo sapiens
  Table A; Target 69202; HLA-A*23:01; PNLDC1; ENSG00000146453; TAA
FSFQASSVQF

SEQ ID NO: 69203 - protein, 10 aa, Homo sapiens
  Table A; Target 69203; HLA-A*25:01; PNLDC1; ENSG00000146453; TAA
FSFQASSVQF

SEQ ID NO: 69204 - protein, 10 aa, Homo sapiens
  Table A; Target 69204; HLA-A*26:01; PNLDC1; ENSG00000146453; TAA
FSFQASSVQF

SEQ ID NO: 69205 - protein, 10 aa, Homo sapiens
  Table A; Target 69205; HLA-A*33:01; PNLDC1; ENSG00000146453; TAA
FSFQASSVQF

SEQ ID NO: 69206 - protein, 10 aa, Homo sapiens
  Table A; Target 69206; HLA-B*46:01; PNLDC1; ENSG00000146453; TAA
FSFQASSVQF

SEQ ID NO: 69207 - protein, 10 aa, Homo sapiens
  Table A; Target 69207; HLA-B*57:01; PNLDC1; ENSG00000146453; TAA
FSFQASSVQF

SEQ ID NO: 69208 - protein, 10 aa, Homo sapiens
  Table A; Target 69208; HLA-B*58:01; PNLDC1; ENSG00000146453; TAA
FSFQASSVQF

SEQ ID NO: 69209 - protein, 10 aa, Homo sapiens
  Table A; Target 69209; HLA-C*02:02; PNLDC1; ENSG00000146453; TAA
FSFQASSVQF

SEQ ID NO: 69210 - protein, 10 aa, Homo sapiens
  Table A; Target 69210; HLA-C*16:04; PNLDC1; ENSG00000146453; TAA
FSFQASSVQF

SEQ ID NO: 69211 - protein, 11 aa, Homo sapiens
  Table A; Target 69211; HLA-A*68:02; PNLDC1; ENSG00000146453; TAA
FSFQASSVQFL

SEQ ID NO: 69212 - protein, 9 aa, Homo sapiens
  Table A; Target 69212; HLA-A*02:01; PNLDC1; ENSG00000146453; TAA
FSGPDYPSI

SEQ ID NO: 69213 - protein, 9 aa, Homo sapiens
  Table A; Target 69213; HLA-A*23:01; PNLDC1; ENSG00000146453; TAA
FSGPDYPSI

SEQ ID NO: 69214 - protein, 9 aa, Homo sapiens
  Table A; Target 69214; HLA-A*24:02; PNLDC1; ENSG00000146453; TAA
FSGPDYPSI

SEQ ID NO: 69215 - protein, 9 aa, Homo sapiens
  Table A; Target 69215; HLA-A*25:01; PNLDC1; ENSG00000146453; TAA
FSGPDYPSI

SEQ ID NO: 69216 - protein, 9 aa, Homo sapiens
  Table A; Target 69216; HLA-A*30:01; PNLDC1; ENSG00000146453; TAA
FSGPDYPSI

SEQ ID NO: 69217 - protein, 9 aa, Homo sapiens
  Table A; Target 69217; HLA-B*07:02; PNLDC1; ENSG00000146453; TAA
FSGPDYPSI

SEQ ID NO: 69218 - protein, 9 aa, Homo sapiens
  Table A; Target 69218; HLA-B*35:03; PNLDC1; ENSG00000146453; TAA
FSGPDYPSI

SEQ ID NO: 69219 - protein, 9 aa, Homo sapiens
  Table A; Target 69219; HLA-B*38:01; PNLDC1; ENSG00000146453; TAA
FSGPDYPSI

SEQ ID NO: 69220 - protein, 9 aa, Homo sapiens
  Table A; Target 69220; HLA-B*51:01; PNLDC1; ENSG00000146453; TAA
FSGPDYPSI

SEQ ID NO: 69221 - protein, 9 aa, Homo sapiens
  Table A; Target 69221; HLA-B*58:01; PNLDC1; ENSG00000146453; TAA
FSGPDYPSI

SEQ ID NO: 69222 - protein, 9 aa, Homo sapiens
  Table A; Target 69222; HLA-C*02:02; PNLDC1; ENSG00000146453; TAA
FSGPDYPSI

SEQ ID NO: 69223 - protein, 9 aa, Homo sapiens
  Table A; Target 69223; HLA-C*03:03; PNLDC1; ENSG00000146453; TAA
FSGPDYPSI

SEQ ID NO: 69224 - protein, 9 aa, Homo sapiens
  Table A; Target 69224; HLA-C*03:04; PNLDC1; ENSG00000146453; TAA
FSGPDYPSI

SEQ ID NO: 69225 - protein, 9 aa, Homo sapiens
  Table A; Target 69225; HLA-C*16:02; PNLDC1; ENSG00000146453; TAA
FSGPDYPSI

SEQ ID NO: 69226 - protein, 9 aa, Homo sapiens
  Table A; Target 69226; HLA-A*68:02; PNLDC1; ENSG00000146453; TAA
FSVFFQMLV

SEQ ID NO: 69227 - protein, 8 aa, Homo sapiens
  Table A; Target 69227; HLA-A*32:01; PNLDC1; ENSG00000146453; TAA
FTGLRSNL

SEQ ID NO: 69228 - protein, 8 aa, Homo sapiens
  Table A; Target 69228; HLA-B*08:01; PNLDC1; ENSG00000146453; TAA
FTGLRSNL

SEQ ID NO: 69229 - protein, 8 aa, Homo sapiens
  Table A; Target 69229; HLA-C*01:02; PNLDC1; ENSG00000146453; TAA
FTGLRSNL

SEQ ID NO: 69230 - protein, 8 aa, Homo sapiens
  Table A; Target 69230; HLA-C*07:02; PNLDC1; ENSG00000146453; TAA
FTGLRSNL

SEQ ID NO: 69231 - protein, 8 aa, Homo sapiens
  Table A; Target 69231; HLA-C*12:03; PNLDC1; ENSG00000146453; TAA
FTGLRSNL

SEQ ID NO: 69232 - protein, 8 aa, Homo sapiens
  Table A; Target 69232; HLA-C*16:01; PNLDC1; ENSG00000146453; TAA
FTGLRSNL

SEQ ID NO: 69233 - protein, 10 aa, Homo sapiens
  Table A; Target 69233; HLA-A*68:02; PNLDC1; ENSG00000146453; TAA
FTVCQIGLSV

SEQ ID NO: 69234 - protein, 8 aa, Homo sapiens
  Table A; Target 69234; HLA-A*23:01; PNLDC1; ENSG00000146453; TAA
FYLFPTTF

SEQ ID NO: 69235 - protein, 8 aa, Homo sapiens
  Table A; Target 69235; HLA-A*24:02; PNLDC1; ENSG00000146453; TAA
FYLFPTTF

SEQ ID NO: 69236 - protein, 8 aa, Homo sapiens
  Table A; Target 69236; HLA-A*29:02; PNLDC1; ENSG00000146453; TAA
FYLFPTTF

SEQ ID NO: 69237 - protein, 8 aa, Homo sapiens
  Table A; Target 69237; HLA-C*14:02; PNLDC1; ENSG00000146453; TAA
FYLFPTTF

SEQ ID NO: 69238 - protein, 9 aa, Homo sapiens
  Table A; Target 69238; HLA-B*18:01; PNLDC1; ENSG00000146453; TAA
GEANKYIAH

SEQ ID NO: 69239 - protein, 9 aa, Homo sapiens
  Table A; Target 69239; HLA-B*40:01; PNLDC1; ENSG00000146453; TAA
GEANKYIAH

SEQ ID NO: 69240 - protein, 9 aa, Homo sapiens
  Table A; Target 69240; HLA-B*44:03; PNLDC1; ENSG00000146453; TAA
GEANKYIAH

SEQ ID NO: 69241 - protein, 9 aa, Homo sapiens
  Table A; Target 69241; HLA-B*49:01; PNLDC1; ENSG00000146453; TAA
GEANKYIAH

SEQ ID NO: 69242 - protein, 9 aa, Homo sapiens
  Table A; Target 69242; HLA-B*38:01; PNLDC1; ENSG00000146453; TAA
GHNMMMDLL

SEQ ID NO: 69243 - protein, 9 aa, Homo sapiens
  Table A; Target 69243; HLA-A*02:01; PNLDC1; ENSG00000146453; TAA
GILDSEFSF

SEQ ID NO: 69244 - protein, 9 aa, Homo sapiens
  Table A; Target 69244; HLA-A*02:04; PNLDC1; ENSG00000146453; TAA
GILDSEFSF

SEQ ID NO: 69245 - protein, 9 aa, Homo sapiens
  Table A; Target 69245; HLA-A*23:01; PNLDC1; ENSG00000146453; TAA
GILDSEFSF

SEQ ID NO: 69246 - protein, 9 aa, Homo sapiens
  Table A; Target 69246; HLA-A*29:02; PNLDC1; ENSG00000146453; TAA
GILDSEFSF

SEQ ID NO: 69247 - protein, 9 aa, Homo sapiens
  Table A; Target 69247; HLA-A*32:01; PNLDC1; ENSG00000146453; TAA
GILDSEFSF

SEQ ID NO: 69248 - protein, 9 aa, Homo sapiens
  Table A; Target 69248; HLA-B*15:01; PNLDC1; ENSG00000146453; TAA
GILDSEFSF

SEQ ID NO: 69249 - protein, 9 aa, Homo sapiens
  Table A; Target 69249; HLA-B*57:01; PNLDC1; ENSG00000146453; TAA
GILDSEFSF

SEQ ID NO: 69250 - protein, 9 aa, Homo sapiens
  Table A; Target 69250; HLA-C*16:04; PNLDC1; ENSG00000146453; TAA
GILDSEFSF

SEQ ID NO: 69251 - protein, 11 aa, Homo sapiens
  Table A; Target 69251; HLA-A*02:01; PNLDC1; ENSG00000146453; TAA
GILDSEFSFQA

SEQ ID NO: 69252 - protein, 9 aa, Homo sapiens
  Table A; Target 69252; HLA-A*02:01; PNLDC1; ENSG00000146453; TAA
GLDIEFTGL

SEQ ID NO: 69253 - protein, 9 aa, Homo sapiens
  Table A; Target 69253; HLA-A*02:04; PNLDC1; ENSG00000146453; TAA
GLDIEFTGL

SEQ ID NO: 69254 - protein, 9 aa, Homo sapiens
  Table A; Target 69254; HLA-A*02:07; PNLDC1; ENSG00000146453; TAA
GLDIEFTGL

SEQ ID NO: 69255 - protein, 9 aa, Homo sapiens
  Table A; Target 69255; HLA-B*38:01; PNLDC1; ENSG00000146453; TAA
GLDIEFTGL

SEQ ID NO: 69256 - protein, 9 aa, Homo sapiens
  Table A; Target 69256; HLA-B*39:01; PNLDC1; ENSG00000146453; TAA
GLDIEFTGL

SEQ ID NO: 69257 - protein, 9 aa, Homo sapiens
  Table A; Target 69257; HLA-B*55:01; PNLDC1; ENSG00000146453; TAA
GLDIEFTGL

SEQ ID NO: 69258 - protein, 9 aa, Homo sapiens
  Table A; Target 69258; HLA-C*05:01; PNLDC1; ENSG00000146453; TAA
GLDIEFTGL

SEQ ID NO: 69259 - protein, 8 aa, Homo sapiens
  Table A; Target 69259; HLA-A*02:04; PNLDC1; ENSG00000146453; TAA
GLLFFAFL

SEQ ID NO: 69260 - protein, 9 aa, Homo sapiens
  Table A; Target 69260; HLA-A*02:04; PNLDC1; ENSG00000146453; TAA
GLLFFAFLA

SEQ ID NO: 69261 - protein, 11 aa, Homo sapiens
  Table A; Target 69261; HLA-A*02:04; PNLDC1; ENSG00000146453; TAA
GLLFFAFLAGL

SEQ ID NO: 69262 - protein, 8 aa, Homo sapiens
  Table A; Target 69262; HLA-B*13:02; PNLDC1; ENSG00000146453; TAA
GLSVFSAI

SEQ ID NO: 69263 - protein, 10 aa, Homo sapiens
  Table A; Target 69263; HLA-B*56:01; PNLDC1; ENSG00000146453; TAA
GPDYPSIRPP

SEQ ID NO: 69264 - protein, 11 aa, Homo sapiens
  Table A; Target 69264; HLA-B*07:02; PNLDC1; ENSG00000146453; TAA
GPDYPSIRPPI

SEQ ID NO: 69265 - protein, 9 aa, Homo sapiens
  Table A; Target 69265; HLA-A*33:03; PNLDC1; ENSG00000146453; TAA
GPEIVHASR

SEQ ID NO: 69266 - protein, 9 aa, Homo sapiens
  Table A; Target 69266; HLA-A*68:01; PNLDC1; ENSG00000146453; TAA
GPEIVHASR

SEQ ID NO: 69267 - protein, 9 aa, Homo sapiens
  Table A; Target 69267; HLA-C*07:06; PNLDC1; ENSG00000146453; TAA
GPEIVHASR

SEQ ID NO: 69268 - protein, 8 aa, Homo sapiens
  Table A; Target 69268; HLA-A*30:02; PNLDC1; ENSG00000146453; TAA
GVSEQQVY

SEQ ID NO: 69269 - protein, 8 aa, Homo sapiens
  Table A; Target 69269; HLA-B*15:01; PNLDC1; ENSG00000146453; TAA
GVSEQQVY

SEQ ID NO: 69270 - protein, 8 aa, Homo sapiens
  Table A; Target 69270; HLA-C*16:01; PNLDC1; ENSG00000146453; TAA
GVSEQQVY

SEQ ID NO: 69271 - protein, 9 aa, Homo sapiens
  Table A; Target 69271; HLA-A*03:01; PNLDC1; ENSG00000146453; TAA
GVSEQQVYH

SEQ ID NO: 69272 - protein, 9 aa, Homo sapiens
  Table A; Target 69272; HLA-A*03:02; PNLDC1; ENSG00000146453; TAA
GVSEQQVYH

SEQ ID NO: 69273 - protein, 9 aa, Homo sapiens
  Table A; Target 69273; HLA-A*11:01; PNLDC1; ENSG00000146453; TAA
GVSEQQVYH

SEQ ID NO: 69274 - protein, 10 aa, Homo sapiens
  Table A; Target 69274; HLA-A*03:01; PNLDC1; ENSG00000146453; TAA
GVSEQQVYHK

SEQ ID NO: 69275 - protein, 10 aa, Homo sapiens
  Table A; Target 69275; HLA-A*03:02; PNLDC1; ENSG00000146453; TAA
GVSEQQVYHK

SEQ ID NO: 69276 - protein, 10 aa, Homo sapiens
  Table A; Target 69276; HLA-A*11:01; PNLDC1; ENSG00000146453; TAA
GVSEQQVYHK

SEQ ID NO: 69277 - protein, 10 aa, Homo sapiens
  Table A; Target 69277; HLA-A*68:01; PNLDC1; ENSG00000146453; TAA
GVSEQQVYHK

SEQ ID NO: 69278 - protein, 10 aa, Homo sapiens
  Table A; Target 69278; HLA-B*27:05; PNLDC1; ENSG00000146453; TAA
GVSEQQVYHK

SEQ ID NO: 69279 - protein, 10 aa, Homo sapiens
  Table A; Target 69279; HLA-C*07:06; PNLDC1; ENSG00000146453; TAA
GVSEQQVYHK

SEQ ID NO: 69280 - protein, 11 aa, Homo sapiens
  Table A; Target 69280; HLA-A*26:01; PNLDC1; ENSG00000146453; TAA
GVSEQQVYHKF

SEQ ID NO: 69281 - protein, 11 aa, Homo sapiens
  Table A; Target 69281; HLA-A*29:02; PNLDC1; ENSG00000146453; TAA
GVSEQQVYHKF

SEQ ID NO: 69282 - protein, 11 aa, Homo sapiens
  Table A; Target 69282; HLA-A*30:02; PNLDC1; ENSG00000146453; TAA
GVSEQQVYHKF

SEQ ID NO: 69283 - protein, 9 aa, Homo sapiens
  Table A; Target 69283; HLA-A*03:01; PNLDC1; ENSG00000146453; TAA
GVVVKKVSK

SEQ ID NO: 69284 - protein, 9 aa, Homo sapiens
  Table A; Target 69284; HLA-A*03:02; PNLDC1; ENSG00000146453; TAA
GVVVKKVSK

SEQ ID NO: 69285 - protein, 9 aa, Homo sapiens
  Table A; Target 69285; HLA-A*11:01; PNLDC1; ENSG00000146453; TAA
GVVVKKVSK

SEQ ID NO: 69286 - protein, 8 aa, Homo sapiens
  Table A; Target 69286; HLA-B*18:01; PNLDC1; ENSG00000146453; TAA
HDILTGNW

SEQ ID NO: 69287 - protein, 8 aa, Homo sapiens
  Table A; Target 69287; HLA-B*37:01; PNLDC1; ENSG00000146453; TAA
HDILTGNW

SEQ ID NO: 69288 - protein, 8 aa, Homo sapiens
  Table A; Target 69288; HLA-B*40:02; PNLDC1; ENSG00000146453; TAA
HDILTGNW

SEQ ID NO: 69289 - protein, 8 aa, Homo sapiens
  Table A; Target 69289; HLA-B*44:02; PNLDC1; ENSG00000146453; TAA
HDILTGNW

SEQ ID NO: 69290 - protein, 8 aa, Homo sapiens
  Table A; Target 69290; HLA-B*44:03; PNLDC1; ENSG00000146453; TAA
HDILTGNW

SEQ ID NO: 69291 - protein, 8 aa, Homo sapiens
  Table A; Target 69291; HLA-B*18:01; PNLDC1; ENSG00000146453; TAA
HEAAYDAF

SEQ ID NO: 69292 - protein, 8 aa, Homo sapiens
  Table A; Target 69292; HLA-B*37:01; PNLDC1; ENSG00000146453; TAA
HEAAYDAF

SEQ ID NO: 69293 - protein, 9 aa, Homo sapiens
  Table A; Target 69293; HLA-A*30:01; PNLDC1; ENSG00000146453; TAA
HEAAYDAFL

SEQ ID NO: 69294 - protein, 9 aa, Homo sapiens
  Table A; Target 69294; HLA-B*38:01; PNLDC1; ENSG00000146453; TAA
HEAAYDAFL

SEQ ID NO: 69295 - protein, 9 aa, Homo sapiens
  Table A; Target 69295; HLA-B*40:01; PNLDC1; ENSG00000146453; TAA
HEAAYDAFL

SEQ ID NO: 69296 - protein, 9 aa, Homo sapiens
  Table A; Target 69296; HLA-B*40:02; PNLDC1; ENSG00000146453; TAA
HEAAYDAFL

SEQ ID NO: 69297 - protein, 9 aa, Homo sapiens
  Table A; Target 69297; HLA-B*44:03; PNLDC1; ENSG00000146453; TAA
HEAAYDAFL

SEQ ID NO: 69298 - protein, 9 aa, Homo sapiens
  Table A; Target 69298; HLA-B*49:01; PNLDC1; ENSG00000146453; TAA
HEAAYDAFL

SEQ ID NO: 69299 - protein, 10 aa, Homo sapiens
  Table A; Target 69299; HLA-A*01:01; PNLDC1; ENSG00000146453; TAA
HIDPVPESSF

SEQ ID NO: 69300 - protein, 10 aa, Homo sapiens
  Table A; Target 69300; HLA-A*02:07; PNLDC1; ENSG00000146453; TAA
HIDPVPESSF

SEQ ID NO: 69301 - protein, 10 aa, Homo sapiens
  Table A; Target 69301; HLA-A*25:01; PNLDC1; ENSG00000146453; TAA
HIDPVPESSF

SEQ ID NO: 69302 - protein, 10 aa, Homo sapiens
  Table A; Target 69302; HLA-A*26:01; PNLDC1; ENSG00000146453; TAA
HIDPVPESSF

SEQ ID NO: 69303 - protein, 10 aa, Homo sapiens
  Table A; Target 69303; HLA-B*15:01; PNLDC1; ENSG00000146453; TAA
HIDPVPESSF

SEQ ID NO: 69304 - protein, 10 aa, Homo sapiens
  Table A; Target 69304; HLA-B*35:01; PNLDC1; ENSG00000146453; TAA
HIDPVPESSF

SEQ ID NO: 69305 - protein, 10 aa, Homo sapiens
  Table A; Target 69305; HLA-B*35:03; PNLDC1; ENSG00000146453; TAA
HIDPVPESSF

SEQ ID NO: 69306 - protein, 10 aa, Homo sapiens
  Table A; Target 69306; HLA-B*38:01; PNLDC1; ENSG00000146453; TAA
HIDPVPESSF

SEQ ID NO: 69307 - protein, 10 aa, Homo sapiens
  Table A; Target 69307; HLA-B*55:01; PNLDC1; ENSG00000146453; TAA
HIDPVPESSF

SEQ ID NO: 69308 - protein, 10 aa, Homo sapiens
  Table A; Target 69308; HLA-B*58:01; PNLDC1; ENSG00000146453; TAA
HIDPVPESSF

SEQ ID NO: 69309 - protein, 10 aa, Homo sapiens
  Table A; Target 69309; HLA-C*03:03; PNLDC1; ENSG00000146453; TAA
HIDPVPESSF

SEQ ID NO: 69310 - protein, 10 aa, Homo sapiens
  Table A; Target 69310; HLA-C*03:04; PNLDC1; ENSG00000146453; TAA
HIDPVPESSF

SEQ ID NO: 69311 - protein, 10 aa, Homo sapiens
  Table A; Target 69311; HLA-C*04:01; PNLDC1; ENSG00000146453; TAA
HIDPVPESSF

SEQ ID NO: 69312 - protein, 10 aa, Homo sapiens
  Table A; Target 69312; HLA-C*05:01; PNLDC1; ENSG00000146453; TAA
HIDPVPESSF

SEQ ID NO: 69313 - protein, 8 aa, Homo sapiens
  Table A; Target 69313; HLA-B*08:01; PNLDC1; ENSG00000146453; TAA
HPTLCISL

SEQ ID NO: 69314 - protein, 9 aa, Homo sapiens
  Table A; Target 69314; HLA-B*35:01; PNLDC1; ENSG00000146453; TAA
HPTLCISLY

SEQ ID NO: 69315 - protein, 9 aa, Homo sapiens
  Table A; Target 69315; HLA-B*55:01; PNLDC1; ENSG00000146453; TAA
HPTLCISLY

SEQ ID NO: 69316 - protein, 11 aa, Homo sapiens
  Table A; Target 69316; HLA-B*27:02; PNLDC1; ENSG00000146453; TAA
HSLFPVLIDTK

SEQ ID NO: 69317 - protein, 8 aa, Homo sapiens
  Table A; Target 69317; HLA-B*07:02; PNLDC1; ENSG00000146453; TAA
HSPNVNCL

SEQ ID NO: 69318 - protein, 8 aa, Homo sapiens
  Table A; Target 69318; HLA-B*51:01; PNLDC1; ENSG00000146453; TAA
HSPNVNCL

SEQ ID NO: 69319 - protein, 8 aa, Homo sapiens
  Table A; Target 69319; HLA-C*01:02; PNLDC1; ENSG00000146453; TAA
HSPNVNCL

SEQ ID NO: 69320 - protein, 9 aa, Homo sapiens
  Table A; Target 69320; HLA-C*01:02; PNLDC1; ENSG00000146453; TAA
HSPNVNCLL

SEQ ID NO: 69321 - protein, 9 aa, Homo sapiens
  Table A; Target 69321; HLA-B*37:01; PNLDC1; ENSG00000146453; TAA
IDPVPESSF

SEQ ID NO: 69322 - protein, 9 aa, Homo sapiens
  Table A; Target 69322; HLA-B*46:01; PNLDC1; ENSG00000146453; TAA
IDPVPESSF

SEQ ID NO: 69323 - protein, 9 aa, Homo sapiens
  Table A; Target 69323; HLA-C*01:02; PNLDC1; ENSG00000146453; TAA
IDPVPESSF

SEQ ID NO: 69324 - protein, 9 aa, Homo sapiens
  Table A; Target 69324; HLA-C*14:02; PNLDC1; ENSG00000146453; TAA
IDPVPESSF

SEQ ID NO: 69325 - protein, 8 aa, Homo sapiens
  Table A; Target 69325; HLA-A*03:02; PNLDC1; ENSG00000146453; TAA
IDTKSVTK

SEQ ID NO: 69326 - protein, 8 aa, Homo sapiens
  Table A; Target 69326; HLA-A*11:01; PNLDC1; ENSG00000146453; TAA
IDTKSVTK

SEQ ID NO: 69327 - protein, 8 aa, Homo sapiens
  Table A; Target 69327; HLA-B*27:02; PNLDC1; ENSG00000146453; TAA
IDTKSVTK

SEQ ID NO: 69328 - protein, 8 aa, Homo sapiens
  Table A; Target 69328; HLA-B*37:01; PNLDC1; ENSG00000146453; TAA
IDTKSVTK

SEQ ID NO: 69329 - protein, 8 aa, Homo sapiens
  Table A; Target 69329; HLA-B*40:02; PNLDC1; ENSG00000146453; TAA
IDTKSVTK

SEQ ID NO: 69330 - protein, 8 aa, Homo sapiens
  Table A; Target 69330; HLA-C*04:01; PNLDC1; ENSG00000146453; TAA
IDTKSVTK

SEQ ID NO: 69331 - protein, 8 aa, Homo sapiens
  Table A; Target 69331; HLA-C*06:02; PNLDC1; ENSG00000146453; TAA
IDTKSVTK

SEQ ID NO: 69332 - protein, 8 aa, Homo sapiens
  Table A; Target 69332; HLA-C*07:01; PNLDC1; ENSG00000146453; TAA
IDTKSVTK

SEQ ID NO: 69333 - protein, 8 aa, Homo sapiens
  Table A; Target 69333; HLA-C*07:02; PNLDC1; ENSG00000146453; TAA
IDTKSVTK

SEQ ID NO: 69334 - protein, 8 aa, Homo sapiens
  Table A; Target 69334; HLA-C*16:02; PNLDC1; ENSG00000146453; TAA
IDTKSVTK

SEQ ID NO: 69335 - protein, 10 aa, Homo sapiens
  Table A; Target 69335; HLA-A*30:01; PNLDC1; ENSG00000146453; TAA
IEFTGLRSNL

SEQ ID NO: 69336 - protein, 10 aa, Homo sapiens
  Table A; Target 69336; HLA-B*18:01; PNLDC1; ENSG00000146453; TAA
IEFTGLRSNL

SEQ ID NO: 69337 - protein, 10 aa, Homo sapiens
  Table A; Target 69337; HLA-B*40:01; PNLDC1; ENSG00000146453; TAA
IEFTGLRSNL

SEQ ID NO: 69338 - protein, 10 aa, Homo sapiens
  Table A; Target 69338; HLA-B*40:02; PNLDC1; ENSG00000146453; TAA
IEFTGLRSNL

SEQ ID NO: 69339 - protein, 10 aa, Homo sapiens
  Table A; Target 69339; HLA-B*44:03; PNLDC1; ENSG00000146453; TAA
IEFTGLRSNL

SEQ ID NO: 69340 - protein, 10 aa, Homo sapiens
  Table A; Target 69340; HLA-B*49:01; PNLDC1; ENSG00000146453; TAA
IEFTGLRSNL

SEQ ID NO: 69341 - protein, 8 aa, Homo sapiens
  Table A; Target 69341; HLA-B*18:01; PNLDC1; ENSG00000146453; TAA
IEGEANKY

SEQ ID NO: 69342 - protein, 8 aa, Homo sapiens
  Table A; Target 69342; HLA-B*37:01; PNLDC1; ENSG00000146453; TAA
IEGEANKY

SEQ ID NO: 69343 - protein, 8 aa, Homo sapiens
  Table A; Target 69343; HLA-B*44:02; PNLDC1; ENSG00000146453; TAA
IEGEANKY

SEQ ID NO: 69344 - protein, 8 aa, Homo sapiens
  Table A; Target 69344; HLA-B*44:03; PNLDC1; ENSG00000146453; TAA
IEGEANKY

SEQ ID NO: 69345 - protein, 8 aa, Homo sapiens
  Table A; Target 69345; HLA-C*07:01; PNLDC1; ENSG00000146453; TAA
IEGEANKY

SEQ ID NO: 69346 - protein, 8 aa, Homo sapiens
  Table A; Target 69346; HLA-C*07:04; PNLDC1; ENSG00000146453; TAA
IEGEANKY

SEQ ID NO: 69347 - protein, 8 aa, Homo sapiens
  Table A; Target 69347; HLA-C*12:03; PNLDC1; ENSG00000146453; TAA
IEGEANKY

SEQ ID NO: 69348 - protein, 8 aa, Homo sapiens
  Table A; Target 69348; HLA-C*14:02; PNLDC1; ENSG00000146453; TAA
IEGEANKY

SEQ ID NO: 69349 - protein, 8 aa, Homo sapiens
  Table A; Target 69349; HLA-C*16:02; PNLDC1; ENSG00000146453; TAA
IEGEANKY

SEQ ID NO: 69350 - protein, 8 aa, Homo sapiens
  Table A; Target 69350; HLA-C*16:04; PNLDC1; ENSG00000146453; TAA
IEGEANKY

SEQ ID NO: 69351 - protein, 9 aa, Homo sapiens
  Table A; Target 69351; HLA-B*44:02; PNLDC1; ENSG00000146453; TAA
IEGEANKYI

SEQ ID NO: 69352 - protein, 9 aa, Homo sapiens
  Table A; Target 69352; HLA-B*44:03; PNLDC1; ENSG00000146453; TAA
IEGEANKYI

SEQ ID NO: 69353 - protein, 9 aa, Homo sapiens
  Table A; Target 69353; HLA-B*49:01; PNLDC1; ENSG00000146453; TAA
IEGEANKYI

SEQ ID NO: 69354 - protein, 9 aa, Homo sapiens
  Table A; Target 69354; HLA-A*23:01; PNLDC1; ENSG00000146453; TAA
IGLSVFSAI

SEQ ID NO: 69355 - protein, 9 aa, Homo sapiens
  Table A; Target 69355; HLA-B*51:01; PNLDC1; ENSG00000146453; TAA
IGLSVFSAI

SEQ ID NO: 69356 - protein, 9 aa, Homo sapiens
  Table A; Target 69356; HLA-C*03:04; PNLDC1; ENSG00000146453; TAA
IGLSVFSAI

SEQ ID NO: 69357 - protein, 8 aa, Homo sapiens
  Table A; Target 69357; HLA-B*38:01; PNLDC1; ENSG00000146453; TAA
IHSLFPVL

SEQ ID NO: 69358 - protein, 9 aa, Homo sapiens
  Table A; Target 69358; HLA-B*38:01; PNLDC1; ENSG00000146453; TAA
IHSLFPVLI

SEQ ID NO: 69359 - protein, 8 aa, Homo sapiens
  Table A; Target 69359; HLA-A*02:07; PNLDC1; ENSG00000146453; TAA
ILDSEFSF

SEQ ID NO: 69360 - protein, 8 aa, Homo sapiens
  Table A; Target 69360; HLA-C*05:01; PNLDC1; ENSG00000146453; TAA
ILDSEFSF

SEQ ID NO: 69361 - protein, 9 aa, Homo sapiens
  Table A; Target 69361; HLA-A*01:01; PNLDC1; ENSG00000146453; TAA
ILDSEFSFQ

SEQ ID NO: 69362 - protein, 10 aa, Homo sapiens
  Table A; Target 69362; HLA-A*02:07; PNLDC1; ENSG00000146453; TAA
ILDSEFSFQA

SEQ ID NO: 69363 - protein, 10 aa, Homo sapiens
  Table A; Target 69363; HLA-A*02:01; PNLDC1; ENSG00000146453; TAA
ILLSARGFSV

SEQ ID NO: 69364 - protein, 10 aa, Homo sapiens
  Table A; Target 69364; HLA-A*02:04; PNLDC1; ENSG00000146453; TAA
ILLSARGFSV

SEQ ID NO: 69365 - protein, 10 aa, Homo sapiens
  Table A; Target 69365; HLA-A*02:07; PNLDC1; ENSG00000146453; TAA
ILLSARGFSV

SEQ ID NO: 69366 - protein, 11 aa, Homo sapiens
  Table A; Target 69366; HLA-A*24:02; PNLDC1; ENSG00000146453; TAA
ILLSARGFSVF

SEQ ID NO: 69367 - protein, 10 aa, Homo sapiens
  Table A; Target 69367; HLA-B*27:02; PNLDC1; ENSG00000146453; TAA
IPYMNEEQEK

SEQ ID NO: 69368 - protein, 11 aa, Homo sapiens
  Table A; Target 69368; HLA-B*27:02; PNLDC1; ENSG00000146453; TAA
IPYMNEEQEKK

SEQ ID NO: 69369 - protein, 8 aa, Homo sapiens
  Table A; Target 69369; HLA-B*13:02; PNLDC1; ENSG00000146453; TAA
IRAGVPKI

SEQ ID NO: 69370 - protein, 8 aa, Homo sapiens
  Table A; Target 69370; HLA-C*06:02; PNLDC1; ENSG00000146453; TAA
IRAGVPKI

SEQ ID NO: 69371 - protein, 10 aa, Homo sapiens
  Table A; Target 69371; HLA-B*27:05; PNLDC1; ENSG00000146453; TAA
IRAGVPKINF

SEQ ID NO: 69372 - protein, 10 aa, Homo sapiens
  Table A; Target 69372; HLA-B*57:01; PNLDC1; ENSG00000146453; TAA
ISLFDLPSEW

SEQ ID NO: 69373 - protein, 10 aa, Homo sapiens
  Table A; Target 69373; HLA-B*58:01; PNLDC1; ENSG00000146453; TAA
ISLFDLPSEW

SEQ ID NO: 69374 - protein, 9 aa, Homo sapiens
  Table A; Target 69374; HLA-C*07:04; PNLDC1; ENSG00000146453; TAA
IYHIDPVPE

SEQ ID NO: 69375 - protein, 9 aa, Homo sapiens
  Table A; Target 69375; HLA-A*03:02; PNLDC1; ENSG00000146453; TAA
KAQKPLVGH

SEQ ID NO: 69376 - protein, 9 aa, Homo sapiens
  Table A; Target 69376; HLA-A*31:01; PNLDC1; ENSG00000146453; TAA
KAQKPLVGH

SEQ ID NO: 69377 - protein, 8 aa, Homo sapiens
  Table A; Target 69377; HLA-A*03:02; PNLDC1; ENSG00000146453; TAA
KDEGVVVK

SEQ ID NO: 69378 - protein, 8 aa, Homo sapiens
  Table A; Target 69378; HLA-B*27:02; PNLDC1; ENSG00000146453; TAA
KDEGVVVK

SEQ ID NO: 69379 - protein, 8 aa, Homo sapiens
  Table A; Target 69379; HLA-B*37:01; PNLDC1; ENSG00000146453; TAA
KDEGVVVK

SEQ ID NO: 69380 - protein, 8 aa, Homo sapiens
  Table A; Target 69380; HLA-C*07:01; PNLDC1; ENSG00000146453; TAA
KDEGVVVK

SEQ ID NO: 69381 - protein, 9 aa, Homo sapiens
  Table A; Target 69381; HLA-A*03:01; PNLDC1; ENSG00000146453; TAA
KDEGVVVKK

SEQ ID NO: 69382 - protein, 9 aa, Homo sapiens
  Table A; Target 69382; HLA-A*03:02; PNLDC1; ENSG00000146453; TAA
KDEGVVVKK

SEQ ID NO: 69383 - protein, 9 aa, Homo sapiens
  Table A; Target 69383; HLA-A*11:01; PNLDC1; ENSG00000146453; TAA
KDEGVVVKK

SEQ ID NO: 69384 - protein, 10 aa, Homo sapiens
  Table A; Target 69384; HLA-B*40:02; PNLDC1; ENSG00000146453; TAA
KDEGVVVKKV

SEQ ID NO: 69385 - protein, 10 aa, Homo sapiens
  Table A; Target 69385; HLA-C*04:01; PNLDC1; ENSG00000146453; TAA
KDEGVVVKKV

SEQ ID NO: 69386 - protein, 8 aa, Homo sapiens
  Table A; Target 69386; HLA-B*37:01; PNLDC1; ENSG00000146453; TAA
KDQIKVVI

SEQ ID NO: 69387 - protein, 8 aa, Homo sapiens
  Table A; Target 69387; HLA-B*49:01; PNLDC1; ENSG00000146453; TAA
KEMNFPRV

SEQ ID NO: 69388 - protein, 11 aa, Homo sapiens
  Table A; Target 69388; HLA-B*37:01; PNLDC1; ENSG00000146453; TAA
KEMNFPRVSNL

SEQ ID NO: 69389 - protein, 11 aa, Homo sapiens
  Table A; Target 69389; HLA-B*44:02; PNLDC1; ENSG00000146453; TAA
KENILLSARGF

SEQ ID NO: 69390 - protein, 11 aa, Homo sapiens
  Table A; Target 69390; HLA-B*44:03; PNLDC1; ENSG00000146453; TAA
KENILLSARGF

SEQ ID NO: 69391 - protein, 9 aa, Homo sapiens
  Table A; Target 69391; HLA-A*30:01; PNLDC1; ENSG00000146453; TAA
KEYRDHPTL

SEQ ID NO: 69392 - protein, 9 aa, Homo sapiens
  Table A; Target 69392; HLA-B*37:01; PNLDC1; ENSG00000146453; TAA
KEYRDHPTL

SEQ ID NO: 69393 - protein, 9 aa, Homo sapiens
  Table A; Target 69393; HLA-B*40:01; PNLDC1; ENSG00000146453; TAA
KEYRDHPTL

SEQ ID NO: 69394 - protein, 9 aa, Homo sapiens
  Table A; Target 69394; HLA-B*40:02; PNLDC1; ENSG00000146453; TAA
KEYRDHPTL

SEQ ID NO: 69395 - protein, 9 aa, Homo sapiens
  Table A; Target 69395; HLA-B*49:01; PNLDC1; ENSG00000146453; TAA
KEYRDHPTL

SEQ ID NO: 69396 - protein, 10 aa, Homo sapiens
  Table A; Target 69396; HLA-A*24:02; PNLDC1; ENSG00000146453; TAA
KFFRPLPESY

SEQ ID NO: 69397 - protein, 10 aa, Homo sapiens
  Table A; Target 69397; HLA-A*29:02; PNLDC1; ENSG00000146453; TAA
KFFRPLPESY

SEQ ID NO: 69398 - protein, 10 aa, Homo sapiens
  Table A; Target 69398; HLA-A*30:02; PNLDC1; ENSG00000146453; TAA
KFFRPLPESY

SEQ ID NO: 69399 - protein, 9 aa, Homo sapiens
  Table A; Target 69399; HLA-A*29:02; PNLDC1; ENSG00000146453; TAA
KFLKNGIPY

SEQ ID NO: 69400 - protein, 9 aa, Homo sapiens
  Table A; Target 69400; HLA-A*30:02; PNLDC1; ENSG00000146453; TAA
KINFSGPDY

SEQ ID NO: 69401 - protein, 9 aa, Homo sapiens
  Table A; Target 69401; HLA-B*15:01; PNLDC1; ENSG00000146453; TAA
KINFSGPDY

SEQ ID NO: 69402 - protein, 11 aa, Homo sapiens
  Table A; Target 69402; HLA-B*57:01; PNLDC1; ENSG00000146453; TAA
KIRHDILTGNW

SEQ ID NO: 69403 - protein, 8 aa, Homo sapiens
  Table A; Target 69403; HLA-B*07:02; PNLDC1; ENSG00000146453; TAA
KPLVGHNM

SEQ ID NO: 69404 - protein, 8 aa, Homo sapiens
  Table A; Target 69404; HLA-B*08:01; PNLDC1; ENSG00000146453; TAA
KPLVGHNM

SEQ ID NO: 69405 - protein, 8 aa, Homo sapiens
  Table A; Target 69405; HLA-B*37:01; PNLDC1; ENSG00000146453; TAA
KPLVGHNM

SEQ ID NO: 69406 - protein, 9 aa, Homo sapiens
  Table A; Target 69406; HLA-B*07:02; PNLDC1; ENSG00000146453; TAA
KPLVGHNMM

SEQ ID NO: 69407 - protein, 9 aa, Homo sapiens
  Table A; Target 69407; HLA-C*07:02; PNLDC1; ENSG00000146453; TAA
KPLVGHNMM

SEQ ID NO: 69408 - protein, 8 aa, Homo sapiens
  Table A; Target 69408; HLA-A*32:01; PNLDC1; ENSG00000146453; TAA
KQNIHSLF

SEQ ID NO: 69409 - protein, 8 aa, Homo sapiens
  Table A; Target 69409; HLA-B*37:01; PNLDC1; ENSG00000146453; TAA
KQNIHSLF

SEQ ID NO: 69410 - protein, 8 aa, Homo sapiens
  Table A; Target 69410; HLA-B*57:01; PNLDC1; ENSG00000146453; TAA
KSVTKDIW

SEQ ID NO: 69411 - protein, 8 aa, Homo sapiens
  Table A; Target 69411; HLA-B*58:01; PNLDC1; ENSG00000146453; TAA
KSVTKDIW

SEQ ID NO: 69412 - protein, 9 aa, Homo sapiens
  Table A; Target 69412; HLA-A*23:01; PNLDC1; ENSG00000146453; TAA
KTRQSVQQF

SEQ ID NO: 69413 - protein, 9 aa, Homo sapiens
  Table A; Target 69413; HLA-A*30:02; PNLDC1; ENSG00000146453; TAA
KTRQSVQQF

SEQ ID NO: 69414 - protein, 9 aa, Homo sapiens
  Table A; Target 69414; HLA-A*31:01; PNLDC1; ENSG00000146453; TAA
KTRQSVQQF

SEQ ID NO: 69415 - protein, 9 aa, Homo sapiens
  Table A; Target 69415; HLA-A*32:01; PNLDC1; ENSG00000146453; TAA
KTRQSVQQF

SEQ ID NO: 69416 - protein, 9 aa, Homo sapiens
  Table A; Target 69416; HLA-B*15:01; PNLDC1; ENSG00000146453; TAA
KTRQSVQQF

SEQ ID NO: 69417 - protein, 9 aa, Homo sapiens
  Table A; Target 69417; HLA-B*40:02; PNLDC1; ENSG00000146453; TAA
KTRQSVQQF

SEQ ID NO: 69418 - protein, 9 aa, Homo sapiens
  Table A; Target 69418; HLA-B*46:01; PNLDC1; ENSG00000146453; TAA
KTRQSVQQF

SEQ ID NO: 69419 - protein, 9 aa, Homo sapiens
  Table A; Target 69419; HLA-B*57:01; PNLDC1; ENSG00000146453; TAA
KTRQSVQQF

SEQ ID NO: 69420 - protein, 9 aa, Homo sapiens
  Table A; Target 69420; HLA-B*58:01; PNLDC1; ENSG00000146453; TAA
KTRQSVQQF

SEQ ID NO: 69421 - protein, 11 aa, Homo sapiens
  Table A; Target 69421; HLA-C*06:02; PNLDC1; ENSG00000146453; TAA
KTRQSVQQFTV

SEQ ID NO: 69422 - protein, 9 aa, Homo sapiens
  Table A; Target 69422; HLA-A*03:01; PNLDC1; ENSG00000146453; TAA
KVAHLLLQK

SEQ ID NO: 69423 - protein, 9 aa, Homo sapiens
  Table A; Target 69423; HLA-A*03:02; PNLDC1; ENSG00000146453; TAA
KVAHLLLQK

SEQ ID NO: 69424 - protein, 9 aa, Homo sapiens
  Table A; Target 69424; HLA-A*11:01; PNLDC1; ENSG00000146453; TAA
KVAHLLLQK

SEQ ID NO: 69425 - protein, 10 aa, Homo sapiens
  Table A; Target 69425; HLA-A*25:01; PNLDC1; ENSG00000146453; TAA
KVVIDEVTRW

SEQ ID NO: 69426 - protein, 10 aa, Homo sapiens
  Table A; Target 69426; HLA-B*44:03; PNLDC1; ENSG00000146453; TAA
KVVIDEVTRW

SEQ ID NO: 69427 - protein, 10 aa, Homo sapiens
  Table A; Target 69427; HLA-B*57:01; PNLDC1; ENSG00000146453; TAA
KVVIDEVTRW

SEQ ID NO: 69428 - protein, 10 aa, Homo sapiens
  Table A; Target 69428; HLA-B*58:01; PNLDC1; ENSG00000146453; TAA
KVVIDEVTRW

SEQ ID NO: 69429 - protein, 9 aa, Homo sapiens
  Table A; Target 69429; HLA-A*23:01; PNLDC1; ENSG00000146453; TAA
KYIAHSCNF

SEQ ID NO: 69430 - protein, 9 aa, Homo sapiens
  Table A; Target 69430; HLA-A*24:02; PNLDC1; ENSG00000146453; TAA
KYIAHSCNF

SEQ ID NO: 69431 - protein, 10 aa, Homo sapiens
  Table A; Target 69431; HLA-C*07:01; PNLDC1; ENSG00000146453; TAA
LAFILGRSGT

SEQ ID NO: 69432 - protein, 8 aa, Homo sapiens
  Table A; Target 69432; HLA-B*35:01; PNLDC1; ENSG00000146453; TAA
LAGLDIEF

SEQ ID NO: 69433 - protein, 8 aa, Homo sapiens
  Table A; Target 69433; HLA-B*35:03; PNLDC1; ENSG00000146453; TAA
LAGLDIEF

SEQ ID NO: 69434 - protein, 8 aa, Homo sapiens
  Table A; Target 69434; HLA-B*55:01; PNLDC1; ENSG00000146453; TAA
LAGLDIEF

SEQ ID NO: 69435 - protein, 8 aa, Homo sapiens
  Table A; Target 69435; HLA-C*03:03; PNLDC1; ENSG00000146453; TAA
LAGLDIEF

SEQ ID NO: 69436 - protein, 8 aa, Homo sapiens
  Table A; Target 69436; HLA-C*05:01; PNLDC1; ENSG00000146453; TAA
LAGLDIEF

SEQ ID NO: 69437 - protein, 8 aa, Homo sapiens
  Table A; Target 69437; HLA-B*51:01; PNLDC1; ENSG00000146453; TAA
LAPYVNQV

SEQ ID NO: 69438 - protein, 8 aa, Homo sapiens
  Table A; Target 69438; HLA-A*30:01; PNLDC1; ENSG00000146453; TAA
LDIEFTGL

SEQ ID NO: 69439 - protein, 8 aa, Homo sapiens
  Table A; Target 69439; HLA-B*18:01; PNLDC1; ENSG00000146453; TAA
LDIEFTGL

SEQ ID NO: 69440 - protein, 8 aa, Homo sapiens
  Table A; Target 69440; HLA-B*37:01; PNLDC1; ENSG00000146453; TAA
LDIEFTGL

SEQ ID NO: 69441 - protein, 8 aa, Homo sapiens
  Table A; Target 69441; HLA-B*40:02; PNLDC1; ENSG00000146453; TAA
LDIEFTGL

SEQ ID NO: 69442 - protein, 8 aa, Homo sapiens
  Table A; Target 69442; HLA-B*49:01; PNLDC1; ENSG00000146453; TAA
LDIEFTGL

SEQ ID NO: 69443 - protein, 8 aa, Homo sapiens
  Table A; Target 69443; HLA-B*40:02; PNLDC1; ENSG00000146453; TAA
LDVLAPYV

SEQ ID NO: 69444 - protein, 9 aa, Homo sapiens
  Table A; Target 69444; HLA-B*44:03; PNLDC1; ENSG00000146453; TAA
LELAKEGDW

SEQ ID NO: 69445 - protein, 8 aa, Homo sapiens
  Table A; Target 69445; HLA-C*04:01; PNLDC1; ENSG00000146453; TAA
LFDLPSEW

SEQ ID NO: 69446 - protein, 9 aa, Homo sapiens
  Table A; Target 69446; HLA-A*29:02; PNLDC1; ENSG00000146453; TAA
LFDLPSEWY

SEQ ID NO: 69447 - protein, 9 aa, Homo sapiens
  Table A; Target 69447; HLA-A*24:02; PNLDC1; ENSG00000146453; TAA
LFPTTFGIL

SEQ ID NO: 69448 - protein, 9 aa, Homo sapiens
  Table A; Target 69448; HLA-A*01:01; PNLDC1; ENSG00000146453; TAA
LIDTKSVTK

SEQ ID NO: 69449 - protein, 9 aa, Homo sapiens
  Table A; Target 69449; HLA-A*03:01; PNLDC1; ENSG00000146453; TAA
LIDTKSVTK

SEQ ID NO: 69450 - protein, 9 aa, Homo sapiens
  Table A; Target 69450; HLA-A*03:02; PNLDC1; ENSG00000146453; TAA
LIDTKSVTK

SEQ ID NO: 69451 - protein, 9 aa, Homo sapiens
  Table A; Target 69451; HLA-A*11:01; PNLDC1; ENSG00000146453; TAA
LIDTKSVTK

SEQ ID NO: 69452 - protein, 9 aa, Homo sapiens
  Table A; Target 69452; HLA-C*05:01; PNLDC1; ENSG00000146453; TAA
LIDTKSVTK

SEQ ID NO: 69453 - protein, 9 aa, Homo sapiens
  Table A; Target 69453; HLA-A*02:03; PNLDC1; ENSG00000146453; TAA
LIRAGVPKI

SEQ ID NO: 69454 - protein, 9 aa, Homo sapiens
  Table A; Target 69454; HLA-B*51:01; PNLDC1; ENSG00000146453; TAA
LIRAGVPKI

SEQ ID NO: 69455 - protein, 10 aa, Homo sapiens
  Table A; Target 69455; HLA-A*02:03; PNLDC1; ENSG00000146453; TAA
LLFFAFLAGL

SEQ ID NO: 69456 - protein, 10 aa, Homo sapiens
  Table A; Target 69456; HLA-A*02:04; PNLDC1; ENSG00000146453; TAA
LLFFAFLAGL

SEQ ID NO: 69457 - protein, 8 aa, Homo sapiens
  Table A; Target 69457; HLA-B*08:01; PNLDC1; ENSG00000146453; TAA
LLKVAHLL

SEQ ID NO: 69458 - protein, 9 aa, Homo sapiens
  Table A; Target 69458; HLA-A*02:03; PNLDC1; ENSG00000146453; TAA
LLKVAHLLL

SEQ ID NO: 69459 - protein, 9 aa, Homo sapiens
  Table A; Target 69459; HLA-A*02:01; PNLDC1; ENSG00000146453; TAA
LLLQKIYHI

SEQ ID NO: 69460 - protein, 9 aa, Homo sapiens
  Table A; Target 69460; HLA-A*02:04; PNLDC1; ENSG00000146453; TAA
LLLQKIYHI

SEQ ID NO: 69461 - protein, 9 aa, Homo sapiens
  Table A; Target 69461; HLA-A*02:07; PNLDC1; ENSG00000146453; TAA
LLLQKIYHI

SEQ ID NO: 69462 - protein, 8 aa, Homo sapiens
  Table A; Target 69462; HLA-A*02:04; PNLDC1; ENSG00000146453; TAA
LLQKIYHI

SEQ ID NO: 69463 - protein, 9 aa, Homo sapiens
  Table A; Target 69463; HLA-A*02:01; PNLDC1; ENSG00000146453; TAA
LLSARGFSV

SEQ ID NO: 69464 - protein, 9 aa, Homo sapiens
  Table A; Target 69464; HLA-A*02:03; PNLDC1; ENSG00000146453; TAA
LLSARGFSV

SEQ ID NO: 69465 - protein, 9 aa, Homo sapiens
  Table A; Target 69465; HLA-A*02:04; PNLDC1; ENSG00000146453; TAA
LLSARGFSV

SEQ ID NO: 69466 - protein, 9 aa, Homo sapiens
  Table A; Target 69466; HLA-B*08:01; PNLDC1; ENSG00000146453; TAA
LLSARGFSV

SEQ ID NO: 69467 - protein, 9 aa, Homo sapiens
  Table A; Target 69467; HLA-B*37:01; PNLDC1; ENSG00000146453; TAA
LLSARGFSV

SEQ ID NO: 69468 - protein, 9 aa, Homo sapiens
  Table A; Target 69468; HLA-B*54:01; PNLDC1; ENSG00000146453; TAA
LPGITGFQA

SEQ ID NO: 69469 - protein, 9 aa, Homo sapiens
  Table A; Target 69469; HLA-B*56:01; PNLDC1; ENSG00000146453; TAA
LPGITGFQA

SEQ ID NO: 69470 - protein, 10 aa, Homo sapiens
  Table A; Target 69470; HLA-B*35:01; PNLDC1; ENSG00000146453; TAA
LPGITGFQAF

SEQ ID NO: 69471 - protein, 8 aa, Homo sapiens
  Table A; Target 69471; HLA-B*07:02; PNLDC1; ENSG00000146453; TAA
LPNIWTVL

SEQ ID NO: 69472 - protein, 8 aa, Homo sapiens
  Table A; Target 69472; HLA-B*08:01; PNLDC1; ENSG00000146453; TAA
LPNIWTVL

SEQ ID NO: 69473 - protein, 8 aa, Homo sapiens
  Table A; Target 69473; HLA-B*35:01; PNLDC1; ENSG00000146453; TAA
LPNIWTVL

SEQ ID NO: 69474 - protein, 8 aa, Homo sapiens
  Table A; Target 69474; HLA-B*35:03; PNLDC1; ENSG00000146453; TAA
LPNIWTVL

SEQ ID NO: 69475 - protein, 8 aa, Homo sapiens
  Table A; Target 69475; HLA-B*51:01; PNLDC1; ENSG00000146453; TAA
LPNIWTVL

SEQ ID NO: 69476 - protein, 10 aa, Homo sapiens
  Table A; Target 69476; HLA-A*25:01; PNLDC1; ENSG00000146453; TAA
LQVCGIVTAW

SEQ ID NO: 69477 - protein, 9 aa, Homo sapiens
  Table A; Target 69477; HLA-B*57:01; PNLDC1; ENSG00000146453; TAA
LSARGFSVF

SEQ ID NO: 69478 - protein, 10 aa, Homo sapiens
  Table A; Target 69478; HLA-B*57:01; PNLDC1; ENSG00000146453; TAA
LSARGFSVFF

SEQ ID NO: 69479 - protein, 9 aa, Homo sapiens
  Table A; Target 69479; HLA-B*40:01; PNLDC1; ENSG00000146453; TAA
LSGPQQISL

SEQ ID NO: 69480 - protein, 9 aa, Homo sapiens
  Table A; Target 69480; HLA-B*58:01; PNLDC1; ENSG00000146453; TAA
LSGPQQISL

SEQ ID NO: 69481 - protein, 9 aa, Homo sapiens
  Table A; Target 69481; HLA-C*01:02; PNLDC1; ENSG00000146453; TAA
LSGPQQISL

SEQ ID NO: 69482 - protein, 9 aa, Homo sapiens
  Table A; Target 69482; HLA-C*03:03; PNLDC1; ENSG00000146453; TAA
LSGPQQISL

SEQ ID NO: 69483 - protein, 9 aa, Homo sapiens
  Table A; Target 69483; HLA-C*03:04; PNLDC1; ENSG00000146453; TAA
LSGPQQISL

SEQ ID NO: 69484 - protein, 9 aa, Homo sapiens
  Table A; Target 69484; HLA-C*07:04; PNLDC1; ENSG00000146453; TAA
LSGPQQISL

SEQ ID NO: 69485 - protein, 9 aa, Homo sapiens
  Table A; Target 69485; HLA-C*16:01; PNLDC1; ENSG00000146453; TAA
LSGPQQISL

SEQ ID NO: 69486 - protein, 10 aa, Homo sapiens
  Table A; Target 69486; HLA-B*57:01; PNLDC1; ENSG00000146453; TAA
LSGPQQISLF

SEQ ID NO: 69487 - protein, 10 aa, Homo sapiens
  Table A; Target 69487; HLA-B*58:01; PNLDC1; ENSG00000146453; TAA
LSGPQQISLF

SEQ ID NO: 69488 - protein, 9 aa, Homo sapiens
  Table A; Target 69488; HLA-A*24:02; PNLDC1; ENSG00000146453; TAA
LTRSQFLLL

SEQ ID NO: 69489 - protein, 9 aa, Homo sapiens
  Table A; Target 69489; HLA-B*57:01; PNLDC1; ENSG00000146453; TAA
LTRSQFLLL

SEQ ID NO: 69490 - protein, 9 aa, Homo sapiens
  Table A; Target 69490; HLA-B*51:01; PNLDC1; ENSG00000146453; TAA
LVKAQKPLV

SEQ ID NO: 69491 - protein, 9 aa, Homo sapiens
  Table A; Target 69491; HLA-B*37:01; PNLDC1; ENSG00000146453; TAA
MDLLHLHEK

SEQ ID NO: 69492 - protein, 8 aa, Homo sapiens
  Table A; Target 69492; HLA-A*02:04; PNLDC1; ENSG00000146453; TAA
MMMDLLHL

SEQ ID NO: 69493 - protein, 9 aa, Homo sapiens
  Table A; Target 69493; HLA-A*02:04; PNLDC1; ENSG00000146453; TAA
MNFPRVSNL

SEQ ID NO: 69494 - protein, 9 aa, Homo sapiens
  Table A; Target 69494; HLA-A*25:01; PNLDC1; ENSG00000146453; TAA
MNFPRVSNL

SEQ ID NO: 69495 - protein, 9 aa, Homo sapiens
  Table A; Target 69495; HLA-A*26:01; PNLDC1; ENSG00000146453; TAA
MNFPRVSNL

SEQ ID NO: 69496 - protein, 9 aa, Homo sapiens
  Table A; Target 69496; HLA-A*68:02; PNLDC1; ENSG00000146453; TAA
MNFPRVSNL

SEQ ID NO: 69497 - protein, 9 aa, Homo sapiens
  Table A; Target 69497; HLA-B*08:01; PNLDC1; ENSG00000146453; TAA
MNFPRVSNL

SEQ ID NO: 69498 - protein, 9 aa, Homo sapiens
  Table A; Target 69498; HLA-B*37:01; PNLDC1; ENSG00000146453; TAA
MNFPRVSNL

SEQ ID NO: 69499 - protein, 9 aa, Homo sapiens
  Table A; Target 69499; HLA-C*12:03; PNLDC1; ENSG00000146453; TAA
MNFPRVSNL

SEQ ID NO: 69500 - protein, 9 aa, Homo sapiens
  Table A; Target 69500; HLA-A*01:01; PNLDC1; ENSG00000146453; TAA
MTLPGITGF

SEQ ID NO: 69501 - protein, 9 aa, Homo sapiens
  Table A; Target 69501; HLA-A*02:04; PNLDC1; ENSG00000146453; TAA
MTLPGITGF

SEQ ID NO: 69502 - protein, 9 aa, Homo sapiens
  Table A; Target 69502; HLA-A*23:01; PNLDC1; ENSG00000146453; TAA
MTLPGITGF

SEQ ID NO: 69503 - protein, 9 aa, Homo sapiens
  Table A; Target 69503; HLA-A*24:02; PNLDC1; ENSG00000146453; TAA
MTLPGITGF

SEQ ID NO: 69504 - protein, 9 aa, Homo sapiens
  Table A; Target 69504; HLA-A*25:01; PNLDC1; ENSG00000146453; TAA
MTLPGITGF

SEQ ID NO: 69505 - protein, 9 aa, Homo sapiens
  Table A; Target 69505; HLA-A*26:01; PNLDC1; ENSG00000146453; TAA
MTLPGITGF

SEQ ID NO: 69506 - protein, 9 aa, Homo sapiens
  Table A; Target 69506; HLA-A*29:02; PNLDC1; ENSG00000146453; TAA
MTLPGITGF

SEQ ID NO: 69507 - protein, 9 aa, Homo sapiens
  Table A; Target 69507; HLA-A*30:02; PNLDC1; ENSG00000146453; TAA
MTLPGITGF

SEQ ID NO: 69508 - protein, 9 aa, Homo sapiens
  Table A; Target 69508; HLA-A*31:01; PNLDC1; ENSG00000146453; TAA
MTLPGITGF

SEQ ID NO: 69509 - protein, 9 aa, Homo sapiens
  Table A; Target 69509; HLA-A*32:01; PNLDC1; ENSG00000146453; TAA
MTLPGITGF

SEQ ID NO: 69510 - protein, 9 aa, Homo sapiens
  Table A; Target 69510; HLA-A*33:01; PNLDC1; ENSG00000146453; TAA
MTLPGITGF

SEQ ID NO: 69511 - protein, 9 aa, Homo sapiens
  Table A; Target 69511; HLA-A*33:03; PNLDC1; ENSG00000146453; TAA
MTLPGITGF

SEQ ID NO: 69512 - protein, 9 aa, Homo sapiens
  Table A; Target 69512; HLA-B*15:01; PNLDC1; ENSG00000146453; TAA
MTLPGITGF

SEQ ID NO: 69513 - protein, 9 aa, Homo sapiens
  Table A; Target 69513; HLA-B*15:03; PNLDC1; ENSG00000146453; TAA
MTLPGITGF

SEQ ID NO: 69514 - protein, 9 aa, Homo sapiens
  Table A; Target 69514; HLA-B*35:01; PNLDC1; ENSG00000146453; TAA
MTLPGITGF

SEQ ID NO: 69515 - protein, 9 aa, Homo sapiens
  Table A; Target 69515; HLA-B*46:01; PNLDC1; ENSG00000146453; TAA
MTLPGITGF

SEQ ID NO: 69516 - protein, 9 aa, Homo sapiens
  Table A; Target 69516; HLA-B*57:01; PNLDC1; ENSG00000146453; TAA
MTLPGITGF

SEQ ID NO: 69517 - protein, 9 aa, Homo sapiens
  Table A; Target 69517; HLA-B*58:01; PNLDC1; ENSG00000146453; TAA
MTLPGITGF

SEQ ID NO: 69518 - protein, 9 aa, Homo sapiens
  Table A; Target 69518; HLA-C*02:02; PNLDC1; ENSG00000146453; TAA
MTLPGITGF

SEQ ID NO: 69519 - protein, 9 aa, Homo sapiens
  Table A; Target 69519; HLA-C*07:04; PNLDC1; ENSG00000146453; TAA
MTLPGITGF

SEQ ID NO: 69520 - protein, 9 aa, Homo sapiens
  Table A; Target 69520; HLA-C*16:04; PNLDC1; ENSG00000146453; TAA
MTLPGITGF

SEQ ID NO: 69521 - protein, 10 aa, Homo sapiens
  Table A; Target 69521; HLA-A*68:02; PNLDC1; ENSG00000146453; TAA
MTLPGITGFQ

SEQ ID NO: 69522 - protein, 11 aa, Homo sapiens
  Table A; Target 69522; HLA-B*54:01; PNLDC1; ENSG00000146453; TAA
MTLPGITGFQA

SEQ ID NO: 69523 - protein, 8 aa, Homo sapiens
  Table A; Target 69523; HLA-C*01:02; PNLDC1; ENSG00000146453; TAA
NFPRVSNL

SEQ ID NO: 69524 - protein, 9 aa, Homo sapiens
  Table A; Target 69524; HLA-A*23:01; PNLDC1; ENSG00000146453; TAA
NFYLFPTTF

SEQ ID NO: 69525 - protein, 9 aa, Homo sapiens
  Table A; Target 69525; HLA-A*24:02; PNLDC1; ENSG00000146453; TAA
NFYLFPTTF

SEQ ID NO: 69526 - protein, 9 aa, Homo sapiens
  Table A; Target 69526; HLA-A*29:02; PNLDC1; ENSG00000146453; TAA
NFYLFPTTF

SEQ ID NO: 69527 - protein, 9 aa, Homo sapiens
  Table A; Target 69527; HLA-B*15:03; PNLDC1; ENSG00000146453; TAA
NFYLFPTTF

SEQ ID NO: 69528 - protein, 9 aa, Homo sapiens
  Table A; Target 69528; HLA-B*18:01; PNLDC1; ENSG00000146453; TAA
NFYLFPTTF

SEQ ID NO: 69529 - protein, 9 aa, Homo sapiens
  Table A; Target 69529; HLA-B*35:01; PNLDC1; ENSG00000146453; TAA
NFYLFPTTF

SEQ ID NO: 69530 - protein, 9 aa, Homo sapiens
  Table A; Target 69530; HLA-C*04:01; PNLDC1; ENSG00000146453; TAA
NFYLFPTTF

SEQ ID NO: 69531 - protein, 9 aa, Homo sapiens
  Table A; Target 69531; HLA-C*14:02; PNLDC1; ENSG00000146453; TAA
NFYLFPTTF

SEQ ID NO: 69532 - protein, 9 aa, Homo sapiens
  Table A; Target 69532; HLA-A*02:04; PNLDC1; ENSG00000146453; TAA
NIHSLFPVL

SEQ ID NO: 69533 - protein, 9 aa, Homo sapiens
  Table A; Target 69533; HLA-A*02:07; PNLDC1; ENSG00000146453; TAA
NIHSLFPVL

SEQ ID NO: 69534 - protein, 9 aa, Homo sapiens
  Table A; Target 69534; HLA-A*68:02; PNLDC1; ENSG00000146453; TAA
NIHSLFPVL

SEQ ID NO: 69535 - protein, 9 aa, Homo sapiens
  Table A; Target 69535; HLA-A*03:01; PNLDC1; ENSG00000146453; TAA
NLIRAGVPK

SEQ ID NO: 69536 - protein, 8 aa, Homo sapiens
  Table A; Target 69536; HLA-A*02:01; PNLDC1; ENSG00000146453; TAA
NLSEVYEV

SEQ ID NO: 69537 - protein, 8 aa, Homo sapiens
  Table A; Target 69537; HLA-A*02:03; PNLDC1; ENSG00000146453; TAA
NLSEVYEV

SEQ ID NO: 69538 - protein, 8 aa, Homo sapiens
  Table A; Target 69538; HLA-A*02:04; PNLDC1; ENSG00000146453; TAA
NLSEVYEV

SEQ ID NO: 69539 - protein, 8 aa, Homo sapiens
  Table A; Target 69539; HLA-B*13:02; PNLDC1; ENSG00000146453; TAA
NLSEVYEV

SEQ ID NO: 69540 - protein, 8 aa, Homo sapiens
  Table A; Target 69540; HLA-B*55:01; PNLDC1; ENSG00000146453; TAA
NLSEVYEV

SEQ ID NO: 69541 - protein, 9 aa, Homo sapiens
  Table A; Target 69541; HLA-A*02:01; PNLDC1; ENSG00000146453; TAA
NLSEVYEVL

SEQ ID NO: 69542 - protein, 9 aa, Homo sapiens
  Table A; Target 69542; HLA-A*02:03; PNLDC1; ENSG00000146453; TAA
NLSEVYEVL

SEQ ID NO: 69543 - protein, 9 aa, Homo sapiens
  Table A; Target 69543; HLA-A*02:04; PNLDC1; ENSG00000146453; TAA
NLSEVYEVL

SEQ ID NO: 69544 - protein, 9 aa, Homo sapiens
  Table A; Target 69544; HLA-A*02:07; PNLDC1; ENSG00000146453; TAA
NLSEVYEVL

SEQ ID NO: 69545 - protein, 9 aa, Homo sapiens
  Table A; Target 69545; HLA-A*25:01; PNLDC1; ENSG00000146453; TAA
NLSEVYEVL

SEQ ID NO: 69546 - protein, 9 aa, Homo sapiens
  Table A; Target 69546; HLA-A*30:01; PNLDC1; ENSG00000146453; TAA
NLSEVYEVL

SEQ ID NO: 69547 - protein, 9 aa, Homo sapiens
  Table A; Target 69547; HLA-A*32:01; PNLDC1; ENSG00000146453; TAA
NLSEVYEVL

SEQ ID NO: 69548 - protein, 9 aa, Homo sapiens
  Table A; Target 69548; HLA-A*68:02; PNLDC1; ENSG00000146453; TAA
NLSEVYEVL

SEQ ID NO: 69549 - protein, 9 aa, Homo sapiens
  Table A; Target 69549; HLA-B*13:02; PNLDC1; ENSG00000146453; TAA
NLSEVYEVL

SEQ ID NO: 69550 - protein, 9 aa, Homo sapiens
  Table A; Target 69550; HLA-B*18:01; PNLDC1; ENSG00000146453; TAA
NLSEVYEVL

SEQ ID NO: 69551 - protein, 9 aa, Homo sapiens
  Table A; Target 69551; HLA-B*27:05; PNLDC1; ENSG00000146453; TAA
NLSEVYEVL

SEQ ID NO: 69552 - protein, 9 aa, Homo sapiens
  Table A; Target 69552; HLA-B*35:01; PNLDC1; ENSG00000146453; TAA
NLSEVYEVL

SEQ ID NO: 69553 - protein, 9 aa, Homo sapiens
  Table A; Target 69553; HLA-B*35:03; PNLDC1; ENSG00000146453; TAA
NLSEVYEVL

SEQ ID NO: 69554 - protein, 9 aa, Homo sapiens
  Table A; Target 69554; HLA-B*38:01; PNLDC1; ENSG00000146453; TAA
NLSEVYEVL

SEQ ID NO: 69555 - protein, 9 aa, Homo sapiens
  Table A; Target 69555; HLA-B*39:01; PNLDC1; ENSG00000146453; TAA
NLSEVYEVL

SEQ ID NO: 69556 - protein, 9 aa, Homo sapiens
  Table A; Target 69556; HLA-B*40:01; PNLDC1; ENSG00000146453; TAA
NLSEVYEVL

SEQ ID NO: 69557 - protein, 9 aa, Homo sapiens
  Table A; Target 69557; HLA-B*55:01; PNLDC1; ENSG00000146453; TAA
NLSEVYEVL

SEQ ID NO: 69558 - protein, 9 aa, Homo sapiens
  Table A; Target 69558; HLA-C*01:02; PNLDC1; ENSG00000146453; TAA
NLSEVYEVL

SEQ ID NO: 69559 - protein, 9 aa, Homo sapiens
  Table A; Target 69559; HLA-C*02:02; PNLDC1; ENSG00000146453; TAA
NLSEVYEVL

SEQ ID NO: 69560 - protein, 9 aa, Homo sapiens
  Table A; Target 69560; HLA-C*03:03; PNLDC1; ENSG00000146453; TAA
NLSEVYEVL

SEQ ID NO: 69561 - protein, 9 aa, Homo sapiens
  Table A; Target 69561; HLA-C*03:04; PNLDC1; ENSG00000146453; TAA
NLSEVYEVL

SEQ ID NO: 69562 - protein, 9 aa, Homo sapiens
  Table A; Target 69562; HLA-C*05:01; PNLDC1; ENSG00000146453; TAA
NLSEVYEVL

SEQ ID NO: 69563 - protein, 9 aa, Homo sapiens
  Table A; Target 69563; HLA-C*07:04; PNLDC1; ENSG00000146453; TAA
NLSEVYEVL

SEQ ID NO: 69564 - protein, 9 aa, Homo sapiens
  Table A; Target 69564; HLA-C*12:03; PNLDC1; ENSG00000146453; TAA
NLSEVYEVL

SEQ ID NO: 69565 - protein, 9 aa, Homo sapiens
  Table A; Target 69565; HLA-C*14:02; PNLDC1; ENSG00000146453; TAA
NLSEVYEVL

SEQ ID NO: 69566 - protein, 9 aa, Homo sapiens
  Table A; Target 69566; HLA-C*16:01; PNLDC1; ENSG00000146453; TAA
NLSEVYEVL

SEQ ID NO: 69567 - protein, 9 aa, Homo sapiens
  Table A; Target 69567; HLA-C*16:02; PNLDC1; ENSG00000146453; TAA
NLSEVYEVL

SEQ ID NO: 69568 - protein, 9 aa, Homo sapiens
  Table A; Target 69568; HLA-A*02:01; PNLDC1; ENSG00000146453; TAA
NMMMDLLHL

SEQ ID NO: 69569 - protein, 9 aa, Homo sapiens
  Table A; Target 69569; HLA-A*02:04; PNLDC1; ENSG00000146453; TAA
NMMMDLLHL

SEQ ID NO: 69570 - protein, 10 aa, Homo sapiens
  Table A; Target 69570; HLA-B*07:02; PNLDC1; ENSG00000146453; TAA
NPTKNSGPEI

SEQ ID NO: 69571 - protein, 10 aa, Homo sapiens
  Table A; Target 69571; HLA-B*35:03; PNLDC1; ENSG00000146453; TAA
NPTKNSGPEI

SEQ ID NO: 69572 - protein, 9 aa, Homo sapiens
  Table A; Target 69572; HLA-A*03:01; PNLDC1; ENSG00000146453; TAA
NQYGFNYNK

SEQ ID NO: 69573 - protein, 9 aa, Homo sapiens
  Table A; Target 69573; HLA-A*03:02; PNLDC1; ENSG00000146453; TAA
NQYGFNYNK

SEQ ID NO: 69574 - protein, 9 aa, Homo sapiens
  Table A; Target 69574; HLA-A*11:01; PNLDC1; ENSG00000146453; TAA
NQYGFNYNK

SEQ ID NO: 69575 - protein, 9 aa, Homo sapiens
  Table A; Target 69575; HLA-A*31:01; PNLDC1; ENSG00000146453; TAA
NQYGFNYNK

SEQ ID NO: 69576 - protein, 9 aa, Homo sapiens
  Table A; Target 69576; HLA-B*13:02; PNLDC1; ENSG00000146453; TAA
NQYGFNYNK

SEQ ID NO: 69577 - protein, 9 aa, Homo sapiens
  Table A; Target 69577; HLA-B*27:05; PNLDC1; ENSG00000146453; TAA
NQYGFNYNK

SEQ ID NO: 69578 - protein, 10 aa, Homo sapiens
  Table A; Target 69578; HLA-A*25:01; PNLDC1; ENSG00000146453; TAA
NQYGFNYNKF

SEQ ID NO: 69579 - protein, 10 aa, Homo sapiens
  Table A; Target 69579; HLA-A*26:01; PNLDC1; ENSG00000146453; TAA
NQYGFNYNKF

SEQ ID NO: 69580 - protein, 10 aa, Homo sapiens
  Table A; Target 69580; HLA-B*15:03; PNLDC1; ENSG00000146453; TAA
NQYGFNYNKF

SEQ ID NO: 69581 - protein, 10 aa, Homo sapiens
  Table A; Target 69581; HLA-B*18:01; PNLDC1; ENSG00000146453; TAA
NQYGFNYNKF

SEQ ID NO: 69582 - protein, 10 aa, Homo sapiens
  Table A; Target 69582; HLA-C*02:02; PNLDC1; ENSG00000146453; TAA
NQYGFNYNKF

SEQ ID NO: 69583 - protein, 8 aa, Homo sapiens
  Table A; Target 69583; HLA-C*05:01; PNLDC1; ENSG00000146453; TAA
NSDLNPTK

SEQ ID NO: 69584 - protein, 9 aa, Homo sapiens
  Table A; Target 69584; HLA-A*01:01; PNLDC1; ENSG00000146453; TAA
NSDLNPTKN

SEQ ID NO: 69585 - protein, 11 aa, Homo sapiens
  Table A; Target 69585; HLA-A*31:01; PNLDC1; ENSG00000146453; TAA
NSGPEIVHASR

SEQ ID NO: 69586 - protein, 11 aa, Homo sapiens
  Table A; Target 69586; HLA-A*33:01; PNLDC1; ENSG00000146453; TAA
NSGPEIVHASR

SEQ ID NO: 69587 - protein, 11 aa, Homo sapiens
  Table A; Target 69587; HLA-A*33:03; PNLDC1; ENSG00000146453; TAA
NSGPEIVHASR

SEQ ID NO: 69588 - protein, 11 aa, Homo sapiens
  Table A; Target 69588; HLA-A*68:01; PNLDC1; ENSG00000146453; TAA
NSGPEIVHASR

SEQ ID NO: 69589 - protein, 11 aa, Homo sapiens
  Table A; Target 69589; HLA-C*07:06; PNLDC1; ENSG00000146453; TAA
NSGPEIVHASR

SEQ ID NO: 69590 - protein, 8 aa, Homo sapiens
  Table A; Target 69590; HLA-C*06:02; PNLDC1; ENSG00000146453; TAA
PDKDQIKV

SEQ ID NO: 69591 - protein, 8 aa, Homo sapiens
  Table A; Target 69591; HLA-C*16:02; PNLDC1; ENSG00000146453; TAA
PDKDQIKV

SEQ ID NO: 69592 - protein, 8 aa, Homo sapiens
  Table A; Target 69592; HLA-B*18:01; PNLDC1; ENSG00000146453; TAA
PESSFPQY

SEQ ID NO: 69593 - protein, 9 aa, Homo sapiens
  Table A; Target 69593; HLA-B*15:01; PNLDC1; ENSG00000146453; TAA
PGVSEQQVY

SEQ ID NO: 69594 - protein, 9 aa, Homo sapiens
  Table A; Target 69594; HLA-B*15:03; PNLDC1; ENSG00000146453; TAA
PGVSEQQVY

SEQ ID NO: 69595 - protein, 9 aa, Homo sapiens
  Table A; Target 69595; HLA-A*24:02; PNLDC1; ENSG00000146453; TAA
PLPESYDQF

SEQ ID NO: 69596 - protein, 8 aa, Homo sapiens
  Table A; Target 69596; HLA-B*51:01; PNLDC1; ENSG00000146453; TAA
PPILILSV

SEQ ID NO: 69597 - protein, 8 aa, Homo sapiens
  Table A; Target 69597; HLA-B*56:01; PNLDC1; ENSG00000146453; TAA
PPILILSV

SEQ ID NO: 69598 - protein, 11 aa, Homo sapiens
  Table A; Target 69598; HLA-C*07:01; PNLDC1; ENSG00000146453; TAA
PTTFGILDSEF

SEQ ID NO: 69599 - protein, 11 aa, Homo sapiens
  Table A; Target 69599; HLA-A*03:02; PNLDC1; ENSG00000146453; TAA
PVLIDTKSVTK

SEQ ID NO: 69600 - protein, 11 aa, Homo sapiens
  Table A; Target 69600; HLA-B*27:02; PNLDC1; ENSG00000146453; TAA
PVLIDTKSVTK

SEQ ID NO: 69601 - protein, 10 aa, Homo sapiens
  Table A; Target 69601; HLA-A*26:01; PNLDC1; ENSG00000146453; TAA
PVPESSFPQY

SEQ ID NO: 69602 - protein, 11 aa, Homo sapiens
  Table A; Target 69602; HLA-A*24:02; PNLDC1; ENSG00000146453; TAA
PYMNEEQEKKI

SEQ ID NO: 69603 - protein, 8 aa, Homo sapiens
  Table A; Target 69603; HLA-A*23:01; PNLDC1; ENSG00000146453; TAA
PYVNQVNL

SEQ ID NO: 69604 - protein, 9 aa, Homo sapiens
  Table A; Target 69604; HLA-A*23:01; PNLDC1; ENSG00000146453; TAA
PYVNQVNLI

SEQ ID NO: 69605 - protein, 9 aa, Homo sapiens
  Table A; Target 69605; HLA-A*24:02; PNLDC1; ENSG00000146453; TAA
PYVNQVNLI

SEQ ID NO: 69606 - protein, 8 aa, Homo sapiens
  Table A; Target 69606; HLA-B*13:02; PNLDC1; ENSG00000146453; TAA
QAFEVQLV

SEQ ID NO: 69607 - protein, 8 aa, Homo sapiens
  Table A; Target 69607; HLA-B*51:01; PNLDC1; ENSG00000146453; TAA
QAFEVQLV

SEQ ID NO: 69608 - protein, 8 aa, Homo sapiens
  Table A; Target 69608; HLA-C*12:03; PNLDC1; ENSG00000146453; TAA
QAFEVQLV

SEQ ID NO: 69609 - protein, 9 aa, Homo sapiens
  Table A; Target 69609; HLA-A*02:01; PNLDC1; ENSG00000146453; TAA
QAFEVQLVL

SEQ ID NO: 69610 - protein, 9 aa, Homo sapiens
  Table A; Target 69610; HLA-A*02:07; PNLDC1; ENSG00000146453; TAA
QAFEVQLVL

SEQ ID NO: 69611 - protein, 9 aa, Homo sapiens
  Table A; Target 69611; HLA-A*11:01; PNLDC1; ENSG00000146453; TAA
QAFEVQLVL

SEQ ID NO: 69612 - protein, 9 aa, Homo sapiens
  Table A; Target 69612; HLA-A*23:01; PNLDC1; ENSG00000146453; TAA
QAFEVQLVL

SEQ ID NO: 69613 - protein, 9 aa, Homo sapiens
  Table A; Target 69613; HLA-A*29:02; PNLDC1; ENSG00000146453; TAA
QAFEVQLVL

SEQ ID NO: 69614 - protein, 9 aa, Homo sapiens
  Table A; Target 69614; HLA-A*30:01; PNLDC1; ENSG00000146453; TAA
QAFEVQLVL

SEQ ID NO: 69615 - protein, 9 aa, Homo sapiens
  Table A; Target 69615; HLA-A*68:01; PNLDC1; ENSG00000146453; TAA
QAFEVQLVL

SEQ ID NO: 69616 - protein, 9 aa, Homo sapiens
  Table A; Target 69616; HLA-A*68:02; PNLDC1; ENSG00000146453; TAA
QAFEVQLVL

SEQ ID NO: 69617 - protein, 9 aa, Homo sapiens
  Table A; Target 69617; HLA-B*07:02; PNLDC1; ENSG00000146453; TAA
QAFEVQLVL

SEQ ID NO: 69618 - protein, 9 aa, Homo sapiens
  Table A; Target 69618; HLA-B*13:02; PNLDC1; ENSG00000146453; TAA
QAFEVQLVL

SEQ ID NO: 69619 - protein, 9 aa, Homo sapiens
  Table A; Target 69619; HLA-B*15:03; PNLDC1; ENSG00000146453; TAA
QAFEVQLVL

SEQ ID NO: 69620 - protein, 9 aa, Homo sapiens
  Table A; Target 69620; HLA-B*18:01; PNLDC1; ENSG00000146453; TAA
QAFEVQLVL

SEQ ID NO: 69621 - protein, 9 aa, Homo sapiens
  Table A; Target 69621; HLA-B*27:02; PNLDC1; ENSG00000146453; TAA
QAFEVQLVL

SEQ ID NO: 69622 - protein, 9 aa, Homo sapiens
  Table A; Target 69622; HLA-B*35:01; PNLDC1; ENSG00000146453; TAA
QAFEVQLVL

SEQ ID NO: 69623 - protein, 9 aa, Homo sapiens
  Table A; Target 69623; HLA-B*35:03; PNLDC1; ENSG00000146453; TAA
QAFEVQLVL

SEQ ID NO: 69624 - protein, 9 aa, Homo sapiens
  Table A; Target 69624; HLA-B*38:01; PNLDC1; ENSG00000146453; TAA
QAFEVQLVL

SEQ ID NO: 69625 - protein, 9 aa, Homo sapiens
  Table A; Target 69625; HLA-B*39:01; PNLDC1; ENSG00000146453; TAA
QAFEVQLVL

SEQ ID NO: 69626 - protein, 9 aa, Homo sapiens
  Table A; Target 69626; HLA-B*40:01; PNLDC1; ENSG00000146453; TAA
QAFEVQLVL

SEQ ID NO: 69627 - protein, 9 aa, Homo sapiens
  Table A; Target 69627; HLA-B*44:03; PNLDC1; ENSG00000146453; TAA
QAFEVQLVL

SEQ ID NO: 69628 - protein, 9 aa, Homo sapiens
  Table A; Target 69628; HLA-B*46:01; PNLDC1; ENSG00000146453; TAA
QAFEVQLVL

SEQ ID NO: 69629 - protein, 9 aa, Homo sapiens
  Table A; Target 69629; HLA-B*51:01; PNLDC1; ENSG00000146453; TAA
QAFEVQLVL

SEQ ID NO: 69630 - protein, 9 aa, Homo sapiens
  Table A; Target 69630; HLA-B*54:01; PNLDC1; ENSG00000146453; TAA
QAFEVQLVL

SEQ ID NO: 69631 - protein, 9 aa, Homo sapiens
  Table A; Target 69631; HLA-B*56:01; PNLDC1; ENSG00000146453; TAA
QAFEVQLVL

SEQ ID NO: 69632 - protein, 9 aa, Homo sapiens
  Table A; Target 69632; HLA-B*57:01; PNLDC1; ENSG00000146453; TAA
QAFEVQLVL

SEQ ID NO: 69633 - protein, 9 aa, Homo sapiens
  Table A; Target 69633; HLA-B*58:01; PNLDC1; ENSG00000146453; TAA
QAFEVQLVL

SEQ ID NO: 69634 - protein, 9 aa, Homo sapiens
  Table A; Target 69634; HLA-C*02:02; PNLDC1; ENSG00000146453; TAA
QAFEVQLVL

SEQ ID NO: 69635 - protein, 9 aa, Homo sapiens
  Table A; Target 69635; HLA-C*03:03; PNLDC1; ENSG00000146453; TAA
QAFEVQLVL

SEQ ID NO: 69636 - protein, 9 aa, Homo sapiens
  Table A; Target 69636; HLA-C*03:04; PNLDC1; ENSG00000146453; TAA
QAFEVQLVL

SEQ ID NO: 69637 - protein, 9 aa, Homo sapiens
  Table A; Target 69637; HLA-C*05:01; PNLDC1; ENSG00000146453; TAA
QAFEVQLVL

SEQ ID NO: 69638 - protein, 9 aa, Homo sapiens
  Table A; Target 69638; HLA-C*07:04; PNLDC1; ENSG00000146453; TAA
QAFEVQLVL

SEQ ID NO: 69639 - protein, 9 aa, Homo sapiens
  Table A; Target 69639; HLA-C*07:06; PNLDC1; ENSG00000146453; TAA
QAFEVQLVL

SEQ ID NO: 69640 - protein, 9 aa, Homo sapiens
  Table A; Target 69640; HLA-C*12:03; PNLDC1; ENSG00000146453; TAA
QAFEVQLVL

SEQ ID NO: 69641 - protein, 9 aa, Homo sapiens
  Table A; Target 69641; HLA-C*16:01; PNLDC1; ENSG00000146453; TAA
QAFEVQLVL

SEQ ID NO: 69642 - protein, 9 aa, Homo sapiens
  Table A; Target 69642; HLA-C*16:02; PNLDC1; ENSG00000146453; TAA
QAFEVQLVL

SEQ ID NO: 69643 - protein, 9 aa, Homo sapiens
  Table A; Target 69643; HLA-C*16:04; PNLDC1; ENSG00000146453; TAA
QAFEVQLVL

SEQ ID NO: 69644 - protein, 10 aa, Homo sapiens
  Table A; Target 69644; HLA-A*31:01; PNLDC1; ENSG00000146453; TAA
QAFEVQLVLR

SEQ ID NO: 69645 - protein, 10 aa, Homo sapiens
  Table A; Target 69645; HLA-A*33:01; PNLDC1; ENSG00000146453; TAA
QAFEVQLVLR

SEQ ID NO: 69646 - protein, 10 aa, Homo sapiens
  Table A; Target 69646; HLA-A*33:03; PNLDC1; ENSG00000146453; TAA
QAFEVQLVLR

SEQ ID NO: 69647 - protein, 10 aa, Homo sapiens
  Table A; Target 69647; HLA-A*68:01; PNLDC1; ENSG00000146453; TAA
QAFEVQLVLR

SEQ ID NO: 69648 - protein, 10 aa, Homo sapiens
  Table A; Target 69648; HLA-A*68:02; PNLDC1; ENSG00000146453; TAA
QAFEVQLVLR

SEQ ID NO: 69649 - protein, 10 aa, Homo sapiens
  Table A; Target 69649; HLA-B*27:02; PNLDC1; ENSG00000146453; TAA
QAFEVQLVLR

SEQ ID NO: 69650 - protein, 10 aa, Homo sapiens
  Table A; Target 69650; HLA-C*07:06; PNLDC1; ENSG00000146453; TAA
QAFEVQLVLR

SEQ ID NO: 69651 - protein, 9 aa, Homo sapiens
  Table A; Target 69651; HLA-A*02:01; PNLDC1; ENSG00000146453; TAA
QALPNIWTV

SEQ ID NO: 69652 - protein, 9 aa, Homo sapiens
  Table A; Target 69652; HLA-A*02:03; PNLDC1; ENSG00000146453; TAA
QALPNIWTV

SEQ ID NO: 69653 - protein, 9 aa, Homo sapiens
  Table A; Target 69653; HLA-A*02:04; PNLDC1; ENSG00000146453; TAA
QALPNIWTV

SEQ ID NO: 69654 - protein, 9 aa, Homo sapiens
  Table A; Target 69654; HLA-A*02:07; PNLDC1; ENSG00000146453; TAA
QALPNIWTV

SEQ ID NO: 69655 - protein, 9 aa, Homo sapiens
  Table A; Target 69655; HLA-A*68:02; PNLDC1; ENSG00000146453; TAA
QALPNIWTV

SEQ ID NO: 69656 - protein, 9 aa, Homo sapiens
  Table A; Target 69656; HLA-B*13:02; PNLDC1; ENSG00000146453; TAA
QALPNIWTV

SEQ ID NO: 69657 - protein, 9 aa, Homo sapiens
  Table A; Target 69657; HLA-B*51:01; PNLDC1; ENSG00000146453; TAA
QALPNIWTV

SEQ ID NO: 69658 - protein, 9 aa, Homo sapiens
  Table A; Target 69658; HLA-B*54:01; PNLDC1; ENSG00000146453; TAA
QALPNIWTV

SEQ ID NO: 69659 - protein, 9 aa, Homo sapiens
  Table A; Target 69659; HLA-B*55:01; PNLDC1; ENSG00000146453; TAA
QALPNIWTV

SEQ ID NO: 69660 - protein, 9 aa, Homo sapiens
  Table A; Target 69660; HLA-B*56:01; PNLDC1; ENSG00000146453; TAA
QALPNIWTV

SEQ ID NO: 69661 - protein, 9 aa, Homo sapiens
  Table A; Target 69661; HLA-B*57:01; PNLDC1; ENSG00000146453; TAA
QALPNIWTV

SEQ ID NO: 69662 - protein, 9 aa, Homo sapiens
  Table A; Target 69662; HLA-C*02:02; PNLDC1; ENSG00000146453; TAA
QALPNIWTV

SEQ ID NO: 69663 - protein, 9 aa, Homo sapiens
  Table A; Target 69663; HLA-C*12:03; PNLDC1; ENSG00000146453; TAA
QALPNIWTV

SEQ ID NO: 69664 - protein, 9 aa, Homo sapiens
  Table A; Target 69664; HLA-C*16:02; PNLDC1; ENSG00000146453; TAA
QALPNIWTV

SEQ ID NO: 69665 - protein, 9 aa, Homo sapiens
  Table A; Target 69665; HLA-C*16:04; PNLDC1; ENSG00000146453; TAA
QALPNIWTV

SEQ ID NO: 69666 - protein, 8 aa, Homo sapiens
  Table A; Target 69666; HLA-B*37:01; PNLDC1; ENSG00000146453; TAA
QASSVQFL

SEQ ID NO: 69667 - protein, 11 aa, Homo sapiens
  Table A; Target 69667; HLA-A*01:01; PNLDC1; ENSG00000146453; TAA
QASSVQFLNQY

SEQ ID NO: 69668 - protein, 11 aa, Homo sapiens
  Table A; Target 69668; HLA-A*30:02; PNLDC1; ENSG00000146453; TAA
QASSVQFLNQY

SEQ ID NO: 69669 - protein, 11 aa, Homo sapiens
  Table A; Target 69669; HLA-B*35:01; PNLDC1; ENSG00000146453; TAA
QASSVQFLNQY

SEQ ID NO: 69670 - protein, 11 aa, Homo sapiens
  Table A; Target 69670; HLA-C*16:04; PNLDC1; ENSG00000146453; TAA
QASSVQFLNQY

SEQ ID NO: 69671 - protein, 9 aa, Homo sapiens
  Table A; Target 69671; HLA-A*23:01; PNLDC1; ENSG00000146453; TAA
QFKQNIHSL

SEQ ID NO: 69672 - protein, 9 aa, Homo sapiens
  Table A; Target 69672; HLA-B*08:01; PNLDC1; ENSG00000146453; TAA
QFKQNIHSL

SEQ ID NO: 69673 - protein, 10 aa, Homo sapiens
  Table A; Target 69673; HLA-A*24:02; PNLDC1; ENSG00000146453; TAA
QFKQNIHSLF

SEQ ID NO: 69674 - protein, 9 aa, Homo sapiens
  Table A; Target 69674; HLA-A*23:01; PNLDC1; ENSG00000146453; TAA
QFLLLTNKF

SEQ ID NO: 69675 - protein, 9 aa, Homo sapiens
  Table A; Target 69675; HLA-A*24:02; PNLDC1; ENSG00000146453; TAA
QFLLLTNKF

SEQ ID NO: 69676 - protein, 9 aa, Homo sapiens
  Table A; Target 69676; HLA-A*29:02; PNLDC1; ENSG00000146453; TAA
QFLLLTNKF

SEQ ID NO: 69677 - protein, 8 aa, Homo sapiens
  Table A; Target 69677; HLA-A*23:01; PNLDC1; ENSG00000146453; TAA
QFLNQYGF

SEQ ID NO: 69678 - protein, 10 aa, Homo sapiens
  Table A; Target 69678; HLA-A*29:02; PNLDC1; ENSG00000146453; TAA
QFLNQYGFNY

SEQ ID NO: 69679 - protein, 10 aa, Homo sapiens
  Table A; Target 69679; HLA-A*30:02; PNLDC1; ENSG00000146453; TAA
QFLNQYGFNY

SEQ ID NO: 69680 - protein, 9 aa, Homo sapiens
  Table A; Target 69680; HLA-A*02:01; PNLDC1; ENSG00000146453; TAA
QIKVVIDEV

SEQ ID NO: 69681 - protein, 9 aa, Homo sapiens
  Table A; Target 69681; HLA-A*02:03; PNLDC1; ENSG00000146453; TAA
QIKVVIDEV

SEQ ID NO: 69682 - protein, 9 aa, Homo sapiens
  Table A; Target 69682; HLA-A*02:04; PNLDC1; ENSG00000146453; TAA
QIKVVIDEV

SEQ ID NO: 69683 - protein, 9 aa, Homo sapiens
  Table A; Target 69683; HLA-A*02:07; PNLDC1; ENSG00000146453; TAA
QIKVVIDEV

SEQ ID NO: 69684 - protein, 9 aa, Homo sapiens
  Table A; Target 69684; HLA-A*68:02; PNLDC1; ENSG00000146453; TAA
QIKVVIDEV

SEQ ID NO: 69685 - protein, 9 aa, Homo sapiens
  Table A; Target 69685; HLA-B*08:01; PNLDC1; ENSG00000146453; TAA
QIKVVIDEV

SEQ ID NO: 69686 - protein, 9 aa, Homo sapiens
  Table A; Target 69686; HLA-B*13:02; PNLDC1; ENSG00000146453; TAA
QIKVVIDEV

SEQ ID NO: 69687 - protein, 9 aa, Homo sapiens
  Table A; Target 69687; HLA-B*40:02; PNLDC1; ENSG00000146453; TAA
QIKVVIDEV

SEQ ID NO: 69688 - protein, 9 aa, Homo sapiens
  Table A; Target 69688; HLA-B*46:01; PNLDC1; ENSG00000146453; TAA
QIKVVIDEV

SEQ ID NO: 69689 - protein, 9 aa, Homo sapiens
  Table A; Target 69689; HLA-C*12:03; PNLDC1; ENSG00000146453; TAA
QIKVVIDEV

SEQ ID NO: 69690 - protein, 9 aa, Homo sapiens
  Table A; Target 69690; HLA-B*15:03; PNLDC1; ENSG00000146453; TAA
QKPLVGHNM

SEQ ID NO: 69691 - protein, 8 aa, Homo sapiens
  Table A; Target 69691; HLA-B*08:01; PNLDC1; ENSG00000146453; TAA
QLVLRQAL

SEQ ID NO: 69692 - protein, 8 aa, Homo sapiens
  Table A; Target 69692; HLA-A*30:01; PNLDC1; ENSG00000146453; TAA
QQFTVCQI

SEQ ID NO: 69693 - protein, 8 aa, Homo sapiens
  Table A; Target 69693; HLA-B*13:02; PNLDC1; ENSG00000146453; TAA
QQFTVCQI

SEQ ID NO: 69694 - protein, 8 aa, Homo sapiens
  Table A; Target 69694; HLA-B*37:01; PNLDC1; ENSG00000146453; TAA
QQFTVCQI

SEQ ID NO: 69695 - protein, 8 aa, Homo sapiens
  Table A; Target 69695; HLA-B*58:01; PNLDC1; ENSG00000146453; TAA
QSVQQFTV

SEQ ID NO: 69696 - protein, 9 aa, Homo sapiens
  Table A; Target 69696; HLA-C*12:03; PNLDC1; ENSG00000146453; TAA
QSVQQFTVC

SEQ ID NO: 69697 - protein, 9 aa, Homo sapiens
  Table A; Target 69697; HLA-A*03:02; PNLDC1; ENSG00000146453; TAA
QVCGIVTAW

SEQ ID NO: 69698 - protein, 9 aa, Homo sapiens
  Table A; Target 69698; HLA-A*25:01; PNLDC1; ENSG00000146453; TAA
QVCGIVTAW

SEQ ID NO: 69699 - protein, 9 aa, Homo sapiens
  Table A; Target 69699; HLA-A*26:01; PNLDC1; ENSG00000146453; TAA
QVCGIVTAW

SEQ ID NO: 69700 - protein, 9 aa, Homo sapiens
  Table A; Target 69700; HLA-A*29:02; PNLDC1; ENSG00000146453; TAA
QVCGIVTAW

SEQ ID NO: 69701 - protein, 9 aa, Homo sapiens
  Table A; Target 69701; HLA-A*31:01; PNLDC1; ENSG00000146453; TAA
QVCGIVTAW

SEQ ID NO: 69702 - protein, 9 aa, Homo sapiens
  Table A; Target 69702; HLA-A*32:01; PNLDC1; ENSG00000146453; TAA
QVCGIVTAW

SEQ ID NO: 69703 - protein, 9 aa, Homo sapiens
  Table A; Target 69703; HLA-A*33:03; PNLDC1; ENSG00000146453; TAA
QVCGIVTAW

SEQ ID NO: 69704 - protein, 9 aa, Homo sapiens
  Table A; Target 69704; HLA-A*68:01; PNLDC1; ENSG00000146453; TAA
QVCGIVTAW

SEQ ID NO: 69705 - protein, 9 aa, Homo sapiens
  Table A; Target 69705; HLA-A*68:02; PNLDC1; ENSG00000146453; TAA
QVCGIVTAW

SEQ ID NO: 69706 - protein, 9 aa, Homo sapiens
  Table A; Target 69706; HLA-B*15:01; PNLDC1; ENSG00000146453; TAA
QVCGIVTAW

SEQ ID NO: 69707 - protein, 9 aa, Homo sapiens
  Table A; Target 69707; HLA-B*35:01; PNLDC1; ENSG00000146453; TAA
QVCGIVTAW

SEQ ID NO: 69708 - protein, 9 aa, Homo sapiens
  Table A; Target 69708; HLA-B*44:02; PNLDC1; ENSG00000146453; TAA
QVCGIVTAW

SEQ ID NO: 69709 - protein, 9 aa, Homo sapiens
  Table A; Target 69709; HLA-B*44:03; PNLDC1; ENSG00000146453; TAA
QVCGIVTAW

SEQ ID NO: 69710 - protein, 9 aa, Homo sapiens
  Table A; Target 69710; HLA-B*57:01; PNLDC1; ENSG00000146453; TAA
QVCGIVTAW

SEQ ID NO: 69711 - protein, 9 aa, Homo sapiens
  Table A; Target 69711; HLA-B*58:01; PNLDC1; ENSG00000146453; TAA
QVCGIVTAW

SEQ ID NO: 69712 - protein, 9 aa, Homo sapiens
  Table A; Target 69712; HLA-C*07:04; PNLDC1; ENSG00000146453; TAA
QVCGIVTAW

SEQ ID NO: 69713 - protein, 9 aa, Homo sapiens
  Table A; Target 69713; HLA-C*07:06; PNLDC1; ENSG00000146453; TAA
QVCGIVTAW

SEQ ID NO: 69714 - protein, 9 aa, Homo sapiens
  Table A; Target 69714; HLA-C*12:03; PNLDC1; ENSG00000146453; TAA
QVCGIVTAW

SEQ ID NO: 69715 - protein, 9 aa, Homo sapiens
  Table A; Target 69715; HLA-C*16:04; PNLDC1; ENSG00000146453; TAA
QVCGIVTAW

SEQ ID NO: 69716 - protein, 9 aa, Homo sapiens
  Table A; Target 69716; HLA-A*32:01; PNLDC1; ENSG00000146453; TAA
QVNLIRAGV

SEQ ID NO: 69717 - protein, 11 aa, Homo sapiens
  Table A; Target 69717; HLA-A*03:02; PNLDC1; ENSG00000146453; TAA
QVNLIRAGVPK

SEQ ID NO: 69718 - protein, 9 aa, Homo sapiens
  Table A; Target 69718; HLA-A*02:07; PNLDC1; ENSG00000146453; TAA
QVYHKFQNL

SEQ ID NO: 69719 - protein, 9 aa, Homo sapiens
  Table A; Target 69719; HLA-A*03:01; PNLDC1; ENSG00000146453; TAA
QVYHKFQNL

SEQ ID NO: 69720 - protein, 9 aa, Homo sapiens
  Table A; Target 69720; HLA-A*25:01; PNLDC1; ENSG00000146453; TAA
QVYHKFQNL

SEQ ID NO: 69721 - protein, 9 aa, Homo sapiens
  Table A; Target 69721; HLA-A*31:01; PNLDC1; ENSG00000146453; TAA
QVYHKFQNL

SEQ ID NO: 69722 - protein, 9 aa, Homo sapiens
  Table A; Target 69722; HLA-A*68:02; PNLDC1; ENSG00000146453; TAA
QVYHKFQNL

SEQ ID NO: 69723 - protein, 9 aa, Homo sapiens
  Table A; Target 69723; HLA-B*08:01; PNLDC1; ENSG00000146453; TAA
QVYHKFQNL

SEQ ID NO: 69724 - protein, 9 aa, Homo sapiens
  Table A; Target 69724; HLA-A*23:01; PNLDC1; ENSG00000146453; TAA
QYGFNYNKF

SEQ ID NO: 69725 - protein, 9 aa, Homo sapiens
  Table A; Target 69725; HLA-A*24:02; PNLDC1; ENSG00000146453; TAA
QYGFNYNKF

SEQ ID NO: 69726 - protein, 9 aa, Homo sapiens
  Table A; Target 69726; HLA-A*23:01; PNLDC1; ENSG00000146453; TAA
QYLDVLAPY

SEQ ID NO: 69727 - protein, 9 aa, Homo sapiens
  Table A; Target 69727; HLA-A*29:02; PNLDC1; ENSG00000146453; TAA
QYLDVLAPY

SEQ ID NO: 69728 - protein, 9 aa, Homo sapiens
  Table A; Target 69728; HLA-A*30:02; PNLDC1; ENSG00000146453; TAA
QYLDVLAPY

SEQ ID NO: 69729 - protein, 9 aa, Homo sapiens
  Table A; Target 69729; HLA-A*31:01; PNLDC1; ENSG00000146453; TAA
QYLDVLAPY

SEQ ID NO: 69730 - protein, 9 aa, Homo sapiens
  Table A; Target 69730; HLA-A*33:03; PNLDC1; ENSG00000146453; TAA
QYLDVLAPY

SEQ ID NO: 69731 - protein, 9 aa, Homo sapiens
  Table A; Target 69731; HLA-C*14:02; PNLDC1; ENSG00000146453; TAA
QYLDVLAPY

SEQ ID NO: 69732 - protein, 9 aa, Homo sapiens
  Table A; Target 69732; HLA-A*31:01; PNLDC1; ENSG00000146453; TAA
RAGVPKINF

SEQ ID NO: 69733 - protein, 9 aa, Homo sapiens
  Table A; Target 69733; HLA-A*32:01; PNLDC1; ENSG00000146453; TAA
RAGVPKINF

SEQ ID NO: 69734 - protein, 9 aa, Homo sapiens
  Table A; Target 69734; HLA-B*57:01; PNLDC1; ENSG00000146453; TAA
RAGVPKINF

SEQ ID NO: 69735 - protein, 9 aa, Homo sapiens
  Table A; Target 69735; HLA-B*58:01; PNLDC1; ENSG00000146453; TAA
RAGVPKINF

SEQ ID NO: 69736 - protein, 9 aa, Homo sapiens
  Table A; Target 69736; HLA-C*16:01; PNLDC1; ENSG00000146453; TAA
RAGVPKINF

SEQ ID NO: 69737 - protein, 8 aa, Homo sapiens
  Table A; Target 69737; HLA-B*37:01; PNLDC1; ENSG00000146453; TAA
RDHPTLCI

SEQ ID NO: 69738 - protein, 9 aa, Homo sapiens
  Table A; Target 69738; HLA-A*31:01; PNLDC1; ENSG00000146453; TAA
RGFSVFFQM

SEQ ID NO: 69739 - protein, 9 aa, Homo sapiens
  Table A; Target 69739; HLA-B*38:01; PNLDC1; ENSG00000146453; TAA
RHDILTGNW

SEQ ID NO: 69740 - protein, 9 aa, Homo sapiens
  Table A; Target 69740; HLA-B*57:01; PNLDC1; ENSG00000146453; TAA
RHDILTGNW

SEQ ID NO: 69741 - protein, 9 aa, Homo sapiens
  Table A; Target 69741; HLA-B*27:05; PNLDC1; ENSG00000146453; TAA
RHSPNVNCL

SEQ ID NO: 69742 - protein, 9 aa, Homo sapiens
  Table A; Target 69742; HLA-B*38:01; PNLDC1; ENSG00000146453; TAA
RHSPNVNCL

SEQ ID NO: 69743 - protein, 9 aa, Homo sapiens
  Table A; Target 69743; HLA-B*39:01; PNLDC1; ENSG00000146453; TAA
RHSPNVNCL

SEQ ID NO: 69744 - protein, 10 aa, Homo sapiens
  Table A; Target 69744; HLA-B*38:01; PNLDC1; ENSG00000146453; TAA
RHSPNVNCLL

SEQ ID NO: 69745 - protein, 10 aa, Homo sapiens
  Table A; Target 69745; HLA-A*23:01; PNLDC1; ENSG00000146453; TAA
RPLPESYDQF

SEQ ID NO: 69746 - protein, 10 aa, Homo sapiens
  Table A; Target 69746; HLA-A*24:02; PNLDC1; ENSG00000146453; TAA
RPLPESYDQF

SEQ ID NO: 69747 - protein, 10 aa, Homo sapiens
  Table A; Target 69747; HLA-B*07:02; PNLDC1; ENSG00000146453; TAA
RPLPESYDQF

SEQ ID NO: 69748 - protein, 10 aa, Homo sapiens
  Table A; Target 69748; HLA-B*27:02; PNLDC1; ENSG00000146453; TAA
RPLPESYDQF

SEQ ID NO: 69749 - protein, 10 aa, Homo sapiens
  Table A; Target 69749; HLA-B*35:01; PNLDC1; ENSG00000146453; TAA
RPLPESYDQF

SEQ ID NO: 69750 - protein, 10 aa, Homo sapiens
  Table A; Target 69750; HLA-B*35:03; PNLDC1; ENSG00000146453; TAA
RPLPESYDQF

SEQ ID NO: 69751 - protein, 10 aa, Homo sapiens
  Table A; Target 69751; HLA-B*55:01; PNLDC1; ENSG00000146453; TAA
RPLPESYDQF

SEQ ID NO: 69752 - protein, 10 aa, Homo sapiens
  Table A; Target 69752; HLA-B*57:01; PNLDC1; ENSG00000146453; TAA
RPLPESYDQF

SEQ ID NO: 69753 - protein, 9 aa, Homo sapiens
  Table A; Target 69753; HLA-B*07:02; PNLDC1; ENSG00000146453; TAA
RPPILILSV

SEQ ID NO: 69754 - protein, 9 aa, Homo sapiens
  Table A; Target 69754; HLA-B*08:01; PNLDC1; ENSG00000146453; TAA
RPPILILSV

SEQ ID NO: 69755 - protein, 9 aa, Homo sapiens
  Table A; Target 69755; HLA-B*51:01; PNLDC1; ENSG00000146453; TAA
RPPILILSV

SEQ ID NO: 69756 - protein, 9 aa, Homo sapiens
  Table A; Target 69756; HLA-B*54:01; PNLDC1; ENSG00000146453; TAA
RPPILILSV

SEQ ID NO: 69757 - protein, 9 aa, Homo sapiens
  Table A; Target 69757; HLA-B*56:01; PNLDC1; ENSG00000146453; TAA
RPPILILSV

SEQ ID NO: 69758 - protein, 10 aa, Homo sapiens
  Table A; Target 69758; HLA-A*02:04; PNLDC1; ENSG00000146453; TAA
RQALPNIWTV

SEQ ID NO: 69759 - protein, 9 aa, Homo sapiens
  Table A; Target 69759; HLA-A*02:01; PNLDC1; ENSG00000146453; TAA
RQSVQQFTV

SEQ ID NO: 69760 - protein, 9 aa, Homo sapiens
  Table A; Target 69760; HLA-A*02:04; PNLDC1; ENSG00000146453; TAA
RQSVQQFTV

SEQ ID NO: 69761 - protein, 9 aa, Homo sapiens
  Table A; Target 69761; HLA-A*30:01; PNLDC1; ENSG00000146453; TAA
RQSVQQFTV

SEQ ID NO: 69762 - protein, 9 aa, Homo sapiens
  Table A; Target 69762; HLA-A*32:01; PNLDC1; ENSG00000146453; TAA
RQSVQQFTV

SEQ ID NO: 69763 - protein, 9 aa, Homo sapiens
  Table A; Target 69763; HLA-B*13:02; PNLDC1; ENSG00000146453; TAA
RQSVQQFTV

SEQ ID NO: 69764 - protein, 9 aa, Homo sapiens
  Table A; Target 69764; HLA-B*37:01; PNLDC1; ENSG00000146453; TAA
RQSVQQFTV

SEQ ID NO: 69765 - protein, 9 aa, Homo sapiens
  Table A; Target 69765; HLA-C*06:02; PNLDC1; ENSG00000146453; TAA
RQSVQQFTV

SEQ ID NO: 69766 - protein, 9 aa, Homo sapiens
  Table A; Target 69766; HLA-C*16:04; PNLDC1; ENSG00000146453; TAA
RQSVQQFTV

SEQ ID NO: 69767 - protein, 10 aa, Homo sapiens
  Table A; Target 69767; HLA-A*03:02; PNLDC1; ENSG00000146453; TAA
RSQFLLLTNK

SEQ ID NO: 69768 - protein, 10 aa, Homo sapiens
  Table A; Target 69768; HLA-A*11:01; PNLDC1; ENSG00000146453; TAA
RSQFLLLTNK

SEQ ID NO: 69769 - protein, 10 aa, Homo sapiens
  Table A; Target 69769; HLA-A*31:01; PNLDC1; ENSG00000146453; TAA
RSQFLLLTNK

SEQ ID NO: 69770 - protein, 10 aa, Homo sapiens
  Table A; Target 69770; HLA-B*27:02; PNLDC1; ENSG00000146453; TAA
RSQFLLLTNK

SEQ ID NO: 69771 - protein, 9 aa, Homo sapiens
  Table A; Target 69771; HLA-A*29:02; PNLDC1; ENSG00000146453; TAA
RVSNLSEVY

SEQ ID NO: 69772 - protein, 9 aa, Homo sapiens
  Table A; Target 69772; HLA-A*30:02; PNLDC1; ENSG00000146453; TAA
RVSNLSEVY

SEQ ID NO: 69773 - protein, 9 aa, Homo sapiens
  Table A; Target 69773; HLA-A*32:01; PNLDC1; ENSG00000146453; TAA
RVSNLSEVY

SEQ ID NO: 69774 - protein, 9 aa, Homo sapiens
  Table A; Target 69774; HLA-B*15:01; PNLDC1; ENSG00000146453; TAA
RVSNLSEVY

SEQ ID NO: 69775 - protein, 9 aa, Homo sapiens
  Table A; Target 69775; HLA-B*15:03; PNLDC1; ENSG00000146453; TAA
RVSNLSEVY

SEQ ID NO: 69776 - protein, 9 aa, Homo sapiens
  Table A; Target 69776; HLA-B*35:01; PNLDC1; ENSG00000146453; TAA
RVSNLSEVY

SEQ ID NO: 69777 - protein, 9 aa, Homo sapiens
  Table A; Target 69777; HLA-B*58:01; PNLDC1; ENSG00000146453; TAA
RVSNLSEVY

SEQ ID NO: 69778 - protein, 11 aa, Homo sapiens
  Table A; Target 69778; HLA-A*24:02; PNLDC1; ENSG00000146453; TAA
RWPGVSEQQVY

SEQ ID NO: 69779 - protein, 9 aa, Homo sapiens
  Table A; Target 69779; HLA-A*03:02; PNLDC1; ENSG00000146453; TAA
SAIEGEANK

SEQ ID NO: 69780 - protein, 9 aa, Homo sapiens
  Table A; Target 69780; HLA-A*11:01; PNLDC1; ENSG00000146453; TAA
SAIEGEANK

SEQ ID NO: 69781 - protein, 9 aa, Homo sapiens
  Table A; Target 69781; HLA-A*33:03; PNLDC1; ENSG00000146453; TAA
SAIEGEANK

SEQ ID NO: 69782 - protein, 9 aa, Homo sapiens
  Table A; Target 69782; HLA-A*68:01; PNLDC1; ENSG00000146453; TAA
SAIEGEANK

SEQ ID NO: 69783 - protein, 9 aa, Homo sapiens
  Table A; Target 69783; HLA-B*27:02; PNLDC1; ENSG00000146453; TAA
SAIEGEANK

SEQ ID NO: 69784 - protein, 9 aa, Homo sapiens
  Table A; Target 69784; HLA-B*27:05; PNLDC1; ENSG00000146453; TAA
SAIEGEANK

SEQ ID NO: 69785 - protein, 9 aa, Homo sapiens
  Table A; Target 69785; HLA-C*01:02; PNLDC1; ENSG00000146453; TAA
SAIEGEANK

SEQ ID NO: 69786 - protein, 9 aa, Homo sapiens
  Table A; Target 69786; HLA-C*03:03; PNLDC1; ENSG00000146453; TAA
SAIEGEANK

SEQ ID NO: 69787 - protein, 9 aa, Homo sapiens
  Table A; Target 69787; HLA-C*07:06; PNLDC1; ENSG00000146453; TAA
SAIEGEANK

SEQ ID NO: 69788 - protein, 9 aa, Homo sapiens
  Table A; Target 69788; HLA-C*16:01; PNLDC1; ENSG00000146453; TAA
SAIEGEANK

SEQ ID NO: 69789 - protein, 10 aa, Homo sapiens
  Table A; Target 69789; HLA-A*01:01; PNLDC1; ENSG00000146453; TAA
SAIEGEANKY

SEQ ID NO: 69790 - protein, 10 aa, Homo sapiens
  Table A; Target 69790; HLA-A*11:01; PNLDC1; ENSG00000146453; TAA
SAIEGEANKY

SEQ ID NO: 69791 - protein, 10 aa, Homo sapiens
  Table A; Target 69791; HLA-A*25:01; PNLDC1; ENSG00000146453; TAA
SAIEGEANKY

SEQ ID NO: 69792 - protein, 10 aa, Homo sapiens
  Table A; Target 69792; HLA-A*26:01; PNLDC1; ENSG00000146453; TAA
SAIEGEANKY

SEQ ID NO: 69793 - protein, 10 aa, Homo sapiens
  Table A; Target 69793; HLA-A*29:02; PNLDC1; ENSG00000146453; TAA
SAIEGEANKY

SEQ ID NO: 69794 - protein, 10 aa, Homo sapiens
  Table A; Target 69794; HLA-A*30:02; PNLDC1; ENSG00000146453; TAA
SAIEGEANKY

SEQ ID NO: 69795 - protein, 10 aa, Homo sapiens
  Table A; Target 69795; HLA-A*32:01; PNLDC1; ENSG00000146453; TAA
SAIEGEANKY

SEQ ID NO: 69796 - protein, 10 aa, Homo sapiens
  Table A; Target 69796; HLA-B*15:01; PNLDC1; ENSG00000146453; TAA
SAIEGEANKY

SEQ ID NO: 69797 - protein, 10 aa, Homo sapiens
  Table A; Target 69797; HLA-B*15:03; PNLDC1; ENSG00000146453; TAA
SAIEGEANKY

SEQ ID NO: 69798 - protein, 10 aa, Homo sapiens
  Table A; Target 69798; HLA-B*27:02; PNLDC1; ENSG00000146453; TAA
SAIEGEANKY

SEQ ID NO: 69799 - protein, 10 aa, Homo sapiens
  Table A; Target 69799; HLA-B*27:05; PNLDC1; ENSG00000146453; TAA
SAIEGEANKY

SEQ ID NO: 69800 - protein, 10 aa, Homo sapiens
  Table A; Target 69800; HLA-B*35:01; PNLDC1; ENSG00000146453; TAA
SAIEGEANKY

SEQ ID NO: 69801 - protein, 10 aa, Homo sapiens
  Table A; Target 69801; HLA-B*38:01; PNLDC1; ENSG00000146453; TAA
SAIEGEANKY

SEQ ID NO: 69802 - protein, 10 aa, Homo sapiens
  Table A; Target 69802; HLA-B*39:01; PNLDC1; ENSG00000146453; TAA
SAIEGEANKY

SEQ ID NO: 69803 - protein, 10 aa, Homo sapiens
  Table A; Target 69803; HLA-B*44:03; PNLDC1; ENSG00000146453; TAA
SAIEGEANKY

SEQ ID NO: 69804 - protein, 10 aa, Homo sapiens
  Table A; Target 69804; HLA-B*46:01; PNLDC1; ENSG00000146453; TAA
SAIEGEANKY

SEQ ID NO: 69805 - protein, 10 aa, Homo sapiens
  Table A; Target 69805; HLA-B*55:01; PNLDC1; ENSG00000146453; TAA
SAIEGEANKY

SEQ ID NO: 69806 - protein, 10 aa, Homo sapiens
  Table A; Target 69806; HLA-B*58:01; PNLDC1; ENSG00000146453; TAA
SAIEGEANKY

SEQ ID NO: 69807 - protein, 10 aa, Homo sapiens
  Table A; Target 69807; HLA-C*01:02; PNLDC1; ENSG00000146453; TAA
SAIEGEANKY

SEQ ID NO: 69808 - protein, 10 aa, Homo sapiens
  Table A; Target 69808; HLA-C*02:02; PNLDC1; ENSG00000146453; TAA
SAIEGEANKY

SEQ ID NO: 69809 - protein, 10 aa, Homo sapiens
  Table A; Target 69809; HLA-C*03:03; PNLDC1; ENSG00000146453; TAA
SAIEGEANKY

SEQ ID NO: 69810 - protein, 10 aa, Homo sapiens
  Table A; Target 69810; HLA-C*03:04; PNLDC1; ENSG00000146453; TAA
SAIEGEANKY

SEQ ID NO: 69811 - protein, 10 aa, Homo sapiens
  Table A; Target 69811; HLA-C*07:06; PNLDC1; ENSG00000146453; TAA
SAIEGEANKY

SEQ ID NO: 69812 - protein, 10 aa, Homo sapiens
  Table A; Target 69812; HLA-C*12:03; PNLDC1; ENSG00000146453; TAA
SAIEGEANKY

SEQ ID NO: 69813 - protein, 10 aa, Homo sapiens
  Table A; Target 69813; HLA-C*14:02; PNLDC1; ENSG00000146453; TAA
SAIEGEANKY

SEQ ID NO: 69814 - protein, 10 aa, Homo sapiens
  Table A; Target 69814; HLA-C*16:01; PNLDC1; ENSG00000146453; TAA
SAIEGEANKY

SEQ ID NO: 69815 - protein, 10 aa, Homo sapiens
  Table A; Target 69815; HLA-C*16:02; PNLDC1; ENSG00000146453; TAA
SAIEGEANKY

SEQ ID NO: 69816 - protein, 10 aa, Homo sapiens
  Table A; Target 69816; HLA-C*16:04; PNLDC1; ENSG00000146453; TAA
SAIEGEANKY

SEQ ID NO: 69817 - protein, 11 aa, Homo sapiens
  Table A; Target 69817; HLA-C*12:03; PNLDC1; ENSG00000146453; TAA
SAIEGEANKYI

SEQ ID NO: 69818 - protein, 11 aa, Homo sapiens
  Table A; Target 69818; HLA-C*16:02; PNLDC1; ENSG00000146453; TAA
SAIEGEANKYI

SEQ ID NO: 69819 - protein, 8 aa, Homo sapiens
  Table A; Target 69819; HLA-B*08:01; PNLDC1; ENSG00000146453; TAA
SARGFSVF

SEQ ID NO: 69820 - protein, 8 aa, Homo sapiens
  Table A; Target 69820; HLA-B*46:01; PNLDC1; ENSG00000146453; TAA
SARGFSVF

SEQ ID NO: 69821 - protein, 9 aa, Homo sapiens
  Table A; Target 69821; HLA-A*31:01; PNLDC1; ENSG00000146453; TAA
SARGFSVFF

SEQ ID NO: 69822 - protein, 9 aa, Homo sapiens
  Table A; Target 69822; HLA-B*57:01; PNLDC1; ENSG00000146453; TAA
SARGFSVFF

SEQ ID NO: 69823 - protein, 9 aa, Homo sapiens
  Table A; Target 69823; HLA-C*02:02; PNLDC1; ENSG00000146453; TAA
SARGFSVFF

SEQ ID NO: 69824 - protein, 8 aa, Homo sapiens
  Table A; Target 69824; HLA-B*18:01; PNLDC1; ENSG00000146453; TAA
SEFSFQAS

SEQ ID NO: 69825 - protein, 8 aa, Homo sapiens
  Table A; Target 69825; HLA-B*49:01; PNLDC1; ENSG00000146453; TAA
SEFSFQAS

SEQ ID NO: 69826 - protein, 9 aa, Homo sapiens
  Table A; Target 69826; HLA-B*49:01; PNLDC1; ENSG00000146453; TAA
SEFSFQASS

SEQ ID NO: 69827 - protein, 10 aa, Homo sapiens
  Table A; Target 69827; HLA-A*30:01; PNLDC1; ENSG00000146453; TAA
SEFSFQASSV

SEQ ID NO: 69828 - protein, 10 aa, Homo sapiens
  Table A; Target 69828; HLA-B*13:02; PNLDC1; ENSG00000146453; TAA
SEFSFQASSV

SEQ ID NO: 69829 - protein, 10 aa, Homo sapiens
  Table A; Target 69829; HLA-B*18:01; PNLDC1; ENSG00000146453; TAA
SEFSFQASSV

SEQ ID NO: 69830 - protein, 10 aa, Homo sapiens
  Table A; Target 69830; HLA-B*40:01; PNLDC1; ENSG00000146453; TAA
SEFSFQASSV

SEQ ID NO: 69831 - protein, 10 aa, Homo sapiens
  Table A; Target 69831; HLA-B*40:02; PNLDC1; ENSG00000146453; TAA
SEFSFQASSV

SEQ ID NO: 69832 - protein, 10 aa, Homo sapiens
  Table A; Target 69832; HLA-B*44:03; PNLDC1; ENSG00000146453; TAA
SEFSFQASSV

SEQ ID NO: 69833 - protein, 10 aa, Homo sapiens
  Table A; Target 69833; HLA-B*49:01; PNLDC1; ENSG00000146453; TAA
SEFSFQASSV

SEQ ID NO: 69834 - protein, 10 aa, Homo sapiens
  Table A; Target 69834; HLA-C*02:02; PNLDC1; ENSG00000146453; TAA
SEFSFQASSV

SEQ ID NO: 69835 - protein, 10 aa, Homo sapiens
  Table A; Target 69835; HLA-C*12:03; PNLDC1; ENSG00000146453; TAA
SEFSFQASSV

SEQ ID NO: 69836 - protein, 10 aa, Homo sapiens
  Table A; Target 69836; HLA-C*16:04; PNLDC1; ENSG00000146453; TAA
SEFSFQASSV

SEQ ID NO: 69837 - protein, 9 aa, Homo sapiens
  Table A; Target 69837; HLA-A*30:01; PNLDC1; ENSG00000146453; TAA
SEQQVYHKF

SEQ ID NO: 69838 - protein, 9 aa, Homo sapiens
  Table A; Target 69838; HLA-A*30:02; PNLDC1; ENSG00000146453; TAA
SEQQVYHKF

SEQ ID NO: 69839 - protein, 9 aa, Homo sapiens
  Table A; Target 69839; HLA-B*18:01; PNLDC1; ENSG00000146453; TAA
SEQQVYHKF

SEQ ID NO: 69840 - protein, 9 aa, Homo sapiens
  Table A; Target 69840; HLA-B*27:02; PNLDC1; ENSG00000146453; TAA
SEQQVYHKF

SEQ ID NO: 69841 - protein, 9 aa, Homo sapiens
  Table A; Target 69841; HLA-B*37:01; PNLDC1; ENSG00000146453; TAA
SEQQVYHKF

SEQ ID NO: 69842 - protein, 9 aa, Homo sapiens
  Table A; Target 69842; HLA-B*40:01; PNLDC1; ENSG00000146453; TAA
SEQQVYHKF

SEQ ID NO: 69843 - protein, 9 aa, Homo sapiens
  Table A; Target 69843; HLA-B*44:02; PNLDC1; ENSG00000146453; TAA
SEQQVYHKF

SEQ ID NO: 69844 - protein, 9 aa, Homo sapiens
  Table A; Target 69844; HLA-B*44:03; PNLDC1; ENSG00000146453; TAA
SEQQVYHKF

SEQ ID NO: 69845 - protein, 9 aa, Homo sapiens
  Table A; Target 69845; HLA-C*16:04; PNLDC1; ENSG00000146453; TAA
SEQQVYHKF

SEQ ID NO: 69846 - protein, 11 aa, Homo sapiens
  Table A; Target 69846; HLA-A*30:01; PNLDC1; ENSG00000146453; TAA
SEVYEVLNSDL

SEQ ID NO: 69847 - protein, 11 aa, Homo sapiens
  Table A; Target 69847; HLA-B*40:01; PNLDC1; ENSG00000146453; TAA
SEVYEVLNSDL

SEQ ID NO: 69848 - protein, 9 aa, Homo sapiens
  Table A; Target 69848; HLA-A*23:01; PNLDC1; ENSG00000146453; TAA
SFQASSVQF

SEQ ID NO: 69849 - protein, 9 aa, Homo sapiens
  Table A; Target 69849; HLA-A*24:02; PNLDC1; ENSG00000146453; TAA
SFQASSVQF

SEQ ID NO: 69850 - protein, 9 aa, Homo sapiens
  Table A; Target 69850; HLA-A*29:02; PNLDC1; ENSG00000146453; TAA
SFQASSVQF

SEQ ID NO: 69851 - protein, 9 aa, Homo sapiens
  Table A; Target 69851; HLA-B*15:01; PNLDC1; ENSG00000146453; TAA
SFQASSVQF

SEQ ID NO: 69852 - protein, 9 aa, Homo sapiens
  Table A; Target 69852; HLA-B*15:03; PNLDC1; ENSG00000146453; TAA
SFQASSVQF

SEQ ID NO: 69853 - protein, 9 aa, Homo sapiens
  Table A; Target 69853; HLA-C*01:02; PNLDC1; ENSG00000146453; TAA
SFQASSVQF

SEQ ID NO: 69854 - protein, 9 aa, Homo sapiens
  Table A; Target 69854; HLA-C*04:01; PNLDC1; ENSG00000146453; TAA
SFQASSVQF

SEQ ID NO: 69855 - protein, 9 aa, Homo sapiens
  Table A; Target 69855; HLA-C*07:04; PNLDC1; ENSG00000146453; TAA
SFQASSVQF

SEQ ID NO: 69856 - protein, 9 aa, Homo sapiens
  Table A; Target 69856; HLA-C*14:02; PNLDC1; ENSG00000146453; TAA
SFQASSVQF

SEQ ID NO: 69857 - protein, 8 aa, Homo sapiens
  Table A; Target 69857; HLA-B*51:01; PNLDC1; ENSG00000146453; TAA
SGPDYPSI

SEQ ID NO: 69858 - protein, 10 aa, Homo sapiens
  Table A; Target 69858; HLA-A*31:01; PNLDC1; ENSG00000146453; TAA
SGPEIVHASR

SEQ ID NO: 69859 - protein, 10 aa, Homo sapiens
  Table A; Target 69859; HLA-A*33:01; PNLDC1; ENSG00000146453; TAA
SGPEIVHASR

SEQ ID NO: 69860 - protein, 10 aa, Homo sapiens
  Table A; Target 69860; HLA-A*33:03; PNLDC1; ENSG00000146453; TAA
SGPEIVHASR

SEQ ID NO: 69861 - protein, 10 aa, Homo sapiens
  Table A; Target 69861; HLA-A*68:01; PNLDC1; ENSG00000146453; TAA
SGPEIVHASR

SEQ ID NO: 69862 - protein, 10 aa, Homo sapiens
  Table A; Target 69862; HLA-C*07:06; PNLDC1; ENSG00000146453; TAA
SGPEIVHASR

SEQ ID NO: 69863 - protein, 8 aa, Homo sapiens
  Table A; Target 69863; HLA-C*01:02; PNLDC1; ENSG00000146453; TAA
SGPQQISL

SEQ ID NO: 69864 - protein, 9 aa, Homo sapiens
  Table A; Target 69864; HLA-A*02:03; PNLDC1; ENSG00000146453; TAA
SIRPPILIL

SEQ ID NO: 69865 - protein, 9 aa, Homo sapiens
  Table A; Target 69865; HLA-A*02:04; PNLDC1; ENSG00000146453; TAA
SIRPPILIL

SEQ ID NO: 69866 - protein, 11 aa, Homo sapiens
  Table A; Target 69866; HLA-A*02:03; PNLDC1; ENSG00000146453; TAA
SIRPPILILSV

SEQ ID NO: 69867 - protein, 9 aa, Homo sapiens
  Table A; Target 69867; HLA-A*02:03; PNLDC1; ENSG00000146453; TAA
SLFDLPSEW

SEQ ID NO: 69868 - protein, 9 aa, Homo sapiens
  Table A; Target 69868; HLA-A*02:04; PNLDC1; ENSG00000146453; TAA
SLFDLPSEW

SEQ ID NO: 69869 - protein, 9 aa, Homo sapiens
  Table A; Target 69869; HLA-A*25:01; PNLDC1; ENSG00000146453; TAA
SLFDLPSEW

SEQ ID NO: 69870 - protein, 9 aa, Homo sapiens
  Table A; Target 69870; HLA-A*26:01; PNLDC1; ENSG00000146453; TAA
SLFDLPSEW

SEQ ID NO: 69871 - protein, 9 aa, Homo sapiens
  Table A; Target 69871; HLA-A*29:02; PNLDC1; ENSG00000146453; TAA
SLFDLPSEW

SEQ ID NO: 69872 - protein, 9 aa, Homo sapiens
  Table A; Target 69872; HLA-A*32:01; PNLDC1; ENSG00000146453; TAA
SLFDLPSEW

SEQ ID NO: 69873 - protein, 9 aa, Homo sapiens
  Table A; Target 69873; HLA-B*13:02; PNLDC1; ENSG00000146453; TAA
SLFDLPSEW

SEQ ID NO: 69874 - protein, 9 aa, Homo sapiens
  Table A; Target 69874; HLA-B*44:02; PNLDC1; ENSG00000146453; TAA
SLFDLPSEW

SEQ ID NO: 69875 - protein, 9 aa, Homo sapiens
  Table A; Target 69875; HLA-B*44:03; PNLDC1; ENSG00000146453; TAA
SLFDLPSEW

SEQ ID NO: 69876 - protein, 9 aa, Homo sapiens
  Table A; Target 69876; HLA-B*57:01; PNLDC1; ENSG00000146453; TAA
SLFDLPSEW

SEQ ID NO: 69877 - protein, 9 aa, Homo sapiens
  Table A; Target 69877; HLA-B*58:01; PNLDC1; ENSG00000146453; TAA
SLFDLPSEW

SEQ ID NO: 69878 - protein, 9 aa, Homo sapiens
  Table A; Target 69878; HLA-C*02:02; PNLDC1; ENSG00000146453; TAA
SLFDLPSEW

SEQ ID NO: 69879 - protein, 9 aa, Homo sapiens
  Table A; Target 69879; HLA-C*16:04; PNLDC1; ENSG00000146453; TAA
SLFDLPSEW

SEQ ID NO: 69880 - protein, 10 aa, Homo sapiens
  Table A; Target 69880; HLA-A*29:02; PNLDC1; ENSG00000146453; TAA
SLFDLPSEWY

SEQ ID NO: 69881 - protein, 11 aa, Homo sapiens
  Table A; Target 69881; HLA-A*02:01; PNLDC1; ENSG00000146453; TAA
SLFDLPSEWYL

SEQ ID NO: 69882 - protein, 11 aa, Homo sapiens
  Table A; Target 69882; HLA-A*02:03; PNLDC1; ENSG00000146453; TAA
SLFDLPSEWYL

SEQ ID NO: 69883 - protein, 11 aa, Homo sapiens
  Table A; Target 69883; HLA-A*02:04; PNLDC1; ENSG00000146453; TAA
SLFDLPSEWYL

SEQ ID NO: 69884 - protein, 11 aa, Homo sapiens
  Table A; Target 69884; HLA-A*02:07; PNLDC1; ENSG00000146453; TAA
SLFDLPSEWYL

SEQ ID NO: 69885 - protein, 9 aa, Homo sapiens
  Table A; Target 69885; HLA-A*02:01; PNLDC1; ENSG00000146453; TAA
SLFPVLIDT

SEQ ID NO: 69886 - protein, 9 aa, Homo sapiens
  Table A; Target 69886; HLA-A*02:03; PNLDC1; ENSG00000146453; TAA
SLFPVLIDT

SEQ ID NO: 69887 - protein, 9 aa, Homo sapiens
  Table A; Target 69887; HLA-A*02:04; PNLDC1; ENSG00000146453; TAA
SLFPVLIDT

SEQ ID NO: 69888 - protein, 10 aa, Homo sapiens
  Table A; Target 69888; HLA-A*03:01; PNLDC1; ENSG00000146453; TAA
SLFPVLIDTK

SEQ ID NO: 69889 - protein, 10 aa, Homo sapiens
  Table A; Target 69889; HLA-A*03:02; PNLDC1; ENSG00000146453; TAA
SLFPVLIDTK

SEQ ID NO: 69890 - protein, 10 aa, Homo sapiens
  Table A; Target 69890; HLA-A*11:01; PNLDC1; ENSG00000146453; TAA
SLFPVLIDTK

SEQ ID NO: 69891 - protein, 10 aa, Homo sapiens
  Table A; Target 69891; HLA-B*27:02; PNLDC1; ENSG00000146453; TAA
SLFPVLIDTK

SEQ ID NO: 69892 - protein, 9 aa, Homo sapiens
  Table A; Target 69892; HLA-A*02:01; PNLDC1; ENSG00000146453; TAA
SNLSEVYEV

SEQ ID NO: 69893 - protein, 9 aa, Homo sapiens
  Table A; Target 69893; HLA-B*13:02; PNLDC1; ENSG00000146453; TAA
SNLSGPQQI

SEQ ID NO: 69894 - protein, 9 aa, Homo sapiens
  Table A; Target 69894; HLA-B*35:03; PNLDC1; ENSG00000146453; TAA
SPDKDQIKV

SEQ ID NO: 69895 - protein, 9 aa, Homo sapiens
  Table A; Target 69895; HLA-B*55:01; PNLDC1; ENSG00000146453; TAA
SPDKDQIKV

SEQ ID NO: 69896 - protein, 9 aa, Homo sapiens
  Table A; Target 69896; HLA-C*05:01; PNLDC1; ENSG00000146453; TAA
SPDKDQIKV

SEQ ID NO: 69897 - protein, 9 aa, Homo sapiens
  Table A; Target 69897; HLA-C*07:02; PNLDC1; ENSG00000146453; TAA
SPDKDQIKV

SEQ ID NO: 69898 - protein, 10 aa, Homo sapiens
  Table A; Target 69898; HLA-B*07:02; PNLDC1; ENSG00000146453; TAA
SPDKDQIKVV

SEQ ID NO: 69899 - protein, 10 aa, Homo sapiens
  Table A; Target 69899; HLA-C*07:02; PNLDC1; ENSG00000146453; TAA
SPDKDQIKVV

SEQ ID NO: 69900 - protein, 8 aa, Homo sapiens
  Table A; Target 69900; HLA-B*07:02; PNLDC1; ENSG00000146453; TAA
SPNVNCLL

SEQ ID NO: 69901 - protein, 9 aa, Homo sapiens
  Table A; Target 69901; HLA-A*03:01; PNLDC1; ENSG00000146453; TAA
SQFLLLTNK

SEQ ID NO: 69902 - protein, 9 aa, Homo sapiens
  Table A; Target 69902; HLA-A*03:02; PNLDC1; ENSG00000146453; TAA
SQFLLLTNK

SEQ ID NO: 69903 - protein, 9 aa, Homo sapiens
  Table A; Target 69903; HLA-A*11:01; PNLDC1; ENSG00000146453; TAA
SQFLLLTNK

SEQ ID NO: 69904 - protein, 9 aa, Homo sapiens
  Table A; Target 69904; HLA-A*31:01; PNLDC1; ENSG00000146453; TAA
SQFLLLTNK

SEQ ID NO: 69905 - protein, 9 aa, Homo sapiens
  Table A; Target 69905; HLA-B*13:02; PNLDC1; ENSG00000146453; TAA
SQFLLLTNK

SEQ ID NO: 69906 - protein, 9 aa, Homo sapiens
  Table A; Target 69906; HLA-B*27:02; PNLDC1; ENSG00000146453; TAA
SQFLLLTNK

SEQ ID NO: 69907 - protein, 9 aa, Homo sapiens
  Table A; Target 69907; HLA-B*27:05; PNLDC1; ENSG00000146453; TAA
SQFLLLTNK

SEQ ID NO: 69908 - protein, 9 aa, Homo sapiens
  Table A; Target 69908; HLA-C*07:06; PNLDC1; ENSG00000146453; TAA
SQFLLLTNK

SEQ ID NO: 69909 - protein, 10 aa, Homo sapiens
  Table A; Target 69909; HLA-B*15:01; PNLDC1; ENSG00000146453; TAA
SQFLLLTNKF

SEQ ID NO: 69910 - protein, 10 aa, Homo sapiens
  Table A; Target 69910; HLA-B*44:02; PNLDC1; ENSG00000146453; TAA
SQFLLLTNKF

SEQ ID NO: 69911 - protein, 10 aa, Homo sapiens
  Table A; Target 69911; HLA-B*44:03; PNLDC1; ENSG00000146453; TAA
SQFLLLTNKF

SEQ ID NO: 69912 - protein, 10 aa, Homo sapiens
  Table A; Target 69912; HLA-C*02:02; PNLDC1; ENSG00000146453; TAA
SQFLLLTNKF

SEQ ID NO: 69913 - protein, 10 aa, Homo sapiens
  Table A; Target 69913; HLA-C*16:04; PNLDC1; ENSG00000146453; TAA
SQFLLLTNKF

SEQ ID NO: 69914 - protein, 9 aa, Homo sapiens
  Table A; Target 69914; HLA-C*16:04; PNLDC1; ENSG00000146453; TAA
SSFPQYLDV

SEQ ID NO: 69915 - protein, 9 aa, Homo sapiens
  Table A; Target 69915; HLA-A*01:01; PNLDC1; ENSG00000146453; TAA
SSVQFLNQY

SEQ ID NO: 69916 - protein, 9 aa, Homo sapiens
  Table A; Target 69916; HLA-A*25:01; PNLDC1; ENSG00000146453; TAA
SSVQFLNQY

SEQ ID NO: 69917 - protein, 9 aa, Homo sapiens
  Table A; Target 69917; HLA-A*26:01; PNLDC1; ENSG00000146453; TAA
SSVQFLNQY

SEQ ID NO: 69918 - protein, 9 aa, Homo sapiens
  Table A; Target 69918; HLA-A*29:02; PNLDC1; ENSG00000146453; TAA
SSVQFLNQY

SEQ ID NO: 69919 - protein, 9 aa, Homo sapiens
  Table A; Target 69919; HLA-A*30:02; PNLDC1; ENSG00000146453; TAA
SSVQFLNQY

SEQ ID NO: 69920 - protein, 9 aa, Homo sapiens
  Table A; Target 69920; HLA-A*32:01; PNLDC1; ENSG00000146453; TAA
SSVQFLNQY

SEQ ID NO: 69921 - protein, 9 aa, Homo sapiens
  Table A; Target 69921; HLA-B*15:01; PNLDC1; ENSG00000146453; TAA
SSVQFLNQY

SEQ ID NO: 69922 - protein, 9 aa, Homo sapiens
  Table A; Target 69922; HLA-B*15:03; PNLDC1; ENSG00000146453; TAA
SSVQFLNQY

SEQ ID NO: 69923 - protein, 9 aa, Homo sapiens
  Table A; Target 69923; HLA-B*18:01; PNLDC1; ENSG00000146453; TAA
SSVQFLNQY

SEQ ID NO: 69924 - protein, 9 aa, Homo sapiens
  Table A; Target 69924; HLA-B*44:03; PNLDC1; ENSG00000146453; TAA
SSVQFLNQY

SEQ ID NO: 69925 - protein, 9 aa, Homo sapiens
  Table A; Target 69925; HLA-B*46:01; PNLDC1; ENSG00000146453; TAA
SSVQFLNQY

SEQ ID NO: 69926 - protein, 9 aa, Homo sapiens
  Table A; Target 69926; HLA-B*58:01; PNLDC1; ENSG00000146453; TAA
SSVQFLNQY

SEQ ID NO: 69927 - protein, 9 aa, Homo sapiens
  Table A; Target 69927; HLA-C*02:02; PNLDC1; ENSG00000146453; TAA
SSVQFLNQY

SEQ ID NO: 69928 - protein, 9 aa, Homo sapiens
  Table A; Target 69928; HLA-C*16:01; PNLDC1; ENSG00000146453; TAA
SSVQFLNQY

SEQ ID NO: 69929 - protein, 9 aa, Homo sapiens
  Table A; Target 69929; HLA-C*16:04; PNLDC1; ENSG00000146453; TAA
SSVQFLNQY

SEQ ID NO: 69930 - protein, 8 aa, Homo sapiens
  Table A; Target 69930; HLA-A*68:02; PNLDC1; ENSG00000146453; TAA
SVFFQMLV

SEQ ID NO: 69931 - protein, 9 aa, Homo sapiens
  Table A; Target 69931; HLA-A*03:01; PNLDC1; ENSG00000146453; TAA
SVFFQMLVK

SEQ ID NO: 69932 - protein, 9 aa, Homo sapiens
  Table A; Target 69932; HLA-A*03:02; PNLDC1; ENSG00000146453; TAA
SVFFQMLVK

SEQ ID NO: 69933 - protein, 9 aa, Homo sapiens
  Table A; Target 69933; HLA-A*11:01; PNLDC1; ENSG00000146453; TAA
SVFFQMLVK

SEQ ID NO: 69934 - protein, 10 aa, Homo sapiens
  Table A; Target 69934; HLA-A*68:02; PNLDC1; ENSG00000146453; TAA
SVFFQMLVKA

SEQ ID NO: 69935 - protein, 10 aa, Homo sapiens
  Table A; Target 69935; HLA-B*56:01; PNLDC1; ENSG00000146453; TAA
SVFSAIEGEA

SEQ ID NO: 69936 - protein, 9 aa, Homo sapiens
  Table A; Target 69936; HLA-A*02:04; PNLDC1; ENSG00000146453; TAA
SVLLKVAHL

SEQ ID NO: 69937 - protein, 9 aa, Homo sapiens
  Table A; Target 69937; HLA-B*08:01; PNLDC1; ENSG00000146453; TAA
SVLLKVAHL

SEQ ID NO: 69938 - protein, 8 aa, Homo sapiens
  Table A; Target 69938; HLA-A*30:02; PNLDC1; ENSG00000146453; TAA
SVQFLNQY

SEQ ID NO: 69939 - protein, 8 aa, Homo sapiens
  Table A; Target 69939; HLA-B*15:01; PNLDC1; ENSG00000146453; TAA
SVQFLNQY

SEQ ID NO: 69940 - protein, 8 aa, Homo sapiens
  Table A; Target 69940; HLA-C*16:02; PNLDC1; ENSG00000146453; TAA
SVQFLNQY

SEQ ID NO: 69941 - protein, 9 aa, Homo sapiens
  Table A; Target 69941; HLA-A*23:01; PNLDC1; ENSG00000146453; TAA
SYDQFKQNI

SEQ ID NO: 69942 - protein, 9 aa, Homo sapiens
  Table A; Target 69942; HLA-A*24:02; PNLDC1; ENSG00000146453; TAA
SYDQFKQNI

SEQ ID NO: 69943 - protein, 9 aa, Homo sapiens
  Table A; Target 69943; HLA-B*35:03; PNLDC1; ENSG00000146453; TAA
SYDQFKQNI

SEQ ID NO: 69944 - protein, 9 aa, Homo sapiens
  Table A; Target 69944; HLA-B*38:01; PNLDC1; ENSG00000146453; TAA
SYDQFKQNI

SEQ ID NO: 69945 - protein, 9 aa, Homo sapiens
  Table A; Target 69945; HLA-C*04:01; PNLDC1; ENSG00000146453; TAA
SYDQFKQNI

SEQ ID NO: 69946 - protein, 9 aa, Homo sapiens
  Table A; Target 69946; HLA-B*51:01; PNLDC1; ENSG00000146453; TAA
TAWALLAFI

SEQ ID NO: 69947 - protein, 8 aa, Homo sapiens
  Table A; Target 69947; HLA-B*13:02; PNLDC1; ENSG00000146453; TAA
TGFQAFEV

SEQ ID NO: 69948 - protein, 8 aa, Homo sapiens
  Table A; Target 69948; HLA-B*51:01; PNLDC1; ENSG00000146453; TAA
TGFQAFEV

SEQ ID NO: 69949 - protein, 9 aa, Homo sapiens
  Table A; Target 69949; HLA-B*15:03; PNLDC1; ENSG00000146453; TAA
TKCPHEAAY

SEQ ID NO: 69950 - protein, 10 aa, Homo sapiens
  Table A; Target 69950; HLA-A*02:07; PNLDC1; ENSG00000146453; TAA
TLPGITGFQA

SEQ ID NO: 69951 - protein, 11 aa, Homo sapiens
  Table A; Target 69951; HLA-A*02:07; PNLDC1; ENSG00000146453; TAA
TLPGITGFQAF

SEQ ID NO: 69952 - protein, 11 aa, Homo sapiens
  Table A; Target 69952; HLA-A*24:02; PNLDC1; ENSG00000146453; TAA
TLPGITGFQAF

SEQ ID NO: 69953 - protein, 8 aa, Homo sapiens
  Table A; Target 69953; HLA-B*27:05; PNLDC1; ENSG00000146453; TAA
TRQSVQQF

SEQ ID NO: 69954 - protein, 8 aa, Homo sapiens
  Table A; Target 69954; HLA-B*37:01; PNLDC1; ENSG00000146453; TAA
TRQSVQQF

SEQ ID NO: 69955 - protein, 8 aa, Homo sapiens
  Table A; Target 69955; HLA-B*39:01; PNLDC1; ENSG00000146453; TAA
TRQSVQQF

SEQ ID NO: 69956 - protein, 9 aa, Homo sapiens
  Table A; Target 69956; HLA-C*06:02; PNLDC1; ENSG00000146453; TAA
TRQSVQQFT

SEQ ID NO: 69957 - protein, 10 aa, Homo sapiens
  Table A; Target 69957; HLA-B*27:05; PNLDC1; ENSG00000146453; TAA
TRQSVQQFTV

SEQ ID NO: 69958 - protein, 10 aa, Homo sapiens
  Table A; Target 69958; HLA-A*25:01; PNLDC1; ENSG00000146453; TAA
TTFGILDSEF

SEQ ID NO: 69959 - protein, 10 aa, Homo sapiens
  Table A; Target 69959; HLA-A*26:01; PNLDC1; ENSG00000146453; TAA
TTFGILDSEF

SEQ ID NO: 69960 - protein, 10 aa, Homo sapiens
  Table A; Target 69960; HLA-A*68:02; PNLDC1; ENSG00000146453; TAA
TTFGILDSEF

SEQ ID NO: 69961 - protein, 9 aa, Homo sapiens
  Table A; Target 69961; HLA-A*26:01; PNLDC1; ENSG00000146453; TAA
TVCQIGLSV

SEQ ID NO: 69962 - protein, 9 aa, Homo sapiens
  Table A; Target 69962; HLA-A*68:02; PNLDC1; ENSG00000146453; TAA
TVCQIGLSV

SEQ ID NO: 69963 - protein, 9 aa, Homo sapiens
  Table A; Target 69963; HLA-B*13:02; PNLDC1; ENSG00000146453; TAA
TVCQIGLSV

SEQ ID NO: 69964 - protein, 10 aa, Homo sapiens
  Table A; Target 69964; HLA-A*25:01; PNLDC1; ENSG00000146453; TAA
TVCQIGLSVF

SEQ ID NO: 69965 - protein, 10 aa, Homo sapiens
  Table A; Target 69965; HLA-A*26:01; PNLDC1; ENSG00000146453; TAA
TVCQIGLSVF

SEQ ID NO: 69966 - protein, 10 aa, Homo sapiens
  Table A; Target 69966; HLA-C*07:04; PNLDC1; ENSG00000146453; TAA
TVCQIGLSVF

SEQ ID NO: 69967 - protein, 11 aa, Homo sapiens
  Table A; Target 69967; HLA-A*03:01; PNLDC1; ENSG00000146453; TAA
TVLKDEGVVVK

SEQ ID NO: 69968 - protein, 11 aa, Homo sapiens
  Table A; Target 69968; HLA-A*03:02; PNLDC1; ENSG00000146453; TAA
TVLKDEGVVVK

SEQ ID NO: 69969 - protein, 11 aa, Homo sapiens
  Table A; Target 69969; HLA-A*11:01; PNLDC1; ENSG00000146453; TAA
TVLKDEGVVVK

SEQ ID NO: 69970 - protein, 11 aa, Homo sapiens
  Table A; Target 69970; HLA-A*31:01; PNLDC1; ENSG00000146453; TAA
TVLKDEGVVVK

SEQ ID NO: 69971 - protein, 11 aa, Homo sapiens
  Table A; Target 69971; HLA-A*68:01; PNLDC1; ENSG00000146453; TAA
TVLKDEGVVVK

SEQ ID NO: 69972 - protein, 11 aa, Homo sapiens
  Table A; Target 69972; HLA-C*07:06; PNLDC1; ENSG00000146453; TAA
TVLKDEGVVVK

SEQ ID NO: 69973 - protein, 9 aa, Homo sapiens
  Table A; Target 69973; HLA-B*13:02; PNLDC1; ENSG00000146453; TAA
VAHLLLQKI

SEQ ID NO: 69974 - protein, 9 aa, Homo sapiens
  Table A; Target 69974; HLA-B*51:01; PNLDC1; ENSG00000146453; TAA
VAHLLLQKI

SEQ ID NO: 69975 - protein, 9 aa, Homo sapiens
  Table A; Target 69975; HLA-B*15:01; PNLDC1; ENSG00000146453; TAA
VCQIGLSVF

SEQ ID NO: 69976 - protein, 9 aa, Homo sapiens
  Table A; Target 69976; HLA-B*46:01; PNLDC1; ENSG00000146453; TAA
VCQIGLSVF

SEQ ID NO: 69977 - protein, 9 aa, Homo sapiens
  Table A; Target 69977; HLA-C*04:01; PNLDC1; ENSG00000146453; TAA
VCQIGLSVF

SEQ ID NO: 69978 - protein, 10 aa, Homo sapiens
  Table A; Target 69978; HLA-C*07:01; PNLDC1; ENSG00000146453; TAA
VCQIGLSVFS

SEQ ID NO: 69979 - protein, 9 aa, Homo sapiens
  Table A; Target 69979; HLA-C*14:02; PNLDC1; ENSG00000146453; TAA
VFSAIEGEA

SEQ ID NO: 69980 - protein, 11 aa, Homo sapiens
  Table A; Target 69980; HLA-B*27:02; PNLDC1; ENSG00000146453; TAA
VFSAIEGEANK

SEQ ID NO: 69981 - protein, 8 aa, Homo sapiens
  Table A; Target 69981; HLA-C*05:01; PNLDC1; ENSG00000146453; TAA
VIDEVTRW

SEQ ID NO: 69982 - protein, 9 aa, Homo sapiens
  Table A; Target 69982; HLA-A*02:07; PNLDC1; ENSG00000146453; TAA
VIDEVTRWL

SEQ ID NO: 69983 - protein, 11 aa, Homo sapiens
  Table A; Target 69983; HLA-A*02:07; PNLDC1; ENSG00000146453; TAA
VIDEVTRWLEL

SEQ ID NO: 69984 - protein, 9 aa, Homo sapiens
  Table A; Target 69984; HLA-A*02:01; PNLDC1; ENSG00000146453; TAA
VLAPYVNQV

SEQ ID NO: 69985 - protein, 9 aa, Homo sapiens
  Table A; Target 69985; HLA-A*02:03; PNLDC1; ENSG00000146453; TAA
VLAPYVNQV

SEQ ID NO: 69986 - protein, 9 aa, Homo sapiens
  Table A; Target 69986; HLA-A*02:04; PNLDC1; ENSG00000146453; TAA
VLAPYVNQV

SEQ ID NO: 69987 - protein, 9 aa, Homo sapiens
  Table A; Target 69987; HLA-A*02:07; PNLDC1; ENSG00000146453; TAA
VLAPYVNQV

SEQ ID NO: 69988 - protein, 9 aa, Homo sapiens
  Table A; Target 69988; HLA-A*03:01; PNLDC1; ENSG00000146453; TAA
VLAPYVNQV

SEQ ID NO: 69989 - protein, 9 aa, Homo sapiens
  Table A; Target 69989; HLA-A*03:02; PNLDC1; ENSG00000146453; TAA
VLAPYVNQV

SEQ ID NO: 69990 - protein, 9 aa, Homo sapiens
  Table A; Target 69990; HLA-A*23:01; PNLDC1; ENSG00000146453; TAA
VLAPYVNQV

SEQ ID NO: 69991 - protein, 9 aa, Homo sapiens
  Table A; Target 69991; HLA-A*24:02; PNLDC1; ENSG00000146453; TAA
VLAPYVNQV

SEQ ID NO: 69992 - protein, 9 aa, Homo sapiens
  Table A; Target 69992; HLA-A*30:01; PNLDC1; ENSG00000146453; TAA
VLAPYVNQV

SEQ ID NO: 69993 - protein, 9 aa, Homo sapiens
  Table A; Target 69993; HLA-A*32:01; PNLDC1; ENSG00000146453; TAA
VLAPYVNQV

SEQ ID NO: 69994 - protein, 9 aa, Homo sapiens
  Table A; Target 69994; HLA-A*68:02; PNLDC1; ENSG00000146453; TAA
VLAPYVNQV

SEQ ID NO: 69995 - protein, 9 aa, Homo sapiens
  Table A; Target 69995; HLA-B*13:02; PNLDC1; ENSG00000146453; TAA
VLAPYVNQV

SEQ ID NO: 69996 - protein, 9 aa, Homo sapiens
  Table A; Target 69996; HLA-B*15:01; PNLDC1; ENSG00000146453; TAA
VLAPYVNQV

SEQ ID NO: 69997 - protein, 9 aa, Homo sapiens
  Table A; Target 69997; HLA-B*27:05; PNLDC1; ENSG00000146453; TAA
VLAPYVNQV

SEQ ID NO: 69998 - protein, 9 aa, Homo sapiens
  Table A; Target 69998; HLA-B*40:02; PNLDC1; ENSG00000146453; TAA
VLAPYVNQV

SEQ ID NO: 69999 - protein, 9 aa, Homo sapiens
  Table A; Target 69999; HLA-B*46:01; PNLDC1; ENSG00000146453; TAA
VLAPYVNQV

SEQ ID NO: 70000 - protein, 9 aa, Homo sapiens
  Table A; Target 70000; HLA-B*49:01; PNLDC1; ENSG00000146453; TAA
VLAPYVNQV

SEQ ID NO: 70001 - protein, 9 aa, Homo sapiens
  Table A; Target 70001; HLA-B*55:01; PNLDC1; ENSG00000146453; TAA
VLAPYVNQV

SEQ ID NO: 70002 - protein, 9 aa, Homo sapiens
  Table A; Target 70002; HLA-C*01:02; PNLDC1; ENSG00000146453; TAA
VLAPYVNQV

SEQ ID NO: 70003 - protein, 9 aa, Homo sapiens
  Table A; Target 70003; HLA-C*02:02; PNLDC1; ENSG00000146453; TAA
VLAPYVNQV

SEQ ID NO: 70004 - protein, 9 aa, Homo sapiens
  Table A; Target 70004; HLA-C*06:02; PNLDC1; ENSG00000146453; TAA
VLAPYVNQV

SEQ ID NO: 70005 - protein, 9 aa, Homo sapiens
  Table A; Target 70005; HLA-C*07:04; PNLDC1; ENSG00000146453; TAA
VLAPYVNQV

SEQ ID NO: 70006 - protein, 9 aa, Homo sapiens
  Table A; Target 70006; HLA-C*12:03; PNLDC1; ENSG00000146453; TAA
VLAPYVNQV

SEQ ID NO: 70007 - protein, 9 aa, Homo sapiens
  Table A; Target 70007; HLA-C*16:02; PNLDC1; ENSG00000146453; TAA
VLAPYVNQV

SEQ ID NO: 70008 - protein, 9 aa, Homo sapiens
  Table A; Target 70008; HLA-C*16:04; PNLDC1; ENSG00000146453; TAA
VLAPYVNQV

SEQ ID NO: 70009 - protein, 10 aa, Homo sapiens
  Table A; Target 70009; HLA-C*06:02; PNLDC1; ENSG00000146453; TAA
VLAPYVNQVN

SEQ ID NO: 70010 - protein, 10 aa, Homo sapiens
  Table A; Target 70010; HLA-C*07:01; PNLDC1; ENSG00000146453; TAA
VLAPYVNQVN

SEQ ID NO: 70011 - protein, 11 aa, Homo sapiens
  Table A; Target 70011; HLA-A*02:01; PNLDC1; ENSG00000146453; TAA
VLAPYVNQVNL

SEQ ID NO: 70012 - protein, 11 aa, Homo sapiens
  Table A; Target 70012; HLA-A*02:04; PNLDC1; ENSG00000146453; TAA
VLAPYVNQVNL

SEQ ID NO: 70013 - protein, 8 aa, Homo sapiens
  Table A; Target 70013; HLA-A*02:03; PNLDC1; ENSG00000146453; TAA
VLIDTKSV

SEQ ID NO: 70014 - protein, 9 aa, Homo sapiens
  Table A; Target 70014; HLA-B*46:01; PNLDC1; ENSG00000146453; TAA
VLIDTKSVT

SEQ ID NO: 70015 - protein, 10 aa, Homo sapiens
  Table A; Target 70015; HLA-A*03:01; PNLDC1; ENSG00000146453; TAA
VLIDTKSVTK

SEQ ID NO: 70016 - protein, 10 aa, Homo sapiens
  Table A; Target 70016; HLA-A*03:02; PNLDC1; ENSG00000146453; TAA
VLIDTKSVTK

SEQ ID NO: 70017 - protein, 10 aa, Homo sapiens
  Table A; Target 70017; HLA-A*11:01; PNLDC1; ENSG00000146453; TAA
VLIDTKSVTK

SEQ ID NO: 70018 - protein, 10 aa, Homo sapiens
  Table A; Target 70018; HLA-B*46:01; PNLDC1; ENSG00000146453; TAA
VLIDTKSVTK

SEQ ID NO: 70019 - protein, 9 aa, Homo sapiens
  Table A; Target 70019; HLA-A*02:01; PNLDC1; ENSG00000146453; TAA
VLKDEGVVV

SEQ ID NO: 70020 - protein, 9 aa, Homo sapiens
  Table A; Target 70020; HLA-A*02:03; PNLDC1; ENSG00000146453; TAA
VLKDEGVVV

SEQ ID NO: 70021 - protein, 9 aa, Homo sapiens
  Table A; Target 70021; HLA-A*02:04; PNLDC1; ENSG00000146453; TAA
VLKDEGVVV

SEQ ID NO: 70022 - protein, 9 aa, Homo sapiens
  Table A; Target 70022; HLA-A*02:07; PNLDC1; ENSG00000146453; TAA
VLKDEGVVV

SEQ ID NO: 70023 - protein, 9 aa, Homo sapiens
  Table A; Target 70023; HLA-A*23:01; PNLDC1; ENSG00000146453; TAA
VLKDEGVVV

SEQ ID NO: 70024 - protein, 9 aa, Homo sapiens
  Table A; Target 70024; HLA-A*30:01; PNLDC1; ENSG00000146453; TAA
VLKDEGVVV

SEQ ID NO: 70025 - protein, 9 aa, Homo sapiens
  Table A; Target 70025; HLA-A*32:01; PNLDC1; ENSG00000146453; TAA
VLKDEGVVV

SEQ ID NO: 70026 - protein, 9 aa, Homo sapiens
  Table A; Target 70026; HLA-B*08:01; PNLDC1; ENSG00000146453; TAA
VLKDEGVVV

SEQ ID NO: 70027 - protein, 9 aa, Homo sapiens
  Table A; Target 70027; HLA-B*13:02; PNLDC1; ENSG00000146453; TAA
VLKDEGVVV

SEQ ID NO: 70028 - protein, 9 aa, Homo sapiens
  Table A; Target 70028; HLA-B*15:01; PNLDC1; ENSG00000146453; TAA
VLKDEGVVV

SEQ ID NO: 70029 - protein, 9 aa, Homo sapiens
  Table A; Target 70029; HLA-B*15:03; PNLDC1; ENSG00000146453; TAA
VLKDEGVVV

SEQ ID NO: 70030 - protein, 9 aa, Homo sapiens
  Table A; Target 70030; HLA-B*40:02; PNLDC1; ENSG00000146453; TAA
VLKDEGVVV

SEQ ID NO: 70031 - protein, 9 aa, Homo sapiens
  Table A; Target 70031; HLA-B*46:01; PNLDC1; ENSG00000146453; TAA
VLKDEGVVV

SEQ ID NO: 70032 - protein, 9 aa, Homo sapiens
  Table A; Target 70032; HLA-B*55:01; PNLDC1; ENSG00000146453; TAA
VLKDEGVVV

SEQ ID NO: 70033 - protein, 9 aa, Homo sapiens
  Table A; Target 70033; HLA-C*01:02; PNLDC1; ENSG00000146453; TAA
VLKDEGVVV

SEQ ID NO: 70034 - protein, 9 aa, Homo sapiens
  Table A; Target 70034; HLA-C*02:02; PNLDC1; ENSG00000146453; TAA
VLKDEGVVV

SEQ ID NO: 70035 - protein, 9 aa, Homo sapiens
  Table A; Target 70035; HLA-C*03:04; PNLDC1; ENSG00000146453; TAA
VLKDEGVVV

SEQ ID NO: 70036 - protein, 9 aa, Homo sapiens
  Table A; Target 70036; HLA-C*05:01; PNLDC1; ENSG00000146453; TAA
VLKDEGVVV

SEQ ID NO: 70037 - protein, 9 aa, Homo sapiens
  Table A; Target 70037; HLA-C*07:04; PNLDC1; ENSG00000146453; TAA
VLKDEGVVV

SEQ ID NO: 70038 - protein, 9 aa, Homo sapiens
  Table A; Target 70038; HLA-C*12:03; PNLDC1; ENSG00000146453; TAA
VLKDEGVVV

SEQ ID NO: 70039 - protein, 9 aa, Homo sapiens
  Table A; Target 70039; HLA-C*14:02; PNLDC1; ENSG00000146453; TAA
VLKDEGVVV

SEQ ID NO: 70040 - protein, 9 aa, Homo sapiens
  Table A; Target 70040; HLA-C*16:02; PNLDC1; ENSG00000146453; TAA
VLKDEGVVV

SEQ ID NO: 70041 - protein, 10 aa, Homo sapiens
  Table A; Target 70041; HLA-A*03:01; PNLDC1; ENSG00000146453; TAA
VLKDEGVVVK

SEQ ID NO: 70042 - protein, 10 aa, Homo sapiens
  Table A; Target 70042; HLA-A*03:02; PNLDC1; ENSG00000146453; TAA
VLKDEGVVVK

SEQ ID NO: 70043 - protein, 10 aa, Homo sapiens
  Table A; Target 70043; HLA-A*11:01; PNLDC1; ENSG00000146453; TAA
VLKDEGVVVK

SEQ ID NO: 70044 - protein, 11 aa, Homo sapiens
  Table A; Target 70044; HLA-A*03:01; PNLDC1; ENSG00000146453; TAA
VLKDEGVVVKK

SEQ ID NO: 70045 - protein, 11 aa, Homo sapiens
  Table A; Target 70045; HLA-A*03:02; PNLDC1; ENSG00000146453; TAA
VLKDEGVVVKK

SEQ ID NO: 70046 - protein, 11 aa, Homo sapiens
  Table A; Target 70046; HLA-A*11:01; PNLDC1; ENSG00000146453; TAA
VLKDEGVVVKK

SEQ ID NO: 70047 - protein, 11 aa, Homo sapiens
  Table A; Target 70047; HLA-A*31:01; PNLDC1; ENSG00000146453; TAA
VLKDEGVVVKK

SEQ ID NO: 70048 - protein, 11 aa, Homo sapiens
  Table A; Target 70048; HLA-A*33:01; PNLDC1; ENSG00000146453; TAA
VLKDEGVVVKK

SEQ ID NO: 70049 - protein, 8 aa, Homo sapiens
  Table A; Target 70049; HLA-A*02:04; PNLDC1; ENSG00000146453; TAA
VLLKVAHL

SEQ ID NO: 70050 - protein, 9 aa, Homo sapiens
  Table A; Target 70050; HLA-A*02:01; PNLDC1; ENSG00000146453; TAA
VLLKVAHLL

SEQ ID NO: 70051 - protein, 9 aa, Homo sapiens
  Table A; Target 70051; HLA-A*02:04; PNLDC1; ENSG00000146453; TAA
VLLKVAHLL

SEQ ID NO: 70052 - protein, 9 aa, Homo sapiens
  Table A; Target 70052; HLA-A*02:07; PNLDC1; ENSG00000146453; TAA
VLLKVAHLL

SEQ ID NO: 70053 - protein, 9 aa, Homo sapiens
  Table A; Target 70053; HLA-A*23:01; PNLDC1; ENSG00000146453; TAA
VLLKVAHLL

SEQ ID NO: 70054 - protein, 9 aa, Homo sapiens
  Table A; Target 70054; HLA-A*24:02; PNLDC1; ENSG00000146453; TAA
VLLKVAHLL

SEQ ID NO: 70055 - protein, 9 aa, Homo sapiens
  Table A; Target 70055; HLA-A*02:01; PNLDC1; ENSG00000146453; TAA
VLNSDLNPT

SEQ ID NO: 70056 - protein, 10 aa, Homo sapiens
  Table A; Target 70056; HLA-A*01:01; PNLDC1; ENSG00000146453; TAA
VLNSDLNPTK

SEQ ID NO: 70057 - protein, 10 aa, Homo sapiens
  Table A; Target 70057; HLA-A*03:01; PNLDC1; ENSG00000146453; TAA
VLNSDLNPTK

SEQ ID NO: 70058 - protein, 10 aa, Homo sapiens
  Table A; Target 70058; HLA-A*03:02; PNLDC1; ENSG00000146453; TAA
VLNSDLNPTK

SEQ ID NO: 70059 - protein, 10 aa, Homo sapiens
  Table A; Target 70059; HLA-A*11:01; PNLDC1; ENSG00000146453; TAA
VLNSDLNPTK

SEQ ID NO: 70060 - protein, 10 aa, Homo sapiens
  Table A; Target 70060; HLA-A*30:02; PNLDC1; ENSG00000146453; TAA
VLNSDLNPTK

SEQ ID NO: 70061 - protein, 10 aa, Homo sapiens
  Table A; Target 70061; HLA-A*32:01; PNLDC1; ENSG00000146453; TAA
VLNSDLNPTK

SEQ ID NO: 70062 - protein, 10 aa, Homo sapiens
  Table A; Target 70062; HLA-B*27:02; PNLDC1; ENSG00000146453; TAA
VLNSDLNPTK

SEQ ID NO: 70063 - protein, 10 aa, Homo sapiens
  Table A; Target 70063; HLA-B*27:05; PNLDC1; ENSG00000146453; TAA
VLNSDLNPTK

SEQ ID NO: 70064 - protein, 10 aa, Homo sapiens
  Table A; Target 70064; HLA-C*06:02; PNLDC1; ENSG00000146453; TAA
VLNSDLNPTK

SEQ ID NO: 70065 - protein, 9 aa, Homo sapiens
  Table A; Target 70065; HLA-A*02:03; PNLDC1; ENSG00000146453; TAA
VLRQALPNI

SEQ ID NO: 70066 - protein, 9 aa, Homo sapiens
  Table A; Target 70066; HLA-A*02:04; PNLDC1; ENSG00000146453; TAA
VLRQALPNI

SEQ ID NO: 70067 - protein, 9 aa, Homo sapiens
  Table A; Target 70067; HLA-A*01:01; PNLDC1; ENSG00000146453; TAA
VPESSFPQY

SEQ ID NO: 70068 - protein, 9 aa, Homo sapiens
  Table A; Target 70068; HLA-A*30:02; PNLDC1; ENSG00000146453; TAA
VPESSFPQY

SEQ ID NO: 70069 - protein, 9 aa, Homo sapiens
  Table A; Target 70069; HLA-B*35:01; PNLDC1; ENSG00000146453; TAA
VPESSFPQY

SEQ ID NO: 70070 - protein, 9 aa, Homo sapiens
  Table A; Target 70070; HLA-B*55:01; PNLDC1; ENSG00000146453; TAA
VPESSFPQY

SEQ ID NO: 70071 - protein, 9 aa, Homo sapiens
  Table A; Target 70071; HLA-C*03:03; PNLDC1; ENSG00000146453; TAA
VPESSFPQY

SEQ ID NO: 70072 - protein, 9 aa, Homo sapiens
  Table A; Target 70072; HLA-B*07:02; PNLDC1; ENSG00000146453; TAA
VPKINFSGP

SEQ ID NO: 70073 - protein, 9 aa, Homo sapiens
  Table A; Target 70073; HLA-A*24:02; PNLDC1; ENSG00000146453; TAA
VQFLNQYGF

SEQ ID NO: 70074 - protein, 9 aa, Homo sapiens
  Table A; Target 70074; HLA-A*30:01; PNLDC1; ENSG00000146453; TAA
VQFLNQYGF

SEQ ID NO: 70075 - protein, 9 aa, Homo sapiens
  Table A; Target 70075; HLA-B*15:01; PNLDC1; ENSG00000146453; TAA
VQFLNQYGF

SEQ ID NO: 70076 - protein, 9 aa, Homo sapiens
  Table A; Target 70076; HLA-B*15:03; PNLDC1; ENSG00000146453; TAA
VQFLNQYGF

SEQ ID NO: 70077 - protein, 9 aa, Homo sapiens
  Table A; Target 70077; HLA-B*27:02; PNLDC1; ENSG00000146453; TAA
VQFLNQYGF

SEQ ID NO: 70078 - protein, 9 aa, Homo sapiens
  Table A; Target 70078; HLA-B*37:01; PNLDC1; ENSG00000146453; TAA
VQFLNQYGF

SEQ ID NO: 70079 - protein, 9 aa, Homo sapiens
  Table A; Target 70079; HLA-C*16:04; PNLDC1; ENSG00000146453; TAA
VQFLNQYGF

SEQ ID NO: 70080 - protein, 11 aa, Homo sapiens
  Table A; Target 70080; HLA-A*29:02; PNLDC1; ENSG00000146453; TAA
VQFLNQYGFNY

SEQ ID NO: 70081 - protein, 11 aa, Homo sapiens
  Table A; Target 70081; HLA-A*30:02; PNLDC1; ENSG00000146453; TAA
VQFLNQYGFNY

SEQ ID NO: 70082 - protein, 9 aa, Homo sapiens
  Table A; Target 70082; HLA-B*15:01; PNLDC1; ENSG00000146453; TAA
VQLVLRQAL

SEQ ID NO: 70083 - protein, 9 aa, Homo sapiens
  Table A; Target 70083; HLA-B*15:03; PNLDC1; ENSG00000146453; TAA
VQLVLRQAL

SEQ ID NO: 70084 - protein, 9 aa, Homo sapiens
  Table A; Target 70084; HLA-A*02:03; PNLDC1; ENSG00000146453; TAA
VQQFTVCQI

SEQ ID NO: 70085 - protein, 9 aa, Homo sapiens
  Table A; Target 70085; HLA-B*13:02; PNLDC1; ENSG00000146453; TAA
VQQFTVCQI

SEQ ID NO: 70086 - protein, 9 aa, Homo sapiens
  Table A; Target 70086; HLA-B*15:01; PNLDC1; ENSG00000146453; TAA
VQQFTVCQI

SEQ ID NO: 70087 - protein, 9 aa, Homo sapiens
  Table A; Target 70087; HLA-B*39:01; PNLDC1; ENSG00000146453; TAA
VQQFTVCQI

SEQ ID NO: 70088 - protein, 9 aa, Homo sapiens
  Table A; Target 70088; HLA-C*06:02; PNLDC1; ENSG00000146453; TAA
VQQFTVCQI

SEQ ID NO: 70089 - protein, 9 aa, Homo sapiens
  Table A; Target 70089; HLA-C*07:04; PNLDC1; ENSG00000146453; TAA
VQQFTVCQI

SEQ ID NO: 70090 - protein, 9 aa, Homo sapiens
  Table A; Target 70090; HLA-A*01:01; PNLDC1; ENSG00000146453; TAA
VSEQQVYHK

SEQ ID NO: 70091 - protein, 9 aa, Homo sapiens
  Table A; Target 70091; HLA-A*03:02; PNLDC1; ENSG00000146453; TAA
VSEQQVYHK

SEQ ID NO: 70092 - protein, 9 aa, Homo sapiens
  Table A; Target 70092; HLA-A*11:01; PNLDC1; ENSG00000146453; TAA
VSEQQVYHK

SEQ ID NO: 70093 - protein, 10 aa, Homo sapiens
  Table A; Target 70093; HLA-A*01:01; PNLDC1; ENSG00000146453; TAA
VSEQQVYHKF

SEQ ID NO: 70094 - protein, 10 aa, Homo sapiens
  Table A; Target 70094; HLA-B*57:01; PNLDC1; ENSG00000146453; TAA
VSEQQVYHKF

SEQ ID NO: 70095 - protein, 10 aa, Homo sapiens
  Table A; Target 70095; HLA-B*58:01; PNLDC1; ENSG00000146453; TAA
VSEQQVYHKF

SEQ ID NO: 70096 - protein, 8 aa, Homo sapiens
  Table A; Target 70096; HLA-B*15:01; PNLDC1; ENSG00000146453; TAA
VSNLSEVY

SEQ ID NO: 70097 - protein, 8 aa, Homo sapiens
  Table A; Target 70097; HLA-B*15:03; PNLDC1; ENSG00000146453; TAA
VSNLSEVY

SEQ ID NO: 70098 - protein, 8 aa, Homo sapiens
  Table A; Target 70098; HLA-B*46:01; PNLDC1; ENSG00000146453; TAA
VSNLSEVY

SEQ ID NO: 70099 - protein, 9 aa, Homo sapiens
  Table A; Target 70099; HLA-B*57:01; PNLDC1; ENSG00000146453; TAA
VTKDIWKEM

SEQ ID NO: 70100 - protein, 9 aa, Homo sapiens
  Table A; Target 70100; HLA-A*23:01; PNLDC1; ENSG00000146453; TAA
VVIDEVTRW

SEQ ID NO: 70101 - protein, 9 aa, Homo sapiens
  Table A; Target 70101; HLA-A*24:02; PNLDC1; ENSG00000146453; TAA
VVIDEVTRW

SEQ ID NO: 70102 - protein, 9 aa, Homo sapiens
  Table A; Target 70102; HLA-A*25:01; PNLDC1; ENSG00000146453; TAA
VVIDEVTRW

SEQ ID NO: 70103 - protein, 9 aa, Homo sapiens
  Table A; Target 70103; HLA-A*26:01; PNLDC1; ENSG00000146453; TAA
VVIDEVTRW

SEQ ID NO: 70104 - protein, 9 aa, Homo sapiens
  Table A; Target 70104; HLA-A*29:02; PNLDC1; ENSG00000146453; TAA
VVIDEVTRW

SEQ ID NO: 70105 - protein, 9 aa, Homo sapiens
  Table A; Target 70105; HLA-A*32:01; PNLDC1; ENSG00000146453; TAA
VVIDEVTRW

SEQ ID NO: 70106 - protein, 9 aa, Homo sapiens
  Table A; Target 70106; HLA-A*33:03; PNLDC1; ENSG00000146453; TAA
VVIDEVTRW

SEQ ID NO: 70107 - protein, 9 aa, Homo sapiens
  Table A; Target 70107; HLA-B*44:02; PNLDC1; ENSG00000146453; TAA
VVIDEVTRW

SEQ ID NO: 70108 - protein, 9 aa, Homo sapiens
  Table A; Target 70108; HLA-B*44:03; PNLDC1; ENSG00000146453; TAA
VVIDEVTRW

SEQ ID NO: 70109 - protein, 9 aa, Homo sapiens
  Table A; Target 70109; HLA-B*57:01; PNLDC1; ENSG00000146453; TAA
VVIDEVTRW

SEQ ID NO: 70110 - protein, 9 aa, Homo sapiens
  Table A; Target 70110; HLA-B*58:01; PNLDC1; ENSG00000146453; TAA
VVIDEVTRW

SEQ ID NO: 70111 - protein, 9 aa, Homo sapiens
  Table A; Target 70111; HLA-C*02:02; PNLDC1; ENSG00000146453; TAA
VVIDEVTRW

SEQ ID NO: 70112 - protein, 9 aa, Homo sapiens
  Table A; Target 70112; HLA-C*07:06; PNLDC1; ENSG00000146453; TAA
VVIDEVTRW

SEQ ID NO: 70113 - protein, 9 aa, Homo sapiens
  Table A; Target 70113; HLA-C*01:02; PNLDC1; ENSG00000146453; TAA
VYEVLNSDL

SEQ ID NO: 70114 - protein, 9 aa, Homo sapiens
  Table A; Target 70114; HLA-C*04:01; PNLDC1; ENSG00000146453; TAA
VYEVLNSDL

SEQ ID NO: 70115 - protein, 9 aa, Homo sapiens
  Table A; Target 70115; HLA-C*14:02; PNLDC1; ENSG00000146453; TAA
VYEVLNSDL

SEQ ID NO: 70116 - protein, 8 aa, Homo sapiens
  Table A; Target 70116; HLA-A*23:01; PNLDC1; ENSG00000146453; TAA
VYHKFQNL

SEQ ID NO: 70117 - protein, 8 aa, Homo sapiens
  Table A; Target 70117; HLA-A*24:02; PNLDC1; ENSG00000146453; TAA
VYHKFQNL

SEQ ID NO: 70118 - protein, 10 aa, Homo sapiens
  Table A; Target 70118; HLA-B*35:01; PNLDC1; ENSG00000146453; TAA
WPGVSEQQVY

SEQ ID NO: 70119 - protein, 10 aa, Homo sapiens
  Table A; Target 70119; HLA-B*55:01; PNLDC1; ENSG00000146453; TAA
WPGVSEQQVY

SEQ ID NO: 70120 - protein, 8 aa, Homo sapiens
  Table A; Target 70120; HLA-B*37:01; PNLDC1; ENSG00000146453; TAA
YDQFKQNI

SEQ ID NO: 70121 - protein, 8 aa, Homo sapiens
  Table A; Target 70121; HLA-A*30:01; PNLDC1; ENSG00000146453; TAA
YEVLNSDL

SEQ ID NO: 70122 - protein, 8 aa, Homo sapiens
  Table A; Target 70122; HLA-B*18:01; PNLDC1; ENSG00000146453; TAA
YEVLNSDL

SEQ ID NO: 70123 - protein, 8 aa, Homo sapiens
  Table A; Target 70123; HLA-B*37:01; PNLDC1; ENSG00000146453; TAA
YEVLNSDL

SEQ ID NO: 70124 - protein, 8 aa, Homo sapiens
  Table A; Target 70124; HLA-B*40:01; PNLDC1; ENSG00000146453; TAA
YEVLNSDL

SEQ ID NO: 70125 - protein, 8 aa, Homo sapiens
  Table A; Target 70125; HLA-B*40:02; PNLDC1; ENSG00000146453; TAA
YEVLNSDL

SEQ ID NO: 70126 - protein, 8 aa, Homo sapiens
  Table A; Target 70126; HLA-B*49:01; PNLDC1; ENSG00000146453; TAA
YEVLNSDL

SEQ ID NO: 70127 - protein, 8 aa, Homo sapiens
  Table A; Target 70127; HLA-C*16:04; PNLDC1; ENSG00000146453; TAA
YEVLNSDL

SEQ ID NO: 70128 - protein, 10 aa, Homo sapiens
  Table A; Target 70128; HLA-B*49:01; PNLDC1; ENSG00000146453; TAA
YEVLNSDLNP

SEQ ID NO: 70129 - protein, 11 aa, Homo sapiens
  Table A; Target 70129; HLA-B*40:02; PNLDC1; ENSG00000146453; TAA
YEVLNSDLNPT

SEQ ID NO: 70130 - protein, 11 aa, Homo sapiens
  Table A; Target 70130; HLA-C*07:01; PNLDC1; ENSG00000146453; TAA
YEVLNSDLNPT

SEQ ID NO: 70131 - protein, 9 aa, Homo sapiens
  Table A; Target 70131; HLA-A*02:04; PNLDC1; ENSG00000146453; TAA
YGFNYNKFL

SEQ ID NO: 70132 - protein, 9 aa, Homo sapiens
  Table A; Target 70132; HLA-B*39:01; PNLDC1; ENSG00000146453; TAA
YHIDPVPES

SEQ ID NO: 70133 - protein, 11 aa, Homo sapiens
  Table A; Target 70133; HLA-B*27:05; PNLDC1; ENSG00000146453; TAA
YHIDPVPESSF

SEQ ID NO: 70134 - protein, 11 aa, Homo sapiens
  Table A; Target 70134; HLA-B*38:01; PNLDC1; ENSG00000146453; TAA
YHIDPVPESSF

SEQ ID NO: 70135 - protein, 11 aa, Homo sapiens
  Table A; Target 70135; HLA-B*39:01; PNLDC1; ENSG00000146453; TAA
YHIDPVPESSF

SEQ ID NO: 70136 - protein, 9 aa, Homo sapiens
  Table A; Target 70136; HLA-A*01:01; PNLDC1; ENSG00000146453; TAA
YIAHSCNFY

SEQ ID NO: 70137 - protein, 9 aa, Homo sapiens
  Table A; Target 70137; HLA-A*29:02; PNLDC1; ENSG00000146453; TAA
YIAHSCNFY

SEQ ID NO: 70138 - protein, 9 aa, Homo sapiens
  Table A; Target 70138; HLA-C*07:04; PNLDC1; ENSG00000146453; TAA
YIAHSCNFY

SEQ ID NO: 70139 - protein, 8 aa, Homo sapiens
  Table A; Target 70139; HLA-A*01:01; PNLDC1; ENSG00000146453; TAA
YLDVLAPY

SEQ ID NO: 70140 - protein, 9 aa, Homo sapiens
  Table A; Target 70140; HLA-A*01:01; PNLDC1; ENSG00000146453; TAA
YLDVLAPYV

SEQ ID NO: 70141 - protein, 9 aa, Homo sapiens
  Table A; Target 70141; HLA-A*02:01; PNLDC1; ENSG00000146453; TAA
YLDVLAPYV

SEQ ID NO: 70142 - protein, 9 aa, Homo sapiens
  Table A; Target 70142; HLA-A*02:07; PNLDC1; ENSG00000146453; TAA
YLDVLAPYV

SEQ ID NO: 70143 - protein, 9 aa, Homo sapiens
  Table A; Target 70143; HLA-A*02:01; PNLDC1; ENSG00000146453; TAA
YLFPTTFGI

SEQ ID NO: 70144 - protein, 9 aa, Homo sapiens
  Table A; Target 70144; HLA-A*02:03; PNLDC1; ENSG00000146453; TAA
YLFPTTFGI

SEQ ID NO: 70145 - protein, 9 aa, Homo sapiens
  Table A; Target 70145; HLA-A*02:04; PNLDC1; ENSG00000146453; TAA
YLFPTTFGI

SEQ ID NO: 70146 - protein, 9 aa, Homo sapiens
  Table A; Target 70146; HLA-A*02:07; PNLDC1; ENSG00000146453; TAA
YLFPTTFGI

SEQ ID NO: 70147 - protein, 9 aa, Homo sapiens
  Table A; Target 70147; HLA-A*68:02; PNLDC1; ENSG00000146453; TAA
YLFPTTFGI

SEQ ID NO: 70148 - protein, 9 aa, Homo sapiens
  Table A; Target 70148; HLA-B*13:02; PNLDC1; ENSG00000146453; TAA
YLFPTTFGI

SEQ ID NO: 70149 - protein, 10 aa, Homo sapiens
  Table A; Target 70149; HLA-A*02:03; PNLDC1; ENSG00000146453; TAA
YLFPTTFGIL

SEQ ID NO: 70150 - protein, 10 aa, Homo sapiens
  Table A; Target 70150; HLA-A*02:04; PNLDC1; ENSG00000146453; TAA
YLFPTTFGIL

SEQ ID NO: 70151 - protein, 10 aa, Homo sapiens
  Table A; Target 70151; HLA-A*02:07; PNLDC1; ENSG00000146453; TAA
YLFPTTFGIL

SEQ ID NO: 70152 - protein, 8 aa, Homo sapiens
  Table A; Target 70152; HLA-B*08:01; PNLDC1; ENSG00000146453; TAA
YLKTRQSV

SEQ ID NO: 70153 - protein, 8 aa, Homo sapiens
  Table A; Target 70153; HLA-B*08:01; PNLDC1; ENSG00000146453; TAA
YPSIRPPI

SEQ ID NO: 70154 - protein, 8 aa, Homo sapiens
  Table A; Target 70154; HLA-B*51:01; PNLDC1; ENSG00000146453; TAA
YPSIRPPI

SEQ ID NO: 70155 - protein, 9 aa, Homo sapiens
  Table A; Target 70155; HLA-B*07:02; PNLDC1; ENSG00000146453; TAA
YPSIRPPIL

SEQ ID NO: 70156 - protein, 9 aa, Homo sapiens
  Table A; Target 70156; HLA-B*08:01; PNLDC1; ENSG00000146453; TAA
YPSIRPPIL

SEQ ID NO: 70157 - protein, 9 aa, Homo sapiens
  Table A; Target 70157; HLA-B*35:01; PNLDC1; ENSG00000146453; TAA
YPSIRPPIL

SEQ ID NO: 70158 - protein, 9 aa, Homo sapiens
  Table A; Target 70158; HLA-B*35:03; PNLDC1; ENSG00000146453; TAA
YPSIRPPIL

SEQ ID NO: 70159 - protein, 9 aa, Homo sapiens
  Table A; Target 70159; HLA-B*51:01; PNLDC1; ENSG00000146453; TAA
YPSIRPPIL

SEQ ID NO: 70160 - protein, 9 aa, Homo sapiens
  Table A; Target 70160; HLA-B*54:01; PNLDC1; ENSG00000146453; TAA
YPSIRPPIL

SEQ ID NO: 70161 - protein, 9 aa, Homo sapiens
  Table A; Target 70161; HLA-C*07:02; PNLDC1; ENSG00000146453; TAA
YPSIRPPIL

SEQ ID NO: 70162 - protein, 9 aa, Homo sapiens
  Table A; Target 70162; HLA-C*16:01; PNLDC1; ENSG00000146453; TAA
YPSIRPPIL

SEQ ID NO: 70163 - protein, 8 aa, Homo sapiens
  Table A; Target 70163; HLA-B*13:02; PNLDC1; ENSG00000146453; TAA
YVNQVNLI

SEQ ID NO: 70164 - protein, 8 aa, Homo sapiens
  Table A; Target 70164; HLA-B*51:01; PNLDC1; ENSG00000146453; TAA
YVNQVNLI

SEQ ID NO: 70165 - protein, 9 aa, Homo sapiens
  Table A; Target 70165; HLA-A*29:02; PNLDC1; ENSG00000146453; TAA
YVNQVNLIR

SEQ ID NO: 70166 - protein, 9 aa, Homo sapiens
  Table A; Target 70166; HLA-A*31:01; PNLDC1; ENSG00000146453; TAA
YVNQVNLIR

SEQ ID NO: 70167 - protein, 9 aa, Homo sapiens
  Table A; Target 70167; HLA-A*33:01; PNLDC1; ENSG00000146453; TAA
YVNQVNLIR

SEQ ID NO: 70168 - protein, 9 aa, Homo sapiens
  Table A; Target 70168; HLA-A*33:03; PNLDC1; ENSG00000146453; TAA
YVNQVNLIR

SEQ ID NO: 70169 - protein, 9 aa, Homo sapiens
  Table A; Target 70169; HLA-A*68:01; PNLDC1; ENSG00000146453; TAA
YVNQVNLIR

SEQ ID NO: 70170 - protein, 9 aa, Homo sapiens
  Table A; Target 70170; HLA-C*07:06; PNLDC1; ENSG00000146453; TAA
YVNQVNLIR

SEQ ID NO: 70171 - protein, 10 aa, Homo sapiens
  Table A; Target 70171; HLA-B*54:01; PNLDC1; ENSG00000146453; TAA
YVNQVNLIRA

SEQ ID NO: 70172 - protein, 10 aa, Homo sapiens
  Table A; Target 70172; HLA-B*56:01; PNLDC1; ENSG00000146453; TAA
YVNQVNLIRA

SEQ ID NO: 70173 - protein, 9 aa, Homo sapiens
  Table A; Target 70173; HLA-A*32:01; PRAME; ENSG00000185686; TAA
AAFDGRHSQ

SEQ ID NO: 70174 - protein, 9 aa, Homo sapiens
  Table A; Target 70174; HLA-B*46:01; PRAME; ENSG00000185686; TAA
AAFDGRHSQ

SEQ ID NO: 70175 - protein, 9 aa, Homo sapiens
  Table A; Target 70175; HLA-B*58:01; PRAME; ENSG00000185686; TAA
AAFDGRHSQ

SEQ ID NO: 70176 - protein, 9 aa, Homo sapiens
  Table A; Target 70176; HLA-C*02:02; PRAME; ENSG00000185686; TAA
AAFDGRHSQ

SEQ ID NO: 70177 - protein, 9 aa, Homo sapiens
  Table A; Target 70177; HLA-C*16:01; PRAME; ENSG00000185686; TAA
AAFDGRHSQ

SEQ ID NO: 70178 - protein, 9 aa, Homo sapiens
  Table A; Target 70178; HLA-C*16:02; PRAME; ENSG00000185686; TAA
AAFDGRHSQ

SEQ ID NO: 70179 - protein, 10 aa, Homo sapiens
  Table A; Target 70179; HLA-A*32:01; PRAME; ENSG00000185686; TAA
AAFDGRHSQT

SEQ ID NO: 70180 - protein, 10 aa, Homo sapiens
  Table A; Target 70180; HLA-C*12:03; PRAME; ENSG00000185686; TAA
AAFDGRHSQT

SEQ ID NO: 70181 - protein, 10 aa, Homo sapiens
  Table A; Target 70181; HLA-C*16:01; PRAME; ENSG00000185686; TAA
AAFDGRHSQT

SEQ ID NO: 70182 - protein, 10 aa, Homo sapiens
  Table A; Target 70182; HLA-C*16:02; PRAME; ENSG00000185686; TAA
AAFDGRHSQT

SEQ ID NO: 70183 - protein, 11 aa, Homo sapiens
  Table A; Target 70183; HLA-A*02:01; PRAME; ENSG00000185686; TAA
AAFDGRHSQTL

SEQ ID NO: 70184 - protein, 11 aa, Homo sapiens
  Table A; Target 70184; HLA-A*02:03; PRAME; ENSG00000185686; TAA
AAFDGRHSQTL

SEQ ID NO: 70185 - protein, 11 aa, Homo sapiens
  Table A; Target 70185; HLA-A*02:04; PRAME; ENSG00000185686; TAA
AAFDGRHSQTL

SEQ ID NO: 70186 - protein, 11 aa, Homo sapiens
  Table A; Target 70186; HLA-A*02:07; PRAME; ENSG00000185686; TAA
AAFDGRHSQTL

SEQ ID NO: 70187 - protein, 11 aa, Homo sapiens
  Table A; Target 70187; HLA-A*23:01; PRAME; ENSG00000185686; TAA
AAFDGRHSQTL

SEQ ID NO: 70188 - protein, 11 aa, Homo sapiens
  Table A; Target 70188; HLA-A*25:01; PRAME; ENSG00000185686; TAA
AAFDGRHSQTL

SEQ ID NO: 70189 - protein, 11 aa, Homo sapiens
  Table A; Target 70189; HLA-A*30:01; PRAME; ENSG00000185686; TAA
AAFDGRHSQTL

SEQ ID NO: 70190 - protein, 11 aa, Homo sapiens
  Table A; Target 70190; HLA-A*32:01; PRAME; ENSG00000185686; TAA
AAFDGRHSQTL

SEQ ID NO: 70191 - protein, 11 aa, Homo sapiens
  Table A; Target 70191; HLA-A*68:02; PRAME; ENSG00000185686; TAA
AAFDGRHSQTL

SEQ ID NO: 70192 - protein, 11 aa, Homo sapiens
  Table A; Target 70192; HLA-B*07:02; PRAME; ENSG00000185686; TAA
AAFDGRHSQTL

SEQ ID NO: 70193 - protein, 11 aa, Homo sapiens
  Table A; Target 70193; HLA-B*13:02; PRAME; ENSG00000185686; TAA
AAFDGRHSQTL

SEQ ID NO: 70194 - protein, 11 aa, Homo sapiens
  Table A; Target 70194; HLA-B*15:01; PRAME; ENSG00000185686; TAA
AAFDGRHSQTL

SEQ ID NO: 70195 - protein, 11 aa, Homo sapiens
  Table A; Target 70195; HLA-B*15:03; PRAME; ENSG00000185686; TAA
AAFDGRHSQTL

SEQ ID NO: 70196 - protein, 11 aa, Homo sapiens
  Table A; Target 70196; HLA-B*27:05; PRAME; ENSG00000185686; TAA
AAFDGRHSQTL

SEQ ID NO: 70197 - protein, 11 aa, Homo sapiens
  Table A; Target 70197; HLA-B*35:01; PRAME; ENSG00000185686; TAA
AAFDGRHSQTL

SEQ ID NO: 70198 - protein, 11 aa, Homo sapiens
  Table A; Target 70198; HLA-B*35:03; PRAME; ENSG00000185686; TAA
AAFDGRHSQTL

SEQ ID NO: 70199 - protein, 11 aa, Homo sapiens
  Table A; Target 70199; HLA-B*37:01; PRAME; ENSG00000185686; TAA
AAFDGRHSQTL

SEQ ID NO: 70200 - protein, 11 aa, Homo sapiens
  Table A; Target 70200; HLA-B*38:01; PRAME; ENSG00000185686; TAA
AAFDGRHSQTL

SEQ ID NO: 70201 - protein, 11 aa, Homo sapiens
  Table A; Target 70201; HLA-B*39:01; PRAME; ENSG00000185686; TAA
AAFDGRHSQTL

SEQ ID NO: 70202 - protein, 11 aa, Homo sapiens
  Table A; Target 70202; HLA-B*40:01; PRAME; ENSG00000185686; TAA
AAFDGRHSQTL

SEQ ID NO: 70203 - protein, 11 aa, Homo sapiens
  Table A; Target 70203; HLA-B*40:02; PRAME; ENSG00000185686; TAA
AAFDGRHSQTL

SEQ ID NO: 70204 - protein, 11 aa, Homo sapiens
  Table A; Target 70204; HLA-B*44:02; PRAME; ENSG00000185686; TAA
AAFDGRHSQTL

SEQ ID NO: 70205 - protein, 11 aa, Homo sapiens
  Table A; Target 70205; HLA-B*44:03; PRAME; ENSG00000185686; TAA
AAFDGRHSQTL

SEQ ID NO: 70206 - protein, 11 aa, Homo sapiens
  Table A; Target 70206; HLA-B*46:01; PRAME; ENSG00000185686; TAA
AAFDGRHSQTL

SEQ ID NO: 70207 - protein, 11 aa, Homo sapiens
  Table A; Target 70207; HLA-B*51:01; PRAME; ENSG00000185686; TAA
AAFDGRHSQTL

SEQ ID NO: 70208 - protein, 11 aa, Homo sapiens
  Table A; Target 70208; HLA-B*55:01; PRAME; ENSG00000185686; TAA
AAFDGRHSQTL

SEQ ID NO: 70209 - protein, 11 aa, Homo sapiens
  Table A; Target 70209; HLA-B*56:01; PRAME; ENSG00000185686; TAA
AAFDGRHSQTL

SEQ ID NO: 70210 - protein, 11 aa, Homo sapiens
  Table A; Target 70210; HLA-B*58:01; PRAME; ENSG00000185686; TAA
AAFDGRHSQTL

SEQ ID NO: 70211 - protein, 11 aa, Homo sapiens
  Table A; Target 70211; HLA-C*01:02; PRAME; ENSG00000185686; TAA
AAFDGRHSQTL

SEQ ID NO: 70212 - protein, 11 aa, Homo sapiens
  Table A; Target 70212; HLA-C*02:02; PRAME; ENSG00000185686; TAA
AAFDGRHSQTL

SEQ ID NO: 70213 - protein, 11 aa, Homo sapiens
  Table A; Target 70213; HLA-C*03:03; PRAME; ENSG00000185686; TAA
AAFDGRHSQTL

SEQ ID NO: 70214 - protein, 11 aa, Homo sapiens
  Table A; Target 70214; HLA-C*03:04; PRAME; ENSG00000185686; TAA
AAFDGRHSQTL

SEQ ID NO: 70215 - protein, 11 aa, Homo sapiens
  Table A; Target 70215; HLA-C*05:01; PRAME; ENSG00000185686; TAA
AAFDGRHSQTL

SEQ ID NO: 70216 - protein, 11 aa, Homo sapiens
  Table A; Target 70216; HLA-C*06:02; PRAME; ENSG00000185686; TAA
AAFDGRHSQTL

SEQ ID NO: 70217 - protein, 11 aa, Homo sapiens
  Table A; Target 70217; HLA-C*07:02; PRAME; ENSG00000185686; TAA
AAFDGRHSQTL

SEQ ID NO: 70218 - protein, 11 aa, Homo sapiens
  Table A; Target 70218; HLA-C*07:04; PRAME; ENSG00000185686; TAA
AAFDGRHSQTL

SEQ ID NO: 70219 - protein, 11 aa, Homo sapiens
  Table A; Target 70219; HLA-C*07:06; PRAME; ENSG00000185686; TAA
AAFDGRHSQTL

SEQ ID NO: 70220 - protein, 11 aa, Homo sapiens
  Table A; Target 70220; HLA-C*12:03; PRAME; ENSG00000185686; TAA
AAFDGRHSQTL

SEQ ID NO: 70221 - protein, 11 aa, Homo sapiens
  Table A; Target 70221; HLA-C*14:02; PRAME; ENSG00000185686; TAA
AAFDGRHSQTL

SEQ ID NO: 70222 - protein, 11 aa, Homo sapiens
  Table A; Target 70222; HLA-C*16:01; PRAME; ENSG00000185686; TAA
AAFDGRHSQTL

SEQ ID NO: 70223 - protein, 11 aa, Homo sapiens
  Table A; Target 70223; HLA-C*16:02; PRAME; ENSG00000185686; TAA
AAFDGRHSQTL

SEQ ID NO: 70224 - protein, 11 aa, Homo sapiens
  Table A; Target 70224; HLA-C*16:04; PRAME; ENSG00000185686; TAA
AAFDGRHSQTL

SEQ ID NO: 70225 - protein, 8 aa, Homo sapiens
  Table A; Target 70225; HLA-A*33:03; PRAME; ENSG00000185686; TAA
AALELLPR

SEQ ID NO: 70226 - protein, 10 aa, Homo sapiens
  Table A; Target 70226; HLA-C*16:01; PRAME; ENSG00000185686; TAA
AALELLPREL

SEQ ID NO: 70227 - protein, 8 aa, Homo sapiens
  Table A; Target 70227; HLA-A*11:01; PRAME; ENSG00000185686; TAA
AAQPMTKK

SEQ ID NO: 70228 - protein, 9 aa, Homo sapiens
  Table A; Target 70228; HLA-A*31:01; PRAME; ENSG00000185686; TAA
AAQPMTKKR

SEQ ID NO: 70229 - protein, 9 aa, Homo sapiens
  Table A; Target 70229; HLA-A*33:01; PRAME; ENSG00000185686; TAA
AAQPMTKKR

SEQ ID NO: 70230 - protein, 9 aa, Homo sapiens
  Table A; Target 70230; HLA-A*02:07; PRAME; ENSG00000185686; TAA
ACDELFSYL

SEQ ID NO: 70231 - protein, 9 aa, Homo sapiens
  Table A; Target 70231; HLA-C*05:01; PRAME; ENSG00000185686; TAA
ACDELFSYL

SEQ ID NO: 70232 - protein, 8 aa, Homo sapiens
  Table A; Target 70232; HLA-B*37:01; PRAME; ENSG00000185686; TAA
AEQPFIPV

SEQ ID NO: 70233 - protein, 8 aa, Homo sapiens
  Table A; Target 70233; HLA-B*49:01; PRAME; ENSG00000185686; TAA
AEQPFIPV

SEQ ID NO: 70234 - protein, 10 aa, Homo sapiens
  Table A; Target 70234; HLA-A*30:01; PRAME; ENSG00000185686; TAA
AEQPFIPVEV

SEQ ID NO: 70235 - protein, 10 aa, Homo sapiens
  Table A; Target 70235; HLA-B*40:01; PRAME; ENSG00000185686; TAA
AEQPFIPVEV

SEQ ID NO: 70236 - protein, 10 aa, Homo sapiens
  Table A; Target 70236; HLA-B*40:02; PRAME; ENSG00000185686; TAA
AEQPFIPVEV

SEQ ID NO: 70237 - protein, 10 aa, Homo sapiens
  Table A; Target 70237; HLA-B*44:02; PRAME; ENSG00000185686; TAA
AEQPFIPVEV

SEQ ID NO: 70238 - protein, 10 aa, Homo sapiens
  Table A; Target 70238; HLA-B*44:03; PRAME; ENSG00000185686; TAA
AEQPFIPVEV

SEQ ID NO: 70239 - protein, 10 aa, Homo sapiens
  Table A; Target 70239; HLA-B*49:01; PRAME; ENSG00000185686; TAA
AEQPFIPVEV

SEQ ID NO: 70240 - protein, 11 aa, Homo sapiens
  Table A; Target 70240; HLA-A*30:01; PRAME; ENSG00000185686; TAA
AEQPFIPVEVL

SEQ ID NO: 70241 - protein, 11 aa, Homo sapiens
  Table A; Target 70241; HLA-B*44:02; PRAME; ENSG00000185686; TAA
AEQPFIPVEVL

SEQ ID NO: 70242 - protein, 11 aa, Homo sapiens
  Table A; Target 70242; HLA-B*44:03; PRAME; ENSG00000185686; TAA
AEQPFIPVEVL

SEQ ID NO: 70243 - protein, 10 aa, Homo sapiens
  Table A; Target 70243; HLA-B*55:01; PRAME; ENSG00000185686; TAA
AFDGRHSQTL

SEQ ID NO: 70244 - protein, 10 aa, Homo sapiens
  Table A; Target 70244; HLA-C*04:01; PRAME; ENSG00000185686; TAA
AFDGRHSQTL

SEQ ID NO: 70245 - protein, 10 aa, Homo sapiens
  Table A; Target 70245; HLA-C*07:02; PRAME; ENSG00000185686; TAA
AFDGRHSQTL

SEQ ID NO: 70246 - protein, 10 aa, Homo sapiens
  Table A; Target 70246; HLA-A*31:01; PRAME; ENSG00000185686; TAA
AIAALELLPR

SEQ ID NO: 70247 - protein, 10 aa, Homo sapiens
  Table A; Target 70247; HLA-A*33:01; PRAME; ENSG00000185686; TAA
AIAALELLPR

SEQ ID NO: 70248 - protein, 10 aa, Homo sapiens
  Table A; Target 70248; HLA-B*27:02; PRAME; ENSG00000185686; TAA
AIAALELLPR

SEQ ID NO: 70249 - protein, 10 aa, Homo sapiens
  Table A; Target 70249; HLA-B*15:03; PRAME; ENSG00000185686; TAA
AKFSPYLGQM

SEQ ID NO: 70250 - protein, 9 aa, Homo sapiens
  Table A; Target 70250; HLA-A*02:01; PRAME; ENSG00000185686; TAA
ALAIAALEL

SEQ ID NO: 70251 - protein, 9 aa, Homo sapiens
  Table A; Target 70251; HLA-A*02:03; PRAME; ENSG00000185686; TAA
ALAIAALEL

SEQ ID NO: 70252 - protein, 9 aa, Homo sapiens
  Table A; Target 70252; HLA-A*02:04; PRAME; ENSG00000185686; TAA
ALAIAALEL

SEQ ID NO: 70253 - protein, 9 aa, Homo sapiens
  Table A; Target 70253; HLA-B*13:02; PRAME; ENSG00000185686; TAA
ALAIAALEL

SEQ ID NO: 70254 - protein, 9 aa, Homo sapiens
  Table A; Target 70254; HLA-B*15:01; PRAME; ENSG00000185686; TAA
ALAIAALEL

SEQ ID NO: 70255 - protein, 9 aa, Homo sapiens
  Table A; Target 70255; HLA-C*01:02; PRAME; ENSG00000185686; TAA
ALAIAALEL

SEQ ID NO: 70256 - protein, 10 aa, Homo sapiens
  Table A; Target 70256; HLA-A*02:03; PRAME; ENSG00000185686; TAA
ALAIAALELL

SEQ ID NO: 70257 - protein, 10 aa, Homo sapiens
  Table A; Target 70257; HLA-A*02:04; PRAME; ENSG00000185686; TAA
ALAIAALELL

SEQ ID NO: 70258 - protein, 9 aa, Homo sapiens
  Table A; Target 70258; HLA-A*02:04; PRAME; ENSG00000185686; TAA
ALELLPREL

SEQ ID NO: 70259 - protein, 9 aa, Homo sapiens
  Table A; Target 70259; HLA-A*32:01; PRAME; ENSG00000185686; TAA
ALLERASAT

SEQ ID NO: 70260 - protein, 9 aa, Homo sapiens
  Table A; Target 70260; HLA-B*08:01; PRAME; ENSG00000185686; TAA
ALLERASAT

SEQ ID NO: 70261 - protein, 10 aa, Homo sapiens
  Table A; Target 70261; HLA-A*02:01; PRAME; ENSG00000185686; TAA
ALLERASATL

SEQ ID NO: 70262 - protein, 10 aa, Homo sapiens
  Table A; Target 70262; HLA-A*02:03; PRAME; ENSG00000185686; TAA
ALLERASATL

SEQ ID NO: 70263 - protein, 10 aa, Homo sapiens
  Table A; Target 70263; HLA-A*02:04; PRAME; ENSG00000185686; TAA
ALLERASATL

SEQ ID NO: 70264 - protein, 10 aa, Homo sapiens
  Table A; Target 70264; HLA-B*15:01; PRAME; ENSG00000185686; TAA
ALLERASATL

SEQ ID NO: 70265 - protein, 9 aa, Homo sapiens
  Table A; Target 70265; HLA-A*02:01; PRAME; ENSG00000185686; TAA
ALLPSLSHC

SEQ ID NO: 70266 - protein, 9 aa, Homo sapiens
  Table A; Target 70266; HLA-A*02:03; PRAME; ENSG00000185686; TAA
ALLPSLSHC

SEQ ID NO: 70267 - protein, 9 aa, Homo sapiens
  Table A; Target 70267; HLA-A*02:04; PRAME; ENSG00000185686; TAA
ALLPSLSHC

SEQ ID NO: 70268 - protein, 9 aa, Homo sapiens
  Table A; Target 70268; HLA-B*55:01; PRAME; ENSG00000185686; TAA
ALLPSLSHC

SEQ ID NO: 70269 - protein, 9 aa, Homo sapiens
  Table A; Target 70269; HLA-A*02:01; PRAME; ENSG00000185686; TAA
ALQSLLQHL

SEQ ID NO: 70270 - protein, 9 aa, Homo sapiens
  Table A; Target 70270; HLA-A*02:03; PRAME; ENSG00000185686; TAA
ALQSLLQHL

SEQ ID NO: 70271 - protein, 9 aa, Homo sapiens
  Table A; Target 70271; HLA-A*02:04; PRAME; ENSG00000185686; TAA
ALQSLLQHL

SEQ ID NO: 70272 - protein, 9 aa, Homo sapiens
  Table A; Target 70272; HLA-A*02:07; PRAME; ENSG00000185686; TAA
ALQSLLQHL

SEQ ID NO: 70273 - protein, 9 aa, Homo sapiens
  Table A; Target 70273; HLA-A*31:01; PRAME; ENSG00000185686; TAA
ALQSLLQHL

SEQ ID NO: 70274 - protein, 9 aa, Homo sapiens
  Table A; Target 70274; HLA-B*13:02; PRAME; ENSG00000185686; TAA
ALQSLLQHL

SEQ ID NO: 70275 - protein, 9 aa, Homo sapiens
  Table A; Target 70275; HLA-B*55:01; PRAME; ENSG00000185686; TAA
ALQSLLQHL

SEQ ID NO: 70276 - protein, 10 aa, Homo sapiens
  Table A; Target 70276; HLA-A*02:04; PRAME; ENSG00000185686; TAA
ALQSLLQHLI

SEQ ID NO: 70277 - protein, 9 aa, Homo sapiens
  Table A; Target 70277; HLA-A*29:02; PRAME; ENSG00000185686; TAA
ALYVDSLFF

SEQ ID NO: 70278 - protein, 10 aa, Homo sapiens
  Table A; Target 70278; HLA-A*02:01; PRAME; ENSG00000185686; TAA
ALYVDSLFFL

SEQ ID NO: 70279 - protein, 10 aa, Homo sapiens
  Table A; Target 70279; HLA-A*02:03; PRAME; ENSG00000185686; TAA
ALYVDSLFFL

SEQ ID NO: 70280 - protein, 10 aa, Homo sapiens
  Table A; Target 70280; HLA-A*02:04; PRAME; ENSG00000185686; TAA
ALYVDSLFFL

SEQ ID NO: 70281 - protein, 10 aa, Homo sapiens
  Table A; Target 70281; HLA-A*02:07; PRAME; ENSG00000185686; TAA
ALYVDSLFFL

SEQ ID NO: 70282 - protein, 11 aa, Homo sapiens
  Table A; Target 70282; HLA-A*03:01; PRAME; ENSG00000185686; TAA
ALYVDSLFFLR

SEQ ID NO: 70283 - protein, 11 aa, Homo sapiens
  Table A; Target 70283; HLA-A*31:01; PRAME; ENSG00000185686; TAA
ALYVDSLFFLR

SEQ ID NO: 70284 - protein, 8 aa, Homo sapiens
  Table A; Target 70284; HLA-B*13:02; PRAME; ENSG00000185686; TAA
AQFTSQFL

SEQ ID NO: 70285 - protein, 8 aa, Homo sapiens
  Table A; Target 70285; HLA-B*15:01; PRAME; ENSG00000185686; TAA
AQFTSQFL

SEQ ID NO: 70286 - protein, 8 aa, Homo sapiens
  Table A; Target 70286; HLA-B*15:03; PRAME; ENSG00000185686; TAA
AQFTSQFL

SEQ ID NO: 70287 - protein, 8 aa, Homo sapiens
  Table A; Target 70287; HLA-B*27:05; PRAME; ENSG00000185686; TAA
AQFTSQFL

SEQ ID NO: 70288 - protein, 8 aa, Homo sapiens
  Table A; Target 70288; HLA-B*37:01; PRAME; ENSG00000185686; TAA
AQFTSQFL

SEQ ID NO: 70289 - protein, 8 aa, Homo sapiens
  Table A; Target 70289; HLA-B*39:01; PRAME; ENSG00000185686; TAA
AQFTSQFL

SEQ ID NO: 70290 - protein, 10 aa, Homo sapiens
  Table A; Target 70290; HLA-A*02:04; PRAME; ENSG00000185686; TAA
AQFTSQFLSL

SEQ ID NO: 70291 - protein, 10 aa, Homo sapiens
  Table A; Target 70291; HLA-A*03:01; PRAME; ENSG00000185686; TAA
AQFTSQFLSL

SEQ ID NO: 70292 - protein, 10 aa, Homo sapiens
  Table A; Target 70292; HLA-A*25:01; PRAME; ENSG00000185686; TAA
AQFTSQFLSL

SEQ ID NO: 70293 - protein, 10 aa, Homo sapiens
  Table A; Target 70293; HLA-A*30:01; PRAME; ENSG00000185686; TAA
AQFTSQFLSL

SEQ ID NO: 70294 - protein, 10 aa, Homo sapiens
  Table A; Target 70294; HLA-B*13:02; PRAME; ENSG00000185686; TAA
AQFTSQFLSL

SEQ ID NO: 70295 - protein, 10 aa, Homo sapiens
  Table A; Target 70295; HLA-B*15:01; PRAME; ENSG00000185686; TAA
AQFTSQFLSL

SEQ ID NO: 70296 - protein, 10 aa, Homo sapiens
  Table A; Target 70296; HLA-B*15:03; PRAME; ENSG00000185686; TAA
AQFTSQFLSL

SEQ ID NO: 70297 - protein, 10 aa, Homo sapiens
  Table A; Target 70297; HLA-B*27:05; PRAME; ENSG00000185686; TAA
AQFTSQFLSL

SEQ ID NO: 70298 - protein, 10 aa, Homo sapiens
  Table A; Target 70298; HLA-B*39:01; PRAME; ENSG00000185686; TAA
AQFTSQFLSL

SEQ ID NO: 70299 - protein, 10 aa, Homo sapiens
  Table A; Target 70299; HLA-C*02:02; PRAME; ENSG00000185686; TAA
AQFTSQFLSL

SEQ ID NO: 70300 - protein, 10 aa, Homo sapiens
  Table A; Target 70300; HLA-C*16:04; PRAME; ENSG00000185686; TAA
AQFTSQFLSL

SEQ ID NO: 70301 - protein, 8 aa, Homo sapiens
  Table A; Target 70301; HLA-C*16:01; PRAME; ENSG00000185686; TAA
ASATLQDL

SEQ ID NO: 70302 - protein, 9 aa, Homo sapiens
  Table A; Target 70302; HLA-A*01:01; PRAME; ENSG00000185686; TAA
ASATLQDLV

SEQ ID NO: 70303 - protein, 10 aa, Homo sapiens
  Table A; Target 70303; HLA-A*23:01; PRAME; ENSG00000185686; TAA
ASATLQDLVF

SEQ ID NO: 70304 - protein, 10 aa, Homo sapiens
  Table A; Target 70304; HLA-B*57:01; PRAME; ENSG00000185686; TAA
ASATLQDLVF

SEQ ID NO: 70305 - protein, 10 aa, Homo sapiens
  Table A; Target 70305; HLA-B*58:01; PRAME; ENSG00000185686; TAA
ASATLQDLVF

SEQ ID NO: 70306 - protein, 9 aa, Homo sapiens
  Table A; Target 70306; HLA-A*01:01; PRAME; ENSG00000185686; TAA
ASSYISPEK

SEQ ID NO: 70307 - protein, 9 aa, Homo sapiens
  Table A; Target 70307; HLA-A*03:01; PRAME; ENSG00000185686; TAA
ASSYISPEK

SEQ ID NO: 70308 - protein, 9 aa, Homo sapiens
  Table A; Target 70308; HLA-A*03:02; PRAME; ENSG00000185686; TAA
ASSYISPEK

SEQ ID NO: 70309 - protein, 9 aa, Homo sapiens
  Table A; Target 70309; HLA-A*11:01; PRAME; ENSG00000185686; TAA
ASSYISPEK

SEQ ID NO: 70310 - protein, 9 aa, Homo sapiens
  Table A; Target 70310; HLA-A*68:01; PRAME; ENSG00000185686; TAA
ASSYISPEK

SEQ ID NO: 70311 - protein, 9 aa, Homo sapiens
  Table A; Target 70311; HLA-B*27:02; PRAME; ENSG00000185686; TAA
ASSYISPEK

SEQ ID NO: 70312 - protein, 9 aa, Homo sapiens
  Table A; Target 70312; HLA-B*27:05; PRAME; ENSG00000185686; TAA
ASSYISPEK

SEQ ID NO: 70313 - protein, 9 aa, Homo sapiens
  Table A; Target 70313; HLA-C*07:06; PRAME; ENSG00000185686; TAA
ASSYISPEK

SEQ ID NO: 70314 - protein, 9 aa, Homo sapiens
  Table A; Target 70314; HLA-A*02:01; PRAME; ENSG00000185686; TAA
AVLDGLDVL

SEQ ID NO: 70315 - protein, 9 aa, Homo sapiens
  Table A; Target 70315; HLA-A*02:04; PRAME; ENSG00000185686; TAA
AVLDGLDVL

SEQ ID NO: 70316 - protein, 9 aa, Homo sapiens
  Table A; Target 70316; HLA-A*02:07; PRAME; ENSG00000185686; TAA
AVLDGLDVL

SEQ ID NO: 70317 - protein, 9 aa, Homo sapiens
  Table A; Target 70317; HLA-A*23:01; PRAME; ENSG00000185686; TAA
AVLDGLDVL

SEQ ID NO: 70318 - protein, 9 aa, Homo sapiens
  Table A; Target 70318; HLA-A*25:01; PRAME; ENSG00000185686; TAA
AVLDGLDVL

SEQ ID NO: 70319 - protein, 9 aa, Homo sapiens
  Table A; Target 70319; HLA-B*15:01; PRAME; ENSG00000185686; TAA
AVLDGLDVL

SEQ ID NO: 70320 - protein, 9 aa, Homo sapiens
  Table A; Target 70320; HLA-B*27:05; PRAME; ENSG00000185686; TAA
AVLDGLDVL

SEQ ID NO: 70321 - protein, 9 aa, Homo sapiens
  Table A; Target 70321; HLA-B*39:01; PRAME; ENSG00000185686; TAA
AVLDGLDVL

SEQ ID NO: 70322 - protein, 9 aa, Homo sapiens
  Table A; Target 70322; HLA-B*40:01; PRAME; ENSG00000185686; TAA
AVLDGLDVL

SEQ ID NO: 70323 - protein, 9 aa, Homo sapiens
  Table A; Target 70323; HLA-B*46:01; PRAME; ENSG00000185686; TAA
AVLDGLDVL

SEQ ID NO: 70324 - protein, 9 aa, Homo sapiens
  Table A; Target 70324; HLA-B*55:01; PRAME; ENSG00000185686; TAA
AVLDGLDVL

SEQ ID NO: 70325 - protein, 9 aa, Homo sapiens
  Table A; Target 70325; HLA-C*01:02; PRAME; ENSG00000185686; TAA
AVLDGLDVL

SEQ ID NO: 70326 - protein, 9 aa, Homo sapiens
  Table A; Target 70326; HLA-C*03:03; PRAME; ENSG00000185686; TAA
AVLDGLDVL

SEQ ID NO: 70327 - protein, 9 aa, Homo sapiens
  Table A; Target 70327; HLA-C*03:04; PRAME; ENSG00000185686; TAA
AVLDGLDVL

SEQ ID NO: 70328 - protein, 9 aa, Homo sapiens
  Table A; Target 70328; HLA-C*05:01; PRAME; ENSG00000185686; TAA
AVLDGLDVL

SEQ ID NO: 70329 - protein, 10 aa, Homo sapiens
  Table A; Target 70329; HLA-A*02:01; PRAME; ENSG00000185686; TAA
AVLDGLDVLL

SEQ ID NO: 70330 - protein, 10 aa, Homo sapiens
  Table A; Target 70330; HLA-A*02:04; PRAME; ENSG00000185686; TAA
AVLDGLDVLL

SEQ ID NO: 70331 - protein, 10 aa, Homo sapiens
  Table A; Target 70331; HLA-A*02:07; PRAME; ENSG00000185686; TAA
AVLDGLDVLL

SEQ ID NO: 70332 - protein, 10 aa, Homo sapiens
  Table A; Target 70332; HLA-A*03:01; PRAME; ENSG00000185686; TAA
AVLDGLDVLL

SEQ ID NO: 70333 - protein, 10 aa, Homo sapiens
  Table A; Target 70333; HLA-A*03:02; PRAME; ENSG00000185686; TAA
AVLDGLDVLL

SEQ ID NO: 70334 - protein, 10 aa, Homo sapiens
  Table A; Target 70334; HLA-A*11:01; PRAME; ENSG00000185686; TAA
AVLDGLDVLL

SEQ ID NO: 70335 - protein, 10 aa, Homo sapiens
  Table A; Target 70335; HLA-A*68:02; PRAME; ENSG00000185686; TAA
AVLDGLDVLL

SEQ ID NO: 70336 - protein, 11 aa, Homo sapiens
  Table A; Target 70336; HLA-A*02:01; PRAME; ENSG00000185686; TAA
AVLDGLDVLLA

SEQ ID NO: 70337 - protein, 8 aa, Homo sapiens
  Table A; Target 70337; HLA-B*18:01; PRAME; ENSG00000185686; TAA
CELGRPSM

SEQ ID NO: 70338 - protein, 8 aa, Homo sapiens
  Table A; Target 70338; HLA-B*37:01; PRAME; ENSG00000185686; TAA
CELGRPSM

SEQ ID NO: 70339 - protein, 9 aa, Homo sapiens
  Table A; Target 70339; HLA-B*37:01; PRAME; ENSG00000185686; TAA
CELGRPSMV

SEQ ID NO: 70340 - protein, 9 aa, Homo sapiens
  Table A; Target 70340; HLA-B*49:01; PRAME; ENSG00000185686; TAA
CELGRPSMV

SEQ ID NO: 70341 - protein, 10 aa, Homo sapiens
  Table A; Target 70341; HLA-B*44:02; PRAME; ENSG00000185686; TAA
CELGRPSMVW

SEQ ID NO: 70342 - protein, 10 aa, Homo sapiens
  Table A; Target 70342; HLA-B*44:03; PRAME; ENSG00000185686; TAA
CELGRPSMVW

SEQ ID NO: 70343 - protein, 9 aa, Homo sapiens
  Table A; Target 70343; HLA-B*27:05; PRAME; ENSG00000185686; TAA
CRLSEGDVM

SEQ ID NO: 70344 - protein, 9 aa, Homo sapiens
  Table A; Target 70344; HLA-B*38:01; PRAME; ENSG00000185686; TAA
CRLSEGDVM

SEQ ID NO: 70345 - protein, 9 aa, Homo sapiens
  Table A; Target 70345; HLA-B*39:01; PRAME; ENSG00000185686; TAA
CRLSEGDVM

SEQ ID NO: 70346 - protein, 9 aa, Homo sapiens
  Table A; Target 70346; HLA-C*07:01; PRAME; ENSG00000185686; TAA
CRLSEGDVM

SEQ ID NO: 70347 - protein, 9 aa, Homo sapiens
  Table A; Target 70347; HLA-B*46:01; PRAME; ENSG00000185686; TAA
CSQLTTLSF

SEQ ID NO: 70348 - protein, 9 aa, Homo sapiens
  Table A; Target 70348; HLA-B*57:01; PRAME; ENSG00000185686; TAA
CSQLTTLSF

SEQ ID NO: 70349 - protein, 9 aa, Homo sapiens
  Table A; Target 70349; HLA-B*58:01; PRAME; ENSG00000185686; TAA
CSQLTTLSF

SEQ ID NO: 70350 - protein, 9 aa, Homo sapiens
  Table A; Target 70350; HLA-C*01:02; PRAME; ENSG00000185686; TAA
CSQLTTLSF

SEQ ID NO: 70351 - protein, 10 aa, Homo sapiens
  Table A; Target 70351; HLA-A*01:01; PRAME; ENSG00000185686; TAA
CSQLTTLSFY

SEQ ID NO: 70352 - protein, 10 aa, Homo sapiens
  Table A; Target 70352; HLA-C*07:01; PRAME; ENSG00000185686; TAA
CSQLTTLSFY

SEQ ID NO: 70353 - protein, 8 aa, Homo sapiens
  Table A; Target 70353; HLA-B*18:01; PRAME; ENSG00000185686; TAA
DEALAIAA

SEQ ID NO: 70354 - protein, 9 aa, Homo sapiens
  Table A; Target 70354; HLA-A*25:01; PRAME; ENSG00000185686; TAA
DEALAIAAL

SEQ ID NO: 70355 - protein, 9 aa, Homo sapiens
  Table A; Target 70355; HLA-A*30:01; PRAME; ENSG00000185686; TAA
DEALAIAAL

SEQ ID NO: 70356 - protein, 9 aa, Homo sapiens
  Table A; Target 70356; HLA-B*18:01; PRAME; ENSG00000185686; TAA
DEALAIAAL

SEQ ID NO: 70357 - protein, 9 aa, Homo sapiens
  Table A; Target 70357; HLA-B*27:05; PRAME; ENSG00000185686; TAA
DEALAIAAL

SEQ ID NO: 70358 - protein, 9 aa, Homo sapiens
  Table A; Target 70358; HLA-B*37:01; PRAME; ENSG00000185686; TAA
DEALAIAAL

SEQ ID NO: 70359 - protein, 9 aa, Homo sapiens
  Table A; Target 70359; HLA-B*38:01; PRAME; ENSG00000185686; TAA
DEALAIAAL

SEQ ID NO: 70360 - protein, 9 aa, Homo sapiens
  Table A; Target 70360; HLA-B*39:01; PRAME; ENSG00000185686; TAA
DEALAIAAL

SEQ ID NO: 70361 - protein, 9 aa, Homo sapiens
  Table A; Target 70361; HLA-B*40:01; PRAME; ENSG00000185686; TAA
DEALAIAAL

SEQ ID NO: 70362 - protein, 9 aa, Homo sapiens
  Table A; Target 70362; HLA-B*40:02; PRAME; ENSG00000185686; TAA
DEALAIAAL

SEQ ID NO: 70363 - protein, 9 aa, Homo sapiens
  Table A; Target 70363; HLA-B*44:02; PRAME; ENSG00000185686; TAA
DEALAIAAL

SEQ ID NO: 70364 - protein, 9 aa, Homo sapiens
  Table A; Target 70364; HLA-B*44:03; PRAME; ENSG00000185686; TAA
DEALAIAAL

SEQ ID NO: 70365 - protein, 9 aa, Homo sapiens
  Table A; Target 70365; HLA-B*49:01; PRAME; ENSG00000185686; TAA
DEALAIAAL

SEQ ID NO: 70366 - protein, 11 aa, Homo sapiens
  Table A; Target 70366; HLA-B*18:01; PRAME; ENSG00000185686; TAA
DEALAIAALEL

SEQ ID NO: 70367 - protein, 11 aa, Homo sapiens
  Table A; Target 70367; HLA-B*38:01; PRAME; ENSG00000185686; TAA
DECGITDDQLL

SEQ ID NO: 70368 - protein, 8 aa, Homo sapiens
  Table A; Target 70368; HLA-B*18:01; PRAME; ENSG00000185686; TAA
DELFSYLI

SEQ ID NO: 70369 - protein, 8 aa, Homo sapiens
  Table A; Target 70369; HLA-B*49:01; PRAME; ENSG00000185686; TAA
DELFSYLI

SEQ ID NO: 70370 - protein, 10 aa, Homo sapiens
  Table A; Target 70370; HLA-B*27:02; PRAME; ENSG00000185686; TAA
DELFSYLIEK

SEQ ID NO: 70371 - protein, 8 aa, Homo sapiens
  Table A; Target 70371; HLA-B*51:01; PRAME; ENSG00000185686; TAA
DGLDVLLA

SEQ ID NO: 70372 - protein, 9 aa, Homo sapiens
  Table A; Target 70372; HLA-A*33:01; PRAME; ENSG00000185686; TAA
DGLDVLLAQ

SEQ ID NO: 70373 - protein, 8 aa, Homo sapiens
  Table A; Target 70373; HLA-B*08:01; PRAME; ENSG00000185686; TAA
DGRHSQTL

SEQ ID NO: 70374 - protein, 8 aa, Homo sapiens
  Table A; Target 70374; HLA-B*51:01; PRAME; ENSG00000185686; TAA
DGRHSQTL

SEQ ID NO: 70375 - protein, 9 aa, Homo sapiens
  Table A; Target 70375; HLA-A*33:01; PRAME; ENSG00000185686; TAA
DGRHSQTLK

SEQ ID NO: 70376 - protein, 8 aa, Homo sapiens
  Table A; Target 70376; HLA-B*08:01; PRAME; ENSG00000185686; TAA
DIHGTLHL

SEQ ID NO: 70377 - protein, 10 aa, Homo sapiens
  Table A; Target 70377; HLA-A*33:01; PRAME; ENSG00000185686; TAA
DIHGTLHLER

SEQ ID NO: 70378 - protein, 10 aa, Homo sapiens
  Table A; Target 70378; HLA-A*33:03; PRAME; ENSG00000185686; TAA
DIHGTLHLER

SEQ ID NO: 70379 - protein, 10 aa, Homo sapiens
  Table A; Target 70379; HLA-A*68:01; PRAME; ENSG00000185686; TAA
DIHGTLHLER

SEQ ID NO: 70380 - protein, 8 aa, Homo sapiens
  Table A; Target 70380; HLA-B*08:01; PRAME; ENSG00000185686; TAA
DIKMILKM

SEQ ID NO: 70381 - protein, 8 aa, Homo sapiens
  Table A; Target 70381; HLA-B*08:01; PRAME; ENSG00000185686; TAA
DLFLKEGA

SEQ ID NO: 70382 - protein, 8 aa, Homo sapiens
  Table A; Target 70382; HLA-B*08:01; PRAME; ENSG00000185686; TAA
DQLLRHVM

SEQ ID NO: 70383 - protein, 8 aa, Homo sapiens
  Table A; Target 70383; HLA-B*51:01; PRAME; ENSG00000185686; TAA
DSIEDLEV

SEQ ID NO: 70384 - protein, 9 aa, Homo sapiens
  Table A; Target 70384; HLA-A*33:01; PRAME; ENSG00000185686; TAA
DSLFFLRGR

SEQ ID NO: 70385 - protein, 8 aa, Homo sapiens
  Table A; Target 70385; HLA-B*08:01; PRAME; ENSG00000185686; TAA
DVLLAQEV

SEQ ID NO: 70386 - protein, 8 aa, Homo sapiens
  Table A; Target 70386; HLA-B*18:01; PRAME; ENSG00000185686; TAA
DVLLAQEV

SEQ ID NO: 70387 - protein, 8 aa, Homo sapiens
  Table A; Target 70387; HLA-B*51:01; PRAME; ENSG00000185686; TAA
DVLLAQEV

SEQ ID NO: 70388 - protein, 8 aa, Homo sapiens
  Table A; Target 70388; HLA-C*07:01; PRAME; ENSG00000185686; TAA
DVLLAQEV

SEQ ID NO: 70389 - protein, 9 aa, Homo sapiens
  Table A; Target 70389; HLA-A*33:01; PRAME; ENSG00000185686; TAA
DVLLAQEVR

SEQ ID NO: 70390 - protein, 9 aa, Homo sapiens
  Table A; Target 70390; HLA-A*33:03; PRAME; ENSG00000185686; TAA
DVLLAQEVR

SEQ ID NO: 70391 - protein, 9 aa, Homo sapiens
  Table A; Target 70391; HLA-A*68:01; PRAME; ENSG00000185686; TAA
DVLLAQEVR

SEQ ID NO: 70392 - protein, 9 aa, Homo sapiens
  Table A; Target 70392; HLA-C*07:06; PRAME; ENSG00000185686; TAA
DVLLAQEVR

SEQ ID NO: 70393 - protein, 11 aa, Homo sapiens
  Table A; Target 70393; HLA-A*33:01; PRAME; ENSG00000185686; TAA
DVLLAQEVRPR

SEQ ID NO: 70394 - protein, 11 aa, Homo sapiens
  Table A; Target 70394; HLA-A*33:03; PRAME; ENSG00000185686; TAA
DVLLAQEVRPR

SEQ ID NO: 70395 - protein, 11 aa, Homo sapiens
  Table A; Target 70395; HLA-A*68:01; PRAME; ENSG00000185686; TAA
DVLLAQEVRPR

SEQ ID NO: 70396 - protein, 11 aa, Homo sapiens
  Table A; Target 70396; HLA-C*07:06; PRAME; ENSG00000185686; TAA
DVLLAQEVRPR

SEQ ID NO: 70397 - protein, 11 aa, Homo sapiens
  Table A; Target 70397; HLA-B*51:01; PRAME; ENSG00000185686; TAA
DVMHLSQSPSV

SEQ ID NO: 70398 - protein, 9 aa, Homo sapiens
  Table A; Target 70398; HLA-A*25:01; PRAME; ENSG00000185686; TAA
DVSPEPLQA

SEQ ID NO: 70399 - protein, 9 aa, Homo sapiens
  Table A; Target 70399; HLA-A*26:01; PRAME; ENSG00000185686; TAA
DVSPEPLQA

SEQ ID NO: 70400 - protein, 9 aa, Homo sapiens
  Table A; Target 70400; HLA-A*68:01; PRAME; ENSG00000185686; TAA
DVSPEPLQA

SEQ ID NO: 70401 - protein, 10 aa, Homo sapiens
  Table A; Target 70401; HLA-A*25:01; PRAME; ENSG00000185686; TAA
DVSPEPLQAL

SEQ ID NO: 70402 - protein, 10 aa, Homo sapiens
  Table A; Target 70402; HLA-A*26:01; PRAME; ENSG00000185686; TAA
DVSPEPLQAL

SEQ ID NO: 70403 - protein, 10 aa, Homo sapiens
  Table A; Target 70403; HLA-A*68:01; PRAME; ENSG00000185686; TAA
DVSPEPLQAL

SEQ ID NO: 70404 - protein, 10 aa, Homo sapiens
  Table A; Target 70404; HLA-A*68:02; PRAME; ENSG00000185686; TAA
DVSPEPLQAL

SEQ ID NO: 70405 - protein, 10 aa, Homo sapiens
  Table A; Target 70405; HLA-B*27:05; PRAME; ENSG00000185686; TAA
DVSPEPLQAL

SEQ ID NO: 70406 - protein, 10 aa, Homo sapiens
  Table A; Target 70406; HLA-B*35:03; PRAME; ENSG00000185686; TAA
DVSPEPLQAL

SEQ ID NO: 70407 - protein, 10 aa, Homo sapiens
  Table A; Target 70407; HLA-B*38:01; PRAME; ENSG00000185686; TAA
DVSPEPLQAL

SEQ ID NO: 70408 - protein, 10 aa, Homo sapiens
  Table A; Target 70408; HLA-B*39:01; PRAME; ENSG00000185686; TAA
DVSPEPLQAL

SEQ ID NO: 70409 - protein, 10 aa, Homo sapiens
  Table A; Target 70409; HLA-C*07:06; PRAME; ENSG00000185686; TAA
DVSPEPLQAL

SEQ ID NO: 70410 - protein, 11 aa, Homo sapiens
  Table A; Target 70410; HLA-A*25:01; PRAME; ENSG00000185686; TAA
DVSPEPLQALL

SEQ ID NO: 70411 - protein, 11 aa, Homo sapiens
  Table A; Target 70411; HLA-A*26:01; PRAME; ENSG00000185686; TAA
DVSPEPLQALL

SEQ ID NO: 70412 - protein, 11 aa, Homo sapiens
  Table A; Target 70412; HLA-A*33:01; PRAME; ENSG00000185686; TAA
DVSPEPLQALL

SEQ ID NO: 70413 - protein, 11 aa, Homo sapiens
  Table A; Target 70413; HLA-A*33:03; PRAME; ENSG00000185686; TAA
DVSPEPLQALL

SEQ ID NO: 70414 - protein, 11 aa, Homo sapiens
  Table A; Target 70414; HLA-A*68:01; PRAME; ENSG00000185686; TAA
DVSPEPLQALL

SEQ ID NO: 70415 - protein, 11 aa, Homo sapiens
  Table A; Target 70415; HLA-A*68:02; PRAME; ENSG00000185686; TAA
DVSPEPLQALL

SEQ ID NO: 70416 - protein, 11 aa, Homo sapiens
  Table A; Target 70416; HLA-C*07:06; PRAME; ENSG00000185686; TAA
DVSPEPLQALL

SEQ ID NO: 70417 - protein, 8 aa, Homo sapiens
  Table A; Target 70417; HLA-A*33:03; PRAME; ENSG00000185686; TAA
EAAQPMTK

SEQ ID NO: 70418 - protein, 8 aa, Homo sapiens
  Table A; Target 70418; HLA-A*68:01; PRAME; ENSG00000185686; TAA
EAAQPMTK

SEQ ID NO: 70419 - protein, 8 aa, Homo sapiens
  Table A; Target 70419; HLA-B*27:02; PRAME; ENSG00000185686; TAA
EAAQPMTK

SEQ ID NO: 70420 - protein, 8 aa, Homo sapiens
  Table A; Target 70420; HLA-B*51:01; PRAME; ENSG00000185686; TAA
EAAQPMTK

SEQ ID NO: 70421 - protein, 8 aa, Homo sapiens
  Table A; Target 70421; HLA-C*07:01; PRAME; ENSG00000185686; TAA
EAAQPMTK

SEQ ID NO: 70422 - protein, 9 aa, Homo sapiens
  Table A; Target 70422; HLA-A*03:01; PRAME; ENSG00000185686; TAA
EAAQPMTKK

SEQ ID NO: 70423 - protein, 9 aa, Homo sapiens
  Table A; Target 70423; HLA-A*11:01; PRAME; ENSG00000185686; TAA
EAAQPMTKK

SEQ ID NO: 70424 - protein, 9 aa, Homo sapiens
  Table A; Target 70424; HLA-A*25:01; PRAME; ENSG00000185686; TAA
EAAQPMTKK

SEQ ID NO: 70425 - protein, 9 aa, Homo sapiens
  Table A; Target 70425; HLA-A*26:01; PRAME; ENSG00000185686; TAA
EAAQPMTKK

SEQ ID NO: 70426 - protein, 9 aa, Homo sapiens
  Table A; Target 70426; HLA-A*33:01; PRAME; ENSG00000185686; TAA
EAAQPMTKK

SEQ ID NO: 70427 - protein, 9 aa, Homo sapiens
  Table A; Target 70427; HLA-A*33:03; PRAME; ENSG00000185686; TAA
EAAQPMTKK

SEQ ID NO: 70428 - protein, 9 aa, Homo sapiens
  Table A; Target 70428; HLA-A*68:01; PRAME; ENSG00000185686; TAA
EAAQPMTKK

SEQ ID NO: 70429 - protein, 9 aa, Homo sapiens
  Table A; Target 70429; HLA-B*51:01; PRAME; ENSG00000185686; TAA
EAAQPMTKK

SEQ ID NO: 70430 - protein, 9 aa, Homo sapiens
  Table A; Target 70430; HLA-C*07:06; PRAME; ENSG00000185686; TAA
EAAQPMTKK

SEQ ID NO: 70431 - protein, 10 aa, Homo sapiens
  Table A; Target 70431; HLA-A*33:01; PRAME; ENSG00000185686; TAA
EAAQPMTKKR

SEQ ID NO: 70432 - protein, 10 aa, Homo sapiens
  Table A; Target 70432; HLA-A*33:03; PRAME; ENSG00000185686; TAA
EAAQPMTKKR

SEQ ID NO: 70433 - protein, 10 aa, Homo sapiens
  Table A; Target 70433; HLA-A*68:01; PRAME; ENSG00000185686; TAA
EAAQPMTKKR

SEQ ID NO: 70434 - protein, 10 aa, Homo sapiens
  Table A; Target 70434; HLA-C*07:06; PRAME; ENSG00000185686; TAA
EAAQPMTKKR

SEQ ID NO: 70435 - protein, 9 aa, Homo sapiens
  Table A; Target 70435; HLA-A*68:02; PRAME; ENSG00000185686; TAA
EAEQPFIPV

SEQ ID NO: 70436 - protein, 11 aa, Homo sapiens
  Table A; Target 70436; HLA-A*68:02; PRAME; ENSG00000185686; TAA
EAEQPFIPVEV

SEQ ID NO: 70437 - protein, 8 aa, Homo sapiens
  Table A; Target 70437; HLA-A*25:01; PRAME; ENSG00000185686; TAA
EALAIAAL

SEQ ID NO: 70438 - protein, 8 aa, Homo sapiens
  Table A; Target 70438; HLA-B*08:01; PRAME; ENSG00000185686; TAA
EALAIAAL

SEQ ID NO: 70439 - protein, 8 aa, Homo sapiens
  Table A; Target 70439; HLA-B*18:01; PRAME; ENSG00000185686; TAA
EALAIAAL

SEQ ID NO: 70440 - protein, 8 aa, Homo sapiens
  Table A; Target 70440; HLA-B*35:01; PRAME; ENSG00000185686; TAA
EALAIAAL

SEQ ID NO: 70441 - protein, 8 aa, Homo sapiens
  Table A; Target 70441; HLA-B*35:03; PRAME; ENSG00000185686; TAA
EALAIAAL

SEQ ID NO: 70442 - protein, 8 aa, Homo sapiens
  Table A; Target 70442; HLA-B*51:01; PRAME; ENSG00000185686; TAA
EALAIAAL

SEQ ID NO: 70443 - protein, 10 aa, Homo sapiens
  Table A; Target 70443; HLA-A*25:01; PRAME; ENSG00000185686; TAA
EALAIAALEL

SEQ ID NO: 70444 - protein, 10 aa, Homo sapiens
  Table A; Target 70444; HLA-B*35:03; PRAME; ENSG00000185686; TAA
EALAIAALEL

SEQ ID NO: 70445 - protein, 8 aa, Homo sapiens
  Table A; Target 70445; HLA-C*07:01; PRAME; ENSG00000185686; TAA
EDIHGTLH

SEQ ID NO: 70446 - protein, 9 aa, Homo sapiens
  Table A; Target 70446; HLA-A*68:02; PRAME; ENSG00000185686; TAA
EDIHGTLHL

SEQ ID NO: 70447 - protein, 9 aa, Homo sapiens
  Table A; Target 70447; HLA-B*40:02; PRAME; ENSG00000185686; TAA
EDIHGTLHL

SEQ ID NO: 70448 - protein, 9 aa, Homo sapiens
  Table A; Target 70448; HLA-B*44:03; PRAME; ENSG00000185686; TAA
EDIHGTLHL

SEQ ID NO: 70449 - protein, 11 aa, Homo sapiens
  Table A; Target 70449; HLA-A*33:01; PRAME; ENSG00000185686; TAA
EDIHGTLHLER

SEQ ID NO: 70450 - protein, 9 aa, Homo sapiens
  Table A; Target 70450; HLA-A*25:01; PRAME; ENSG00000185686; TAA
EDLEVTCTW

SEQ ID NO: 70451 - protein, 9 aa, Homo sapiens
  Table A; Target 70451; HLA-B*18:01; PRAME; ENSG00000185686; TAA
EDLEVTCTW

SEQ ID NO: 70452 - protein, 9 aa, Homo sapiens
  Table A; Target 70452; HLA-B*27:02; PRAME; ENSG00000185686; TAA
EDLEVTCTW

SEQ ID NO: 70453 - protein, 9 aa, Homo sapiens
  Table A; Target 70453; HLA-B*44:02; PRAME; ENSG00000185686; TAA
EDLEVTCTW

SEQ ID NO: 70454 - protein, 9 aa, Homo sapiens
  Table A; Target 70454; HLA-B*44:03; PRAME; ENSG00000185686; TAA
EDLEVTCTW

SEQ ID NO: 70455 - protein, 9 aa, Homo sapiens
  Table A; Target 70455; HLA-C*16:04; PRAME; ENSG00000185686; TAA
EDLEVTCTW

SEQ ID NO: 70456 - protein, 8 aa, Homo sapiens
  Table A; Target 70456; HLA-B*18:01; PRAME; ENSG00000185686; TAA
EEQYIAQF

SEQ ID NO: 70457 - protein, 8 aa, Homo sapiens
  Table A; Target 70457; HLA-B*37:01; PRAME; ENSG00000185686; TAA
EEQYIAQF

SEQ ID NO: 70458 - protein, 8 aa, Homo sapiens
  Table A; Target 70458; HLA-B*44:02; PRAME; ENSG00000185686; TAA
EEQYIAQF

SEQ ID NO: 70459 - protein, 8 aa, Homo sapiens
  Table A; Target 70459; HLA-B*44:03; PRAME; ENSG00000185686; TAA
EEQYIAQF

SEQ ID NO: 70460 - protein, 9 aa, Homo sapiens
  Table A; Target 70460; HLA-A*01:01; PRAME; ENSG00000185686; TAA
ELAGQSLLK

SEQ ID NO: 70461 - protein, 9 aa, Homo sapiens
  Table A; Target 70461; HLA-A*03:01; PRAME; ENSG00000185686; TAA
ELAGQSLLK

SEQ ID NO: 70462 - protein, 9 aa, Homo sapiens
  Table A; Target 70462; HLA-A*03:02; PRAME; ENSG00000185686; TAA
ELAGQSLLK

SEQ ID NO: 70463 - protein, 9 aa, Homo sapiens
  Table A; Target 70463; HLA-A*33:03; PRAME; ENSG00000185686; TAA
ELAGQSLLK

SEQ ID NO: 70464 - protein, 9 aa, Homo sapiens
  Table A; Target 70464; HLA-A*68:01; PRAME; ENSG00000185686; TAA
ELAGQSLLK

SEQ ID NO: 70465 - protein, 9 aa, Homo sapiens
  Table A; Target 70465; HLA-C*07:06; PRAME; ENSG00000185686; TAA
ELAGQSLLK

SEQ ID NO: 70466 - protein, 8 aa, Homo sapiens
  Table A; Target 70466; HLA-A*01:01; PRAME; ENSG00000185686; TAA
ELFPPLFM

SEQ ID NO: 70467 - protein, 9 aa, Homo sapiens
  Table A; Target 70467; HLA-A*02:01; PRAME; ENSG00000185686; TAA
ELFPPLFMA

SEQ ID NO: 70468 - protein, 9 aa, Homo sapiens
  Table A; Target 70468; HLA-A*02:03; PRAME; ENSG00000185686; TAA
ELFPPLFMA

SEQ ID NO: 70469 - protein, 9 aa, Homo sapiens
  Table A; Target 70469; HLA-A*02:04; PRAME; ENSG00000185686; TAA
ELFPPLFMA

SEQ ID NO: 70470 - protein, 9 aa, Homo sapiens
  Table A; Target 70470; HLA-A*02:07; PRAME; ENSG00000185686; TAA
ELFPPLFMA

SEQ ID NO: 70471 - protein, 9 aa, Homo sapiens
  Table A; Target 70471; HLA-A*68:02; PRAME; ENSG00000185686; TAA
ELFPPLFMA

SEQ ID NO: 70472 - protein, 9 aa, Homo sapiens
  Table A; Target 70472; HLA-B*54:01; PRAME; ENSG00000185686; TAA
ELFPPLFMA

SEQ ID NO: 70473 - protein, 10 aa, Homo sapiens
  Table A; Target 70473; HLA-A*02:03; PRAME; ENSG00000185686; TAA
ELFPPLFMAA

SEQ ID NO: 70474 - protein, 10 aa, Homo sapiens
  Table A; Target 70474; HLA-A*02:07; PRAME; ENSG00000185686; TAA
ELFPPLFMAA

SEQ ID NO: 70475 - protein, 10 aa, Homo sapiens
  Table A; Target 70475; HLA-A*68:02; PRAME; ENSG00000185686; TAA
ELFPPLFMAA

SEQ ID NO: 70476 - protein, 10 aa, Homo sapiens
  Table A; Target 70476; HLA-B*54:01; PRAME; ENSG00000185686; TAA
ELFPPLFMAA

SEQ ID NO: 70477 - protein, 11 aa, Homo sapiens
  Table A; Target 70477; HLA-A*68:02; PRAME; ENSG00000185686; TAA
ELFPPLFMAAF

SEQ ID NO: 70478 - protein, 9 aa, Homo sapiens
  Table A; Target 70478; HLA-A*03:01; PRAME; ENSG00000185686; TAA
ELFSYLIEK

SEQ ID NO: 70479 - protein, 9 aa, Homo sapiens
  Table A; Target 70479; HLA-A*03:02; PRAME; ENSG00000185686; TAA
ELFSYLIEK

SEQ ID NO: 70480 - protein, 9 aa, Homo sapiens
  Table A; Target 70480; HLA-A*11:01; PRAME; ENSG00000185686; TAA
ELFSYLIEK

SEQ ID NO: 70481 - protein, 9 aa, Homo sapiens
  Table A; Target 70481; HLA-A*33:01; PRAME; ENSG00000185686; TAA
ELFSYLIEK

SEQ ID NO: 70482 - protein, 9 aa, Homo sapiens
  Table A; Target 70482; HLA-A*33:03; PRAME; ENSG00000185686; TAA
ELFSYLIEK

SEQ ID NO: 70483 - protein, 9 aa, Homo sapiens
  Table A; Target 70483; HLA-A*68:01; PRAME; ENSG00000185686; TAA
ELFSYLIEK

SEQ ID NO: 70484 - protein, 9 aa, Homo sapiens
  Table A; Target 70484; HLA-A*68:02; PRAME; ENSG00000185686; TAA
ELFSYLIEK

SEQ ID NO: 70485 - protein, 9 aa, Homo sapiens
  Table A; Target 70485; HLA-B*27:02; PRAME; ENSG00000185686; TAA
ELFSYLIEK

SEQ ID NO: 70486 - protein, 9 aa, Homo sapiens
  Table A; Target 70486; HLA-C*07:06; PRAME; ENSG00000185686; TAA
ELFSYLIEK

SEQ ID NO: 70487 - protein, 10 aa, Homo sapiens
  Table A; Target 70487; HLA-A*02:03; PRAME; ENSG00000185686; TAA
ELFSYLIEKV

SEQ ID NO: 70488 - protein, 10 aa, Homo sapiens
  Table A; Target 70488; HLA-A*02:04; PRAME; ENSG00000185686; TAA
ELFSYLIEKV

SEQ ID NO: 70489 - protein, 10 aa, Homo sapiens
  Table A; Target 70489; HLA-A*02:07; PRAME; ENSG00000185686; TAA
ELFSYLIEKV

SEQ ID NO: 70490 - protein, 10 aa, Homo sapiens
  Table A; Target 70490; HLA-A*26:01; PRAME; ENSG00000185686; TAA
ELFSYLIEKV

SEQ ID NO: 70491 - protein, 10 aa, Homo sapiens
  Table A; Target 70491; HLA-A*68:02; PRAME; ENSG00000185686; TAA
ELFSYLIEKV

SEQ ID NO: 70492 - protein, 9 aa, Homo sapiens
  Table A; Target 70492; HLA-A*25:01; PRAME; ENSG00000185686; TAA
ELGRPSMVW

SEQ ID NO: 70493 - protein, 8 aa, Homo sapiens
  Table A; Target 70493; HLA-B*35:03; PRAME; ENSG00000185686; TAA
EPEAAQPM

SEQ ID NO: 70494 - protein, 10 aa, Homo sapiens
  Table A; Target 70494; HLA-A*68:01; PRAME; ENSG00000185686; TAA
EPEAAQPMTK

SEQ ID NO: 70495 - protein, 10 aa, Homo sapiens
  Table A; Target 70495; HLA-B*27:02; PRAME; ENSG00000185686; TAA
EPEAAQPMTK

SEQ ID NO: 70496 - protein, 10 aa, Homo sapiens
  Table A; Target 70496; HLA-C*07:06; PRAME; ENSG00000185686; TAA
EPEAAQPMTK

SEQ ID NO: 70497 - protein, 9 aa, Homo sapiens
  Table A; Target 70497; HLA-A*33:01; PRAME; ENSG00000185686; TAA
EPLQALLER

SEQ ID NO: 70498 - protein, 9 aa, Homo sapiens
  Table A; Target 70498; HLA-A*33:03; PRAME; ENSG00000185686; TAA
EPLQALLER

SEQ ID NO: 70499 - protein, 9 aa, Homo sapiens
  Table A; Target 70499; HLA-A*68:01; PRAME; ENSG00000185686; TAA
EPLQALLER

SEQ ID NO: 70500 - protein, 9 aa, Homo sapiens
  Table A; Target 70500; HLA-C*07:06; PRAME; ENSG00000185686; TAA
EPLQALLER

SEQ ID NO: 70501 - protein, 10 aa, Homo sapiens
  Table A; Target 70501; HLA-B*54:01; PRAME; ENSG00000185686; TAA
EPLQALLERA

SEQ ID NO: 70502 - protein, 10 aa, Homo sapiens
  Table A; Target 70502; HLA-B*56:01; PRAME; ENSG00000185686; TAA
EPLQALLERA

SEQ ID NO: 70503 - protein, 9 aa, Homo sapiens
  Table A; Target 70503; HLA-A*02:07; PRAME; ENSG00000185686; TAA
EQPFIPVEV

SEQ ID NO: 70504 - protein, 9 aa, Homo sapiens
  Table A; Target 70504; HLA-A*26:01; PRAME; ENSG00000185686; TAA
EQPFIPVEV

SEQ ID NO: 70505 - protein, 9 aa, Homo sapiens
  Table A; Target 70505; HLA-A*68:02; PRAME; ENSG00000185686; TAA
EQPFIPVEV

SEQ ID NO: 70506 - protein, 9 aa, Homo sapiens
  Table A; Target 70506; HLA-B*13:02; PRAME; ENSG00000185686; TAA
EQPFIPVEV

SEQ ID NO: 70507 - protein, 11 aa, Homo sapiens
  Table A; Target 70507; HLA-A*26:01; PRAME; ENSG00000185686; TAA
EQYIAQFTSQF

SEQ ID NO: 70508 - protein, 11 aa, Homo sapiens
  Table A; Target 70508; HLA-B*38:01; PRAME; ENSG00000185686; TAA
EQYIAQFTSQF

SEQ ID NO: 70509 - protein, 9 aa, Homo sapiens
  Table A; Target 70509; HLA-A*33:01; PRAME; ENSG00000185686; TAA
ERLAYLHAR

SEQ ID NO: 70510 - protein, 9 aa, Homo sapiens
  Table A; Target 70510; HLA-A*33:03; PRAME; ENSG00000185686; TAA
ERLAYLHAR

SEQ ID NO: 70511 - protein, 10 aa, Homo sapiens
  Table A; Target 70511; HLA-A*25:01; PRAME; ENSG00000185686; TAA
ESYEDIHGTL

SEQ ID NO: 70512 - protein, 10 aa, Homo sapiens
  Table A; Target 70512; HLA-A*26:01; PRAME; ENSG00000185686; TAA
ESYEDIHGTL

SEQ ID NO: 70513 - protein, 10 aa, Homo sapiens
  Table A; Target 70513; HLA-A*33:03; PRAME; ENSG00000185686; TAA
ESYEDIHGTL

SEQ ID NO: 70514 - protein, 10 aa, Homo sapiens
  Table A; Target 70514; HLA-A*68:01; PRAME; ENSG00000185686; TAA
ESYEDIHGTL

SEQ ID NO: 70515 - protein, 10 aa, Homo sapiens
  Table A; Target 70515; HLA-A*68:02; PRAME; ENSG00000185686; TAA
ESYEDIHGTL

SEQ ID NO: 70516 - protein, 10 aa, Homo sapiens
  Table A; Target 70516; HLA-A*25:01; PRAME; ENSG00000185686; TAA
ETFKAVLDGL

SEQ ID NO: 70517 - protein, 10 aa, Homo sapiens
  Table A; Target 70517; HLA-A*26:01; PRAME; ENSG00000185686; TAA
ETFKAVLDGL

SEQ ID NO: 70518 - protein, 10 aa, Homo sapiens
  Table A; Target 70518; HLA-A*68:01; PRAME; ENSG00000185686; TAA
ETFKAVLDGL

SEQ ID NO: 70519 - protein, 10 aa, Homo sapiens
  Table A; Target 70519; HLA-A*68:02; PRAME; ENSG00000185686; TAA
ETFKAVLDGL

SEQ ID NO: 70520 - protein, 9 aa, Homo sapiens
  Table A; Target 70520; HLA-A*26:01; PRAME; ENSG00000185686; TAA
ETLSITNCR

SEQ ID NO: 70521 - protein, 9 aa, Homo sapiens
  Table A; Target 70521; HLA-A*33:01; PRAME; ENSG00000185686; TAA
ETLSITNCR

SEQ ID NO: 70522 - protein, 9 aa, Homo sapiens
  Table A; Target 70522; HLA-A*33:03; PRAME; ENSG00000185686; TAA
ETLSITNCR

SEQ ID NO: 70523 - protein, 9 aa, Homo sapiens
  Table A; Target 70523; HLA-A*68:01; PRAME; ENSG00000185686; TAA
ETLSITNCR

SEQ ID NO: 70524 - protein, 9 aa, Homo sapiens
  Table A; Target 70524; HLA-C*07:06; PRAME; ENSG00000185686; TAA
ETLSITNCR

SEQ ID NO: 70525 - protein, 10 aa, Homo sapiens
  Table A; Target 70525; HLA-A*33:03; PRAME; ENSG00000185686; TAA
ETLSITNCRL

SEQ ID NO: 70526 - protein, 10 aa, Homo sapiens
  Table A; Target 70526; HLA-A*68:02; PRAME; ENSG00000185686; TAA
ETLSITNCRL

SEQ ID NO: 70527 - protein, 8 aa, Homo sapiens
  Table A; Target 70527; HLA-B*08:01; PRAME; ENSG00000185686; TAA
FAMPMQDI

SEQ ID NO: 70528 - protein, 8 aa, Homo sapiens
  Table A; Target 70528; HLA-B*13:02; PRAME; ENSG00000185686; TAA
FAMPMQDI

SEQ ID NO: 70529 - protein, 8 aa, Homo sapiens
  Table A; Target 70529; HLA-B*46:01; PRAME; ENSG00000185686; TAA
FAMPMQDI

SEQ ID NO: 70530 - protein, 8 aa, Homo sapiens
  Table A; Target 70530; HLA-B*51:01; PRAME; ENSG00000185686; TAA
FAMPMQDI

SEQ ID NO: 70531 - protein, 8 aa, Homo sapiens
  Table A; Target 70531; HLA-B*54:01; PRAME; ENSG00000185686; TAA
FAMPMQDI

SEQ ID NO: 70532 - protein, 8 aa, Homo sapiens
  Table A; Target 70532; HLA-C*03:03; PRAME; ENSG00000185686; TAA
FAMPMQDI

SEQ ID NO: 70533 - protein, 8 aa, Homo sapiens
  Table A; Target 70533; HLA-C*03:04; PRAME; ENSG00000185686; TAA
FAMPMQDI

SEQ ID NO: 70534 - protein, 8 aa, Homo sapiens
  Table A; Target 70534; HLA-C*05:01; PRAME; ENSG00000185686; TAA
FAMPMQDI

SEQ ID NO: 70535 - protein, 8 aa, Homo sapiens
  Table A; Target 70535; HLA-C*16:02; PRAME; ENSG00000185686; TAA
FAMPMQDI

SEQ ID NO: 70536 - protein, 8 aa, Homo sapiens
  Table A; Target 70536; HLA-C*16:04; PRAME; ENSG00000185686; TAA
FAMPMQDI

SEQ ID NO: 70537 - protein, 9 aa, Homo sapiens
  Table A; Target 70537; HLA-B*27:02; PRAME; ENSG00000185686; TAA
FAMPMQDIK

SEQ ID NO: 70538 - protein, 10 aa, Homo sapiens
  Table A; Target 70538; HLA-B*35:01; PRAME; ENSG00000185686; TAA
FAMPMQDIKM

SEQ ID NO: 70539 - protein, 10 aa, Homo sapiens
  Table A; Target 70539; HLA-B*35:03; PRAME; ENSG00000185686; TAA
FAMPMQDIKM

SEQ ID NO: 70540 - protein, 10 aa, Homo sapiens
  Table A; Target 70540; HLA-B*54:01; PRAME; ENSG00000185686; TAA
FAMPMQDIKM

SEQ ID NO: 70541 - protein, 10 aa, Homo sapiens
  Table A; Target 70541; HLA-B*55:01; PRAME; ENSG00000185686; TAA
FAMPMQDIKM

SEQ ID NO: 70542 - protein, 10 aa, Homo sapiens
  Table A; Target 70542; HLA-C*02:02; PRAME; ENSG00000185686; TAA
FAMPMQDIKM

SEQ ID NO: 70543 - protein, 9 aa, Homo sapiens
  Table A; Target 70543; HLA-A*30:01; PRAME; ENSG00000185686; TAA
FDGRHSQTL

SEQ ID NO: 70544 - protein, 9 aa, Homo sapiens
  Table A; Target 70544; HLA-B*37:01; PRAME; ENSG00000185686; TAA
FDGRHSQTL

SEQ ID NO: 70545 - protein, 9 aa, Homo sapiens
  Table A; Target 70545; HLA-B*38:01; PRAME; ENSG00000185686; TAA
FDGRHSQTL

SEQ ID NO: 70546 - protein, 9 aa, Homo sapiens
  Table A; Target 70546; HLA-B*40:02; PRAME; ENSG00000185686; TAA
FDGRHSQTL

SEQ ID NO: 70547 - protein, 9 aa, Homo sapiens
  Table A; Target 70547; HLA-C*04:01; PRAME; ENSG00000185686; TAA
FDGRHSQTL

SEQ ID NO: 70548 - protein, 9 aa, Homo sapiens
  Table A; Target 70548; HLA-C*07:01; PRAME; ENSG00000185686; TAA
FDGRHSQTL

SEQ ID NO: 70549 - protein, 9 aa, Homo sapiens
  Table A; Target 70549; HLA-C*07:02; PRAME; ENSG00000185686; TAA
FDGRHSQTL

SEQ ID NO: 70550 - protein, 10 aa, Homo sapiens
  Table A; Target 70550; HLA-A*02:07; PRAME; ENSG00000185686; TAA
FIPVEVLVDL

SEQ ID NO: 70551 - protein, 10 aa, Homo sapiens
  Table A; Target 70551; HLA-A*02:03; PRAME; ENSG00000185686; TAA
FLKEGACDEL

SEQ ID NO: 70552 - protein, 10 aa, Homo sapiens
  Table A; Target 70552; HLA-B*46:01; PRAME; ENSG00000185686; TAA
FLKEGACDEL

SEQ ID NO: 70553 - protein, 9 aa, Homo sapiens
  Table A; Target 70553; HLA-A*02:03; PRAME; ENSG00000185686; TAA
FLRGRLDQL

SEQ ID NO: 70554 - protein, 9 aa, Homo sapiens
  Table A; Target 70554; HLA-A*02:04; PRAME; ENSG00000185686; TAA
FLRGRLDQL

SEQ ID NO: 70555 - protein, 9 aa, Homo sapiens
  Table A; Target 70555; HLA-B*35:01; PRAME; ENSG00000185686; TAA
FPEPEAAQP

SEQ ID NO: 70556 - protein, 9 aa, Homo sapiens
  Table A; Target 70556; HLA-B*35:03; PRAME; ENSG00000185686; TAA
FPEPEAAQP

SEQ ID NO: 70557 - protein, 9 aa, Homo sapiens
  Table A; Target 70557; HLA-B*55:01; PRAME; ENSG00000185686; TAA
FPEPEAAQP

SEQ ID NO: 70558 - protein, 10 aa, Homo sapiens
  Table A; Target 70558; HLA-A*01:01; PRAME; ENSG00000185686; TAA
FPEPEAAQPM

SEQ ID NO: 70559 - protein, 10 aa, Homo sapiens
  Table A; Target 70559; HLA-B*07:02; PRAME; ENSG00000185686; TAA
FPEPEAAQPM

SEQ ID NO: 70560 - protein, 10 aa, Homo sapiens
  Table A; Target 70560; HLA-B*27:02; PRAME; ENSG00000185686; TAA
FPEPEAAQPM

SEQ ID NO: 70561 - protein, 10 aa, Homo sapiens
  Table A; Target 70561; HLA-B*35:01; PRAME; ENSG00000185686; TAA
FPEPEAAQPM

SEQ ID NO: 70562 - protein, 10 aa, Homo sapiens
  Table A; Target 70562; HLA-B*35:03; PRAME; ENSG00000185686; TAA
FPEPEAAQPM

SEQ ID NO: 70563 - protein, 10 aa, Homo sapiens
  Table A; Target 70563; HLA-B*54:01; PRAME; ENSG00000185686; TAA
FPEPEAAQPM

SEQ ID NO: 70564 - protein, 10 aa, Homo sapiens
  Table A; Target 70564; HLA-B*55:01; PRAME; ENSG00000185686; TAA
FPEPEAAQPM

SEQ ID NO: 70565 - protein, 10 aa, Homo sapiens
  Table A; Target 70565; HLA-C*01:02; PRAME; ENSG00000185686; TAA
FPEPEAAQPM

SEQ ID NO: 70566 - protein, 10 aa, Homo sapiens
  Table A; Target 70566; HLA-C*03:03; PRAME; ENSG00000185686; TAA
FPEPEAAQPM

SEQ ID NO: 70567 - protein, 10 aa, Homo sapiens
  Table A; Target 70567; HLA-C*04:01; PRAME; ENSG00000185686; TAA
FPEPEAAQPM

SEQ ID NO: 70568 - protein, 10 aa, Homo sapiens
  Table A; Target 70568; HLA-C*05:01; PRAME; ENSG00000185686; TAA
FPEPEAAQPM

SEQ ID NO: 70569 - protein, 10 aa, Homo sapiens
  Table A; Target 70569; HLA-C*07:02; PRAME; ENSG00000185686; TAA
FPEPEAAQPM

SEQ ID NO: 70570 - protein, 10 aa, Homo sapiens
  Table A; Target 70570; HLA-C*07:04; PRAME; ENSG00000185686; TAA
FPEPEAAQPM

SEQ ID NO: 70571 - protein, 11 aa, Homo sapiens
  Table A; Target 70571; HLA-B*35:01; PRAME; ENSG00000185686; TAA
FPEPEAAQPMT

SEQ ID NO: 70572 - protein, 11 aa, Homo sapiens
  Table A; Target 70572; HLA-B*35:03; PRAME; ENSG00000185686; TAA
FPEPEAAQPMT

SEQ ID NO: 70573 - protein, 11 aa, Homo sapiens
  Table A; Target 70573; HLA-B*54:01; PRAME; ENSG00000185686; TAA
FPEPEAAQPMT

SEQ ID NO: 70574 - protein, 11 aa, Homo sapiens
  Table A; Target 70574; HLA-B*55:01; PRAME; ENSG00000185686; TAA
FPEPEAAQPMT

SEQ ID NO: 70575 - protein, 11 aa, Homo sapiens
  Table A; Target 70575; HLA-C*04:01; PRAME; ENSG00000185686; TAA
FPEPEAAQPMT

SEQ ID NO: 70576 - protein, 8 aa, Homo sapiens
  Table A; Target 70576; HLA-B*54:01; PRAME; ENSG00000185686; TAA
FPPLFMAA

SEQ ID NO: 70577 - protein, 8 aa, Homo sapiens
  Table A; Target 70577; HLA-B*56:01; PRAME; ENSG00000185686; TAA
FPPLFMAA

SEQ ID NO: 70578 - protein, 9 aa, Homo sapiens
  Table A; Target 70578; HLA-B*35:01; PRAME; ENSG00000185686; TAA
FPPLFMAAF

SEQ ID NO: 70579 - protein, 9 aa, Homo sapiens
  Table A; Target 70579; HLA-B*54:01; PRAME; ENSG00000185686; TAA
FPPLFMAAF

SEQ ID NO: 70580 - protein, 9 aa, Homo sapiens
  Table A; Target 70580; HLA-B*56:01; PRAME; ENSG00000185686; TAA
FPPLFMAAF

SEQ ID NO: 70581 - protein, 9 aa, Homo sapiens
  Table A; Target 70581; HLA-A*68:02; PRAME; ENSG00000185686; TAA
FSPYLGQMI

SEQ ID NO: 70582 - protein, 8 aa, Homo sapiens
  Table A; Target 70582; HLA-A*02:03; PRAME; ENSG00000185686; TAA
FSYLIEKV

SEQ ID NO: 70583 - protein, 8 aa, Homo sapiens
  Table A; Target 70583; HLA-A*68:02; PRAME; ENSG00000185686; TAA
FSYLIEKV

SEQ ID NO: 70584 - protein, 8 aa, Homo sapiens
  Table A; Target 70584; HLA-B*08:01; PRAME; ENSG00000185686; TAA
FSYLIEKV

SEQ ID NO: 70585 - protein, 8 aa, Homo sapiens
  Table A; Target 70585; HLA-B*13:02; PRAME; ENSG00000185686; TAA
FSYLIEKV

SEQ ID NO: 70586 - protein, 8 aa, Homo sapiens
  Table A; Target 70586; HLA-B*40:02; PRAME; ENSG00000185686; TAA
FSYLIEKV

SEQ ID NO: 70587 - protein, 8 aa, Homo sapiens
  Table A; Target 70587; HLA-B*49:01; PRAME; ENSG00000185686; TAA
FSYLIEKV

SEQ ID NO: 70588 - protein, 8 aa, Homo sapiens
  Table A; Target 70588; HLA-B*51:01; PRAME; ENSG00000185686; TAA
FSYLIEKV

SEQ ID NO: 70589 - protein, 8 aa, Homo sapiens
  Table A; Target 70589; HLA-B*54:01; PRAME; ENSG00000185686; TAA
FSYLIEKV

SEQ ID NO: 70590 - protein, 8 aa, Homo sapiens
  Table A; Target 70590; HLA-C*02:02; PRAME; ENSG00000185686; TAA
FSYLIEKV

SEQ ID NO: 70591 - protein, 8 aa, Homo sapiens
  Table A; Target 70591; HLA-C*06:02; PRAME; ENSG00000185686; TAA
FSYLIEKV

SEQ ID NO: 70592 - protein, 8 aa, Homo sapiens
  Table A; Target 70592; HLA-C*12:03; PRAME; ENSG00000185686; TAA
FSYLIEKV

SEQ ID NO: 70593 - protein, 9 aa, Homo sapiens
  Table A; Target 70593; HLA-A*03:01; PRAME; ENSG00000185686; TAA
FSYLIEKVK

SEQ ID NO: 70594 - protein, 9 aa, Homo sapiens
  Table A; Target 70594; HLA-B*57:01; PRAME; ENSG00000185686; TAA
FSYLIEKVK

SEQ ID NO: 70595 - protein, 10 aa, Homo sapiens
  Table A; Target 70595; HLA-A*31:01; PRAME; ENSG00000185686; TAA
FSYLIEKVKR

SEQ ID NO: 70596 - protein, 10 aa, Homo sapiens
  Table A; Target 70596; HLA-A*33:01; PRAME; ENSG00000185686; TAA
FSYLIEKVKR

SEQ ID NO: 70597 - protein, 10 aa, Homo sapiens
  Table A; Target 70597; HLA-A*33:03; PRAME; ENSG00000185686; TAA
FSYLIEKVKR

SEQ ID NO: 70598 - protein, 9 aa, Homo sapiens
  Table A; Target 70598; HLA-C*03:04; PRAME; ENSG00000185686; TAA
FTCLPLGVL

SEQ ID NO: 70599 - protein, 10 aa, Homo sapiens
  Table A; Target 70599; HLA-A*01:01; PRAME; ENSG00000185686; TAA
FTCLPLGVLM

SEQ ID NO: 70600 - protein, 8 aa, Homo sapiens
  Table A; Target 70600; HLA-C*03:03; PRAME; ENSG00000185686; TAA
FTSQFLSL

SEQ ID NO: 70601 - protein, 8 aa, Homo sapiens
  Table A; Target 70601; HLA-C*03:04; PRAME; ENSG00000185686; TAA
FTSQFLSL

SEQ ID NO: 70602 - protein, 8 aa, Homo sapiens
  Table A; Target 70602; HLA-B*35:01; PRAME; ENSG00000185686; TAA
FYDPEPIL

SEQ ID NO: 70603 - protein, 8 aa, Homo sapiens
  Table A; Target 70603; HLA-B*35:03; PRAME; ENSG00000185686; TAA
FYDPEPIL

SEQ ID NO: 70604 - protein, 8 aa, Homo sapiens
  Table A; Target 70604; HLA-C*04:01; PRAME; ENSG00000185686; TAA
FYDPEPIL

SEQ ID NO: 70605 - protein, 9 aa, Homo sapiens
  Table A; Target 70605; HLA-A*02:01; PRAME; ENSG00000185686; TAA
FYDPEPILC

SEQ ID NO: 70606 - protein, 9 aa, Homo sapiens
  Table A; Target 70606; HLA-B*35:03; PRAME; ENSG00000185686; TAA
FYDPEPILC

SEQ ID NO: 70607 - protein, 9 aa, Homo sapiens
  Table A; Target 70607; HLA-C*04:01; PRAME; ENSG00000185686; TAA
FYDPEPILC

SEQ ID NO: 70608 - protein, 8 aa, Homo sapiens
  Table A; Target 70608; HLA-A*23:01; PRAME; ENSG00000185686; TAA
FYGNSISI

SEQ ID NO: 70609 - protein, 8 aa, Homo sapiens
  Table A; Target 70609; HLA-A*24:02; PRAME; ENSG00000185686; TAA
FYGNSISI

SEQ ID NO: 70610 - protein, 8 aa, Homo sapiens
  Table A; Target 70610; HLA-B*07:02; PRAME; ENSG00000185686; TAA
FYGNSISI

SEQ ID NO: 70611 - protein, 8 aa, Homo sapiens
  Table A; Target 70611; HLA-B*35:03; PRAME; ENSG00000185686; TAA
FYGNSISI

SEQ ID NO: 70612 - protein, 8 aa, Homo sapiens
  Table A; Target 70612; HLA-C*01:02; PRAME; ENSG00000185686; TAA
FYGNSISI

SEQ ID NO: 70613 - protein, 8 aa, Homo sapiens
  Table A; Target 70613; HLA-C*04:01; PRAME; ENSG00000185686; TAA
FYGNSISI

SEQ ID NO: 70614 - protein, 8 aa, Homo sapiens
  Table A; Target 70614; HLA-C*06:02; PRAME; ENSG00000185686; TAA
FYGNSISI

SEQ ID NO: 70615 - protein, 8 aa, Homo sapiens
  Table A; Target 70615; HLA-C*07:01; PRAME; ENSG00000185686; TAA
FYGNSISI

SEQ ID NO: 70616 - protein, 8 aa, Homo sapiens
  Table A; Target 70616; HLA-C*07:02; PRAME; ENSG00000185686; TAA
FYGNSISI

SEQ ID NO: 70617 - protein, 8 aa, Homo sapiens
  Table A; Target 70617; HLA-C*07:04; PRAME; ENSG00000185686; TAA
FYGNSISI

SEQ ID NO: 70618 - protein, 8 aa, Homo sapiens
  Table A; Target 70618; HLA-C*12:03; PRAME; ENSG00000185686; TAA
FYGNSISI

SEQ ID NO: 70619 - protein, 8 aa, Homo sapiens
  Table A; Target 70619; HLA-C*14:02; PRAME; ENSG00000185686; TAA
FYGNSISI

SEQ ID NO: 70620 - protein, 10 aa, Homo sapiens
  Table A; Target 70620; HLA-B*54:01; PRAME; ENSG00000185686; TAA
FYGNSISISA

SEQ ID NO: 70621 - protein, 10 aa, Homo sapiens
  Table A; Target 70621; HLA-B*56:01; PRAME; ENSG00000185686; TAA
FYGNSISISA

SEQ ID NO: 70622 - protein, 10 aa, Homo sapiens
  Table A; Target 70622; HLA-C*14:02; PRAME; ENSG00000185686; TAA
FYGNSISISA

SEQ ID NO: 70623 - protein, 11 aa, Homo sapiens
  Table A; Target 70623; HLA-A*24:02; PRAME; ENSG00000185686; TAA
FYGNSISISAL

SEQ ID NO: 70624 - protein, 11 aa, Homo sapiens
  Table A; Target 70624; HLA-C*14:02; PRAME; ENSG00000185686; TAA
FYGNSISISAL

SEQ ID NO: 70625 - protein, 9 aa, Homo sapiens
  Table A; Target 70625; HLA-A*03:02; PRAME; ENSG00000185686; TAA
GACDELFSY

SEQ ID NO: 70626 - protein, 9 aa, Homo sapiens
  Table A; Target 70626; HLA-A*11:01; PRAME; ENSG00000185686; TAA
GACDELFSY

SEQ ID NO: 70627 - protein, 9 aa, Homo sapiens
  Table A; Target 70627; HLA-A*26:01; PRAME; ENSG00000185686; TAA
GACDELFSY

SEQ ID NO: 70628 - protein, 9 aa, Homo sapiens
  Table A; Target 70628; HLA-A*29:02; PRAME; ENSG00000185686; TAA
GACDELFSY

SEQ ID NO: 70629 - protein, 9 aa, Homo sapiens
  Table A; Target 70629; HLA-A*30:02; PRAME; ENSG00000185686; TAA
GACDELFSY

SEQ ID NO: 70630 - protein, 9 aa, Homo sapiens
  Table A; Target 70630; HLA-B*15:01; PRAME; ENSG00000185686; TAA
GACDELFSY

SEQ ID NO: 70631 - protein, 9 aa, Homo sapiens
  Table A; Target 70631; HLA-B*35:01; PRAME; ENSG00000185686; TAA
GACDELFSY

SEQ ID NO: 70632 - protein, 9 aa, Homo sapiens
  Table A; Target 70632; HLA-B*46:01; PRAME; ENSG00000185686; TAA
GACDELFSY

SEQ ID NO: 70633 - protein, 9 aa, Homo sapiens
  Table A; Target 70633; HLA-C*02:02; PRAME; ENSG00000185686; TAA
GACDELFSY

SEQ ID NO: 70634 - protein, 9 aa, Homo sapiens
  Table A; Target 70634; HLA-C*07:01; PRAME; ENSG00000185686; TAA
GACDELFSY

SEQ ID NO: 70635 - protein, 9 aa, Homo sapiens
  Table A; Target 70635; HLA-B*13:02; PRAME; ENSG00000185686; TAA
GITDDQLLA

SEQ ID NO: 70636 - protein, 10 aa, Homo sapiens
  Table A; Target 70636; HLA-A*02:01; PRAME; ENSG00000185686; TAA
GLDVLLAQEV

SEQ ID NO: 70637 - protein, 10 aa, Homo sapiens
  Table A; Target 70637; HLA-A*02:07; PRAME; ENSG00000185686; TAA
GLDVLLAQEV

SEQ ID NO: 70638 - protein, 10 aa, Homo sapiens
  Table A; Target 70638; HLA-B*13:02; PRAME; ENSG00000185686; TAA
GLDVLLAQEV

SEQ ID NO: 70639 - protein, 10 aa, Homo sapiens
  Table A; Target 70639; HLA-B*55:01; PRAME; ENSG00000185686; TAA
GLDVLLAQEV

SEQ ID NO: 70640 - protein, 9 aa, Homo sapiens
  Table A; Target 70640; HLA-A*02:01; PRAME; ENSG00000185686; TAA
GLSNLTHVL

SEQ ID NO: 70641 - protein, 9 aa, Homo sapiens
  Table A; Target 70641; HLA-A*02:03; PRAME; ENSG00000185686; TAA
GLSNLTHVL

SEQ ID NO: 70642 - protein, 9 aa, Homo sapiens
  Table A; Target 70642; HLA-A*02:04; PRAME; ENSG00000185686; TAA
GLSNLTHVL

SEQ ID NO: 70643 - protein, 9 aa, Homo sapiens
  Table A; Target 70643; HLA-A*02:07; PRAME; ENSG00000185686; TAA
GLSNLTHVL

SEQ ID NO: 70644 - protein, 9 aa, Homo sapiens
  Table A; Target 70644; HLA-A*03:01; PRAME; ENSG00000185686; TAA
GLSNLTHVL

SEQ ID NO: 70645 - protein, 9 aa, Homo sapiens
  Table A; Target 70645; HLA-A*03:02; PRAME; ENSG00000185686; TAA
GLSNLTHVL

SEQ ID NO: 70646 - protein, 9 aa, Homo sapiens
  Table A; Target 70646; HLA-A*30:01; PRAME; ENSG00000185686; TAA
GLSNLTHVL

SEQ ID NO: 70647 - protein, 9 aa, Homo sapiens
  Table A; Target 70647; HLA-A*32:01; PRAME; ENSG00000185686; TAA
GLSNLTHVL

SEQ ID NO: 70648 - protein, 9 aa, Homo sapiens
  Table A; Target 70648; HLA-B*13:02; PRAME; ENSG00000185686; TAA
GLSNLTHVL

SEQ ID NO: 70649 - protein, 9 aa, Homo sapiens
  Table A; Target 70649; HLA-B*15:01; PRAME; ENSG00000185686; TAA
GLSNLTHVL

SEQ ID NO: 70650 - protein, 9 aa, Homo sapiens
  Table A; Target 70650; HLA-B*15:03; PRAME; ENSG00000185686; TAA
GLSNLTHVL

SEQ ID NO: 70651 - protein, 9 aa, Homo sapiens
  Table A; Target 70651; HLA-B*27:05; PRAME; ENSG00000185686; TAA
GLSNLTHVL

SEQ ID NO: 70652 - protein, 9 aa, Homo sapiens
  Table A; Target 70652; HLA-B*37:01; PRAME; ENSG00000185686; TAA
GLSNLTHVL

SEQ ID NO: 70653 - protein, 9 aa, Homo sapiens
  Table A; Target 70653; HLA-B*38:01; PRAME; ENSG00000185686; TAA
GLSNLTHVL

SEQ ID NO: 70654 - protein, 9 aa, Homo sapiens
  Table A; Target 70654; HLA-B*40:01; PRAME; ENSG00000185686; TAA
GLSNLTHVL

SEQ ID NO: 70655 - protein, 9 aa, Homo sapiens
  Table A; Target 70655; HLA-B*55:01; PRAME; ENSG00000185686; TAA
GLSNLTHVL

SEQ ID NO: 70656 - protein, 9 aa, Homo sapiens
  Table A; Target 70656; HLA-C*02:02; PRAME; ENSG00000185686; TAA
GLSNLTHVL

SEQ ID NO: 70657 - protein, 9 aa, Homo sapiens
  Table A; Target 70657; HLA-C*06:02; PRAME; ENSG00000185686; TAA
GLSNLTHVL

SEQ ID NO: 70658 - protein, 9 aa, Homo sapiens
  Table A; Target 70658; HLA-C*07:04; PRAME; ENSG00000185686; TAA
GLSNLTHVL

SEQ ID NO: 70659 - protein, 9 aa, Homo sapiens
  Table A; Target 70659; HLA-C*16:01; PRAME; ENSG00000185686; TAA
GLSNLTHVL

SEQ ID NO: 70660 - protein, 9 aa, Homo sapiens
  Table A; Target 70660; HLA-C*16:02; PRAME; ENSG00000185686; TAA
GLSNLTHVL

SEQ ID NO: 70661 - protein, 10 aa, Homo sapiens
  Table A; Target 70661; HLA-A*01:01; PRAME; ENSG00000185686; TAA
GLSNLTHVLY

SEQ ID NO: 70662 - protein, 10 aa, Homo sapiens
  Table A; Target 70662; HLA-A*29:02; PRAME; ENSG00000185686; TAA
GLSNLTHVLY

SEQ ID NO: 70663 - protein, 10 aa, Homo sapiens
  Table A; Target 70663; HLA-A*30:02; PRAME; ENSG00000185686; TAA
GLSNLTHVLY

SEQ ID NO: 70664 - protein, 10 aa, Homo sapiens
  Table A; Target 70664; HLA-B*15:01; PRAME; ENSG00000185686; TAA
GLSNLTHVLY

SEQ ID NO: 70665 - protein, 11 aa, Homo sapiens
  Table A; Target 70665; HLA-A*02:01; PRAME; ENSG00000185686; TAA
GLSTEAEQPFI

SEQ ID NO: 70666 - protein, 11 aa, Homo sapiens
  Table A; Target 70666; HLA-B*13:02; PRAME; ENSG00000185686; TAA
GLSTEAEQPFI

SEQ ID NO: 70667 - protein, 9 aa, Homo sapiens
  Table A; Target 70667; HLA-B*27:05; PRAME; ENSG00000185686; TAA
GNSISISAL

SEQ ID NO: 70668 - protein, 9 aa, Homo sapiens
  Table A; Target 70668; HLA-B*37:01; PRAME; ENSG00000185686; TAA
GNSISISAL

SEQ ID NO: 70669 - protein, 9 aa, Homo sapiens
  Table A; Target 70669; HLA-B*39:01; PRAME; ENSG00000185686; TAA
GNSISISAL

SEQ ID NO: 70670 - protein, 9 aa, Homo sapiens
  Table A; Target 70670; HLA-B*40:01; PRAME; ENSG00000185686; TAA
GNSISISAL

SEQ ID NO: 70671 - protein, 9 aa, Homo sapiens
  Table A; Target 70671; HLA-C*06:02; PRAME; ENSG00000185686; TAA
GNSISISAL

SEQ ID NO: 70672 - protein, 9 aa, Homo sapiens
  Table A; Target 70672; HLA-C*07:02; PRAME; ENSG00000185686; TAA
GNSISISAL

SEQ ID NO: 70673 - protein, 9 aa, Homo sapiens
  Table A; Target 70673; HLA-C*07:04; PRAME; ENSG00000185686; TAA
GNSISISAL

SEQ ID NO: 70674 - protein, 9 aa, Homo sapiens
  Table A; Target 70674; HLA-A*30:01; PRAME; ENSG00000185686; TAA
GQHLHLETF

SEQ ID NO: 70675 - protein, 9 aa, Homo sapiens
  Table A; Target 70675; HLA-A*30:02; PRAME; ENSG00000185686; TAA
GQHLHLETF

SEQ ID NO: 70676 - protein, 9 aa, Homo sapiens
  Table A; Target 70676; HLA-A*32:01; PRAME; ENSG00000185686; TAA
GQHLHLETF

SEQ ID NO: 70677 - protein, 9 aa, Homo sapiens
  Table A; Target 70677; HLA-B*13:02; PRAME; ENSG00000185686; TAA
GQHLHLETF

SEQ ID NO: 70678 - protein, 9 aa, Homo sapiens
  Table A; Target 70678; HLA-B*15:01; PRAME; ENSG00000185686; TAA
GQHLHLETF

SEQ ID NO: 70679 - protein, 9 aa, Homo sapiens
  Table A; Target 70679; HLA-B*15:03; PRAME; ENSG00000185686; TAA
GQHLHLETF

SEQ ID NO: 70680 - protein, 9 aa, Homo sapiens
  Table A; Target 70680; HLA-B*18:01; PRAME; ENSG00000185686; TAA
GQHLHLETF

SEQ ID NO: 70681 - protein, 9 aa, Homo sapiens
  Table A; Target 70681; HLA-B*27:02; PRAME; ENSG00000185686; TAA
GQHLHLETF

SEQ ID NO: 70682 - protein, 9 aa, Homo sapiens
  Table A; Target 70682; HLA-B*27:05; PRAME; ENSG00000185686; TAA
GQHLHLETF

SEQ ID NO: 70683 - protein, 9 aa, Homo sapiens
  Table A; Target 70683; HLA-B*37:01; PRAME; ENSG00000185686; TAA
GQHLHLETF

SEQ ID NO: 70684 - protein, 9 aa, Homo sapiens
  Table A; Target 70684; HLA-B*38:01; PRAME; ENSG00000185686; TAA
GQHLHLETF

SEQ ID NO: 70685 - protein, 9 aa, Homo sapiens
  Table A; Target 70685; HLA-B*39:01; PRAME; ENSG00000185686; TAA
GQHLHLETF

SEQ ID NO: 70686 - protein, 9 aa, Homo sapiens
  Table A; Target 70686; HLA-B*40:02; PRAME; ENSG00000185686; TAA
GQHLHLETF

SEQ ID NO: 70687 - protein, 9 aa, Homo sapiens
  Table A; Target 70687; HLA-B*44:02; PRAME; ENSG00000185686; TAA
GQHLHLETF

SEQ ID NO: 70688 - protein, 9 aa, Homo sapiens
  Table A; Target 70688; HLA-B*44:03; PRAME; ENSG00000185686; TAA
GQHLHLETF

SEQ ID NO: 70689 - protein, 9 aa, Homo sapiens
  Table A; Target 70689; HLA-B*46:01; PRAME; ENSG00000185686; TAA
GQHLHLETF

SEQ ID NO: 70690 - protein, 9 aa, Homo sapiens
  Table A; Target 70690; HLA-C*02:02; PRAME; ENSG00000185686; TAA
GQHLHLETF

SEQ ID NO: 70691 - protein, 9 aa, Homo sapiens
  Table A; Target 70691; HLA-C*04:01; PRAME; ENSG00000185686; TAA
GQHLHLETF

SEQ ID NO: 70692 - protein, 9 aa, Homo sapiens
  Table A; Target 70692; HLA-C*07:01; PRAME; ENSG00000185686; TAA
GQHLHLETF

SEQ ID NO: 70693 - protein, 9 aa, Homo sapiens
  Table A; Target 70693; HLA-C*07:04; PRAME; ENSG00000185686; TAA
GQHLHLETF

SEQ ID NO: 70694 - protein, 9 aa, Homo sapiens
  Table A; Target 70694; HLA-C*16:04; PRAME; ENSG00000185686; TAA
GQHLHLETF

SEQ ID NO: 70695 - protein, 9 aa, Homo sapiens
  Table A; Target 70695; HLA-A*02:04; PRAME; ENSG00000185686; TAA
GQMINLRRL

SEQ ID NO: 70696 - protein, 10 aa, Homo sapiens
  Table A; Target 70696; HLA-A*30:01; PRAME; ENSG00000185686; TAA
GQSLLKDEAL

SEQ ID NO: 70697 - protein, 10 aa, Homo sapiens
  Table A; Target 70697; HLA-B*27:05; PRAME; ENSG00000185686; TAA
GQSLLKDEAL

SEQ ID NO: 70698 - protein, 10 aa, Homo sapiens
  Table A; Target 70698; HLA-B*38:01; PRAME; ENSG00000185686; TAA
GQSLLKDEAL

SEQ ID NO: 70699 - protein, 8 aa, Homo sapiens
  Table A; Target 70699; HLA-B*27:05; PRAME; ENSG00000185686; TAA
GRHSQTLK

SEQ ID NO: 70700 - protein, 9 aa, Homo sapiens
  Table A; Target 70700; HLA-B*27:05; PRAME; ENSG00000185686; TAA
GRHSQTLKA

SEQ ID NO: 70701 - protein, 9 aa, Homo sapiens
  Table A; Target 70701; HLA-C*06:02; PRAME; ENSG00000185686; TAA
GRHSQTLKA

SEQ ID NO: 70702 - protein, 10 aa, Homo sapiens
  Table A; Target 70702; HLA-B*27:05; PRAME; ENSG00000185686; TAA
GRHSQTLKAM

SEQ ID NO: 70703 - protein, 10 aa, Homo sapiens
  Table A; Target 70703; HLA-C*06:02; PRAME; ENSG00000185686; TAA
GRHSQTLKAM

SEQ ID NO: 70704 - protein, 10 aa, Homo sapiens
  Table A; Target 70704; HLA-C*07:01; PRAME; ENSG00000185686; TAA
GRHSQTLKAM

SEQ ID NO: 70705 - protein, 10 aa, Homo sapiens
  Table A; Target 70705; HLA-C*07:02; PRAME; ENSG00000185686; TAA
GRHSQTLKAM

SEQ ID NO: 70706 - protein, 9 aa, Homo sapiens
  Table A; Target 70706; HLA-B*27:05; PRAME; ENSG00000185686; TAA
GRLDQLLRH

SEQ ID NO: 70707 - protein, 8 aa, Homo sapiens
  Table A; Target 70707; HLA-C*06:02; PRAME; ENSG00000185686; TAA
GSIQSRYI

SEQ ID NO: 70708 - protein, 10 aa, Homo sapiens
  Table A; Target 70708; HLA-B*40:02; PRAME; ENSG00000185686; TAA
GSIQSRYISM

SEQ ID NO: 70709 - protein, 10 aa, Homo sapiens
  Table A; Target 70709; HLA-C*02:02; PRAME; ENSG00000185686; TAA
GSIQSRYISM

SEQ ID NO: 70710 - protein, 10 aa, Homo sapiens
  Table A; Target 70710; HLA-C*12:03; PRAME; ENSG00000185686; TAA
GSIQSRYISM

SEQ ID NO: 70711 - protein, 10 aa, Homo sapiens
  Table A; Target 70711; HLA-C*16:02; PRAME; ENSG00000185686; TAA
GSIQSRYISM

SEQ ID NO: 70712 - protein, 10 aa, Homo sapiens
  Table A; Target 70712; HLA-A*01:01; PRAME; ENSG00000185686; TAA
GTLHLERLAY

SEQ ID NO: 70713 - protein, 10 aa, Homo sapiens
  Table A; Target 70713; HLA-A*03:01; PRAME; ENSG00000185686; TAA
GTLHLERLAY

SEQ ID NO: 70714 - protein, 10 aa, Homo sapiens
  Table A; Target 70714; HLA-A*29:02; PRAME; ENSG00000185686; TAA
GTLHLERLAY

SEQ ID NO: 70715 - protein, 10 aa, Homo sapiens
  Table A; Target 70715; HLA-A*30:02; PRAME; ENSG00000185686; TAA
GTLHLERLAY

SEQ ID NO: 70716 - protein, 10 aa, Homo sapiens
  Table A; Target 70716; HLA-A*32:01; PRAME; ENSG00000185686; TAA
GTLHLERLAY

SEQ ID NO: 70717 - protein, 10 aa, Homo sapiens
  Table A; Target 70717; HLA-B*57:01; PRAME; ENSG00000185686; TAA
GTLHLERLAY

SEQ ID NO: 70718 - protein, 11 aa, Homo sapiens
  Table A; Target 70718; HLA-A*02:04; PRAME; ENSG00000185686; TAA
GTLHLERLAYL

SEQ ID NO: 70719 - protein, 8 aa, Homo sapiens
  Table A; Target 70719; HLA-B*08:01; PRAME; ENSG00000185686; TAA
HARLRELL

SEQ ID NO: 70720 - protein, 10 aa, Homo sapiens
  Table A; Target 70720; HLA-A*03:01; PRAME; ENSG00000185686; TAA
HASSYISPEK

SEQ ID NO: 70721 - protein, 10 aa, Homo sapiens
  Table A; Target 70721; HLA-A*03:02; PRAME; ENSG00000185686; TAA
HASSYISPEK

SEQ ID NO: 70722 - protein, 10 aa, Homo sapiens
  Table A; Target 70722; HLA-A*11:01; PRAME; ENSG00000185686; TAA
HASSYISPEK

SEQ ID NO: 70723 - protein, 10 aa, Homo sapiens
  Table A; Target 70723; HLA-A*68:01; PRAME; ENSG00000185686; TAA
HASSYISPEK

SEQ ID NO: 70724 - protein, 10 aa, Homo sapiens
  Table A; Target 70724; HLA-A*68:02; PRAME; ENSG00000185686; TAA
HASSYISPEK

SEQ ID NO: 70725 - protein, 10 aa, Homo sapiens
  Table A; Target 70725; HLA-B*27:02; PRAME; ENSG00000185686; TAA
HASSYISPEK

SEQ ID NO: 70726 - protein, 10 aa, Homo sapiens
  Table A; Target 70726; HLA-B*27:05; PRAME; ENSG00000185686; TAA
HASSYISPEK

SEQ ID NO: 70727 - protein, 10 aa, Homo sapiens
  Table A; Target 70727; HLA-C*07:06; PRAME; ENSG00000185686; TAA
HASSYISPEK

SEQ ID NO: 70728 - protein, 8 aa, Homo sapiens
  Table A; Target 70728; HLA-C*04:01; PRAME; ENSG00000185686; TAA
HIHASSYI

SEQ ID NO: 70729 - protein, 8 aa, Homo sapiens
  Table A; Target 70729; HLA-C*07:01; PRAME; ENSG00000185686; TAA
HIHASSYI

SEQ ID NO: 70730 - protein, 9 aa, Homo sapiens
  Table A; Target 70730; HLA-B*08:01; PRAME; ENSG00000185686; TAA
HLETFKAVL

SEQ ID NO: 70731 - protein, 9 aa, Homo sapiens
  Table A; Target 70731; HLA-B*54:01; PRAME; ENSG00000185686; TAA
HLHLETFKA

SEQ ID NO: 70732 - protein, 11 aa, Homo sapiens
  Table A; Target 70732; HLA-A*02:01; PRAME; ENSG00000185686; TAA
HLIGLSNLTHV

SEQ ID NO: 70733 - protein, 11 aa, Homo sapiens
  Table A; Target 70733; HLA-A*02:03; PRAME; ENSG00000185686; TAA
HLIGLSNLTHV

SEQ ID NO: 70734 - protein, 11 aa, Homo sapiens
  Table A; Target 70734; HLA-A*02:04; PRAME; ENSG00000185686; TAA
HLIGLSNLTHV

SEQ ID NO: 70735 - protein, 11 aa, Homo sapiens
  Table A; Target 70735; HLA-A*02:07; PRAME; ENSG00000185686; TAA
HLIGLSNLTHV

SEQ ID NO: 70736 - protein, 11 aa, Homo sapiens
  Table A; Target 70736; HLA-A*68:02; PRAME; ENSG00000185686; TAA
HLIGLSNLTHV

SEQ ID NO: 70737 - protein, 8 aa, Homo sapiens
  Table A; Target 70737; HLA-B*13:02; PRAME; ENSG00000185686; TAA
HLSQSPSV

SEQ ID NO: 70738 - protein, 8 aa, Homo sapiens
  Table A; Target 70738; HLA-B*37:01; PRAME; ENSG00000185686; TAA
HLSQSPSV

SEQ ID NO: 70739 - protein, 8 aa, Homo sapiens
  Table A; Target 70739; HLA-B*55:01; PRAME; ENSG00000185686; TAA
HLSQSPSV

SEQ ID NO: 70740 - protein, 11 aa, Homo sapiens
  Table A; Target 70740; HLA-A*02:04; PRAME; ENSG00000185686; TAA
HLSQSPSVSQL

SEQ ID NO: 70741 - protein, 8 aa, Homo sapiens
  Table A; Target 70741; HLA-B*08:01; PRAME; ENSG00000185686; TAA
HSQTLKAM

SEQ ID NO: 70742 - protein, 8 aa, Homo sapiens
  Table A; Target 70742; HLA-C*03:04; PRAME; ENSG00000185686; TAA
HSQTLKAM

SEQ ID NO: 70743 - protein, 8 aa, Homo sapiens
  Table A; Target 70743; HLA-C*16:01; PRAME; ENSG00000185686; TAA
HSQTLKAM

SEQ ID NO: 70744 - protein, 8 aa, Homo sapiens
  Table A; Target 70744; HLA-C*16:02; PRAME; ENSG00000185686; TAA
HSQTLKAM

SEQ ID NO: 70745 - protein, 9 aa, Homo sapiens
  Table A; Target 70745; HLA-C*06:02; PRAME; ENSG00000185686; TAA
HSQTLKAMV

SEQ ID NO: 70746 - protein, 11 aa, Homo sapiens
  Table A; Target 70746; HLA-A*29:02; PRAME; ENSG00000185686; TAA
HVLYPVPLESY

SEQ ID NO: 70747 - protein, 9 aa, Homo sapiens
  Table A; Target 70747; HLA-A*02:01; PRAME; ENSG00000185686; TAA
HVMNPLETL

SEQ ID NO: 70748 - protein, 9 aa, Homo sapiens
  Table A; Target 70748; HLA-A*02:03; PRAME; ENSG00000185686; TAA
HVMNPLETL

SEQ ID NO: 70749 - protein, 9 aa, Homo sapiens
  Table A; Target 70749; HLA-A*02:04; PRAME; ENSG00000185686; TAA
HVMNPLETL

SEQ ID NO: 70750 - protein, 9 aa, Homo sapiens
  Table A; Target 70750; HLA-A*02:07; PRAME; ENSG00000185686; TAA
HVMNPLETL

SEQ ID NO: 70751 - protein, 9 aa, Homo sapiens
  Table A; Target 70751; HLA-A*03:01; PRAME; ENSG00000185686; TAA
HVMNPLETL

SEQ ID NO: 70752 - protein, 9 aa, Homo sapiens
  Table A; Target 70752; HLA-A*03:02; PRAME; ENSG00000185686; TAA
HVMNPLETL

SEQ ID NO: 70753 - protein, 9 aa, Homo sapiens
  Table A; Target 70753; HLA-A*11:01; PRAME; ENSG00000185686; TAA
HVMNPLETL

SEQ ID NO: 70754 - protein, 9 aa, Homo sapiens
  Table A; Target 70754; HLA-A*23:01; PRAME; ENSG00000185686; TAA
HVMNPLETL

SEQ ID NO: 70755 - protein, 9 aa, Homo sapiens
  Table A; Target 70755; HLA-A*24:02; PRAME; ENSG00000185686; TAA
HVMNPLETL

SEQ ID NO: 70756 - protein, 9 aa, Homo sapiens
  Table A; Target 70756; HLA-A*25:01; PRAME; ENSG00000185686; TAA
HVMNPLETL

SEQ ID NO: 70757 - protein, 9 aa, Homo sapiens
  Table A; Target 70757; HLA-A*26:01; PRAME; ENSG00000185686; TAA
HVMNPLETL

SEQ ID NO: 70758 - protein, 9 aa, Homo sapiens
  Table A; Target 70758; HLA-A*30:01; PRAME; ENSG00000185686; TAA
HVMNPLETL

SEQ ID NO: 70759 - protein, 9 aa, Homo sapiens
  Table A; Target 70759; HLA-A*31:01; PRAME; ENSG00000185686; TAA
HVMNPLETL

SEQ ID NO: 70760 - protein, 9 aa, Homo sapiens
  Table A; Target 70760; HLA-A*32:01; PRAME; ENSG00000185686; TAA
HVMNPLETL

SEQ ID NO: 70761 - protein, 9 aa, Homo sapiens
  Table A; Target 70761; HLA-A*33:01; PRAME; ENSG00000185686; TAA
HVMNPLETL

SEQ ID NO: 70762 - protein, 9 aa, Homo sapiens
  Table A; Target 70762; HLA-A*33:03; PRAME; ENSG00000185686; TAA
HVMNPLETL

SEQ ID NO: 70763 - protein, 9 aa, Homo sapiens
  Table A; Target 70763; HLA-A*68:01; PRAME; ENSG00000185686; TAA
HVMNPLETL

SEQ ID NO: 70764 - protein, 9 aa, Homo sapiens
  Table A; Target 70764; HLA-A*68:02; PRAME; ENSG00000185686; TAA
HVMNPLETL

SEQ ID NO: 70765 - protein, 9 aa, Homo sapiens
  Table A; Target 70765; HLA-B*07:02; PRAME; ENSG00000185686; TAA
HVMNPLETL

SEQ ID NO: 70766 - protein, 9 aa, Homo sapiens
  Table A; Target 70766; HLA-B*08:01; PRAME; ENSG00000185686; TAA
HVMNPLETL

SEQ ID NO: 70767 - protein, 9 aa, Homo sapiens
  Table A; Target 70767; HLA-B*13:02; PRAME; ENSG00000185686; TAA
HVMNPLETL

SEQ ID NO: 70768 - protein, 9 aa, Homo sapiens
  Table A; Target 70768; HLA-B*15:01; PRAME; ENSG00000185686; TAA
HVMNPLETL

SEQ ID NO: 70769 - protein, 9 aa, Homo sapiens
  Table A; Target 70769; HLA-B*15:03; PRAME; ENSG00000185686; TAA
HVMNPLETL

SEQ ID NO: 70770 - protein, 9 aa, Homo sapiens
  Table A; Target 70770; HLA-B*27:05; PRAME; ENSG00000185686; TAA
HVMNPLETL

SEQ ID NO: 70771 - protein, 9 aa, Homo sapiens
  Table A; Target 70771; HLA-B*35:01; PRAME; ENSG00000185686; TAA
HVMNPLETL

SEQ ID NO: 70772 - protein, 9 aa, Homo sapiens
  Table A; Target 70772; HLA-B*35:03; PRAME; ENSG00000185686; TAA
HVMNPLETL

SEQ ID NO: 70773 - protein, 9 aa, Homo sapiens
  Table A; Target 70773; HLA-B*38:01; PRAME; ENSG00000185686; TAA
HVMNPLETL

SEQ ID NO: 70774 - protein, 9 aa, Homo sapiens
  Table A; Target 70774; HLA-B*39:01; PRAME; ENSG00000185686; TAA
HVMNPLETL

SEQ ID NO: 70775 - protein, 9 aa, Homo sapiens
  Table A; Target 70775; HLA-B*40:01; PRAME; ENSG00000185686; TAA
HVMNPLETL

SEQ ID NO: 70776 - protein, 9 aa, Homo sapiens
  Table A; Target 70776; HLA-B*40:02; PRAME; ENSG00000185686; TAA
HVMNPLETL

SEQ ID NO: 70777 - protein, 9 aa, Homo sapiens
  Table A; Target 70777; HLA-B*46:01; PRAME; ENSG00000185686; TAA
HVMNPLETL

SEQ ID NO: 70778 - protein, 9 aa, Homo sapiens
  Table A; Target 70778; HLA-B*51:01; PRAME; ENSG00000185686; TAA
HVMNPLETL

SEQ ID NO: 70779 - protein, 9 aa, Homo sapiens
  Table A; Target 70779; HLA-B*54:01; PRAME; ENSG00000185686; TAA
HVMNPLETL

SEQ ID NO: 70780 - protein, 9 aa, Homo sapiens
  Table A; Target 70780; HLA-B*55:01; PRAME; ENSG00000185686; TAA
HVMNPLETL

SEQ ID NO: 70781 - protein, 9 aa, Homo sapiens
  Table A; Target 70781; HLA-B*56:01; PRAME; ENSG00000185686; TAA
HVMNPLETL

SEQ ID NO: 70782 - protein, 9 aa, Homo sapiens
  Table A; Target 70782; HLA-B*57:01; PRAME; ENSG00000185686; TAA
HVMNPLETL

SEQ ID NO: 70783 - protein, 9 aa, Homo sapiens
  Table A; Target 70783; HLA-B*58:01; PRAME; ENSG00000185686; TAA
HVMNPLETL

SEQ ID NO: 70784 - protein, 9 aa, Homo sapiens
  Table A; Target 70784; HLA-C*01:02; PRAME; ENSG00000185686; TAA
HVMNPLETL

SEQ ID NO: 70785 - protein, 9 aa, Homo sapiens
  Table A; Target 70785; HLA-C*02:02; PRAME; ENSG00000185686; TAA
HVMNPLETL

SEQ ID NO: 70786 - protein, 9 aa, Homo sapiens
  Table A; Target 70786; HLA-C*03:03; PRAME; ENSG00000185686; TAA
HVMNPLETL

SEQ ID NO: 70787 - protein, 9 aa, Homo sapiens
  Table A; Target 70787; HLA-C*03:04; PRAME; ENSG00000185686; TAA
HVMNPLETL

SEQ ID NO: 70788 - protein, 9 aa, Homo sapiens
  Table A; Target 70788; HLA-C*05:01; PRAME; ENSG00000185686; TAA
HVMNPLETL

SEQ ID NO: 70789 - protein, 9 aa, Homo sapiens
  Table A; Target 70789; HLA-C*06:02; PRAME; ENSG00000185686; TAA
HVMNPLETL

SEQ ID NO: 70790 - protein, 9 aa, Homo sapiens
  Table A; Target 70790; HLA-C*07:02; PRAME; ENSG00000185686; TAA
HVMNPLETL

SEQ ID NO: 70791 - protein, 9 aa, Homo sapiens
  Table A; Target 70791; HLA-C*07:04; PRAME; ENSG00000185686; TAA
HVMNPLETL

SEQ ID NO: 70792 - protein, 9 aa, Homo sapiens
  Table A; Target 70792; HLA-C*07:06; PRAME; ENSG00000185686; TAA
HVMNPLETL

SEQ ID NO: 70793 - protein, 9 aa, Homo sapiens
  Table A; Target 70793; HLA-C*12:03; PRAME; ENSG00000185686; TAA
HVMNPLETL

SEQ ID NO: 70794 - protein, 9 aa, Homo sapiens
  Table A; Target 70794; HLA-C*14:02; PRAME; ENSG00000185686; TAA
HVMNPLETL

SEQ ID NO: 70795 - protein, 9 aa, Homo sapiens
  Table A; Target 70795; HLA-C*16:01; PRAME; ENSG00000185686; TAA
HVMNPLETL

SEQ ID NO: 70796 - protein, 9 aa, Homo sapiens
  Table A; Target 70796; HLA-C*16:02; PRAME; ENSG00000185686; TAA
HVMNPLETL

SEQ ID NO: 70797 - protein, 9 aa, Homo sapiens
  Table A; Target 70797; HLA-C*16:04; PRAME; ENSG00000185686; TAA
HVMNPLETL

SEQ ID NO: 70798 - protein, 11 aa, Homo sapiens
  Table A; Target 70798; HLA-A*25:01; PRAME; ENSG00000185686; TAA
HVMNPLETLSI

SEQ ID NO: 70799 - protein, 11 aa, Homo sapiens
  Table A; Target 70799; HLA-A*68:02; PRAME; ENSG00000185686; TAA
HVMNPLETLSI

SEQ ID NO: 70800 - protein, 11 aa, Homo sapiens
  Table A; Target 70800; HLA-B*13:02; PRAME; ENSG00000185686; TAA
HVMNPLETLSI

SEQ ID NO: 70801 - protein, 9 aa, Homo sapiens
  Table A; Target 70801; HLA-A*33:03; PRAME; ENSG00000185686; TAA
IAALELLPR

SEQ ID NO: 70802 - protein, 9 aa, Homo sapiens
  Table A; Target 70802; HLA-A*68:01; PRAME; ENSG00000185686; TAA
IAALELLPR

SEQ ID NO: 70803 - protein, 9 aa, Homo sapiens
  Table A; Target 70803; HLA-B*27:02; PRAME; ENSG00000185686; TAA
IAALELLPR

SEQ ID NO: 70804 - protein, 9 aa, Homo sapiens
  Table A; Target 70804; HLA-C*07:06; PRAME; ENSG00000185686; TAA
IAALELLPR

SEQ ID NO: 70805 - protein, 8 aa, Homo sapiens
  Table A; Target 70805; HLA-B*15:01; PRAME; ENSG00000185686; TAA
IAQFTSQF

SEQ ID NO: 70806 - protein, 8 aa, Homo sapiens
  Table A; Target 70806; HLA-B*46:01; PRAME; ENSG00000185686; TAA
IAQFTSQF

SEQ ID NO: 70807 - protein, 8 aa, Homo sapiens
  Table A; Target 70807; HLA-C*05:01; PRAME; ENSG00000185686; TAA
IAQFTSQF

SEQ ID NO: 70808 - protein, 8 aa, Homo sapiens
  Table A; Target 70808; HLA-C*14:02; PRAME; ENSG00000185686; TAA
IAQFTSQF

SEQ ID NO: 70809 - protein, 9 aa, Homo sapiens
  Table A; Target 70809; HLA-B*13:02; PRAME; ENSG00000185686; TAA
IAQFTSQFL

SEQ ID NO: 70810 - protein, 9 aa, Homo sapiens
  Table A; Target 70810; HLA-B*35:03; PRAME; ENSG00000185686; TAA
IAQFTSQFL

SEQ ID NO: 70811 - protein, 9 aa, Homo sapiens
  Table A; Target 70811; HLA-B*38:01; PRAME; ENSG00000185686; TAA
IAQFTSQFL

SEQ ID NO: 70812 - protein, 9 aa, Homo sapiens
  Table A; Target 70812; HLA-B*46:01; PRAME; ENSG00000185686; TAA
IAQFTSQFL

SEQ ID NO: 70813 - protein, 9 aa, Homo sapiens
  Table A; Target 70813; HLA-B*58:01; PRAME; ENSG00000185686; TAA
IAQFTSQFL

SEQ ID NO: 70814 - protein, 9 aa, Homo sapiens
  Table A; Target 70814; HLA-C*01:02; PRAME; ENSG00000185686; TAA
IAQFTSQFL

SEQ ID NO: 70815 - protein, 9 aa, Homo sapiens
  Table A; Target 70815; HLA-C*02:02; PRAME; ENSG00000185686; TAA
IAQFTSQFL

SEQ ID NO: 70816 - protein, 9 aa, Homo sapiens
  Table A; Target 70816; HLA-C*03:03; PRAME; ENSG00000185686; TAA
IAQFTSQFL

SEQ ID NO: 70817 - protein, 9 aa, Homo sapiens
  Table A; Target 70817; HLA-C*03:04; PRAME; ENSG00000185686; TAA
IAQFTSQFL

SEQ ID NO: 70818 - protein, 9 aa, Homo sapiens
  Table A; Target 70818; HLA-C*06:02; PRAME; ENSG00000185686; TAA
IAQFTSQFL

SEQ ID NO: 70819 - protein, 9 aa, Homo sapiens
  Table A; Target 70819; HLA-C*07:04; PRAME; ENSG00000185686; TAA
IAQFTSQFL

SEQ ID NO: 70820 - protein, 9 aa, Homo sapiens
  Table A; Target 70820; HLA-C*12:03; PRAME; ENSG00000185686; TAA
IAQFTSQFL

SEQ ID NO: 70821 - protein, 9 aa, Homo sapiens
  Table A; Target 70821; HLA-C*16:02; PRAME; ENSG00000185686; TAA
IAQFTSQFL

SEQ ID NO: 70822 - protein, 8 aa, Homo sapiens
  Table A; Target 70822; HLA-B*49:01; PRAME; ENSG00000185686; TAA
IEDLEVTC

SEQ ID NO: 70823 - protein, 9 aa, Homo sapiens
  Table A; Target 70823; HLA-B*40:01; PRAME; ENSG00000185686; TAA
IEDLEVTCT

SEQ ID NO: 70824 - protein, 9 aa, Homo sapiens
  Table A; Target 70824; HLA-B*49:01; PRAME; ENSG00000185686; TAA
IEDLEVTCT

SEQ ID NO: 70825 - protein, 10 aa, Homo sapiens
  Table A; Target 70825; HLA-B*18:01; PRAME; ENSG00000185686; TAA
IEDLEVTCTW

SEQ ID NO: 70826 - protein, 10 aa, Homo sapiens
  Table A; Target 70826; HLA-B*27:02; PRAME; ENSG00000185686; TAA
IEDLEVTCTW

SEQ ID NO: 70827 - protein, 10 aa, Homo sapiens
  Table A; Target 70827; HLA-B*40:01; PRAME; ENSG00000185686; TAA
IEDLEVTCTW

SEQ ID NO: 70828 - protein, 10 aa, Homo sapiens
  Table A; Target 70828; HLA-B*44:02; PRAME; ENSG00000185686; TAA
IEDLEVTCTW

SEQ ID NO: 70829 - protein, 10 aa, Homo sapiens
  Table A; Target 70829; HLA-B*44:03; PRAME; ENSG00000185686; TAA
IEDLEVTCTW

SEQ ID NO: 70830 - protein, 10 aa, Homo sapiens
  Table A; Target 70830; HLA-B*49:01; PRAME; ENSG00000185686; TAA
IEDLEVTCTW

SEQ ID NO: 70831 - protein, 10 aa, Homo sapiens
  Table A; Target 70831; HLA-B*57:01; PRAME; ENSG00000185686; TAA
IEDLEVTCTW

SEQ ID NO: 70832 - protein, 10 aa, Homo sapiens
  Table A; Target 70832; HLA-C*16:04; PRAME; ENSG00000185686; TAA
IEDLEVTCTW

SEQ ID NO: 70833 - protein, 9 aa, Homo sapiens
  Table A; Target 70833; HLA-A*02:01; PRAME; ENSG00000185686; TAA
IGLSNLTHV

SEQ ID NO: 70834 - protein, 9 aa, Homo sapiens
  Table A; Target 70834; HLA-A*02:04; PRAME; ENSG00000185686; TAA
IGLSNLTHV

SEQ ID NO: 70835 - protein, 9 aa, Homo sapiens
  Table A; Target 70835; HLA-B*13:02; PRAME; ENSG00000185686; TAA
IGLSNLTHV

SEQ ID NO: 70836 - protein, 9 aa, Homo sapiens
  Table A; Target 70836; HLA-B*49:01; PRAME; ENSG00000185686; TAA
IGLSNLTHV

SEQ ID NO: 70837 - protein, 9 aa, Homo sapiens
  Table A; Target 70837; HLA-C*16:02; PRAME; ENSG00000185686; TAA
IGLSNLTHV

SEQ ID NO: 70838 - protein, 9 aa, Homo sapiens
  Table A; Target 70838; HLA-C*16:04; PRAME; ENSG00000185686; TAA
IGLSNLTHV

SEQ ID NO: 70839 - protein, 11 aa, Homo sapiens
  Table A; Target 70839; HLA-A*29:02; PRAME; ENSG00000185686; TAA
IGLSNLTHVLY

SEQ ID NO: 70840 - protein, 9 aa, Homo sapiens
  Table A; Target 70840; HLA-A*23:01; PRAME; ENSG00000185686; TAA
IPVEVLVDL

SEQ ID NO: 70841 - protein, 9 aa, Homo sapiens
  Table A; Target 70841; HLA-B*07:02; PRAME; ENSG00000185686; TAA
IPVEVLVDL

SEQ ID NO: 70842 - protein, 9 aa, Homo sapiens
  Table A; Target 70842; HLA-B*35:01; PRAME; ENSG00000185686; TAA
IPVEVLVDL

SEQ ID NO: 70843 - protein, 9 aa, Homo sapiens
  Table A; Target 70843; HLA-B*35:03; PRAME; ENSG00000185686; TAA
IPVEVLVDL

SEQ ID NO: 70844 - protein, 9 aa, Homo sapiens
  Table A; Target 70844; HLA-B*51:01; PRAME; ENSG00000185686; TAA
IPVEVLVDL

SEQ ID NO: 70845 - protein, 9 aa, Homo sapiens
  Table A; Target 70845; HLA-B*54:01; PRAME; ENSG00000185686; TAA
IPVEVLVDL

SEQ ID NO: 70846 - protein, 9 aa, Homo sapiens
  Table A; Target 70846; HLA-B*55:01; PRAME; ENSG00000185686; TAA
IPVEVLVDL

SEQ ID NO: 70847 - protein, 9 aa, Homo sapiens
  Table A; Target 70847; HLA-B*56:01; PRAME; ENSG00000185686; TAA
IPVEVLVDL

SEQ ID NO: 70848 - protein, 9 aa, Homo sapiens
  Table A; Target 70848; HLA-C*03:03; PRAME; ENSG00000185686; TAA
IPVEVLVDL

SEQ ID NO: 70849 - protein, 10 aa, Homo sapiens
  Table A; Target 70849; HLA-B*35:01; PRAME; ENSG00000185686; TAA
IPVEVLVDLF

SEQ ID NO: 70850 - protein, 8 aa, Homo sapiens
  Table A; Target 70850; HLA-B*15:01; PRAME; ENSG00000185686; TAA
IQSRYISM

SEQ ID NO: 70851 - protein, 8 aa, Homo sapiens
  Table A; Target 70851; HLA-B*37:01; PRAME; ENSG00000185686; TAA
IQSRYISM

SEQ ID NO: 70852 - protein, 9 aa, Homo sapiens
  Table A; Target 70852; HLA-A*23:01; PRAME; ENSG00000185686; TAA
ISISALQSL

SEQ ID NO: 70853 - protein, 9 aa, Homo sapiens
  Table A; Target 70853; HLA-A*24:02; PRAME; ENSG00000185686; TAA
ISISALQSL

SEQ ID NO: 70854 - protein, 9 aa, Homo sapiens
  Table A; Target 70854; HLA-A*25:01; PRAME; ENSG00000185686; TAA
ISISALQSL

SEQ ID NO: 70855 - protein, 9 aa, Homo sapiens
  Table A; Target 70855; HLA-A*30:01; PRAME; ENSG00000185686; TAA
ISISALQSL

SEQ ID NO: 70856 - protein, 9 aa, Homo sapiens
  Table A; Target 70856; HLA-A*32:01; PRAME; ENSG00000185686; TAA
ISISALQSL

SEQ ID NO: 70857 - protein, 9 aa, Homo sapiens
  Table A; Target 70857; HLA-B*15:01; PRAME; ENSG00000185686; TAA
ISISALQSL

SEQ ID NO: 70858 - protein, 9 aa, Homo sapiens
  Table A; Target 70858; HLA-B*15:03; PRAME; ENSG00000185686; TAA
ISISALQSL

SEQ ID NO: 70859 - protein, 9 aa, Homo sapiens
  Table A; Target 70859; HLA-B*35:03; PRAME; ENSG00000185686; TAA
ISISALQSL

SEQ ID NO: 70860 - protein, 9 aa, Homo sapiens
  Table A; Target 70860; HLA-B*40:01; PRAME; ENSG00000185686; TAA
ISISALQSL

SEQ ID NO: 70861 - protein, 9 aa, Homo sapiens
  Table A; Target 70861; HLA-B*40:02; PRAME; ENSG00000185686; TAA
ISISALQSL

SEQ ID NO: 70862 - protein, 9 aa, Homo sapiens
  Table A; Target 70862; HLA-B*46:01; PRAME; ENSG00000185686; TAA
ISISALQSL

SEQ ID NO: 70863 - protein, 9 aa, Homo sapiens
  Table A; Target 70863; HLA-B*57:01; PRAME; ENSG00000185686; TAA
ISISALQSL

SEQ ID NO: 70864 - protein, 9 aa, Homo sapiens
  Table A; Target 70864; HLA-B*58:01; PRAME; ENSG00000185686; TAA
ISISALQSL

SEQ ID NO: 70865 - protein, 9 aa, Homo sapiens
  Table A; Target 70865; HLA-C*01:02; PRAME; ENSG00000185686; TAA
ISISALQSL

SEQ ID NO: 70866 - protein, 9 aa, Homo sapiens
  Table A; Target 70866; HLA-C*02:02; PRAME; ENSG00000185686; TAA
ISISALQSL

SEQ ID NO: 70867 - protein, 9 aa, Homo sapiens
  Table A; Target 70867; HLA-C*03:03; PRAME; ENSG00000185686; TAA
ISISALQSL

SEQ ID NO: 70868 - protein, 9 aa, Homo sapiens
  Table A; Target 70868; HLA-C*03:04; PRAME; ENSG00000185686; TAA
ISISALQSL

SEQ ID NO: 70869 - protein, 9 aa, Homo sapiens
  Table A; Target 70869; HLA-C*05:01; PRAME; ENSG00000185686; TAA
ISISALQSL

SEQ ID NO: 70870 - protein, 9 aa, Homo sapiens
  Table A; Target 70870; HLA-C*07:02; PRAME; ENSG00000185686; TAA
ISISALQSL

SEQ ID NO: 70871 - protein, 9 aa, Homo sapiens
  Table A; Target 70871; HLA-C*12:03; PRAME; ENSG00000185686; TAA
ISISALQSL

SEQ ID NO: 70872 - protein, 9 aa, Homo sapiens
  Table A; Target 70872; HLA-C*14:02; PRAME; ENSG00000185686; TAA
ISISALQSL

SEQ ID NO: 70873 - protein, 9 aa, Homo sapiens
  Table A; Target 70873; HLA-C*16:01; PRAME; ENSG00000185686; TAA
ISISALQSL

SEQ ID NO: 70874 - protein, 9 aa, Homo sapiens
  Table A; Target 70874; HLA-C*16:02; PRAME; ENSG00000185686; TAA
ISISALQSL

SEQ ID NO: 70875 - protein, 9 aa, Homo sapiens
  Table A; Target 70875; HLA-C*16:04; PRAME; ENSG00000185686; TAA
ISISALQSL

SEQ ID NO: 70876 - protein, 10 aa, Homo sapiens
  Table A; Target 70876; HLA-B*57:01; PRAME; ENSG00000185686; TAA
ISISALQSLL

SEQ ID NO: 70877 - protein, 10 aa, Homo sapiens
  Table A; Target 70877; HLA-B*58:01; PRAME; ENSG00000185686; TAA
ISISALQSLL

SEQ ID NO: 70878 - protein, 10 aa, Homo sapiens
  Table A; Target 70878; HLA-A*31:01; PRAME; ENSG00000185686; TAA
ISMSVWTSPR

SEQ ID NO: 70879 - protein, 10 aa, Homo sapiens
  Table A; Target 70879; HLA-B*27:02; PRAME; ENSG00000185686; TAA
ISMSVWTSPR

SEQ ID NO: 70880 - protein, 9 aa, Homo sapiens
  Table A; Target 70880; HLA-A*01:01; PRAME; ENSG00000185686; TAA
ISPEKEEQY

SEQ ID NO: 70881 - protein, 9 aa, Homo sapiens
  Table A; Target 70881; HLA-B*15:01; PRAME; ENSG00000185686; TAA
ISPEKEEQY

SEQ ID NO: 70882 - protein, 9 aa, Homo sapiens
  Table A; Target 70882; HLA-B*46:01; PRAME; ENSG00000185686; TAA
ISPEKEEQY

SEQ ID NO: 70883 - protein, 9 aa, Homo sapiens
  Table A; Target 70883; HLA-B*58:01; PRAME; ENSG00000185686; TAA
ISPEKEEQY

SEQ ID NO: 70884 - protein, 9 aa, Homo sapiens
  Table A; Target 70884; HLA-C*01:02; PRAME; ENSG00000185686; TAA
ISPEKEEQY

SEQ ID NO: 70885 - protein, 9 aa, Homo sapiens
  Table A; Target 70885; HLA-C*16:01; PRAME; ENSG00000185686; TAA
ISPEKEEQY

SEQ ID NO: 70886 - protein, 9 aa, Homo sapiens
  Table A; Target 70886; HLA-A*01:01; PRAME; ENSG00000185686; TAA
ITDDQLLAL

SEQ ID NO: 70887 - protein, 9 aa, Homo sapiens
  Table A; Target 70887; HLA-A*02:07; PRAME; ENSG00000185686; TAA
ITDDQLLAL

SEQ ID NO: 70888 - protein, 9 aa, Homo sapiens
  Table A; Target 70888; HLA-A*03:01; PRAME; ENSG00000185686; TAA
ITDDQLLAL

SEQ ID NO: 70889 - protein, 9 aa, Homo sapiens
  Table A; Target 70889; HLA-A*11:01; PRAME; ENSG00000185686; TAA
ITDDQLLAL

SEQ ID NO: 70890 - protein, 9 aa, Homo sapiens
  Table A; Target 70890; HLA-B*35:03; PRAME; ENSG00000185686; TAA
ITDDQLLAL

SEQ ID NO: 70891 - protein, 9 aa, Homo sapiens
  Table A; Target 70891; HLA-B*38:01; PRAME; ENSG00000185686; TAA
ITDDQLLAL

SEQ ID NO: 70892 - protein, 9 aa, Homo sapiens
  Table A; Target 70892; HLA-C*03:03; PRAME; ENSG00000185686; TAA
ITDDQLLAL

SEQ ID NO: 70893 - protein, 9 aa, Homo sapiens
  Table A; Target 70893; HLA-C*03:04; PRAME; ENSG00000185686; TAA
ITDDQLLAL

SEQ ID NO: 70894 - protein, 9 aa, Homo sapiens
  Table A; Target 70894; HLA-C*04:01; PRAME; ENSG00000185686; TAA
ITDDQLLAL

SEQ ID NO: 70895 - protein, 9 aa, Homo sapiens
  Table A; Target 70895; HLA-C*05:01; PRAME; ENSG00000185686; TAA
ITDDQLLAL

SEQ ID NO: 70896 - protein, 9 aa, Homo sapiens
  Table A; Target 70896; HLA-C*07:04; PRAME; ENSG00000185686; TAA
ITDDQLLAL

SEQ ID NO: 70897 - protein, 10 aa, Homo sapiens
  Table A; Target 70897; HLA-A*01:01; PRAME; ENSG00000185686; TAA
ITDDQLLALL

SEQ ID NO: 70898 - protein, 9 aa, Homo sapiens
  Table A; Target 70898; HLA-B*57:01; PRAME; ENSG00000185686; TAA
KAMVQAWPF

SEQ ID NO: 70899 - protein, 9 aa, Homo sapiens
  Table A; Target 70899; HLA-C*03:03; PRAME; ENSG00000185686; TAA
KAVLDGLDV

SEQ ID NO: 70900 - protein, 9 aa, Homo sapiens
  Table A; Target 70900; HLA-C*03:04; PRAME; ENSG00000185686; TAA
KAVLDGLDV

SEQ ID NO: 70901 - protein, 10 aa, Homo sapiens
  Table A; Target 70901; HLA-B*40:01; PRAME; ENSG00000185686; TAA
KAVLDGLDVL

SEQ ID NO: 70902 - protein, 10 aa, Homo sapiens
  Table A; Target 70902; HLA-B*40:01; PRAME; ENSG00000185686; TAA
KDEALAIAAL

SEQ ID NO: 70903 - protein, 10 aa, Homo sapiens
  Table A; Target 70903; HLA-B*40:02; PRAME; ENSG00000185686; TAA
KDEALAIAAL

SEQ ID NO: 70904 - protein, 9 aa, Homo sapiens
  Table A; Target 70904; HLA-A*30:01; PRAME; ENSG00000185686; TAA
KEEQYIAQF

SEQ ID NO: 70905 - protein, 9 aa, Homo sapiens
  Table A; Target 70905; HLA-B*18:01; PRAME; ENSG00000185686; TAA
KEEQYIAQF

SEQ ID NO: 70906 - protein, 9 aa, Homo sapiens
  Table A; Target 70906; HLA-B*27:02; PRAME; ENSG00000185686; TAA
KEEQYIAQF

SEQ ID NO: 70907 - protein, 9 aa, Homo sapiens
  Table A; Target 70907; HLA-B*37:01; PRAME; ENSG00000185686; TAA
KEEQYIAQF

SEQ ID NO: 70908 - protein, 9 aa, Homo sapiens
  Table A; Target 70908; HLA-B*40:01; PRAME; ENSG00000185686; TAA
KEEQYIAQF

SEQ ID NO: 70909 - protein, 9 aa, Homo sapiens
  Table A; Target 70909; HLA-B*40:02; PRAME; ENSG00000185686; TAA
KEEQYIAQF

SEQ ID NO: 70910 - protein, 9 aa, Homo sapiens
  Table A; Target 70910; HLA-B*44:02; PRAME; ENSG00000185686; TAA
KEEQYIAQF

SEQ ID NO: 70911 - protein, 9 aa, Homo sapiens
  Table A; Target 70911; HLA-B*44:03; PRAME; ENSG00000185686; TAA
KEEQYIAQF

SEQ ID NO: 70912 - protein, 9 aa, Homo sapiens
  Table A; Target 70912; HLA-B*49:01; PRAME; ENSG00000185686; TAA
KEEQYIAQF

SEQ ID NO: 70913 - protein, 9 aa, Homo sapiens
  Table A; Target 70913; HLA-C*16:04; PRAME; ENSG00000185686; TAA
KEEQYIAQF

SEQ ID NO: 70914 - protein, 9 aa, Homo sapiens
  Table A; Target 70914; HLA-B*40:01; PRAME; ENSG00000185686; TAA
KEGACDELF

SEQ ID NO: 70915 - protein, 8 aa, Homo sapiens
  Table A; Target 70915; HLA-A*02:07; PRAME; ENSG00000185686; TAA
KLPTLAKF

SEQ ID NO: 70916 - protein, 8 aa, Homo sapiens
  Table A; Target 70916; HLA-A*24:02; PRAME; ENSG00000185686; TAA
KLPTLAKF

SEQ ID NO: 70917 - protein, 11 aa, Homo sapiens
  Table A; Target 70917; HLA-A*03:01; PRAME; ENSG00000185686; TAA
KLPTLAKFSPY

SEQ ID NO: 70918 - protein, 9 aa, Homo sapiens
  Table A; Target 70918; HLA-A*03:02; PRAME; ENSG00000185686; TAA
KLQVLDLRK

SEQ ID NO: 70919 - protein, 9 aa, Homo sapiens
  Table A; Target 70919; HLA-A*02:03; PRAME; ENSG00000185686; TAA
KMILKMVQL

SEQ ID NO: 70920 - protein, 9 aa, Homo sapiens
  Table A; Target 70920; HLA-C*05:01; PRAME; ENSG00000185686; TAA
KVDGLSTEA

SEQ ID NO: 70921 - protein, 8 aa, Homo sapiens
  Table A; Target 70921; HLA-B*27:02; PRAME; ENSG00000185686; TAA
LAGQSLLK

SEQ ID NO: 70922 - protein, 8 aa, Homo sapiens
  Table A; Target 70922; HLA-A*23:01; PRAME; ENSG00000185686; TAA
LAIAALEL

SEQ ID NO: 70923 - protein, 8 aa, Homo sapiens
  Table A; Target 70923; HLA-B*35:03; PRAME; ENSG00000185686; TAA
LAIAALEL

SEQ ID NO: 70924 - protein, 8 aa, Homo sapiens
  Table A; Target 70924; HLA-B*46:01; PRAME; ENSG00000185686; TAA
LAIAALEL

SEQ ID NO: 70925 - protein, 8 aa, Homo sapiens
  Table A; Target 70925; HLA-B*51:01; PRAME; ENSG00000185686; TAA
LAIAALEL

SEQ ID NO: 70926 - protein, 8 aa, Homo sapiens
  Table A; Target 70926; HLA-B*58:01; PRAME; ENSG00000185686; TAA
LAIAALEL

SEQ ID NO: 70927 - protein, 8 aa, Homo sapiens
  Table A; Target 70927; HLA-C*03:03; PRAME; ENSG00000185686; TAA
LAIAALEL

SEQ ID NO: 70928 - protein, 8 aa, Homo sapiens
  Table A; Target 70928; HLA-C*03:04; PRAME; ENSG00000185686; TAA
LAIAALEL

SEQ ID NO: 70929 - protein, 8 aa, Homo sapiens
  Table A; Target 70929; HLA-C*14:02; PRAME; ENSG00000185686; TAA
LAIAALEL

SEQ ID NO: 70930 - protein, 9 aa, Homo sapiens
  Table A; Target 70930; HLA-A*02:04; PRAME; ENSG00000185686; TAA
LAIAALELL

SEQ ID NO: 70931 - protein, 9 aa, Homo sapiens
  Table A; Target 70931; HLA-A*02:07; PRAME; ENSG00000185686; TAA
LAIAALELL

SEQ ID NO: 70932 - protein, 9 aa, Homo sapiens
  Table A; Target 70932; HLA-A*23:01; PRAME; ENSG00000185686; TAA
LAIAALELL

SEQ ID NO: 70933 - protein, 9 aa, Homo sapiens
  Table A; Target 70933; HLA-A*24:02; PRAME; ENSG00000185686; TAA
LAIAALELL

SEQ ID NO: 70934 - protein, 9 aa, Homo sapiens
  Table A; Target 70934; HLA-B*35:03; PRAME; ENSG00000185686; TAA
LAIAALELL

SEQ ID NO: 70935 - protein, 9 aa, Homo sapiens
  Table A; Target 70935; HLA-B*46:01; PRAME; ENSG00000185686; TAA
LAIAALELL

SEQ ID NO: 70936 - protein, 9 aa, Homo sapiens
  Table A; Target 70936; HLA-B*58:01; PRAME; ENSG00000185686; TAA
LAIAALELL

SEQ ID NO: 70937 - protein, 9 aa, Homo sapiens
  Table A; Target 70937; HLA-C*01:02; PRAME; ENSG00000185686; TAA
LAIAALELL

SEQ ID NO: 70938 - protein, 9 aa, Homo sapiens
  Table A; Target 70938; HLA-C*02:02; PRAME; ENSG00000185686; TAA
LAIAALELL

SEQ ID NO: 70939 - protein, 9 aa, Homo sapiens
  Table A; Target 70939; HLA-C*03:03; PRAME; ENSG00000185686; TAA
LAIAALELL

SEQ ID NO: 70940 - protein, 9 aa, Homo sapiens
  Table A; Target 70940; HLA-C*03:04; PRAME; ENSG00000185686; TAA
LAIAALELL

SEQ ID NO: 70941 - protein, 11 aa, Homo sapiens
  Table A; Target 70941; HLA-B*27:02; PRAME; ENSG00000185686; TAA
LAIAALELLPR

SEQ ID NO: 70942 - protein, 9 aa, Homo sapiens
  Table A; Target 70942; HLA-B*46:01; PRAME; ENSG00000185686; TAA
LALLPSLSH

SEQ ID NO: 70943 - protein, 9 aa, Homo sapiens
  Table A; Target 70943; HLA-C*03:04; PRAME; ENSG00000185686; TAA
LALLPSLSH

SEQ ID NO: 70944 - protein, 8 aa, Homo sapiens
  Table A; Target 70944; HLA-A*33:03; PRAME; ENSG00000185686; TAA
LAQEVRPR

SEQ ID NO: 70945 - protein, 10 aa, Homo sapiens
  Table A; Target 70945; HLA-B*57:01; PRAME; ENSG00000185686; TAA
LAQEVRPRRW

SEQ ID NO: 70946 - protein, 8 aa, Homo sapiens
  Table A; Target 70946; HLA-B*08:01; PRAME; ENSG00000185686; TAA
LAYLHARL

SEQ ID NO: 70947 - protein, 9 aa, Homo sapiens
  Table A; Target 70947; HLA-A*30:01; PRAME; ENSG00000185686; TAA
LDVLLAQEV

SEQ ID NO: 70948 - protein, 9 aa, Homo sapiens
  Table A; Target 70948; HLA-B*18:01; PRAME; ENSG00000185686; TAA
LDVLLAQEV

SEQ ID NO: 70949 - protein, 9 aa, Homo sapiens
  Table A; Target 70949; HLA-B*40:02; PRAME; ENSG00000185686; TAA
LDVLLAQEV

SEQ ID NO: 70950 - protein, 9 aa, Homo sapiens
  Table A; Target 70950; HLA-B*49:01; PRAME; ENSG00000185686; TAA
LDVLLAQEV

SEQ ID NO: 70951 - protein, 8 aa, Homo sapiens
  Table A; Target 70951; HLA-B*18:01; PRAME; ENSG00000185686; TAA
LELLPREL

SEQ ID NO: 70952 - protein, 9 aa, Homo sapiens
  Table A; Target 70952; HLA-B*44:02; PRAME; ENSG00000185686; TAA
LELLPRELF

SEQ ID NO: 70953 - protein, 9 aa, Homo sapiens
  Table A; Target 70953; HLA-B*44:03; PRAME; ENSG00000185686; TAA
LELLPRELF

SEQ ID NO: 70954 - protein, 8 aa, Homo sapiens
  Table A; Target 70954; HLA-A*30:01; PRAME; ENSG00000185686; TAA
LERASATL

SEQ ID NO: 70955 - protein, 8 aa, Homo sapiens
  Table A; Target 70955; HLA-B*18:01; PRAME; ENSG00000185686; TAA
LERASATL

SEQ ID NO: 70956 - protein, 8 aa, Homo sapiens
  Table A; Target 70956; HLA-B*40:01; PRAME; ENSG00000185686; TAA
LERASATL

SEQ ID NO: 70957 - protein, 8 aa, Homo sapiens
  Table A; Target 70957; HLA-B*40:02; PRAME; ENSG00000185686; TAA
LERASATL

SEQ ID NO: 70958 - protein, 8 aa, Homo sapiens
  Table A; Target 70958; HLA-B*49:01; PRAME; ENSG00000185686; TAA
LERASATL

SEQ ID NO: 70959 - protein, 11 aa, Homo sapiens
  Table A; Target 70959; HLA-A*30:01; PRAME; ENSG00000185686; TAA
LERASATLQDL

SEQ ID NO: 70960 - protein, 11 aa, Homo sapiens
  Table A; Target 70960; HLA-B*40:02; PRAME; ENSG00000185686; TAA
LERASATLQDL

SEQ ID NO: 70961 - protein, 11 aa, Homo sapiens
  Table A; Target 70961; HLA-B*40:01; PRAME; ENSG00000185686; TAA
LESYEDIHGTL

SEQ ID NO: 70962 - protein, 8 aa, Homo sapiens
  Table A; Target 70962; HLA-B*18:01; PRAME; ENSG00000185686; TAA
LETFKAVL

SEQ ID NO: 70963 - protein, 8 aa, Homo sapiens
  Table A; Target 70963; HLA-B*37:01; PRAME; ENSG00000185686; TAA
LETFKAVL

SEQ ID NO: 70964 - protein, 9 aa, Homo sapiens
  Table A; Target 70964; HLA-A*30:01; PRAME; ENSG00000185686; TAA
LETLSITNC

SEQ ID NO: 70965 - protein, 9 aa, Homo sapiens
  Table A; Target 70965; HLA-B*40:02; PRAME; ENSG00000185686; TAA
LETLSITNC

SEQ ID NO: 70966 - protein, 9 aa, Homo sapiens
  Table A; Target 70966; HLA-B*49:01; PRAME; ENSG00000185686; TAA
LETLSITNC

SEQ ID NO: 70967 - protein, 9 aa, Homo sapiens
  Table A; Target 70967; HLA-A*02:07; PRAME; ENSG00000185686; TAA
LFPPLFMAA

SEQ ID NO: 70968 - protein, 10 aa, Homo sapiens
  Table A; Target 70968; HLA-A*24:02; PRAME; ENSG00000185686; TAA
LFPPLFMAAF

SEQ ID NO: 70969 - protein, 10 aa, Homo sapiens
  Table A; Target 70969; HLA-A*29:02; PRAME; ENSG00000185686; TAA
LFPPLFMAAF

SEQ ID NO: 70970 - protein, 9 aa, Homo sapiens
  Table A; Target 70970; HLA-A*68:02; PRAME; ENSG00000185686; TAA
LFSYLIEKV

SEQ ID NO: 70971 - protein, 8 aa, Homo sapiens
  Table A; Target 70971; HLA-B*57:01; PRAME; ENSG00000185686; TAA
LGRPSMVW

SEQ ID NO: 70972 - protein, 9 aa, Homo sapiens
  Table A; Target 70972; HLA-A*02:01; PRAME; ENSG00000185686; TAA
LHLERLAYL

SEQ ID NO: 70973 - protein, 9 aa, Homo sapiens
  Table A; Target 70973; HLA-A*02:04; PRAME; ENSG00000185686; TAA
LHLERLAYL

SEQ ID NO: 70974 - protein, 8 aa, Homo sapiens
  Table A; Target 70974; HLA-A*02:04; PRAME; ENSG00000185686; TAA
LLALLPSL

SEQ ID NO: 70975 - protein, 9 aa, Homo sapiens
  Table A; Target 70975; HLA-A*02:03; PRAME; ENSG00000185686; TAA
LLAQEVRPR

SEQ ID NO: 70976 - protein, 9 aa, Homo sapiens
  Table A; Target 70976; HLA-A*03:01; PRAME; ENSG00000185686; TAA
LLAQEVRPR

SEQ ID NO: 70977 - protein, 9 aa, Homo sapiens
  Table A; Target 70977; HLA-A*31:01; PRAME; ENSG00000185686; TAA
LLAQEVRPR

SEQ ID NO: 70978 - protein, 9 aa, Homo sapiens
  Table A; Target 70978; HLA-B*08:01; PRAME; ENSG00000185686; TAA
LLERASATL

SEQ ID NO: 70979 - protein, 9 aa, Homo sapiens
  Table A; Target 70979; HLA-C*01:02; PRAME; ENSG00000185686; TAA
LLERASATL

SEQ ID NO: 70980 - protein, 9 aa, Homo sapiens
  Table A; Target 70980; HLA-C*03:03; PRAME; ENSG00000185686; TAA
LLERASATL

SEQ ID NO: 70981 - protein, 9 aa, Homo sapiens
  Table A; Target 70981; HLA-C*03:04; PRAME; ENSG00000185686; TAA
LLERASATL

SEQ ID NO: 70982 - protein, 9 aa, Homo sapiens
  Table A; Target 70982; HLA-C*05:01; PRAME; ENSG00000185686; TAA
LLERASATL

SEQ ID NO: 70983 - protein, 9 aa, Homo sapiens
  Table A; Target 70983; HLA-C*07:04; PRAME; ENSG00000185686; TAA
LLERASATL

SEQ ID NO: 70984 - protein, 9 aa, Homo sapiens
  Table A; Target 70984; HLA-C*14:02; PRAME; ENSG00000185686; TAA
LLERASATL

SEQ ID NO: 70985 - protein, 9 aa, Homo sapiens
  Table A; Target 70985; HLA-A*02:01; PRAME; ENSG00000185686; TAA
LLKDEALAI

SEQ ID NO: 70986 - protein, 9 aa, Homo sapiens
  Table A; Target 70986; HLA-A*02:03; PRAME; ENSG00000185686; TAA
LLKDEALAI

SEQ ID NO: 70987 - protein, 9 aa, Homo sapiens
  Table A; Target 70987; HLA-A*02:04; PRAME; ENSG00000185686; TAA
LLKDEALAI

SEQ ID NO: 70988 - protein, 9 aa, Homo sapiens
  Table A; Target 70988; HLA-A*23:01; PRAME; ENSG00000185686; TAA
LLKDEALAI

SEQ ID NO: 70989 - protein, 9 aa, Homo sapiens
  Table A; Target 70989; HLA-A*24:02; PRAME; ENSG00000185686; TAA
LLKDEALAI

SEQ ID NO: 70990 - protein, 9 aa, Homo sapiens
  Table A; Target 70990; HLA-A*25:01; PRAME; ENSG00000185686; TAA
LLKDEALAI

SEQ ID NO: 70991 - protein, 9 aa, Homo sapiens
  Table A; Target 70991; HLA-B*08:01; PRAME; ENSG00000185686; TAA
LLKDEALAI

SEQ ID NO: 70992 - protein, 9 aa, Homo sapiens
  Table A; Target 70992; HLA-B*13:02; PRAME; ENSG00000185686; TAA
LLKDEALAI

SEQ ID NO: 70993 - protein, 9 aa, Homo sapiens
  Table A; Target 70993; HLA-B*40:02; PRAME; ENSG00000185686; TAA
LLKDEALAI

SEQ ID NO: 70994 - protein, 9 aa, Homo sapiens
  Table A; Target 70994; HLA-B*46:01; PRAME; ENSG00000185686; TAA
LLKDEALAI

SEQ ID NO: 70995 - protein, 9 aa, Homo sapiens
  Table A; Target 70995; HLA-B*55:01; PRAME; ENSG00000185686; TAA
LLKDEALAI

SEQ ID NO: 70996 - protein, 9 aa, Homo sapiens
  Table A; Target 70996; HLA-C*06:02; PRAME; ENSG00000185686; TAA
LLKDEALAI

SEQ ID NO: 70997 - protein, 9 aa, Homo sapiens
  Table A; Target 70997; HLA-C*07:02; PRAME; ENSG00000185686; TAA
LLKDEALAI

SEQ ID NO: 70998 - protein, 9 aa, Homo sapiens
  Table A; Target 70998; HLA-C*07:04; PRAME; ENSG00000185686; TAA
LLKDEALAI

SEQ ID NO: 70999 - protein, 10 aa, Homo sapiens
  Table A; Target 70999; HLA-A*02:03; PRAME; ENSG00000185686; TAA
LLKDEALAIA

SEQ ID NO: 71000 - protein, 9 aa, Homo sapiens
  Table A; Target 71000; HLA-A*02:04; PRAME; ENSG00000185686; TAA
LLLSHIHAS

SEQ ID NO: 71001 - protein, 10 aa, Homo sapiens
  Table A; Target 71001; HLA-A*02:04; PRAME; ENSG00000185686; TAA
LLPRELFPPL

SEQ ID NO: 71002 - protein, 10 aa, Homo sapiens
  Table A; Target 71002; HLA-A*02:07; PRAME; ENSG00000185686; TAA
LLPRELFPPL

SEQ ID NO: 71003 - protein, 10 aa, Homo sapiens
  Table A; Target 71003; HLA-A*03:01; PRAME; ENSG00000185686; TAA
LLPRELFPPL

SEQ ID NO: 71004 - protein, 10 aa, Homo sapiens
  Table A; Target 71004; HLA-A*24:02; PRAME; ENSG00000185686; TAA
LLPRELFPPL

SEQ ID NO: 71005 - protein, 11 aa, Homo sapiens
  Table A; Target 71005; HLA-A*02:07; PRAME; ENSG00000185686; TAA
LLPRELFPPLF

SEQ ID NO: 71006 - protein, 11 aa, Homo sapiens
  Table A; Target 71006; HLA-A*24:02; PRAME; ENSG00000185686; TAA
LLPRELFPPLF

SEQ ID NO: 71007 - protein, 8 aa, Homo sapiens
  Table A; Target 71007; HLA-A*02:04; PRAME; ENSG00000185686; TAA
LLQHLIGL

SEQ ID NO: 71008 - protein, 8 aa, Homo sapiens
  Table A; Target 71008; HLA-C*07:04; PRAME; ENSG00000185686; TAA
LLQHLIGL

SEQ ID NO: 71009 - protein, 11 aa, Homo sapiens
  Table A; Target 71009; HLA-A*02:04; PRAME; ENSG00000185686; TAA
LLQHLIGLSNL

SEQ ID NO: 71010 - protein, 10 aa, Homo sapiens
  Table A; Target 71010; HLA-A*01:01; PRAME; ENSG00000185686; TAA
LLSHIHASSY

SEQ ID NO: 71011 - protein, 10 aa, Homo sapiens
  Table A; Target 71011; HLA-A*29:02; PRAME; ENSG00000185686; TAA
LLSHIHASSY

SEQ ID NO: 71012 - protein, 10 aa, Homo sapiens
  Table A; Target 71012; HLA-A*30:02; PRAME; ENSG00000185686; TAA
LLSHIHASSY

SEQ ID NO: 71013 - protein, 8 aa, Homo sapiens
  Table A; Target 71013; HLA-B*51:01; PRAME; ENSG00000185686; TAA
LPLGVLMK

SEQ ID NO: 71014 - protein, 9 aa, Homo sapiens
  Table A; Target 71014; HLA-B*54:01; PRAME; ENSG00000185686; TAA
LPLGVLMKG

SEQ ID NO: 71015 - protein, 8 aa, Homo sapiens
  Table A; Target 71015; HLA-B*54:01; PRAME; ENSG00000185686; TAA
LPRELFPP

SEQ ID NO: 71016 - protein, 9 aa, Homo sapiens
  Table A; Target 71016; HLA-B*07:02; PRAME; ENSG00000185686; TAA
LPRELFPPL

SEQ ID NO: 71017 - protein, 9 aa, Homo sapiens
  Table A; Target 71017; HLA-B*35:01; PRAME; ENSG00000185686; TAA
LPRELFPPL

SEQ ID NO: 71018 - protein, 9 aa, Homo sapiens
  Table A; Target 71018; HLA-B*51:01; PRAME; ENSG00000185686; TAA
LPRELFPPL

SEQ ID NO: 71019 - protein, 9 aa, Homo sapiens
  Table A; Target 71019; HLA-B*54:01; PRAME; ENSG00000185686; TAA
LPRELFPPL

SEQ ID NO: 71020 - protein, 10 aa, Homo sapiens
  Table A; Target 71020; HLA-B*51:01; PRAME; ENSG00000185686; TAA
LPRELFPPLF

SEQ ID NO: 71021 - protein, 10 aa, Homo sapiens
  Table A; Target 71021; HLA-B*54:01; PRAME; ENSG00000185686; TAA
LPRELFPPLF

SEQ ID NO: 71022 - protein, 10 aa, Homo sapiens
  Table A; Target 71022; HLA-B*07:02; PRAME; ENSG00000185686; TAA
LPSLSHCSQL

SEQ ID NO: 71023 - protein, 10 aa, Homo sapiens
  Table A; Target 71023; HLA-C*07:02; PRAME; ENSG00000185686; TAA
LPSLSHCSQL

SEQ ID NO: 71024 - protein, 9 aa, Homo sapiens
  Table A; Target 71024; HLA-B*54:01; PRAME; ENSG00000185686; TAA
LPTLAKFSP

SEQ ID NO: 71025 - protein, 10 aa, Homo sapiens
  Table A; Target 71025; HLA-B*35:01; PRAME; ENSG00000185686; TAA
LPTLAKFSPY

SEQ ID NO: 71026 - protein, 9 aa, Homo sapiens
  Table A; Target 71026; HLA-A*02:04; PRAME; ENSG00000185686; TAA
LQALYVDSL

SEQ ID NO: 71027 - protein, 9 aa, Homo sapiens
  Table A; Target 71027; HLA-B*27:05; PRAME; ENSG00000185686; TAA
LQALYVDSL

SEQ ID NO: 71028 - protein, 9 aa, Homo sapiens
  Table A; Target 71028; HLA-B*38:01; PRAME; ENSG00000185686; TAA
LQALYVDSL

SEQ ID NO: 71029 - protein, 9 aa, Homo sapiens
  Table A; Target 71029; HLA-B*39:01; PRAME; ENSG00000185686; TAA
LQALYVDSL

SEQ ID NO: 71030 - protein, 9 aa, Homo sapiens
  Table A; Target 71030; HLA-C*07:04; PRAME; ENSG00000185686; TAA
LQALYVDSL

SEQ ID NO: 71031 - protein, 9 aa, Homo sapiens
  Table A; Target 71031; HLA-B*13:02; PRAME; ENSG00000185686; TAA
LQCLQALYV

SEQ ID NO: 71032 - protein, 8 aa, Homo sapiens
  Table A; Target 71032; HLA-B*37:01; PRAME; ENSG00000185686; TAA
LQSLLQHL

SEQ ID NO: 71033 - protein, 9 aa, Homo sapiens
  Table A; Target 71033; HLA-B*13:02; PRAME; ENSG00000185686; TAA
LQSLLQHLI

SEQ ID NO: 71034 - protein, 9 aa, Homo sapiens
  Table A; Target 71034; HLA-B*38:01; PRAME; ENSG00000185686; TAA
LQSLLQHLI

SEQ ID NO: 71035 - protein, 9 aa, Homo sapiens
  Table A; Target 71035; HLA-A*01:01; PRAME; ENSG00000185686; TAA
LSEGDVMHL

SEQ ID NO: 71036 - protein, 9 aa, Homo sapiens
  Table A; Target 71036; HLA-B*27:05; PRAME; ENSG00000185686; TAA
LSEGDVMHL

SEQ ID NO: 71037 - protein, 9 aa, Homo sapiens
  Table A; Target 71037; HLA-B*58:01; PRAME; ENSG00000185686; TAA
LSEGDVMHL

SEQ ID NO: 71038 - protein, 9 aa, Homo sapiens
  Table A; Target 71038; HLA-C*03:03; PRAME; ENSG00000185686; TAA
LSEGDVMHL

SEQ ID NO: 71039 - protein, 9 aa, Homo sapiens
  Table A; Target 71039; HLA-C*03:04; PRAME; ENSG00000185686; TAA
LSEGDVMHL

SEQ ID NO: 71040 - protein, 9 aa, Homo sapiens
  Table A; Target 71040; HLA-C*04:01; PRAME; ENSG00000185686; TAA
LSEGDVMHL

SEQ ID NO: 71041 - protein, 9 aa, Homo sapiens
  Table A; Target 71041; HLA-C*05:01; PRAME; ENSG00000185686; TAA
LSEGDVMHL

SEQ ID NO: 71042 - protein, 9 aa, Homo sapiens
  Table A; Target 71042; HLA-C*06:02; PRAME; ENSG00000185686; TAA
LSEGDVMHL

SEQ ID NO: 71043 - protein, 9 aa, Homo sapiens
  Table A; Target 71043; HLA-C*07:01; PRAME; ENSG00000185686; TAA
LSEGDVMHL

SEQ ID NO: 71044 - protein, 9 aa, Homo sapiens
  Table A; Target 71044; HLA-C*07:04; PRAME; ENSG00000185686; TAA
LSEGDVMHL

SEQ ID NO: 71045 - protein, 8 aa, Homo sapiens
  Table A; Target 71045; HLA-B*40:02; PRAME; ENSG00000185686; TAA
LSFYGNSI

SEQ ID NO: 71046 - protein, 8 aa, Homo sapiens
  Table A; Target 71046; HLA-B*46:01; PRAME; ENSG00000185686; TAA
LSFYGNSI

SEQ ID NO: 71047 - protein, 8 aa, Homo sapiens
  Table A; Target 71047; HLA-B*51:01; PRAME; ENSG00000185686; TAA
LSFYGNSI

SEQ ID NO: 71048 - protein, 8 aa, Homo sapiens
  Table A; Target 71048; HLA-C*03:03; PRAME; ENSG00000185686; TAA
LSFYGNSI

SEQ ID NO: 71049 - protein, 8 aa, Homo sapiens
  Table A; Target 71049; HLA-C*03:04; PRAME; ENSG00000185686; TAA
LSFYGNSI

SEQ ID NO: 71050 - protein, 10 aa, Homo sapiens
  Table A; Target 71050; HLA-A*68:02; PRAME; ENSG00000185686; TAA
LSFYGNSISI

SEQ ID NO: 71051 - protein, 10 aa, Homo sapiens
  Table A; Target 71051; HLA-C*07:02; PRAME; ENSG00000185686; TAA
LSFYGNSISI

SEQ ID NO: 71052 - protein, 9 aa, Homo sapiens
  Table A; Target 71052; HLA-A*01:01; PRAME; ENSG00000185686; TAA
LSHIHASSY

SEQ ID NO: 71053 - protein, 9 aa, Homo sapiens
  Table A; Target 71053; HLA-A*30:02; PRAME; ENSG00000185686; TAA
LSHIHASSY

SEQ ID NO: 71054 - protein, 9 aa, Homo sapiens
  Table A; Target 71054; HLA-A*32:01; PRAME; ENSG00000185686; TAA
LSHIHASSY

SEQ ID NO: 71055 - protein, 9 aa, Homo sapiens
  Table A; Target 71055; HLA-B*15:01; PRAME; ENSG00000185686; TAA
LSHIHASSY

SEQ ID NO: 71056 - protein, 9 aa, Homo sapiens
  Table A; Target 71056; HLA-B*15:03; PRAME; ENSG00000185686; TAA
LSHIHASSY

SEQ ID NO: 71057 - protein, 9 aa, Homo sapiens
  Table A; Target 71057; HLA-B*46:01; PRAME; ENSG00000185686; TAA
LSHIHASSY

SEQ ID NO: 71058 - protein, 9 aa, Homo sapiens
  Table A; Target 71058; HLA-B*58:01; PRAME; ENSG00000185686; TAA
LSHIHASSY

SEQ ID NO: 71059 - protein, 9 aa, Homo sapiens
  Table A; Target 71059; HLA-C*02:02; PRAME; ENSG00000185686; TAA
LSHIHASSY

SEQ ID NO: 71060 - protein, 9 aa, Homo sapiens
  Table A; Target 71060; HLA-C*07:01; PRAME; ENSG00000185686; TAA
LSHIHASSY

SEQ ID NO: 71061 - protein, 9 aa, Homo sapiens
  Table A; Target 71061; HLA-C*07:04; PRAME; ENSG00000185686; TAA
LSHIHASSY

SEQ ID NO: 71062 - protein, 9 aa, Homo sapiens
  Table A; Target 71062; HLA-C*14:02; PRAME; ENSG00000185686; TAA
LSHIHASSY

SEQ ID NO: 71063 - protein, 9 aa, Homo sapiens
  Table A; Target 71063; HLA-C*16:01; PRAME; ENSG00000185686; TAA
LSHIHASSY

SEQ ID NO: 71064 - protein, 9 aa, Homo sapiens
  Table A; Target 71064; HLA-C*16:02; PRAME; ENSG00000185686; TAA
LSHIHASSY

SEQ ID NO: 71065 - protein, 8 aa, Homo sapiens
  Table A; Target 71065; HLA-C*03:03; PRAME; ENSG00000185686; TAA
LSLSGVML

SEQ ID NO: 71066 - protein, 8 aa, Homo sapiens
  Table A; Target 71066; HLA-C*03:04; PRAME; ENSG00000185686; TAA
LSLSGVML

SEQ ID NO: 71067 - protein, 8 aa, Homo sapiens
  Table A; Target 71067; HLA-B*08:01; PRAME; ENSG00000185686; TAA
LSNLTHVL

SEQ ID NO: 71068 - protein, 8 aa, Homo sapiens
  Table A; Target 71068; HLA-C*03:03; PRAME; ENSG00000185686; TAA
LSNLTHVL

SEQ ID NO: 71069 - protein, 8 aa, Homo sapiens
  Table A; Target 71069; HLA-C*03:04; PRAME; ENSG00000185686; TAA
LSNLTHVL

SEQ ID NO: 71070 - protein, 8 aa, Homo sapiens
  Table A; Target 71070; HLA-C*07:04; PRAME; ENSG00000185686; TAA
LSNLTHVL

SEQ ID NO: 71071 - protein, 8 aa, Homo sapiens
  Table A; Target 71071; HLA-C*16:01; PRAME; ENSG00000185686; TAA
LSNLTHVL

SEQ ID NO: 71072 - protein, 9 aa, Homo sapiens
  Table A; Target 71072; HLA-A*01:01; PRAME; ENSG00000185686; TAA
LSNLTHVLY

SEQ ID NO: 71073 - protein, 9 aa, Homo sapiens
  Table A; Target 71073; HLA-A*29:02; PRAME; ENSG00000185686; TAA
LSNLTHVLY

SEQ ID NO: 71074 - protein, 9 aa, Homo sapiens
  Table A; Target 71074; HLA-A*30:02; PRAME; ENSG00000185686; TAA
LSNLTHVLY

SEQ ID NO: 71075 - protein, 9 aa, Homo sapiens
  Table A; Target 71075; HLA-A*32:01; PRAME; ENSG00000185686; TAA
LSNLTHVLY

SEQ ID NO: 71076 - protein, 9 aa, Homo sapiens
  Table A; Target 71076; HLA-B*15:01; PRAME; ENSG00000185686; TAA
LSNLTHVLY

SEQ ID NO: 71077 - protein, 9 aa, Homo sapiens
  Table A; Target 71077; HLA-B*46:01; PRAME; ENSG00000185686; TAA
LSNLTHVLY

SEQ ID NO: 71078 - protein, 9 aa, Homo sapiens
  Table A; Target 71078; HLA-B*57:01; PRAME; ENSG00000185686; TAA
LSNLTHVLY

SEQ ID NO: 71079 - protein, 9 aa, Homo sapiens
  Table A; Target 71079; HLA-B*58:01; PRAME; ENSG00000185686; TAA
LSNLTHVLY

SEQ ID NO: 71080 - protein, 9 aa, Homo sapiens
  Table A; Target 71080; HLA-C*02:02; PRAME; ENSG00000185686; TAA
LSNLTHVLY

SEQ ID NO: 71081 - protein, 9 aa, Homo sapiens
  Table A; Target 71081; HLA-C*16:01; PRAME; ENSG00000185686; TAA
LSNLTHVLY

SEQ ID NO: 71082 - protein, 9 aa, Homo sapiens
  Table A; Target 71082; HLA-C*03:03; PRAME; ENSG00000185686; TAA
LSQSPSVSQ

SEQ ID NO: 71083 - protein, 10 aa, Homo sapiens
  Table A; Target 71083; HLA-B*39:01; PRAME; ENSG00000185686; TAA
LSQSPSVSQL

SEQ ID NO: 71084 - protein, 9 aa, Homo sapiens
  Table A; Target 71084; HLA-A*01:01; PRAME; ENSG00000185686; TAA
LTDVSPEPL

SEQ ID NO: 71085 - protein, 9 aa, Homo sapiens
  Table A; Target 71085; HLA-B*35:03; PRAME; ENSG00000185686; TAA
LTDVSPEPL

SEQ ID NO: 71086 - protein, 9 aa, Homo sapiens
  Table A; Target 71086; HLA-B*39:01; PRAME; ENSG00000185686; TAA
LTDVSPEPL

SEQ ID NO: 71087 - protein, 9 aa, Homo sapiens
  Table A; Target 71087; HLA-C*03:03; PRAME; ENSG00000185686; TAA
LTDVSPEPL

SEQ ID NO: 71088 - protein, 9 aa, Homo sapiens
  Table A; Target 71088; HLA-C*03:04; PRAME; ENSG00000185686; TAA
LTDVSPEPL

SEQ ID NO: 71089 - protein, 9 aa, Homo sapiens
  Table A; Target 71089; HLA-C*04:01; PRAME; ENSG00000185686; TAA
LTDVSPEPL

SEQ ID NO: 71090 - protein, 9 aa, Homo sapiens
  Table A; Target 71090; HLA-C*05:01; PRAME; ENSG00000185686; TAA
LTDVSPEPL

SEQ ID NO: 71091 - protein, 9 aa, Homo sapiens
  Table A; Target 71091; HLA-C*07:04; PRAME; ENSG00000185686; TAA
LTDVSPEPL

SEQ ID NO: 71092 - protein, 10 aa, Homo sapiens
  Table A; Target 71092; HLA-A*01:01; PRAME; ENSG00000185686; TAA
LTDVSPEPLQ

SEQ ID NO: 71093 - protein, 11 aa, Homo sapiens
  Table A; Target 71093; HLA-B*27:05; PRAME; ENSG00000185686; TAA
LTDVSPEPLQA

SEQ ID NO: 71094 - protein, 9 aa, Homo sapiens
  Table A; Target 71094; HLA-B*07:02; PRAME; ENSG00000185686; TAA
LVELAGQSL

SEQ ID NO: 71095 - protein, 9 aa, Homo sapiens
  Table A; Target 71095; HLA-B*35:03; PRAME; ENSG00000185686; TAA
LVELAGQSL

SEQ ID NO: 71096 - protein, 9 aa, Homo sapiens
  Table A; Target 71096; HLA-B*39:01; PRAME; ENSG00000185686; TAA
LVELAGQSL

SEQ ID NO: 71097 - protein, 9 aa, Homo sapiens
  Table A; Target 71097; HLA-C*01:02; PRAME; ENSG00000185686; TAA
LVELAGQSL

SEQ ID NO: 71098 - protein, 9 aa, Homo sapiens
  Table A; Target 71098; HLA-C*03:03; PRAME; ENSG00000185686; TAA
LVELAGQSL

SEQ ID NO: 71099 - protein, 9 aa, Homo sapiens
  Table A; Target 71099; HLA-C*03:04; PRAME; ENSG00000185686; TAA
LVELAGQSL

SEQ ID NO: 71100 - protein, 9 aa, Homo sapiens
  Table A; Target 71100; HLA-C*05:01; PRAME; ENSG00000185686; TAA
LVELAGQSL

SEQ ID NO: 71101 - protein, 9 aa, Homo sapiens
  Table A; Target 71101; HLA-C*07:04; PRAME; ENSG00000185686; TAA
LVELAGQSL

SEQ ID NO: 71102 - protein, 9 aa, Homo sapiens
  Table A; Target 71102; HLA-C*14:02; PRAME; ENSG00000185686; TAA
LVELAGQSL

SEQ ID NO: 71103 - protein, 10 aa, Homo sapiens
  Table A; Target 71103; HLA-A*01:01; PRAME; ENSG00000185686; TAA
LVELAGQSLL

SEQ ID NO: 71104 - protein, 10 aa, Homo sapiens
  Table A; Target 71104; HLA-C*05:01; PRAME; ENSG00000185686; TAA
LVELAGQSLL

SEQ ID NO: 71105 - protein, 11 aa, Homo sapiens
  Table A; Target 71105; HLA-A*01:01; PRAME; ENSG00000185686; TAA
LVELAGQSLLK

SEQ ID NO: 71106 - protein, 11 aa, Homo sapiens
  Table A; Target 71106; HLA-B*27:02; PRAME; ENSG00000185686; TAA
LVELAGQSLLK

SEQ ID NO: 71107 - protein, 9 aa, Homo sapiens
  Table A; Target 71107; HLA-A*29:02; PRAME; ENSG00000185686; TAA
LWGSIQSRY

SEQ ID NO: 71108 - protein, 9 aa, Homo sapiens
  Table A; Target 71108; HLA-A*23:01; PRAME; ENSG00000185686; TAA
LYPVPLESY

SEQ ID NO: 71109 - protein, 9 aa, Homo sapiens
  Table A; Target 71109; HLA-A*24:02; PRAME; ENSG00000185686; TAA
LYPVPLESY

SEQ ID NO: 71110 - protein, 9 aa, Homo sapiens
  Table A; Target 71110; HLA-A*29:02; PRAME; ENSG00000185686; TAA
LYPVPLESY

SEQ ID NO: 71111 - protein, 9 aa, Homo sapiens
  Table A; Target 71111; HLA-A*30:02; PRAME; ENSG00000185686; TAA
LYPVPLESY

SEQ ID NO: 71112 - protein, 9 aa, Homo sapiens
  Table A; Target 71112; HLA-B*15:01; PRAME; ENSG00000185686; TAA
LYPVPLESY

SEQ ID NO: 71113 - protein, 9 aa, Homo sapiens
  Table A; Target 71113; HLA-B*15:03; PRAME; ENSG00000185686; TAA
LYPVPLESY

SEQ ID NO: 71114 - protein, 9 aa, Homo sapiens
  Table A; Target 71114; HLA-B*46:01; PRAME; ENSG00000185686; TAA
LYPVPLESY

SEQ ID NO: 71115 - protein, 9 aa, Homo sapiens
  Table A; Target 71115; HLA-C*01:02; PRAME; ENSG00000185686; TAA
LYPVPLESY

SEQ ID NO: 71116 - protein, 9 aa, Homo sapiens
  Table A; Target 71116; HLA-C*04:01; PRAME; ENSG00000185686; TAA
LYPVPLESY

SEQ ID NO: 71117 - protein, 9 aa, Homo sapiens
  Table A; Target 71117; HLA-C*14:02; PRAME; ENSG00000185686; TAA
LYPVPLESY

SEQ ID NO: 71118 - protein, 9 aa, Homo sapiens
  Table A; Target 71118; HLA-B*54:01; PRAME; ENSG00000185686; TAA
LYSFPEPEA

SEQ ID NO: 71119 - protein, 8 aa, Homo sapiens
  Table A; Target 71119; HLA-A*23:01; PRAME; ENSG00000185686; TAA
LYVDSLFF

SEQ ID NO: 71120 - protein, 8 aa, Homo sapiens
  Table A; Target 71120; HLA-A*24:02; PRAME; ENSG00000185686; TAA
LYVDSLFF

SEQ ID NO: 71121 - protein, 8 aa, Homo sapiens
  Table A; Target 71121; HLA-C*07:01; PRAME; ENSG00000185686; TAA
LYVDSLFF

SEQ ID NO: 71122 - protein, 9 aa, Homo sapiens
  Table A; Target 71122; HLA-A*02:04; PRAME; ENSG00000185686; TAA
LYVDSLFFL

SEQ ID NO: 71123 - protein, 9 aa, Homo sapiens
  Table A; Target 71123; HLA-A*23:01; PRAME; ENSG00000185686; TAA
LYVDSLFFL

SEQ ID NO: 71124 - protein, 9 aa, Homo sapiens
  Table A; Target 71124; HLA-A*24:02; PRAME; ENSG00000185686; TAA
LYVDSLFFL

SEQ ID NO: 71125 - protein, 9 aa, Homo sapiens
  Table A; Target 71125; HLA-A*29:02; PRAME; ENSG00000185686; TAA
LYVDSLFFL

SEQ ID NO: 71126 - protein, 10 aa, Homo sapiens
  Table A; Target 71126; HLA-A*29:02; PRAME; ENSG00000185686; TAA
LYVDSLFFLR

SEQ ID NO: 71127 - protein, 10 aa, Homo sapiens
  Table A; Target 71127; HLA-A*31:01; PRAME; ENSG00000185686; TAA
LYVDSLFFLR

SEQ ID NO: 71128 - protein, 9 aa, Homo sapiens
  Table A; Target 71128; HLA-B*38:01; PRAME; ENSG00000185686; TAA
MHLSQSPSV

SEQ ID NO: 71129 - protein, 9 aa, Homo sapiens
  Table A; Target 71129; HLA-B*39:01; PRAME; ENSG00000185686; TAA
MHLSQSPSV

SEQ ID NO: 71130 - protein, 9 aa, Homo sapiens
  Table A; Target 71130; HLA-B*51:01; PRAME; ENSG00000185686; TAA
MHLSQSPSV

SEQ ID NO: 71131 - protein, 9 aa, Homo sapiens
  Table A; Target 71131; HLA-B*54:01; PRAME; ENSG00000185686; TAA
MHLSQSPSV

SEQ ID NO: 71132 - protein, 10 aa, Homo sapiens
  Table A; Target 71132; HLA-C*07:01; PRAME; ENSG00000185686; TAA
MHLSQSPSVS

SEQ ID NO: 71133 - protein, 9 aa, Homo sapiens
  Table A; Target 71133; HLA-B*08:01; PRAME; ENSG00000185686; TAA
MINLRRLLL

SEQ ID NO: 71134 - protein, 9 aa, Homo sapiens
  Table A; Target 71134; HLA-A*02:01; PRAME; ENSG00000185686; TAA
MLTDVSPEP

SEQ ID NO: 71135 - protein, 9 aa, Homo sapiens
  Table A; Target 71135; HLA-B*27:05; PRAME; ENSG00000185686; TAA
MLTDVSPEP

SEQ ID NO: 71136 - protein, 10 aa, Homo sapiens
  Table A; Target 71136; HLA-A*68:02; PRAME; ENSG00000185686; TAA
MLTDVSPEPL

SEQ ID NO: 71137 - protein, 10 aa, Homo sapiens
  Table A; Target 71137; HLA-B*35:03; PRAME; ENSG00000185686; TAA
MLTDVSPEPL

SEQ ID NO: 71138 - protein, 10 aa, Homo sapiens
  Table A; Target 71138; HLA-C*07:02; PRAME; ENSG00000185686; TAA
MLTDVSPEPL

SEQ ID NO: 71139 - protein, 10 aa, Homo sapiens
  Table A; Target 71139; HLA-C*07:04; PRAME; ENSG00000185686; TAA
MLTDVSPEPL

SEQ ID NO: 71140 - protein, 11 aa, Homo sapiens
  Table A; Target 71140; HLA-C*07:01; PRAME; ENSG00000185686; TAA
MNPLETLSITN

SEQ ID NO: 71141 - protein, 8 aa, Homo sapiens
  Table A; Target 71141; HLA-B*08:01; PRAME; ENSG00000185686; TAA
MPMQDIKM

SEQ ID NO: 71142 - protein, 8 aa, Homo sapiens
  Table A; Target 71142; HLA-B*35:01; PRAME; ENSG00000185686; TAA
MPMQDIKM

SEQ ID NO: 71143 - protein, 8 aa, Homo sapiens
  Table A; Target 71143; HLA-B*35:03; PRAME; ENSG00000185686; TAA
MPMQDIKM

SEQ ID NO: 71144 - protein, 8 aa, Homo sapiens
  Table A; Target 71144; HLA-B*51:01; PRAME; ENSG00000185686; TAA
MPMQDIKM

SEQ ID NO: 71145 - protein, 8 aa, Homo sapiens
  Table A; Target 71145; HLA-B*54:01; PRAME; ENSG00000185686; TAA
MPMQDIKM

SEQ ID NO: 71146 - protein, 8 aa, Homo sapiens
  Table A; Target 71146; HLA-B*55:01; PRAME; ENSG00000185686; TAA
MPMQDIKM

SEQ ID NO: 71147 - protein, 8 aa, Homo sapiens
  Table A; Target 71147; HLA-B*56:01; PRAME; ENSG00000185686; TAA
MPMQDIKM

SEQ ID NO: 71148 - protein, 8 aa, Homo sapiens
  Table A; Target 71148; HLA-C*03:03; PRAME; ENSG00000185686; TAA
MPMQDIKM

SEQ ID NO: 71149 - protein, 9 aa, Homo sapiens
  Table A; Target 71149; HLA-B*07:02; PRAME; ENSG00000185686; TAA
MPMQDIKMI

SEQ ID NO: 71150 - protein, 9 aa, Homo sapiens
  Table A; Target 71150; HLA-B*08:01; PRAME; ENSG00000185686; TAA
MPMQDIKMI

SEQ ID NO: 71151 - protein, 9 aa, Homo sapiens
  Table A; Target 71151; HLA-B*35:01; PRAME; ENSG00000185686; TAA
MPMQDIKMI

SEQ ID NO: 71152 - protein, 9 aa, Homo sapiens
  Table A; Target 71152; HLA-B*35:03; PRAME; ENSG00000185686; TAA
MPMQDIKMI

SEQ ID NO: 71153 - protein, 9 aa, Homo sapiens
  Table A; Target 71153; HLA-B*51:01; PRAME; ENSG00000185686; TAA
MPMQDIKMI

SEQ ID NO: 71154 - protein, 9 aa, Homo sapiens
  Table A; Target 71154; HLA-B*54:01; PRAME; ENSG00000185686; TAA
MPMQDIKMI

SEQ ID NO: 71155 - protein, 9 aa, Homo sapiens
  Table A; Target 71155; HLA-B*55:01; PRAME; ENSG00000185686; TAA
MPMQDIKMI

SEQ ID NO: 71156 - protein, 9 aa, Homo sapiens
  Table A; Target 71156; HLA-B*56:01; PRAME; ENSG00000185686; TAA
MPMQDIKMI

SEQ ID NO: 71157 - protein, 9 aa, Homo sapiens
  Table A; Target 71157; HLA-C*07:02; PRAME; ENSG00000185686; TAA
MPMQDIKMI

SEQ ID NO: 71158 - protein, 10 aa, Homo sapiens
  Table A; Target 71158; HLA-B*07:02; PRAME; ENSG00000185686; TAA
MPMQDIKMIL

SEQ ID NO: 71159 - protein, 10 aa, Homo sapiens
  Table A; Target 71159; HLA-B*08:01; PRAME; ENSG00000185686; TAA
MPMQDIKMIL

SEQ ID NO: 71160 - protein, 10 aa, Homo sapiens
  Table A; Target 71160; HLA-B*35:01; PRAME; ENSG00000185686; TAA
MPMQDIKMIL

SEQ ID NO: 71161 - protein, 10 aa, Homo sapiens
  Table A; Target 71161; HLA-B*35:03; PRAME; ENSG00000185686; TAA
MPMQDIKMIL

SEQ ID NO: 71162 - protein, 10 aa, Homo sapiens
  Table A; Target 71162; HLA-B*51:01; PRAME; ENSG00000185686; TAA
MPMQDIKMIL

SEQ ID NO: 71163 - protein, 10 aa, Homo sapiens
  Table A; Target 71163; HLA-B*54:01; PRAME; ENSG00000185686; TAA
MPMQDIKMIL

SEQ ID NO: 71164 - protein, 10 aa, Homo sapiens
  Table A; Target 71164; HLA-B*55:01; PRAME; ENSG00000185686; TAA
MPMQDIKMIL

SEQ ID NO: 71165 - protein, 10 aa, Homo sapiens
  Table A; Target 71165; HLA-B*56:01; PRAME; ENSG00000185686; TAA
MPMQDIKMIL

SEQ ID NO: 71166 - protein, 10 aa, Homo sapiens
  Table A; Target 71166; HLA-C*07:02; PRAME; ENSG00000185686; TAA
MPMQDIKMIL

SEQ ID NO: 71167 - protein, 11 aa, Homo sapiens
  Table A; Target 71167; HLA-B*54:01; PRAME; ENSG00000185686; TAA
MPMQDIKMILK

SEQ ID NO: 71168 - protein, 8 aa, Homo sapiens
  Table A; Target 71168; HLA-B*08:01; PRAME; ENSG00000185686; TAA
MQDIKMIL

SEQ ID NO: 71169 - protein, 8 aa, Homo sapiens
  Table A; Target 71169; HLA-C*04:01; PRAME; ENSG00000185686; TAA
MQDIKMIL

SEQ ID NO: 71170 - protein, 9 aa, Homo sapiens
  Table A; Target 71170; HLA-A*03:01; PRAME; ENSG00000185686; TAA
MQDIKMILK

SEQ ID NO: 71171 - protein, 9 aa, Homo sapiens
  Table A; Target 71171; HLA-A*02:01; PRAME; ENSG00000185686; TAA
NLTHVLYPV

SEQ ID NO: 71172 - protein, 9 aa, Homo sapiens
  Table A; Target 71172; HLA-A*02:04; PRAME; ENSG00000185686; TAA
NLTHVLYPV

SEQ ID NO: 71173 - protein, 9 aa, Homo sapiens
  Table A; Target 71173; HLA-A*02:07; PRAME; ENSG00000185686; TAA
NLTHVLYPV

SEQ ID NO: 71174 - protein, 9 aa, Homo sapiens
  Table A; Target 71174; HLA-A*68:02; PRAME; ENSG00000185686; TAA
NLTHVLYPV

SEQ ID NO: 71175 - protein, 8 aa, Homo sapiens
  Table A; Target 71175; HLA-B*35:01; PRAME; ENSG00000185686; TAA
NPLETLSI

SEQ ID NO: 71176 - protein, 8 aa, Homo sapiens
  Table A; Target 71176; HLA-B*35:03; PRAME; ENSG00000185686; TAA
NPLETLSI

SEQ ID NO: 71177 - protein, 8 aa, Homo sapiens
  Table A; Target 71177; HLA-B*51:01; PRAME; ENSG00000185686; TAA
NPLETLSI

SEQ ID NO: 71178 - protein, 9 aa, Homo sapiens
  Table A; Target 71178; HLA-B*35:03; PRAME; ENSG00000185686; TAA
NPLETLSIT

SEQ ID NO: 71179 - protein, 10 aa, Homo sapiens
  Table A; Target 71179; HLA-B*57:01; PRAME; ENSG00000185686; TAA
NSHQDFWTVW

SEQ ID NO: 71180 - protein, 8 aa, Homo sapiens
  Table A; Target 71180; HLA-B*08:01; PRAME; ENSG00000185686; TAA
NSISISAL

SEQ ID NO: 71181 - protein, 8 aa, Homo sapiens
  Table A; Target 71181; HLA-B*18:01; PRAME; ENSG00000185686; TAA
NSISISAL

SEQ ID NO: 71182 - protein, 8 aa, Homo sapiens
  Table A; Target 71182; HLA-B*40:02; PRAME; ENSG00000185686; TAA
NSISISAL

SEQ ID NO: 71183 - protein, 8 aa, Homo sapiens
  Table A; Target 71183; HLA-B*46:01; PRAME; ENSG00000185686; TAA
NSISISAL

SEQ ID NO: 71184 - protein, 8 aa, Homo sapiens
  Table A; Target 71184; HLA-C*01:02; PRAME; ENSG00000185686; TAA
NSISISAL

SEQ ID NO: 71185 - protein, 8 aa, Homo sapiens
  Table A; Target 71185; HLA-C*03:03; PRAME; ENSG00000185686; TAA
NSISISAL

SEQ ID NO: 71186 - protein, 8 aa, Homo sapiens
  Table A; Target 71186; HLA-C*03:04; PRAME; ENSG00000185686; TAA
NSISISAL

SEQ ID NO: 71187 - protein, 8 aa, Homo sapiens
  Table A; Target 71187; HLA-C*05:01; PRAME; ENSG00000185686; TAA
NSISISAL

SEQ ID NO: 71188 - protein, 8 aa, Homo sapiens
  Table A; Target 71188; HLA-C*12:03; PRAME; ENSG00000185686; TAA
NSISISAL

SEQ ID NO: 71189 - protein, 8 aa, Homo sapiens
  Table A; Target 71189; HLA-C*14:02; PRAME; ENSG00000185686; TAA
NSISISAL

SEQ ID NO: 71190 - protein, 11 aa, Homo sapiens
  Table A; Target 71190; HLA-A*23:01; PRAME; ENSG00000185686; TAA
NSISISALQSL

SEQ ID NO: 71191 - protein, 11 aa, Homo sapiens
  Table A; Target 71191; HLA-A*68:02; PRAME; ENSG00000185686; TAA
NSISISALQSL

SEQ ID NO: 71192 - protein, 11 aa, Homo sapiens
  Table A; Target 71192; HLA-C*01:02; PRAME; ENSG00000185686; TAA
NSISISALQSL

SEQ ID NO: 71193 - protein, 9 aa, Homo sapiens
  Table A; Target 71193; HLA-A*11:01; PRAME; ENSG00000185686; TAA
PEAAQPMTK

SEQ ID NO: 71194 - protein, 9 aa, Homo sapiens
  Table A; Target 71194; HLA-B*07:02; PRAME; ENSG00000185686; TAA
PEAAQPMTK

SEQ ID NO: 71195 - protein, 9 aa, Homo sapiens
  Table A; Target 71195; HLA-B*27:02; PRAME; ENSG00000185686; TAA
PEAAQPMTK

SEQ ID NO: 71196 - protein, 9 aa, Homo sapiens
  Table A; Target 71196; HLA-C*01:02; PRAME; ENSG00000185686; TAA
PEPEAAQPM

SEQ ID NO: 71197 - protein, 11 aa, Homo sapiens
  Table A; Target 71197; HLA-B*27:02; PRAME; ENSG00000185686; TAA
PEPEAAQPMTK

SEQ ID NO: 71198 - protein, 11 aa, Homo sapiens
  Table A; Target 71198; HLA-C*07:02; PRAME; ENSG00000185686; TAA
PEPEAAQPMTK

SEQ ID NO: 71199 - protein, 9 aa, Homo sapiens
  Table A; Target 71199; HLA-A*23:01; PRAME; ENSG00000185686; TAA
PFIPVEVLV

SEQ ID NO: 71200 - protein, 9 aa, Homo sapiens
  Table A; Target 71200; HLA-A*24:02; PRAME; ENSG00000185686; TAA
PFIPVEVLV

SEQ ID NO: 71201 - protein, 9 aa, Homo sapiens
  Table A; Target 71201; HLA-A*24:02; PRAME; ENSG00000185686; TAA
PMQDIKMIL

SEQ ID NO: 71202 - protein, 10 aa, Homo sapiens
  Table A; Target 71202; HLA-A*03:02; PRAME; ENSG00000185686; TAA
PMQDIKMILK

SEQ ID NO: 71203 - protein, 9 aa, Homo sapiens
  Table A; Target 71203; HLA-C*07:01; PRAME; ENSG00000185686; TAA
PSVSQLSVL

SEQ ID NO: 71204 - protein, 9 aa, Homo sapiens
  Table A; Target 71204; HLA-C*07:02; PRAME; ENSG00000185686; TAA
PSVSQLSVL

SEQ ID NO: 71205 - protein, 11 aa, Homo sapiens
  Table A; Target 71205; HLA-B*07:02; PRAME; ENSG00000185686; TAA
PSVSQLSVLSL

SEQ ID NO: 71206 - protein, 9 aa, Homo sapiens
  Table A; Target 71206; HLA-A*01:01; PRAME; ENSG00000185686; TAA
PTLAKFSPY

SEQ ID NO: 71207 - protein, 9 aa, Homo sapiens
  Table A; Target 71207; HLA-A*29:02; PRAME; ENSG00000185686; TAA
PTLAKFSPY

SEQ ID NO: 71208 - protein, 9 aa, Homo sapiens
  Table A; Target 71208; HLA-A*23:01; PRAME; ENSG00000185686; TAA
PYLGQMINL

SEQ ID NO: 71209 - protein, 9 aa, Homo sapiens
  Table A; Target 71209; HLA-A*24:02; PRAME; ENSG00000185686; TAA
PYLGQMINL

SEQ ID NO: 71210 - protein, 9 aa, Homo sapiens
  Table A; Target 71210; HLA-C*07:02; PRAME; ENSG00000185686; TAA
PYLGQMINL

SEQ ID NO: 71211 - protein, 9 aa, Homo sapiens
  Table A; Target 71211; HLA-B*08:01; PRAME; ENSG00000185686; TAA
QALLERASA

SEQ ID NO: 71212 - protein, 9 aa, Homo sapiens
  Table A; Target 71212; HLA-B*54:01; PRAME; ENSG00000185686; TAA
QALLERASA

SEQ ID NO: 71213 - protein, 9 aa, Homo sapiens
  Table A; Target 71213; HLA-B*56:01; PRAME; ENSG00000185686; TAA
QALLERASA

SEQ ID NO: 71214 - protein, 11 aa, Homo sapiens
  Table A; Target 71214; HLA-B*07:02; PRAME; ENSG00000185686; TAA
QALLERASATL

SEQ ID NO: 71215 - protein, 11 aa, Homo sapiens
  Table A; Target 71215; HLA-B*35:03; PRAME; ENSG00000185686; TAA
QALLERASATL

SEQ ID NO: 71216 - protein, 9 aa, Homo sapiens
  Table A; Target 71216; HLA-A*23:01; PRAME; ENSG00000185686; TAA
QALYVDSLF

SEQ ID NO: 71217 - protein, 9 aa, Homo sapiens
  Table A; Target 71217; HLA-B*35:01; PRAME; ENSG00000185686; TAA
QALYVDSLF

SEQ ID NO: 71218 - protein, 9 aa, Homo sapiens
  Table A; Target 71218; HLA-B*35:03; PRAME; ENSG00000185686; TAA
QALYVDSLF

SEQ ID NO: 71219 - protein, 9 aa, Homo sapiens
  Table A; Target 71219; HLA-B*57:01; PRAME; ENSG00000185686; TAA
QALYVDSLF

SEQ ID NO: 71220 - protein, 9 aa, Homo sapiens
  Table A; Target 71220; HLA-C*04:01; PRAME; ENSG00000185686; TAA
QALYVDSLF

SEQ ID NO: 71221 - protein, 9 aa, Homo sapiens
  Table A; Target 71221; HLA-B*37:01; PRAME; ENSG00000185686; TAA
QDIKMILKM

SEQ ID NO: 71222 - protein, 9 aa, Homo sapiens
  Table A; Target 71222; HLA-A*23:01; PRAME; ENSG00000185686; TAA
QFTSQFLSL

SEQ ID NO: 71223 - protein, 9 aa, Homo sapiens
  Table A; Target 71223; HLA-A*24:02; PRAME; ENSG00000185686; TAA
QFTSQFLSL

SEQ ID NO: 71224 - protein, 9 aa, Homo sapiens
  Table A; Target 71224; HLA-C*01:02; PRAME; ENSG00000185686; TAA
QFTSQFLSL

SEQ ID NO: 71225 - protein, 9 aa, Homo sapiens
  Table A; Target 71225; HLA-C*14:02; PRAME; ENSG00000185686; TAA
QFTSQFLSL

SEQ ID NO: 71226 - protein, 9 aa, Homo sapiens
  Table A; Target 71226; HLA-B*38:01; PRAME; ENSG00000185686; TAA
QHLIGLSNL

SEQ ID NO: 71227 - protein, 9 aa, Homo sapiens
  Table A; Target 71227; HLA-B*39:01; PRAME; ENSG00000185686; TAA
QHLIGLSNL

SEQ ID NO: 71228 - protein, 10 aa, Homo sapiens
  Table A; Target 71228; HLA-C*07:01; PRAME; ENSG00000185686; TAA
QHLIGLSNLT

SEQ ID NO: 71229 - protein, 8 aa, Homo sapiens
  Table A; Target 71229; HLA-C*05:01; PRAME; ENSG00000185686; TAA
QLDSIEDL

SEQ ID NO: 71230 - protein, 10 aa, Homo sapiens
  Table A; Target 71230; HLA-A*01:01; PRAME; ENSG00000185686; TAA
QLDSIEDLEV

SEQ ID NO: 71231 - protein, 10 aa, Homo sapiens
  Table A; Target 71231; HLA-A*02:01; PRAME; ENSG00000185686; TAA
QLDSIEDLEV

SEQ ID NO: 71232 - protein, 10 aa, Homo sapiens
  Table A; Target 71232; HLA-A*02:07; PRAME; ENSG00000185686; TAA
QLDSIEDLEV

SEQ ID NO: 71233 - protein, 9 aa, Homo sapiens
  Table A; Target 71233; HLA-A*02:01; PRAME; ENSG00000185686; TAA
QLLALLPSL

SEQ ID NO: 71234 - protein, 9 aa, Homo sapiens
  Table A; Target 71234; HLA-A*02:03; PRAME; ENSG00000185686; TAA
QLLALLPSL

SEQ ID NO: 71235 - protein, 9 aa, Homo sapiens
  Table A; Target 71235; HLA-A*02:04; PRAME; ENSG00000185686; TAA
QLLALLPSL

SEQ ID NO: 71236 - protein, 9 aa, Homo sapiens
  Table A; Target 71236; HLA-A*02:07; PRAME; ENSG00000185686; TAA
QLLALLPSL

SEQ ID NO: 71237 - protein, 9 aa, Homo sapiens
  Table A; Target 71237; HLA-A*23:01; PRAME; ENSG00000185686; TAA
QLLALLPSL

SEQ ID NO: 71238 - protein, 9 aa, Homo sapiens
  Table A; Target 71238; HLA-A*24:02; PRAME; ENSG00000185686; TAA
QLLALLPSL

SEQ ID NO: 71239 - protein, 9 aa, Homo sapiens
  Table A; Target 71239; HLA-B*40:02; PRAME; ENSG00000185686; TAA
QLLALLPSL

SEQ ID NO: 71240 - protein, 9 aa, Homo sapiens
  Table A; Target 71240; HLA-B*55:01; PRAME; ENSG00000185686; TAA
QLLALLPSL

SEQ ID NO: 71241 - protein, 10 aa, Homo sapiens
  Table A; Target 71241; HLA-A*02:03; PRAME; ENSG00000185686; TAA
QLSVLSLSGV

SEQ ID NO: 71242 - protein, 8 aa, Homo sapiens
  Table A; Target 71242; HLA-A*01:01; PRAME; ENSG00000185686; TAA
QLTTLSFY

SEQ ID NO: 71243 - protein, 8 aa, Homo sapiens
  Table A; Target 71243; HLA-C*07:01; PRAME; ENSG00000185686; TAA
QLTTLSFY

SEQ ID NO: 71244 - protein, 8 aa, Homo sapiens
  Table A; Target 71244; HLA-B*08:01; PRAME; ENSG00000185686; TAA
QPFIPVEV

SEQ ID NO: 71245 - protein, 8 aa, Homo sapiens
  Table A; Target 71245; HLA-B*51:01; PRAME; ENSG00000185686; TAA
QPFIPVEV

SEQ ID NO: 71246 - protein, 8 aa, Homo sapiens
  Table A; Target 71246; HLA-B*54:01; PRAME; ENSG00000185686; TAA
QPFIPVEV

SEQ ID NO: 71247 - protein, 8 aa, Homo sapiens
  Table A; Target 71247; HLA-B*56:01; PRAME; ENSG00000185686; TAA
QPFIPVEV

SEQ ID NO: 71248 - protein, 9 aa, Homo sapiens
  Table A; Target 71248; HLA-B*07:02; PRAME; ENSG00000185686; TAA
QPFIPVEVL

SEQ ID NO: 71249 - protein, 9 aa, Homo sapiens
  Table A; Target 71249; HLA-B*35:01; PRAME; ENSG00000185686; TAA
QPFIPVEVL

SEQ ID NO: 71250 - protein, 9 aa, Homo sapiens
  Table A; Target 71250; HLA-B*35:03; PRAME; ENSG00000185686; TAA
QPFIPVEVL

SEQ ID NO: 71251 - protein, 9 aa, Homo sapiens
  Table A; Target 71251; HLA-B*51:01; PRAME; ENSG00000185686; TAA
QPFIPVEVL

SEQ ID NO: 71252 - protein, 9 aa, Homo sapiens
  Table A; Target 71252; HLA-B*54:01; PRAME; ENSG00000185686; TAA
QPFIPVEVL

SEQ ID NO: 71253 - protein, 9 aa, Homo sapiens
  Table A; Target 71253; HLA-B*56:01; PRAME; ENSG00000185686; TAA
QPFIPVEVL

SEQ ID NO: 71254 - protein, 9 aa, Homo sapiens
  Table A; Target 71254; HLA-C*07:02; PRAME; ENSG00000185686; TAA
QPFIPVEVL

SEQ ID NO: 71255 - protein, 10 aa, Homo sapiens
  Table A; Target 71255; HLA-B*54:01; PRAME; ENSG00000185686; TAA
QPFIPVEVLV

SEQ ID NO: 71256 - protein, 9 aa, Homo sapiens
  Table A; Target 71256; HLA-B*08:01; PRAME; ENSG00000185686; TAA
QPMTKKRKV

SEQ ID NO: 71257 - protein, 9 aa, Homo sapiens
  Table A; Target 71257; HLA-B*08:01; PRAME; ENSG00000185686; TAA
QSLLKDEAL

SEQ ID NO: 71258 - protein, 9 aa, Homo sapiens
  Table A; Target 71258; HLA-B*35:03; PRAME; ENSG00000185686; TAA
QSLLKDEAL

SEQ ID NO: 71259 - protein, 9 aa, Homo sapiens
  Table A; Target 71259; HLA-B*40:02; PRAME; ENSG00000185686; TAA
QSLLKDEAL

SEQ ID NO: 71260 - protein, 9 aa, Homo sapiens
  Table A; Target 71260; HLA-C*01:02; PRAME; ENSG00000185686; TAA
QSLLKDEAL

SEQ ID NO: 71261 - protein, 9 aa, Homo sapiens
  Table A; Target 71261; HLA-C*07:01; PRAME; ENSG00000185686; TAA
QSLLKDEAL

SEQ ID NO: 71262 - protein, 8 aa, Homo sapiens
  Table A; Target 71262; HLA-B*51:01; PRAME; ENSG00000185686; TAA
QSPSVSQL

SEQ ID NO: 71263 - protein, 8 aa, Homo sapiens
  Table A; Target 71263; HLA-C*01:02; PRAME; ENSG00000185686; TAA
QSPSVSQL

SEQ ID NO: 71264 - protein, 11 aa, Homo sapiens
  Table A; Target 71264; HLA-C*07:02; PRAME; ENSG00000185686; TAA
QSPSVSQLSVL

SEQ ID NO: 71265 - protein, 10 aa, Homo sapiens
  Table A; Target 71265; HLA-B*57:01; PRAME; ENSG00000185686; TAA
QSRYISMSVW

SEQ ID NO: 71266 - protein, 8 aa, Homo sapiens
  Table A; Target 71266; HLA-C*06:02; PRAME; ENSG00000185686; TAA
QTLKAMVQ

SEQ ID NO: 71267 - protein, 8 aa, Homo sapiens
  Table A; Target 71267; HLA-C*07:01; PRAME; ENSG00000185686; TAA
QTLKAMVQ

SEQ ID NO: 71268 - protein, 10 aa, Homo sapiens
  Table A; Target 71268; HLA-A*25:01; PRAME; ENSG00000185686; TAA
QTLKAMVQAW

SEQ ID NO: 71269 - protein, 10 aa, Homo sapiens
  Table A; Target 71269; HLA-B*44:02; PRAME; ENSG00000185686; TAA
QTLKAMVQAW

SEQ ID NO: 71270 - protein, 10 aa, Homo sapiens
  Table A; Target 71270; HLA-B*44:03; PRAME; ENSG00000185686; TAA
QTLKAMVQAW

SEQ ID NO: 71271 - protein, 10 aa, Homo sapiens
  Table A; Target 71271; HLA-B*57:01; PRAME; ENSG00000185686; TAA
QTLKAMVQAW

SEQ ID NO: 71272 - protein, 10 aa, Homo sapiens
  Table A; Target 71272; HLA-B*58:01; PRAME; ENSG00000185686; TAA
QTLKAMVQAW

SEQ ID NO: 71273 - protein, 9 aa, Homo sapiens
  Table A; Target 71273; HLA-A*23:01; PRAME; ENSG00000185686; TAA
QYIAQFTSQ

SEQ ID NO: 71274 - protein, 9 aa, Homo sapiens
  Table A; Target 71274; HLA-A*24:02; PRAME; ENSG00000185686; TAA
QYIAQFTSQ

SEQ ID NO: 71275 - protein, 9 aa, Homo sapiens
  Table A; Target 71275; HLA-A*31:01; PRAME; ENSG00000185686; TAA
QYIAQFTSQ

SEQ ID NO: 71276 - protein, 9 aa, Homo sapiens
  Table A; Target 71276; HLA-C*14:02; PRAME; ENSG00000185686; TAA
QYIAQFTSQ

SEQ ID NO: 71277 - protein, 10 aa, Homo sapiens
  Table A; Target 71277; HLA-A*23:01; PRAME; ENSG00000185686; TAA
QYIAQFTSQF

SEQ ID NO: 71278 - protein, 10 aa, Homo sapiens
  Table A; Target 71278; HLA-A*24:02; PRAME; ENSG00000185686; TAA
QYIAQFTSQF

SEQ ID NO: 71279 - protein, 10 aa, Homo sapiens
  Table A; Target 71279; HLA-C*14:02; PRAME; ENSG00000185686; TAA
QYIAQFTSQF

SEQ ID NO: 71280 - protein, 11 aa, Homo sapiens
  Table A; Target 71280; HLA-A*24:02; PRAME; ENSG00000185686; TAA
QYIAQFTSQFL

SEQ ID NO: 71281 - protein, 9 aa, Homo sapiens
  Table A; Target 71281; HLA-B*44:02; PRAME; ENSG00000185686; TAA
RELFPPLFM

SEQ ID NO: 71282 - protein, 9 aa, Homo sapiens
  Table A; Target 71282; HLA-B*44:03; PRAME; ENSG00000185686; TAA
RELFPPLFM

SEQ ID NO: 71283 - protein, 10 aa, Homo sapiens
  Table A; Target 71283; HLA-B*38:01; PRAME; ENSG00000185686; TAA
RHVMNPLETL

SEQ ID NO: 71284 - protein, 10 aa, Homo sapiens
  Table A; Target 71284; HLA-B*39:01; PRAME; ENSG00000185686; TAA
RHVMNPLETL

SEQ ID NO: 71285 - protein, 9 aa, Homo sapiens
  Table A; Target 71285; HLA-A*02:04; PRAME; ENSG00000185686; TAA
RLAYLHARL

SEQ ID NO: 71286 - protein, 9 aa, Homo sapiens
  Table A; Target 71286; HLA-A*02:01; PRAME; ENSG00000185686; TAA
RLDQLLRHV

SEQ ID NO: 71287 - protein, 9 aa, Homo sapiens
  Table A; Target 71287; HLA-A*02:03; PRAME; ENSG00000185686; TAA
RLDQLLRHV

SEQ ID NO: 71288 - protein, 9 aa, Homo sapiens
  Table A; Target 71288; HLA-A*02:04; PRAME; ENSG00000185686; TAA
RLDQLLRHV

SEQ ID NO: 71289 - protein, 9 aa, Homo sapiens
  Table A; Target 71289; HLA-A*02:07; PRAME; ENSG00000185686; TAA
RLDQLLRHV

SEQ ID NO: 71290 - protein, 9 aa, Homo sapiens
  Table A; Target 71290; HLA-A*03:01; PRAME; ENSG00000185686; TAA
RLDQLLRHV

SEQ ID NO: 71291 - protein, 10 aa, Homo sapiens
  Table A; Target 71291; HLA-A*02:07; PRAME; ENSG00000185686; TAA
RLDQLLRHVM

SEQ ID NO: 71292 - protein, 9 aa, Homo sapiens
  Table A; Target 71292; HLA-A*02:04; PRAME; ENSG00000185686; TAA
RLLLSHIHA

SEQ ID NO: 71293 - protein, 9 aa, Homo sapiens
  Table A; Target 71293; HLA-A*02:03; PRAME; ENSG00000185686; TAA
RLRELLCEL

SEQ ID NO: 71294 - protein, 9 aa, Homo sapiens
  Table A; Target 71294; HLA-A*02:04; PRAME; ENSG00000185686; TAA
RLRELLCEL

SEQ ID NO: 71295 - protein, 8 aa, Homo sapiens
  Table A; Target 71295; HLA-C*05:01; PRAME; ENSG00000185686; TAA
RLSEGDVM

SEQ ID NO: 71296 - protein, 10 aa, Homo sapiens
  Table A; Target 71296; HLA-A*02:01; PRAME; ENSG00000185686; TAA
RLSEGDVMHL

SEQ ID NO: 71297 - protein, 10 aa, Homo sapiens
  Table A; Target 71297; HLA-A*02:03; PRAME; ENSG00000185686; TAA
RLSEGDVMHL

SEQ ID NO: 71298 - protein, 10 aa, Homo sapiens
  Table A; Target 71298; HLA-A*02:04; PRAME; ENSG00000185686; TAA
RLSEGDVMHL

SEQ ID NO: 71299 - protein, 10 aa, Homo sapiens
  Table A; Target 71299; HLA-A*02:07; PRAME; ENSG00000185686; TAA
RLSEGDVMHL

SEQ ID NO: 71300 - protein, 10 aa, Homo sapiens
  Table A; Target 71300; HLA-A*03:01; PRAME; ENSG00000185686; TAA
RLSEGDVMHL

SEQ ID NO: 71301 - protein, 10 aa, Homo sapiens
  Table A; Target 71301; HLA-B*55:01; PRAME; ENSG00000185686; TAA
RLSEGDVMHL

SEQ ID NO: 71302 - protein, 10 aa, Homo sapiens
  Table A; Target 71302; HLA-A*02:01; PRAME; ENSG00000185686; TAA
RLVELAGQSL

SEQ ID NO: 71303 - protein, 10 aa, Homo sapiens
  Table A; Target 71303; HLA-A*02:03; PRAME; ENSG00000185686; TAA
RLVELAGQSL

SEQ ID NO: 71304 - protein, 10 aa, Homo sapiens
  Table A; Target 71304; HLA-A*02:04; PRAME; ENSG00000185686; TAA
RLVELAGQSL

SEQ ID NO: 71305 - protein, 10 aa, Homo sapiens
  Table A; Target 71305; HLA-A*02:07; PRAME; ENSG00000185686; TAA
RLVELAGQSL

SEQ ID NO: 71306 - protein, 10 aa, Homo sapiens
  Table A; Target 71306; HLA-A*23:01; PRAME; ENSG00000185686; TAA
RLVELAGQSL

SEQ ID NO: 71307 - protein, 10 aa, Homo sapiens
  Table A; Target 71307; HLA-A*30:01; PRAME; ENSG00000185686; TAA
RLVELAGQSL

SEQ ID NO: 71308 - protein, 10 aa, Homo sapiens
  Table A; Target 71308; HLA-A*32:01; PRAME; ENSG00000185686; TAA
RLVELAGQSL

SEQ ID NO: 71309 - protein, 10 aa, Homo sapiens
  Table A; Target 71309; HLA-B*07:02; PRAME; ENSG00000185686; TAA
RLVELAGQSL

SEQ ID NO: 71310 - protein, 10 aa, Homo sapiens
  Table A; Target 71310; HLA-B*15:01; PRAME; ENSG00000185686; TAA
RLVELAGQSL

SEQ ID NO: 71311 - protein, 10 aa, Homo sapiens
  Table A; Target 71311; HLA-B*15:03; PRAME; ENSG00000185686; TAA
RLVELAGQSL

SEQ ID NO: 71312 - protein, 10 aa, Homo sapiens
  Table A; Target 71312; HLA-B*40:01; PRAME; ENSG00000185686; TAA
RLVELAGQSL

SEQ ID NO: 71313 - protein, 10 aa, Homo sapiens
  Table A; Target 71313; HLA-B*40:02; PRAME; ENSG00000185686; TAA
RLVELAGQSL

SEQ ID NO: 71314 - protein, 10 aa, Homo sapiens
  Table A; Target 71314; HLA-B*55:01; PRAME; ENSG00000185686; TAA
RLVELAGQSL

SEQ ID NO: 71315 - protein, 10 aa, Homo sapiens
  Table A; Target 71315; HLA-B*58:01; PRAME; ENSG00000185686; TAA
RLVELAGQSL

SEQ ID NO: 71316 - protein, 10 aa, Homo sapiens
  Table A; Target 71316; HLA-C*01:02; PRAME; ENSG00000185686; TAA
RLVELAGQSL

SEQ ID NO: 71317 - protein, 10 aa, Homo sapiens
  Table A; Target 71317; HLA-C*14:02; PRAME; ENSG00000185686; TAA
RLVELAGQSL

SEQ ID NO: 71318 - protein, 11 aa, Homo sapiens
  Table A; Target 71318; HLA-A*02:01; PRAME; ENSG00000185686; TAA
RLVELAGQSLL

SEQ ID NO: 71319 - protein, 11 aa, Homo sapiens
  Table A; Target 71319; HLA-A*02:03; PRAME; ENSG00000185686; TAA
RLVELAGQSLL

SEQ ID NO: 71320 - protein, 11 aa, Homo sapiens
  Table A; Target 71320; HLA-A*02:04; PRAME; ENSG00000185686; TAA
RLVELAGQSLL

SEQ ID NO: 71321 - protein, 11 aa, Homo sapiens
  Table A; Target 71321; HLA-A*02:07; PRAME; ENSG00000185686; TAA
RLVELAGQSLL

SEQ ID NO: 71322 - protein, 9 aa, Homo sapiens
  Table A; Target 71322; HLA-A*02:04; PRAME; ENSG00000185686; TAA
RLWGSIQSR

SEQ ID NO: 71323 - protein, 9 aa, Homo sapiens
  Table A; Target 71323; HLA-A*03:01; PRAME; ENSG00000185686; TAA
RLWGSIQSR

SEQ ID NO: 71324 - protein, 9 aa, Homo sapiens
  Table A; Target 71324; HLA-A*03:02; PRAME; ENSG00000185686; TAA
RLWGSIQSR

SEQ ID NO: 71325 - protein, 9 aa, Homo sapiens
  Table A; Target 71325; HLA-A*31:01; PRAME; ENSG00000185686; TAA
RLWGSIQSR

SEQ ID NO: 71326 - protein, 9 aa, Homo sapiens
  Table A; Target 71326; HLA-A*33:01; PRAME; ENSG00000185686; TAA
RLWGSIQSR

SEQ ID NO: 71327 - protein, 10 aa, Homo sapiens
  Table A; Target 71327; HLA-A*03:01; PRAME; ENSG00000185686; TAA
RLWGSIQSRY

SEQ ID NO: 71328 - protein, 10 aa, Homo sapiens
  Table A; Target 71328; HLA-A*29:02; PRAME; ENSG00000185686; TAA
RLWGSIQSRY

SEQ ID NO: 71329 - protein, 10 aa, Homo sapiens
  Table A; Target 71329; HLA-A*30:02; PRAME; ENSG00000185686; TAA
RLWGSIQSRY

SEQ ID NO: 71330 - protein, 10 aa, Homo sapiens
  Table A; Target 71330; HLA-B*57:01; PRAME; ENSG00000185686; TAA
RLWGSIQSRY

SEQ ID NO: 71331 - protein, 11 aa, Homo sapiens
  Table A; Target 71331; HLA-A*02:01; PRAME; ENSG00000185686; TAA
RLWGSIQSRYI

SEQ ID NO: 71332 - protein, 11 aa, Homo sapiens
  Table A; Target 71332; HLA-A*02:04; PRAME; ENSG00000185686; TAA
RLWGSIQSRYI

SEQ ID NO: 71333 - protein, 9 aa, Homo sapiens
  Table A; Target 71333; HLA-B*54:01; PRAME; ENSG00000185686; TAA
RPSMVWLSA

SEQ ID NO: 71334 - protein, 9 aa, Homo sapiens
  Table A; Target 71334; HLA-B*56:01; PRAME; ENSG00000185686; TAA
RPSMVWLSA

SEQ ID NO: 71335 - protein, 10 aa, Homo sapiens
  Table A; Target 71335; HLA-B*57:01; PRAME; ENSG00000185686; TAA
RTFYDPEPIL

SEQ ID NO: 71336 - protein, 9 aa, Homo sapiens
  Table A; Target 71336; HLA-A*03:01; PRAME; ENSG00000185686; TAA
SALQSLLQH

SEQ ID NO: 71337 - protein, 9 aa, Homo sapiens
  Table A; Target 71337; HLA-A*11:01; PRAME; ENSG00000185686; TAA
SALQSLLQH

SEQ ID NO: 71338 - protein, 9 aa, Homo sapiens
  Table A; Target 71338; HLA-B*15:03; PRAME; ENSG00000185686; TAA
SATLQDLVF

SEQ ID NO: 71339 - protein, 9 aa, Homo sapiens
  Table A; Target 71339; HLA-B*35:01; PRAME; ENSG00000185686; TAA
SATLQDLVF

SEQ ID NO: 71340 - protein, 9 aa, Homo sapiens
  Table A; Target 71340; HLA-B*35:03; PRAME; ENSG00000185686; TAA
SATLQDLVF

SEQ ID NO: 71341 - protein, 9 aa, Homo sapiens
  Table A; Target 71341; HLA-B*38:01; PRAME; ENSG00000185686; TAA
SATLQDLVF

SEQ ID NO: 71342 - protein, 9 aa, Homo sapiens
  Table A; Target 71342; HLA-B*39:01; PRAME; ENSG00000185686; TAA
SATLQDLVF

SEQ ID NO: 71343 - protein, 9 aa, Homo sapiens
  Table A; Target 71343; HLA-B*55:01; PRAME; ENSG00000185686; TAA
SATLQDLVF

SEQ ID NO: 71344 - protein, 9 aa, Homo sapiens
  Table A; Target 71344; HLA-B*58:01; PRAME; ENSG00000185686; TAA
SATLQDLVF

SEQ ID NO: 71345 - protein, 9 aa, Homo sapiens
  Table A; Target 71345; HLA-C*02:02; PRAME; ENSG00000185686; TAA
SATLQDLVF

SEQ ID NO: 71346 - protein, 9 aa, Homo sapiens
  Table A; Target 71346; HLA-C*03:03; PRAME; ENSG00000185686; TAA
SATLQDLVF

SEQ ID NO: 71347 - protein, 9 aa, Homo sapiens
  Table A; Target 71347; HLA-C*03:04; PRAME; ENSG00000185686; TAA
SATLQDLVF

SEQ ID NO: 71348 - protein, 9 aa, Homo sapiens
  Table A; Target 71348; HLA-C*07:04; PRAME; ENSG00000185686; TAA
SATLQDLVF

SEQ ID NO: 71349 - protein, 9 aa, Homo sapiens
  Table A; Target 71349; HLA-C*16:01; PRAME; ENSG00000185686; TAA
SATLQDLVF

SEQ ID NO: 71350 - protein, 9 aa, Homo sapiens
  Table A; Target 71350; HLA-C*16:02; PRAME; ENSG00000185686; TAA
SATLQDLVF

SEQ ID NO: 71351 - protein, 9 aa, Homo sapiens
  Table A; Target 71351; HLA-C*16:04; PRAME; ENSG00000185686; TAA
SATLQDLVF

SEQ ID NO: 71352 - protein, 8 aa, Homo sapiens
  Table A; Target 71352; HLA-A*30:01; PRAME; ENSG00000185686; TAA
SEGDVMHL

SEQ ID NO: 71353 - protein, 8 aa, Homo sapiens
  Table A; Target 71353; HLA-B*18:01; PRAME; ENSG00000185686; TAA
SEGDVMHL

SEQ ID NO: 71354 - protein, 8 aa, Homo sapiens
  Table A; Target 71354; HLA-B*27:05; PRAME; ENSG00000185686; TAA
SEGDVMHL

SEQ ID NO: 71355 - protein, 8 aa, Homo sapiens
  Table A; Target 71355; HLA-B*37:01; PRAME; ENSG00000185686; TAA
SEGDVMHL

SEQ ID NO: 71356 - protein, 8 aa, Homo sapiens
  Table A; Target 71356; HLA-B*38:01; PRAME; ENSG00000185686; TAA
SEGDVMHL

SEQ ID NO: 71357 - protein, 8 aa, Homo sapiens
  Table A; Target 71357; HLA-B*40:01; PRAME; ENSG00000185686; TAA
SEGDVMHL

SEQ ID NO: 71358 - protein, 8 aa, Homo sapiens
  Table A; Target 71358; HLA-B*40:02; PRAME; ENSG00000185686; TAA
SEGDVMHL

SEQ ID NO: 71359 - protein, 8 aa, Homo sapiens
  Table A; Target 71359; HLA-B*44:02; PRAME; ENSG00000185686; TAA
SEGDVMHL

SEQ ID NO: 71360 - protein, 8 aa, Homo sapiens
  Table A; Target 71360; HLA-B*44:03; PRAME; ENSG00000185686; TAA
SEGDVMHL

SEQ ID NO: 71361 - protein, 8 aa, Homo sapiens
  Table A; Target 71361; HLA-B*49:01; PRAME; ENSG00000185686; TAA
SEGDVMHL

SEQ ID NO: 71362 - protein, 8 aa, Homo sapiens
  Table A; Target 71362; HLA-C*06:02; PRAME; ENSG00000185686; TAA
SEGDVMHL

SEQ ID NO: 71363 - protein, 8 aa, Homo sapiens
  Table A; Target 71363; HLA-C*07:04; PRAME; ENSG00000185686; TAA
SEGDVMHL

SEQ ID NO: 71364 - protein, 8 aa, Homo sapiens
  Table A; Target 71364; HLA-C*12:03; PRAME; ENSG00000185686; TAA
SEGDVMHL

SEQ ID NO: 71365 - protein, 8 aa, Homo sapiens
  Table A; Target 71365; HLA-C*16:04; PRAME; ENSG00000185686; TAA
SEGDVMHL

SEQ ID NO: 71366 - protein, 9 aa, Homo sapiens
  Table A; Target 71366; HLA-B*44:02; PRAME; ENSG00000185686; TAA
SEGDVMHLS

SEQ ID NO: 71367 - protein, 9 aa, Homo sapiens
  Table A; Target 71367; HLA-B*44:03; PRAME; ENSG00000185686; TAA
SEGDVMHLS

SEQ ID NO: 71368 - protein, 11 aa, Homo sapiens
  Table A; Target 71368; HLA-C*01:02; PRAME; ENSG00000185686; TAA
SFPEPEAAQPM

SEQ ID NO: 71369 - protein, 11 aa, Homo sapiens
  Table A; Target 71369; HLA-C*14:02; PRAME; ENSG00000185686; TAA
SFPEPEAAQPM

SEQ ID NO: 71370 - protein, 9 aa, Homo sapiens
  Table A; Target 71370; HLA-A*23:01; PRAME; ENSG00000185686; TAA
SFYGNSISI

SEQ ID NO: 71371 - protein, 9 aa, Homo sapiens
  Table A; Target 71371; HLA-A*24:02; PRAME; ENSG00000185686; TAA
SFYGNSISI

SEQ ID NO: 71372 - protein, 9 aa, Homo sapiens
  Table A; Target 71372; HLA-A*30:01; PRAME; ENSG00000185686; TAA
SFYGNSISI

SEQ ID NO: 71373 - protein, 9 aa, Homo sapiens
  Table A; Target 71373; HLA-B*13:02; PRAME; ENSG00000185686; TAA
SFYGNSISI

SEQ ID NO: 71374 - protein, 9 aa, Homo sapiens
  Table A; Target 71374; HLA-B*15:03; PRAME; ENSG00000185686; TAA
SFYGNSISI

SEQ ID NO: 71375 - protein, 9 aa, Homo sapiens
  Table A; Target 71375; HLA-B*35:03; PRAME; ENSG00000185686; TAA
SFYGNSISI

SEQ ID NO: 71376 - protein, 9 aa, Homo sapiens
  Table A; Target 71376; HLA-B*40:02; PRAME; ENSG00000185686; TAA
SFYGNSISI

SEQ ID NO: 71377 - protein, 9 aa, Homo sapiens
  Table A; Target 71377; HLA-B*46:01; PRAME; ENSG00000185686; TAA
SFYGNSISI

SEQ ID NO: 71378 - protein, 9 aa, Homo sapiens
  Table A; Target 71378; HLA-B*49:01; PRAME; ENSG00000185686; TAA
SFYGNSISI

SEQ ID NO: 71379 - protein, 9 aa, Homo sapiens
  Table A; Target 71379; HLA-B*51:01; PRAME; ENSG00000185686; TAA
SFYGNSISI

SEQ ID NO: 71380 - protein, 9 aa, Homo sapiens
  Table A; Target 71380; HLA-B*55:01; PRAME; ENSG00000185686; TAA
SFYGNSISI

SEQ ID NO: 71381 - protein, 9 aa, Homo sapiens
  Table A; Target 71381; HLA-C*01:02; PRAME; ENSG00000185686; TAA
SFYGNSISI

SEQ ID NO: 71382 - protein, 9 aa, Homo sapiens
  Table A; Target 71382; HLA-C*04:01; PRAME; ENSG00000185686; TAA
SFYGNSISI

SEQ ID NO: 71383 - protein, 9 aa, Homo sapiens
  Table A; Target 71383; HLA-C*06:02; PRAME; ENSG00000185686; TAA
SFYGNSISI

SEQ ID NO: 71384 - protein, 9 aa, Homo sapiens
  Table A; Target 71384; HLA-C*07:01; PRAME; ENSG00000185686; TAA
SFYGNSISI

SEQ ID NO: 71385 - protein, 9 aa, Homo sapiens
  Table A; Target 71385; HLA-C*07:04; PRAME; ENSG00000185686; TAA
SFYGNSISI

SEQ ID NO: 71386 - protein, 9 aa, Homo sapiens
  Table A; Target 71386; HLA-C*12:03; PRAME; ENSG00000185686; TAA
SFYGNSISI

SEQ ID NO: 71387 - protein, 9 aa, Homo sapiens
  Table A; Target 71387; HLA-C*14:02; PRAME; ENSG00000185686; TAA
SFYGNSISI

SEQ ID NO: 71388 - protein, 9 aa, Homo sapiens
  Table A; Target 71388; HLA-C*16:04; PRAME; ENSG00000185686; TAA
SFYGNSISI

SEQ ID NO: 71389 - protein, 8 aa, Homo sapiens
  Table A; Target 71389; HLA-A*30:02; PRAME; ENSG00000185686; TAA
SGNRASLY

SEQ ID NO: 71390 - protein, 8 aa, Homo sapiens
  Table A; Target 71390; HLA-B*15:01; PRAME; ENSG00000185686; TAA
SGNRASLY

SEQ ID NO: 71391 - protein, 8 aa, Homo sapiens
  Table A; Target 71391; HLA-B*15:03; PRAME; ENSG00000185686; TAA
SGNRASLY

SEQ ID NO: 71392 - protein, 8 aa, Homo sapiens
  Table A; Target 71392; HLA-B*46:01; PRAME; ENSG00000185686; TAA
SGNRASLY

SEQ ID NO: 71393 - protein, 8 aa, Homo sapiens
  Table A; Target 71393; HLA-C*04:01; PRAME; ENSG00000185686; TAA
SGNRASLY

SEQ ID NO: 71394 - protein, 8 aa, Homo sapiens
  Table A; Target 71394; HLA-C*07:04; PRAME; ENSG00000185686; TAA
SGNRASLY

SEQ ID NO: 71395 - protein, 8 aa, Homo sapiens
  Table A; Target 71395; HLA-C*12:03; PRAME; ENSG00000185686; TAA
SGNRASLY

SEQ ID NO: 71396 - protein, 8 aa, Homo sapiens
  Table A; Target 71396; HLA-C*16:01; PRAME; ENSG00000185686; TAA
SGNRASLY

SEQ ID NO: 71397 - protein, 8 aa, Homo sapiens
  Table A; Target 71397; HLA-C*16:02; PRAME; ENSG00000185686; TAA
SGNRASLY

SEQ ID NO: 71398 - protein, 9 aa, Homo sapiens
  Table A; Target 71398; HLA-B*27:05; PRAME; ENSG00000185686; TAA
SHCSQLTTL

SEQ ID NO: 71399 - protein, 9 aa, Homo sapiens
  Table A; Target 71399; HLA-B*38:01; PRAME; ENSG00000185686; TAA
SHCSQLTTL

SEQ ID NO: 71400 - protein, 9 aa, Homo sapiens
  Table A; Target 71400; HLA-B*39:01; PRAME; ENSG00000185686; TAA
SHCSQLTTL

SEQ ID NO: 71401 - protein, 8 aa, Homo sapiens
  Table A; Target 71401; HLA-B*15:03; PRAME; ENSG00000185686; TAA
SHIHASSY

SEQ ID NO: 71402 - protein, 9 aa, Homo sapiens
  Table A; Target 71402; HLA-B*38:01; PRAME; ENSG00000185686; TAA
SHIHASSYI

SEQ ID NO: 71403 - protein, 9 aa, Homo sapiens
  Table A; Target 71403; HLA-B*38:01; PRAME; ENSG00000185686; TAA
SHQDFWTVW

SEQ ID NO: 71404 - protein, 11 aa, Homo sapiens
  Table A; Target 71404; HLA-A*25:01; PRAME; ENSG00000185686; TAA
SIEDLEVTCTW

SEQ ID NO: 71405 - protein, 11 aa, Homo sapiens
  Table A; Target 71405; HLA-B*57:01; PRAME; ENSG00000185686; TAA
SIEDLEVTCTW

SEQ ID NO: 71406 - protein, 11 aa, Homo sapiens
  Table A; Target 71406; HLA-B*58:01; PRAME; ENSG00000185686; TAA
SIEDLEVTCTW

SEQ ID NO: 71407 - protein, 9 aa, Homo sapiens
  Table A; Target 71407; HLA-A*31:01; PRAME; ENSG00000185686; TAA
SIQSRYISM

SEQ ID NO: 71408 - protein, 9 aa, Homo sapiens
  Table A; Target 71408; HLA-A*32:01; PRAME; ENSG00000185686; TAA
SIQSRYISM

SEQ ID NO: 71409 - protein, 9 aa, Homo sapiens
  Table A; Target 71409; HLA-B*07:02; PRAME; ENSG00000185686; TAA
SIQSRYISM

SEQ ID NO: 71410 - protein, 9 aa, Homo sapiens
  Table A; Target 71410; HLA-B*08:01; PRAME; ENSG00000185686; TAA
SIQSRYISM

SEQ ID NO: 71411 - protein, 9 aa, Homo sapiens
  Table A; Target 71411; HLA-B*37:01; PRAME; ENSG00000185686; TAA
SIQSRYISM

SEQ ID NO: 71412 - protein, 9 aa, Homo sapiens
  Table A; Target 71412; HLA-B*46:01; PRAME; ENSG00000185686; TAA
SIQSRYISM

SEQ ID NO: 71413 - protein, 9 aa, Homo sapiens
  Table A; Target 71413; HLA-C*01:02; PRAME; ENSG00000185686; TAA
SIQSRYISM

SEQ ID NO: 71414 - protein, 9 aa, Homo sapiens
  Table A; Target 71414; HLA-C*03:03; PRAME; ENSG00000185686; TAA
SIQSRYISM

SEQ ID NO: 71415 - protein, 9 aa, Homo sapiens
  Table A; Target 71415; HLA-C*07:02; PRAME; ENSG00000185686; TAA
SIQSRYISM

SEQ ID NO: 71416 - protein, 9 aa, Homo sapiens
  Table A; Target 71416; HLA-C*14:02; PRAME; ENSG00000185686; TAA
SIQSRYISM

SEQ ID NO: 71417 - protein, 9 aa, Homo sapiens
  Table A; Target 71417; HLA-C*16:01; PRAME; ENSG00000185686; TAA
SIQSRYISM

SEQ ID NO: 71418 - protein, 9 aa, Homo sapiens
  Table A; Target 71418; HLA-C*16:02; PRAME; ENSG00000185686; TAA
SIQSRYISM

SEQ ID NO: 71419 - protein, 8 aa, Homo sapiens
  Table A; Target 71419; HLA-B*37:01; PRAME; ENSG00000185686; TAA
SISALQSL

SEQ ID NO: 71420 - protein, 8 aa, Homo sapiens
  Table A; Target 71420; HLA-C*01:02; PRAME; ENSG00000185686; TAA
SISALQSL

SEQ ID NO: 71421 - protein, 9 aa, Homo sapiens
  Table A; Target 71421; HLA-B*13:02; PRAME; ENSG00000185686; TAA
SISALQSLL

SEQ ID NO: 71422 - protein, 9 aa, Homo sapiens
  Table A; Target 71422; HLA-C*07:04; PRAME; ENSG00000185686; TAA
SISALQSLL

SEQ ID NO: 71423 - protein, 10 aa, Homo sapiens
  Table A; Target 71423; HLA-C*01:02; PRAME; ENSG00000185686; TAA
SISISALQSL

SEQ ID NO: 71424 - protein, 9 aa, Homo sapiens
  Table A; Target 71424; HLA-A*02:01; PRAME; ENSG00000185686; TAA
SLLKDEALA

SEQ ID NO: 71425 - protein, 10 aa, Homo sapiens
  Table A; Target 71425; HLA-B*13:02; PRAME; ENSG00000185686; TAA
SLLKDEALAI

SEQ ID NO: 71426 - protein, 11 aa, Homo sapiens
  Table A; Target 71426; HLA-A*02:01; PRAME; ENSG00000185686; TAA
SLLKDEALAIA

SEQ ID NO: 71427 - protein, 11 aa, Homo sapiens
  Table A; Target 71427; HLA-A*02:04; PRAME; ENSG00000185686; TAA
SLLKDEALAIA

SEQ ID NO: 71428 - protein, 9 aa, Homo sapiens
  Table A; Target 71428; HLA-A*02:01; PRAME; ENSG00000185686; TAA
SLLQHLIGL

SEQ ID NO: 71429 - protein, 9 aa, Homo sapiens
  Table A; Target 71429; HLA-A*02:03; PRAME; ENSG00000185686; TAA
SLLQHLIGL

SEQ ID NO: 71430 - protein, 9 aa, Homo sapiens
  Table A; Target 71430; HLA-A*02:04; PRAME; ENSG00000185686; TAA
SLLQHLIGL

SEQ ID NO: 71431 - protein, 9 aa, Homo sapiens
  Table A; Target 71431; HLA-A*02:07; PRAME; ENSG00000185686; TAA
SLLQHLIGL

SEQ ID NO: 71432 - protein, 9 aa, Homo sapiens
  Table A; Target 71432; HLA-A*03:01; PRAME; ENSG00000185686; TAA
SLLQHLIGL

SEQ ID NO: 71433 - protein, 9 aa, Homo sapiens
  Table A; Target 71433; HLA-A*31:01; PRAME; ENSG00000185686; TAA
SLLQHLIGL

SEQ ID NO: 71434 - protein, 9 aa, Homo sapiens
  Table A; Target 71434; HLA-B*08:01; PRAME; ENSG00000185686; TAA
SLLQHLIGL

SEQ ID NO: 71435 - protein, 9 aa, Homo sapiens
  Table A; Target 71435; HLA-B*37:01; PRAME; ENSG00000185686; TAA
SLLQHLIGL

SEQ ID NO: 71436 - protein, 9 aa, Homo sapiens
  Table A; Target 71436; HLA-B*55:01; PRAME; ENSG00000185686; TAA
SLLQHLIGL

SEQ ID NO: 71437 - protein, 9 aa, Homo sapiens
  Table A; Target 71437; HLA-A*01:01; PRAME; ENSG00000185686; TAA
SLQCLQALY

SEQ ID NO: 71438 - protein, 9 aa, Homo sapiens
  Table A; Target 71438; HLA-A*29:02; PRAME; ENSG00000185686; TAA
SLQCLQALY

SEQ ID NO: 71439 - protein, 9 aa, Homo sapiens
  Table A; Target 71439; HLA-A*30:02; PRAME; ENSG00000185686; TAA
SLQCLQALY

SEQ ID NO: 71440 - protein, 9 aa, Homo sapiens
  Table A; Target 71440; HLA-B*15:01; PRAME; ENSG00000185686; TAA
SLQCLQALY

SEQ ID NO: 71441 - protein, 9 aa, Homo sapiens
  Table A; Target 71441; HLA-C*07:04; PRAME; ENSG00000185686; TAA
SLQCLQALY

SEQ ID NO: 71442 - protein, 10 aa, Homo sapiens
  Table A; Target 71442; HLA-A*02:01; PRAME; ENSG00000185686; TAA
SLSGVMLTDV

SEQ ID NO: 71443 - protein, 10 aa, Homo sapiens
  Table A; Target 71443; HLA-A*02:03; PRAME; ENSG00000185686; TAA
SLSGVMLTDV

SEQ ID NO: 71444 - protein, 10 aa, Homo sapiens
  Table A; Target 71444; HLA-A*02:04; PRAME; ENSG00000185686; TAA
SLSGVMLTDV

SEQ ID NO: 71445 - protein, 10 aa, Homo sapiens
  Table A; Target 71445; HLA-A*02:01; PRAME; ENSG00000185686; TAA
SLYSFPEPEA

SEQ ID NO: 71446 - protein, 10 aa, Homo sapiens
  Table A; Target 71446; HLA-A*02:03; PRAME; ENSG00000185686; TAA
SLYSFPEPEA

SEQ ID NO: 71447 - protein, 11 aa, Homo sapiens
  Table A; Target 71447; HLA-A*02:01; PRAME; ENSG00000185686; TAA
SLYSFPEPEAA

SEQ ID NO: 71448 - protein, 11 aa, Homo sapiens
  Table A; Target 71448; HLA-A*02:03; PRAME; ENSG00000185686; TAA
SLYSFPEPEAA

SEQ ID NO: 71449 - protein, 11 aa, Homo sapiens
  Table A; Target 71449; HLA-A*02:04; PRAME; ENSG00000185686; TAA
SLYSFPEPEAA

SEQ ID NO: 71450 - protein, 9 aa, Homo sapiens
  Table A; Target 71450; HLA-A*03:01; PRAME; ENSG00000185686; TAA
SMSVWTSPR

SEQ ID NO: 71451 - protein, 9 aa, Homo sapiens
  Table A; Target 71451; HLA-A*31:01; PRAME; ENSG00000185686; TAA
SMSVWTSPR

SEQ ID NO: 71452 - protein, 8 aa, Homo sapiens
  Table A; Target 71452; HLA-A*29:02; PRAME; ENSG00000185686; TAA
SNLTHVLY

SEQ ID NO: 71453 - protein, 8 aa, Homo sapiens
  Table A; Target 71453; HLA-C*07:01; PRAME; ENSG00000185686; TAA
SNLTHVLY

SEQ ID NO: 71454 - protein, 9 aa, Homo sapiens
  Table A; Target 71454; HLA-B*35:03; PRAME; ENSG00000185686; TAA
SPEKEEQYI

SEQ ID NO: 71455 - protein, 8 aa, Homo sapiens
  Table A; Target 71455; HLA-B*07:02; PRAME; ENSG00000185686; TAA
SPEPLQAL

SEQ ID NO: 71456 - protein, 8 aa, Homo sapiens
  Table A; Target 71456; HLA-B*35:03; PRAME; ENSG00000185686; TAA
SPEPLQAL

SEQ ID NO: 71457 - protein, 9 aa, Homo sapiens
  Table A; Target 71457; HLA-B*07:02; PRAME; ENSG00000185686; TAA
SPEPLQALL

SEQ ID NO: 71458 - protein, 9 aa, Homo sapiens
  Table A; Target 71458; HLA-B*35:01; PRAME; ENSG00000185686; TAA
SPEPLQALL

SEQ ID NO: 71459 - protein, 9 aa, Homo sapiens
  Table A; Target 71459; HLA-B*35:03; PRAME; ENSG00000185686; TAA
SPEPLQALL

SEQ ID NO: 71460 - protein, 9 aa, Homo sapiens
  Table A; Target 71460; HLA-B*38:01; PRAME; ENSG00000185686; TAA
SPEPLQALL

SEQ ID NO: 71461 - protein, 9 aa, Homo sapiens
  Table A; Target 71461; HLA-C*07:02; PRAME; ENSG00000185686; TAA
SPEPLQALL

SEQ ID NO: 71462 - protein, 8 aa, Homo sapiens
  Table A; Target 71462; HLA-B*07:02; PRAME; ENSG00000185686; TAA
SPRRLVEL

SEQ ID NO: 71463 - protein, 8 aa, Homo sapiens
  Table A; Target 71463; HLA-B*08:01; PRAME; ENSG00000185686; TAA
SPRRLVEL

SEQ ID NO: 71464 - protein, 8 aa, Homo sapiens
  Table A; Target 71464; HLA-C*07:02; PRAME; ENSG00000185686; TAA
SPRRLVEL

SEQ ID NO: 71465 - protein, 9 aa, Homo sapiens
  Table A; Target 71465; HLA-B*07:02; PRAME; ENSG00000185686; TAA
SPSVSQLSV

SEQ ID NO: 71466 - protein, 9 aa, Homo sapiens
  Table A; Target 71466; HLA-B*13:02; PRAME; ENSG00000185686; TAA
SPSVSQLSV

SEQ ID NO: 71467 - protein, 9 aa, Homo sapiens
  Table A; Target 71467; HLA-B*35:03; PRAME; ENSG00000185686; TAA
SPSVSQLSV

SEQ ID NO: 71468 - protein, 9 aa, Homo sapiens
  Table A; Target 71468; HLA-B*51:01; PRAME; ENSG00000185686; TAA
SPSVSQLSV

SEQ ID NO: 71469 - protein, 9 aa, Homo sapiens
  Table A; Target 71469; HLA-B*54:01; PRAME; ENSG00000185686; TAA
SPSVSQLSV

SEQ ID NO: 71470 - protein, 9 aa, Homo sapiens
  Table A; Target 71470; HLA-B*55:01; PRAME; ENSG00000185686; TAA
SPSVSQLSV

SEQ ID NO: 71471 - protein, 9 aa, Homo sapiens
  Table A; Target 71471; HLA-B*56:01; PRAME; ENSG00000185686; TAA
SPSVSQLSV

SEQ ID NO: 71472 - protein, 9 aa, Homo sapiens
  Table A; Target 71472; HLA-C*07:02; PRAME; ENSG00000185686; TAA
SPSVSQLSV

SEQ ID NO: 71473 - protein, 10 aa, Homo sapiens
  Table A; Target 71473; HLA-B*07:02; PRAME; ENSG00000185686; TAA
SPSVSQLSVL

SEQ ID NO: 71474 - protein, 10 aa, Homo sapiens
  Table A; Target 71474; HLA-B*35:03; PRAME; ENSG00000185686; TAA
SPSVSQLSVL

SEQ ID NO: 71475 - protein, 10 aa, Homo sapiens
  Table A; Target 71475; HLA-B*56:01; PRAME; ENSG00000185686; TAA
SPSVSQLSVL

SEQ ID NO: 71476 - protein, 10 aa, Homo sapiens
  Table A; Target 71476; HLA-C*07:02; PRAME; ENSG00000185686; TAA
SPSVSQLSVL

SEQ ID NO: 71477 - protein, 8 aa, Homo sapiens
  Table A; Target 71477; HLA-B*07:02; PRAME; ENSG00000185686; TAA
SPYLGQMI

SEQ ID NO: 71478 - protein, 8 aa, Homo sapiens
  Table A; Target 71478; HLA-B*08:01; PRAME; ENSG00000185686; TAA
SPYLGQMI

SEQ ID NO: 71479 - protein, 8 aa, Homo sapiens
  Table A; Target 71479; HLA-B*13:02; PRAME; ENSG00000185686; TAA
SPYLGQMI

SEQ ID NO: 71480 - protein, 8 aa, Homo sapiens
  Table A; Target 71480; HLA-B*51:01; PRAME; ENSG00000185686; TAA
SPYLGQMI

SEQ ID NO: 71481 - protein, 8 aa, Homo sapiens
  Table A; Target 71481; HLA-B*54:01; PRAME; ENSG00000185686; TAA
SPYLGQMI

SEQ ID NO: 71482 - protein, 8 aa, Homo sapiens
  Table A; Target 71482; HLA-B*55:01; PRAME; ENSG00000185686; TAA
SPYLGQMI

SEQ ID NO: 71483 - protein, 8 aa, Homo sapiens
  Table A; Target 71483; HLA-B*56:01; PRAME; ENSG00000185686; TAA
SPYLGQMI

SEQ ID NO: 71484 - protein, 8 aa, Homo sapiens
  Table A; Target 71484; HLA-C*07:02; PRAME; ENSG00000185686; TAA
SPYLGQMI

SEQ ID NO: 71485 - protein, 8 aa, Homo sapiens
  Table A; Target 71485; HLA-C*07:04; PRAME; ENSG00000185686; TAA
SPYLGQMI

SEQ ID NO: 71486 - protein, 10 aa, Homo sapiens
  Table A; Target 71486; HLA-B*07:02; PRAME; ENSG00000185686; TAA
SPYLGQMINL

SEQ ID NO: 71487 - protein, 10 aa, Homo sapiens
  Table A; Target 71487; HLA-B*35:03; PRAME; ENSG00000185686; TAA
SPYLGQMINL

SEQ ID NO: 71488 - protein, 10 aa, Homo sapiens
  Table A; Target 71488; HLA-B*51:01; PRAME; ENSG00000185686; TAA
SPYLGQMINL

SEQ ID NO: 71489 - protein, 10 aa, Homo sapiens
  Table A; Target 71489; HLA-B*56:01; PRAME; ENSG00000185686; TAA
SPYLGQMINL

SEQ ID NO: 71490 - protein, 10 aa, Homo sapiens
  Table A; Target 71490; HLA-C*07:02; PRAME; ENSG00000185686; TAA
SPYLGQMINL

SEQ ID NO: 71491 - protein, 11 aa, Homo sapiens
  Table A; Target 71491; HLA-A*31:01; PRAME; ENSG00000185686; TAA
SPYLGQMINLR

SEQ ID NO: 71492 - protein, 11 aa, Homo sapiens
  Table A; Target 71492; HLA-A*33:01; PRAME; ENSG00000185686; TAA
SPYLGQMINLR

SEQ ID NO: 71493 - protein, 11 aa, Homo sapiens
  Table A; Target 71493; HLA-A*68:01; PRAME; ENSG00000185686; TAA
SPYLGQMINLR

SEQ ID NO: 71494 - protein, 11 aa, Homo sapiens
  Table A; Target 71494; HLA-C*07:06; PRAME; ENSG00000185686; TAA
SPYLGQMINLR

SEQ ID NO: 71495 - protein, 9 aa, Homo sapiens
  Table A; Target 71495; HLA-A*30:01; PRAME; ENSG00000185686; TAA
SQFLSLQCL

SEQ ID NO: 71496 - protein, 9 aa, Homo sapiens
  Table A; Target 71496; HLA-B*13:02; PRAME; ENSG00000185686; TAA
SQFLSLQCL

SEQ ID NO: 71497 - protein, 9 aa, Homo sapiens
  Table A; Target 71497; HLA-B*15:01; PRAME; ENSG00000185686; TAA
SQFLSLQCL

SEQ ID NO: 71498 - protein, 9 aa, Homo sapiens
  Table A; Target 71498; HLA-B*15:03; PRAME; ENSG00000185686; TAA
SQFLSLQCL

SEQ ID NO: 71499 - protein, 9 aa, Homo sapiens
  Table A; Target 71499; HLA-B*39:01; PRAME; ENSG00000185686; TAA
SQFLSLQCL

SEQ ID NO: 71500 - protein, 9 aa, Homo sapiens
  Table A; Target 71500; HLA-B*40:02; PRAME; ENSG00000185686; TAA
SQFLSLQCL

SEQ ID NO: 71501 - protein, 9 aa, Homo sapiens
  Table A; Target 71501; HLA-C*16:04; PRAME; ENSG00000185686; TAA
SQFLSLQCL

SEQ ID NO: 71502 - protein, 8 aa, Homo sapiens
  Table A; Target 71502; HLA-B*13:02; PRAME; ENSG00000185686; TAA
SQLSVLSL

SEQ ID NO: 71503 - protein, 8 aa, Homo sapiens
  Table A; Target 71503; HLA-B*15:01; PRAME; ENSG00000185686; TAA
SQLSVLSL

SEQ ID NO: 71504 - protein, 11 aa, Homo sapiens
  Table A; Target 71504; HLA-A*02:01; PRAME; ENSG00000185686; TAA
SQLSVLSLSGV

SEQ ID NO: 71505 - protein, 8 aa, Homo sapiens
  Table A; Target 71505; HLA-A*23:01; PRAME; ENSG00000185686; TAA
SQLTTLSF

SEQ ID NO: 71506 - protein, 8 aa, Homo sapiens
  Table A; Target 71506; HLA-A*32:01; PRAME; ENSG00000185686; TAA
SQLTTLSF

SEQ ID NO: 71507 - protein, 8 aa, Homo sapiens
  Table A; Target 71507; HLA-B*13:02; PRAME; ENSG00000185686; TAA
SQLTTLSF

SEQ ID NO: 71508 - protein, 8 aa, Homo sapiens
  Table A; Target 71508; HLA-B*15:01; PRAME; ENSG00000185686; TAA
SQLTTLSF

SEQ ID NO: 71509 - protein, 8 aa, Homo sapiens
  Table A; Target 71509; HLA-B*15:03; PRAME; ENSG00000185686; TAA
SQLTTLSF

SEQ ID NO: 71510 - protein, 8 aa, Homo sapiens
  Table A; Target 71510; HLA-B*37:01; PRAME; ENSG00000185686; TAA
SQLTTLSF

SEQ ID NO: 71511 - protein, 8 aa, Homo sapiens
  Table A; Target 71511; HLA-C*14:02; PRAME; ENSG00000185686; TAA
SQLTTLSF

SEQ ID NO: 71512 - protein, 9 aa, Homo sapiens
  Table A; Target 71512; HLA-A*29:02; PRAME; ENSG00000185686; TAA
SQLTTLSFY

SEQ ID NO: 71513 - protein, 9 aa, Homo sapiens
  Table A; Target 71513; HLA-A*30:02; PRAME; ENSG00000185686; TAA
SQLTTLSFY

SEQ ID NO: 71514 - protein, 9 aa, Homo sapiens
  Table A; Target 71514; HLA-A*32:01; PRAME; ENSG00000185686; TAA
SQLTTLSFY

SEQ ID NO: 71515 - protein, 9 aa, Homo sapiens
  Table A; Target 71515; HLA-B*13:02; PRAME; ENSG00000185686; TAA
SQLTTLSFY

SEQ ID NO: 71516 - protein, 9 aa, Homo sapiens
  Table A; Target 71516; HLA-B*15:01; PRAME; ENSG00000185686; TAA
SQLTTLSFY

SEQ ID NO: 71517 - protein, 9 aa, Homo sapiens
  Table A; Target 71517; HLA-B*15:03; PRAME; ENSG00000185686; TAA
SQLTTLSFY

SEQ ID NO: 71518 - protein, 9 aa, Homo sapiens
  Table A; Target 71518; HLA-B*46:01; PRAME; ENSG00000185686; TAA
SQLTTLSFY

SEQ ID NO: 71519 - protein, 9 aa, Homo sapiens
  Table A; Target 71519; HLA-C*04:01; PRAME; ENSG00000185686; TAA
SQLTTLSFY

SEQ ID NO: 71520 - protein, 9 aa, Homo sapiens
  Table A; Target 71520; HLA-C*07:01; PRAME; ENSG00000185686; TAA
SQLTTLSFY

SEQ ID NO: 71521 - protein, 9 aa, Homo sapiens
  Table A; Target 71521; HLA-C*07:04; PRAME; ENSG00000185686; TAA
SQLTTLSFY

SEQ ID NO: 71522 - protein, 9 aa, Homo sapiens
  Table A; Target 71522; HLA-C*14:02; PRAME; ENSG00000185686; TAA
SQLTTLSFY

SEQ ID NO: 71523 - protein, 9 aa, Homo sapiens
  Table A; Target 71523; HLA-C*16:04; PRAME; ENSG00000185686; TAA
SQLTTLSFY

SEQ ID NO: 71524 - protein, 9 aa, Homo sapiens
  Table A; Target 71524; HLA-A*02:01; PRAME; ENSG00000185686; TAA
SQSPSVSQL

SEQ ID NO: 71525 - protein, 9 aa, Homo sapiens
  Table A; Target 71525; HLA-A*02:03; PRAME; ENSG00000185686; TAA
SQSPSVSQL

SEQ ID NO: 71526 - protein, 9 aa, Homo sapiens
  Table A; Target 71526; HLA-A*02:04; PRAME; ENSG00000185686; TAA
SQSPSVSQL

SEQ ID NO: 71527 - protein, 9 aa, Homo sapiens
  Table A; Target 71527; HLA-A*25:01; PRAME; ENSG00000185686; TAA
SQSPSVSQL

SEQ ID NO: 71528 - protein, 9 aa, Homo sapiens
  Table A; Target 71528; HLA-A*26:01; PRAME; ENSG00000185686; TAA
SQSPSVSQL

SEQ ID NO: 71529 - protein, 9 aa, Homo sapiens
  Table A; Target 71529; HLA-A*30:01; PRAME; ENSG00000185686; TAA
SQSPSVSQL

SEQ ID NO: 71530 - protein, 9 aa, Homo sapiens
  Table A; Target 71530; HLA-A*30:02; PRAME; ENSG00000185686; TAA
SQSPSVSQL

SEQ ID NO: 71531 - protein, 9 aa, Homo sapiens
  Table A; Target 71531; HLA-A*32:01; PRAME; ENSG00000185686; TAA
SQSPSVSQL

SEQ ID NO: 71532 - protein, 9 aa, Homo sapiens
  Table A; Target 71532; HLA-B*07:02; PRAME; ENSG00000185686; TAA
SQSPSVSQL

SEQ ID NO: 71533 - protein, 9 aa, Homo sapiens
  Table A; Target 71533; HLA-B*13:02; PRAME; ENSG00000185686; TAA
SQSPSVSQL

SEQ ID NO: 71534 - protein, 9 aa, Homo sapiens
  Table A; Target 71534; HLA-B*15:01; PRAME; ENSG00000185686; TAA
SQSPSVSQL

SEQ ID NO: 71535 - protein, 9 aa, Homo sapiens
  Table A; Target 71535; HLA-B*15:03; PRAME; ENSG00000185686; TAA
SQSPSVSQL

SEQ ID NO: 71536 - protein, 9 aa, Homo sapiens
  Table A; Target 71536; HLA-B*27:05; PRAME; ENSG00000185686; TAA
SQSPSVSQL

SEQ ID NO: 71537 - protein, 9 aa, Homo sapiens
  Table A; Target 71537; HLA-B*37:01; PRAME; ENSG00000185686; TAA
SQSPSVSQL

SEQ ID NO: 71538 - protein, 9 aa, Homo sapiens
  Table A; Target 71538; HLA-B*38:01; PRAME; ENSG00000185686; TAA
SQSPSVSQL

SEQ ID NO: 71539 - protein, 9 aa, Homo sapiens
  Table A; Target 71539; HLA-B*39:01; PRAME; ENSG00000185686; TAA
SQSPSVSQL

SEQ ID NO: 71540 - protein, 9 aa, Homo sapiens
  Table A; Target 71540; HLA-B*40:01; PRAME; ENSG00000185686; TAA
SQSPSVSQL

SEQ ID NO: 71541 - protein, 9 aa, Homo sapiens
  Table A; Target 71541; HLA-B*40:02; PRAME; ENSG00000185686; TAA
SQSPSVSQL

SEQ ID NO: 71542 - protein, 9 aa, Homo sapiens
  Table A; Target 71542; HLA-B*55:01; PRAME; ENSG00000185686; TAA
SQSPSVSQL

SEQ ID NO: 71543 - protein, 9 aa, Homo sapiens
  Table A; Target 71543; HLA-B*58:01; PRAME; ENSG00000185686; TAA
SQSPSVSQL

SEQ ID NO: 71544 - protein, 9 aa, Homo sapiens
  Table A; Target 71544; HLA-C*01:02; PRAME; ENSG00000185686; TAA
SQSPSVSQL

SEQ ID NO: 71545 - protein, 9 aa, Homo sapiens
  Table A; Target 71545; HLA-C*02:02; PRAME; ENSG00000185686; TAA
SQSPSVSQL

SEQ ID NO: 71546 - protein, 9 aa, Homo sapiens
  Table A; Target 71546; HLA-C*03:03; PRAME; ENSG00000185686; TAA
SQSPSVSQL

SEQ ID NO: 71547 - protein, 9 aa, Homo sapiens
  Table A; Target 71547; HLA-C*03:04; PRAME; ENSG00000185686; TAA
SQSPSVSQL

SEQ ID NO: 71548 - protein, 9 aa, Homo sapiens
  Table A; Target 71548; HLA-C*05:01; PRAME; ENSG00000185686; TAA
SQSPSVSQL

SEQ ID NO: 71549 - protein, 9 aa, Homo sapiens
  Table A; Target 71549; HLA-C*06:02; PRAME; ENSG00000185686; TAA
SQSPSVSQL

SEQ ID NO: 71550 - protein, 9 aa, Homo sapiens
  Table A; Target 71550; HLA-C*07:04; PRAME; ENSG00000185686; TAA
SQSPSVSQL

SEQ ID NO: 71551 - protein, 9 aa, Homo sapiens
  Table A; Target 71551; HLA-C*12:03; PRAME; ENSG00000185686; TAA
SQSPSVSQL

SEQ ID NO: 71552 - protein, 9 aa, Homo sapiens
  Table A; Target 71552; HLA-C*14:02; PRAME; ENSG00000185686; TAA
SQSPSVSQL

SEQ ID NO: 71553 - protein, 9 aa, Homo sapiens
  Table A; Target 71553; HLA-C*16:02; PRAME; ENSG00000185686; TAA
SQSPSVSQL

SEQ ID NO: 71554 - protein, 9 aa, Homo sapiens
  Table A; Target 71554; HLA-C*16:04; PRAME; ENSG00000185686; TAA
SQSPSVSQL

SEQ ID NO: 71555 - protein, 11 aa, Homo sapiens
  Table A; Target 71555; HLA-B*13:02; PRAME; ENSG00000185686; TAA
SQSPSVSQLSV

SEQ ID NO: 71556 - protein, 11 aa, Homo sapiens
  Table A; Target 71556; HLA-B*39:01; PRAME; ENSG00000185686; TAA
SQSPSVSQLSV

SEQ ID NO: 71557 - protein, 8 aa, Homo sapiens
  Table A; Target 71557; HLA-B*13:02; PRAME; ENSG00000185686; TAA
SQTLKAMV

SEQ ID NO: 71558 - protein, 9 aa, Homo sapiens
  Table A; Target 71558; HLA-C*16:04; PRAME; ENSG00000185686; TAA
SRYISMSVW

SEQ ID NO: 71559 - protein, 8 aa, Homo sapiens
  Table A; Target 71559; HLA-A*03:01; PRAME; ENSG00000185686; TAA
SSYISPEK

SEQ ID NO: 71560 - protein, 8 aa, Homo sapiens
  Table A; Target 71560; HLA-A*03:02; PRAME; ENSG00000185686; TAA
SSYISPEK

SEQ ID NO: 71561 - protein, 8 aa, Homo sapiens
  Table A; Target 71561; HLA-A*11:01; PRAME; ENSG00000185686; TAA
SSYISPEK

SEQ ID NO: 71562 - protein, 8 aa, Homo sapiens
  Table A; Target 71562; HLA-B*27:05; PRAME; ENSG00000185686; TAA
SSYISPEK

SEQ ID NO: 71563 - protein, 8 aa, Homo sapiens
  Table A; Target 71563; HLA-C*06:02; PRAME; ENSG00000185686; TAA
SSYISPEK

SEQ ID NO: 71564 - protein, 9 aa, Homo sapiens
  Table A; Target 71564; HLA-B*13:02; PRAME; ENSG00000185686; TAA
STEAEQPFI

SEQ ID NO: 71565 - protein, 9 aa, Homo sapiens
  Table A; Target 71565; HLA-A*26:01; PRAME; ENSG00000185686; TAA
SVLSLSGVM

SEQ ID NO: 71566 - protein, 9 aa, Homo sapiens
  Table A; Target 71566; HLA-A*30:02; PRAME; ENSG00000185686; TAA
SVLSLSGVM

SEQ ID NO: 71567 - protein, 9 aa, Homo sapiens
  Table A; Target 71567; HLA-B*35:01; PRAME; ENSG00000185686; TAA
SVLSLSGVM

SEQ ID NO: 71568 - protein, 9 aa, Homo sapiens
  Table A; Target 71568; HLA-B*39:01; PRAME; ENSG00000185686; TAA
SVLSLSGVM

SEQ ID NO: 71569 - protein, 9 aa, Homo sapiens
  Table A; Target 71569; HLA-C*07:06; PRAME; ENSG00000185686; TAA
SVLSLSGVM

SEQ ID NO: 71570 - protein, 8 aa, Homo sapiens
  Table A; Target 71570; HLA-C*05:01; PRAME; ENSG00000185686; TAA
SVSQLSVL

SEQ ID NO: 71571 - protein, 10 aa, Homo sapiens
  Table A; Target 71571; HLA-A*25:01; PRAME; ENSG00000185686; TAA
SVSQLSVLSL

SEQ ID NO: 71572 - protein, 9 aa, Homo sapiens
  Table A; Target 71572; HLA-A*23:01; PRAME; ENSG00000185686; TAA
SYEDIHGTL

SEQ ID NO: 71573 - protein, 9 aa, Homo sapiens
  Table A; Target 71573; HLA-A*24:02; PRAME; ENSG00000185686; TAA
SYEDIHGTL

SEQ ID NO: 71574 - protein, 9 aa, Homo sapiens
  Table A; Target 71574; HLA-B*27:05; PRAME; ENSG00000185686; TAA
SYEDIHGTL

SEQ ID NO: 71575 - protein, 9 aa, Homo sapiens
  Table A; Target 71575; HLA-B*35:03; PRAME; ENSG00000185686; TAA
SYEDIHGTL

SEQ ID NO: 71576 - protein, 9 aa, Homo sapiens
  Table A; Target 71576; HLA-B*38:01; PRAME; ENSG00000185686; TAA
SYEDIHGTL

SEQ ID NO: 71577 - protein, 9 aa, Homo sapiens
  Table A; Target 71577; HLA-C*01:02; PRAME; ENSG00000185686; TAA
SYEDIHGTL

SEQ ID NO: 71578 - protein, 9 aa, Homo sapiens
  Table A; Target 71578; HLA-C*04:01; PRAME; ENSG00000185686; TAA
SYEDIHGTL

SEQ ID NO: 71579 - protein, 9 aa, Homo sapiens
  Table A; Target 71579; HLA-C*05:01; PRAME; ENSG00000185686; TAA
SYEDIHGTL

SEQ ID NO: 71580 - protein, 9 aa, Homo sapiens
  Table A; Target 71580; HLA-C*12:03; PRAME; ENSG00000185686; TAA
SYEDIHGTL

SEQ ID NO: 71581 - protein, 9 aa, Homo sapiens
  Table A; Target 71581; HLA-C*14:02; PRAME; ENSG00000185686; TAA
SYEDIHGTL

SEQ ID NO: 71582 - protein, 9 aa, Homo sapiens
  Table A; Target 71582; HLA-C*16:02; PRAME; ENSG00000185686; TAA
SYEDIHGTL

SEQ ID NO: 71583 - protein, 11 aa, Homo sapiens
  Table A; Target 71583; HLA-A*24:02; PRAME; ENSG00000185686; TAA
SYEDIHGTLHL

SEQ ID NO: 71584 - protein, 11 aa, Homo sapiens
  Table A; Target 71584; HLA-A*23:01; PRAME; ENSG00000185686; TAA
SYISPEKEEQY

SEQ ID NO: 71585 - protein, 11 aa, Homo sapiens
  Table A; Target 71585; HLA-A*24:02; PRAME; ENSG00000185686; TAA
SYISPEKEEQY

SEQ ID NO: 71586 - protein, 11 aa, Homo sapiens
  Table A; Target 71586; HLA-A*29:02; PRAME; ENSG00000185686; TAA
SYISPEKEEQY

SEQ ID NO: 71587 - protein, 11 aa, Homo sapiens
  Table A; Target 71587; HLA-A*30:02; PRAME; ENSG00000185686; TAA
SYISPEKEEQY

SEQ ID NO: 71588 - protein, 11 aa, Homo sapiens
  Table A; Target 71588; HLA-A*31:01; PRAME; ENSG00000185686; TAA
SYISPEKEEQY

SEQ ID NO: 71589 - protein, 11 aa, Homo sapiens
  Table A; Target 71589; HLA-A*32:01; PRAME; ENSG00000185686; TAA
SYISPEKEEQY

SEQ ID NO: 71590 - protein, 11 aa, Homo sapiens
  Table A; Target 71590; HLA-A*33:01; PRAME; ENSG00000185686; TAA
SYISPEKEEQY

SEQ ID NO: 71591 - protein, 11 aa, Homo sapiens
  Table A; Target 71591; HLA-B*15:01; PRAME; ENSG00000185686; TAA
SYISPEKEEQY

SEQ ID NO: 71592 - protein, 11 aa, Homo sapiens
  Table A; Target 71592; HLA-B*15:03; PRAME; ENSG00000185686; TAA
SYISPEKEEQY

SEQ ID NO: 71593 - protein, 11 aa, Homo sapiens
  Table A; Target 71593; HLA-C*01:02; PRAME; ENSG00000185686; TAA
SYISPEKEEQY

SEQ ID NO: 71594 - protein, 11 aa, Homo sapiens
  Table A; Target 71594; HLA-C*14:02; PRAME; ENSG00000185686; TAA
SYISPEKEEQY

SEQ ID NO: 71595 - protein, 11 aa, Homo sapiens
  Table A; Target 71595; HLA-C*16:01; PRAME; ENSG00000185686; TAA
SYISPEKEEQY

SEQ ID NO: 71596 - protein, 11 aa, Homo sapiens
  Table A; Target 71596; HLA-C*16:02; PRAME; ENSG00000185686; TAA
SYISPEKEEQY

SEQ ID NO: 71597 - protein, 11 aa, Homo sapiens
  Table A; Target 71597; HLA-C*16:04; PRAME; ENSG00000185686; TAA
SYISPEKEEQY

SEQ ID NO: 71598 - protein, 8 aa, Homo sapiens
  Table A; Target 71598; HLA-C*07:01; PRAME; ENSG00000185686; TAA
SYLIEKVK

SEQ ID NO: 71599 - protein, 9 aa, Homo sapiens
  Table A; Target 71599; HLA-A*31:01; PRAME; ENSG00000185686; TAA
SYLIEKVKR

SEQ ID NO: 71600 - protein, 9 aa, Homo sapiens
  Table A; Target 71600; HLA-A*33:01; PRAME; ENSG00000185686; TAA
SYLIEKVKR

SEQ ID NO: 71601 - protein, 9 aa, Homo sapiens
  Table A; Target 71601; HLA-A*33:03; PRAME; ENSG00000185686; TAA
SYLIEKVKR

SEQ ID NO: 71602 - protein, 9 aa, Homo sapiens
  Table A; Target 71602; HLA-A*23:01; PRAME; ENSG00000185686; TAA
TCLPLGVLM

SEQ ID NO: 71603 - protein, 9 aa, Homo sapiens
  Table A; Target 71603; HLA-B*15:03; PRAME; ENSG00000185686; TAA
TCLPLGVLM

SEQ ID NO: 71604 - protein, 9 aa, Homo sapiens
  Table A; Target 71604; HLA-C*04:01; PRAME; ENSG00000185686; TAA
TCLPLGVLM

SEQ ID NO: 71605 - protein, 9 aa, Homo sapiens
  Table A; Target 71605; HLA-C*07:01; PRAME; ENSG00000185686; TAA
TCLPLGVLM

SEQ ID NO: 71606 - protein, 10 aa, Homo sapiens
  Table A; Target 71606; HLA-B*27:02; PRAME; ENSG00000185686; TAA
TCLPLGVLMK

SEQ ID NO: 71607 - protein, 8 aa, Homo sapiens
  Table A; Target 71607; HLA-A*30:01; PRAME; ENSG00000185686; TAA
TDVSPEPL

SEQ ID NO: 71608 - protein, 8 aa, Homo sapiens
  Table A; Target 71608; HLA-B*37:01; PRAME; ENSG00000185686; TAA
TDVSPEPL

SEQ ID NO: 71609 - protein, 8 aa, Homo sapiens
  Table A; Target 71609; HLA-C*04:01; PRAME; ENSG00000185686; TAA
TDVSPEPL

SEQ ID NO: 71610 - protein, 9 aa, Homo sapiens
  Table A; Target 71610; HLA-C*06:02; PRAME; ENSG00000185686; TAA
TDVSPEPLQ

SEQ ID NO: 71611 - protein, 9 aa, Homo sapiens
  Table A; Target 71611; HLA-C*07:01; PRAME; ENSG00000185686; TAA
TDVSPEPLQ

SEQ ID NO: 71612 - protein, 9 aa, Homo sapiens
  Table A; Target 71612; HLA-C*07:02; PRAME; ENSG00000185686; TAA
TDVSPEPLQ

SEQ ID NO: 71613 - protein, 9 aa, Homo sapiens
  Table A; Target 71613; HLA-C*12:03; PRAME; ENSG00000185686; TAA
TDVSPEPLQ

SEQ ID NO: 71614 - protein, 11 aa, Homo sapiens
  Table A; Target 71614; HLA-A*30:01; PRAME; ENSG00000185686; TAA
TDVSPEPLQAL

SEQ ID NO: 71615 - protein, 11 aa, Homo sapiens
  Table A; Target 71615; HLA-A*68:02; PRAME; ENSG00000185686; TAA
TDVSPEPLQAL

SEQ ID NO: 71616 - protein, 11 aa, Homo sapiens
  Table A; Target 71616; HLA-B*38:01; PRAME; ENSG00000185686; TAA
TDVSPEPLQAL

SEQ ID NO: 71617 - protein, 8 aa, Homo sapiens
  Table A; Target 71617; HLA-A*30:01; PRAME; ENSG00000185686; TAA
TEAEQPFI

SEQ ID NO: 71618 - protein, 8 aa, Homo sapiens
  Table A; Target 71618; HLA-B*13:02; PRAME; ENSG00000185686; TAA
TEAEQPFI

SEQ ID NO: 71619 - protein, 8 aa, Homo sapiens
  Table A; Target 71619; HLA-B*44:02; PRAME; ENSG00000185686; TAA
TEAEQPFI

SEQ ID NO: 71620 - protein, 8 aa, Homo sapiens
  Table A; Target 71620; HLA-B*49:01; PRAME; ENSG00000185686; TAA
TEAEQPFI

SEQ ID NO: 71621 - protein, 8 aa, Homo sapiens
  Table A; Target 71621; HLA-B*51:01; PRAME; ENSG00000185686; TAA
TEAEQPFI

SEQ ID NO: 71622 - protein, 10 aa, Homo sapiens
  Table A; Target 71622; HLA-A*30:01; PRAME; ENSG00000185686; TAA
TEAEQPFIPV

SEQ ID NO: 71623 - protein, 10 aa, Homo sapiens
  Table A; Target 71623; HLA-A*68:02; PRAME; ENSG00000185686; TAA
TEAEQPFIPV

SEQ ID NO: 71624 - protein, 10 aa, Homo sapiens
  Table A; Target 71624; HLA-B*40:02; PRAME; ENSG00000185686; TAA
TEAEQPFIPV

SEQ ID NO: 71625 - protein, 10 aa, Homo sapiens
  Table A; Target 71625; HLA-B*49:01; PRAME; ENSG00000185686; TAA
TEAEQPFIPV

SEQ ID NO: 71626 - protein, 9 aa, Homo sapiens
  Table A; Target 71626; HLA-A*23:01; PRAME; ENSG00000185686; TAA
TFKAVLDGL

SEQ ID NO: 71627 - protein, 9 aa, Homo sapiens
  Table A; Target 71627; HLA-A*23:01; PRAME; ENSG00000185686; TAA
TFYDPEPIL

SEQ ID NO: 71628 - protein, 9 aa, Homo sapiens
  Table A; Target 71628; HLA-A*24:02; PRAME; ENSG00000185686; TAA
TFYDPEPIL

SEQ ID NO: 71629 - protein, 9 aa, Homo sapiens
  Table A; Target 71629; HLA-B*35:03; PRAME; ENSG00000185686; TAA
TFYDPEPIL

SEQ ID NO: 71630 - protein, 9 aa, Homo sapiens
  Table A; Target 71630; HLA-B*38:01; PRAME; ENSG00000185686; TAA
TFYDPEPIL

SEQ ID NO: 71631 - protein, 9 aa, Homo sapiens
  Table A; Target 71631; HLA-C*14:02; PRAME; ENSG00000185686; TAA
TFYDPEPIL

SEQ ID NO: 71632 - protein, 9 aa, Homo sapiens
  Table A; Target 71632; HLA-B*38:01; PRAME; ENSG00000185686; TAA
THVLYPVPL

SEQ ID NO: 71633 - protein, 9 aa, Homo sapiens
  Table A; Target 71633; HLA-B*39:01; PRAME; ENSG00000185686; TAA
THVLYPVPL

SEQ ID NO: 71634 - protein, 9 aa, Homo sapiens
  Table A; Target 71634; HLA-C*04:01; PRAME; ENSG00000185686; TAA
THVLYPVPL

SEQ ID NO: 71635 - protein, 9 aa, Homo sapiens
  Table A; Target 71635; HLA-C*06:02; PRAME; ENSG00000185686; TAA
THVLYPVPL

SEQ ID NO: 71636 - protein, 9 aa, Homo sapiens
  Table A; Target 71636; HLA-C*07:01; PRAME; ENSG00000185686; TAA
THVLYPVPL

SEQ ID NO: 71637 - protein, 9 aa, Homo sapiens
  Table A; Target 71637; HLA-A*02:01; PRAME; ENSG00000185686; TAA
TLAKFSPYL

SEQ ID NO: 71638 - protein, 9 aa, Homo sapiens
  Table A; Target 71638; HLA-A*02:03; PRAME; ENSG00000185686; TAA
TLAKFSPYL

SEQ ID NO: 71639 - protein, 9 aa, Homo sapiens
  Table A; Target 71639; HLA-A*02:04; PRAME; ENSG00000185686; TAA
TLAKFSPYL

SEQ ID NO: 71640 - protein, 9 aa, Homo sapiens
  Table A; Target 71640; HLA-A*02:07; PRAME; ENSG00000185686; TAA
TLAKFSPYL

SEQ ID NO: 71641 - protein, 9 aa, Homo sapiens
  Table A; Target 71641; HLA-A*01:01; PRAME; ENSG00000185686; TAA
TLHLERLAY

SEQ ID NO: 71642 - protein, 9 aa, Homo sapiens
  Table A; Target 71642; HLA-A*29:02; PRAME; ENSG00000185686; TAA
TLHLERLAY

SEQ ID NO: 71643 - protein, 9 aa, Homo sapiens
  Table A; Target 71643; HLA-A*30:02; PRAME; ENSG00000185686; TAA
TLHLERLAY

SEQ ID NO: 71644 - protein, 9 aa, Homo sapiens
  Table A; Target 71644; HLA-A*32:01; PRAME; ENSG00000185686; TAA
TLHLERLAY

SEQ ID NO: 71645 - protein, 9 aa, Homo sapiens
  Table A; Target 71645; HLA-B*15:01; PRAME; ENSG00000185686; TAA
TLHLERLAY

SEQ ID NO: 71646 - protein, 9 aa, Homo sapiens
  Table A; Target 71646; HLA-B*46:01; PRAME; ENSG00000185686; TAA
TLHLERLAY

SEQ ID NO: 71647 - protein, 10 aa, Homo sapiens
  Table A; Target 71647; HLA-A*02:03; PRAME; ENSG00000185686; TAA
TLHLERLAYL

SEQ ID NO: 71648 - protein, 10 aa, Homo sapiens
  Table A; Target 71648; HLA-A*02:04; PRAME; ENSG00000185686; TAA
TLHLERLAYL

SEQ ID NO: 71649 - protein, 9 aa, Homo sapiens
  Table A; Target 71649; HLA-A*25:01; PRAME; ENSG00000185686; TAA
TLKAMVQAW

SEQ ID NO: 71650 - protein, 9 aa, Homo sapiens
  Table A; Target 71650; HLA-A*32:01; PRAME; ENSG00000185686; TAA
TLKAMVQAW

SEQ ID NO: 71651 - protein, 9 aa, Homo sapiens
  Table A; Target 71651; HLA-B*08:01; PRAME; ENSG00000185686; TAA
TLKAMVQAW

SEQ ID NO: 71652 - protein, 9 aa, Homo sapiens
  Table A; Target 71652; HLA-B*57:01; PRAME; ENSG00000185686; TAA
TLKAMVQAW

SEQ ID NO: 71653 - protein, 9 aa, Homo sapiens
  Table A; Target 71653; HLA-B*13:02; PRAME; ENSG00000185686; TAA
TLSFYGNSI

SEQ ID NO: 71654 - protein, 9 aa, Homo sapiens
  Table A; Target 71654; HLA-B*38:01; PRAME; ENSG00000185686; TAA
TLSFYGNSI

SEQ ID NO: 71655 - protein, 9 aa, Homo sapiens
  Table A; Target 71655; HLA-B*39:01; PRAME; ENSG00000185686; TAA
TLSFYGNSI

SEQ ID NO: 71656 - protein, 9 aa, Homo sapiens
  Table A; Target 71656; HLA-C*01:02; PRAME; ENSG00000185686; TAA
TLSFYGNSI

SEQ ID NO: 71657 - protein, 9 aa, Homo sapiens
  Table A; Target 71657; HLA-C*07:04; PRAME; ENSG00000185686; TAA
TLSFYGNSI

SEQ ID NO: 71658 - protein, 9 aa, Homo sapiens
  Table A; Target 71658; HLA-A*02:07; PRAME; ENSG00000185686; TAA
TSPRRLVEL

SEQ ID NO: 71659 - protein, 9 aa, Homo sapiens
  Table A; Target 71659; HLA-C*01:02; PRAME; ENSG00000185686; TAA
TSPRRLVEL

SEQ ID NO: 71660 - protein, 10 aa, Homo sapiens
  Table A; Target 71660; HLA-A*25:01; PRAME; ENSG00000185686; TAA
TTLSFYGNSI

SEQ ID NO: 71661 - protein, 10 aa, Homo sapiens
  Table A; Target 71661; HLA-A*25:01; PRAME; ENSG00000185686; TAA
TVWSGNRASL

SEQ ID NO: 71662 - protein, 10 aa, Homo sapiens
  Table A; Target 71662; HLA-A*32:01; PRAME; ENSG00000185686; TAA
TVWSGNRASL

SEQ ID NO: 71663 - protein, 10 aa, Homo sapiens
  Table A; Target 71663; HLA-B*07:02; PRAME; ENSG00000185686; TAA
TVWSGNRASL

SEQ ID NO: 71664 - protein, 10 aa, Homo sapiens
  Table A; Target 71664; HLA-C*07:02; PRAME; ENSG00000185686; TAA
TVWSGNRASL

SEQ ID NO: 71665 - protein, 11 aa, Homo sapiens
  Table A; Target 71665; HLA-A*01:01; PRAME; ENSG00000185686; TAA
TVWSGNRASLY

SEQ ID NO: 71666 - protein, 11 aa, Homo sapiens
  Table A; Target 71666; HLA-A*03:01; PRAME; ENSG00000185686; TAA
TVWSGNRASLY

SEQ ID NO: 71667 - protein, 11 aa, Homo sapiens
  Table A; Target 71667; HLA-A*26:01; PRAME; ENSG00000185686; TAA
TVWSGNRASLY

SEQ ID NO: 71668 - protein, 11 aa, Homo sapiens
  Table A; Target 71668; HLA-A*29:02; PRAME; ENSG00000185686; TAA
TVWSGNRASLY

SEQ ID NO: 71669 - protein, 11 aa, Homo sapiens
  Table A; Target 71669; HLA-A*30:02; PRAME; ENSG00000185686; TAA
TVWSGNRASLY

SEQ ID NO: 71670 - protein, 10 aa, Homo sapiens
  Table A; Target 71670; HLA-A*24:02; PRAME; ENSG00000185686; TAA
TWKLPTLAKF

SEQ ID NO: 71671 - protein, 8 aa, Homo sapiens
  Table A; Target 71671; HLA-A*30:01; PRAME; ENSG00000185686; TAA
VELAGQSL

SEQ ID NO: 71672 - protein, 8 aa, Homo sapiens
  Table A; Target 71672; HLA-B*15:03; PRAME; ENSG00000185686; TAA
VELAGQSL

SEQ ID NO: 71673 - protein, 8 aa, Homo sapiens
  Table A; Target 71673; HLA-B*18:01; PRAME; ENSG00000185686; TAA
VELAGQSL

SEQ ID NO: 71674 - protein, 8 aa, Homo sapiens
  Table A; Target 71674; HLA-B*37:01; PRAME; ENSG00000185686; TAA
VELAGQSL

SEQ ID NO: 71675 - protein, 8 aa, Homo sapiens
  Table A; Target 71675; HLA-B*40:01; PRAME; ENSG00000185686; TAA
VELAGQSL

SEQ ID NO: 71676 - protein, 8 aa, Homo sapiens
  Table A; Target 71676; HLA-B*40:02; PRAME; ENSG00000185686; TAA
VELAGQSL

SEQ ID NO: 71677 - protein, 8 aa, Homo sapiens
  Table A; Target 71677; HLA-B*44:02; PRAME; ENSG00000185686; TAA
VELAGQSL

SEQ ID NO: 71678 - protein, 8 aa, Homo sapiens
  Table A; Target 71678; HLA-B*44:03; PRAME; ENSG00000185686; TAA
VELAGQSL

SEQ ID NO: 71679 - protein, 8 aa, Homo sapiens
  Table A; Target 71679; HLA-B*49:01; PRAME; ENSG00000185686; TAA
VELAGQSL

SEQ ID NO: 71680 - protein, 8 aa, Homo sapiens
  Table A; Target 71680; HLA-C*01:02; PRAME; ENSG00000185686; TAA
VELAGQSL

SEQ ID NO: 71681 - protein, 8 aa, Homo sapiens
  Table A; Target 71681; HLA-C*03:04; PRAME; ENSG00000185686; TAA
VELAGQSL

SEQ ID NO: 71682 - protein, 8 aa, Homo sapiens
  Table A; Target 71682; HLA-C*14:02; PRAME; ENSG00000185686; TAA
VELAGQSL

SEQ ID NO: 71683 - protein, 8 aa, Homo sapiens
  Table A; Target 71683; HLA-C*16:04; PRAME; ENSG00000185686; TAA
VELAGQSL

SEQ ID NO: 71684 - protein, 9 aa, Homo sapiens
  Table A; Target 71684; HLA-A*23:01; PRAME; ENSG00000185686; TAA
VELAGQSLL

SEQ ID NO: 71685 - protein, 9 aa, Homo sapiens
  Table A; Target 71685; HLA-A*24:02; PRAME; ENSG00000185686; TAA
VELAGQSLL

SEQ ID NO: 71686 - protein, 9 aa, Homo sapiens
  Table A; Target 71686; HLA-A*30:01; PRAME; ENSG00000185686; TAA
VELAGQSLL

SEQ ID NO: 71687 - protein, 9 aa, Homo sapiens
  Table A; Target 71687; HLA-B*13:02; PRAME; ENSG00000185686; TAA
VELAGQSLL

SEQ ID NO: 71688 - protein, 9 aa, Homo sapiens
  Table A; Target 71688; HLA-B*15:03; PRAME; ENSG00000185686; TAA
VELAGQSLL

SEQ ID NO: 71689 - protein, 9 aa, Homo sapiens
  Table A; Target 71689; HLA-B*18:01; PRAME; ENSG00000185686; TAA
VELAGQSLL

SEQ ID NO: 71690 - protein, 9 aa, Homo sapiens
  Table A; Target 71690; HLA-B*37:01; PRAME; ENSG00000185686; TAA
VELAGQSLL

SEQ ID NO: 71691 - protein, 9 aa, Homo sapiens
  Table A; Target 71691; HLA-B*40:01; PRAME; ENSG00000185686; TAA
VELAGQSLL

SEQ ID NO: 71692 - protein, 9 aa, Homo sapiens
  Table A; Target 71692; HLA-B*40:02; PRAME; ENSG00000185686; TAA
VELAGQSLL

SEQ ID NO: 71693 - protein, 9 aa, Homo sapiens
  Table A; Target 71693; HLA-B*44:02; PRAME; ENSG00000185686; TAA
VELAGQSLL

SEQ ID NO: 71694 - protein, 9 aa, Homo sapiens
  Table A; Target 71694; HLA-B*44:03; PRAME; ENSG00000185686; TAA
VELAGQSLL

SEQ ID NO: 71695 - protein, 9 aa, Homo sapiens
  Table A; Target 71695; HLA-B*49:01; PRAME; ENSG00000185686; TAA
VELAGQSLL

SEQ ID NO: 71696 - protein, 9 aa, Homo sapiens
  Table A; Target 71696; HLA-C*02:02; PRAME; ENSG00000185686; TAA
VELAGQSLL

SEQ ID NO: 71697 - protein, 9 aa, Homo sapiens
  Table A; Target 71697; HLA-C*03:04; PRAME; ENSG00000185686; TAA
VELAGQSLL

SEQ ID NO: 71698 - protein, 9 aa, Homo sapiens
  Table A; Target 71698; HLA-C*07:04; PRAME; ENSG00000185686; TAA
VELAGQSLL

SEQ ID NO: 71699 - protein, 9 aa, Homo sapiens
  Table A; Target 71699; HLA-C*16:04; PRAME; ENSG00000185686; TAA
VELAGQSLL

SEQ ID NO: 71700 - protein, 10 aa, Homo sapiens
  Table A; Target 71700; HLA-B*27:02; PRAME; ENSG00000185686; TAA
VELAGQSLLK

SEQ ID NO: 71701 - protein, 8 aa, Homo sapiens
  Table A; Target 71701; HLA-B*18:01; PRAME; ENSG00000185686; TAA
VEVLVDLF

SEQ ID NO: 71702 - protein, 8 aa, Homo sapiens
  Table A; Target 71702; HLA-B*37:01; PRAME; ENSG00000185686; TAA
VEVLVDLF

SEQ ID NO: 71703 - protein, 8 aa, Homo sapiens
  Table A; Target 71703; HLA-B*49:01; PRAME; ENSG00000185686; TAA
VEVLVDLF

SEQ ID NO: 71704 - protein, 8 aa, Homo sapiens
  Table A; Target 71704; HLA-C*05:01; PRAME; ENSG00000185686; TAA
VLDGLDVL

SEQ ID NO: 71705 - protein, 9 aa, Homo sapiens
  Table A; Target 71705; HLA-A*02:01; PRAME; ENSG00000185686; TAA
VLDGLDVLL

SEQ ID NO: 71706 - protein, 9 aa, Homo sapiens
  Table A; Target 71706; HLA-A*02:04; PRAME; ENSG00000185686; TAA
VLDGLDVLL

SEQ ID NO: 71707 - protein, 9 aa, Homo sapiens
  Table A; Target 71707; HLA-A*02:07; PRAME; ENSG00000185686; TAA
VLDGLDVLL

SEQ ID NO: 71708 - protein, 9 aa, Homo sapiens
  Table A; Target 71708; HLA-B*35:03; PRAME; ENSG00000185686; TAA
VLDGLDVLL

SEQ ID NO: 71709 - protein, 9 aa, Homo sapiens
  Table A; Target 71709; HLA-B*38:01; PRAME; ENSG00000185686; TAA
VLDGLDVLL

SEQ ID NO: 71710 - protein, 9 aa, Homo sapiens
  Table A; Target 71710; HLA-B*55:01; PRAME; ENSG00000185686; TAA
VLDGLDVLL

SEQ ID NO: 71711 - protein, 9 aa, Homo sapiens
  Table A; Target 71711; HLA-C*04:01; PRAME; ENSG00000185686; TAA
VLDGLDVLL

SEQ ID NO: 71712 - protein, 9 aa, Homo sapiens
  Table A; Target 71712; HLA-C*05:01; PRAME; ENSG00000185686; TAA
VLDGLDVLL

SEQ ID NO: 71713 - protein, 9 aa, Homo sapiens
  Table A; Target 71713; HLA-C*07:04; PRAME; ENSG00000185686; TAA
VLDGLDVLL

SEQ ID NO: 71714 - protein, 10 aa, Homo sapiens
  Table A; Target 71714; HLA-A*02:07; PRAME; ENSG00000185686; TAA
VLDGLDVLLA

SEQ ID NO: 71715 - protein, 10 aa, Homo sapiens
  Table A; Target 71715; HLA-A*03:01; PRAME; ENSG00000185686; TAA
VLLAQEVRPR

SEQ ID NO: 71716 - protein, 10 aa, Homo sapiens
  Table A; Target 71716; HLA-A*31:01; PRAME; ENSG00000185686; TAA
VLLAQEVRPR

SEQ ID NO: 71717 - protein, 8 aa, Homo sapiens
  Table A; Target 71717; HLA-B*08:01; PRAME; ENSG00000185686; TAA
VLMKGQHL

SEQ ID NO: 71718 - protein, 9 aa, Homo sapiens
  Table A; Target 71718; HLA-A*02:01; PRAME; ENSG00000185686; TAA
VLSLSGVML

SEQ ID NO: 71719 - protein, 9 aa, Homo sapiens
  Table A; Target 71719; HLA-A*02:01; PRAME; ENSG00000185686; TAA
VLYPVPLES

SEQ ID NO: 71720 - protein, 9 aa, Homo sapiens
  Table A; Target 71720; HLA-A*02:03; PRAME; ENSG00000185686; TAA
VLYPVPLES

SEQ ID NO: 71721 - protein, 9 aa, Homo sapiens
  Table A; Target 71721; HLA-A*02:07; PRAME; ENSG00000185686; TAA
VLYPVPLES

SEQ ID NO: 71722 - protein, 9 aa, Homo sapiens
  Table A; Target 71722; HLA-A*03:01; PRAME; ENSG00000185686; TAA
VLYPVPLES

SEQ ID NO: 71723 - protein, 9 aa, Homo sapiens
  Table A; Target 71723; HLA-A*29:02; PRAME; ENSG00000185686; TAA
VLYPVPLES

SEQ ID NO: 71724 - protein, 9 aa, Homo sapiens
  Table A; Target 71724; HLA-B*13:02; PRAME; ENSG00000185686; TAA
VLYPVPLES

SEQ ID NO: 71725 - protein, 9 aa, Homo sapiens
  Table A; Target 71725; HLA-B*46:01; PRAME; ENSG00000185686; TAA
VLYPVPLES

SEQ ID NO: 71726 - protein, 9 aa, Homo sapiens
  Table A; Target 71726; HLA-B*55:01; PRAME; ENSG00000185686; TAA
VLYPVPLES

SEQ ID NO: 71727 - protein, 9 aa, Homo sapiens
  Table A; Target 71727; HLA-C*06:02; PRAME; ENSG00000185686; TAA
VLYPVPLES

SEQ ID NO: 71728 - protein, 9 aa, Homo sapiens
  Table A; Target 71728; HLA-C*12:03; PRAME; ENSG00000185686; TAA
VLYPVPLES

SEQ ID NO: 71729 - protein, 10 aa, Homo sapiens
  Table A; Target 71729; HLA-A*01:01; PRAME; ENSG00000185686; TAA
VLYPVPLESY

SEQ ID NO: 71730 - protein, 10 aa, Homo sapiens
  Table A; Target 71730; HLA-A*02:01; PRAME; ENSG00000185686; TAA
VLYPVPLESY

SEQ ID NO: 71731 - protein, 10 aa, Homo sapiens
  Table A; Target 71731; HLA-A*02:03; PRAME; ENSG00000185686; TAA
VLYPVPLESY

SEQ ID NO: 71732 - protein, 10 aa, Homo sapiens
  Table A; Target 71732; HLA-A*02:07; PRAME; ENSG00000185686; TAA
VLYPVPLESY

SEQ ID NO: 71733 - protein, 10 aa, Homo sapiens
  Table A; Target 71733; HLA-A*03:01; PRAME; ENSG00000185686; TAA
VLYPVPLESY

SEQ ID NO: 71734 - protein, 10 aa, Homo sapiens
  Table A; Target 71734; HLA-A*03:02; PRAME; ENSG00000185686; TAA
VLYPVPLESY

SEQ ID NO: 71735 - protein, 10 aa, Homo sapiens
  Table A; Target 71735; HLA-A*23:01; PRAME; ENSG00000185686; TAA
VLYPVPLESY

SEQ ID NO: 71736 - protein, 10 aa, Homo sapiens
  Table A; Target 71736; HLA-A*25:01; PRAME; ENSG00000185686; TAA
VLYPVPLESY

SEQ ID NO: 71737 - protein, 10 aa, Homo sapiens
  Table A; Target 71737; HLA-A*26:01; PRAME; ENSG00000185686; TAA
VLYPVPLESY

SEQ ID NO: 71738 - protein, 10 aa, Homo sapiens
  Table A; Target 71738; HLA-A*29:02; PRAME; ENSG00000185686; TAA
VLYPVPLESY

SEQ ID NO: 71739 - protein, 10 aa, Homo sapiens
  Table A; Target 71739; HLA-A*30:02; PRAME; ENSG00000185686; TAA
VLYPVPLESY

SEQ ID NO: 71740 - protein, 10 aa, Homo sapiens
  Table A; Target 71740; HLA-A*31:01; PRAME; ENSG00000185686; TAA
VLYPVPLESY

SEQ ID NO: 71741 - protein, 10 aa, Homo sapiens
  Table A; Target 71741; HLA-A*32:01; PRAME; ENSG00000185686; TAA
VLYPVPLESY

SEQ ID NO: 71742 - protein, 10 aa, Homo sapiens
  Table A; Target 71742; HLA-B*15:01; PRAME; ENSG00000185686; TAA
VLYPVPLESY

SEQ ID NO: 71743 - protein, 10 aa, Homo sapiens
  Table A; Target 71743; HLA-B*15:03; PRAME; ENSG00000185686; TAA
VLYPVPLESY

SEQ ID NO: 71744 - protein, 10 aa, Homo sapiens
  Table A; Target 71744; HLA-B*18:01; PRAME; ENSG00000185686; TAA
VLYPVPLESY

SEQ ID NO: 71745 - protein, 10 aa, Homo sapiens
  Table A; Target 71745; HLA-B*35:01; PRAME; ENSG00000185686; TAA
VLYPVPLESY

SEQ ID NO: 71746 - protein, 10 aa, Homo sapiens
  Table A; Target 71746; HLA-B*39:01; PRAME; ENSG00000185686; TAA
VLYPVPLESY

SEQ ID NO: 71747 - protein, 10 aa, Homo sapiens
  Table A; Target 71747; HLA-B*46:01; PRAME; ENSG00000185686; TAA
VLYPVPLESY

SEQ ID NO: 71748 - protein, 10 aa, Homo sapiens
  Table A; Target 71748; HLA-B*55:01; PRAME; ENSG00000185686; TAA
VLYPVPLESY

SEQ ID NO: 71749 - protein, 10 aa, Homo sapiens
  Table A; Target 71749; HLA-B*56:01; PRAME; ENSG00000185686; TAA
VLYPVPLESY

SEQ ID NO: 71750 - protein, 10 aa, Homo sapiens
  Table A; Target 71750; HLA-B*57:01; PRAME; ENSG00000185686; TAA
VLYPVPLESY

SEQ ID NO: 71751 - protein, 10 aa, Homo sapiens
  Table A; Target 71751; HLA-B*58:01; PRAME; ENSG00000185686; TAA
VLYPVPLESY

SEQ ID NO: 71752 - protein, 10 aa, Homo sapiens
  Table A; Target 71752; HLA-C*01:02; PRAME; ENSG00000185686; TAA
VLYPVPLESY

SEQ ID NO: 71753 - protein, 10 aa, Homo sapiens
  Table A; Target 71753; HLA-C*02:02; PRAME; ENSG00000185686; TAA
VLYPVPLESY

SEQ ID NO: 71754 - protein, 10 aa, Homo sapiens
  Table A; Target 71754; HLA-C*07:01; PRAME; ENSG00000185686; TAA
VLYPVPLESY

SEQ ID NO: 71755 - protein, 10 aa, Homo sapiens
  Table A; Target 71755; HLA-C*07:04; PRAME; ENSG00000185686; TAA
VLYPVPLESY

SEQ ID NO: 71756 - protein, 10 aa, Homo sapiens
  Table A; Target 71756; HLA-C*12:03; PRAME; ENSG00000185686; TAA
VLYPVPLESY

SEQ ID NO: 71757 - protein, 10 aa, Homo sapiens
  Table A; Target 71757; HLA-C*14:02; PRAME; ENSG00000185686; TAA
VLYPVPLESY

SEQ ID NO: 71758 - protein, 10 aa, Homo sapiens
  Table A; Target 71758; HLA-C*16:04; PRAME; ENSG00000185686; TAA
VLYPVPLESY

SEQ ID NO: 71759 - protein, 11 aa, Homo sapiens
  Table A; Target 71759; HLA-A*02:01; PRAME; ENSG00000185686; TAA
VMLTDVSPEPL

SEQ ID NO: 71760 - protein, 8 aa, Homo sapiens
  Table A; Target 71760; HLA-A*02:01; PRAME; ENSG00000185686; TAA
VMNPLETL

SEQ ID NO: 71761 - protein, 8 aa, Homo sapiens
  Table A; Target 71761; HLA-A*02:04; PRAME; ENSG00000185686; TAA
VMNPLETL

SEQ ID NO: 71762 - protein, 8 aa, Homo sapiens
  Table A; Target 71762; HLA-A*23:01; PRAME; ENSG00000185686; TAA
VMNPLETL

SEQ ID NO: 71763 - protein, 8 aa, Homo sapiens
  Table A; Target 71763; HLA-A*24:02; PRAME; ENSG00000185686; TAA
VMNPLETL

SEQ ID NO: 71764 - protein, 8 aa, Homo sapiens
  Table A; Target 71764; HLA-A*32:01; PRAME; ENSG00000185686; TAA
VMNPLETL

SEQ ID NO: 71765 - protein, 8 aa, Homo sapiens
  Table A; Target 71765; HLA-B*08:01; PRAME; ENSG00000185686; TAA
VMNPLETL

SEQ ID NO: 71766 - protein, 8 aa, Homo sapiens
  Table A; Target 71766; HLA-B*15:01; PRAME; ENSG00000185686; TAA
VMNPLETL

SEQ ID NO: 71767 - protein, 8 aa, Homo sapiens
  Table A; Target 71767; HLA-B*37:01; PRAME; ENSG00000185686; TAA
VMNPLETL

SEQ ID NO: 71768 - protein, 8 aa, Homo sapiens
  Table A; Target 71768; HLA-B*39:01; PRAME; ENSG00000185686; TAA
VMNPLETL

SEQ ID NO: 71769 - protein, 8 aa, Homo sapiens
  Table A; Target 71769; HLA-B*40:02; PRAME; ENSG00000185686; TAA
VMNPLETL

SEQ ID NO: 71770 - protein, 8 aa, Homo sapiens
  Table A; Target 71770; HLA-B*46:01; PRAME; ENSG00000185686; TAA
VMNPLETL

SEQ ID NO: 71771 - protein, 8 aa, Homo sapiens
  Table A; Target 71771; HLA-B*55:01; PRAME; ENSG00000185686; TAA
VMNPLETL

SEQ ID NO: 71772 - protein, 8 aa, Homo sapiens
  Table A; Target 71772; HLA-B*58:01; PRAME; ENSG00000185686; TAA
VMNPLETL

SEQ ID NO: 71773 - protein, 8 aa, Homo sapiens
  Table A; Target 71773; HLA-C*14:02; PRAME; ENSG00000185686; TAA
VMNPLETL

SEQ ID NO: 71774 - protein, 8 aa, Homo sapiens
  Table A; Target 71774; HLA-C*16:02; PRAME; ENSG00000185686; TAA
VMNPLETL

SEQ ID NO: 71775 - protein, 10 aa, Homo sapiens
  Table A; Target 71775; HLA-A*02:01; PRAME; ENSG00000185686; TAA
VMNPLETLSI

SEQ ID NO: 71776 - protein, 10 aa, Homo sapiens
  Table A; Target 71776; HLA-A*02:03; PRAME; ENSG00000185686; TAA
VMNPLETLSI

SEQ ID NO: 71777 - protein, 10 aa, Homo sapiens
  Table A; Target 71777; HLA-A*02:07; PRAME; ENSG00000185686; TAA
VMNPLETLSI

SEQ ID NO: 71778 - protein, 10 aa, Homo sapiens
  Table A; Target 71778; HLA-A*23:01; PRAME; ENSG00000185686; TAA
VMNPLETLSI

SEQ ID NO: 71779 - protein, 10 aa, Homo sapiens
  Table A; Target 71779; HLA-A*24:02; PRAME; ENSG00000185686; TAA
VMNPLETLSI

SEQ ID NO: 71780 - protein, 10 aa, Homo sapiens
  Table A; Target 71780; HLA-B*13:02; PRAME; ENSG00000185686; TAA
VMNPLETLSI

SEQ ID NO: 71781 - protein, 9 aa, Homo sapiens
  Table A; Target 71781; HLA-B*35:01; PRAME; ENSG00000185686; TAA
VPLESYEDI

SEQ ID NO: 71782 - protein, 9 aa, Homo sapiens
  Table A; Target 71782; HLA-B*35:03; PRAME; ENSG00000185686; TAA
VPLESYEDI

SEQ ID NO: 71783 - protein, 9 aa, Homo sapiens
  Table A; Target 71783; HLA-B*51:01; PRAME; ENSG00000185686; TAA
VPLESYEDI

SEQ ID NO: 71784 - protein, 9 aa, Homo sapiens
  Table A; Target 71784; HLA-B*56:01; PRAME; ENSG00000185686; TAA
VPLESYEDI

SEQ ID NO: 71785 - protein, 9 aa, Homo sapiens
  Table A; Target 71785; HLA-A*24:02; PRAME; ENSG00000185686; TAA
VQAWPFTCL

SEQ ID NO: 71786 - protein, 9 aa, Homo sapiens
  Table A; Target 71786; HLA-B*13:02; PRAME; ENSG00000185686; TAA
VQAWPFTCL

SEQ ID NO: 71787 - protein, 9 aa, Homo sapiens
  Table A; Target 71787; HLA-B*15:01; PRAME; ENSG00000185686; TAA
VQAWPFTCL

SEQ ID NO: 71788 - protein, 9 aa, Homo sapiens
  Table A; Target 71788; HLA-A*02:04; PRAME; ENSG00000185686; TAA
VQLDSIEDL

SEQ ID NO: 71789 - protein, 9 aa, Homo sapiens
  Table A; Target 71789; HLA-B*15:01; PRAME; ENSG00000185686; TAA
VQLDSIEDL

SEQ ID NO: 71790 - protein, 9 aa, Homo sapiens
  Table A; Target 71790; HLA-B*27:05; PRAME; ENSG00000185686; TAA
VQLDSIEDL

SEQ ID NO: 71791 - protein, 9 aa, Homo sapiens
  Table A; Target 71791; HLA-B*38:01; PRAME; ENSG00000185686; TAA
VQLDSIEDL

SEQ ID NO: 71792 - protein, 9 aa, Homo sapiens
  Table A; Target 71792; HLA-B*39:01; PRAME; ENSG00000185686; TAA
VQLDSIEDL

SEQ ID NO: 71793 - protein, 11 aa, Homo sapiens
  Table A; Target 71793; HLA-A*02:01; PRAME; ENSG00000185686; TAA
VQLDSIEDLEV

SEQ ID NO: 71794 - protein, 11 aa, Homo sapiens
  Table A; Target 71794; HLA-B*13:02; PRAME; ENSG00000185686; TAA
VQLDSIEDLEV

SEQ ID NO: 71795 - protein, 9 aa, Homo sapiens
  Table A; Target 71795; HLA-A*02:07; PRAME; ENSG00000185686; TAA
VSPEPLQAL

SEQ ID NO: 71796 - protein, 9 aa, Homo sapiens
  Table A; Target 71796; HLA-A*23:01; PRAME; ENSG00000185686; TAA
VSPEPLQAL

SEQ ID NO: 71797 - protein, 9 aa, Homo sapiens
  Table A; Target 71797; HLA-A*24:02; PRAME; ENSG00000185686; TAA
VSPEPLQAL

SEQ ID NO: 71798 - protein, 9 aa, Homo sapiens
  Table A; Target 71798; HLA-A*25:01; PRAME; ENSG00000185686; TAA
VSPEPLQAL

SEQ ID NO: 71799 - protein, 9 aa, Homo sapiens
  Table A; Target 71799; HLA-B*15:01; PRAME; ENSG00000185686; TAA
VSPEPLQAL

SEQ ID NO: 71800 - protein, 9 aa, Homo sapiens
  Table A; Target 71800; HLA-B*46:01; PRAME; ENSG00000185686; TAA
VSPEPLQAL

SEQ ID NO: 71801 - protein, 9 aa, Homo sapiens
  Table A; Target 71801; HLA-B*51:01; PRAME; ENSG00000185686; TAA
VSPEPLQAL

SEQ ID NO: 71802 - protein, 9 aa, Homo sapiens
  Table A; Target 71802; HLA-B*58:01; PRAME; ENSG00000185686; TAA
VSPEPLQAL

SEQ ID NO: 71803 - protein, 9 aa, Homo sapiens
  Table A; Target 71803; HLA-C*01:02; PRAME; ENSG00000185686; TAA
VSPEPLQAL

SEQ ID NO: 71804 - protein, 9 aa, Homo sapiens
  Table A; Target 71804; HLA-C*03:03; PRAME; ENSG00000185686; TAA
VSPEPLQAL

SEQ ID NO: 71805 - protein, 9 aa, Homo sapiens
  Table A; Target 71805; HLA-C*03:04; PRAME; ENSG00000185686; TAA
VSPEPLQAL

SEQ ID NO: 71806 - protein, 9 aa, Homo sapiens
  Table A; Target 71806; HLA-C*05:01; PRAME; ENSG00000185686; TAA
VSPEPLQAL

SEQ ID NO: 71807 - protein, 9 aa, Homo sapiens
  Table A; Target 71807; HLA-C*07:02; PRAME; ENSG00000185686; TAA
VSPEPLQAL

SEQ ID NO: 71808 - protein, 9 aa, Homo sapiens
  Table A; Target 71808; HLA-C*14:02; PRAME; ENSG00000185686; TAA
VSPEPLQAL

SEQ ID NO: 71809 - protein, 9 aa, Homo sapiens
  Table A; Target 71809; HLA-C*16:01; PRAME; ENSG00000185686; TAA
VSPEPLQAL

SEQ ID NO: 71810 - protein, 10 aa, Homo sapiens
  Table A; Target 71810; HLA-C*07:02; PRAME; ENSG00000185686; TAA
VSPEPLQALL

SEQ ID NO: 71811 - protein, 9 aa, Homo sapiens
  Table A; Target 71811; HLA-C*01:02; PRAME; ENSG00000185686; TAA
VSQLSVLSL

SEQ ID NO: 71812 - protein, 9 aa, Homo sapiens
  Table A; Target 71812; HLA-C*03:03; PRAME; ENSG00000185686; TAA
VSQLSVLSL

SEQ ID NO: 71813 - protein, 9 aa, Homo sapiens
  Table A; Target 71813; HLA-C*03:04; PRAME; ENSG00000185686; TAA
VSQLSVLSL

SEQ ID NO: 71814 - protein, 9 aa, Homo sapiens
  Table A; Target 71814; HLA-C*14:02; PRAME; ENSG00000185686; TAA
VSQLSVLSL

SEQ ID NO: 71815 - protein, 11 aa, Homo sapiens
  Table A; Target 71815; HLA-A*24:02; PRAME; ENSG00000185686; TAA
VWTSPRRLVEL

SEQ ID NO: 71816 - protein, 8 aa, Homo sapiens
  Table A; Target 71816; HLA-C*16:01; PRAME; ENSG00000185686; TAA
WSGNRASL

SEQ ID NO: 71817 - protein, 9 aa, Homo sapiens
  Table A; Target 71817; HLA-A*01:01; PRAME; ENSG00000185686; TAA
WSGNRASLY

SEQ ID NO: 71818 - protein, 8 aa, Homo sapiens
  Table A; Target 71818; HLA-A*30:01; PRAME; ENSG00000185686; TAA
YEDIHGTL

SEQ ID NO: 71819 - protein, 8 aa, Homo sapiens
  Table A; Target 71819; HLA-B*08:01; PRAME; ENSG00000185686; TAA
YEDIHGTL

SEQ ID NO: 71820 - protein, 8 aa, Homo sapiens
  Table A; Target 71820; HLA-B*18:01; PRAME; ENSG00000185686; TAA
YEDIHGTL

SEQ ID NO: 71821 - protein, 8 aa, Homo sapiens
  Table A; Target 71821; HLA-B*37:01; PRAME; ENSG00000185686; TAA
YEDIHGTL

SEQ ID NO: 71822 - protein, 8 aa, Homo sapiens
  Table A; Target 71822; HLA-B*38:01; PRAME; ENSG00000185686; TAA
YEDIHGTL

SEQ ID NO: 71823 - protein, 8 aa, Homo sapiens
  Table A; Target 71823; HLA-B*39:01; PRAME; ENSG00000185686; TAA
YEDIHGTL

SEQ ID NO: 71824 - protein, 8 aa, Homo sapiens
  Table A; Target 71824; HLA-B*40:01; PRAME; ENSG00000185686; TAA
YEDIHGTL

SEQ ID NO: 71825 - protein, 8 aa, Homo sapiens
  Table A; Target 71825; HLA-B*40:02; PRAME; ENSG00000185686; TAA
YEDIHGTL

SEQ ID NO: 71826 - protein, 8 aa, Homo sapiens
  Table A; Target 71826; HLA-B*49:01; PRAME; ENSG00000185686; TAA
YEDIHGTL

SEQ ID NO: 71827 - protein, 8 aa, Homo sapiens
  Table A; Target 71827; HLA-C*03:03; PRAME; ENSG00000185686; TAA
YEDIHGTL

SEQ ID NO: 71828 - protein, 8 aa, Homo sapiens
  Table A; Target 71828; HLA-C*03:04; PRAME; ENSG00000185686; TAA
YEDIHGTL

SEQ ID NO: 71829 - protein, 8 aa, Homo sapiens
  Table A; Target 71829; HLA-C*04:01; PRAME; ENSG00000185686; TAA
YEDIHGTL

SEQ ID NO: 71830 - protein, 8 aa, Homo sapiens
  Table A; Target 71830; HLA-C*05:01; PRAME; ENSG00000185686; TAA
YEDIHGTL

SEQ ID NO: 71831 - protein, 8 aa, Homo sapiens
  Table A; Target 71831; HLA-C*07:01; PRAME; ENSG00000185686; TAA
YEDIHGTL

SEQ ID NO: 71832 - protein, 8 aa, Homo sapiens
  Table A; Target 71832; HLA-C*07:04; PRAME; ENSG00000185686; TAA
YEDIHGTL

SEQ ID NO: 71833 - protein, 8 aa, Homo sapiens
  Table A; Target 71833; HLA-C*12:03; PRAME; ENSG00000185686; TAA
YEDIHGTL

SEQ ID NO: 71834 - protein, 8 aa, Homo sapiens
  Table A; Target 71834; HLA-C*16:02; PRAME; ENSG00000185686; TAA
YEDIHGTL

SEQ ID NO: 71835 - protein, 8 aa, Homo sapiens
  Table A; Target 71835; HLA-C*16:04; PRAME; ENSG00000185686; TAA
YEDIHGTL

SEQ ID NO: 71836 - protein, 9 aa, Homo sapiens
  Table A; Target 71836; HLA-A*01:01; PRAME; ENSG00000185686; TAA
YEDIHGTLH

SEQ ID NO: 71837 - protein, 9 aa, Homo sapiens
  Table A; Target 71837; HLA-B*18:01; PRAME; ENSG00000185686; TAA
YEDIHGTLH

SEQ ID NO: 71838 - protein, 9 aa, Homo sapiens
  Table A; Target 71838; HLA-B*37:01; PRAME; ENSG00000185686; TAA
YEDIHGTLH

SEQ ID NO: 71839 - protein, 9 aa, Homo sapiens
  Table A; Target 71839; HLA-B*40:01; PRAME; ENSG00000185686; TAA
YEDIHGTLH

SEQ ID NO: 71840 - protein, 9 aa, Homo sapiens
  Table A; Target 71840; HLA-B*49:01; PRAME; ENSG00000185686; TAA
YEDIHGTLH

SEQ ID NO: 71841 - protein, 10 aa, Homo sapiens
  Table A; Target 71841; HLA-A*30:01; PRAME; ENSG00000185686; TAA
YEDIHGTLHL

SEQ ID NO: 71842 - protein, 10 aa, Homo sapiens
  Table A; Target 71842; HLA-B*40:01; PRAME; ENSG00000185686; TAA
YEDIHGTLHL

SEQ ID NO: 71843 - protein, 10 aa, Homo sapiens
  Table A; Target 71843; HLA-B*40:02; PRAME; ENSG00000185686; TAA
YEDIHGTLHL

SEQ ID NO: 71844 - protein, 10 aa, Homo sapiens
  Table A; Target 71844; HLA-B*49:01; PRAME; ENSG00000185686; TAA
YEDIHGTLHL

SEQ ID NO: 71845 - protein, 9 aa, Homo sapiens
  Table A; Target 71845; HLA-A*32:01; PRAME; ENSG00000185686; TAA
YGNSISISA

SEQ ID NO: 71846 - protein, 9 aa, Homo sapiens
  Table A; Target 71846; HLA-B*35:03; PRAME; ENSG00000185686; TAA
YGNSISISA

SEQ ID NO: 71847 - protein, 9 aa, Homo sapiens
  Table A; Target 71847; HLA-B*46:01; PRAME; ENSG00000185686; TAA
YGNSISISA

SEQ ID NO: 71848 - protein, 9 aa, Homo sapiens
  Table A; Target 71848; HLA-B*54:01; PRAME; ENSG00000185686; TAA
YGNSISISA

SEQ ID NO: 71849 - protein, 9 aa, Homo sapiens
  Table A; Target 71849; HLA-B*56:01; PRAME; ENSG00000185686; TAA
YGNSISISA

SEQ ID NO: 71850 - protein, 9 aa, Homo sapiens
  Table A; Target 71850; HLA-C*02:02; PRAME; ENSG00000185686; TAA
YGNSISISA

SEQ ID NO: 71851 - protein, 9 aa, Homo sapiens
  Table A; Target 71851; HLA-C*03:04; PRAME; ENSG00000185686; TAA
YGNSISISA

SEQ ID NO: 71852 - protein, 9 aa, Homo sapiens
  Table A; Target 71852; HLA-C*12:03; PRAME; ENSG00000185686; TAA
YGNSISISA

SEQ ID NO: 71853 - protein, 9 aa, Homo sapiens
  Table A; Target 71853; HLA-C*14:02; PRAME; ENSG00000185686; TAA
YGNSISISA

SEQ ID NO: 71854 - protein, 9 aa, Homo sapiens
  Table A; Target 71854; HLA-C*16:04; PRAME; ENSG00000185686; TAA
YGNSISISA

SEQ ID NO: 71855 - protein, 10 aa, Homo sapiens
  Table A; Target 71855; HLA-A*25:01; PRAME; ENSG00000185686; TAA
YGNSISISAL

SEQ ID NO: 71856 - protein, 10 aa, Homo sapiens
  Table A; Target 71856; HLA-A*30:01; PRAME; ENSG00000185686; TAA
YGNSISISAL

SEQ ID NO: 71857 - protein, 10 aa, Homo sapiens
  Table A; Target 71857; HLA-B*27:05; PRAME; ENSG00000185686; TAA
YGNSISISAL

SEQ ID NO: 71858 - protein, 10 aa, Homo sapiens
  Table A; Target 71858; HLA-B*35:03; PRAME; ENSG00000185686; TAA
YGNSISISAL

SEQ ID NO: 71859 - protein, 10 aa, Homo sapiens
  Table A; Target 71859; HLA-B*40:01; PRAME; ENSG00000185686; TAA
YGNSISISAL

SEQ ID NO: 71860 - protein, 10 aa, Homo sapiens
  Table A; Target 71860; HLA-B*46:01; PRAME; ENSG00000185686; TAA
YGNSISISAL

SEQ ID NO: 71861 - protein, 10 aa, Homo sapiens
  Table A; Target 71861; HLA-C*01:02; PRAME; ENSG00000185686; TAA
YGNSISISAL

SEQ ID NO: 71862 - protein, 10 aa, Homo sapiens
  Table A; Target 71862; HLA-C*03:03; PRAME; ENSG00000185686; TAA
YGNSISISAL

SEQ ID NO: 71863 - protein, 10 aa, Homo sapiens
  Table A; Target 71863; HLA-C*03:04; PRAME; ENSG00000185686; TAA
YGNSISISAL

SEQ ID NO: 71864 - protein, 10 aa, Homo sapiens
  Table A; Target 71864; HLA-C*07:02; PRAME; ENSG00000185686; TAA
YGNSISISAL

SEQ ID NO: 71865 - protein, 10 aa, Homo sapiens
  Table A; Target 71865; HLA-C*07:04; PRAME; ENSG00000185686; TAA
YGNSISISAL

SEQ ID NO: 71866 - protein, 10 aa, Homo sapiens
  Table A; Target 71866; HLA-C*14:02; PRAME; ENSG00000185686; TAA
YGNSISISAL

SEQ ID NO: 71867 - protein, 9 aa, Homo sapiens
  Table A; Target 71867; HLA-A*02:03; PRAME; ENSG00000185686; TAA
YIAQFTSQF

SEQ ID NO: 71868 - protein, 9 aa, Homo sapiens
  Table A; Target 71868; HLA-A*02:07; PRAME; ENSG00000185686; TAA
YIAQFTSQF

SEQ ID NO: 71869 - protein, 9 aa, Homo sapiens
  Table A; Target 71869; HLA-A*23:01; PRAME; ENSG00000185686; TAA
YIAQFTSQF

SEQ ID NO: 71870 - protein, 9 aa, Homo sapiens
  Table A; Target 71870; HLA-A*24:02; PRAME; ENSG00000185686; TAA
YIAQFTSQF

SEQ ID NO: 71871 - protein, 9 aa, Homo sapiens
  Table A; Target 71871; HLA-A*25:01; PRAME; ENSG00000185686; TAA
YIAQFTSQF

SEQ ID NO: 71872 - protein, 9 aa, Homo sapiens
  Table A; Target 71872; HLA-A*26:01; PRAME; ENSG00000185686; TAA
YIAQFTSQF

SEQ ID NO: 71873 - protein, 9 aa, Homo sapiens
  Table A; Target 71873; HLA-A*29:02; PRAME; ENSG00000185686; TAA
YIAQFTSQF

SEQ ID NO: 71874 - protein, 9 aa, Homo sapiens
  Table A; Target 71874; HLA-A*32:01; PRAME; ENSG00000185686; TAA
YIAQFTSQF

SEQ ID NO: 71875 - protein, 9 aa, Homo sapiens
  Table A; Target 71875; HLA-A*68:02; PRAME; ENSG00000185686; TAA
YIAQFTSQF

SEQ ID NO: 71876 - protein, 9 aa, Homo sapiens
  Table A; Target 71876; HLA-B*15:01; PRAME; ENSG00000185686; TAA
YIAQFTSQF

SEQ ID NO: 71877 - protein, 9 aa, Homo sapiens
  Table A; Target 71877; HLA-B*15:03; PRAME; ENSG00000185686; TAA
YIAQFTSQF

SEQ ID NO: 71878 - protein, 9 aa, Homo sapiens
  Table A; Target 71878; HLA-B*35:01; PRAME; ENSG00000185686; TAA
YIAQFTSQF

SEQ ID NO: 71879 - protein, 9 aa, Homo sapiens
  Table A; Target 71879; HLA-B*46:01; PRAME; ENSG00000185686; TAA
YIAQFTSQF

SEQ ID NO: 71880 - protein, 9 aa, Homo sapiens
  Table A; Target 71880; HLA-C*01:02; PRAME; ENSG00000185686; TAA
YIAQFTSQF

SEQ ID NO: 71881 - protein, 9 aa, Homo sapiens
  Table A; Target 71881; HLA-C*02:02; PRAME; ENSG00000185686; TAA
YIAQFTSQF

SEQ ID NO: 71882 - protein, 9 aa, Homo sapiens
  Table A; Target 71882; HLA-C*07:04; PRAME; ENSG00000185686; TAA
YIAQFTSQF

SEQ ID NO: 71883 - protein, 9 aa, Homo sapiens
  Table A; Target 71883; HLA-C*12:03; PRAME; ENSG00000185686; TAA
YIAQFTSQF

SEQ ID NO: 71884 - protein, 9 aa, Homo sapiens
  Table A; Target 71884; HLA-C*14:02; PRAME; ENSG00000185686; TAA
YIAQFTSQF

SEQ ID NO: 71885 - protein, 9 aa, Homo sapiens
  Table A; Target 71885; HLA-C*16:04; PRAME; ENSG00000185686; TAA
YIAQFTSQF

SEQ ID NO: 71886 - protein, 10 aa, Homo sapiens
  Table A; Target 71886; HLA-A*02:03; PRAME; ENSG00000185686; TAA
YIAQFTSQFL

SEQ ID NO: 71887 - protein, 10 aa, Homo sapiens
  Table A; Target 71887; HLA-A*68:02; PRAME; ENSG00000185686; TAA
YIAQFTSQFL

SEQ ID NO: 71888 - protein, 10 aa, Homo sapiens
  Table A; Target 71888; HLA-C*02:02; PRAME; ENSG00000185686; TAA
YIAQFTSQFL

SEQ ID NO: 71889 - protein, 10 aa, Homo sapiens
  Table A; Target 71889; HLA-A*01:01; PRAME; ENSG00000185686; TAA
YISPEKEEQY

SEQ ID NO: 71890 - protein, 10 aa, Homo sapiens
  Table A; Target 71890; HLA-A*25:01; PRAME; ENSG00000185686; TAA
YISPEKEEQY

SEQ ID NO: 71891 - protein, 10 aa, Homo sapiens
  Table A; Target 71891; HLA-A*26:01; PRAME; ENSG00000185686; TAA
YISPEKEEQY

SEQ ID NO: 71892 - protein, 10 aa, Homo sapiens
  Table A; Target 71892; HLA-A*29:02; PRAME; ENSG00000185686; TAA
YISPEKEEQY

SEQ ID NO: 71893 - protein, 10 aa, Homo sapiens
  Table A; Target 71893; HLA-A*30:02; PRAME; ENSG00000185686; TAA
YISPEKEEQY

SEQ ID NO: 71894 - protein, 10 aa, Homo sapiens
  Table A; Target 71894; HLA-A*32:01; PRAME; ENSG00000185686; TAA
YISPEKEEQY

SEQ ID NO: 71895 - protein, 10 aa, Homo sapiens
  Table A; Target 71895; HLA-B*15:01; PRAME; ENSG00000185686; TAA
YISPEKEEQY

SEQ ID NO: 71896 - protein, 10 aa, Homo sapiens
  Table A; Target 71896; HLA-B*15:03; PRAME; ENSG00000185686; TAA
YISPEKEEQY

SEQ ID NO: 71897 - protein, 10 aa, Homo sapiens
  Table A; Target 71897; HLA-B*35:01; PRAME; ENSG00000185686; TAA
YISPEKEEQY

SEQ ID NO: 71898 - protein, 10 aa, Homo sapiens
  Table A; Target 71898; HLA-B*46:01; PRAME; ENSG00000185686; TAA
YISPEKEEQY

SEQ ID NO: 71899 - protein, 10 aa, Homo sapiens
  Table A; Target 71899; HLA-B*58:01; PRAME; ENSG00000185686; TAA
YISPEKEEQY

SEQ ID NO: 71900 - protein, 10 aa, Homo sapiens
  Table A; Target 71900; HLA-C*03:03; PRAME; ENSG00000185686; TAA
YISPEKEEQY

SEQ ID NO: 71901 - protein, 10 aa, Homo sapiens
  Table A; Target 71901; HLA-C*07:04; PRAME; ENSG00000185686; TAA
YISPEKEEQY

SEQ ID NO: 71902 - protein, 11 aa, Homo sapiens
  Table A; Target 71902; HLA-A*68:02; PRAME; ENSG00000185686; TAA
YISPEKEEQYI

SEQ ID NO: 71903 - protein, 8 aa, Homo sapiens
  Table A; Target 71903; HLA-A*02:01; PRAME; ENSG00000185686; TAA
YLGQMINL

SEQ ID NO: 71904 - protein, 8 aa, Homo sapiens
  Table A; Target 71904; HLA-A*02:03; PRAME; ENSG00000185686; TAA
YLGQMINL

SEQ ID NO: 71905 - protein, 8 aa, Homo sapiens
  Table A; Target 71905; HLA-A*02:04; PRAME; ENSG00000185686; TAA
YLGQMINL

SEQ ID NO: 71906 - protein, 8 aa, Homo sapiens
  Table A; Target 71906; HLA-C*07:04; PRAME; ENSG00000185686; TAA
YLGQMINL

SEQ ID NO: 71907 - protein, 9 aa, Homo sapiens
  Table A; Target 71907; HLA-A*02:01; PRAME; ENSG00000185686; TAA
YLHARLREL

SEQ ID NO: 71908 - protein, 9 aa, Homo sapiens
  Table A; Target 71908; HLA-A*02:03; PRAME; ENSG00000185686; TAA
YLHARLREL

SEQ ID NO: 71909 - protein, 9 aa, Homo sapiens
  Table A; Target 71909; HLA-A*02:04; PRAME; ENSG00000185686; TAA
YLHARLREL

SEQ ID NO: 71910 - protein, 9 aa, Homo sapiens
  Table A; Target 71910; HLA-A*02:07; PRAME; ENSG00000185686; TAA
YLHARLREL

SEQ ID NO: 71911 - protein, 9 aa, Homo sapiens
  Table A; Target 71911; HLA-B*08:01; PRAME; ENSG00000185686; TAA
YLHARLREL

SEQ ID NO: 71912 - protein, 8 aa, Homo sapiens
  Table A; Target 71912; HLA-B*08:01; PRAME; ENSG00000185686; TAA
YLIEKVKR

SEQ ID NO: 71913 - protein, 9 aa, Homo sapiens
  Table A; Target 71913; HLA-A*02:03; PRAME; ENSG00000185686; TAA
YLIEKVKRK

SEQ ID NO: 71914 - protein, 9 aa, Homo sapiens
  Table A; Target 71914; HLA-A*02:04; PRAME; ENSG00000185686; TAA
YLIEKVKRK

SEQ ID NO: 71915 - protein, 9 aa, Homo sapiens
  Table A; Target 71915; HLA-A*02:07; PRAME; ENSG00000185686; TAA
YLIEKVKRK

SEQ ID NO: 71916 - protein, 9 aa, Homo sapiens
  Table A; Target 71916; HLA-A*03:01; PRAME; ENSG00000185686; TAA
YLIEKVKRK

SEQ ID NO: 71917 - protein, 8 aa, Homo sapiens
  Table A; Target 71917; HLA-B*15:01; PRAME; ENSG00000185686; TAA
YPVPLESY

SEQ ID NO: 71918 - protein, 8 aa, Homo sapiens
  Table A; Target 71918; HLA-B*15:03; PRAME; ENSG00000185686; TAA
YPVPLESY

SEQ ID NO: 71919 - protein, 8 aa, Homo sapiens
  Table A; Target 71919; HLA-B*18:01; PRAME; ENSG00000185686; TAA
YPVPLESY

SEQ ID NO: 71920 - protein, 8 aa, Homo sapiens
  Table A; Target 71920; HLA-B*35:01; PRAME; ENSG00000185686; TAA
YPVPLESY

SEQ ID NO: 71921 - protein, 8 aa, Homo sapiens
  Table A; Target 71921; HLA-B*35:03; PRAME; ENSG00000185686; TAA
YPVPLESY

SEQ ID NO: 71922 - protein, 8 aa, Homo sapiens
  Table A; Target 71922; HLA-B*46:01; PRAME; ENSG00000185686; TAA
YPVPLESY

SEQ ID NO: 71923 - protein, 8 aa, Homo sapiens
  Table A; Target 71923; HLA-B*51:01; PRAME; ENSG00000185686; TAA
YPVPLESY

SEQ ID NO: 71924 - protein, 8 aa, Homo sapiens
  Table A; Target 71924; HLA-B*54:01; PRAME; ENSG00000185686; TAA
YPVPLESY

SEQ ID NO: 71925 - protein, 8 aa, Homo sapiens
  Table A; Target 71925; HLA-B*55:01; PRAME; ENSG00000185686; TAA
YPVPLESY

SEQ ID NO: 71926 - protein, 8 aa, Homo sapiens
  Table A; Target 71926; HLA-B*56:01; PRAME; ENSG00000185686; TAA
YPVPLESY

SEQ ID NO: 71927 - protein, 8 aa, Homo sapiens
  Table A; Target 71927; HLA-C*03:03; PRAME; ENSG00000185686; TAA
YPVPLESY

SEQ ID NO: 71928 - protein, 11 aa, Homo sapiens
  Table A; Target 71928; HLA-B*27:02; PRAME; ENSG00000185686; TAA
YPVPLESYEDI

SEQ ID NO: 71929 - protein, 11 aa, Homo sapiens
  Table A; Target 71929; HLA-B*54:01; PRAME; ENSG00000185686; TAA
YPVPLESYEDI

SEQ ID NO: 71930 - protein, 8 aa, Homo sapiens
  Table A; Target 71930; HLA-B*13:02; PRAME; ENSG00000185686; TAA
YSFPEPEA

SEQ ID NO: 71931 - protein, 8 aa, Homo sapiens
  Table A; Target 71931; HLA-B*54:01; PRAME; ENSG00000185686; TAA
YSFPEPEA

SEQ ID NO: 71932 - protein, 8 aa, Homo sapiens
  Table A; Target 71932; HLA-B*56:01; PRAME; ENSG00000185686; TAA
YSFPEPEA

SEQ ID NO: 71933 - protein, 8 aa, Homo sapiens
  Table A; Target 71933; HLA-C*03:03; PRAME; ENSG00000185686; TAA
YSFPEPEA

SEQ ID NO: 71934 - protein, 8 aa, Homo sapiens
  Table A; Target 71934; HLA-C*03:04; PRAME; ENSG00000185686; TAA
YSFPEPEA

SEQ ID NO: 71935 - protein, 8 aa, Homo sapiens
  Table A; Target 71935; HLA-C*12:03; PRAME; ENSG00000185686; TAA
YSFPEPEA

SEQ ID NO: 71936 - protein, 8 aa, Homo sapiens
  Table A; Target 71936; HLA-C*16:02; PRAME; ENSG00000185686; TAA
YSFPEPEA

SEQ ID NO: 71937 - protein, 9 aa, Homo sapiens
  Table A; Target 71937; HLA-A*02:01; PRAME; ENSG00000185686; TAA
YSFPEPEAA

SEQ ID NO: 71938 - protein, 9 aa, Homo sapiens
  Table A; Target 71938; HLA-A*02:03; PRAME; ENSG00000185686; TAA
YSFPEPEAA

SEQ ID NO: 71939 - protein, 9 aa, Homo sapiens
  Table A; Target 71939; HLA-A*30:01; PRAME; ENSG00000185686; TAA
YSFPEPEAA

SEQ ID NO: 71940 - protein, 9 aa, Homo sapiens
  Table A; Target 71940; HLA-A*68:02; PRAME; ENSG00000185686; TAA
YSFPEPEAA

SEQ ID NO: 71941 - protein, 9 aa, Homo sapiens
  Table A; Target 71941; HLA-B*18:01; PRAME; ENSG00000185686; TAA
YSFPEPEAA

SEQ ID NO: 71942 - protein, 9 aa, Homo sapiens
  Table A; Target 71942; HLA-B*27:05; PRAME; ENSG00000185686; TAA
YSFPEPEAA

SEQ ID NO: 71943 - protein, 9 aa, Homo sapiens
  Table A; Target 71943; HLA-B*35:03; PRAME; ENSG00000185686; TAA
YSFPEPEAA

SEQ ID NO: 71944 - protein, 9 aa, Homo sapiens
  Table A; Target 71944; HLA-B*54:01; PRAME; ENSG00000185686; TAA
YSFPEPEAA

SEQ ID NO: 71945 - protein, 9 aa, Homo sapiens
  Table A; Target 71945; HLA-B*55:01; PRAME; ENSG00000185686; TAA
YSFPEPEAA

SEQ ID NO: 71946 - protein, 9 aa, Homo sapiens
  Table A; Target 71946; HLA-B*56:01; PRAME; ENSG00000185686; TAA
YSFPEPEAA

SEQ ID NO: 71947 - protein, 9 aa, Homo sapiens
  Table A; Target 71947; HLA-C*02:02; PRAME; ENSG00000185686; TAA
YSFPEPEAA

SEQ ID NO: 71948 - protein, 9 aa, Homo sapiens
  Table A; Target 71948; HLA-C*03:03; PRAME; ENSG00000185686; TAA
YSFPEPEAA

SEQ ID NO: 71949 - protein, 9 aa, Homo sapiens
  Table A; Target 71949; HLA-C*03:04; PRAME; ENSG00000185686; TAA
YSFPEPEAA

SEQ ID NO: 71950 - protein, 9 aa, Homo sapiens
  Table A; Target 71950; HLA-C*12:03; PRAME; ENSG00000185686; TAA
YSFPEPEAA

SEQ ID NO: 71951 - protein, 10 aa, Homo sapiens
  Table A; Target 71951; HLA-A*68:02; PRAME; ENSG00000185686; TAA
YSFPEPEAAQ

SEQ ID NO: 71952 - protein, 10 aa, Homo sapiens
  Table A; Target 71952; HLA-C*04:01; PRAME; ENSG00000185686; TAA
YSFPEPEAAQ

SEQ ID NO: 71953 - protein, 11 aa, Homo sapiens
  Table A; Target 71953; HLA-A*68:02; PRAME; ENSG00000185686; TAA
YSFPEPEAAQP

SEQ ID NO: 71954 - protein, 8 aa, Homo sapiens
  Table A; Target 71954; HLA-A*01:01; PRAME; ENSG00000185686; TAA
YVDSLFFL

SEQ ID NO: 71955 - protein, 8 aa, Homo sapiens
  Table A; Target 71955; HLA-A*02:01; PRAME; ENSG00000185686; TAA
YVDSLFFL

SEQ ID NO: 71956 - protein, 8 aa, Homo sapiens
  Table A; Target 71956; HLA-A*02:04; PRAME; ENSG00000185686; TAA
YVDSLFFL

SEQ ID NO: 71957 - protein, 8 aa, Homo sapiens
  Table A; Target 71957; HLA-A*02:07; PRAME; ENSG00000185686; TAA
YVDSLFFL

SEQ ID NO: 71958 - protein, 8 aa, Homo sapiens
  Table A; Target 71958; HLA-A*68:02; PRAME; ENSG00000185686; TAA
YVDSLFFL

SEQ ID NO: 71959 - protein, 8 aa, Homo sapiens
  Table A; Target 71959; HLA-C*05:01; PRAME; ENSG00000185686; TAA
YVDSLFFL

SEQ ID NO: 71960 - protein, 9 aa, Homo sapiens
  Table A; Target 71960; HLA-A*01:01; PRAME; ENSG00000185686; TAA
YVDSLFFLR

SEQ ID NO: 71961 - protein, 9 aa, Homo sapiens
  Table A; Target 71961; HLA-A*02:07; PRAME; ENSG00000185686; TAA
YVDSLFFLR

SEQ ID NO: 71962 - protein, 9 aa, Homo sapiens
  Table A; Target 71962; HLA-A*29:02; PRAME; ENSG00000185686; TAA
YVDSLFFLR

SEQ ID NO: 71963 - protein, 9 aa, Homo sapiens
  Table A; Target 71963; HLA-A*31:01; PRAME; ENSG00000185686; TAA
YVDSLFFLR

SEQ ID NO: 71964 - protein, 9 aa, Homo sapiens
  Table A; Target 71964; HLA-A*33:01; PRAME; ENSG00000185686; TAA
YVDSLFFLR

SEQ ID NO: 71965 - protein, 9 aa, Homo sapiens
  Table A; Target 71965; HLA-A*68:02; PRAME; ENSG00000185686; TAA
YVDSLFFLR

SEQ ID NO: 71966 - protein, 9 aa, Homo sapiens
  Table A; Target 71966; HLA-B*57:01; PRAME; ENSG00000185686; TAA
YVDSLFFLR

SEQ ID NO: 71967 - protein, 10 aa, Homo sapiens
  Table A; Target 71967; HLA-A*02:07; PRAME; ENSG00000185686; TAA
YVDSLFFLRG

SEQ ID NO: 71968 - protein, 8 aa, Homo sapiens
  Table A; Target 71968; HLA-A*32:01; PRDM7; ENSG00000126856; CTA
AAHGPPTF

SEQ ID NO: 71969 - protein, 8 aa, Homo sapiens
  Table A; Target 71969; HLA-B*39:01; PRDM7; ENSG00000126856; CTA
AAHGPPTF

SEQ ID NO: 71970 - protein, 8 aa, Homo sapiens
  Table A; Target 71970; HLA-B*46:01; PRDM7; ENSG00000126856; CTA
AAHGPPTF

SEQ ID NO: 71971 - protein, 8 aa, Homo sapiens
  Table A; Target 71971; HLA-B*57:01; PRDM7; ENSG00000126856; CTA
AAHGPPTF

SEQ ID NO: 71972 - protein, 8 aa, Homo sapiens
  Table A; Target 71972; HLA-B*58:01; PRDM7; ENSG00000126856; CTA
AAHGPPTF

SEQ ID NO: 71973 - protein, 8 aa, Homo sapiens
  Table A; Target 71973; HLA-C*02:02; PRDM7; ENSG00000126856; CTA
AAHGPPTF

SEQ ID NO: 71974 - protein, 8 aa, Homo sapiens
  Table A; Target 71974; HLA-C*03:04; PRDM7; ENSG00000126856; CTA
AAHGPPTF

SEQ ID NO: 71975 - protein, 8 aa, Homo sapiens
  Table A; Target 71975; HLA-C*05:01; PRDM7; ENSG00000126856; CTA
AAHGPPTF

SEQ ID NO: 71976 - protein, 8 aa, Homo sapiens
  Table A; Target 71976; HLA-C*12:03; PRDM7; ENSG00000126856; CTA
AAHGPPTF

SEQ ID NO: 71977 - protein, 8 aa, Homo sapiens
  Table A; Target 71977; HLA-C*16:01; PRDM7; ENSG00000126856; CTA
AAHGPPTF

SEQ ID NO: 71978 - protein, 8 aa, Homo sapiens
  Table A; Target 71978; HLA-C*16:02; PRDM7; ENSG00000126856; CTA
AAHGPPTF

SEQ ID NO: 71979 - protein, 8 aa, Homo sapiens
  Table A; Target 71979; HLA-C*16:04; PRDM7; ENSG00000126856; CTA
AAHGPPTF

SEQ ID NO: 71980 - protein, 9 aa, Homo sapiens
  Table A; Target 71980; HLA-A*02:03; PRDM7; ENSG00000126856; CTA
AAHGPPTFV

SEQ ID NO: 71981 - protein, 9 aa, Homo sapiens
  Table A; Target 71981; HLA-A*32:01; PRDM7; ENSG00000126856; CTA
AAHGPPTFV

SEQ ID NO: 71982 - protein, 9 aa, Homo sapiens
  Table A; Target 71982; HLA-B*13:02; PRDM7; ENSG00000126856; CTA
AAHGPPTFV

SEQ ID NO: 71983 - protein, 9 aa, Homo sapiens
  Table A; Target 71983; HLA-B*49:01; PRDM7; ENSG00000126856; CTA
AAHGPPTFV

SEQ ID NO: 71984 - protein, 9 aa, Homo sapiens
  Table A; Target 71984; HLA-B*51:01; PRDM7; ENSG00000126856; CTA
AAHGPPTFV

SEQ ID NO: 71985 - protein, 9 aa, Homo sapiens
  Table A; Target 71985; HLA-C*02:02; PRDM7; ENSG00000126856; CTA
AAHGPPTFV

SEQ ID NO: 71986 - protein, 9 aa, Homo sapiens
  Table A; Target 71986; HLA-C*12:03; PRDM7; ENSG00000126856; CTA
AAHGPPTFV

SEQ ID NO: 71987 - protein, 9 aa, Homo sapiens
  Table A; Target 71987; HLA-C*16:04; PRDM7; ENSG00000126856; CTA
AAHGPPTFV

SEQ ID NO: 71988 - protein, 10 aa, Homo sapiens
  Table A; Target 71988; HLA-A*03:01; PRDM7; ENSG00000126856; CTA
AAHGPPTFVK

SEQ ID NO: 71989 - protein, 10 aa, Homo sapiens
  Table A; Target 71989; HLA-A*03:02; PRDM7; ENSG00000126856; CTA
AAHGPPTFVK

SEQ ID NO: 71990 - protein, 10 aa, Homo sapiens
  Table A; Target 71990; HLA-A*11:01; PRDM7; ENSG00000126856; CTA
AAHGPPTFVK

SEQ ID NO: 71991 - protein, 10 aa, Homo sapiens
  Table A; Target 71991; HLA-C*07:06; PRDM7; ENSG00000126856; CTA
AAHGPPTFVK

SEQ ID NO: 71992 - protein, 8 aa, Homo sapiens
  Table A; Target 71992; HLA-A*32:01; PRDM7; ENSG00000126856; CTA
AANSGYSW

SEQ ID NO: 71993 - protein, 8 aa, Homo sapiens
  Table A; Target 71993; HLA-B*57:01; PRDM7; ENSG00000126856; CTA
AANSGYSW

SEQ ID NO: 71994 - protein, 8 aa, Homo sapiens
  Table A; Target 71994; HLA-B*58:01; PRDM7; ENSG00000126856; CTA
AANSGYSW

SEQ ID NO: 71995 - protein, 8 aa, Homo sapiens
  Table A; Target 71995; HLA-C*16:01; PRDM7; ENSG00000126856; CTA
AANSGYSW

SEQ ID NO: 71996 - protein, 8 aa, Homo sapiens
  Table A; Target 71996; HLA-C*16:04; PRDM7; ENSG00000126856; CTA
AANSGYSW

SEQ ID NO: 71997 - protein, 9 aa, Homo sapiens
  Table A; Target 71997; HLA-A*25:01; PRDM7; ENSG00000126856; CTA
AASGRKSSW

SEQ ID NO: 71998 - protein, 9 aa, Homo sapiens
  Table A; Target 71998; HLA-A*32:01; PRDM7; ENSG00000126856; CTA
AASGRKSSW

SEQ ID NO: 71999 - protein, 9 aa, Homo sapiens
  Table A; Target 71999; HLA-B*58:01; PRDM7; ENSG00000126856; CTA
AASGRKSSW

SEQ ID NO: 72000 - protein, 9 aa, Homo sapiens
  Table A; Target 72000; HLA-C*16:01; PRDM7; ENSG00000126856; CTA
AASGRKSSW

SEQ ID NO: 72001 - protein, 9 aa, Homo sapiens
  Table A; Target 72001; HLA-C*16:02; PRDM7; ENSG00000126856; CTA
AASGRKSSW

SEQ ID NO: 72002 - protein, 9 aa, Homo sapiens
  Table A; Target 72002; HLA-C*16:04; PRDM7; ENSG00000126856; CTA
AASGRKSSW

SEQ ID NO: 72003 - protein, 9 aa, Homo sapiens
  Table A; Target 72003; HLA-C*12:03; PRDM7; ENSG00000126856; CTA
AAVMTKPKV

SEQ ID NO: 72004 - protein, 9 aa, Homo sapiens
  Table A; Target 72004; HLA-C*16:02; PRDM7; ENSG00000126856; CTA
AAVMTKPKV

SEQ ID NO: 72005 - protein, 10 aa, Homo sapiens
  Table A; Target 72005; HLA-B*44:02; PRDM7; ENSG00000126856; CTA
AEMGDWEKTR

SEQ ID NO: 72006 - protein, 11 aa, Homo sapiens
  Table A; Target 72006; HLA-B*44:02; PRDM7; ENSG00000126856; CTA
AEMGDWEKTRY

SEQ ID NO: 72007 - protein, 11 aa, Homo sapiens
  Table A; Target 72007; HLA-B*44:03; PRDM7; ENSG00000126856; CTA
AEMGDWEKTRY

SEQ ID NO: 72008 - protein, 8 aa, Homo sapiens
  Table A; Target 72008; HLA-B*37:01; PRDM7; ENSG00000126856; CTA
AESLGQAV

SEQ ID NO: 72009 - protein, 8 aa, Homo sapiens
  Table A; Target 72009; HLA-B*49:01; PRDM7; ENSG00000126856; CTA
AESLGQAV

SEQ ID NO: 72010 - protein, 11 aa, Homo sapiens
  Table A; Target 72010; HLA-B*27:02; PRDM7; ENSG00000126856; CTA
AESLGQAVNCW

SEQ ID NO: 72011 - protein, 11 aa, Homo sapiens
  Table A; Target 72011; HLA-B*37:01; PRDM7; ENSG00000126856; CTA
AESLGQAVNCW

SEQ ID NO: 72012 - protein, 11 aa, Homo sapiens
  Table A; Target 72012; HLA-B*44:02; PRDM7; ENSG00000126856; CTA
AESLGQAVNCW

SEQ ID NO: 72013 - protein, 11 aa, Homo sapiens
  Table A; Target 72013; HLA-B*44:03; PRDM7; ENSG00000126856; CTA
AESLGQAVNCW

SEQ ID NO: 72014 - protein, 11 aa, Homo sapiens
  Table A; Target 72014; HLA-B*49:01; PRDM7; ENSG00000126856; CTA
AESLGQAVNCW

SEQ ID NO: 72015 - protein, 11 aa, Homo sapiens
  Table A; Target 72015; HLA-C*16:04; PRDM7; ENSG00000126856; CTA
AESLGQAVNCW

SEQ ID NO: 72016 - protein, 8 aa, Homo sapiens
  Table A; Target 72016; HLA-A*30:02; PRDM7; ENSG00000126856; CTA
AFKDISIY

SEQ ID NO: 72017 - protein, 8 aa, Homo sapiens
  Table A; Target 72017; HLA-B*15:03; PRDM7; ENSG00000126856; CTA
AFKDISIY

SEQ ID NO: 72018 - protein, 8 aa, Homo sapiens
  Table A; Target 72018; HLA-B*46:01; PRDM7; ENSG00000126856; CTA
AFKDISIY

SEQ ID NO: 72019 - protein, 9 aa, Homo sapiens
  Table A; Target 72019; HLA-A*23:01; PRDM7; ENSG00000126856; CTA
AFKDISIYF

SEQ ID NO: 72020 - protein, 9 aa, Homo sapiens
  Table A; Target 72020; HLA-A*24:02; PRDM7; ENSG00000126856; CTA
AFKDISIYF

SEQ ID NO: 72021 - protein, 9 aa, Homo sapiens
  Table A; Target 72021; HLA-A*29:02; PRDM7; ENSG00000126856; CTA
AFKDISIYF

SEQ ID NO: 72022 - protein, 9 aa, Homo sapiens
  Table A; Target 72022; HLA-A*31:01; PRDM7; ENSG00000126856; CTA
AFKDISIYF

SEQ ID NO: 72023 - protein, 9 aa, Homo sapiens
  Table A; Target 72023; HLA-B*57:01; PRDM7; ENSG00000126856; CTA
AFKDISIYF

SEQ ID NO: 72024 - protein, 11 aa, Homo sapiens
  Table A; Target 72024; HLA-A*31:01; PRDM7; ENSG00000126856; CTA
AFKDISIYFTK

SEQ ID NO: 72025 - protein, 8 aa, Homo sapiens
  Table A; Target 72025; HLA-B*27:05; PRDM7; ENSG00000126856; CTA
AHGPPTFV

SEQ ID NO: 72026 - protein, 8 aa, Homo sapiens
  Table A; Target 72026; HLA-B*39:01; PRDM7; ENSG00000126856; CTA
AHGPPTFV

SEQ ID NO: 72027 - protein, 9 aa, Homo sapiens
  Table A; Target 72027; HLA-A*03:01; PRDM7; ENSG00000126856; CTA
AHGPPTFVK

SEQ ID NO: 72028 - protein, 9 aa, Homo sapiens
  Table A; Target 72028; HLA-A*03:02; PRDM7; ENSG00000126856; CTA
AHGPPTFVK

SEQ ID NO: 72029 - protein, 9 aa, Homo sapiens
  Table A; Target 72029; HLA-A*11:01; PRDM7; ENSG00000126856; CTA
AHGPPTFVK

SEQ ID NO: 72030 - protein, 9 aa, Homo sapiens
  Table A; Target 72030; HLA-A*31:01; PRDM7; ENSG00000126856; CTA
AHGPPTFVK

SEQ ID NO: 72031 - protein, 9 aa, Homo sapiens
  Table A; Target 72031; HLA-B*27:05; PRDM7; ENSG00000126856; CTA
AHGPPTFVK

SEQ ID NO: 72032 - protein, 9 aa, Homo sapiens
  Table A; Target 72032; HLA-A*02:01; PRDM7; ENSG00000126856; CTA
ALITVGLRA

SEQ ID NO: 72033 - protein, 9 aa, Homo sapiens
  Table A; Target 72033; HLA-A*02:03; PRDM7; ENSG00000126856; CTA
ALITVGLRA

SEQ ID NO: 72034 - protein, 9 aa, Homo sapiens
  Table A; Target 72034; HLA-A*02:04; PRDM7; ENSG00000126856; CTA
ALITVGLRA

SEQ ID NO: 72035 - protein, 9 aa, Homo sapiens
  Table A; Target 72035; HLA-A*02:07; PRDM7; ENSG00000126856; CTA
ALITVGLRA

SEQ ID NO: 72036 - protein, 9 aa, Homo sapiens
  Table A; Target 72036; HLA-A*29:02; PRDM7; ENSG00000126856; CTA
ALITVGLRA

SEQ ID NO: 72037 - protein, 9 aa, Homo sapiens
  Table A; Target 72037; HLA-B*13:02; PRDM7; ENSG00000126856; CTA
ALITVGLRA

SEQ ID NO: 72038 - protein, 10 aa, Homo sapiens
  Table A; Target 72038; HLA-A*02:03; PRDM7; ENSG00000126856; CTA
ALITVGLRAT

SEQ ID NO: 72039 - protein, 11 aa, Homo sapiens
  Table A; Target 72039; HLA-A*31:01; PRDM7; ENSG00000126856; CTA
ALITVGLRATR

SEQ ID NO: 72040 - protein, 8 aa, Homo sapiens
  Table A; Target 72040; HLA-B*37:01; PRDM7; ENSG00000126856; CTA
ALSLPPGL

SEQ ID NO: 72041 - protein, 9 aa, Homo sapiens
  Table A; Target 72041; HLA-A*30:02; PRDM7; ENSG00000126856; CTA
AQKPVSPPG

SEQ ID NO: 72042 - protein, 9 aa, Homo sapiens
  Table A; Target 72042; HLA-A*31:01; PRDM7; ENSG00000126856; CTA
AQKPVSPPG

SEQ ID NO: 72043 - protein, 9 aa, Homo sapiens
  Table A; Target 72043; HLA-A*32:01; PRDM7; ENSG00000126856; CTA
AQKPVSPPG

SEQ ID NO: 72044 - protein, 9 aa, Homo sapiens
  Table A; Target 72044; HLA-B*15:03; PRDM7; ENSG00000126856; CTA
AQKPVSPPG

SEQ ID NO: 72045 - protein, 9 aa, Homo sapiens
  Table A; Target 72045; HLA-B*40:02; PRDM7; ENSG00000126856; CTA
AQKPVSPPG

SEQ ID NO: 72046 - protein, 9 aa, Homo sapiens
  Table A; Target 72046; HLA-C*06:02; PRDM7; ENSG00000126856; CTA
AQKPVSPPG

SEQ ID NO: 72047 - protein, 9 aa, Homo sapiens
  Table A; Target 72047; HLA-C*16:02; PRDM7; ENSG00000126856; CTA
AQKPVSPPG

SEQ ID NO: 72048 - protein, 9 aa, Homo sapiens
  Table A; Target 72048; HLA-B*38:01; PRDM7; ENSG00000126856; CTA
ARDDEEQNL

SEQ ID NO: 72049 - protein, 9 aa, Homo sapiens
  Table A; Target 72049; HLA-B*39:01; PRDM7; ENSG00000126856; CTA
ARDDEEQNL

SEQ ID NO: 72050 - protein, 8 aa, Homo sapiens
  Table A; Target 72050; HLA-A*01:01; PRDM7; ENSG00000126856; CTA
ASDLPLGL

SEQ ID NO: 72051 - protein, 8 aa, Homo sapiens
  Table A; Target 72051; HLA-C*05:01; PRDM7; ENSG00000126856; CTA
ASDLPLGL

SEQ ID NO: 72052 - protein, 9 aa, Homo sapiens
  Table A; Target 72052; HLA-A*01:01; PRDM7; ENSG00000126856; CTA
ASDLPLGLH

SEQ ID NO: 72053 - protein, 10 aa, Homo sapiens
  Table A; Target 72053; HLA-A*01:01; PRDM7; ENSG00000126856; CTA
ASDLPLGLHF

SEQ ID NO: 72054 - protein, 9 aa, Homo sapiens
  Table A; Target 72054; HLA-A*32:01; PRDM7; ENSG00000126856; CTA
ASFNNESSL

SEQ ID NO: 72055 - protein, 9 aa, Homo sapiens
  Table A; Target 72055; HLA-B*15:01; PRDM7; ENSG00000126856; CTA
ASFNNESSL

SEQ ID NO: 72056 - protein, 9 aa, Homo sapiens
  Table A; Target 72056; HLA-B*40:01; PRDM7; ENSG00000126856; CTA
ASFNNESSL

SEQ ID NO: 72057 - protein, 9 aa, Homo sapiens
  Table A; Target 72057; HLA-B*46:01; PRDM7; ENSG00000126856; CTA
ASFNNESSL

SEQ ID NO: 72058 - protein, 9 aa, Homo sapiens
  Table A; Target 72058; HLA-B*58:01; PRDM7; ENSG00000126856; CTA
ASFNNESSL

SEQ ID NO: 72059 - protein, 9 aa, Homo sapiens
  Table A; Target 72059; HLA-C*01:02; PRDM7; ENSG00000126856; CTA
ASFNNESSL

SEQ ID NO: 72060 - protein, 9 aa, Homo sapiens
  Table A; Target 72060; HLA-C*03:03; PRDM7; ENSG00000126856; CTA
ASFNNESSL

SEQ ID NO: 72061 - protein, 9 aa, Homo sapiens
  Table A; Target 72061; HLA-C*03:04; PRDM7; ENSG00000126856; CTA
ASFNNESSL

SEQ ID NO: 72062 - protein, 9 aa, Homo sapiens
  Table A; Target 72062; HLA-C*05:01; PRDM7; ENSG00000126856; CTA
ASFNNESSL

SEQ ID NO: 72063 - protein, 9 aa, Homo sapiens
  Table A; Target 72063; HLA-C*14:02; PRDM7; ENSG00000126856; CTA
ASFNNESSL

SEQ ID NO: 72064 - protein, 9 aa, Homo sapiens
  Table A; Target 72064; HLA-C*16:02; PRDM7; ENSG00000126856; CTA
ASFNNESSL

SEQ ID NO: 72065 - protein, 9 aa, Homo sapiens
  Table A; Target 72065; HLA-C*16:04; PRDM7; ENSG00000126856; CTA
ASFNNESSL

SEQ ID NO: 72066 - protein, 10 aa, Homo sapiens
  Table A; Target 72066; HLA-A*68:01; PRDM7; ENSG00000126856; CTA
ASFNNESSLR

SEQ ID NO: 72067 - protein, 10 aa, Homo sapiens
  Table A; Target 72067; HLA-C*07:06; PRDM7; ENSG00000126856; CTA
ASFNNESSLR

SEQ ID NO: 72068 - protein, 8 aa, Homo sapiens
  Table A; Target 72068; HLA-A*32:01; PRDM7; ENSG00000126856; CTA
ASGRKSSW

SEQ ID NO: 72069 - protein, 8 aa, Homo sapiens
  Table A; Target 72069; HLA-B*58:01; PRDM7; ENSG00000126856; CTA
ASGRKSSW

SEQ ID NO: 72070 - protein, 8 aa, Homo sapiens
  Table A; Target 72070; HLA-C*16:01; PRDM7; ENSG00000126856; CTA
ASGRKSSW

SEQ ID NO: 72071 - protein, 9 aa, Homo sapiens
  Table A; Target 72071; HLA-A*31:01; PRDM7; ENSG00000126856; CTA
ASSGAASGR

SEQ ID NO: 72072 - protein, 9 aa, Homo sapiens
  Table A; Target 72072; HLA-A*68:01; PRDM7; ENSG00000126856; CTA
ASSGAASGR

SEQ ID NO: 72073 - protein, 9 aa, Homo sapiens
  Table A; Target 72073; HLA-C*07:06; PRDM7; ENSG00000126856; CTA
ASSGAASGR

SEQ ID NO: 72074 - protein, 9 aa, Homo sapiens
  Table A; Target 72074; HLA-A*03:01; PRDM7; ENSG00000126856; CTA
ATRPAFMCH

SEQ ID NO: 72075 - protein, 9 aa, Homo sapiens
  Table A; Target 72075; HLA-A*31:01; PRDM7; ENSG00000126856; CTA
ATRPAFMCH

SEQ ID NO: 72076 - protein, 10 aa, Homo sapiens
  Table A; Target 72076; HLA-A*31:01; PRDM7; ENSG00000126856; CTA
ATRPAFMCHR

SEQ ID NO: 72077 - protein, 9 aa, Homo sapiens
  Table A; Target 72077; HLA-A*03:01; PRDM7; ENSG00000126856; CTA
AVDKGHPNR

SEQ ID NO: 72078 - protein, 9 aa, Homo sapiens
  Table A; Target 72078; HLA-A*03:02; PRDM7; ENSG00000126856; CTA
AVDKGHPNR

SEQ ID NO: 72079 - protein, 9 aa, Homo sapiens
  Table A; Target 72079; HLA-A*11:01; PRDM7; ENSG00000126856; CTA
AVDKGHPNR

SEQ ID NO: 72080 - protein, 9 aa, Homo sapiens
  Table A; Target 72080; HLA-A*31:01; PRDM7; ENSG00000126856; CTA
AVDKGHPNR

SEQ ID NO: 72081 - protein, 8 aa, Homo sapiens
  Table A; Target 72081; HLA-B*08:01; PRDM7; ENSG00000126856; CTA
AVMTKPKV

SEQ ID NO: 72082 - protein, 9 aa, Homo sapiens
  Table A; Target 72082; HLA-A*03:02; PRDM7; ENSG00000126856; CTA
AVMTKPKVK

SEQ ID NO: 72083 - protein, 9 aa, Homo sapiens
  Table A; Target 72083; HLA-A*31:01; PRDM7; ENSG00000126856; CTA
AVMTKPKVK

SEQ ID NO: 72084 - protein, 9 aa, Homo sapiens
  Table A; Target 72084; HLA-A*32:01; PRDM7; ENSG00000126856; CTA
AVMTKPKVK

SEQ ID NO: 72085 - protein, 10 aa, Homo sapiens
  Table A; Target 72085; HLA-A*03:01; PRDM7; ENSG00000126856; CTA
AVMTKPKVKR

SEQ ID NO: 72086 - protein, 10 aa, Homo sapiens
  Table A; Target 72086; HLA-A*11:01; PRDM7; ENSG00000126856; CTA
AVMTKPKVKR

SEQ ID NO: 72087 - protein, 10 aa, Homo sapiens
  Table A; Target 72087; HLA-A*31:01; PRDM7; ENSG00000126856; CTA
AVMTKPKVKR

SEQ ID NO: 72088 - protein, 10 aa, Homo sapiens
  Table A; Target 72088; HLA-A*33:01; PRDM7; ENSG00000126856; CTA
AVMTKPKVKR

SEQ ID NO: 72089 - protein, 10 aa, Homo sapiens
  Table A; Target 72089; HLA-A*33:03; PRDM7; ENSG00000126856; CTA
AVMTKPKVKR

SEQ ID NO: 72090 - protein, 9 aa, Homo sapiens
  Table A; Target 72090; HLA-B*58:01; PRDM7; ENSG00000126856; CTA
CAAHGPPTF

SEQ ID NO: 72091 - protein, 9 aa, Homo sapiens
  Table A; Target 72091; HLA-C*02:02; PRDM7; ENSG00000126856; CTA
CAAHGPPTF

SEQ ID NO: 72092 - protein, 9 aa, Homo sapiens
  Table A; Target 72092; HLA-C*03:04; PRDM7; ENSG00000126856; CTA
CAAHGPPTF

SEQ ID NO: 72093 - protein, 9 aa, Homo sapiens
  Table A; Target 72093; HLA-C*16:01; PRDM7; ENSG00000126856; CTA
CAAHGPPTF

SEQ ID NO: 72094 - protein, 9 aa, Homo sapiens
  Table A; Target 72094; HLA-C*16:04; PRDM7; ENSG00000126856; CTA
CAAHGPPTF

SEQ ID NO: 72095 - protein, 8 aa, Homo sapiens
  Table A; Target 72095; HLA-B*35:03; PRDM7; ENSG00000126856; CTA
DAFKDISI

SEQ ID NO: 72096 - protein, 9 aa, Homo sapiens
  Table A; Target 72096; HLA-A*25:01; PRDM7; ENSG00000126856; CTA
DAFKDISIY

SEQ ID NO: 72097 - protein, 9 aa, Homo sapiens
  Table A; Target 72097; HLA-A*26:01; PRDM7; ENSG00000126856; CTA
DAFKDISIY

SEQ ID NO: 72098 - protein, 9 aa, Homo sapiens
  Table A; Target 72098; HLA-A*33:01; PRDM7; ENSG00000126856; CTA
DAFKDISIY

SEQ ID NO: 72099 - protein, 9 aa, Homo sapiens
  Table A; Target 72099; HLA-B*18:01; PRDM7; ENSG00000126856; CTA
DAFKDISIY

SEQ ID NO: 72100 - protein, 9 aa, Homo sapiens
  Table A; Target 72100; HLA-B*35:03; PRDM7; ENSG00000126856; CTA
DAFKDISIY

SEQ ID NO: 72101 - protein, 9 aa, Homo sapiens
  Table A; Target 72101; HLA-B*51:01; PRDM7; ENSG00000126856; CTA
DAFKDISIY

SEQ ID NO: 72102 - protein, 9 aa, Homo sapiens
  Table A; Target 72102; HLA-C*03:03; PRDM7; ENSG00000126856; CTA
DAFKDISIY

SEQ ID NO: 72103 - protein, 9 aa, Homo sapiens
  Table A; Target 72103; HLA-C*07:06; PRDM7; ENSG00000126856; CTA
DAFKDISIY

SEQ ID NO: 72104 - protein, 9 aa, Homo sapiens
  Table A; Target 72104; HLA-C*12:03; PRDM7; ENSG00000126856; CTA
DAFKDISIY

SEQ ID NO: 72105 - protein, 10 aa, Homo sapiens
  Table A; Target 72105; HLA-A*25:01; PRDM7; ENSG00000126856; CTA
DAFKDISIYF

SEQ ID NO: 72106 - protein, 10 aa, Homo sapiens
  Table A; Target 72106; HLA-A*26:01; PRDM7; ENSG00000126856; CTA
DAFKDISIYF

SEQ ID NO: 72107 - protein, 10 aa, Homo sapiens
  Table A; Target 72107; HLA-A*33:01; PRDM7; ENSG00000126856; CTA
DAFKDISIYF

SEQ ID NO: 72108 - protein, 10 aa, Homo sapiens
  Table A; Target 72108; HLA-B*35:01; PRDM7; ENSG00000126856; CTA
DAFKDISIYF

SEQ ID NO: 72109 - protein, 10 aa, Homo sapiens
  Table A; Target 72109; HLA-A*33:01; PRDM7; ENSG00000126856; CTA
DDEEQNLVAF

SEQ ID NO: 72110 - protein, 10 aa, Homo sapiens
  Table A; Target 72110; HLA-B*18:01; PRDM7; ENSG00000126856; CTA
DDEEQNLVAF

SEQ ID NO: 72111 - protein, 8 aa, Homo sapiens
  Table A; Target 72111; HLA-B*18:01; PRDM7; ENSG00000126856; CTA
DDYLYCEM

SEQ ID NO: 72112 - protein, 9 aa, Homo sapiens
  Table A; Target 72112; HLA-B*18:01; PRDM7; ENSG00000126856; CTA
DEEAANSGY

SEQ ID NO: 72113 - protein, 9 aa, Homo sapiens
  Table A; Target 72113; HLA-B*44:03; PRDM7; ENSG00000126856; CTA
DEEAANSGY

SEQ ID NO: 72114 - protein, 11 aa, Homo sapiens
  Table A; Target 72114; HLA-B*18:01; PRDM7; ENSG00000126856; CTA
DEEAANSGYSW

SEQ ID NO: 72115 - protein, 11 aa, Homo sapiens
  Table A; Target 72115; HLA-B*27:02; PRDM7; ENSG00000126856; CTA
DEEAANSGYSW

SEQ ID NO: 72116 - protein, 11 aa, Homo sapiens
  Table A; Target 72116; HLA-B*38:01; PRDM7; ENSG00000126856; CTA
DEEAANSGYSW

SEQ ID NO: 72117 - protein, 11 aa, Homo sapiens
  Table A; Target 72117; HLA-B*44:02; PRDM7; ENSG00000126856; CTA
DEEAANSGYSW

SEQ ID NO: 72118 - protein, 11 aa, Homo sapiens
  Table A; Target 72118; HLA-B*44:03; PRDM7; ENSG00000126856; CTA
DEEAANSGYSW

SEQ ID NO: 72119 - protein, 9 aa, Homo sapiens
  Table A; Target 72119; HLA-A*30:01; PRDM7; ENSG00000126856; CTA
DEEQNLVAF

SEQ ID NO: 72120 - protein, 9 aa, Homo sapiens
  Table A; Target 72120; HLA-B*38:01; PRDM7; ENSG00000126856; CTA
DEEQNLVAF

SEQ ID NO: 72121 - protein, 9 aa, Homo sapiens
  Table A; Target 72121; HLA-B*40:01; PRDM7; ENSG00000126856; CTA
DEEQNLVAF

SEQ ID NO: 72122 - protein, 9 aa, Homo sapiens
  Table A; Target 72122; HLA-B*44:02; PRDM7; ENSG00000126856; CTA
DEEQNLVAF

SEQ ID NO: 72123 - protein, 9 aa, Homo sapiens
  Table A; Target 72123; HLA-B*44:03; PRDM7; ENSG00000126856; CTA
DEEQNLVAF

SEQ ID NO: 72124 - protein, 11 aa, Homo sapiens
  Table A; Target 72124; HLA-B*18:01; PRDM7; ENSG00000126856; CTA
DEEQNLVAFQY

SEQ ID NO: 72125 - protein, 11 aa, Homo sapiens
  Table A; Target 72125; HLA-B*44:02; PRDM7; ENSG00000126856; CTA
DEEQNLVAFQY

SEQ ID NO: 72126 - protein, 11 aa, Homo sapiens
  Table A; Target 72126; HLA-B*44:03; PRDM7; ENSG00000126856; CTA
DEEQNLVAFQY

SEQ ID NO: 72127 - protein, 9 aa, Homo sapiens
  Table A; Target 72127; HLA-A*30:01; PRDM7; ENSG00000126856; CTA
DEYGQELGI

SEQ ID NO: 72128 - protein, 9 aa, Homo sapiens
  Table A; Target 72128; HLA-B*18:01; PRDM7; ENSG00000126856; CTA
DEYGQELGI

SEQ ID NO: 72129 - protein, 9 aa, Homo sapiens
  Table A; Target 72129; HLA-B*38:01; PRDM7; ENSG00000126856; CTA
DEYGQELGI

SEQ ID NO: 72130 - protein, 9 aa, Homo sapiens
  Table A; Target 72130; HLA-B*39:01; PRDM7; ENSG00000126856; CTA
DEYGQELGI

SEQ ID NO: 72131 - protein, 9 aa, Homo sapiens
  Table A; Target 72131; HLA-B*44:02; PRDM7; ENSG00000126856; CTA
DEYGQELGI

SEQ ID NO: 72132 - protein, 9 aa, Homo sapiens
  Table A; Target 72132; HLA-B*44:03; PRDM7; ENSG00000126856; CTA
DEYGQELGI

SEQ ID NO: 72133 - protein, 9 aa, Homo sapiens
  Table A; Target 72133; HLA-B*49:01; PRDM7; ENSG00000126856; CTA
DEYGQELGI

SEQ ID NO: 72134 - protein, 9 aa, Homo sapiens
  Table A; Target 72134; HLA-B*51:01; PRDM7; ENSG00000126856; CTA
DEYGQELGI

SEQ ID NO: 72135 - protein, 10 aa, Homo sapiens
  Table A; Target 72135; HLA-A*25:01; PRDM7; ENSG00000126856; CTA
DGKDKSSANW

SEQ ID NO: 72136 - protein, 8 aa, Homo sapiens
  Table A; Target 72136; HLA-B*08:01; PRDM7; ENSG00000126856; CTA
DLPLGLHF

SEQ ID NO: 72137 - protein, 9 aa, Homo sapiens
  Table A; Target 72137; HLA-A*25:01; PRDM7; ENSG00000126856; CTA
EAANSGYSW

SEQ ID NO: 72138 - protein, 9 aa, Homo sapiens
  Table A; Target 72138; HLA-A*26:01; PRDM7; ENSG00000126856; CTA
EAANSGYSW

SEQ ID NO: 72139 - protein, 9 aa, Homo sapiens
  Table A; Target 72139; HLA-A*33:01; PRDM7; ENSG00000126856; CTA
EAANSGYSW

SEQ ID NO: 72140 - protein, 9 aa, Homo sapiens
  Table A; Target 72140; HLA-A*33:03; PRDM7; ENSG00000126856; CTA
EAANSGYSW

SEQ ID NO: 72141 - protein, 9 aa, Homo sapiens
  Table A; Target 72141; HLA-A*68:01; PRDM7; ENSG00000126856; CTA
EAANSGYSW

SEQ ID NO: 72142 - protein, 9 aa, Homo sapiens
  Table A; Target 72142; HLA-B*35:01; PRDM7; ENSG00000126856; CTA
EAANSGYSW

SEQ ID NO: 72143 - protein, 9 aa, Homo sapiens
  Table A; Target 72143; HLA-B*39:01; PRDM7; ENSG00000126856; CTA
EAANSGYSW

SEQ ID NO: 72144 - protein, 9 aa, Homo sapiens
  Table A; Target 72144; HLA-B*44:02; PRDM7; ENSG00000126856; CTA
EAANSGYSW

SEQ ID NO: 72145 - protein, 9 aa, Homo sapiens
  Table A; Target 72145; HLA-B*57:01; PRDM7; ENSG00000126856; CTA
EAANSGYSW

SEQ ID NO: 72146 - protein, 9 aa, Homo sapiens
  Table A; Target 72146; HLA-B*58:01; PRDM7; ENSG00000126856; CTA
EAANSGYSW

SEQ ID NO: 72147 - protein, 9 aa, Homo sapiens
  Table A; Target 72147; HLA-C*07:06; PRDM7; ENSG00000126856; CTA
EAANSGYSW

SEQ ID NO: 72148 - protein, 9 aa, Homo sapiens
  Table A; Target 72148; HLA-C*16:04; PRDM7; ENSG00000126856; CTA
EAANSGYSW

SEQ ID NO: 72149 - protein, 9 aa, Homo sapiens
  Table A; Target 72149; HLA-A*25:01; PRDM7; ENSG00000126856; CTA
EASDLPLGL

SEQ ID NO: 72150 - protein, 9 aa, Homo sapiens
  Table A; Target 72150; HLA-A*26:01; PRDM7; ENSG00000126856; CTA
EASDLPLGL

SEQ ID NO: 72151 - protein, 9 aa, Homo sapiens
  Table A; Target 72151; HLA-A*33:03; PRDM7; ENSG00000126856; CTA
EASDLPLGL

SEQ ID NO: 72152 - protein, 9 aa, Homo sapiens
  Table A; Target 72152; HLA-A*68:01; PRDM7; ENSG00000126856; CTA
EASDLPLGL

SEQ ID NO: 72153 - protein, 9 aa, Homo sapiens
  Table A; Target 72153; HLA-A*68:02; PRDM7; ENSG00000126856; CTA
EASDLPLGL

SEQ ID NO: 72154 - protein, 9 aa, Homo sapiens
  Table A; Target 72154; HLA-B*27:05; PRDM7; ENSG00000126856; CTA
EASDLPLGL

SEQ ID NO: 72155 - protein, 9 aa, Homo sapiens
  Table A; Target 72155; HLA-B*35:01; PRDM7; ENSG00000126856; CTA
EASDLPLGL

SEQ ID NO: 72156 - protein, 9 aa, Homo sapiens
  Table A; Target 72156; HLA-B*35:03; PRDM7; ENSG00000126856; CTA
EASDLPLGL

SEQ ID NO: 72157 - protein, 9 aa, Homo sapiens
  Table A; Target 72157; HLA-B*38:01; PRDM7; ENSG00000126856; CTA
EASDLPLGL

SEQ ID NO: 72158 - protein, 9 aa, Homo sapiens
  Table A; Target 72158; HLA-B*39:01; PRDM7; ENSG00000126856; CTA
EASDLPLGL

SEQ ID NO: 72159 - protein, 9 aa, Homo sapiens
  Table A; Target 72159; HLA-B*44:03; PRDM7; ENSG00000126856; CTA
EASDLPLGL

SEQ ID NO: 72160 - protein, 9 aa, Homo sapiens
  Table A; Target 72160; HLA-C*02:02; PRDM7; ENSG00000126856; CTA
EASDLPLGL

SEQ ID NO: 72161 - protein, 9 aa, Homo sapiens
  Table A; Target 72161; HLA-C*05:01; PRDM7; ENSG00000126856; CTA
EASDLPLGL

SEQ ID NO: 72162 - protein, 9 aa, Homo sapiens
  Table A; Target 72162; HLA-C*07:06; PRDM7; ENSG00000126856; CTA
EASDLPLGL

SEQ ID NO: 72163 - protein, 9 aa, Homo sapiens
  Table A; Target 72163; HLA-C*12:03; PRDM7; ENSG00000126856; CTA
EASDLPLGL

SEQ ID NO: 72164 - protein, 9 aa, Homo sapiens
  Table A; Target 72164; HLA-C*16:04; PRDM7; ENSG00000126856; CTA
EASDLPLGL

SEQ ID NO: 72165 - protein, 11 aa, Homo sapiens
  Table A; Target 72165; HLA-A*25:01; PRDM7; ENSG00000126856; CTA
EASDLPLGLHF

SEQ ID NO: 72166 - protein, 11 aa, Homo sapiens
  Table A; Target 72166; HLA-A*26:01; PRDM7; ENSG00000126856; CTA
EASDLPLGLHF

SEQ ID NO: 72167 - protein, 11 aa, Homo sapiens
  Table A; Target 72167; HLA-A*33:03; PRDM7; ENSG00000126856; CTA
EASDLPLGLHF

SEQ ID NO: 72168 - protein, 11 aa, Homo sapiens
  Table A; Target 72168; HLA-A*68:01; PRDM7; ENSG00000126856; CTA
EASDLPLGLHF

SEQ ID NO: 72169 - protein, 11 aa, Homo sapiens
  Table A; Target 72169; HLA-A*68:02; PRDM7; ENSG00000126856; CTA
EASDLPLGLHF

SEQ ID NO: 72170 - protein, 11 aa, Homo sapiens
  Table A; Target 72170; HLA-B*44:03; PRDM7; ENSG00000126856; CTA
EASDLPLGLHF

SEQ ID NO: 72171 - protein, 10 aa, Homo sapiens
  Table A; Target 72171; HLA-A*33:03; PRDM7; ENSG00000126856; CTA
EASTSGQHSR

SEQ ID NO: 72172 - protein, 10 aa, Homo sapiens
  Table A; Target 72172; HLA-A*68:01; PRDM7; ENSG00000126856; CTA
EASTSGQHSR

SEQ ID NO: 72173 - protein, 10 aa, Homo sapiens
  Table A; Target 72173; HLA-C*07:06; PRDM7; ENSG00000126856; CTA
EASTSGQHSR

SEQ ID NO: 72174 - protein, 11 aa, Homo sapiens
  Table A; Target 72174; HLA-A*68:01; PRDM7; ENSG00000126856; CTA
EASTSGQHSRL

SEQ ID NO: 72175 - protein, 8 aa, Homo sapiens
  Table A; Target 72175; HLA-B*18:01; PRDM7; ENSG00000126856; CTA
EEAANSGY

SEQ ID NO: 72176 - protein, 8 aa, Homo sapiens
  Table A; Target 72176; HLA-B*44:02; PRDM7; ENSG00000126856; CTA
EEAANSGY

SEQ ID NO: 72177 - protein, 8 aa, Homo sapiens
  Table A; Target 72177; HLA-B*44:03; PRDM7; ENSG00000126856; CTA
EEAANSGY

SEQ ID NO: 72178 - protein, 10 aa, Homo sapiens
  Table A; Target 72178; HLA-A*25:01; PRDM7; ENSG00000126856; CTA
EEAANSGYSW

SEQ ID NO: 72179 - protein, 10 aa, Homo sapiens
  Table A; Target 72179; HLA-B*18:01; PRDM7; ENSG00000126856; CTA
EEAANSGYSW

SEQ ID NO: 72180 - protein, 10 aa, Homo sapiens
  Table A; Target 72180; HLA-B*27:02; PRDM7; ENSG00000126856; CTA
EEAANSGYSW

SEQ ID NO: 72181 - protein, 10 aa, Homo sapiens
  Table A; Target 72181; HLA-C*16:04; PRDM7; ENSG00000126856; CTA
EEAANSGYSW

SEQ ID NO: 72182 - protein, 8 aa, Homo sapiens
  Table A; Target 72182; HLA-B*18:01; PRDM7; ENSG00000126856; CTA
EEQNLVAF

SEQ ID NO: 72183 - protein, 8 aa, Homo sapiens
  Table A; Target 72183; HLA-B*37:01; PRDM7; ENSG00000126856; CTA
EEQNLVAF

SEQ ID NO: 72184 - protein, 8 aa, Homo sapiens
  Table A; Target 72184; HLA-B*44:02; PRDM7; ENSG00000126856; CTA
EEQNLVAF

SEQ ID NO: 72185 - protein, 10 aa, Homo sapiens
  Table A; Target 72185; HLA-A*30:02; PRDM7; ENSG00000126856; CTA
EEQNLVAFQY

SEQ ID NO: 72186 - protein, 10 aa, Homo sapiens
  Table A; Target 72186; HLA-B*18:01; PRDM7; ENSG00000126856; CTA
EEQNLVAFQY

SEQ ID NO: 72187 - protein, 10 aa, Homo sapiens
  Table A; Target 72187; HLA-B*27:02; PRDM7; ENSG00000126856; CTA
EEQNLVAFQY

SEQ ID NO: 72188 - protein, 10 aa, Homo sapiens
  Table A; Target 72188; HLA-B*27:05; PRDM7; ENSG00000126856; CTA
EEQNLVAFQY

SEQ ID NO: 72189 - protein, 10 aa, Homo sapiens
  Table A; Target 72189; HLA-B*44:02; PRDM7; ENSG00000126856; CTA
EEQNLVAFQY

SEQ ID NO: 72190 - protein, 9 aa, Homo sapiens
  Table A; Target 72190; HLA-B*44:02; PRDM7; ENSG00000126856; CTA
EEWAEMGDW

SEQ ID NO: 72191 - protein, 9 aa, Homo sapiens
  Table A; Target 72191; HLA-B*44:03; PRDM7; ENSG00000126856; CTA
EEWAEMGDW

SEQ ID NO: 72192 - protein, 9 aa, Homo sapiens
  Table A; Target 72192; HLA-B*18:01; PRDM7; ENSG00000126856; CTA
EEWTPRQQV

SEQ ID NO: 72193 - protein, 9 aa, Homo sapiens
  Table A; Target 72193; HLA-B*44:02; PRDM7; ENSG00000126856; CTA
EEWTPRQQV

SEQ ID NO: 72194 - protein, 9 aa, Homo sapiens
  Table A; Target 72194; HLA-B*44:03; PRDM7; ENSG00000126856; CTA
EEWTPRQQV

SEQ ID NO: 72195 - protein, 9 aa, Homo sapiens
  Table A; Target 72195; HLA-B*49:01; PRDM7; ENSG00000126856; CTA
EEWTPRQQV

SEQ ID NO: 72196 - protein, 10 aa, Homo sapiens
  Table A; Target 72196; HLA-B*44:02; PRDM7; ENSG00000126856; CTA
EEWTPRQQVK

SEQ ID NO: 72197 - protein, 8 aa, Homo sapiens
  Table A; Target 72197; HLA-B*08:01; PRDM7; ENSG00000126856; CTA
ELGIRSSI

SEQ ID NO: 72198 - protein, 9 aa, Homo sapiens
  Table A; Target 72198; HLA-A*68:02; PRDM7; ENSG00000126856; CTA
ELSGTPNLL

SEQ ID NO: 72199 - protein, 9 aa, Homo sapiens
  Table A; Target 72199; HLA-B*38:01; PRDM7; ENSG00000126856; CTA
ELSGTPNLL

SEQ ID NO: 72200 - protein, 9 aa, Homo sapiens
  Table A; Target 72200; HLA-A*33:01; PRDM7; ENSG00000126856; CTA
EMGDWEKTR

SEQ ID NO: 72201 - protein, 9 aa, Homo sapiens
  Table A; Target 72201; HLA-A*33:03; PRDM7; ENSG00000126856; CTA
EMGDWEKTR

SEQ ID NO: 72202 - protein, 10 aa, Homo sapiens
  Table A; Target 72202; HLA-B*54:01; PRDM7; ENSG00000126856; CTA
ENFSNQRIPA

SEQ ID NO: 72203 - protein, 10 aa, Homo sapiens
  Table A; Target 72203; HLA-B*56:01; PRDM7; ENSG00000126856; CTA
EPAESLGQAV

SEQ ID NO: 72204 - protein, 9 aa, Homo sapiens
  Table A; Target 72204; HLA-B*35:01; PRDM7; ENSG00000126856; CTA
EPQDDDYLY

SEQ ID NO: 72205 - protein, 9 aa, Homo sapiens
  Table A; Target 72205; HLA-B*55:01; PRDM7; ENSG00000126856; CTA
EPQDDDYLY

SEQ ID NO: 72206 - protein, 9 aa, Homo sapiens
  Table A; Target 72206; HLA-C*03:03; PRDM7; ENSG00000126856; CTA
EPQDDDYLY

SEQ ID NO: 72207 - protein, 9 aa, Homo sapiens
  Table A; Target 72207; HLA-B*39:01; PRDM7; ENSG00000126856; CTA
EQAQKPVSP

SEQ ID NO: 72208 - protein, 9 aa, Homo sapiens
  Table A; Target 72208; HLA-A*26:01; PRDM7; ENSG00000126856; CTA
EQNLVAFQY

SEQ ID NO: 72209 - protein, 9 aa, Homo sapiens
  Table A; Target 72209; HLA-A*29:02; PRDM7; ENSG00000126856; CTA
EQNLVAFQY

SEQ ID NO: 72210 - protein, 9 aa, Homo sapiens
  Table A; Target 72210; HLA-A*30:02; PRDM7; ENSG00000126856; CTA
EQNLVAFQY

SEQ ID NO: 72211 - protein, 9 aa, Homo sapiens
  Table A; Target 72211; HLA-A*32:01; PRDM7; ENSG00000126856; CTA
EQNLVAFQY

SEQ ID NO: 72212 - protein, 9 aa, Homo sapiens
  Table A; Target 72212; HLA-B*15:01; PRDM7; ENSG00000126856; CTA
EQNLVAFQY

SEQ ID NO: 72213 - protein, 9 aa, Homo sapiens
  Table A; Target 72213; HLA-B*15:03; PRDM7; ENSG00000126856; CTA
EQNLVAFQY

SEQ ID NO: 72214 - protein, 9 aa, Homo sapiens
  Table A; Target 72214; HLA-B*18:01; PRDM7; ENSG00000126856; CTA
EQNLVAFQY

SEQ ID NO: 72215 - protein, 9 aa, Homo sapiens
  Table A; Target 72215; HLA-B*27:02; PRDM7; ENSG00000126856; CTA
EQNLVAFQY

SEQ ID NO: 72216 - protein, 9 aa, Homo sapiens
  Table A; Target 72216; HLA-B*27:05; PRDM7; ENSG00000126856; CTA
EQNLVAFQY

SEQ ID NO: 72217 - protein, 9 aa, Homo sapiens
  Table A; Target 72217; HLA-B*35:01; PRDM7; ENSG00000126856; CTA
EQNLVAFQY

SEQ ID NO: 72218 - protein, 9 aa, Homo sapiens
  Table A; Target 72218; HLA-B*44:02; PRDM7; ENSG00000126856; CTA
EQNLVAFQY

SEQ ID NO: 72219 - protein, 9 aa, Homo sapiens
  Table A; Target 72219; HLA-B*44:03; PRDM7; ENSG00000126856; CTA
EQNLVAFQY

SEQ ID NO: 72220 - protein, 9 aa, Homo sapiens
  Table A; Target 72220; HLA-C*07:04; PRDM7; ENSG00000126856; CTA
EQNLVAFQY

SEQ ID NO: 72221 - protein, 9 aa, Homo sapiens
  Table A; Target 72221; HLA-C*07:06; PRDM7; ENSG00000126856; CTA
EQNLVAFQY

SEQ ID NO: 72222 - protein, 9 aa, Homo sapiens
  Table A; Target 72222; HLA-C*16:04; PRDM7; ENSG00000126856; CTA
EQNLVAFQY

SEQ ID NO: 72223 - protein, 10 aa, Homo sapiens
  Table A; Target 72223; HLA-A*25:01; PRDM7; ENSG00000126856; CTA
ESLGQAVNCW

SEQ ID NO: 72224 - protein, 10 aa, Homo sapiens
  Table A; Target 72224; HLA-A*26:01; PRDM7; ENSG00000126856; CTA
ESLGQAVNCW

SEQ ID NO: 72225 - protein, 10 aa, Homo sapiens
  Table A; Target 72225; HLA-A*33:01; PRDM7; ENSG00000126856; CTA
ESLGQAVNCW

SEQ ID NO: 72226 - protein, 10 aa, Homo sapiens
  Table A; Target 72226; HLA-A*33:03; PRDM7; ENSG00000126856; CTA
ESLGQAVNCW

SEQ ID NO: 72227 - protein, 10 aa, Homo sapiens
  Table A; Target 72227; HLA-A*68:01; PRDM7; ENSG00000126856; CTA
ESLGQAVNCW

SEQ ID NO: 72228 - protein, 10 aa, Homo sapiens
  Table A; Target 72228; HLA-B*44:02; PRDM7; ENSG00000126856; CTA
ESLGQAVNCW

SEQ ID NO: 72229 - protein, 10 aa, Homo sapiens
  Table A; Target 72229; HLA-B*57:01; PRDM7; ENSG00000126856; CTA
ESLGQAVNCW

SEQ ID NO: 72230 - protein, 10 aa, Homo sapiens
  Table A; Target 72230; HLA-B*58:01; PRDM7; ENSG00000126856; CTA
ESLGQAVNCW

SEQ ID NO: 72231 - protein, 10 aa, Homo sapiens
  Table A; Target 72231; HLA-C*16:04; PRDM7; ENSG00000126856; CTA
ESLGQAVNCW

SEQ ID NO: 72232 - protein, 9 aa, Homo sapiens
  Table A; Target 72232; HLA-A*25:01; PRDM7; ENSG00000126856; CTA
ETEGKMYSL

SEQ ID NO: 72233 - protein, 9 aa, Homo sapiens
  Table A; Target 72233; HLA-A*26:01; PRDM7; ENSG00000126856; CTA
ETEGKMYSL

SEQ ID NO: 72234 - protein, 9 aa, Homo sapiens
  Table A; Target 72234; HLA-A*33:01; PRDM7; ENSG00000126856; CTA
ETEGKMYSL

SEQ ID NO: 72235 - protein, 9 aa, Homo sapiens
  Table A; Target 72235; HLA-A*33:03; PRDM7; ENSG00000126856; CTA
ETEGKMYSL

SEQ ID NO: 72236 - protein, 9 aa, Homo sapiens
  Table A; Target 72236; HLA-A*68:01; PRDM7; ENSG00000126856; CTA
ETEGKMYSL

SEQ ID NO: 72237 - protein, 9 aa, Homo sapiens
  Table A; Target 72237; HLA-A*68:02; PRDM7; ENSG00000126856; CTA
ETEGKMYSL

SEQ ID NO: 72238 - protein, 9 aa, Homo sapiens
  Table A; Target 72238; HLA-B*08:01; PRDM7; ENSG00000126856; CTA
ETEGKMYSL

SEQ ID NO: 72239 - protein, 10 aa, Homo sapiens
  Table A; Target 72239; HLA-A*33:01; PRDM7; ENSG00000126856; CTA
ETEGKMYSLR

SEQ ID NO: 72240 - protein, 10 aa, Homo sapiens
  Table A; Target 72240; HLA-A*33:03; PRDM7; ENSG00000126856; CTA
ETEGKMYSLR

SEQ ID NO: 72241 - protein, 10 aa, Homo sapiens
  Table A; Target 72241; HLA-A*68:01; PRDM7; ENSG00000126856; CTA
ETEGKMYSLR

SEQ ID NO: 72242 - protein, 9 aa, Homo sapiens
  Table A; Target 72242; HLA-A*33:03; PRDM7; ENSG00000126856; CTA
EYGQELGIR

SEQ ID NO: 72243 - protein, 9 aa, Homo sapiens
  Table A; Target 72243; HLA-C*14:02; PRDM7; ENSG00000126856; CTA
FFIDSCAAH

SEQ ID NO: 72244 - protein, 10 aa, Homo sapiens
  Table A; Target 72244; HLA-C*07:02; PRDM7; ENSG00000126856; CTA
FGPYEGRITE

SEQ ID NO: 72245 - protein, 8 aa, Homo sapiens
  Table A; Target 72245; HLA-A*33:01; PRDM7; ENSG00000126856; CTA
FNNESSLR

SEQ ID NO: 72246 - protein, 8 aa, Homo sapiens
  Table A; Target 72246; HLA-A*33:03; PRDM7; ENSG00000126856; CTA
FNNESSLR

SEQ ID NO: 72247 - protein, 8 aa, Homo sapiens
  Table A; Target 72247; HLA-B*13:02; PRDM7; ENSG00000126856; CTA
FQVKNFSV

SEQ ID NO: 72248 - protein, 9 aa, Homo sapiens
  Table A; Target 72248; HLA-A*03:01; PRDM7; ENSG00000126856; CTA
FQYHRQIFY

SEQ ID NO: 72249 - protein, 9 aa, Homo sapiens
  Table A; Target 72249; HLA-A*29:02; PRDM7; ENSG00000126856; CTA
FQYHRQIFY

SEQ ID NO: 72250 - protein, 9 aa, Homo sapiens
  Table A; Target 72250; HLA-C*02:02; PRDM7; ENSG00000126856; CTA
FQYHRQIFY

SEQ ID NO: 72251 - protein, 8 aa, Homo sapiens
  Table A; Target 72251; HLA-C*16:01; PRDM7; ENSG00000126856; CTA
FSNQRIPA

SEQ ID NO: 72252 - protein, 9 aa, Homo sapiens
  Table A; Target 72252; HLA-C*16:01; PRDM7; ENSG00000126856; CTA
FSNQRIPAQ

SEQ ID NO: 72253 - protein, 9 aa, Homo sapiens
  Table A; Target 72253; HLA-A*26:01; PRDM7; ENSG00000126856; CTA
FTKEEWAEM

SEQ ID NO: 72254 - protein, 9 aa, Homo sapiens
  Table A; Target 72254; HLA-B*46:01; PRDM7; ENSG00000126856; CTA
FTKEEWAEM

SEQ ID NO: 72255 - protein, 10 aa, Homo sapiens
  Table A; Target 72255; HLA-A*25:01; PRDM7; ENSG00000126856; CTA
GAASGRKSSW

SEQ ID NO: 72256 - protein, 10 aa, Homo sapiens
  Table A; Target 72256; HLA-A*32:01; PRDM7; ENSG00000126856; CTA
GAASGRKSSW

SEQ ID NO: 72257 - protein, 10 aa, Homo sapiens
  Table A; Target 72257; HLA-B*58:01; PRDM7; ENSG00000126856; CTA
GAASGRKSSW

SEQ ID NO: 72258 - protein, 10 aa, Homo sapiens
  Table A; Target 72258; HLA-C*16:01; PRDM7; ENSG00000126856; CTA
GAASGRKSSW

SEQ ID NO: 72259 - protein, 10 aa, Homo sapiens
  Table A; Target 72259; HLA-C*16:02; PRDM7; ENSG00000126856; CTA
GAASGRKSSW

SEQ ID NO: 72260 - protein, 8 aa, Homo sapiens
  Table A; Target 72260; HLA-B*37:01; PRDM7; ENSG00000126856; CTA
GDWEKTRY

SEQ ID NO: 72261 - protein, 9 aa, Homo sapiens
  Table A; Target 72261; HLA-A*30:01; PRDM7; ENSG00000126856; CTA
GENQSQRSI

SEQ ID NO: 72262 - protein, 9 aa, Homo sapiens
  Table A; Target 72262; HLA-B*13:02; PRDM7; ENSG00000126856; CTA
GENQSQRSI

SEQ ID NO: 72263 - protein, 9 aa, Homo sapiens
  Table A; Target 72263; HLA-B*27:02; PRDM7; ENSG00000126856; CTA
GENQSQRSI

SEQ ID NO: 72264 - protein, 9 aa, Homo sapiens
  Table A; Target 72264; HLA-B*40:01; PRDM7; ENSG00000126856; CTA
GENQSQRSI

SEQ ID NO: 72265 - protein, 9 aa, Homo sapiens
  Table A; Target 72265; HLA-B*44:02; PRDM7; ENSG00000126856; CTA
GENQSQRSI

SEQ ID NO: 72266 - protein, 9 aa, Homo sapiens
  Table A; Target 72266; HLA-B*44:03; PRDM7; ENSG00000126856; CTA
GENQSQRSI

SEQ ID NO: 72267 - protein, 9 aa, Homo sapiens
  Table A; Target 72267; HLA-B*49:01; PRDM7; ENSG00000126856; CTA
GENQSQRSI

SEQ ID NO: 72268 - protein, 9 aa, Homo sapiens
  Table A; Target 72268; HLA-C*16:04; PRDM7; ENSG00000126856; CTA
GENQSQRSI

SEQ ID NO: 72269 - protein, 11 aa, Homo sapiens
  Table A; Target 72269; HLA-B*49:01; PRDM7; ENSG00000126856; CTA
GENQSQRSIHV

SEQ ID NO: 72270 - protein, 10 aa, Homo sapiens
  Table A; Target 72270; HLA-A*25:01; PRDM7; ENSG00000126856; CTA
GIPQAGLGVW

SEQ ID NO: 72271 - protein, 10 aa, Homo sapiens
  Table A; Target 72271; HLA-A*02:03; PRDM7; ENSG00000126856; CTA
GLRATRPAFM

SEQ ID NO: 72272 - protein, 9 aa, Homo sapiens
  Table A; Target 72272; HLA-A*02:03; PRDM7; ENSG00000126856; CTA
GLRIGPSGI

SEQ ID NO: 72273 - protein, 10 aa, Homo sapiens
  Table A; Target 72273; HLA-B*56:01; PRDM7; ENSG00000126856; CTA
GPPTFVKDSA

SEQ ID NO: 72274 - protein, 8 aa, Homo sapiens
  Table A; Target 72274; HLA-B*55:01; PRDM7; ENSG00000126856; CTA
GPSGIPQA

SEQ ID NO: 72275 - protein, 8 aa, Homo sapiens
  Table A; Target 72275; HLA-B*56:01; PRDM7; ENSG00000126856; CTA
GPSGIPQA

SEQ ID NO: 72276 - protein, 10 aa, Homo sapiens
  Table A; Target 72276; HLA-B*07:02; PRDM7; ENSG00000126856; CTA
GPSGIPQAGL

SEQ ID NO: 72277 - protein, 10 aa, Homo sapiens
  Table A; Target 72277; HLA-B*56:01; PRDM7; ENSG00000126856; CTA
GPSGIPQAGL

SEQ ID NO: 72278 - protein, 10 aa, Homo sapiens
  Table A; Target 72278; HLA-C*07:02; PRDM7; ENSG00000126856; CTA
GPSGIPQAGL

SEQ ID NO: 72279 - protein, 9 aa, Homo sapiens
  Table A; Target 72279; HLA-B*07:02; PRDM7; ENSG00000126856; CTA
GPYEGRITE

SEQ ID NO: 72280 - protein, 9 aa, Homo sapiens
  Table A; Target 72280; HLA-B*56:01; PRDM7; ENSG00000126856; CTA
GPYEGRITE

SEQ ID NO: 72281 - protein, 9 aa, Homo sapiens
  Table A; Target 72281; HLA-C*07:02; PRDM7; ENSG00000126856; CTA
GPYEGRITE

SEQ ID NO: 72282 - protein, 10 aa, Homo sapiens
  Table A; Target 72282; HLA-B*13:02; PRDM7; ENSG00000126856; CTA
GQELGIRSSI

SEQ ID NO: 72283 - protein, 9 aa, Homo sapiens
  Table A; Target 72283; HLA-A*03:01; PRDM7; ENSG00000126856; CTA
HAAVMTKPK

SEQ ID NO: 72284 - protein, 9 aa, Homo sapiens
  Table A; Target 72284; HLA-A*68:01; PRDM7; ENSG00000126856; CTA
HAAVMTKPK

SEQ ID NO: 72285 - protein, 9 aa, Homo sapiens
  Table A; Target 72285; HLA-C*07:06; PRDM7; ENSG00000126856; CTA
HAAVMTKPK

SEQ ID NO: 72286 - protein, 10 aa, Homo sapiens
  Table A; Target 72286; HLA-A*33:03; PRDM7; ENSG00000126856; CTA
HLQENFSNQR

SEQ ID NO: 72287 - protein, 10 aa, Homo sapiens
  Table A; Target 72287; HLA-A*68:01; PRDM7; ENSG00000126856; CTA
HLQENFSNQR

SEQ ID NO: 72288 - protein, 10 aa, Homo sapiens
  Table A; Target 72288; HLA-C*07:06; PRDM7; ENSG00000126856; CTA
HLQENFSNQR

SEQ ID NO: 72289 - protein, 9 aa, Homo sapiens
  Table A; Target 72289; HLA-B*07:02; PRDM7; ENSG00000126856; CTA
HPNRSALSL

SEQ ID NO: 72290 - protein, 9 aa, Homo sapiens
  Table A; Target 72290; HLA-B*08:01; PRDM7; ENSG00000126856; CTA
HPNRSALSL

SEQ ID NO: 72291 - protein, 9 aa, Homo sapiens
  Table A; Target 72291; HLA-B*35:01; PRDM7; ENSG00000126856; CTA
HPNRSALSL

SEQ ID NO: 72292 - protein, 9 aa, Homo sapiens
  Table A; Target 72292; HLA-B*35:03; PRDM7; ENSG00000126856; CTA
HPNRSALSL

SEQ ID NO: 72293 - protein, 9 aa, Homo sapiens
  Table A; Target 72293; HLA-B*56:01; PRDM7; ENSG00000126856; CTA
HPNRSALSL

SEQ ID NO: 72294 - protein, 9 aa, Homo sapiens
  Table A; Target 72294; HLA-C*07:02; PRDM7; ENSG00000126856; CTA
HPNRSALSL

SEQ ID NO: 72295 - protein, 10 aa, Homo sapiens
  Table A; Target 72295; HLA-B*15:01; PRDM7; ENSG00000126856; CTA
HQKGMPKASF

SEQ ID NO: 72296 - protein, 8 aa, Homo sapiens
  Table A; Target 72296; HLA-B*08:01; PRDM7; ENSG00000126856; CTA
HSRLKLEL

SEQ ID NO: 72297 - protein, 9 aa, Homo sapiens
  Table A; Target 72297; HLA-A*33:01; PRDM7; ENSG00000126856; CTA
HSRLKLELR

SEQ ID NO: 72298 - protein, 11 aa, Homo sapiens
  Table A; Target 72298; HLA-A*30:01; PRDM7; ENSG00000126856; CTA
IEPAESLGQAV

SEQ ID NO: 72299 - protein, 11 aa, Homo sapiens
  Table A; Target 72299; HLA-B*13:02; PRDM7; ENSG00000126856; CTA
IEPAESLGQAV

SEQ ID NO: 72300 - protein, 11 aa, Homo sapiens
  Table A; Target 72300; HLA-B*40:01; PRDM7; ENSG00000126856; CTA
IEPAESLGQAV

SEQ ID NO: 72301 - protein, 11 aa, Homo sapiens
  Table A; Target 72301; HLA-B*40:02; PRDM7; ENSG00000126856; CTA
IEPAESLGQAV

SEQ ID NO: 72302 - protein, 11 aa, Homo sapiens
  Table A; Target 72302; HLA-B*49:01; PRDM7; ENSG00000126856; CTA
IEPAESLGQAV

SEQ ID NO: 72303 - protein, 8 aa, Homo sapiens
  Table A; Target 72303; HLA-B*08:01; PRDM7; ENSG00000126856; CTA
ILIHAAVM

SEQ ID NO: 72304 - protein, 8 aa, Homo sapiens
  Table A; Target 72304; HLA-B*07:02; PRDM7; ENSG00000126856; CTA
IPAQGIRI

SEQ ID NO: 72305 - protein, 8 aa, Homo sapiens
  Table A; Target 72305; HLA-B*08:01; PRDM7; ENSG00000126856; CTA
IPAQGIRI

SEQ ID NO: 72306 - protein, 8 aa, Homo sapiens
  Table A; Target 72306; HLA-B*51:01; PRDM7; ENSG00000126856; CTA
IPAQGIRI

SEQ ID NO: 72307 - protein, 8 aa, Homo sapiens
  Table A; Target 72307; HLA-B*54:01; PRDM7; ENSG00000126856; CTA
IPAQGIRI

SEQ ID NO: 72308 - protein, 8 aa, Homo sapiens
  Table A; Target 72308; HLA-B*56:01; PRDM7; ENSG00000126856; CTA
IPAQGIRI

SEQ ID NO: 72309 - protein, 8 aa, Homo sapiens
  Table A; Target 72309; HLA-C*07:02; PRDM7; ENSG00000126856; CTA
IPAQGIRI

SEQ ID NO: 72310 - protein, 8 aa, Homo sapiens
  Table A; Target 72310; HLA-B*51:01; PRDM7; ENSG00000126856; CTA
IPQAGLGV

SEQ ID NO: 72311 - protein, 9 aa, Homo sapiens
  Table A; Target 72311; HLA-A*01:01; PRDM7; ENSG00000126856; CTA
ISEPQDDDY

SEQ ID NO: 72312 - protein, 11 aa, Homo sapiens
  Table A; Target 72312; HLA-A*01:01; PRDM7; ENSG00000126856; CTA
ISEPQDDDYLY

SEQ ID NO: 72313 - protein, 11 aa, Homo sapiens
  Table A; Target 72313; HLA-B*57:01; PRDM7; ENSG00000126856; CTA
ISEPQDDDYLY

SEQ ID NO: 72314 - protein, 11 aa, Homo sapiens
  Table A; Target 72314; HLA-B*58:01; PRDM7; ENSG00000126856; CTA
ISEPQDDDYLY

SEQ ID NO: 72315 - protein, 10 aa, Homo sapiens
  Table A; Target 72315; HLA-B*57:01; PRDM7; ENSG00000126856; CTA
ISIYFTKEEW

SEQ ID NO: 72316 - protein, 9 aa, Homo sapiens
  Table A; Target 72316; HLA-A*31:01; PRDM7; ENSG00000126856; CTA
ITVGLRATR

SEQ ID NO: 72317 - protein, 9 aa, Homo sapiens
  Table A; Target 72317; HLA-A*33:03; PRDM7; ENSG00000126856; CTA
ITVGLRATR

SEQ ID NO: 72318 - protein, 9 aa, Homo sapiens
  Table A; Target 72318; HLA-A*68:01; PRDM7; ENSG00000126856; CTA
ITVGLRATR

SEQ ID NO: 72319 - protein, 9 aa, Homo sapiens
  Table A; Target 72319; HLA-B*57:01; PRDM7; ENSG00000126856; CTA
ITVGLRATR

SEQ ID NO: 72320 - protein, 8 aa, Homo sapiens
  Table A; Target 72320; HLA-A*24:02; PRDM7; ENSG00000126856; CTA
IYFTKEEW

SEQ ID NO: 72321 - protein, 8 aa, Homo sapiens
  Table A; Target 72321; HLA-B*57:01; PRDM7; ENSG00000126856; CTA
IYFTKEEW

SEQ ID NO: 72322 - protein, 11 aa, Homo sapiens
  Table A; Target 72322; HLA-A*30:02; PRDM7; ENSG00000126856; CTA
KEISEPQDDDY

SEQ ID NO: 72323 - protein, 8 aa, Homo sapiens
  Table A; Target 72323; HLA-B*18:01; PRDM7; ENSG00000126856; CTA
KETEGKMY

SEQ ID NO: 72324 - protein, 8 aa, Homo sapiens
  Table A; Target 72324; HLA-B*37:01; PRDM7; ENSG00000126856; CTA
KETEGKMY

SEQ ID NO: 72325 - protein, 8 aa, Homo sapiens
  Table A; Target 72325; HLA-B*44:02; PRDM7; ENSG00000126856; CTA
KETEGKMY

SEQ ID NO: 72326 - protein, 8 aa, Homo sapiens
  Table A; Target 72326; HLA-B*44:03; PRDM7; ENSG00000126856; CTA
KETEGKMY

SEQ ID NO: 72327 - protein, 8 aa, Homo sapiens
  Table A; Target 72327; HLA-C*16:02; PRDM7; ENSG00000126856; CTA
KETEGKMY

SEQ ID NO: 72328 - protein, 10 aa, Homo sapiens
  Table A; Target 72328; HLA-A*30:01; PRDM7; ENSG00000126856; CTA
KETEGKMYSL

SEQ ID NO: 72329 - protein, 10 aa, Homo sapiens
  Table A; Target 72329; HLA-B*40:01; PRDM7; ENSG00000126856; CTA
KETEGKMYSL

SEQ ID NO: 72330 - protein, 10 aa, Homo sapiens
  Table A; Target 72330; HLA-B*40:02; PRDM7; ENSG00000126856; CTA
KETEGKMYSL

SEQ ID NO: 72331 - protein, 10 aa, Homo sapiens
  Table A; Target 72331; HLA-B*44:02; PRDM7; ENSG00000126856; CTA
KETEGKMYSL

SEQ ID NO: 72332 - protein, 10 aa, Homo sapiens
  Table A; Target 72332; HLA-B*44:03; PRDM7; ENSG00000126856; CTA
KETEGKMYSL

SEQ ID NO: 72333 - protein, 10 aa, Homo sapiens
  Table A; Target 72333; HLA-B*49:01; PRDM7; ENSG00000126856; CTA
KETEGKMYSL

SEQ ID NO: 72334 - protein, 9 aa, Homo sapiens
  Table A; Target 72334; HLA-A*32:01; PRDM7; ENSG00000126856; CTA
KGHPNRSAL

SEQ ID NO: 72335 - protein, 9 aa, Homo sapiens
  Table A; Target 72335; HLA-B*07:02; PRDM7; ENSG00000126856; CTA
KGHPNRSAL

SEQ ID NO: 72336 - protein, 8 aa, Homo sapiens
  Table A; Target 72336; HLA-A*32:01; PRDM7; ENSG00000126856; CTA
KGMPKASF

SEQ ID NO: 72337 - protein, 8 aa, Homo sapiens
  Table A; Target 72337; HLA-B*08:01; PRDM7; ENSG00000126856; CTA
KGMPKASF

SEQ ID NO: 72338 - protein, 8 aa, Homo sapiens
  Table A; Target 72338; HLA-B*37:01; PRDM7; ENSG00000126856; CTA
KGMPKASF

SEQ ID NO: 72339 - protein, 8 aa, Homo sapiens
  Table A; Target 72339; HLA-C*16:01; PRDM7; ENSG00000126856; CTA
KGMPKASF

SEQ ID NO: 72340 - protein, 10 aa, Homo sapiens
  Table A; Target 72340; HLA-A*02:01; PRDM7; ENSG00000126856; CTA
KMNYNALITV

SEQ ID NO: 72341 - protein, 10 aa, Homo sapiens
  Table A; Target 72341; HLA-A*02:03; PRDM7; ENSG00000126856; CTA
KMNYNALITV

SEQ ID NO: 72342 - protein, 10 aa, Homo sapiens
  Table A; Target 72342; HLA-A*02:04; PRDM7; ENSG00000126856; CTA
KMNYNALITV

SEQ ID NO: 72343 - protein, 10 aa, Homo sapiens
  Table A; Target 72343; HLA-A*02:07; PRDM7; ENSG00000126856; CTA
KMNYNALITV

SEQ ID NO: 72344 - protein, 8 aa, Homo sapiens
  Table A; Target 72344; HLA-B*07:02; PRDM7; ENSG00000126856; CTA
KPMVKDAF

SEQ ID NO: 72345 - protein, 8 aa, Homo sapiens
  Table A; Target 72345; HLA-B*08:01; PRDM7; ENSG00000126856; CTA
KPMVKDAF

SEQ ID NO: 72346 - protein, 8 aa, Homo sapiens
  Table A; Target 72346; HLA-C*07:02; PRDM7; ENSG00000126856; CTA
KPMVKDAF

SEQ ID NO: 72347 - protein, 8 aa, Homo sapiens
  Table A; Target 72347; HLA-C*16:01; PRDM7; ENSG00000126856; CTA
KPMVKDAF

SEQ ID NO: 72348 - protein, 9 aa, Homo sapiens
  Table A; Target 72348; HLA-B*07:02; PRDM7; ENSG00000126856; CTA
KPVSPPGEA

SEQ ID NO: 72349 - protein, 9 aa, Homo sapiens
  Table A; Target 72349; HLA-B*54:01; PRDM7; ENSG00000126856; CTA
KPVSPPGEA

SEQ ID NO: 72350 - protein, 9 aa, Homo sapiens
  Table A; Target 72350; HLA-B*55:01; PRDM7; ENSG00000126856; CTA
KPVSPPGEA

SEQ ID NO: 72351 - protein, 9 aa, Homo sapiens
  Table A; Target 72351; HLA-B*56:01; PRDM7; ENSG00000126856; CTA
KPVSPPGEA

SEQ ID NO: 72352 - protein, 9 aa, Homo sapiens
  Table A; Target 72352; HLA-C*07:02; PRDM7; ENSG00000126856; CTA
KPVSPPGEA

SEQ ID NO: 72353 - protein, 10 aa, Homo sapiens
  Table A; Target 72353; HLA-B*07:02; PRDM7; ENSG00000126856; CTA
KPVSPPGEAS

SEQ ID NO: 72354 - protein, 10 aa, Homo sapiens
  Table A; Target 72354; HLA-B*56:01; PRDM7; ENSG00000126856; CTA
KPVSPPGEAS

SEQ ID NO: 72355 - protein, 11 aa, Homo sapiens
  Table A; Target 72355; HLA-B*56:01; PRDM7; ENSG00000126856; CTA
KPVSPPGEAST

SEQ ID NO: 72356 - protein, 9 aa, Homo sapiens
  Table A; Target 72356; HLA-A*01:01; PRDM7; ENSG00000126856; CTA
KSSANWMRY

SEQ ID NO: 72357 - protein, 9 aa, Homo sapiens
  Table A; Target 72357; HLA-A*03:01; PRDM7; ENSG00000126856; CTA
LIHAAVMTK

SEQ ID NO: 72358 - protein, 9 aa, Homo sapiens
  Table A; Target 72358; HLA-A*03:02; PRDM7; ENSG00000126856; CTA
LIHAAVMTK

SEQ ID NO: 72359 - protein, 9 aa, Homo sapiens
  Table A; Target 72359; HLA-A*01:01; PRDM7; ENSG00000126856; CTA
LLVWSGDEY

SEQ ID NO: 72360 - protein, 9 aa, Homo sapiens
  Table A; Target 72360; HLA-A*29:02; PRDM7; ENSG00000126856; CTA
LLVWSGDEY

SEQ ID NO: 72361 - protein, 9 aa, Homo sapiens
  Table A; Target 72361; HLA-B*15:01; PRDM7; ENSG00000126856; CTA
LLVWSGDEY

SEQ ID NO: 72362 - protein, 9 aa, Homo sapiens
  Table A; Target 72362; HLA-B*15:03; PRDM7; ENSG00000126856; CTA
LLVWSGDEY

SEQ ID NO: 72363 - protein, 9 aa, Homo sapiens
  Table A; Target 72363; HLA-B*46:01; PRDM7; ENSG00000126856; CTA
LLVWSGDEY

SEQ ID NO: 72364 - protein, 9 aa, Homo sapiens
  Table A; Target 72364; HLA-B*54:01; PRDM7; ENSG00000126856; CTA
LPLGLHFGP

SEQ ID NO: 72365 - protein, 9 aa, Homo sapiens
  Table A; Target 72365; HLA-B*51:01; PRDM7; ENSG00000126856; CTA
LSLPPGLRI

SEQ ID NO: 72366 - protein, 9 aa, Homo sapiens
  Table A; Target 72366; HLA-B*57:01; PRDM7; ENSG00000126856; CTA
LSLPPGLRI

SEQ ID NO: 72367 - protein, 9 aa, Homo sapiens
  Table A; Target 72367; HLA-A*01:01; PRDM7; ENSG00000126856; CTA
MGDWEKTRY

SEQ ID NO: 72368 - protein, 9 aa, Homo sapiens
  Table A; Target 72368; HLA-B*57:01; PRDM7; ENSG00000126856; CTA
MGMSMARNW

SEQ ID NO: 72369 - protein, 9 aa, Homo sapiens
  Table A; Target 72369; HLA-A*68:02; PRDM7; ENSG00000126856; CTA
MNYNALITV

SEQ ID NO: 72370 - protein, 9 aa, Homo sapiens
  Table A; Target 72370; HLA-B*49:01; PRDM7; ENSG00000126856; CTA
MNYNALITV

SEQ ID NO: 72371 - protein, 9 aa, Homo sapiens
  Table A; Target 72371; HLA-B*51:01; PRDM7; ENSG00000126856; CTA
MNYNALITV

SEQ ID NO: 72372 - protein, 9 aa, Homo sapiens
  Table A; Target 72372; HLA-B*54:01; PRDM7; ENSG00000126856; CTA
MNYNALITV

SEQ ID NO: 72373 - protein, 9 aa, Homo sapiens
  Table A; Target 72373; HLA-B*56:01; PRDM7; ENSG00000126856; CTA
MNYNALITV

SEQ ID NO: 72374 - protein, 10 aa, Homo sapiens
  Table A; Target 72374; HLA-B*54:01; PRDM7; ENSG00000126856; CTA
MPKASFNNES

SEQ ID NO: 72375 - protein, 8 aa, Homo sapiens
  Table A; Target 72375; HLA-A*33:03; PRDM7; ENSG00000126856; CTA
MTKPKVKR

SEQ ID NO: 72376 - protein, 8 aa, Homo sapiens
  Table A; Target 72376; HLA-B*08:01; PRDM7; ENSG00000126856; CTA
NALITVGL

SEQ ID NO: 72377 - protein, 8 aa, Homo sapiens
  Table A; Target 72377; HLA-B*51:01; PRDM7; ENSG00000126856; CTA
NALITVGL

SEQ ID NO: 72378 - protein, 8 aa, Homo sapiens
  Table A; Target 72378; HLA-C*07:04; PRDM7; ENSG00000126856; CTA
NALITVGL

SEQ ID NO: 72379 - protein, 9 aa, Homo sapiens
  Table A; Target 72379; HLA-A*33:01; PRDM7; ENSG00000126856; CTA
NALITVGLR

SEQ ID NO: 72380 - protein, 9 aa, Homo sapiens
  Table A; Target 72380; HLA-A*33:03; PRDM7; ENSG00000126856; CTA
NALITVGLR

SEQ ID NO: 72381 - protein, 9 aa, Homo sapiens
  Table A; Target 72381; HLA-A*68:01; PRDM7; ENSG00000126856; CTA
NALITVGLR

SEQ ID NO: 72382 - protein, 9 aa, Homo sapiens
  Table A; Target 72382; HLA-C*07:06; PRDM7; ENSG00000126856; CTA
NALITVGLR

SEQ ID NO: 72383 - protein, 10 aa, Homo sapiens
  Table A; Target 72383; HLA-B*54:01; PRDM7; ENSG00000126856; CTA
NALITVGLRA

SEQ ID NO: 72384 - protein, 10 aa, Homo sapiens
  Table A; Target 72384; HLA-A*30:01; PRDM7; ENSG00000126856; CTA
NEASDLPLGL

SEQ ID NO: 72385 - protein, 10 aa, Homo sapiens
  Table A; Target 72385; HLA-B*18:01; PRDM7; ENSG00000126856; CTA
NEASDLPLGL

SEQ ID NO: 72386 - protein, 10 aa, Homo sapiens
  Table A; Target 72386; HLA-B*40:01; PRDM7; ENSG00000126856; CTA
NEASDLPLGL

SEQ ID NO: 72387 - protein, 10 aa, Homo sapiens
  Table A; Target 72387; HLA-B*44:02; PRDM7; ENSG00000126856; CTA
NEASDLPLGL

SEQ ID NO: 72388 - protein, 10 aa, Homo sapiens
  Table A; Target 72388; HLA-B*44:03; PRDM7; ENSG00000126856; CTA
NEASDLPLGL

SEQ ID NO: 72389 - protein, 8 aa, Homo sapiens
  Table A; Target 72389; HLA-B*18:01; PRDM7; ENSG00000126856; CTA
NESSLREL

SEQ ID NO: 72390 - protein, 8 aa, Homo sapiens
  Table A; Target 72390; HLA-B*37:01; PRDM7; ENSG00000126856; CTA
NESSLREL

SEQ ID NO: 72391 - protein, 8 aa, Homo sapiens
  Table A; Target 72391; HLA-B*44:02; PRDM7; ENSG00000126856; CTA
NESSLREL

SEQ ID NO: 72392 - protein, 8 aa, Homo sapiens
  Table A; Target 72392; HLA-B*44:03; PRDM7; ENSG00000126856; CTA
NESSLREL

SEQ ID NO: 72393 - protein, 9 aa, Homo sapiens
  Table A; Target 72393; HLA-C*16:01; PRDM7; ENSG00000126856; CTA
NFSNQRIPA

SEQ ID NO: 72394 - protein, 8 aa, Homo sapiens
  Table A; Target 72394; HLA-B*08:01; PRDM7; ENSG00000126856; CTA
NILIHAAV

SEQ ID NO: 72395 - protein, 9 aa, Homo sapiens
  Table A; Target 72395; HLA-A*02:01; PRDM7; ENSG00000126856; CTA
NMWNAITPL

SEQ ID NO: 72396 - protein, 9 aa, Homo sapiens
  Table A; Target 72396; HLA-A*02:04; PRDM7; ENSG00000126856; CTA
NMWNAITPL

SEQ ID NO: 72397 - protein, 9 aa, Homo sapiens
  Table A; Target 72397; HLA-A*02:07; PRDM7; ENSG00000126856; CTA
NMWNAITPL

SEQ ID NO: 72398 - protein, 9 aa, Homo sapiens
  Table A; Target 72398; HLA-B*13:02; PRDM7; ENSG00000126856; CTA
NQRIPAQGI

SEQ ID NO: 72399 - protein, 9 aa, Homo sapiens
  Table A; Target 72399; HLA-B*15:03; PRDM7; ENSG00000126856; CTA
NQRIPAQGI

SEQ ID NO: 72400 - protein, 9 aa, Homo sapiens
  Table A; Target 72400; HLA-C*06:02; PRDM7; ENSG00000126856; CTA
NQRIPAQGI

SEQ ID NO: 72401 - protein, 9 aa, Homo sapiens
  Table A; Target 72401; HLA-B*37:01; PRDM7; ENSG00000126856; CTA
NQSQRSIHV

SEQ ID NO: 72402 - protein, 10 aa, Homo sapiens
  Table A; Target 72402; HLA-A*68:01; PRDM7; ENSG00000126856; CTA
NTSDSEQAQK

SEQ ID NO: 72403 - protein, 10 aa, Homo sapiens
  Table A; Target 72403; HLA-C*07:06; PRDM7; ENSG00000126856; CTA
NTSDSEQAQK

SEQ ID NO: 72404 - protein, 9 aa, Homo sapiens
  Table A; Target 72404; HLA-A*25:01; PRDM7; ENSG00000126856; CTA
NVKMNYNAL

SEQ ID NO: 72405 - protein, 9 aa, Homo sapiens
  Table A; Target 72405; HLA-B*07:02; PRDM7; ENSG00000126856; CTA
NVKMNYNAL

SEQ ID NO: 72406 - protein, 9 aa, Homo sapiens
  Table A; Target 72406; HLA-B*08:01; PRDM7; ENSG00000126856; CTA
NVKMNYNAL

SEQ ID NO: 72407 - protein, 9 aa, Homo sapiens
  Table A; Target 72407; HLA-C*01:02; PRDM7; ENSG00000126856; CTA
NVKMNYNAL

SEQ ID NO: 72408 - protein, 9 aa, Homo sapiens
  Table A; Target 72408; HLA-C*14:02; PRDM7; ENSG00000126856; CTA
NVKMNYNAL

SEQ ID NO: 72409 - protein, 8 aa, Homo sapiens
  Table A; Target 72409; HLA-C*14:02; PRDM7; ENSG00000126856; CTA
NYNALITV

SEQ ID NO: 72410 - protein, 9 aa, Homo sapiens
  Table A; Target 72410; HLA-A*33:03; PRDM7; ENSG00000126856; CTA
NYNALITVG

SEQ ID NO: 72411 - protein, 9 aa, Homo sapiens
  Table A; Target 72411; HLA-C*14:02; PRDM7; ENSG00000126856; CTA
NYNALITVG

SEQ ID NO: 72412 - protein, 10 aa, Homo sapiens
  Table A; Target 72412; HLA-A*23:01; PRDM7; ENSG00000126856; CTA
NYNALITVGL

SEQ ID NO: 72413 - protein, 10 aa, Homo sapiens
  Table A; Target 72413; HLA-A*24:02; PRDM7; ENSG00000126856; CTA
NYNALITVGL

SEQ ID NO: 72414 - protein, 10 aa, Homo sapiens
  Table A; Target 72414; HLA-C*14:02; PRDM7; ENSG00000126856; CTA
NYNALITVGL

SEQ ID NO: 72415 - protein, 9 aa, Homo sapiens
  Table A; Target 72415; HLA-B*56:01; PRDM7; ENSG00000126856; CTA
PPTFVKDSA

SEQ ID NO: 72416 - protein, 9 aa, Homo sapiens
  Table A; Target 72416; HLA-C*07:04; PRDM7; ENSG00000126856; CTA
QAQKPVSPP

SEQ ID NO: 72417 - protein, 8 aa, Homo sapiens
  Table A; Target 72417; HLA-B*37:01; PRDM7; ENSG00000126856; CTA
QDHLQENF

SEQ ID NO: 72418 - protein, 8 aa, Homo sapiens
  Table A; Target 72418; HLA-C*07:01; PRDM7; ENSG00000126856; CTA
QDHLQENF

SEQ ID NO: 72419 - protein, 9 aa, Homo sapiens
  Table A; Target 72419; HLA-A*30:01; PRDM7; ENSG00000126856; CTA
QELGIRSSI

SEQ ID NO: 72420 - protein, 9 aa, Homo sapiens
  Table A; Target 72420; HLA-B*40:01; PRDM7; ENSG00000126856; CTA
QELGIRSSI

SEQ ID NO: 72421 - protein, 9 aa, Homo sapiens
  Table A; Target 72421; HLA-B*44:02; PRDM7; ENSG00000126856; CTA
QELGIRSSI

SEQ ID NO: 72422 - protein, 9 aa, Homo sapiens
  Table A; Target 72422; HLA-B*44:03; PRDM7; ENSG00000126856; CTA
QELGIRSSI

SEQ ID NO: 72423 - protein, 9 aa, Homo sapiens
  Table A; Target 72423; HLA-B*49:01; PRDM7; ENSG00000126856; CTA
QELGIRSSI

SEQ ID NO: 72424 - protein, 9 aa, Homo sapiens
  Table A; Target 72424; HLA-A*30:01; PRDM7; ENSG00000126856; CTA
QENFSNQRI

SEQ ID NO: 72425 - protein, 9 aa, Homo sapiens
  Table A; Target 72425; HLA-B*13:02; PRDM7; ENSG00000126856; CTA
QENFSNQRI

SEQ ID NO: 72426 - protein, 9 aa, Homo sapiens
  Table A; Target 72426; HLA-B*40:01; PRDM7; ENSG00000126856; CTA
QENFSNQRI

SEQ ID NO: 72427 - protein, 9 aa, Homo sapiens
  Table A; Target 72427; HLA-B*44:02; PRDM7; ENSG00000126856; CTA
QENFSNQRI

SEQ ID NO: 72428 - protein, 9 aa, Homo sapiens
  Table A; Target 72428; HLA-B*44:03; PRDM7; ENSG00000126856; CTA
QENFSNQRI

SEQ ID NO: 72429 - protein, 9 aa, Homo sapiens
  Table A; Target 72429; HLA-B*49:01; PRDM7; ENSG00000126856; CTA
QENFSNQRI

SEQ ID NO: 72430 - protein, 9 aa, Homo sapiens
  Table A; Target 72430; HLA-C*16:04; PRDM7; ENSG00000126856; CTA
QENFSNQRI

SEQ ID NO: 72431 - protein, 10 aa, Homo sapiens
  Table A; Target 72431; HLA-C*16:02; PRDM7; ENSG00000126856; CTA
QGENQSQRSI

SEQ ID NO: 72432 - protein, 9 aa, Homo sapiens
  Table A; Target 72432; HLA-B*15:03; PRDM7; ENSG00000126856; CTA
QKGMPKASF

SEQ ID NO: 72433 - protein, 8 aa, Homo sapiens
  Table A; Target 72433; HLA-A*29:02; PRDM7; ENSG00000126856; CTA
QNLVAFQY

SEQ ID NO: 72434 - protein, 8 aa, Homo sapiens
  Table A; Target 72434; HLA-B*18:01; PRDM7; ENSG00000126856; CTA
QNLVAFQY

SEQ ID NO: 72435 - protein, 9 aa, Homo sapiens
  Table A; Target 72435; HLA-B*27:05; PRDM7; ENSG00000126856; CTA
QRIPAQGIR

SEQ ID NO: 72436 - protein, 9 aa, Homo sapiens
  Table A; Target 72436; HLA-A*33:03; PRDM7; ENSG00000126856; CTA
QVKNFSVNM

SEQ ID NO: 72437 - protein, 10 aa, Homo sapiens
  Table A; Target 72437; HLA-A*25:01; PRDM7; ENSG00000126856; CTA
QVKNFSVNMW

SEQ ID NO: 72438 - protein, 10 aa, Homo sapiens
  Table A; Target 72438; HLA-B*57:01; PRDM7; ENSG00000126856; CTA
QVKNFSVNMW

SEQ ID NO: 72439 - protein, 9 aa, Homo sapiens
  Table A; Target 72439; HLA-A*25:01; PRDM7; ENSG00000126856; CTA
QVKPPWMAF

SEQ ID NO: 72440 - protein, 9 aa, Homo sapiens
  Table A; Target 72440; HLA-A*31:01; PRDM7; ENSG00000126856; CTA
QVKPPWMAF

SEQ ID NO: 72441 - protein, 9 aa, Homo sapiens
  Table A; Target 72441; HLA-B*57:01; PRDM7; ENSG00000126856; CTA
QVKPPWMAF

SEQ ID NO: 72442 - protein, 10 aa, Homo sapiens
  Table A; Target 72442; HLA-A*31:01; PRDM7; ENSG00000126856; CTA
QVKPPWMAFR

SEQ ID NO: 72443 - protein, 9 aa, Homo sapiens
  Table A; Target 72443; HLA-A*31:01; PRDM7; ENSG00000126856; CTA
QYHRQIFYR

SEQ ID NO: 72444 - protein, 9 aa, Homo sapiens
  Table A; Target 72444; HLA-A*33:01; PRDM7; ENSG00000126856; CTA
QYHRQIFYR

SEQ ID NO: 72445 - protein, 9 aa, Homo sapiens
  Table A; Target 72445; HLA-A*30:01; PRDM7; ENSG00000126856; CTA
RELSGTPNL

SEQ ID NO: 72446 - protein, 9 aa, Homo sapiens
  Table A; Target 72446; HLA-B*37:01; PRDM7; ENSG00000126856; CTA
RELSGTPNL

SEQ ID NO: 72447 - protein, 9 aa, Homo sapiens
  Table A; Target 72447; HLA-B*40:01; PRDM7; ENSG00000126856; CTA
RELSGTPNL

SEQ ID NO: 72448 - protein, 9 aa, Homo sapiens
  Table A; Target 72448; HLA-B*40:02; PRDM7; ENSG00000126856; CTA
RELSGTPNL

SEQ ID NO: 72449 - protein, 9 aa, Homo sapiens
  Table A; Target 72449; HLA-B*44:02; PRDM7; ENSG00000126856; CTA
RELSGTPNL

SEQ ID NO: 72450 - protein, 9 aa, Homo sapiens
  Table A; Target 72450; HLA-B*44:03; PRDM7; ENSG00000126856; CTA
RELSGTPNL

SEQ ID NO: 72451 - protein, 9 aa, Homo sapiens
  Table A; Target 72451; HLA-B*49:01; PRDM7; ENSG00000126856; CTA
RELSGTPNL

SEQ ID NO: 72452 - protein, 10 aa, Homo sapiens
  Table A; Target 72452; HLA-A*30:01; PRDM7; ENSG00000126856; CTA
RELSGTPNLL

SEQ ID NO: 72453 - protein, 10 aa, Homo sapiens
  Table A; Target 72453; HLA-B*40:01; PRDM7; ENSG00000126856; CTA
RELSGTPNLL

SEQ ID NO: 72454 - protein, 10 aa, Homo sapiens
  Table A; Target 72454; HLA-A*02:01; PRDM7; ENSG00000126856; CTA
RIGPSGIPQA

SEQ ID NO: 72455 - protein, 9 aa, Homo sapiens
  Table A; Target 72455; HLA-A*02:07; PRDM7; ENSG00000126856; CTA
RIPAQGIRI

SEQ ID NO: 72456 - protein, 10 aa, Homo sapiens
  Table A; Target 72456; HLA-A*03:01; PRDM7; ENSG00000126856; CTA
RIRSGNILIH

SEQ ID NO: 72457 - protein, 10 aa, Homo sapiens
  Table A; Target 72457; HLA-B*57:01; PRDM7; ENSG00000126856; CTA
RSIHVPHAVW

SEQ ID NO: 72458 - protein, 9 aa, Homo sapiens
  Table A; Target 72458; HLA-A*03:01; PRDM7; ENSG00000126856; CTA
RTERKPMVK

SEQ ID NO: 72459 - protein, 11 aa, Homo sapiens
  Table A; Target 72459; HLA-B*57:01; PRDM7; ENSG00000126856; CTA
RTSQDHLQENF

SEQ ID NO: 72460 - protein, 9 aa, Homo sapiens
  Table A; Target 72460; HLA-C*03:03; PRDM7; ENSG00000126856; CTA
RVIRPGCEL

SEQ ID NO: 72461 - protein, 9 aa, Homo sapiens
  Table A; Target 72461; HLA-C*03:04; PRDM7; ENSG00000126856; CTA
RVIRPGCEL

SEQ ID NO: 72462 - protein, 9 aa, Homo sapiens
  Table A; Target 72462; HLA-A*02:01; PRDM7; ENSG00000126856; CTA
SALSLPPGL

SEQ ID NO: 72463 - protein, 9 aa, Homo sapiens
  Table A; Target 72463; HLA-A*02:04; PRDM7; ENSG00000126856; CTA
SALSLPPGL

SEQ ID NO: 72464 - protein, 10 aa, Homo sapiens
  Table A; Target 72464; HLA-A*33:01; PRDM7; ENSG00000126856; CTA
SAVDKGHPNR

SEQ ID NO: 72465 - protein, 10 aa, Homo sapiens
  Table A; Target 72465; HLA-A*68:01; PRDM7; ENSG00000126856; CTA
SAVDKGHPNR

SEQ ID NO: 72466 - protein, 10 aa, Homo sapiens
  Table A; Target 72466; HLA-C*07:06; PRDM7; ENSG00000126856; CTA
SAVDKGHPNR

SEQ ID NO: 72467 - protein, 9 aa, Homo sapiens
  Table A; Target 72467; HLA-B*37:01; PRDM7; ENSG00000126856; CTA
SDLPLGLHF

SEQ ID NO: 72468 - protein, 9 aa, Homo sapiens
  Table A; Target 72468; HLA-B*44:02; PRDM7; ENSG00000126856; CTA
SDLPLGLHF

SEQ ID NO: 72469 - protein, 9 aa, Homo sapiens
  Table A; Target 72469; HLA-B*44:03; PRDM7; ENSG00000126856; CTA
SDLPLGLHF

SEQ ID NO: 72470 - protein, 9 aa, Homo sapiens
  Table A; Target 72470; HLA-B*40:01; PRDM7; ENSG00000126856; CTA
SEPQDDDYL

SEQ ID NO: 72471 - protein, 8 aa, Homo sapiens
  Table A; Target 72471; HLA-C*01:02; PRDM7; ENSG00000126856; CTA
SFNNESSL

SEQ ID NO: 72472 - protein, 8 aa, Homo sapiens
  Table A; Target 72472; HLA-C*14:02; PRDM7; ENSG00000126856; CTA
SFNNESSL

SEQ ID NO: 72473 - protein, 9 aa, Homo sapiens
  Table A; Target 72473; HLA-A*31:01; PRDM7; ENSG00000126856; CTA
SFNNESSLR

SEQ ID NO: 72474 - protein, 9 aa, Homo sapiens
  Table A; Target 72474; HLA-A*33:01; PRDM7; ENSG00000126856; CTA
SFNNESSLR

SEQ ID NO: 72475 - protein, 9 aa, Homo sapiens
  Table A; Target 72475; HLA-A*33:03; PRDM7; ENSG00000126856; CTA
SFNNESSLR

SEQ ID NO: 72476 - protein, 9 aa, Homo sapiens
  Table A; Target 72476; HLA-C*07:06; PRDM7; ENSG00000126856; CTA
SFNNESSLR

SEQ ID NO: 72477 - protein, 11 aa, Homo sapiens
  Table A; Target 72477; HLA-A*32:01; PRDM7; ENSG00000126856; CTA
SGAASGRKSSW

SEQ ID NO: 72478 - protein, 11 aa, Homo sapiens
  Table A; Target 72478; HLA-C*16:01; PRDM7; ENSG00000126856; CTA
SGAASGRKSSW

SEQ ID NO: 72479 - protein, 9 aa, Homo sapiens
  Table A; Target 72479; HLA-B*35:03; PRDM7; ENSG00000126856; CTA
SGDEYGQEL

SEQ ID NO: 72480 - protein, 9 aa, Homo sapiens
  Table A; Target 72480; HLA-B*38:01; PRDM7; ENSG00000126856; CTA
SGDEYGQEL

SEQ ID NO: 72481 - protein, 9 aa, Homo sapiens
  Table A; Target 72481; HLA-B*39:01; PRDM7; ENSG00000126856; CTA
SGDEYGQEL

SEQ ID NO: 72482 - protein, 9 aa, Homo sapiens
  Table A; Target 72482; HLA-C*03:04; PRDM7; ENSG00000126856; CTA
SGDEYGQEL

SEQ ID NO: 72483 - protein, 9 aa, Homo sapiens
  Table A; Target 72483; HLA-C*05:01; PRDM7; ENSG00000126856; CTA
SGDEYGQEL

SEQ ID NO: 72484 - protein, 11 aa, Homo sapiens
  Table A; Target 72484; HLA-B*57:01; PRDM7; ENSG00000126856; CTA
SGIPQAGLGVW

SEQ ID NO: 72485 - protein, 9 aa, Homo sapiens
  Table A; Target 72485; HLA-A*11:01; PRDM7; ENSG00000126856; CTA
SGMGMSMAR

SEQ ID NO: 72486 - protein, 9 aa, Homo sapiens
  Table A; Target 72486; HLA-A*31:01; PRDM7; ENSG00000126856; CTA
SGMGMSMAR

SEQ ID NO: 72487 - protein, 9 aa, Homo sapiens
  Table A; Target 72487; HLA-A*33:03; PRDM7; ENSG00000126856; CTA
SGMGMSMAR

SEQ ID NO: 72488 - protein, 9 aa, Homo sapiens
  Table A; Target 72488; HLA-A*68:01; PRDM7; ENSG00000126856; CTA
SGMGMSMAR

SEQ ID NO: 72489 - protein, 9 aa, Homo sapiens
  Table A; Target 72489; HLA-C*07:06; PRDM7; ENSG00000126856; CTA
SGMGMSMAR

SEQ ID NO: 72490 - protein, 9 aa, Homo sapiens
  Table A; Target 72490; HLA-B*54:01; PRDM7; ENSG00000126856; CTA
SGNILIHAA

SEQ ID NO: 72491 - protein, 9 aa, Homo sapiens
  Table A; Target 72491; HLA-A*03:01; PRDM7; ENSG00000126856; CTA
SGYSWLITK

SEQ ID NO: 72492 - protein, 9 aa, Homo sapiens
  Table A; Target 72492; HLA-A*03:02; PRDM7; ENSG00000126856; CTA
SGYSWLITK

SEQ ID NO: 72493 - protein, 9 aa, Homo sapiens
  Table A; Target 72493; HLA-A*11:01; PRDM7; ENSG00000126856; CTA
SGYSWLITK

SEQ ID NO: 72494 - protein, 9 aa, Homo sapiens
  Table A; Target 72494; HLA-A*31:01; PRDM7; ENSG00000126856; CTA
SGYSWLITK

SEQ ID NO: 72495 - protein, 11 aa, Homo sapiens
  Table A; Target 72495; HLA-A*31:01; PRDM7; ENSG00000126856; CTA
SGYSWLITKGR

SEQ ID NO: 72496 - protein, 8 aa, Homo sapiens
  Table A; Target 72496; HLA-C*05:01; PRDM7; ENSG00000126856; CTA
SIEPAESL

SEQ ID NO: 72497 - protein, 9 aa, Homo sapiens
  Table A; Target 72497; HLA-B*57:01; PRDM7; ENSG00000126856; CTA
SIHVPHAVW

SEQ ID NO: 72498 - protein, 9 aa, Homo sapiens
  Table A; Target 72498; HLA-B*57:01; PRDM7; ENSG00000126856; CTA
SIYFTKEEW

SEQ ID NO: 72499 - protein, 9 aa, Homo sapiens
  Table A; Target 72499; HLA-B*58:01; PRDM7; ENSG00000126856; CTA
SIYFTKEEW

SEQ ID NO: 72500 - protein, 9 aa, Homo sapiens
  Table A; Target 72500; HLA-A*25:01; PRDM7; ENSG00000126856; CTA
SLGQAVNCW

SEQ ID NO: 72501 - protein, 11 aa, Homo sapiens
  Table A; Target 72501; HLA-A*02:04; PRDM7; ENSG00000126856; CTA
SLRELSGTPNL

SEQ ID NO: 72502 - protein, 9 aa, Homo sapiens
  Table A; Target 72502; HLA-B*15:01; PRDM7; ENSG00000126856; CTA
SQDHLQENF

SEQ ID NO: 72503 - protein, 9 aa, Homo sapiens
  Table A; Target 72503; HLA-B*15:03; PRDM7; ENSG00000126856; CTA
SQDHLQENF

SEQ ID NO: 72504 - protein, 9 aa, Homo sapiens
  Table A; Target 72504; HLA-B*38:01; PRDM7; ENSG00000126856; CTA
SQDHLQENF

SEQ ID NO: 72505 - protein, 9 aa, Homo sapiens
  Table A; Target 72505; HLA-C*05:01; PRDM7; ENSG00000126856; CTA
SQDHLQENF

SEQ ID NO: 72506 - protein, 9 aa, Homo sapiens
  Table A; Target 72506; HLA-C*16:04; PRDM7; ENSG00000126856; CTA
SQDHLQENF

SEQ ID NO: 72507 - protein, 9 aa, Homo sapiens
  Table A; Target 72507; HLA-A*02:03; PRDM7; ENSG00000126856; CTA
SSANWMRYV

SEQ ID NO: 72508 - protein, 9 aa, Homo sapiens
  Table A; Target 72508; HLA-A*25:01; PRDM7; ENSG00000126856; CTA
SSIEPAESL

SEQ ID NO: 72509 - protein, 9 aa, Homo sapiens
  Table A; Target 72509; HLA-A*30:01; PRDM7; ENSG00000126856; CTA
SSIEPAESL

SEQ ID NO: 72510 - protein, 9 aa, Homo sapiens
  Table A; Target 72510; HLA-B*07:02; PRDM7; ENSG00000126856; CTA
SSIEPAESL

SEQ ID NO: 72511 - protein, 9 aa, Homo sapiens
  Table A; Target 72511; HLA-B*15:01; PRDM7; ENSG00000126856; CTA
SSIEPAESL

SEQ ID NO: 72512 - protein, 9 aa, Homo sapiens
  Table A; Target 72512; HLA-B*27:05; PRDM7; ENSG00000126856; CTA
SSIEPAESL

SEQ ID NO: 72513 - protein, 9 aa, Homo sapiens
  Table A; Target 72513; HLA-B*35:03; PRDM7; ENSG00000126856; CTA
SSIEPAESL

SEQ ID NO: 72514 - protein, 9 aa, Homo sapiens
  Table A; Target 72514; HLA-B*39:01; PRDM7; ENSG00000126856; CTA
SSIEPAESL

SEQ ID NO: 72515 - protein, 9 aa, Homo sapiens
  Table A; Target 72515; HLA-B*40:01; PRDM7; ENSG00000126856; CTA
SSIEPAESL

SEQ ID NO: 72516 - protein, 9 aa, Homo sapiens
  Table A; Target 72516; HLA-B*46:01; PRDM7; ENSG00000126856; CTA
SSIEPAESL

SEQ ID NO: 72517 - protein, 9 aa, Homo sapiens
  Table A; Target 72517; HLA-B*58:01; PRDM7; ENSG00000126856; CTA
SSIEPAESL

SEQ ID NO: 72518 - protein, 9 aa, Homo sapiens
  Table A; Target 72518; HLA-C*01:02; PRDM7; ENSG00000126856; CTA
SSIEPAESL

SEQ ID NO: 72519 - protein, 9 aa, Homo sapiens
  Table A; Target 72519; HLA-C*03:03; PRDM7; ENSG00000126856; CTA
SSIEPAESL

SEQ ID NO: 72520 - protein, 9 aa, Homo sapiens
  Table A; Target 72520; HLA-C*03:04; PRDM7; ENSG00000126856; CTA
SSIEPAESL

SEQ ID NO: 72521 - protein, 9 aa, Homo sapiens
  Table A; Target 72521; HLA-C*05:01; PRDM7; ENSG00000126856; CTA
SSIEPAESL

SEQ ID NO: 72522 - protein, 9 aa, Homo sapiens
  Table A; Target 72522; HLA-C*07:02; PRDM7; ENSG00000126856; CTA
SSIEPAESL

SEQ ID NO: 72523 - protein, 9 aa, Homo sapiens
  Table A; Target 72523; HLA-C*07:06; PRDM7; ENSG00000126856; CTA
SSIEPAESL

SEQ ID NO: 72524 - protein, 9 aa, Homo sapiens
  Table A; Target 72524; HLA-C*14:02; PRDM7; ENSG00000126856; CTA
SSIEPAESL

SEQ ID NO: 72525 - protein, 9 aa, Homo sapiens
  Table A; Target 72525; HLA-C*16:01; PRDM7; ENSG00000126856; CTA
SSIEPAESL

SEQ ID NO: 72526 - protein, 9 aa, Homo sapiens
  Table A; Target 72526; HLA-C*16:04; PRDM7; ENSG00000126856; CTA
SSIEPAESL

SEQ ID NO: 72527 - protein, 11 aa, Homo sapiens
  Table A; Target 72527; HLA-A*11:01; PRDM7; ENSG00000126856; CTA
SSWQGENQSQR

SEQ ID NO: 72528 - protein, 11 aa, Homo sapiens
  Table A; Target 72528; HLA-A*31:01; PRDM7; ENSG00000126856; CTA
SSWQGENQSQR

SEQ ID NO: 72529 - protein, 11 aa, Homo sapiens
  Table A; Target 72529; HLA-A*68:01; PRDM7; ENSG00000126856; CTA
SSWQGENQSQR

SEQ ID NO: 72530 - protein, 11 aa, Homo sapiens
  Table A; Target 72530; HLA-C*07:06; PRDM7; ENSG00000126856; CTA
SSWQGENQSQR

SEQ ID NO: 72531 - protein, 9 aa, Homo sapiens
  Table A; Target 72531; HLA-C*16:02; PRDM7; ENSG00000126856; CTA
STSGQHSRL

SEQ ID NO: 72532 - protein, 10 aa, Homo sapiens
  Table A; Target 72532; HLA-A*11:01; PRDM7; ENSG00000126856; CTA
STSGQHSRLK

SEQ ID NO: 72533 - protein, 11 aa, Homo sapiens
  Table A; Target 72533; HLA-A*01:01; PRDM7; ENSG00000126856; CTA
TEDEEAANSGY

SEQ ID NO: 72534 - protein, 11 aa, Homo sapiens
  Table A; Target 72534; HLA-B*18:01; PRDM7; ENSG00000126856; CTA
TEDEEAANSGY

SEQ ID NO: 72535 - protein, 11 aa, Homo sapiens
  Table A; Target 72535; HLA-B*44:02; PRDM7; ENSG00000126856; CTA
TEDEEAANSGY

SEQ ID NO: 72536 - protein, 11 aa, Homo sapiens
  Table A; Target 72536; HLA-B*44:03; PRDM7; ENSG00000126856; CTA
TEDEEAANSGY

SEQ ID NO: 72537 - protein, 8 aa, Homo sapiens
  Table A; Target 72537; HLA-A*30:01; PRDM7; ENSG00000126856; CTA
TEGKMYSL

SEQ ID NO: 72538 - protein, 8 aa, Homo sapiens
  Table A; Target 72538; HLA-B*08:01; PRDM7; ENSG00000126856; CTA
TEGKMYSL

SEQ ID NO: 72539 - protein, 8 aa, Homo sapiens
  Table A; Target 72539; HLA-B*18:01; PRDM7; ENSG00000126856; CTA
TEGKMYSL

SEQ ID NO: 72540 - protein, 8 aa, Homo sapiens
  Table A; Target 72540; HLA-B*37:01; PRDM7; ENSG00000126856; CTA
TEGKMYSL

SEQ ID NO: 72541 - protein, 8 aa, Homo sapiens
  Table A; Target 72541; HLA-B*40:01; PRDM7; ENSG00000126856; CTA
TEGKMYSL

SEQ ID NO: 72542 - protein, 8 aa, Homo sapiens
  Table A; Target 72542; HLA-B*40:02; PRDM7; ENSG00000126856; CTA
TEGKMYSL

SEQ ID NO: 72543 - protein, 8 aa, Homo sapiens
  Table A; Target 72543; HLA-B*44:02; PRDM7; ENSG00000126856; CTA
TEGKMYSL

SEQ ID NO: 72544 - protein, 8 aa, Homo sapiens
  Table A; Target 72544; HLA-B*44:03; PRDM7; ENSG00000126856; CTA
TEGKMYSL

SEQ ID NO: 72545 - protein, 8 aa, Homo sapiens
  Table A; Target 72545; HLA-B*49:01; PRDM7; ENSG00000126856; CTA
TEGKMYSL

SEQ ID NO: 72546 - protein, 9 aa, Homo sapiens
  Table A; Target 72546; HLA-A*01:01; PRDM7; ENSG00000126856; CTA
TSDSEQAQK

SEQ ID NO: 72547 - protein, 9 aa, Homo sapiens
  Table A; Target 72547; HLA-C*07:06; PRDM7; ENSG00000126856; CTA
TSDSEQAQK

SEQ ID NO: 72548 - protein, 10 aa, Homo sapiens
  Table A; Target 72548; HLA-B*57:01; PRDM7; ENSG00000126856; CTA
TSQDHLQENF

SEQ ID NO: 72549 - protein, 10 aa, Homo sapiens
  Table A; Target 72549; HLA-B*58:01; PRDM7; ENSG00000126856; CTA
TSQDHLQENF

SEQ ID NO: 72550 - protein, 9 aa, Homo sapiens
  Table A; Target 72550; HLA-B*51:01; PRDM7; ENSG00000126856; CTA
VAFQYHRQI

SEQ ID NO: 72551 - protein, 9 aa, Homo sapiens
  Table A; Target 72551; HLA-C*16:02; PRDM7; ENSG00000126856; CTA
VAFQYHRQI

SEQ ID NO: 72552 - protein, 8 aa, Homo sapiens
  Table A; Target 72552; HLA-A*33:01; PRDM7; ENSG00000126856; CTA
VDKGHPNR

SEQ ID NO: 72553 - protein, 8 aa, Homo sapiens
  Table A; Target 72553; HLA-B*07:02; PRDM7; ENSG00000126856; CTA
VIRPGCEL

SEQ ID NO: 72554 - protein, 8 aa, Homo sapiens
  Table A; Target 72554; HLA-C*07:02; PRDM7; ENSG00000126856; CTA
VIRPGCEL

SEQ ID NO: 72555 - protein, 8 aa, Homo sapiens
  Table A; Target 72555; HLA-A*03:01; PRDM7; ENSG00000126856; CTA
VMTKPKVK

SEQ ID NO: 72556 - protein, 8 aa, Homo sapiens
  Table A; Target 72556; HLA-A*03:02; PRDM7; ENSG00000126856; CTA
VMTKPKVK

SEQ ID NO: 72557 - protein, 9 aa, Homo sapiens
  Table A; Target 72557; HLA-A*31:01; PRDM7; ENSG00000126856; CTA
VMTKPKVKR

SEQ ID NO: 72558 - protein, 9 aa, Homo sapiens
  Table A; Target 72558; HLA-A*33:01; PRDM7; ENSG00000126856; CTA
VMTKPKVKR

SEQ ID NO: 72559 - protein, 9 aa, Homo sapiens
  Table A; Target 72559; HLA-C*01:02; PRDM7; ENSG00000126856; CTA
VSPPGEAST

SEQ ID NO: 72560 - protein, 8 aa, Homo sapiens
  Table A; Target 72560; HLA-C*14:02; PRDM7; ENSG00000126856; CTA
VWNEASDL

SEQ ID NO: 72561 - protein, 9 aa, Homo sapiens
  Table A; Target 72561; HLA-A*24:02; PRDM7; ENSG00000126856; CTA
VWPFQVKNF

SEQ ID NO: 72562 - protein, 10 aa, Homo sapiens
  Table A; Target 72562; HLA-B*54:01; PRDM7; ENSG00000126856; CTA
WPFQVKNFSV

SEQ ID NO: 72563 - protein, 9 aa, Homo sapiens
  Table A; Target 72563; HLA-B*40:02; PRDM7; ENSG00000126856; CTA
YEYVDGKDK

SEQ ID NO: 72564 - protein, 9 aa, Homo sapiens
  Table A; Target 72564; HLA-B*49:01; PRDM7; ENSG00000126856; CTA
YEYVDGKDK

SEQ ID NO: 72565 - protein, 9 aa, Homo sapiens
  Table A; Target 72565; HLA-A*23:01; PRDM7; ENSG00000126856; CTA
YNALITVGL

SEQ ID NO: 72566 - protein, 9 aa, Homo sapiens
  Table A; Target 72566; HLA-A*68:02; PRDM7; ENSG00000126856; CTA
YNALITVGL

SEQ ID NO: 72567 - protein, 9 aa, Homo sapiens
  Table A; Target 72567; HLA-B*35:03; PRDM7; ENSG00000126856; CTA
YNALITVGL

SEQ ID NO: 72568 - protein, 9 aa, Homo sapiens
  Table A; Target 72568; HLA-C*07:02; PRDM7; ENSG00000126856; CTA
YNALITVGL

SEQ ID NO: 72569 - protein, 9 aa, Homo sapiens
  Table A; Target 72569; HLA-C*12:03; PRDM7; ENSG00000126856; CTA
YNALITVGL

SEQ ID NO: 72570 - protein, 10 aa, Homo sapiens
  Table A; Target 72570; HLA-A*33:03; PRDM7; ENSG00000126856; CTA
YNALITVGLR

SEQ ID NO: 72571 - protein, 9 aa, Homo sapiens
  Table A; Target 72571; HLA-A*31:01; PRDM7; ENSG00000126856; CTA
YSWLITKGR

SEQ ID NO: 72572 - protein, 8 aa, Homo sapiens
  Table A; Target 72572; HLA-B*08:01; PROKR1; ENSG00000169618; CTA
AAKIVIGM

SEQ ID NO: 72573 - protein, 8 aa, Homo sapiens
  Table A; Target 72573; HLA-B*37:01; PROKR1; ENSG00000169618; CTA
AAKIVIGM

SEQ ID NO: 72574 - protein, 10 aa, Homo sapiens
  Table A; Target 72574; HLA-A*30:01; PROKR1; ENSG00000169618; CTA
ADLDLKTIGM

SEQ ID NO: 72575 - protein, 10 aa, Homo sapiens
  Table A; Target 72575; HLA-B*37:01; PROKR1; ENSG00000169618; CTA
ADLDLKTIGM

SEQ ID NO: 72576 - protein, 9 aa, Homo sapiens
  Table A; Target 72576; HLA-A*02:07; PROKR1; ENSG00000169618; CTA
AIDRYLAIV

SEQ ID NO: 72577 - protein, 9 aa, Homo sapiens
  Table A; Target 72577; HLA-A*02:01; PROKR1; ENSG00000169618; CTA
AISDFLVAI

SEQ ID NO: 72578 - protein, 9 aa, Homo sapiens
  Table A; Target 72578; HLA-A*02:03; PROKR1; ENSG00000169618; CTA
AISDFLVAI

SEQ ID NO: 72579 - protein, 9 aa, Homo sapiens
  Table A; Target 72579; HLA-A*02:04; PROKR1; ENSG00000169618; CTA
AISDFLVAI

SEQ ID NO: 72580 - protein, 9 aa, Homo sapiens
  Table A; Target 72580; HLA-A*02:07; PROKR1; ENSG00000169618; CTA
AISDFLVAI

SEQ ID NO: 72581 - protein, 9 aa, Homo sapiens
  Table A; Target 72581; HLA-A*68:02; PROKR1; ENSG00000169618; CTA
AISDFLVAI

SEQ ID NO: 72582 - protein, 9 aa, Homo sapiens
  Table A; Target 72582; HLA-B*13:02; PROKR1; ENSG00000169618; CTA
AISDFLVAI

SEQ ID NO: 72583 - protein, 10 aa, Homo sapiens
  Table A; Target 72583; HLA-A*02:03; PROKR1; ENSG00000169618; CTA
AISDFLVAIV

SEQ ID NO: 72584 - protein, 9 aa, Homo sapiens
  Table A; Target 72584; HLA-A*31:01; PROKR1; ENSG00000169618; CTA
AIVHPLRPR

SEQ ID NO: 72585 - protein, 9 aa, Homo sapiens
  Table A; Target 72585; HLA-B*15:03; PROKR1; ENSG00000169618; CTA
AKIVIGMAL

SEQ ID NO: 72586 - protein, 9 aa, Homo sapiens
  Table A; Target 72586; HLA-A*03:01; PROKR1; ENSG00000169618; CTA
ALLAIAIDR

SEQ ID NO: 72587 - protein, 9 aa, Homo sapiens
  Table A; Target 72587; HLA-A*03:02; PROKR1; ENSG00000169618; CTA
ALLAIAIDR

SEQ ID NO: 72588 - protein, 10 aa, Homo sapiens
  Table A; Target 72588; HLA-A*29:02; PROKR1; ENSG00000169618; CTA
ALLAIAIDRY

SEQ ID NO: 72589 - protein, 10 aa, Homo sapiens
  Table A; Target 72589; HLA-A*30:02; PROKR1; ENSG00000169618; CTA
ALLAIAIDRY

SEQ ID NO: 72590 - protein, 11 aa, Homo sapiens
  Table A; Target 72590; HLA-A*02:01; PROKR1; ENSG00000169618; CTA
ALLAIAIDRYL

SEQ ID NO: 72591 - protein, 11 aa, Homo sapiens
  Table A; Target 72591; HLA-A*02:04; PROKR1; ENSG00000169618; CTA
ALLAIAIDRYL

SEQ ID NO: 72592 - protein, 10 aa, Homo sapiens
  Table A; Target 72592; HLA-A*02:03; PROKR1; ENSG00000169618; CTA
AMSNSMINTL

SEQ ID NO: 72593 - protein, 8 aa, Homo sapiens
  Table A; Target 72593; HLA-B*51:01; PROKR1; ENSG00000169618; CTA
APFYGFTI

SEQ ID NO: 72594 - protein, 8 aa, Homo sapiens
  Table A; Target 72594; HLA-B*54:01; PROKR1; ENSG00000169618; CTA
APFYGFTI

SEQ ID NO: 72595 - protein, 8 aa, Homo sapiens
  Table A; Target 72595; HLA-B*56:01; PROKR1; ENSG00000169618; CTA
APFYGFTI

SEQ ID NO: 72596 - protein, 9 aa, Homo sapiens
  Table A; Target 72596; HLA-B*07:02; PROKR1; ENSG00000169618; CTA
APFYGFTIV

SEQ ID NO: 72597 - protein, 9 aa, Homo sapiens
  Table A; Target 72597; HLA-B*51:01; PROKR1; ENSG00000169618; CTA
APFYGFTIV

SEQ ID NO: 72598 - protein, 9 aa, Homo sapiens
  Table A; Target 72598; HLA-B*54:01; PROKR1; ENSG00000169618; CTA
APFYGFTIV

SEQ ID NO: 72599 - protein, 9 aa, Homo sapiens
  Table A; Target 72599; HLA-B*56:01; PROKR1; ENSG00000169618; CTA
APFYGFTIV

SEQ ID NO: 72600 - protein, 10 aa, Homo sapiens
  Table A; Target 72600; HLA-A*32:01; PROKR1; ENSG00000169618; CTA
ASYNGGKSSA

SEQ ID NO: 72601 - protein, 10 aa, Homo sapiens
  Table A; Target 72601; HLA-B*56:01; PROKR1; ENSG00000169618; CTA
ASYNGGKSSA

SEQ ID NO: 72602 - protein, 11 aa, Homo sapiens
  Table A; Target 72602; HLA-A*03:01; PROKR1; ENSG00000169618; CTA
ATEEVDCIRLK

SEQ ID NO: 72603 - protein, 11 aa, Homo sapiens
  Table A; Target 72603; HLA-A*03:02; PROKR1; ENSG00000169618; CTA
ATEEVDCIRLK

SEQ ID NO: 72604 - protein, 11 aa, Homo sapiens
  Table A; Target 72604; HLA-A*11:01; PROKR1; ENSG00000169618; CTA
ATEEVDCIRLK

SEQ ID NO: 72605 - protein, 9 aa, Homo sapiens
  Table A; Target 72605; HLA-B*44:02; PROKR1; ENSG00000169618; CTA
ATGLIALVW

SEQ ID NO: 72606 - protein, 9 aa, Homo sapiens
  Table A; Target 72606; HLA-B*44:03; PROKR1; ENSG00000169618; CTA
ATGLIALVW

SEQ ID NO: 72607 - protein, 9 aa, Homo sapiens
  Table A; Target 72607; HLA-B*57:01; PROKR1; ENSG00000169618; CTA
ATGLIALVW

SEQ ID NO: 72608 - protein, 8 aa, Homo sapiens
  Table A; Target 72608; HLA-A*32:01; PROKR1; ENSG00000169618; CTA
ATNTSTSF

SEQ ID NO: 72609 - protein, 8 aa, Homo sapiens
  Table A; Target 72609; HLA-B*46:01; PROKR1; ENSG00000169618; CTA
ATNTSTSF

SEQ ID NO: 72610 - protein, 8 aa, Homo sapiens
  Table A; Target 72610; HLA-C*14:02; PROKR1; ENSG00000169618; CTA
ATNTSTSF

SEQ ID NO: 72611 - protein, 9 aa, Homo sapiens
  Table A; Target 72611; HLA-A*31:01; PROKR1; ENSG00000169618; CTA
ATNTSTSFL

SEQ ID NO: 72612 - protein, 9 aa, Homo sapiens
  Table A; Target 72612; HLA-C*01:02; PROKR1; ENSG00000169618; CTA
ATNTSTSFL

SEQ ID NO: 72613 - protein, 10 aa, Homo sapiens
  Table A; Target 72613; HLA-A*01:01; PROKR1; ENSG00000169618; CTA
ATSFPFNFSY

SEQ ID NO: 72614 - protein, 10 aa, Homo sapiens
  Table A; Target 72614; HLA-A*11:01; PROKR1; ENSG00000169618; CTA
ATSFPFNFSY

SEQ ID NO: 72615 - protein, 10 aa, Homo sapiens
  Table A; Target 72615; HLA-A*29:02; PROKR1; ENSG00000169618; CTA
ATSFPFNFSY

SEQ ID NO: 72616 - protein, 10 aa, Homo sapiens
  Table A; Target 72616; HLA-A*30:02; PROKR1; ENSG00000169618; CTA
ATSFPFNFSY

SEQ ID NO: 72617 - protein, 8 aa, Homo sapiens
  Table A; Target 72617; HLA-C*14:02; PROKR1; ENSG00000169618; CTA
AYFTTETV

SEQ ID NO: 72618 - protein, 9 aa, Homo sapiens
  Table A; Target 72618; HLA-A*23:01; PROKR1; ENSG00000169618; CTA
AYFTTETVL

SEQ ID NO: 72619 - protein, 9 aa, Homo sapiens
  Table A; Target 72619; HLA-A*24:02; PROKR1; ENSG00000169618; CTA
AYFTTETVL

SEQ ID NO: 72620 - protein, 9 aa, Homo sapiens
  Table A; Target 72620; HLA-C*14:02; PROKR1; ENSG00000169618; CTA
AYFTTETVL

SEQ ID NO: 72621 - protein, 10 aa, Homo sapiens
  Table A; Target 72621; HLA-A*25:01; PROKR1; ENSG00000169618; CTA
DEDVTNSRTF

SEQ ID NO: 72622 - protein, 10 aa, Homo sapiens
  Table A; Target 72622; HLA-B*18:01; PROKR1; ENSG00000169618; CTA
DEDVTNSRTF

SEQ ID NO: 72623 - protein, 10 aa, Homo sapiens
  Table A; Target 72623; HLA-B*38:01; PROKR1; ENSG00000169618; CTA
DEDVTNSRTF

SEQ ID NO: 72624 - protein, 10 aa, Homo sapiens
  Table A; Target 72624; HLA-B*44:02; PROKR1; ENSG00000169618; CTA
DEDVTNSRTF

SEQ ID NO: 72625 - protein, 10 aa, Homo sapiens
  Table A; Target 72625; HLA-B*44:03; PROKR1; ENSG00000169618; CTA
DEDVTNSRTF

SEQ ID NO: 72626 - protein, 10 aa, Homo sapiens
  Table A; Target 72626; HLA-C*16:04; PROKR1; ENSG00000169618; CTA
DEDVTNSRTF

SEQ ID NO: 72627 - protein, 11 aa, Homo sapiens
  Table A; Target 72627; HLA-B*44:02; PROKR1; ENSG00000169618; CTA
DEDVTNSRTFF

SEQ ID NO: 72628 - protein, 11 aa, Homo sapiens
  Table A; Target 72628; HLA-B*44:03; PROKR1; ENSG00000169618; CTA
DEDVTNSRTFF

SEQ ID NO: 72629 - protein, 9 aa, Homo sapiens
  Table A; Target 72629; HLA-A*33:01; PROKR1; ENSG00000169618; CTA
DFFPTVFVK

SEQ ID NO: 72630 - protein, 9 aa, Homo sapiens
  Table A; Target 72630; HLA-B*08:01; PROKR1; ENSG00000169618; CTA
DLDLKTIGM

SEQ ID NO: 72631 - protein, 10 aa, Homo sapiens
  Table A; Target 72631; HLA-A*25:01; PROKR1; ENSG00000169618; CTA
DNATNTSTSF

SEQ ID NO: 72632 - protein, 10 aa, Homo sapiens
  Table A; Target 72632; HLA-A*26:01; PROKR1; ENSG00000169618; CTA
DNATNTSTSF

SEQ ID NO: 72633 - protein, 9 aa, Homo sapiens
  Table A; Target 72633; HLA-A*25:01; PROKR1; ENSG00000169618; CTA
DQQLYYKSY

SEQ ID NO: 72634 - protein, 9 aa, Homo sapiens
  Table A; Target 72634; HLA-B*18:01; PROKR1; ENSG00000169618; CTA
DQQLYYKSY

SEQ ID NO: 72635 - protein, 9 aa, Homo sapiens
  Table A; Target 72635; HLA-A*68:02; PROKR1; ENSG00000169618; CTA
DTVKYFKKI

SEQ ID NO: 72636 - protein, 8 aa, Homo sapiens
  Table A; Target 72636; HLA-A*25:01; PROKR1; ENSG00000169618; CTA
DVTNSRTF

SEQ ID NO: 72637 - protein, 9 aa, Homo sapiens
  Table A; Target 72637; HLA-A*25:01; PROKR1; ENSG00000169618; CTA
DVTNSRTFF

SEQ ID NO: 72638 - protein, 9 aa, Homo sapiens
  Table A; Target 72638; HLA-A*26:01; PROKR1; ENSG00000169618; CTA
DVTNSRTFF

SEQ ID NO: 72639 - protein, 8 aa, Homo sapiens
  Table A; Target 72639; HLA-B*08:01; PROKR1; ENSG00000169618; CTA
DYYVVRQL

SEQ ID NO: 72640 - protein, 8 aa, Homo sapiens
  Table A; Target 72640; HLA-B*18:01; PROKR1; ENSG00000169618; CTA
DYYVVRQL

SEQ ID NO: 72641 - protein, 8 aa, Homo sapiens
  Table A; Target 72641; HLA-B*51:01; PROKR1; ENSG00000169618; CTA
DYYVVRQL

SEQ ID NO: 72642 - protein, 8 aa, Homo sapiens
  Table A; Target 72642; HLA-C*14:02; PROKR1; ENSG00000169618; CTA
DYYVVRQL

SEQ ID NO: 72643 - protein, 10 aa, Homo sapiens
  Table A; Target 72643; HLA-A*24:02; PROKR1; ENSG00000169618; CTA
DYYVVRQLSW

SEQ ID NO: 72644 - protein, 9 aa, Homo sapiens
  Table A; Target 72644; HLA-A*26:01; PROKR1; ENSG00000169618; CTA
ECIAMSNSM

SEQ ID NO: 72645 - protein, 9 aa, Homo sapiens
  Table A; Target 72645; HLA-A*33:03; PROKR1; ENSG00000169618; CTA
EDEDVTNSR

SEQ ID NO: 72646 - protein, 9 aa, Homo sapiens
  Table A; Target 72646; HLA-A*68:01; PROKR1; ENSG00000169618; CTA
EDEDVTNSR

SEQ ID NO: 72647 - protein, 9 aa, Homo sapiens
  Table A; Target 72647; HLA-C*07:06; PROKR1; ENSG00000169618; CTA
EDEDVTNSR

SEQ ID NO: 72648 - protein, 11 aa, Homo sapiens
  Table A; Target 72648; HLA-B*38:01; PROKR1; ENSG00000169618; CTA
EDEDVTNSRTF

SEQ ID NO: 72649 - protein, 11 aa, Homo sapiens
  Table A; Target 72649; HLA-B*44:02; PROKR1; ENSG00000169618; CTA
EDEDVTNSRTF

SEQ ID NO: 72650 - protein, 11 aa, Homo sapiens
  Table A; Target 72650; HLA-B*44:03; PROKR1; ENSG00000169618; CTA
EDEDVTNSRTF

SEQ ID NO: 72651 - protein, 9 aa, Homo sapiens
  Table A; Target 72651; HLA-A*25:01; PROKR1; ENSG00000169618; CTA
EDVTNSRTF

SEQ ID NO: 72652 - protein, 9 aa, Homo sapiens
  Table A; Target 72652; HLA-A*26:01; PROKR1; ENSG00000169618; CTA
EDVTNSRTF

SEQ ID NO: 72653 - protein, 9 aa, Homo sapiens
  Table A; Target 72653; HLA-B*18:01; PROKR1; ENSG00000169618; CTA
EDVTNSRTF

SEQ ID NO: 72654 - protein, 9 aa, Homo sapiens
  Table A; Target 72654; HLA-B*44:02; PROKR1; ENSG00000169618; CTA
EDVTNSRTF

SEQ ID NO: 72655 - protein, 9 aa, Homo sapiens
  Table A; Target 72655; HLA-B*44:03; PROKR1; ENSG00000169618; CTA
EDVTNSRTF

SEQ ID NO: 72656 - protein, 9 aa, Homo sapiens
  Table A; Target 72656; HLA-C*16:04; PROKR1; ENSG00000169618; CTA
EDVTNSRTF

SEQ ID NO: 72657 - protein, 10 aa, Homo sapiens
  Table A; Target 72657; HLA-B*44:02; PROKR1; ENSG00000169618; CTA
EDVTNSRTFF

SEQ ID NO: 72658 - protein, 9 aa, Homo sapiens
  Table A; Target 72658; HLA-A*23:01; PROKR1; ENSG00000169618; CTA
EFVGPVVTM

SEQ ID NO: 72659 - protein, 9 aa, Homo sapiens
  Table A; Target 72659; HLA-A*26:01; PROKR1; ENSG00000169618; CTA
EFVGPVVTM

SEQ ID NO: 72660 - protein, 9 aa, Homo sapiens
  Table A; Target 72660; HLA-A*33:03; PROKR1; ENSG00000169618; CTA
EFVGPVVTM

SEQ ID NO: 72661 - protein, 9 aa, Homo sapiens
  Table A; Target 72661; HLA-B*35:01; PROKR1; ENSG00000169618; CTA
EFVGPVVTM

SEQ ID NO: 72662 - protein, 9 aa, Homo sapiens
  Table A; Target 72662; HLA-C*14:02; PROKR1; ENSG00000169618; CTA
EFVGPVVTM

SEQ ID NO: 72663 - protein, 11 aa, Homo sapiens
  Table A; Target 72663; HLA-A*23:01; PROKR1; ENSG00000169618; CTA
EFVGPVVTMTL

SEQ ID NO: 72664 - protein, 8 aa, Homo sapiens
  Table A; Target 72664; HLA-A*33:03; PROKR1; ENSG00000169618; CTA
ETVLVIVK

SEQ ID NO: 72665 - protein, 9 aa, Homo sapiens
  Table A; Target 72665; HLA-A*26:01; PROKR1; ENSG00000169618; CTA
FAAKIVIGM

SEQ ID NO: 72666 - protein, 9 aa, Homo sapiens
  Table A; Target 72666; HLA-A*68:01; PROKR1; ENSG00000169618; CTA
FAAKIVIGM

SEQ ID NO: 72667 - protein, 9 aa, Homo sapiens
  Table A; Target 72667; HLA-A*68:02; PROKR1; ENSG00000169618; CTA
FAAKIVIGM

SEQ ID NO: 72668 - protein, 9 aa, Homo sapiens
  Table A; Target 72668; HLA-B*27:05; PROKR1; ENSG00000169618; CTA
FAAKIVIGM

SEQ ID NO: 72669 - protein, 9 aa, Homo sapiens
  Table A; Target 72669; HLA-B*35:01; PROKR1; ENSG00000169618; CTA
FAAKIVIGM

SEQ ID NO: 72670 - protein, 9 aa, Homo sapiens
  Table A; Target 72670; HLA-B*35:03; PROKR1; ENSG00000169618; CTA
FAAKIVIGM

SEQ ID NO: 72671 - protein, 9 aa, Homo sapiens
  Table A; Target 72671; HLA-B*46:01; PROKR1; ENSG00000169618; CTA
FAAKIVIGM

SEQ ID NO: 72672 - protein, 9 aa, Homo sapiens
  Table A; Target 72672; HLA-B*51:01; PROKR1; ENSG00000169618; CTA
FAAKIVIGM

SEQ ID NO: 72673 - protein, 9 aa, Homo sapiens
  Table A; Target 72673; HLA-B*54:01; PROKR1; ENSG00000169618; CTA
FAAKIVIGM

SEQ ID NO: 72674 - protein, 9 aa, Homo sapiens
  Table A; Target 72674; HLA-B*55:01; PROKR1; ENSG00000169618; CTA
FAAKIVIGM

SEQ ID NO: 72675 - protein, 9 aa, Homo sapiens
  Table A; Target 72675; HLA-C*02:02; PROKR1; ENSG00000169618; CTA
FAAKIVIGM

SEQ ID NO: 72676 - protein, 9 aa, Homo sapiens
  Table A; Target 72676; HLA-C*03:03; PROKR1; ENSG00000169618; CTA
FAAKIVIGM

SEQ ID NO: 72677 - protein, 9 aa, Homo sapiens
  Table A; Target 72677; HLA-C*03:04; PROKR1; ENSG00000169618; CTA
FAAKIVIGM

SEQ ID NO: 72678 - protein, 9 aa, Homo sapiens
  Table A; Target 72678; HLA-C*07:04; PROKR1; ENSG00000169618; CTA
FAAKIVIGM

SEQ ID NO: 72679 - protein, 9 aa, Homo sapiens
  Table A; Target 72679; HLA-C*07:06; PROKR1; ENSG00000169618; CTA
FAAKIVIGM

SEQ ID NO: 72680 - protein, 9 aa, Homo sapiens
  Table A; Target 72680; HLA-C*12:03; PROKR1; ENSG00000169618; CTA
FAAKIVIGM

SEQ ID NO: 72681 - protein, 9 aa, Homo sapiens
  Table A; Target 72681; HLA-C*16:01; PROKR1; ENSG00000169618; CTA
FAAKIVIGM

SEQ ID NO: 72682 - protein, 9 aa, Homo sapiens
  Table A; Target 72682; HLA-C*16:02; PROKR1; ENSG00000169618; CTA
FAAKIVIGM

SEQ ID NO: 72683 - protein, 9 aa, Homo sapiens
  Table A; Target 72683; HLA-C*16:04; PROKR1; ENSG00000169618; CTA
FAAKIVIGM

SEQ ID NO: 72684 - protein, 11 aa, Homo sapiens
  Table A; Target 72684; HLA-C*02:02; PROKR1; ENSG00000169618; CTA
FAAKIVIGMAL

SEQ ID NO: 72685 - protein, 8 aa, Homo sapiens
  Table A; Target 72685; HLA-B*49:01; PROKR1; ENSG00000169618; CTA
FEMDYYVV

SEQ ID NO: 72686 - protein, 9 aa, Homo sapiens
  Table A; Target 72686; HLA-A*03:01; PROKR1; ENSG00000169618; CTA
FIAALVRYK

SEQ ID NO: 72687 - protein, 10 aa, Homo sapiens
  Table A; Target 72687; HLA-A*29:02; PROKR1; ENSG00000169618; CTA
FIFIAALVRY

SEQ ID NO: 72688 - protein, 10 aa, Homo sapiens
  Table A; Target 72688; HLA-A*02:01; PROKR1; ENSG00000169618; CTA
FLFIFGIEFV

SEQ ID NO: 72689 - protein, 10 aa, Homo sapiens
  Table A; Target 72689; HLA-A*02:03; PROKR1; ENSG00000169618; CTA
FLFIFGIEFV

SEQ ID NO: 72690 - protein, 10 aa, Homo sapiens
  Table A; Target 72690; HLA-A*02:04; PROKR1; ENSG00000169618; CTA
FLFIFGIEFV

SEQ ID NO: 72691 - protein, 10 aa, Homo sapiens
  Table A; Target 72691; HLA-B*35:01; PROKR1; ENSG00000169618; CTA
FPFNFSYSDY

SEQ ID NO: 72692 - protein, 9 aa, Homo sapiens
  Table A; Target 72692; HLA-A*68:02; PROKR1; ENSG00000169618; CTA
FTTETVLVI

SEQ ID NO: 72693 - protein, 9 aa, Homo sapiens
  Table A; Target 72693; HLA-B*13:02; PROKR1; ENSG00000169618; CTA
FTTETVLVI

SEQ ID NO: 72694 - protein, 9 aa, Homo sapiens
  Table A; Target 72694; HLA-C*12:03; PROKR1; ENSG00000169618; CTA
FTTETVLVI

SEQ ID NO: 72695 - protein, 9 aa, Homo sapiens
  Table A; Target 72695; HLA-C*16:02; PROKR1; ENSG00000169618; CTA
FTTETVLVI

SEQ ID NO: 72696 - protein, 10 aa, Homo sapiens
  Table A; Target 72696; HLA-A*68:02; PROKR1; ENSG00000169618; CTA
FTTETVLVIV

SEQ ID NO: 72697 - protein, 11 aa, Homo sapiens
  Table A; Target 72697; HLA-B*27:02; PROKR1; ENSG00000169618; CTA
FTTETVLVIVK

SEQ ID NO: 72698 - protein, 8 aa, Homo sapiens
  Table A; Target 72698; HLA-A*32:01; PROKR1; ENSG00000169618; CTA
FVGPVVTM

SEQ ID NO: 72699 - protein, 8 aa, Homo sapiens
  Table A; Target 72699; HLA-B*18:01; PROKR1; ENSG00000169618; CTA
FVGPVVTM

SEQ ID NO: 72700 - protein, 8 aa, Homo sapiens
  Table A; Target 72700; HLA-B*35:01; PROKR1; ENSG00000169618; CTA
FVGPVVTM

SEQ ID NO: 72701 - protein, 8 aa, Homo sapiens
  Table A; Target 72701; HLA-B*35:03; PROKR1; ENSG00000169618; CTA
FVGPVVTM

SEQ ID NO: 72702 - protein, 8 aa, Homo sapiens
  Table A; Target 72702; HLA-B*37:01; PROKR1; ENSG00000169618; CTA
FVGPVVTM

SEQ ID NO: 72703 - protein, 8 aa, Homo sapiens
  Table A; Target 72703; HLA-B*46:01; PROKR1; ENSG00000169618; CTA
FVGPVVTM

SEQ ID NO: 72704 - protein, 8 aa, Homo sapiens
  Table A; Target 72704; HLA-C*02:02; PROKR1; ENSG00000169618; CTA
FVGPVVTM

SEQ ID NO: 72705 - protein, 8 aa, Homo sapiens
  Table A; Target 72705; HLA-C*03:03; PROKR1; ENSG00000169618; CTA
FVGPVVTM

SEQ ID NO: 72706 - protein, 8 aa, Homo sapiens
  Table A; Target 72706; HLA-C*03:04; PROKR1; ENSG00000169618; CTA
FVGPVVTM

SEQ ID NO: 72707 - protein, 8 aa, Homo sapiens
  Table A; Target 72707; HLA-C*05:01; PROKR1; ENSG00000169618; CTA
FVGPVVTM

SEQ ID NO: 72708 - protein, 8 aa, Homo sapiens
  Table A; Target 72708; HLA-C*07:04; PROKR1; ENSG00000169618; CTA
FVGPVVTM

SEQ ID NO: 72709 - protein, 10 aa, Homo sapiens
  Table A; Target 72709; HLA-A*02:07; PROKR1; ENSG00000169618; CTA
FVGPVVTMTL

SEQ ID NO: 72710 - protein, 10 aa, Homo sapiens
  Table A; Target 72710; HLA-A*25:01; PROKR1; ENSG00000169618; CTA
FVGPVVTMTL

SEQ ID NO: 72711 - protein, 10 aa, Homo sapiens
  Table A; Target 72711; HLA-A*26:01; PROKR1; ENSG00000169618; CTA
FVGPVVTMTL

SEQ ID NO: 72712 - protein, 10 aa, Homo sapiens
  Table A; Target 72712; HLA-A*30:01; PROKR1; ENSG00000169618; CTA
FVGPVVTMTL

SEQ ID NO: 72713 - protein, 10 aa, Homo sapiens
  Table A; Target 72713; HLA-A*68:02; PROKR1; ENSG00000169618; CTA
FVGPVVTMTL

SEQ ID NO: 72714 - protein, 10 aa, Homo sapiens
  Table A; Target 72714; HLA-B*35:01; PROKR1; ENSG00000169618; CTA
FVGPVVTMTL

SEQ ID NO: 72715 - protein, 10 aa, Homo sapiens
  Table A; Target 72715; HLA-B*35:03; PROKR1; ENSG00000169618; CTA
FVGPVVTMTL

SEQ ID NO: 72716 - protein, 10 aa, Homo sapiens
  Table A; Target 72716; HLA-B*38:01; PROKR1; ENSG00000169618; CTA
FVGPVVTMTL

SEQ ID NO: 72717 - protein, 10 aa, Homo sapiens
  Table A; Target 72717; HLA-C*02:02; PROKR1; ENSG00000169618; CTA
FVGPVVTMTL

SEQ ID NO: 72718 - protein, 10 aa, Homo sapiens
  Table A; Target 72718; HLA-C*03:03; PROKR1; ENSG00000169618; CTA
FVGPVVTMTL

SEQ ID NO: 72719 - protein, 10 aa, Homo sapiens
  Table A; Target 72719; HLA-C*03:04; PROKR1; ENSG00000169618; CTA
FVGPVVTMTL

SEQ ID NO: 72720 - protein, 10 aa, Homo sapiens
  Table A; Target 72720; HLA-C*07:06; PROKR1; ENSG00000169618; CTA
FVGPVVTMTL

SEQ ID NO: 72721 - protein, 8 aa, Homo sapiens
  Table A; Target 72721; HLA-B*08:01; PROKR1; ENSG00000169618; CTA
FVKEKHYL

SEQ ID NO: 72722 - protein, 11 aa, Homo sapiens
  Table A; Target 72722; HLA-A*01:01; PROKR1; ENSG00000169618; CTA
FVTVKNDTVKY

SEQ ID NO: 72723 - protein, 9 aa, Homo sapiens
  Table A; Target 72723; HLA-C*14:02; PROKR1; ENSG00000169618; CTA
FYIVECIAM

SEQ ID NO: 72724 - protein, 9 aa, Homo sapiens
  Table A; Target 72724; HLA-A*02:01; PROKR1; ENSG00000169618; CTA
GLIALVWTV

SEQ ID NO: 72725 - protein, 9 aa, Homo sapiens
  Table A; Target 72725; HLA-A*02:03; PROKR1; ENSG00000169618; CTA
GLIALVWTV

SEQ ID NO: 72726 - protein, 9 aa, Homo sapiens
  Table A; Target 72726; HLA-A*02:04; PROKR1; ENSG00000169618; CTA
GLIALVWTV

SEQ ID NO: 72727 - protein, 9 aa, Homo sapiens
  Table A; Target 72727; HLA-A*02:07; PROKR1; ENSG00000169618; CTA
GLIALVWTV

SEQ ID NO: 72728 - protein, 9 aa, Homo sapiens
  Table A; Target 72728; HLA-B*13:02; PROKR1; ENSG00000169618; CTA
GLIALVWTV

SEQ ID NO: 72729 - protein, 9 aa, Homo sapiens
  Table A; Target 72729; HLA-B*55:01; PROKR1; ENSG00000169618; CTA
GLIALVWTV

SEQ ID NO: 72730 - protein, 8 aa, Homo sapiens
  Table A; Target 72730; HLA-B*07:02; PROKR1; ENSG00000169618; CTA
GPVVTMTL

SEQ ID NO: 72731 - protein, 8 aa, Homo sapiens
  Table A; Target 72731; HLA-B*56:01; PROKR1; ENSG00000169618; CTA
GPVVTMTL

SEQ ID NO: 72732 - protein, 10 aa, Homo sapiens
  Table A; Target 72732; HLA-B*13:02; PROKR1; ENSG00000169618; CTA
GQIWPVDQQL

SEQ ID NO: 72733 - protein, 11 aa, Homo sapiens
  Table A; Target 72733; HLA-A*30:02; PROKR1; ENSG00000169618; CTA
GQIWPVDQQLY

SEQ ID NO: 72734 - protein, 11 aa, Homo sapiens
  Table A; Target 72734; HLA-B*15:01; PROKR1; ENSG00000169618; CTA
GQIWPVDQQLY

SEQ ID NO: 72735 - protein, 11 aa, Homo sapiens
  Table A; Target 72735; HLA-B*15:03; PROKR1; ENSG00000169618; CTA
GQIWPVDQQLY

SEQ ID NO: 72736 - protein, 9 aa, Homo sapiens
  Table A; Target 72736; HLA-C*02:02; PROKR1; ENSG00000169618; CTA
HATSFPFNF

SEQ ID NO: 72737 - protein, 9 aa, Homo sapiens
  Table A; Target 72737; HLA-A*26:01; PROKR1; ENSG00000169618; CTA
HVLCTSVNY

SEQ ID NO: 72738 - protein, 9 aa, Homo sapiens
  Table A; Target 72738; HLA-A*29:02; PROKR1; ENSG00000169618; CTA
HVLCTSVNY

SEQ ID NO: 72739 - protein, 9 aa, Homo sapiens
  Table A; Target 72739; HLA-A*30:02; PROKR1; ENSG00000169618; CTA
HVLCTSVNY

SEQ ID NO: 72740 - protein, 9 aa, Homo sapiens
  Table A; Target 72740; HLA-B*15:03; PROKR1; ENSG00000169618; CTA
HVLCTSVNY

SEQ ID NO: 72741 - protein, 9 aa, Homo sapiens
  Table A; Target 72741; HLA-B*35:01; PROKR1; ENSG00000169618; CTA
HVLCTSVNY

SEQ ID NO: 72742 - protein, 9 aa, Homo sapiens
  Table A; Target 72742; HLA-C*07:04; PROKR1; ENSG00000169618; CTA
HVLCTSVNY

SEQ ID NO: 72743 - protein, 9 aa, Homo sapiens
  Table A; Target 72743; HLA-A*23:01; PROKR1; ENSG00000169618; CTA
IAIDRYLAI

SEQ ID NO: 72744 - protein, 9 aa, Homo sapiens
  Table A; Target 72744; HLA-A*24:02; PROKR1; ENSG00000169618; CTA
IAIDRYLAI

SEQ ID NO: 72745 - protein, 9 aa, Homo sapiens
  Table A; Target 72745; HLA-A*25:01; PROKR1; ENSG00000169618; CTA
IAIDRYLAI

SEQ ID NO: 72746 - protein, 9 aa, Homo sapiens
  Table A; Target 72746; HLA-B*08:01; PROKR1; ENSG00000169618; CTA
IAIDRYLAI

SEQ ID NO: 72747 - protein, 9 aa, Homo sapiens
  Table A; Target 72747; HLA-B*13:02; PROKR1; ENSG00000169618; CTA
IAIDRYLAI

SEQ ID NO: 72748 - protein, 9 aa, Homo sapiens
  Table A; Target 72748; HLA-B*46:01; PROKR1; ENSG00000169618; CTA
IAIDRYLAI

SEQ ID NO: 72749 - protein, 9 aa, Homo sapiens
  Table A; Target 72749; HLA-B*51:01; PROKR1; ENSG00000169618; CTA
IAIDRYLAI

SEQ ID NO: 72750 - protein, 9 aa, Homo sapiens
  Table A; Target 72750; HLA-B*58:01; PROKR1; ENSG00000169618; CTA
IAIDRYLAI

SEQ ID NO: 72751 - protein, 9 aa, Homo sapiens
  Table A; Target 72751; HLA-C*02:02; PROKR1; ENSG00000169618; CTA
IAIDRYLAI

SEQ ID NO: 72752 - protein, 9 aa, Homo sapiens
  Table A; Target 72752; HLA-C*03:03; PROKR1; ENSG00000169618; CTA
IAIDRYLAI

SEQ ID NO: 72753 - protein, 9 aa, Homo sapiens
  Table A; Target 72753; HLA-C*03:04; PROKR1; ENSG00000169618; CTA
IAIDRYLAI

SEQ ID NO: 72754 - protein, 9 aa, Homo sapiens
  Table A; Target 72754; HLA-C*16:01; PROKR1; ENSG00000169618; CTA
IAIDRYLAI

SEQ ID NO: 72755 - protein, 9 aa, Homo sapiens
  Table A; Target 72755; HLA-C*16:02; PROKR1; ENSG00000169618; CTA
IAIDRYLAI

SEQ ID NO: 72756 - protein, 9 aa, Homo sapiens
  Table A; Target 72756; HLA-C*16:04; PROKR1; ENSG00000169618; CTA
IAIDRYLAI

SEQ ID NO: 72757 - protein, 8 aa, Homo sapiens
  Table A; Target 72757; HLA-A*23:01; PROKR1; ENSG00000169618; CTA
IAIPSAYF

SEQ ID NO: 72758 - protein, 8 aa, Homo sapiens
  Table A; Target 72758; HLA-B*57:01; PROKR1; ENSG00000169618; CTA
IAIPSAYF

SEQ ID NO: 72759 - protein, 8 aa, Homo sapiens
  Table A; Target 72759; HLA-B*58:01; PROKR1; ENSG00000169618; CTA
IAIPSAYF

SEQ ID NO: 72760 - protein, 9 aa, Homo sapiens
  Table A; Target 72760; HLA-B*51:01; PROKR1; ENSG00000169618; CTA
IALVWTVSI

SEQ ID NO: 72761 - protein, 8 aa, Homo sapiens
  Table A; Target 72761; HLA-B*51:01; PROKR1; ENSG00000169618; CTA
IAMSNSMI

SEQ ID NO: 72762 - protein, 11 aa, Homo sapiens
  Table A; Target 72762; HLA-A*23:01; PROKR1; ENSG00000169618; CTA
IAMSNSMINTL

SEQ ID NO: 72763 - protein, 11 aa, Homo sapiens
  Table A; Target 72763; HLA-B*35:03; PROKR1; ENSG00000169618; CTA
IAMSNSMINTL

SEQ ID NO: 72764 - protein, 11 aa, Homo sapiens
  Table A; Target 72764; HLA-C*03:03; PROKR1; ENSG00000169618; CTA
IAMSNSMINTL

SEQ ID NO: 72765 - protein, 11 aa, Homo sapiens
  Table A; Target 72765; HLA-C*03:04; PROKR1; ENSG00000169618; CTA
IAMSNSMINTL

SEQ ID NO: 72766 - protein, 9 aa, Homo sapiens
  Table A; Target 72766; HLA-B*35:01; PROKR1; ENSG00000169618; CTA
IANLAISDF

SEQ ID NO: 72767 - protein, 9 aa, Homo sapiens
  Table A; Target 72767; HLA-B*46:01; PROKR1; ENSG00000169618; CTA
IANLAISDF

SEQ ID NO: 72768 - protein, 9 aa, Homo sapiens
  Table A; Target 72768; HLA-C*02:02; PROKR1; ENSG00000169618; CTA
IANLAISDF

SEQ ID NO: 72769 - protein, 9 aa, Homo sapiens
  Table A; Target 72769; HLA-C*05:01; PROKR1; ENSG00000169618; CTA
IANLAISDF

SEQ ID NO: 72770 - protein, 8 aa, Homo sapiens
  Table A; Target 72770; HLA-A*30:01; PROKR1; ENSG00000169618; CTA
IEFVGPVV

SEQ ID NO: 72771 - protein, 8 aa, Homo sapiens
  Table A; Target 72771; HLA-B*13:02; PROKR1; ENSG00000169618; CTA
IEFVGPVV

SEQ ID NO: 72772 - protein, 8 aa, Homo sapiens
  Table A; Target 72772; HLA-B*18:01; PROKR1; ENSG00000169618; CTA
IEFVGPVV

SEQ ID NO: 72773 - protein, 8 aa, Homo sapiens
  Table A; Target 72773; HLA-B*37:01; PROKR1; ENSG00000169618; CTA
IEFVGPVV

SEQ ID NO: 72774 - protein, 8 aa, Homo sapiens
  Table A; Target 72774; HLA-B*40:01; PROKR1; ENSG00000169618; CTA
IEFVGPVV

SEQ ID NO: 72775 - protein, 8 aa, Homo sapiens
  Table A; Target 72775; HLA-B*40:02; PROKR1; ENSG00000169618; CTA
IEFVGPVV

SEQ ID NO: 72776 - protein, 8 aa, Homo sapiens
  Table A; Target 72776; HLA-B*49:01; PROKR1; ENSG00000169618; CTA
IEFVGPVV

SEQ ID NO: 72777 - protein, 8 aa, Homo sapiens
  Table A; Target 72777; HLA-B*51:01; PROKR1; ENSG00000169618; CTA
IEFVGPVV

SEQ ID NO: 72778 - protein, 8 aa, Homo sapiens
  Table A; Target 72778; HLA-C*12:03; PROKR1; ENSG00000169618; CTA
IEFVGPVV

SEQ ID NO: 72779 - protein, 9 aa, Homo sapiens
  Table A; Target 72779; HLA-A*30:01; PROKR1; ENSG00000169618; CTA
IEFVGPVVT

SEQ ID NO: 72780 - protein, 9 aa, Homo sapiens
  Table A; Target 72780; HLA-B*18:01; PROKR1; ENSG00000169618; CTA
IEFVGPVVT

SEQ ID NO: 72781 - protein, 9 aa, Homo sapiens
  Table A; Target 72781; HLA-B*40:01; PROKR1; ENSG00000169618; CTA
IEFVGPVVT

SEQ ID NO: 72782 - protein, 9 aa, Homo sapiens
  Table A; Target 72782; HLA-B*40:02; PROKR1; ENSG00000169618; CTA
IEFVGPVVT

SEQ ID NO: 72783 - protein, 9 aa, Homo sapiens
  Table A; Target 72783; HLA-B*49:01; PROKR1; ENSG00000169618; CTA
IEFVGPVVT

SEQ ID NO: 72784 - protein, 10 aa, Homo sapiens
  Table A; Target 72784; HLA-A*30:01; PROKR1; ENSG00000169618; CTA
IEFVGPVVTM

SEQ ID NO: 72785 - protein, 10 aa, Homo sapiens
  Table A; Target 72785; HLA-B*18:01; PROKR1; ENSG00000169618; CTA
IEFVGPVVTM

SEQ ID NO: 72786 - protein, 10 aa, Homo sapiens
  Table A; Target 72786; HLA-B*37:01; PROKR1; ENSG00000169618; CTA
IEFVGPVVTM

SEQ ID NO: 72787 - protein, 10 aa, Homo sapiens
  Table A; Target 72787; HLA-B*40:01; PROKR1; ENSG00000169618; CTA
IEFVGPVVTM

SEQ ID NO: 72788 - protein, 10 aa, Homo sapiens
  Table A; Target 72788; HLA-B*40:02; PROKR1; ENSG00000169618; CTA
IEFVGPVVTM

SEQ ID NO: 72789 - protein, 10 aa, Homo sapiens
  Table A; Target 72789; HLA-B*44:02; PROKR1; ENSG00000169618; CTA
IEFVGPVVTM

SEQ ID NO: 72790 - protein, 10 aa, Homo sapiens
  Table A; Target 72790; HLA-B*44:03; PROKR1; ENSG00000169618; CTA
IEFVGPVVTM

SEQ ID NO: 72791 - protein, 10 aa, Homo sapiens
  Table A; Target 72791; HLA-B*49:01; PROKR1; ENSG00000169618; CTA
IEFVGPVVTM

SEQ ID NO: 72792 - protein, 10 aa, Homo sapiens
  Table A; Target 72792; HLA-C*16:04; PROKR1; ENSG00000169618; CTA
IEFVGPVVTM

SEQ ID NO: 72793 - protein, 9 aa, Homo sapiens
  Table A; Target 72793; HLA-A*23:01; PROKR1; ENSG00000169618; CTA
IFIAALVRY

SEQ ID NO: 72794 - protein, 9 aa, Homo sapiens
  Table A; Target 72794; HLA-A*24:02; PROKR1; ENSG00000169618; CTA
IFIAALVRY

SEQ ID NO: 72795 - protein, 9 aa, Homo sapiens
  Table A; Target 72795; HLA-A*29:02; PROKR1; ENSG00000169618; CTA
IFIAALVRY

SEQ ID NO: 72796 - protein, 9 aa, Homo sapiens
  Table A; Target 72796; HLA-C*14:02; PROKR1; ENSG00000169618; CTA
IFIAALVRY

SEQ ID NO: 72797 - protein, 9 aa, Homo sapiens
  Table A; Target 72797; HLA-B*46:01; PROKR1; ENSG00000169618; CTA
IGMPATEEV

SEQ ID NO: 72798 - protein, 9 aa, Homo sapiens
  Table A; Target 72798; HLA-B*54:01; PROKR1; ENSG00000169618; CTA
IGNFIFIAA

SEQ ID NO: 72799 - protein, 9 aa, Homo sapiens
  Table A; Target 72799; HLA-B*56:01; PROKR1; ENSG00000169618; CTA
IGNFIFIAA

SEQ ID NO: 72800 - protein, 9 aa, Homo sapiens
  Table A; Target 72800; HLA-A*01:01; PROKR1; ENSG00000169618; CTA
ILIAIPSAY

SEQ ID NO: 72801 - protein, 9 aa, Homo sapiens
  Table A; Target 72801; HLA-A*03:01; PROKR1; ENSG00000169618; CTA
ILIAIPSAY

SEQ ID NO: 72802 - protein, 9 aa, Homo sapiens
  Table A; Target 72802; HLA-A*23:01; PROKR1; ENSG00000169618; CTA
ILIAIPSAY

SEQ ID NO: 72803 - protein, 9 aa, Homo sapiens
  Table A; Target 72803; HLA-A*25:01; PROKR1; ENSG00000169618; CTA
ILIAIPSAY

SEQ ID NO: 72804 - protein, 9 aa, Homo sapiens
  Table A; Target 72804; HLA-A*26:01; PROKR1; ENSG00000169618; CTA
ILIAIPSAY

SEQ ID NO: 72805 - protein, 9 aa, Homo sapiens
  Table A; Target 72805; HLA-A*29:02; PROKR1; ENSG00000169618; CTA
ILIAIPSAY

SEQ ID NO: 72806 - protein, 9 aa, Homo sapiens
  Table A; Target 72806; HLA-A*30:02; PROKR1; ENSG00000169618; CTA
ILIAIPSAY

SEQ ID NO: 72807 - protein, 9 aa, Homo sapiens
  Table A; Target 72807; HLA-A*32:01; PROKR1; ENSG00000169618; CTA
ILIAIPSAY

SEQ ID NO: 72808 - protein, 9 aa, Homo sapiens
  Table A; Target 72808; HLA-B*15:01; PROKR1; ENSG00000169618; CTA
ILIAIPSAY

SEQ ID NO: 72809 - protein, 9 aa, Homo sapiens
  Table A; Target 72809; HLA-B*15:03; PROKR1; ENSG00000169618; CTA
ILIAIPSAY

SEQ ID NO: 72810 - protein, 9 aa, Homo sapiens
  Table A; Target 72810; HLA-B*18:01; PROKR1; ENSG00000169618; CTA
ILIAIPSAY

SEQ ID NO: 72811 - protein, 9 aa, Homo sapiens
  Table A; Target 72811; HLA-B*46:01; PROKR1; ENSG00000169618; CTA
ILIAIPSAY

SEQ ID NO: 72812 - protein, 9 aa, Homo sapiens
  Table A; Target 72812; HLA-B*58:01; PROKR1; ENSG00000169618; CTA
ILIAIPSAY

SEQ ID NO: 72813 - protein, 9 aa, Homo sapiens
  Table A; Target 72813; HLA-C*01:02; PROKR1; ENSG00000169618; CTA
ILIAIPSAY

SEQ ID NO: 72814 - protein, 9 aa, Homo sapiens
  Table A; Target 72814; HLA-C*02:02; PROKR1; ENSG00000169618; CTA
ILIAIPSAY

SEQ ID NO: 72815 - protein, 9 aa, Homo sapiens
  Table A; Target 72815; HLA-C*07:04; PROKR1; ENSG00000169618; CTA
ILIAIPSAY

SEQ ID NO: 72816 - protein, 9 aa, Homo sapiens
  Table A; Target 72816; HLA-C*14:02; PROKR1; ENSG00000169618; CTA
ILIAIPSAY

SEQ ID NO: 72817 - protein, 9 aa, Homo sapiens
  Table A; Target 72817; HLA-C*16:04; PROKR1; ENSG00000169618; CTA
ILIAIPSAY

SEQ ID NO: 72818 - protein, 10 aa, Homo sapiens
  Table A; Target 72818; HLA-A*23:01; PROKR1; ENSG00000169618; CTA
ILIAIPSAYF

SEQ ID NO: 72819 - protein, 10 aa, Homo sapiens
  Table A; Target 72819; HLA-A*24:02; PROKR1; ENSG00000169618; CTA
ILIAIPSAYF

SEQ ID NO: 72820 - protein, 9 aa, Homo sapiens
  Table A; Target 72820; HLA-A*01:01; PROKR1; ENSG00000169618; CTA
ISDFLVAIV

SEQ ID NO: 72821 - protein, 9 aa, Homo sapiens
  Table A; Target 72821; HLA-A*02:03; PROKR1; ENSG00000169618; CTA
IVRDFFPTV

SEQ ID NO: 72822 - protein, 9 aa, Homo sapiens
  Table A; Target 72822; HLA-A*02:07; PROKR1; ENSG00000169618; CTA
IVRDFFPTV

SEQ ID NO: 72823 - protein, 9 aa, Homo sapiens
  Table A; Target 72823; HLA-B*51:01; PROKR1; ENSG00000169618; CTA
IVRDFFPTV

SEQ ID NO: 72824 - protein, 9 aa, Homo sapiens
  Table A; Target 72824; HLA-B*54:01; PROKR1; ENSG00000169618; CTA
IVRDFFPTV

SEQ ID NO: 72825 - protein, 10 aa, Homo sapiens
  Table A; Target 72825; HLA-B*57:01; PROKR1; ENSG00000169618; CTA
IVRDFFPTVF

SEQ ID NO: 72826 - protein, 8 aa, Homo sapiens
  Table A; Target 72826; HLA-C*03:04; PROKR1; ENSG00000169618; CTA
KIVIGMAL

SEQ ID NO: 72827 - protein, 9 aa, Homo sapiens
  Table A; Target 72827; HLA-A*24:02; PROKR1; ENSG00000169618; CTA
KYFKKIMLL

SEQ ID NO: 72828 - protein, 8 aa, Homo sapiens
  Table A; Target 72828; HLA-B*58:01; PROKR1; ENSG00000169618; CTA
LAIAIDRY

SEQ ID NO: 72829 - protein, 9 aa, Homo sapiens
  Table A; Target 72829; HLA-B*57:01; PROKR1; ENSG00000169618; CTA
LAIAIDRYL

SEQ ID NO: 72830 - protein, 9 aa, Homo sapiens
  Table A; Target 72830; HLA-C*02:02; PROKR1; ENSG00000169618; CTA
LAIAIDRYL

SEQ ID NO: 72831 - protein, 9 aa, Homo sapiens
  Table A; Target 72831; HLA-B*54:01; PROKR1; ENSG00000169618; CTA
LAISDFLVA

SEQ ID NO: 72832 - protein, 9 aa, Homo sapiens
  Table A; Target 72832; HLA-B*54:01; PROKR1; ENSG00000169618; CTA
LAIVHPLRP

SEQ ID NO: 72833 - protein, 8 aa, Homo sapiens
  Table A; Target 72833; HLA-B*37:01; PROKR1; ENSG00000169618; CTA
LDLKTIGM

SEQ ID NO: 72834 - protein, 8 aa, Homo sapiens
  Table A; Target 72834; HLA-A*01:01; PROKR1; ENSG00000169618; CTA
LIAIPSAY

SEQ ID NO: 72835 - protein, 8 aa, Homo sapiens
  Table A; Target 72835; HLA-B*46:01; PROKR1; ENSG00000169618; CTA
LIAIPSAY

SEQ ID NO: 72836 - protein, 9 aa, Homo sapiens
  Table A; Target 72836; HLA-A*01:01; PROKR1; ENSG00000169618; CTA
LLAIAIDRY

SEQ ID NO: 72837 - protein, 9 aa, Homo sapiens
  Table A; Target 72837; HLA-A*29:02; PROKR1; ENSG00000169618; CTA
LLAIAIDRY

SEQ ID NO: 72838 - protein, 9 aa, Homo sapiens
  Table A; Target 72838; HLA-B*15:01; PROKR1; ENSG00000169618; CTA
LLAIAIDRY

SEQ ID NO: 72839 - protein, 9 aa, Homo sapiens
  Table A; Target 72839; HLA-A*02:04; PROKR1; ENSG00000169618; CTA
LSWEHGHVL

SEQ ID NO: 72840 - protein, 9 aa, Homo sapiens
  Table A; Target 72840; HLA-A*02:07; PROKR1; ENSG00000169618; CTA
LSWEHGHVL

SEQ ID NO: 72841 - protein, 9 aa, Homo sapiens
  Table A; Target 72841; HLA-C*03:03; PROKR1; ENSG00000169618; CTA
LSWEHGHVL

SEQ ID NO: 72842 - protein, 9 aa, Homo sapiens
  Table A; Target 72842; HLA-C*03:04; PROKR1; ENSG00000169618; CTA
LSWEHGHVL

SEQ ID NO: 72843 - protein, 9 aa, Homo sapiens
  Table A; Target 72843; HLA-A*02:04; PROKR1; ENSG00000169618; CTA
LTNLLIANL

SEQ ID NO: 72844 - protein, 9 aa, Homo sapiens
  Table A; Target 72844; HLA-A*24:02; PROKR1; ENSG00000169618; CTA
LWFKAVPGF

SEQ ID NO: 72845 - protein, 8 aa, Homo sapiens
  Table A; Target 72845; HLA-A*23:01; PROKR1; ENSG00000169618; CTA
LYVSTNAL

SEQ ID NO: 72846 - protein, 8 aa, Homo sapiens
  Table A; Target 72846; HLA-C*01:02; PROKR1; ENSG00000169618; CTA
LYVSTNAL

SEQ ID NO: 72847 - protein, 8 aa, Homo sapiens
  Table A; Target 72847; HLA-C*14:02; PROKR1; ENSG00000169618; CTA
LYVSTNAL

SEQ ID NO: 72848 - protein, 9 aa, Homo sapiens
  Table A; Target 72848; HLA-A*23:01; PROKR1; ENSG00000169618; CTA
LYVSTNALL

SEQ ID NO: 72849 - protein, 9 aa, Homo sapiens
  Table A; Target 72849; HLA-A*24:02; PROKR1; ENSG00000169618; CTA
LYVSTNALL

SEQ ID NO: 72850 - protein, 9 aa, Homo sapiens
  Table A; Target 72850; HLA-C*14:02; PROKR1; ENSG00000169618; CTA
LYVSTNALL

SEQ ID NO: 72851 - protein, 11 aa, Homo sapiens
  Table A; Target 72851; HLA-A*23:01; PROKR1; ENSG00000169618; CTA
LYVSTNALLAI

SEQ ID NO: 72852 - protein, 9 aa, Homo sapiens
  Table A; Target 72852; HLA-A*24:02; PROKR1; ENSG00000169618; CTA
LYYKSYFLF

SEQ ID NO: 72853 - protein, 8 aa, Homo sapiens
  Table A; Target 72853; HLA-C*03:03; PROKR1; ENSG00000169618; CTA
MALVGIML

SEQ ID NO: 72854 - protein, 8 aa, Homo sapiens
  Table A; Target 72854; HLA-C*03:04; PROKR1; ENSG00000169618; CTA
MALVGIML

SEQ ID NO: 72855 - protein, 9 aa, Homo sapiens
  Table A; Target 72855; HLA-B*51:01; PROKR1; ENSG00000169618; CTA
MALVGIMLV

SEQ ID NO: 72856 - protein, 9 aa, Homo sapiens
  Table A; Target 72856; HLA-B*54:01; PROKR1; ENSG00000169618; CTA
MALVGIMLV

SEQ ID NO: 72857 - protein, 9 aa, Homo sapiens
  Table A; Target 72857; HLA-C*02:02; PROKR1; ENSG00000169618; CTA
MALVGIMLV

SEQ ID NO: 72858 - protein, 9 aa, Homo sapiens
  Table A; Target 72858; HLA-C*06:02; PROKR1; ENSG00000169618; CTA
MDYYVVRQL

SEQ ID NO: 72859 - protein, 9 aa, Homo sapiens
  Table A; Target 72859; HLA-A*29:02; PROKR1; ENSG00000169618; CTA
MLLHWKASY

SEQ ID NO: 72860 - protein, 9 aa, Homo sapiens
  Table A; Target 72860; HLA-B*35:03; PROKR1; ENSG00000169618; CTA
MPATEEVDC

SEQ ID NO: 72861 - protein, 9 aa, Homo sapiens
  Table A; Target 72861; HLA-B*55:01; PROKR1; ENSG00000169618; CTA
MPATEEVDC

SEQ ID NO: 72862 - protein, 10 aa, Homo sapiens
  Table A; Target 72862; HLA-B*35:03; PROKR1; ENSG00000169618; CTA
MPATEEVDCI

SEQ ID NO: 72863 - protein, 10 aa, Homo sapiens
  Table A; Target 72863; HLA-B*55:01; PROKR1; ENSG00000169618; CTA
MPATEEVDCI

SEQ ID NO: 72864 - protein, 9 aa, Homo sapiens
  Table A; Target 72864; HLA-B*35:03; PROKR1; ENSG00000169618; CTA
MPLDEDEDV

SEQ ID NO: 72865 - protein, 10 aa, Homo sapiens
  Table A; Target 72865; HLA-B*35:03; PROKR1; ENSG00000169618; CTA
MPLDEDEDVT

SEQ ID NO: 72866 - protein, 9 aa, Homo sapiens
  Table A; Target 72866; HLA-B*35:01; PROKR1; ENSG00000169618; CTA
MSNSMINTL

SEQ ID NO: 72867 - protein, 9 aa, Homo sapiens
  Table A; Target 72867; HLA-B*35:03; PROKR1; ENSG00000169618; CTA
MSNSMINTL

SEQ ID NO: 72868 - protein, 9 aa, Homo sapiens
  Table A; Target 72868; HLA-B*58:01; PROKR1; ENSG00000169618; CTA
MSNSMINTL

SEQ ID NO: 72869 - protein, 9 aa, Homo sapiens
  Table A; Target 72869; HLA-C*02:02; PROKR1; ENSG00000169618; CTA
MSNSMINTL

SEQ ID NO: 72870 - protein, 9 aa, Homo sapiens
  Table A; Target 72870; HLA-C*03:03; PROKR1; ENSG00000169618; CTA
MSNSMINTL

SEQ ID NO: 72871 - protein, 9 aa, Homo sapiens
  Table A; Target 72871; HLA-C*03:04; PROKR1; ENSG00000169618; CTA
MSNSMINTL

SEQ ID NO: 72872 - protein, 9 aa, Homo sapiens
  Table A; Target 72872; HLA-C*07:04; PROKR1; ENSG00000169618; CTA
MSNSMINTL

SEQ ID NO: 72873 - protein, 9 aa, Homo sapiens
  Table A; Target 72873; HLA-C*12:03; PROKR1; ENSG00000169618; CTA
MSNSMINTL

SEQ ID NO: 72874 - protein, 9 aa, Homo sapiens
  Table A; Target 72874; HLA-C*16:01; PROKR1; ENSG00000169618; CTA
MSNSMINTL

SEQ ID NO: 72875 - protein, 9 aa, Homo sapiens
  Table A; Target 72875; HLA-C*16:02; PROKR1; ENSG00000169618; CTA
MSNSMINTL

SEQ ID NO: 72876 - protein, 8 aa, Homo sapiens
  Table A; Target 72876; HLA-B*51:01; PROKR1; ENSG00000169618; CTA
NALLAIAI

SEQ ID NO: 72877 - protein, 9 aa, Homo sapiens
  Table A; Target 72877; HLA-A*23:01; PROKR1; ENSG00000169618; CTA
NATNTSTSF

SEQ ID NO: 72878 - protein, 9 aa, Homo sapiens
  Table A; Target 72878; HLA-A*25:01; PROKR1; ENSG00000169618; CTA
NATNTSTSF

SEQ ID NO: 72879 - protein, 9 aa, Homo sapiens
  Table A; Target 72879; HLA-A*32:01; PROKR1; ENSG00000169618; CTA
NATNTSTSF

SEQ ID NO: 72880 - protein, 9 aa, Homo sapiens
  Table A; Target 72880; HLA-B*15:03; PROKR1; ENSG00000169618; CTA
NATNTSTSF

SEQ ID NO: 72881 - protein, 9 aa, Homo sapiens
  Table A; Target 72881; HLA-B*35:01; PROKR1; ENSG00000169618; CTA
NATNTSTSF

SEQ ID NO: 72882 - protein, 9 aa, Homo sapiens
  Table A; Target 72882; HLA-B*35:03; PROKR1; ENSG00000169618; CTA
NATNTSTSF

SEQ ID NO: 72883 - protein, 9 aa, Homo sapiens
  Table A; Target 72883; HLA-B*39:01; PROKR1; ENSG00000169618; CTA
NATNTSTSF

SEQ ID NO: 72884 - protein, 9 aa, Homo sapiens
  Table A; Target 72884; HLA-B*46:01; PROKR1; ENSG00000169618; CTA
NATNTSTSF

SEQ ID NO: 72885 - protein, 9 aa, Homo sapiens
  Table A; Target 72885; HLA-B*55:01; PROKR1; ENSG00000169618; CTA
NATNTSTSF

SEQ ID NO: 72886 - protein, 9 aa, Homo sapiens
  Table A; Target 72886; HLA-B*58:01; PROKR1; ENSG00000169618; CTA
NATNTSTSF

SEQ ID NO: 72887 - protein, 9 aa, Homo sapiens
  Table A; Target 72887; HLA-C*02:02; PROKR1; ENSG00000169618; CTA
NATNTSTSF

SEQ ID NO: 72888 - protein, 9 aa, Homo sapiens
  Table A; Target 72888; HLA-C*03:03; PROKR1; ENSG00000169618; CTA
NATNTSTSF

SEQ ID NO: 72889 - protein, 9 aa, Homo sapiens
  Table A; Target 72889; HLA-C*03:04; PROKR1; ENSG00000169618; CTA
NATNTSTSF

SEQ ID NO: 72890 - protein, 9 aa, Homo sapiens
  Table A; Target 72890; HLA-C*05:01; PROKR1; ENSG00000169618; CTA
NATNTSTSF

SEQ ID NO: 72891 - protein, 9 aa, Homo sapiens
  Table A; Target 72891; HLA-C*07:06; PROKR1; ENSG00000169618; CTA
NATNTSTSF

SEQ ID NO: 72892 - protein, 9 aa, Homo sapiens
  Table A; Target 72892; HLA-C*14:02; PROKR1; ENSG00000169618; CTA
NATNTSTSF

SEQ ID NO: 72893 - protein, 9 aa, Homo sapiens
  Table A; Target 72893; HLA-C*16:01; PROKR1; ENSG00000169618; CTA
NATNTSTSF

SEQ ID NO: 72894 - protein, 9 aa, Homo sapiens
  Table A; Target 72894; HLA-C*16:02; PROKR1; ENSG00000169618; CTA
NATNTSTSF

SEQ ID NO: 72895 - protein, 11 aa, Homo sapiens
  Table A; Target 72895; HLA-A*29:02; PROKR1; ENSG00000169618; CTA
NFIFIAALVRY

SEQ ID NO: 72896 - protein, 10 aa, Homo sapiens
  Table A; Target 72896; HLA-A*02:04; PROKR1; ENSG00000169618; CTA
NLTNLLIANL

SEQ ID NO: 72897 - protein, 10 aa, Homo sapiens
  Table A; Target 72897; HLA-B*07:02; PROKR1; ENSG00000169618; CTA
NPHGAHATSF

SEQ ID NO: 72898 - protein, 10 aa, Homo sapiens
  Table A; Target 72898; HLA-B*35:01; PROKR1; ENSG00000169618; CTA
NPHGAHATSF

SEQ ID NO: 72899 - protein, 10 aa, Homo sapiens
  Table A; Target 72899; HLA-B*35:03; PROKR1; ENSG00000169618; CTA
NPHGAHATSF

SEQ ID NO: 72900 - protein, 10 aa, Homo sapiens
  Table A; Target 72900; HLA-C*07:02; PROKR1; ENSG00000169618; CTA
NPHGAHATSF

SEQ ID NO: 72901 - protein, 9 aa, Homo sapiens
  Table A; Target 72901; HLA-A*11:01; PROKR1; ENSG00000169618; CTA
NTLCFVTVK

SEQ ID NO: 72902 - protein, 9 aa, Homo sapiens
  Table A; Target 72902; HLA-A*68:02; PROKR1; ENSG00000169618; CTA
NTSTSFLSV

SEQ ID NO: 72903 - protein, 8 aa, Homo sapiens
  Table A; Target 72903; HLA-A*23:01; PROKR1; ENSG00000169618; CTA
NYLRTVSL

SEQ ID NO: 72904 - protein, 8 aa, Homo sapiens
  Table A; Target 72904; HLA-C*14:02; PROKR1; ENSG00000169618; CTA
NYLRTVSL

SEQ ID NO: 72905 - protein, 9 aa, Homo sapiens
  Table A; Target 72905; HLA-A*23:01; PROKR1; ENSG00000169618; CTA
NYLRTVSLY

SEQ ID NO: 72906 - protein, 9 aa, Homo sapiens
  Table A; Target 72906; HLA-A*24:02; PROKR1; ENSG00000169618; CTA
NYLRTVSLY

SEQ ID NO: 72907 - protein, 9 aa, Homo sapiens
  Table A; Target 72907; HLA-A*29:02; PROKR1; ENSG00000169618; CTA
NYLRTVSLY

SEQ ID NO: 72908 - protein, 9 aa, Homo sapiens
  Table A; Target 72908; HLA-C*14:02; PROKR1; ENSG00000169618; CTA
NYLRTVSLY

SEQ ID NO: 72909 - protein, 8 aa, Homo sapiens
  Table A; Target 72909; HLA-A*01:01; PROKR1; ENSG00000169618; CTA
PVDQQLYY

SEQ ID NO: 72910 - protein, 9 aa, Homo sapiens
  Table A; Target 72910; HLA-A*03:02; PROKR1; ENSG00000169618; CTA
PVDQQLYYK

SEQ ID NO: 72911 - protein, 9 aa, Homo sapiens
  Table A; Target 72911; HLA-A*29:02; PROKR1; ENSG00000169618; CTA
PVVTMTLCY

SEQ ID NO: 72912 - protein, 9 aa, Homo sapiens
  Table A; Target 72912; HLA-A*02:04; PROKR1; ENSG00000169618; CTA
QIWPVDQQL

SEQ ID NO: 72913 - protein, 9 aa, Homo sapiens
  Table A; Target 72913; HLA-A*02:07; PROKR1; ENSG00000169618; CTA
QIWPVDQQL

SEQ ID NO: 72914 - protein, 9 aa, Homo sapiens
  Table A; Target 72914; HLA-B*35:03; PROKR1; ENSG00000169618; CTA
QIWPVDQQL

SEQ ID NO: 72915 - protein, 10 aa, Homo sapiens
  Table A; Target 72915; HLA-A*29:02; PROKR1; ENSG00000169618; CTA
QIWPVDQQLY

SEQ ID NO: 72916 - protein, 11 aa, Homo sapiens
  Table A; Target 72916; HLA-A*29:02; PROKR1; ENSG00000169618; CTA
QIWPVDQQLYY

SEQ ID NO: 72917 - protein, 9 aa, Homo sapiens
  Table A; Target 72917; HLA-C*01:02; PROKR1; ENSG00000169618; CTA
QTATGLIAL

SEQ ID NO: 72918 - protein, 11 aa, Homo sapiens
  Table A; Target 72918; HLA-B*57:01; PROKR1; ENSG00000169618; CTA
QTATGLIALVW

SEQ ID NO: 72919 - protein, 8 aa, Homo sapiens
  Table A; Target 72919; HLA-B*37:01; PROKR1; ENSG00000169618; CTA
RDFFPTVF

SEQ ID NO: 72920 - protein, 9 aa, Homo sapiens
  Table A; Target 72920; HLA-A*23:01; PROKR1; ENSG00000169618; CTA
RYLAIVHPL

SEQ ID NO: 72921 - protein, 9 aa, Homo sapiens
  Table A; Target 72921; HLA-A*24:02; PROKR1; ENSG00000169618; CTA
RYLAIVHPL

SEQ ID NO: 72922 - protein, 9 aa, Homo sapiens
  Table A; Target 72922; HLA-A*31:01; PROKR1; ENSG00000169618; CTA
RYLAIVHPL

SEQ ID NO: 72923 - protein, 9 aa, Homo sapiens
  Table A; Target 72923; HLA-B*38:01; PROKR1; ENSG00000169618; CTA
SADLDLKTI

SEQ ID NO: 72924 - protein, 9 aa, Homo sapiens
  Table A; Target 72924; HLA-B*51:01; PROKR1; ENSG00000169618; CTA
SADLDLKTI

SEQ ID NO: 72925 - protein, 9 aa, Homo sapiens
  Table A; Target 72925; HLA-C*05:01; PROKR1; ENSG00000169618; CTA
SADLDLKTI

SEQ ID NO: 72926 - protein, 9 aa, Homo sapiens
  Table A; Target 72926; HLA-C*16:02; PROKR1; ENSG00000169618; CTA
SADLDLKTI

SEQ ID NO: 72927 - protein, 9 aa, Homo sapiens
  Table A; Target 72927; HLA-B*13:02; PROKR1; ENSG00000169618; CTA
SAYFTTETV

SEQ ID NO: 72928 - protein, 9 aa, Homo sapiens
  Table A; Target 72928; HLA-B*46:01; PROKR1; ENSG00000169618; CTA
SAYFTTETV

SEQ ID NO: 72929 - protein, 9 aa, Homo sapiens
  Table A; Target 72929; HLA-B*49:01; PROKR1; ENSG00000169618; CTA
SAYFTTETV

SEQ ID NO: 72930 - protein, 9 aa, Homo sapiens
  Table A; Target 72930; HLA-B*51:01; PROKR1; ENSG00000169618; CTA
SAYFTTETV

SEQ ID NO: 72931 - protein, 9 aa, Homo sapiens
  Table A; Target 72931; HLA-C*02:02; PROKR1; ENSG00000169618; CTA
SAYFTTETV

SEQ ID NO: 72932 - protein, 9 aa, Homo sapiens
  Table A; Target 72932; HLA-C*03:04; PROKR1; ENSG00000169618; CTA
SAYFTTETV

SEQ ID NO: 72933 - protein, 9 aa, Homo sapiens
  Table A; Target 72933; HLA-C*05:01; PROKR1; ENSG00000169618; CTA
SAYFTTETV

SEQ ID NO: 72934 - protein, 9 aa, Homo sapiens
  Table A; Target 72934; HLA-C*12:03; PROKR1; ENSG00000169618; CTA
SAYFTTETV

SEQ ID NO: 72935 - protein, 9 aa, Homo sapiens
  Table A; Target 72935; HLA-C*16:04; PROKR1; ENSG00000169618; CTA
SAYFTTETV

SEQ ID NO: 72936 - protein, 10 aa, Homo sapiens
  Table A; Target 72936; HLA-B*35:03; PROKR1; ENSG00000169618; CTA
SAYFTTETVL

SEQ ID NO: 72937 - protein, 8 aa, Homo sapiens
  Table A; Target 72937; HLA-B*37:01; PROKR1; ENSG00000169618; CTA
SDFLVAIV

SEQ ID NO: 72938 - protein, 8 aa, Homo sapiens
  Table A; Target 72938; HLA-A*29:02; PROKR1; ENSG00000169618; CTA
SFPFNFSY

SEQ ID NO: 72939 - protein, 9 aa, Homo sapiens
  Table A; Target 72939; HLA-A*02:01; PROKR1; ENSG00000169618; CTA
SILIAIPSA

SEQ ID NO: 72940 - protein, 9 aa, Homo sapiens
  Table A; Target 72940; HLA-B*56:01; PROKR1; ENSG00000169618; CTA
SILIAIPSA

SEQ ID NO: 72941 - protein, 10 aa, Homo sapiens
  Table A; Target 72941; HLA-A*30:02; PROKR1; ENSG00000169618; CTA
SILIAIPSAY

SEQ ID NO: 72942 - protein, 9 aa, Homo sapiens
  Table A; Target 72942; HLA-A*02:01; PROKR1; ENSG00000169618; CTA
SLYVSTNAL

SEQ ID NO: 72943 - protein, 9 aa, Homo sapiens
  Table A; Target 72943; HLA-A*02:03; PROKR1; ENSG00000169618; CTA
SLYVSTNAL

SEQ ID NO: 72944 - protein, 9 aa, Homo sapiens
  Table A; Target 72944; HLA-A*02:04; PROKR1; ENSG00000169618; CTA
SLYVSTNAL

SEQ ID NO: 72945 - protein, 9 aa, Homo sapiens
  Table A; Target 72945; HLA-A*30:01; PROKR1; ENSG00000169618; CTA
SLYVSTNAL

SEQ ID NO: 72946 - protein, 9 aa, Homo sapiens
  Table A; Target 72946; HLA-B*07:02; PROKR1; ENSG00000169618; CTA
SLYVSTNAL

SEQ ID NO: 72947 - protein, 9 aa, Homo sapiens
  Table A; Target 72947; HLA-B*08:01; PROKR1; ENSG00000169618; CTA
SLYVSTNAL

SEQ ID NO: 72948 - protein, 9 aa, Homo sapiens
  Table A; Target 72948; HLA-B*13:02; PROKR1; ENSG00000169618; CTA
SLYVSTNAL

SEQ ID NO: 72949 - protein, 9 aa, Homo sapiens
  Table A; Target 72949; HLA-B*15:01; PROKR1; ENSG00000169618; CTA
SLYVSTNAL

SEQ ID NO: 72950 - protein, 9 aa, Homo sapiens
  Table A; Target 72950; HLA-B*15:03; PROKR1; ENSG00000169618; CTA
SLYVSTNAL

SEQ ID NO: 72951 - protein, 9 aa, Homo sapiens
  Table A; Target 72951; HLA-B*37:01; PROKR1; ENSG00000169618; CTA
SLYVSTNAL

SEQ ID NO: 72952 - protein, 9 aa, Homo sapiens
  Table A; Target 72952; HLA-B*40:01; PROKR1; ENSG00000169618; CTA
SLYVSTNAL

SEQ ID NO: 72953 - protein, 9 aa, Homo sapiens
  Table A; Target 72953; HLA-B*46:01; PROKR1; ENSG00000169618; CTA
SLYVSTNAL

SEQ ID NO: 72954 - protein, 9 aa, Homo sapiens
  Table A; Target 72954; HLA-C*01:02; PROKR1; ENSG00000169618; CTA
SLYVSTNAL

SEQ ID NO: 72955 - protein, 9 aa, Homo sapiens
  Table A; Target 72955; HLA-C*02:02; PROKR1; ENSG00000169618; CTA
SLYVSTNAL

SEQ ID NO: 72956 - protein, 9 aa, Homo sapiens
  Table A; Target 72956; HLA-C*03:03; PROKR1; ENSG00000169618; CTA
SLYVSTNAL

SEQ ID NO: 72957 - protein, 9 aa, Homo sapiens
  Table A; Target 72957; HLA-C*03:04; PROKR1; ENSG00000169618; CTA
SLYVSTNAL

SEQ ID NO: 72958 - protein, 9 aa, Homo sapiens
  Table A; Target 72958; HLA-C*14:02; PROKR1; ENSG00000169618; CTA
SLYVSTNAL

SEQ ID NO: 72959 - protein, 9 aa, Homo sapiens
  Table A; Target 72959; HLA-A*02:01; PROKR1; ENSG00000169618; CTA
SMINTLCFV

SEQ ID NO: 72960 - protein, 9 aa, Homo sapiens
  Table A; Target 72960; HLA-A*02:03; PROKR1; ENSG00000169618; CTA
SMINTLCFV

SEQ ID NO: 72961 - protein, 8 aa, Homo sapiens
  Table A; Target 72961; HLA-B*37:01; PROKR1; ENSG00000169618; CTA
SNSMINTL

SEQ ID NO: 72962 - protein, 10 aa, Homo sapiens
  Table A; Target 72962; HLA-B*07:02; PROKR1; ENSG00000169618; CTA
SVNYLRTVSL

SEQ ID NO: 72963 - protein, 11 aa, Homo sapiens
  Table A; Target 72963; HLA-A*30:02; PROKR1; ENSG00000169618; CTA
SVNYLRTVSLY

SEQ ID NO: 72964 - protein, 9 aa, Homo sapiens
  Table A; Target 72964; HLA-C*14:02; PROKR1; ENSG00000169618; CTA
SYNGGKSSA

SEQ ID NO: 72965 - protein, 8 aa, Homo sapiens
  Table A; Target 72965; HLA-B*54:01; PROKR1; ENSG00000169618; CTA
TAFYIVEC

SEQ ID NO: 72966 - protein, 8 aa, Homo sapiens
  Table A; Target 72966; HLA-B*56:01; PROKR1; ENSG00000169618; CTA
TAFYIVEC

SEQ ID NO: 72967 - protein, 8 aa, Homo sapiens
  Table A; Target 72967; HLA-C*12:03; PROKR1; ENSG00000169618; CTA
TAFYIVEC

SEQ ID NO: 72968 - protein, 9 aa, Homo sapiens
  Table A; Target 72968; HLA-A*68:02; PROKR1; ENSG00000169618; CTA
TAFYIVECI

SEQ ID NO: 72969 - protein, 9 aa, Homo sapiens
  Table A; Target 72969; HLA-B*13:02; PROKR1; ENSG00000169618; CTA
TAFYIVECI

SEQ ID NO: 72970 - protein, 9 aa, Homo sapiens
  Table A; Target 72970; HLA-B*51:01; PROKR1; ENSG00000169618; CTA
TAFYIVECI

SEQ ID NO: 72971 - protein, 9 aa, Homo sapiens
  Table A; Target 72971; HLA-B*54:01; PROKR1; ENSG00000169618; CTA
TAFYIVECI

SEQ ID NO: 72972 - protein, 8 aa, Homo sapiens
  Table A; Target 72972; HLA-C*03:04; PROKR1; ENSG00000169618; CTA
TATGLIAL

SEQ ID NO: 72973 - protein, 9 aa, Homo sapiens
  Table A; Target 72973; HLA-A*68:02; PROKR1; ENSG00000169618; CTA
TATGLIALV

SEQ ID NO: 72974 - protein, 9 aa, Homo sapiens
  Table A; Target 72974; HLA-B*13:02; PROKR1; ENSG00000169618; CTA
TATGLIALV

SEQ ID NO: 72975 - protein, 9 aa, Homo sapiens
  Table A; Target 72975; HLA-C*02:02; PROKR1; ENSG00000169618; CTA
TATGLIALV

SEQ ID NO: 72976 - protein, 9 aa, Homo sapiens
  Table A; Target 72976; HLA-C*12:03; PROKR1; ENSG00000169618; CTA
TATGLIALV

SEQ ID NO: 72977 - protein, 9 aa, Homo sapiens
  Table A; Target 72977; HLA-C*16:02; PROKR1; ENSG00000169618; CTA
TATGLIALV

SEQ ID NO: 72978 - protein, 10 aa, Homo sapiens
  Table A; Target 72978; HLA-B*44:02; PROKR1; ENSG00000169618; CTA
TATGLIALVW

SEQ ID NO: 72979 - protein, 9 aa, Homo sapiens
  Table A; Target 72979; HLA-B*40:01; PROKR1; ENSG00000169618; CTA
TEEVDCIRL

SEQ ID NO: 72980 - protein, 8 aa, Homo sapiens
  Table A; Target 72980; HLA-A*30:01; PROKR1; ENSG00000169618; CTA
TETVLVIV

SEQ ID NO: 72981 - protein, 8 aa, Homo sapiens
  Table A; Target 72981; HLA-B*18:01; PROKR1; ENSG00000169618; CTA
TETVLVIV

SEQ ID NO: 72982 - protein, 8 aa, Homo sapiens
  Table A; Target 72982; HLA-B*49:01; PROKR1; ENSG00000169618; CTA
TETVLVIV

SEQ ID NO: 72983 - protein, 9 aa, Homo sapiens
  Table A; Target 72983; HLA-B*18:01; PROKR1; ENSG00000169618; CTA
TETVLVIVK

SEQ ID NO: 72984 - protein, 9 aa, Homo sapiens
  Table A; Target 72984; HLA-B*27:02; PROKR1; ENSG00000169618; CTA
TETVLVIVK

SEQ ID NO: 72985 - protein, 9 aa, Homo sapiens
  Table A; Target 72985; HLA-B*49:01; PROKR1; ENSG00000169618; CTA
TETVLVIVK

SEQ ID NO: 72986 - protein, 9 aa, Homo sapiens
  Table A; Target 72986; HLA-A*01:01; PROKR1; ENSG00000169618; CTA
TSFPFNFSY

SEQ ID NO: 72987 - protein, 9 aa, Homo sapiens
  Table A; Target 72987; HLA-A*29:02; PROKR1; ENSG00000169618; CTA
TSFPFNFSY

SEQ ID NO: 72988 - protein, 9 aa, Homo sapiens
  Table A; Target 72988; HLA-A*30:02; PROKR1; ENSG00000169618; CTA
TSFPFNFSY

SEQ ID NO: 72989 - protein, 9 aa, Homo sapiens
  Table A; Target 72989; HLA-A*32:01; PROKR1; ENSG00000169618; CTA
TSFPFNFSY

SEQ ID NO: 72990 - protein, 9 aa, Homo sapiens
  Table A; Target 72990; HLA-B*35:01; PROKR1; ENSG00000169618; CTA
TSFPFNFSY

SEQ ID NO: 72991 - protein, 9 aa, Homo sapiens
  Table A; Target 72991; HLA-B*57:01; PROKR1; ENSG00000169618; CTA
TSFPFNFSY

SEQ ID NO: 72992 - protein, 9 aa, Homo sapiens
  Table A; Target 72992; HLA-B*58:01; PROKR1; ENSG00000169618; CTA
TSFPFNFSY

SEQ ID NO: 72993 - protein, 9 aa, Homo sapiens
  Table A; Target 72993; HLA-C*02:02; PROKR1; ENSG00000169618; CTA
TSFPFNFSY

SEQ ID NO: 72994 - protein, 9 aa, Homo sapiens
  Table A; Target 72994; HLA-C*16:04; PROKR1; ENSG00000169618; CTA
TSFPFNFSY

SEQ ID NO: 72995 - protein, 9 aa, Homo sapiens
  Table A; Target 72995; HLA-C*03:04; PROKR1; ENSG00000169618; CTA
TSTSFLSVL

SEQ ID NO: 72996 - protein, 9 aa, Homo sapiens
  Table A; Target 72996; HLA-C*16:02; PROKR1; ENSG00000169618; CTA
TSTSFLSVL

SEQ ID NO: 72997 - protein, 9 aa, Homo sapiens
  Table A; Target 72997; HLA-A*02:03; PROKR1; ENSG00000169618; CTA
TSVNYLRTV

SEQ ID NO: 72998 - protein, 9 aa, Homo sapiens
  Table A; Target 72998; HLA-C*02:02; PROKR1; ENSG00000169618; CTA
TSVNYLRTV

SEQ ID NO: 72999 - protein, 9 aa, Homo sapiens
  Table A; Target 72999; HLA-C*06:02; PROKR1; ENSG00000169618; CTA
TSVNYLRTV

SEQ ID NO: 73000 - protein, 9 aa, Homo sapiens
  Table A; Target 73000; HLA-C*16:01; PROKR1; ENSG00000169618; CTA
TSVNYLRTV

SEQ ID NO: 73001 - protein, 9 aa, Homo sapiens
  Table A; Target 73001; HLA-C*16:02; PROKR1; ENSG00000169618; CTA
TSVNYLRTV

SEQ ID NO: 73002 - protein, 9 aa, Homo sapiens
  Table A; Target 73002; HLA-A*01:01; PROKR1; ENSG00000169618; CTA
TTETVLVIV

SEQ ID NO: 73003 - protein, 9 aa, Homo sapiens
  Table A; Target 73003; HLA-A*68:02; PROKR1; ENSG00000169618; CTA
TTETVLVIV

SEQ ID NO: 73004 - protein, 9 aa, Homo sapiens
  Table A; Target 73004; HLA-C*05:01; PROKR1; ENSG00000169618; CTA
TTETVLVIV

SEQ ID NO: 73005 - protein, 10 aa, Homo sapiens
  Table A; Target 73005; HLA-A*01:01; PROKR1; ENSG00000169618; CTA
TTETVLVIVK

SEQ ID NO: 73006 - protein, 10 aa, Homo sapiens
  Table A; Target 73006; HLA-A*11:01; PROKR1; ENSG00000169618; CTA
TTETVLVIVK

SEQ ID NO: 73007 - protein, 10 aa, Homo sapiens
  Table A; Target 73007; HLA-A*68:01; PROKR1; ENSG00000169618; CTA
TTETVLVIVK

SEQ ID NO: 73008 - protein, 10 aa, Homo sapiens
  Table A; Target 73008; HLA-B*27:02; PROKR1; ENSG00000169618; CTA
TTETVLVIVK

SEQ ID NO: 73009 - protein, 9 aa, Homo sapiens
  Table A; Target 73009; HLA-A*25:01; PROKR1; ENSG00000169618; CTA
TVKNDTVKY

SEQ ID NO: 73010 - protein, 9 aa, Homo sapiens
  Table A; Target 73010; HLA-A*26:01; PROKR1; ENSG00000169618; CTA
TVKNDTVKY

SEQ ID NO: 73011 - protein, 9 aa, Homo sapiens
  Table A; Target 73011; HLA-A*29:02; PROKR1; ENSG00000169618; CTA
TVKNDTVKY

SEQ ID NO: 73012 - protein, 9 aa, Homo sapiens
  Table A; Target 73012; HLA-A*30:02; PROKR1; ENSG00000169618; CTA
TVKNDTVKY

SEQ ID NO: 73013 - protein, 9 aa, Homo sapiens
  Table A; Target 73013; HLA-A*32:01; PROKR1; ENSG00000169618; CTA
TVKNDTVKY

SEQ ID NO: 73014 - protein, 9 aa, Homo sapiens
  Table A; Target 73014; HLA-A*33:01; PROKR1; ENSG00000169618; CTA
TVKNDTVKY

SEQ ID NO: 73015 - protein, 9 aa, Homo sapiens
  Table A; Target 73015; HLA-A*33:03; PROKR1; ENSG00000169618; CTA
TVKNDTVKY

SEQ ID NO: 73016 - protein, 9 aa, Homo sapiens
  Table A; Target 73016; HLA-B*15:01; PROKR1; ENSG00000169618; CTA
TVKNDTVKY

SEQ ID NO: 73017 - protein, 9 aa, Homo sapiens
  Table A; Target 73017; HLA-B*15:03; PROKR1; ENSG00000169618; CTA
TVKNDTVKY

SEQ ID NO: 73018 - protein, 9 aa, Homo sapiens
  Table A; Target 73018; HLA-B*35:01; PROKR1; ENSG00000169618; CTA
TVKNDTVKY

SEQ ID NO: 73019 - protein, 9 aa, Homo sapiens
  Table A; Target 73019; HLA-B*46:01; PROKR1; ENSG00000169618; CTA
TVKNDTVKY

SEQ ID NO: 73020 - protein, 9 aa, Homo sapiens
  Table A; Target 73020; HLA-B*58:01; PROKR1; ENSG00000169618; CTA
TVKNDTVKY

SEQ ID NO: 73021 - protein, 9 aa, Homo sapiens
  Table A; Target 73021; HLA-C*02:02; PROKR1; ENSG00000169618; CTA
TVKNDTVKY

SEQ ID NO: 73022 - protein, 9 aa, Homo sapiens
  Table A; Target 73022; HLA-C*03:03; PROKR1; ENSG00000169618; CTA
TVKNDTVKY

SEQ ID NO: 73023 - protein, 9 aa, Homo sapiens
  Table A; Target 73023; HLA-C*07:04; PROKR1; ENSG00000169618; CTA
TVKNDTVKY

SEQ ID NO: 73024 - protein, 9 aa, Homo sapiens
  Table A; Target 73024; HLA-C*07:06; PROKR1; ENSG00000169618; CTA
TVKNDTVKY

SEQ ID NO: 73025 - protein, 9 aa, Homo sapiens
  Table A; Target 73025; HLA-C*12:03; PROKR1; ENSG00000169618; CTA
TVKNDTVKY

SEQ ID NO: 73026 - protein, 9 aa, Homo sapiens
  Table A; Target 73026; HLA-C*16:01; PROKR1; ENSG00000169618; CTA
TVKNDTVKY

SEQ ID NO: 73027 - protein, 9 aa, Homo sapiens
  Table A; Target 73027; HLA-C*16:04; PROKR1; ENSG00000169618; CTA
TVKNDTVKY

SEQ ID NO: 73028 - protein, 10 aa, Homo sapiens
  Table A; Target 73028; HLA-A*25:01; PROKR1; ENSG00000169618; CTA
TVKNDTVKYF

SEQ ID NO: 73029 - protein, 9 aa, Homo sapiens
  Table A; Target 73029; HLA-A*02:07; PROKR1; ENSG00000169618; CTA
VGPVVTMTL

SEQ ID NO: 73030 - protein, 9 aa, Homo sapiens
  Table A; Target 73030; HLA-A*23:01; PROKR1; ENSG00000169618; CTA
VGPVVTMTL

SEQ ID NO: 73031 - protein, 9 aa, Homo sapiens
  Table A; Target 73031; HLA-A*24:02; PROKR1; ENSG00000169618; CTA
VGPVVTMTL

SEQ ID NO: 73032 - protein, 9 aa, Homo sapiens
  Table A; Target 73032; HLA-B*08:01; PROKR1; ENSG00000169618; CTA
VGPVVTMTL

SEQ ID NO: 73033 - protein, 9 aa, Homo sapiens
  Table A; Target 73033; HLA-B*46:01; PROKR1; ENSG00000169618; CTA
VGPVVTMTL

SEQ ID NO: 73034 - protein, 9 aa, Homo sapiens
  Table A; Target 73034; HLA-B*51:01; PROKR1; ENSG00000169618; CTA
VGPVVTMTL

SEQ ID NO: 73035 - protein, 9 aa, Homo sapiens
  Table A; Target 73035; HLA-C*01:02; PROKR1; ENSG00000169618; CTA
VGPVVTMTL

SEQ ID NO: 73036 - protein, 9 aa, Homo sapiens
  Table A; Target 73036; HLA-C*03:03; PROKR1; ENSG00000169618; CTA
VGPVVTMTL

SEQ ID NO: 73037 - protein, 9 aa, Homo sapiens
  Table A; Target 73037; HLA-C*03:04; PROKR1; ENSG00000169618; CTA
VGPVVTMTL

SEQ ID NO: 73038 - protein, 9 aa, Homo sapiens
  Table A; Target 73038; HLA-C*05:01; PROKR1; ENSG00000169618; CTA
VGPVVTMTL

SEQ ID NO: 73039 - protein, 9 aa, Homo sapiens
  Table A; Target 73039; HLA-C*14:02; PROKR1; ENSG00000169618; CTA
VGPVVTMTL

SEQ ID NO: 73040 - protein, 8 aa, Homo sapiens
  Table A; Target 73040; HLA-B*15:03; PROKR1; ENSG00000169618; CTA
VKNDTVKY

SEQ ID NO: 73041 - protein, 9 aa, Homo sapiens
  Table A; Target 73041; HLA-A*03:01; PROKR1; ENSG00000169618; CTA
VLMCILTAY

SEQ ID NO: 73042 - protein, 9 aa, Homo sapiens
  Table A; Target 73042; HLA-A*29:02; PROKR1; ENSG00000169618; CTA
VLMCILTAY

SEQ ID NO: 73043 - protein, 9 aa, Homo sapiens
  Table A; Target 73043; HLA-A*30:02; PROKR1; ENSG00000169618; CTA
VLMCILTAY

SEQ ID NO: 73044 - protein, 9 aa, Homo sapiens
  Table A; Target 73044; HLA-B*15:01; PROKR1; ENSG00000169618; CTA
VLMCILTAY

SEQ ID NO: 73045 - protein, 9 aa, Homo sapiens
  Table A; Target 73045; HLA-B*15:03; PROKR1; ENSG00000169618; CTA
VLMCILTAY

SEQ ID NO: 73046 - protein, 9 aa, Homo sapiens
  Table A; Target 73046; HLA-B*46:01; PROKR1; ENSG00000169618; CTA
VLMCILTAY

SEQ ID NO: 73047 - protein, 9 aa, Homo sapiens
  Table A; Target 73047; HLA-A*02:03; PROKR1; ENSG00000169618; CTA
VLNPHGAHA

SEQ ID NO: 73048 - protein, 9 aa, Homo sapiens
  Table A; Target 73048; HLA-A*32:01; PROKR1; ENSG00000169618; CTA
VLNPHGAHA

SEQ ID NO: 73049 - protein, 9 aa, Homo sapiens
  Table A; Target 73049; HLA-B*08:01; PROKR1; ENSG00000169618; CTA
VNYLRTVSL

SEQ ID NO: 73050 - protein, 9 aa, Homo sapiens
  Table A; Target 73050; HLA-B*37:01; PROKR1; ENSG00000169618; CTA
VNYLRTVSL

SEQ ID NO: 73051 - protein, 9 aa, Homo sapiens
  Table A; Target 73051; HLA-B*40:02; PROKR1; ENSG00000169618; CTA
VNYLRTVSL

SEQ ID NO: 73052 - protein, 9 aa, Homo sapiens
  Table A; Target 73052; HLA-B*51:01; PROKR1; ENSG00000169618; CTA
VNYLRTVSL

SEQ ID NO: 73053 - protein, 9 aa, Homo sapiens
  Table A; Target 73053; HLA-C*01:02; PROKR1; ENSG00000169618; CTA
VNYLRTVSL

SEQ ID NO: 73054 - protein, 9 aa, Homo sapiens
  Table A; Target 73054; HLA-C*03:04; PROKR1; ENSG00000169618; CTA
VNYLRTVSL

SEQ ID NO: 73055 - protein, 9 aa, Homo sapiens
  Table A; Target 73055; HLA-C*12:03; PROKR1; ENSG00000169618; CTA
VNYLRTVSL

SEQ ID NO: 73056 - protein, 9 aa, Homo sapiens
  Table A; Target 73056; HLA-C*14:02; PROKR1; ENSG00000169618; CTA
VNYLRTVSL

SEQ ID NO: 73057 - protein, 9 aa, Homo sapiens
  Table A; Target 73057; HLA-C*16:01; PROKR1; ENSG00000169618; CTA
VNYLRTVSL

SEQ ID NO: 73058 - protein, 9 aa, Homo sapiens
  Table A; Target 73058; HLA-B*51:01; PROKR1; ENSG00000169618; CTA
VPGFQTEQI

SEQ ID NO: 73059 - protein, 11 aa, Homo sapiens
  Table A; Target 73059; HLA-A*30:02; PROKR1; ENSG00000169618; CTA
VSILIAIPSAY

SEQ ID NO: 73060 - protein, 9 aa, Homo sapiens
  Table A; Target 73060; HLA-B*13:02; PROKR1; ENSG00000169618; CTA
VSTNALLAI

SEQ ID NO: 73061 - protein, 8 aa, Homo sapiens
  Table A; Target 73061; HLA-A*32:01; PROKR1; ENSG00000169618; CTA
VTNSRTFF

SEQ ID NO: 73062 - protein, 9 aa, Homo sapiens
  Table A; Target 73062; HLA-A*11:01; PROKR1; ENSG00000169618; CTA
VTVKNDTVK

SEQ ID NO: 73063 - protein, 10 aa, Homo sapiens
  Table A; Target 73063; HLA-A*01:01; PROKR1; ENSG00000169618; CTA
VTVKNDTVKY

SEQ ID NO: 73064 - protein, 10 aa, Homo sapiens
  Table A; Target 73064; HLA-A*26:01; PROKR1; ENSG00000169618; CTA
VTVKNDTVKY

SEQ ID NO: 73065 - protein, 10 aa, Homo sapiens
  Table A; Target 73065; HLA-A*30:02; PROKR1; ENSG00000169618; CTA
VTVKNDTVKY

SEQ ID NO: 73066 - protein, 10 aa, Homo sapiens
  Table A; Target 73066; HLA-B*57:01; PROKR1; ENSG00000169618; CTA
VTVKNDTVKY

SEQ ID NO: 73067 - protein, 10 aa, Homo sapiens
  Table A; Target 73067; HLA-B*58:01; PROKR1; ENSG00000169618; CTA
VTVKNDTVKY

SEQ ID NO: 73068 - protein, 11 aa, Homo sapiens
  Table A; Target 73068; HLA-B*57:01; PROKR1; ENSG00000169618; CTA
VTVKNDTVKYF

SEQ ID NO: 73069 - protein, 9 aa, Homo sapiens
  Table A; Target 73069; HLA-A*29:02; PROKR1; ENSG00000169618; CTA
WPVDQQLYY

SEQ ID NO: 73070 - protein, 9 aa, Homo sapiens
  Table A; Target 73070; HLA-B*35:01; PROKR1; ENSG00000169618; CTA
WPVDQQLYY

SEQ ID NO: 73071 - protein, 9 aa, Homo sapiens
  Table A; Target 73071; HLA-A*68:02; PROKR1; ENSG00000169618; CTA
WTVSILIAI

SEQ ID NO: 73072 - protein, 8 aa, Homo sapiens
  Table A; Target 73072; HLA-B*08:01; PROKR1; ENSG00000169618; CTA
YARISREL

SEQ ID NO: 73073 - protein, 8 aa, Homo sapiens
  Table A; Target 73073; HLA-C*03:04; PROKR1; ENSG00000169618; CTA
YARISREL

SEQ ID NO: 73074 - protein, 9 aa, Homo sapiens
  Table A; Target 73074; HLA-B*57:01; PROKR1; ENSG00000169618; CTA
YARISRELW

SEQ ID NO: 73075 - protein, 10 aa, Homo sapiens
  Table A; Target 73075; HLA-A*29:02; PROKR1; ENSG00000169618; CTA
YFLFIFGIEF

SEQ ID NO: 73076 - protein, 8 aa, Homo sapiens
  Table A; Target 73076; HLA-C*14:02; PROKR1; ENSG00000169618; CTA
YFTTETVL

SEQ ID NO: 73077 - protein, 9 aa, Homo sapiens
  Table A; Target 73077; HLA-C*02:02; PROKR1; ENSG00000169618; CTA
YGFTIVRDF

SEQ ID NO: 73078 - protein, 8 aa, Homo sapiens
  Table A; Target 73078; HLA-C*03:03; PROKR1; ENSG00000169618; CTA
YIVECIAM

SEQ ID NO: 73079 - protein, 8 aa, Homo sapiens
  Table A; Target 73079; HLA-C*03:04; PROKR1; ENSG00000169618; CTA
YIVECIAM

SEQ ID NO: 73080 - protein, 8 aa, Homo sapiens
  Table A; Target 73080; HLA-A*02:03; PROKR1; ENSG00000169618; CTA
YLAIVHPL

SEQ ID NO: 73081 - protein, 8 aa, Homo sapiens
  Table A; Target 73081; HLA-A*02:04; PROKR1; ENSG00000169618; CTA
YLAIVHPL

SEQ ID NO: 73082 - protein, 8 aa, Homo sapiens
  Table A; Target 73082; HLA-B*08:01; PROKR1; ENSG00000169618; CTA
YLAIVHPL

SEQ ID NO: 73083 - protein, 8 aa, Homo sapiens
  Table A; Target 73083; HLA-B*37:01; PROKR1; ENSG00000169618; CTA
YLAIVHPL

SEQ ID NO: 73084 - protein, 8 aa, Homo sapiens
  Table A; Target 73084; HLA-B*46:01; PROKR1; ENSG00000169618; CTA
YLRTVSLY

SEQ ID NO: 73085 - protein, 9 aa, Homo sapiens
  Table A; Target 73085; HLA-A*02:03; PROKR1; ENSG00000169618; CTA
YLRTVSLYV

SEQ ID NO: 73086 - protein, 9 aa, Homo sapiens
  Table A; Target 73086; HLA-A*02:07; PROKR1; ENSG00000169618; CTA
YLRTVSLYV

SEQ ID NO: 73087 - protein, 9 aa, Homo sapiens
  Table A; Target 73087; HLA-A*29:02; PROKR1; ENSG00000169618; CTA
YVLCWAPFY

SEQ ID NO: 73088 - protein, 8 aa, Homo sapiens
  Table A; Target 73088; HLA-C*03:03; PROKR1; ENSG00000169618; CTA
YVSTNALL

SEQ ID NO: 73089 - protein, 8 aa, Homo sapiens
  Table A; Target 73089; HLA-C*05:01; PROKR1; ENSG00000169618; CTA
YVSTNALL

SEQ ID NO: 73090 - protein, 9 aa, Homo sapiens
  Table A; Target 73090; HLA-A*24:02; PROKR1; ENSG00000169618; CTA
YYKSYFLFI

SEQ ID NO: 73091 - protein, 9 aa, Homo sapiens
  Table A; Target 73091; HLA-A*23:01; PROKR1; ENSG00000169618; CTA
YYVVRQLSW

SEQ ID NO: 73092 - protein, 9 aa, Homo sapiens
  Table A; Target 73092; HLA-A*24:02; PROKR1; ENSG00000169618; CTA
YYVVRQLSW

SEQ ID NO: 73093 - protein, 9 aa, Homo sapiens
  Table A; Target 73093; HLA-B*57:01; R3HDML; ENSG00000101074; CTA
AANMEYMVW

SEQ ID NO: 73094 - protein, 8 aa, Homo sapiens
  Table A; Target 73094; HLA-B*15:01; R3HDML; ENSG00000101074; CTA
AAYLVCNY

SEQ ID NO: 73095 - protein, 8 aa, Homo sapiens
  Table A; Target 73095; HLA-B*15:03; R3HDML; ENSG00000101074; CTA
AAYLVCNY

SEQ ID NO: 73096 - protein, 8 aa, Homo sapiens
  Table A; Target 73096; HLA-B*18:01; R3HDML; ENSG00000101074; CTA
AAYLVCNY

SEQ ID NO: 73097 - protein, 8 aa, Homo sapiens
  Table A; Target 73097; HLA-B*37:01; R3HDML; ENSG00000101074; CTA
AAYLVCNY

SEQ ID NO: 73098 - protein, 8 aa, Homo sapiens
  Table A; Target 73098; HLA-B*46:01; R3HDML; ENSG00000101074; CTA
AAYLVCNY

SEQ ID NO: 73099 - protein, 8 aa, Homo sapiens
  Table A; Target 73099; HLA-C*02:02; R3HDML; ENSG00000101074; CTA
AAYLVCNY

SEQ ID NO: 73100 - protein, 8 aa, Homo sapiens
  Table A; Target 73100; HLA-C*07:01; R3HDML; ENSG00000101074; CTA
AAYLVCNY

SEQ ID NO: 73101 - protein, 8 aa, Homo sapiens
  Table A; Target 73101; HLA-C*12:03; R3HDML; ENSG00000101074; CTA
AAYLVCNY

SEQ ID NO: 73102 - protein, 8 aa, Homo sapiens
  Table A; Target 73102; HLA-C*16:01; R3HDML; ENSG00000101074; CTA
AAYLVCNY

SEQ ID NO: 73103 - protein, 8 aa, Homo sapiens
  Table A; Target 73103; HLA-C*16:02; R3HDML; ENSG00000101074; CTA
AAYLVCNY

SEQ ID NO: 73104 - protein, 8 aa, Homo sapiens
  Table A; Target 73104; HLA-C*16:04; R3HDML; ENSG00000101074; CTA
AAYLVCNY

SEQ ID NO: 73105 - protein, 9 aa, Homo sapiens
  Table A; Target 73105; HLA-B*54:01; R3HDML; ENSG00000101074; CTA
AAYLVCNYA

SEQ ID NO: 73106 - protein, 9 aa, Homo sapiens
  Table A; Target 73106; HLA-A*30:01; R3HDML; ENSG00000101074; CTA
AEAWATQCI

SEQ ID NO: 73107 - protein, 9 aa, Homo sapiens
  Table A; Target 73107; HLA-B*13:02; R3HDML; ENSG00000101074; CTA
AEAWATQCI

SEQ ID NO: 73108 - protein, 9 aa, Homo sapiens
  Table A; Target 73108; HLA-B*27:02; R3HDML; ENSG00000101074; CTA
AEAWATQCI

SEQ ID NO: 73109 - protein, 9 aa, Homo sapiens
  Table A; Target 73109; HLA-B*37:01; R3HDML; ENSG00000101074; CTA
AEAWATQCI

SEQ ID NO: 73110 - protein, 9 aa, Homo sapiens
  Table A; Target 73110; HLA-B*40:01; R3HDML; ENSG00000101074; CTA
AEAWATQCI

SEQ ID NO: 73111 - protein, 9 aa, Homo sapiens
  Table A; Target 73111; HLA-B*40:02; R3HDML; ENSG00000101074; CTA
AEAWATQCI

SEQ ID NO: 73112 - protein, 9 aa, Homo sapiens
  Table A; Target 73112; HLA-B*44:02; R3HDML; ENSG00000101074; CTA
AEAWATQCI

SEQ ID NO: 73113 - protein, 9 aa, Homo sapiens
  Table A; Target 73113; HLA-B*44:03; R3HDML; ENSG00000101074; CTA
AEAWATQCI

SEQ ID NO: 73114 - protein, 9 aa, Homo sapiens
  Table A; Target 73114; HLA-B*49:01; R3HDML; ENSG00000101074; CTA
AEAWATQCI

SEQ ID NO: 73115 - protein, 9 aa, Homo sapiens
  Table A; Target 73115; HLA-C*16:04; R3HDML; ENSG00000101074; CTA
AEAWATQCI

SEQ ID NO: 73116 - protein, 10 aa, Homo sapiens
  Table A; Target 73116; HLA-B*44:02; R3HDML; ENSG00000101074; CTA
AEAWATQCIW

SEQ ID NO: 73117 - protein, 10 aa, Homo sapiens
  Table A; Target 73117; HLA-B*44:03; R3HDML; ENSG00000101074; CTA
AEAWATQCIW

SEQ ID NO: 73118 - protein, 8 aa, Homo sapiens
  Table A; Target 73118; HLA-B*27:05; R3HDML; ENSG00000101074; CTA
AHGPSQLM

SEQ ID NO: 73119 - protein, 8 aa, Homo sapiens
  Table A; Target 73119; HLA-B*38:01; R3HDML; ENSG00000101074; CTA
AHGPSQLM

SEQ ID NO: 73120 - protein, 8 aa, Homo sapiens
  Table A; Target 73120; HLA-B*39:01; R3HDML; ENSG00000101074; CTA
AHGPSQLM

SEQ ID NO: 73121 - protein, 10 aa, Homo sapiens
  Table A; Target 73121; HLA-A*30:02; R3HDML; ENSG00000101074; CTA
AHGPSQLMRY

SEQ ID NO: 73122 - protein, 9 aa, Homo sapiens
  Table A; Target 73122; HLA-A*02:01; R3HDML; ENSG00000101074; CTA
ALLDYHNHI

SEQ ID NO: 73123 - protein, 9 aa, Homo sapiens
  Table A; Target 73123; HLA-A*02:04; R3HDML; ENSG00000101074; CTA
ALLDYHNHI

SEQ ID NO: 73124 - protein, 9 aa, Homo sapiens
  Table A; Target 73124; HLA-A*02:07; R3HDML; ENSG00000101074; CTA
ALLDYHNHI

SEQ ID NO: 73125 - protein, 9 aa, Homo sapiens
  Table A; Target 73125; HLA-B*13:02; R3HDML; ENSG00000101074; CTA
ALLDYHNHI

SEQ ID NO: 73126 - protein, 9 aa, Homo sapiens
  Table A; Target 73126; HLA-B*07:02; R3HDML; ENSG00000101074; CTA
APAQPESTA

SEQ ID NO: 73127 - protein, 9 aa, Homo sapiens
  Table A; Target 73127; HLA-B*54:01; R3HDML; ENSG00000101074; CTA
APAQPESTA

SEQ ID NO: 73128 - protein, 9 aa, Homo sapiens
  Table A; Target 73128; HLA-B*55:01; R3HDML; ENSG00000101074; CTA
APAQPESTA

SEQ ID NO: 73129 - protein, 9 aa, Homo sapiens
  Table A; Target 73129; HLA-B*56:01; R3HDML; ENSG00000101074; CTA
APAQPESTA

SEQ ID NO: 73130 - protein, 10 aa, Homo sapiens
  Table A; Target 73130; HLA-B*07:02; R3HDML; ENSG00000101074; CTA
APAQPESTAM

SEQ ID NO: 73131 - protein, 10 aa, Homo sapiens
  Table A; Target 73131; HLA-B*35:01; R3HDML; ENSG00000101074; CTA
APAQPESTAM

SEQ ID NO: 73132 - protein, 10 aa, Homo sapiens
  Table A; Target 73132; HLA-B*35:03; R3HDML; ENSG00000101074; CTA
APAQPESTAM

SEQ ID NO: 73133 - protein, 10 aa, Homo sapiens
  Table A; Target 73133; HLA-B*55:01; R3HDML; ENSG00000101074; CTA
APAQPESTAM

SEQ ID NO: 73134 - protein, 10 aa, Homo sapiens
  Table A; Target 73134; HLA-B*56:01; R3HDML; ENSG00000101074; CTA
APAQPESTAM

SEQ ID NO: 73135 - protein, 10 aa, Homo sapiens
  Table A; Target 73135; HLA-C*03:03; R3HDML; ENSG00000101074; CTA
APAQPESTAM

SEQ ID NO: 73136 - protein, 10 aa, Homo sapiens
  Table A; Target 73136; HLA-C*07:02; R3HDML; ENSG00000101074; CTA
APAQPESTAM

SEQ ID NO: 73137 - protein, 11 aa, Homo sapiens
  Table A; Target 73137; HLA-A*68:01; R3HDML; ENSG00000101074; CTA
APAQPESTAMR

SEQ ID NO: 73138 - protein, 11 aa, Homo sapiens
  Table A; Target 73138; HLA-C*07:06; R3HDML; ENSG00000101074; CTA
APAQPESTAMR

SEQ ID NO: 73139 - protein, 8 aa, Homo sapiens
  Table A; Target 73139; HLA-C*01:02; R3HDML; ENSG00000101074; CTA
AQPESTAM

SEQ ID NO: 73140 - protein, 8 aa, Homo sapiens
  Table A; Target 73140; HLA-C*05:01; R3HDML; ENSG00000101074; CTA
AQPESTAM

SEQ ID NO: 73141 - protein, 9 aa, Homo sapiens
  Table A; Target 73141; HLA-A*23:01; R3HDML; ENSG00000101074; CTA
AYLVCNYAI

SEQ ID NO: 73142 - protein, 9 aa, Homo sapiens
  Table A; Target 73142; HLA-A*24:02; R3HDML; ENSG00000101074; CTA
AYLVCNYAI

SEQ ID NO: 73143 - protein, 9 aa, Homo sapiens
  Table A; Target 73143; HLA-C*07:01; R3HDML; ENSG00000101074; CTA
CDGPTCSHY

SEQ ID NO: 73144 - protein, 9 aa, Homo sapiens
  Table A; Target 73144; HLA-B*57:01; R3HDML; ENSG00000101074; CTA
CSHYTQMVW

SEQ ID NO: 73145 - protein, 8 aa, Homo sapiens
  Table A; Target 73145; HLA-B*51:01; R3HDML; ENSG00000101074; CTA
EAWATQCI

SEQ ID NO: 73146 - protein, 9 aa, Homo sapiens
  Table A; Target 73146; HLA-B*57:01; R3HDML; ENSG00000101074; CTA
EAWATQCIW

SEQ ID NO: 73147 - protein, 9 aa, Homo sapiens
  Table A; Target 73147; HLA-A*24:02; R3HDML; ENSG00000101074; CTA
EYMVWDKRL

SEQ ID NO: 73148 - protein, 9 aa, Homo sapiens
  Table A; Target 73148; HLA-B*55:01; R3HDML; ENSG00000101074; CTA
FPAPRDCNP

SEQ ID NO: 73149 - protein, 9 aa, Homo sapiens
  Table A; Target 73149; HLA-A*02:04; R3HDML; ENSG00000101074; CTA
GLLFWAGQA

SEQ ID NO: 73150 - protein, 10 aa, Homo sapiens
  Table A; Target 73150; HLA-A*02:04; R3HDML; ENSG00000101074; CTA
GLLFWAGQAV

SEQ ID NO: 73151 - protein, 9 aa, Homo sapiens
  Table A; Target 73151; HLA-A*29:02; R3HDML; ENSG00000101074; CTA
GNWIGESPY

SEQ ID NO: 73152 - protein, 9 aa, Homo sapiens
  Table A; Target 73152; HLA-B*56:01; R3HDML; ENSG00000101074; CTA
GPSQLMRYV

SEQ ID NO: 73153 - protein, 8 aa, Homo sapiens
  Table A; Target 73153; HLA-B*13:02; R3HDML; ENSG00000101074; CTA
GQAVNALI

SEQ ID NO: 73154 - protein, 9 aa, Homo sapiens
  Table A; Target 73154; HLA-B*13:02; R3HDML; ENSG00000101074; CTA
GQAVNALIM

SEQ ID NO: 73155 - protein, 9 aa, Homo sapiens
  Table A; Target 73155; HLA-B*15:01; R3HDML; ENSG00000101074; CTA
GQAVNALIM

SEQ ID NO: 73156 - protein, 9 aa, Homo sapiens
  Table A; Target 73156; HLA-B*15:03; R3HDML; ENSG00000101074; CTA
GQAVNALIM

SEQ ID NO: 73157 - protein, 9 aa, Homo sapiens
  Table A; Target 73157; HLA-B*27:05; R3HDML; ENSG00000101074; CTA
GQAVNALIM

SEQ ID NO: 73158 - protein, 9 aa, Homo sapiens
  Table A; Target 73158; HLA-C*07:04; R3HDML; ENSG00000101074; CTA
GQAVNALIM

SEQ ID NO: 73159 - protein, 9 aa, Homo sapiens
  Table A; Target 73159; HLA-C*12:03; R3HDML; ENSG00000101074; CTA
GQAVNALIM

SEQ ID NO: 73160 - protein, 9 aa, Homo sapiens
  Table A; Target 73160; HLA-C*16:04; R3HDML; ENSG00000101074; CTA
GQAVNALIM

SEQ ID NO: 73161 - protein, 9 aa, Homo sapiens
  Table A; Target 73161; HLA-A*32:01; R3HDML; ENSG00000101074; CTA
GQNLSIHSG

SEQ ID NO: 73162 - protein, 9 aa, Homo sapiens
  Table A; Target 73162; HLA-B*13:02; R3HDML; ENSG00000101074; CTA
GQNLSIHSG

SEQ ID NO: 73163 - protein, 9 aa, Homo sapiens
  Table A; Target 73163; HLA-B*15:01; R3HDML; ENSG00000101074; CTA
GQNLSIHSG

SEQ ID NO: 73164 - protein, 11 aa, Homo sapiens
  Table A; Target 73164; HLA-A*29:02; R3HDML; ENSG00000101074; CTA
GQNLSIHSGQY

SEQ ID NO: 73165 - protein, 11 aa, Homo sapiens
  Table A; Target 73165; HLA-A*30:02; R3HDML; ENSG00000101074; CTA
GQNLSIHSGQY

SEQ ID NO: 73166 - protein, 11 aa, Homo sapiens
  Table A; Target 73166; HLA-A*32:01; R3HDML; ENSG00000101074; CTA
GQNLSIHSGQY

SEQ ID NO: 73167 - protein, 11 aa, Homo sapiens
  Table A; Target 73167; HLA-B*15:03; R3HDML; ENSG00000101074; CTA
GQNLSIHSGQY

SEQ ID NO: 73168 - protein, 11 aa, Homo sapiens
  Table A; Target 73168; HLA-B*27:02; R3HDML; ENSG00000101074; CTA
GQNLSIHSGQY

SEQ ID NO: 73169 - protein, 11 aa, Homo sapiens
  Table A; Target 73169; HLA-B*27:05; R3HDML; ENSG00000101074; CTA
GQNLSIHSGQY

SEQ ID NO: 73170 - protein, 11 aa, Homo sapiens
  Table A; Target 73170; HLA-B*44:03; R3HDML; ENSG00000101074; CTA
GQNLSIHSGQY

SEQ ID NO: 73171 - protein, 11 aa, Homo sapiens
  Table A; Target 73171; HLA-C*04:01; R3HDML; ENSG00000101074; CTA
GQNLSIHSGQY

SEQ ID NO: 73172 - protein, 11 aa, Homo sapiens
  Table A; Target 73172; HLA-C*07:04; R3HDML; ENSG00000101074; CTA
GQNLSIHSGQY

SEQ ID NO: 73173 - protein, 11 aa, Homo sapiens
  Table A; Target 73173; HLA-C*16:04; R3HDML; ENSG00000101074; CTA
GQNLSIHSGQY

SEQ ID NO: 73174 - protein, 9 aa, Homo sapiens
  Table A; Target 73174; HLA-A*30:01; R3HDML; ENSG00000101074; CTA
GQYRSVVDL

SEQ ID NO: 73175 - protein, 9 aa, Homo sapiens
  Table A; Target 73175; HLA-B*13:02; R3HDML; ENSG00000101074; CTA
GQYRSVVDL

SEQ ID NO: 73176 - protein, 9 aa, Homo sapiens
  Table A; Target 73176; HLA-B*15:03; R3HDML; ENSG00000101074; CTA
GQYRSVVDL

SEQ ID NO: 73177 - protein, 9 aa, Homo sapiens
  Table A; Target 73177; HLA-B*27:05; R3HDML; ENSG00000101074; CTA
GQYRSVVDL

SEQ ID NO: 73178 - protein, 9 aa, Homo sapiens
  Table A; Target 73178; HLA-B*39:01; R3HDML; ENSG00000101074; CTA
GQYRSVVDL

SEQ ID NO: 73179 - protein, 9 aa, Homo sapiens
  Table A; Target 73179; HLA-B*40:01; R3HDML; ENSG00000101074; CTA
GQYRSVVDL

SEQ ID NO: 73180 - protein, 9 aa, Homo sapiens
  Table A; Target 73180; HLA-B*40:02; R3HDML; ENSG00000101074; CTA
GQYRSVVDL

SEQ ID NO: 73181 - protein, 9 aa, Homo sapiens
  Table A; Target 73181; HLA-C*07:04; R3HDML; ENSG00000101074; CTA
GQYRSVVDL

SEQ ID NO: 73182 - protein, 9 aa, Homo sapiens
  Table A; Target 73182; HLA-C*12:03; R3HDML; ENSG00000101074; CTA
GQYRSVVDL

SEQ ID NO: 73183 - protein, 10 aa, Homo sapiens
  Table A; Target 73183; HLA-B*15:03; R3HDML; ENSG00000101074; CTA
GQYRSVVDLM

SEQ ID NO: 73184 - protein, 10 aa, Homo sapiens
  Table A; Target 73184; HLA-B*54:01; R3HDML; ENSG00000101074; CTA
HIRASVYPPA

SEQ ID NO: 73185 - protein, 9 aa, Homo sapiens
  Table A; Target 73185; HLA-A*25:01; R3HDML; ENSG00000101074; CTA
HTCSSISVW

SEQ ID NO: 73186 - protein, 9 aa, Homo sapiens
  Table A; Target 73186; HLA-A*26:01; R3HDML; ENSG00000101074; CTA
HTCSSISVW

SEQ ID NO: 73187 - protein, 9 aa, Homo sapiens
  Table A; Target 73187; HLA-B*57:01; R3HDML; ENSG00000101074; CTA
HTCSSISVW

SEQ ID NO: 73188 - protein, 8 aa, Homo sapiens
  Table A; Target 73188; HLA-C*05:01; R3HDML; ENSG00000101074; CTA
IGESPYKM

SEQ ID NO: 73189 - protein, 10 aa, Homo sapiens
  Table A; Target 73189; HLA-A*02:01; R3HDML; ENSG00000101074; CTA
IMPNATPAPA

SEQ ID NO: 73190 - protein, 10 aa, Homo sapiens
  Table A; Target 73190; HLA-A*02:03; R3HDML; ENSG00000101074; CTA
IMPNATPAPA

SEQ ID NO: 73191 - protein, 9 aa, Homo sapiens
  Table A; Target 73191; HLA-B*40:01; R3HDML; ENSG00000101074; CTA
ISVRDMNAL

SEQ ID NO: 73192 - protein, 9 aa, Homo sapiens
  Table A; Target 73192; HLA-B*58:01; R3HDML; ENSG00000101074; CTA
ISVRDMNAL

SEQ ID NO: 73193 - protein, 9 aa, Homo sapiens
  Table A; Target 73193; HLA-C*03:03; R3HDML; ENSG00000101074; CTA
ISVRDMNAL

SEQ ID NO: 73194 - protein, 9 aa, Homo sapiens
  Table A; Target 73194; HLA-C*03:04; R3HDML; ENSG00000101074; CTA
ISVRDMNAL

SEQ ID NO: 73195 - protein, 10 aa, Homo sapiens
  Table A; Target 73195; HLA-B*58:01; R3HDML; ENSG00000101074; CTA
ISVRDMNALL

SEQ ID NO: 73196 - protein, 8 aa, Homo sapiens
  Table A; Target 73196; HLA-B*57:01; R3HDML; ENSG00000101074; CTA
ISVWGNTW

SEQ ID NO: 73197 - protein, 8 aa, Homo sapiens
  Table A; Target 73197; HLA-B*58:01; R3HDML; ENSG00000101074; CTA
ISVWGNTW

SEQ ID NO: 73198 - protein, 10 aa, Homo sapiens
  Table A; Target 73198; HLA-A*30:02; R3HDML; ENSG00000101074; CTA
KGNWIGESPY

SEQ ID NO: 73199 - protein, 8 aa, Homo sapiens
  Table A; Target 73199; HLA-B*57:01; R3HDML; ENSG00000101074; CTA
KSWSEEKW

SEQ ID NO: 73200 - protein, 8 aa, Homo sapiens
  Table A; Target 73200; HLA-B*57:01; R3HDML; ENSG00000101074; CTA
LARAAEAW

SEQ ID NO: 73201 - protein, 9 aa, Homo sapiens
  Table A; Target 73201; HLA-A*02:01; R3HDML; ENSG00000101074; CTA
LIMPNATPA

SEQ ID NO: 73202 - protein, 9 aa, Homo sapiens
  Table A; Target 73202; HLA-A*02:03; R3HDML; ENSG00000101074; CTA
LIMPNATPA

SEQ ID NO: 73203 - protein, 9 aa, Homo sapiens
  Table A; Target 73203; HLA-B*46:01; R3HDML; ENSG00000101074; CTA
LIMPNATPA

SEQ ID NO: 73204 - protein, 9 aa, Homo sapiens
  Table A; Target 73204; HLA-B*54:01; R3HDML; ENSG00000101074; CTA
LIMPNATPA

SEQ ID NO: 73205 - protein, 9 aa, Homo sapiens
  Table A; Target 73205; HLA-C*03:03; R3HDML; ENSG00000101074; CTA
LIMPNATPA

SEQ ID NO: 73206 - protein, 11 aa, Homo sapiens
  Table A; Target 73206; HLA-A*02:01; R3HDML; ENSG00000101074; CTA
LIMPNATPAPA

SEQ ID NO: 73207 - protein, 9 aa, Homo sapiens
  Table A; Target 73207; HLA-A*02:01; R3HDML; ENSG00000101074; CTA
LLFWAGQAV

SEQ ID NO: 73208 - protein, 9 aa, Homo sapiens
  Table A; Target 73208; HLA-A*02:03; R3HDML; ENSG00000101074; CTA
LLFWAGQAV

SEQ ID NO: 73209 - protein, 9 aa, Homo sapiens
  Table A; Target 73209; HLA-A*02:04; R3HDML; ENSG00000101074; CTA
LLFWAGQAV

SEQ ID NO: 73210 - protein, 9 aa, Homo sapiens
  Table A; Target 73210; HLA-A*02:07; R3HDML; ENSG00000101074; CTA
LLFWAGQAV

SEQ ID NO: 73211 - protein, 9 aa, Homo sapiens
  Table A; Target 73211; HLA-B*13:02; R3HDML; ENSG00000101074; CTA
LLFWAGQAV

SEQ ID NO: 73212 - protein, 8 aa, Homo sapiens
  Table A; Target 73212; HLA-A*02:07; R3HDML; ENSG00000101074; CTA
LLPSTVGL

SEQ ID NO: 73213 - protein, 9 aa, Homo sapiens
  Table A; Target 73213; HLA-A*02:03; R3HDML; ENSG00000101074; CTA
LLPSTVGLA

SEQ ID NO: 73214 - protein, 9 aa, Homo sapiens
  Table A; Target 73214; HLA-A*02:07; R3HDML; ENSG00000101074; CTA
LLPSTVGLA

SEQ ID NO: 73215 - protein, 11 aa, Homo sapiens
  Table A; Target 73215; HLA-A*02:07; R3HDML; ENSG00000101074; CTA
LLPSTVGLAGL

SEQ ID NO: 73216 - protein, 10 aa, Homo sapiens
  Table A; Target 73216; HLA-A*01:01; R3HDML; ENSG00000101074; CTA
LLSGLEVPRY

SEQ ID NO: 73217 - protein, 10 aa, Homo sapiens
  Table A; Target 73217; HLA-A*29:02; R3HDML; ENSG00000101074; CTA
LLSGLEVPRY

SEQ ID NO: 73218 - protein, 10 aa, Homo sapiens
  Table A; Target 73218; HLA-A*30:02; R3HDML; ENSG00000101074; CTA
LLSGLEVPRY

SEQ ID NO: 73219 - protein, 9 aa, Homo sapiens
  Table A; Target 73219; HLA-B*56:01; R3HDML; ENSG00000101074; CTA
LPSTVGLAG

SEQ ID NO: 73220 - protein, 10 aa, Homo sapiens
  Table A; Target 73220; HLA-B*35:03; R3HDML; ENSG00000101074; CTA
LPSTVGLAGL

SEQ ID NO: 73221 - protein, 9 aa, Homo sapiens
  Table A; Target 73221; HLA-A*01:01; R3HDML; ENSG00000101074; CTA
LSGLEVPRY

SEQ ID NO: 73222 - protein, 9 aa, Homo sapiens
  Table A; Target 73222; HLA-A*30:02; R3HDML; ENSG00000101074; CTA
LSGLEVPRY

SEQ ID NO: 73223 - protein, 9 aa, Homo sapiens
  Table A; Target 73223; HLA-B*57:01; R3HDML; ENSG00000101074; CTA
LSGLEVPRY

SEQ ID NO: 73224 - protein, 9 aa, Homo sapiens
  Table A; Target 73224; HLA-B*58:01; R3HDML; ENSG00000101074; CTA
LSGLEVPRY

SEQ ID NO: 73225 - protein, 9 aa, Homo sapiens
  Table A; Target 73225; HLA-C*07:01; R3HDML; ENSG00000101074; CTA
LSGLEVPRY

SEQ ID NO: 73226 - protein, 9 aa, Homo sapiens
  Table A; Target 73226; HLA-C*12:03; R3HDML; ENSG00000101074; CTA
LSGLEVPRY

SEQ ID NO: 73227 - protein, 9 aa, Homo sapiens
  Table A; Target 73227; HLA-C*16:01; R3HDML; ENSG00000101074; CTA
LSGLEVPRY

SEQ ID NO: 73228 - protein, 8 aa, Homo sapiens
  Table A; Target 73228; HLA-A*30:02; R3HDML; ENSG00000101074; CTA
LSIHSGQY

SEQ ID NO: 73229 - protein, 8 aa, Homo sapiens
  Table A; Target 73229; HLA-B*15:01; R3HDML; ENSG00000101074; CTA
LSIHSGQY

SEQ ID NO: 73230 - protein, 8 aa, Homo sapiens
  Table A; Target 73230; HLA-B*39:01; R3HDML; ENSG00000101074; CTA
LSIHSGQY

SEQ ID NO: 73231 - protein, 8 aa, Homo sapiens
  Table A; Target 73231; HLA-B*46:01; R3HDML; ENSG00000101074; CTA
LSIHSGQY

SEQ ID NO: 73232 - protein, 8 aa, Homo sapiens
  Table A; Target 73232; HLA-B*58:01; R3HDML; ENSG00000101074; CTA
LSIHSGQY

SEQ ID NO: 73233 - protein, 9 aa, Homo sapiens
  Table A; Target 73233; HLA-A*31:01; R3HDML; ENSG00000101074; CTA
LSIHSGQYR

SEQ ID NO: 73234 - protein, 9 aa, Homo sapiens
  Table A; Target 73234; HLA-A*33:01; R3HDML; ENSG00000101074; CTA
LSIHSGQYR

SEQ ID NO: 73235 - protein, 9 aa, Homo sapiens
  Table A; Target 73235; HLA-A*33:03; R3HDML; ENSG00000101074; CTA
LSIHSGQYR

SEQ ID NO: 73236 - protein, 9 aa, Homo sapiens
  Table A; Target 73236; HLA-B*57:01; R3HDML; ENSG00000101074; CTA
LSIHSGQYR

SEQ ID NO: 73237 - protein, 8 aa, Homo sapiens
  Table A; Target 73237; HLA-B*08:01; R3HDML; ENSG00000101074; CTA
MPLLPSTV

SEQ ID NO: 73238 - protein, 8 aa, Homo sapiens
  Table A; Target 73238; HLA-B*51:01; R3HDML; ENSG00000101074; CTA
MPLLPSTV

SEQ ID NO: 73239 - protein, 8 aa, Homo sapiens
  Table A; Target 73239; HLA-B*54:01; R3HDML; ENSG00000101074; CTA
MPLLPSTV

SEQ ID NO: 73240 - protein, 8 aa, Homo sapiens
  Table A; Target 73240; HLA-B*56:01; R3HDML; ENSG00000101074; CTA
MPLLPSTV

SEQ ID NO: 73241 - protein, 9 aa, Homo sapiens
  Table A; Target 73241; HLA-B*54:01; R3HDML; ENSG00000101074; CTA
MPLLPSTVG

SEQ ID NO: 73242 - protein, 9 aa, Homo sapiens
  Table A; Target 73242; HLA-B*56:01; R3HDML; ENSG00000101074; CTA
MPLLPSTVG

SEQ ID NO: 73243 - protein, 10 aa, Homo sapiens
  Table A; Target 73243; HLA-B*07:02; R3HDML; ENSG00000101074; CTA
MPLLPSTVGL

SEQ ID NO: 73244 - protein, 10 aa, Homo sapiens
  Table A; Target 73244; HLA-B*35:01; R3HDML; ENSG00000101074; CTA
MPLLPSTVGL

SEQ ID NO: 73245 - protein, 10 aa, Homo sapiens
  Table A; Target 73245; HLA-B*35:03; R3HDML; ENSG00000101074; CTA
MPLLPSTVGL

SEQ ID NO: 73246 - protein, 10 aa, Homo sapiens
  Table A; Target 73246; HLA-B*54:01; R3HDML; ENSG00000101074; CTA
MPLLPSTVGL

SEQ ID NO: 73247 - protein, 10 aa, Homo sapiens
  Table A; Target 73247; HLA-B*55:01; R3HDML; ENSG00000101074; CTA
MPLLPSTVGL

SEQ ID NO: 73248 - protein, 10 aa, Homo sapiens
  Table A; Target 73248; HLA-B*56:01; R3HDML; ENSG00000101074; CTA
MPLLPSTVGL

SEQ ID NO: 73249 - protein, 10 aa, Homo sapiens
  Table A; Target 73249; HLA-C*04:01; R3HDML; ENSG00000101074; CTA
MPLLPSTVGL

SEQ ID NO: 73250 - protein, 10 aa, Homo sapiens
  Table A; Target 73250; HLA-C*07:02; R3HDML; ENSG00000101074; CTA
MPLLPSTVGL

SEQ ID NO: 73251 - protein, 11 aa, Homo sapiens
  Table A; Target 73251; HLA-B*54:01; R3HDML; ENSG00000101074; CTA
MPLLPSTVGLA

SEQ ID NO: 73252 - protein, 11 aa, Homo sapiens
  Table A; Target 73252; HLA-B*56:01; R3HDML; ENSG00000101074; CTA
MPLLPSTVGLA

SEQ ID NO: 73253 - protein, 8 aa, Homo sapiens
  Table A; Target 73253; HLA-B*54:01; R3HDML; ENSG00000101074; CTA
MPNATPAP

SEQ ID NO: 73254 - protein, 8 aa, Homo sapiens
  Table A; Target 73254; HLA-B*55:01; R3HDML; ENSG00000101074; CTA
MPNATPAP

SEQ ID NO: 73255 - protein, 8 aa, Homo sapiens
  Table A; Target 73255; HLA-B*56:01; R3HDML; ENSG00000101074; CTA
MPNATPAP

SEQ ID NO: 73256 - protein, 9 aa, Homo sapiens
  Table A; Target 73256; HLA-B*35:01; R3HDML; ENSG00000101074; CTA
MPNATPAPA

SEQ ID NO: 73257 - protein, 9 aa, Homo sapiens
  Table A; Target 73257; HLA-B*35:03; R3HDML; ENSG00000101074; CTA
MPNATPAPA

SEQ ID NO: 73258 - protein, 9 aa, Homo sapiens
  Table A; Target 73258; HLA-B*54:01; R3HDML; ENSG00000101074; CTA
MPNATPAPA

SEQ ID NO: 73259 - protein, 9 aa, Homo sapiens
  Table A; Target 73259; HLA-B*55:01; R3HDML; ENSG00000101074; CTA
MPNATPAPA

SEQ ID NO: 73260 - protein, 9 aa, Homo sapiens
  Table A; Target 73260; HLA-B*56:01; R3HDML; ENSG00000101074; CTA
MPNATPAPA

SEQ ID NO: 73261 - protein, 10 aa, Homo sapiens
  Table A; Target 73261; HLA-B*35:01; R3HDML; ENSG00000101074; CTA
MPNATPAPAQ

SEQ ID NO: 73262 - protein, 10 aa, Homo sapiens
  Table A; Target 73262; HLA-B*35:03; R3HDML; ENSG00000101074; CTA
MPNATPAPAQ

SEQ ID NO: 73263 - protein, 10 aa, Homo sapiens
  Table A; Target 73263; HLA-B*54:01; R3HDML; ENSG00000101074; CTA
MPNATPAPAQ

SEQ ID NO: 73264 - protein, 10 aa, Homo sapiens
  Table A; Target 73264; HLA-B*55:01; R3HDML; ENSG00000101074; CTA
MPNATPAPAQ

SEQ ID NO: 73265 - protein, 10 aa, Homo sapiens
  Table A; Target 73265; HLA-B*56:01; R3HDML; ENSG00000101074; CTA
MPNATPAPAQ

SEQ ID NO: 73266 - protein, 11 aa, Homo sapiens
  Table A; Target 73266; HLA-B*56:01; R3HDML; ENSG00000101074; CTA
MPNATPAPAQP

SEQ ID NO: 73267 - protein, 8 aa, Homo sapiens
  Table A; Target 73267; HLA-B*08:01; R3HDML; ENSG00000101074; CTA
MRYVGQNL

SEQ ID NO: 73268 - protein, 8 aa, Homo sapiens
  Table A; Target 73268; HLA-B*27:05; R3HDML; ENSG00000101074; CTA
MRYVGQNL

SEQ ID NO: 73269 - protein, 8 aa, Homo sapiens
  Table A; Target 73269; HLA-C*06:02; R3HDML; ENSG00000101074; CTA
MRYVGQNL

SEQ ID NO: 73270 - protein, 8 aa, Homo sapiens
  Table A; Target 73270; HLA-C*16:04; R3HDML; ENSG00000101074; CTA
MRYVGQNL

SEQ ID NO: 73271 - protein, 9 aa, Homo sapiens
  Table A; Target 73271; HLA-A*03:01; R3HDML; ENSG00000101074; CTA
MVWDKRLAR

SEQ ID NO: 73272 - protein, 9 aa, Homo sapiens
  Table A; Target 73272; HLA-A*31:01; R3HDML; ENSG00000101074; CTA
MVWDKRLAR

SEQ ID NO: 73273 - protein, 8 aa, Homo sapiens
  Table A; Target 73273; HLA-B*51:01; R3HDML; ENSG00000101074; CTA
NALIMPNA

SEQ ID NO: 73274 - protein, 8 aa, Homo sapiens
  Table A; Target 73274; HLA-B*54:01; R3HDML; ENSG00000101074; CTA
NALIMPNA

SEQ ID NO: 73275 - protein, 8 aa, Homo sapiens
  Table A; Target 73275; HLA-B*15:03; R3HDML; ENSG00000101074; CTA
NHIRASVY

SEQ ID NO: 73276 - protein, 8 aa, Homo sapiens
  Table A; Target 73276; HLA-B*18:01; R3HDML; ENSG00000101074; CTA
NHIRASVY

SEQ ID NO: 73277 - protein, 9 aa, Homo sapiens
  Table A; Target 73277; HLA-A*01:01; R3HDML; ENSG00000101074; CTA
NLSIHSGQY

SEQ ID NO: 73278 - protein, 9 aa, Homo sapiens
  Table A; Target 73278; HLA-A*26:01; R3HDML; ENSG00000101074; CTA
NLSIHSGQY

SEQ ID NO: 73279 - protein, 9 aa, Homo sapiens
  Table A; Target 73279; HLA-A*29:02; R3HDML; ENSG00000101074; CTA
NLSIHSGQY

SEQ ID NO: 73280 - protein, 9 aa, Homo sapiens
  Table A; Target 73280; HLA-A*30:02; R3HDML; ENSG00000101074; CTA
NLSIHSGQY

SEQ ID NO: 73281 - protein, 9 aa, Homo sapiens
  Table A; Target 73281; HLA-A*32:01; R3HDML; ENSG00000101074; CTA
NLSIHSGQY

SEQ ID NO: 73282 - protein, 9 aa, Homo sapiens
  Table A; Target 73282; HLA-B*15:01; R3HDML; ENSG00000101074; CTA
NLSIHSGQY

SEQ ID NO: 73283 - protein, 9 aa, Homo sapiens
  Table A; Target 73283; HLA-C*07:04; R3HDML; ENSG00000101074; CTA
NLSIHSGQY

SEQ ID NO: 73284 - protein, 9 aa, Homo sapiens
  Table A; Target 73284; HLA-C*16:01; R3HDML; ENSG00000101074; CTA
NLSIHSGQY

SEQ ID NO: 73285 - protein, 9 aa, Homo sapiens
  Table A; Target 73285; HLA-C*03:03; R3HDML; ENSG00000101074; CTA
PAQPESTAM

SEQ ID NO: 73286 - protein, 9 aa, Homo sapiens
  Table A; Target 73286; HLA-C*14:02; R3HDML; ENSG00000101074; CTA
PAQPESTAM

SEQ ID NO: 73287 - protein, 10 aa, Homo sapiens
  Table A; Target 73287; HLA-B*27:02; R3HDML; ENSG00000101074; CTA
PAQPESTAMR

SEQ ID NO: 73288 - protein, 8 aa, Homo sapiens
  Table A; Target 73288; HLA-B*37:01; R3HDML; ENSG00000101074; CTA
PESTAMRL

SEQ ID NO: 73289 - protein, 9 aa, Homo sapiens
  Table A; Target 73289; HLA-A*02:01; R3HDML; ENSG00000101074; CTA
PLLPSTVGL

SEQ ID NO: 73290 - protein, 9 aa, Homo sapiens
  Table A; Target 73290; HLA-A*02:03; R3HDML; ENSG00000101074; CTA
PLLPSTVGL

SEQ ID NO: 73291 - protein, 9 aa, Homo sapiens
  Table A; Target 73291; HLA-A*02:04; R3HDML; ENSG00000101074; CTA
PLLPSTVGL

SEQ ID NO: 73292 - protein, 9 aa, Homo sapiens
  Table A; Target 73292; HLA-A*23:01; R3HDML; ENSG00000101074; CTA
PLLPSTVGL

SEQ ID NO: 73293 - protein, 9 aa, Homo sapiens
  Table A; Target 73293; HLA-A*24:02; R3HDML; ENSG00000101074; CTA
PLLPSTVGL

SEQ ID NO: 73294 - protein, 8 aa, Homo sapiens
  Table A; Target 73294; HLA-B*35:01; R3HDML; ENSG00000101074; CTA
QAVNALIM

SEQ ID NO: 73295 - protein, 8 aa, Homo sapiens
  Table A; Target 73295; HLA-B*35:03; R3HDML; ENSG00000101074; CTA
QAVNALIM

SEQ ID NO: 73296 - protein, 10 aa, Homo sapiens
  Table A; Target 73296; HLA-A*26:01; R3HDML; ENSG00000101074; CTA
QNLSIHSGQY

SEQ ID NO: 73297 - protein, 10 aa, Homo sapiens
  Table A; Target 73297; HLA-A*29:02; R3HDML; ENSG00000101074; CTA
QNLSIHSGQY

SEQ ID NO: 73298 - protein, 10 aa, Homo sapiens
  Table A; Target 73298; HLA-A*30:02; R3HDML; ENSG00000101074; CTA
QNLSIHSGQY

SEQ ID NO: 73299 - protein, 10 aa, Homo sapiens
  Table A; Target 73299; HLA-C*07:01; R3HDML; ENSG00000101074; CTA
QNLSIHSGQY

SEQ ID NO: 73300 - protein, 11 aa, Homo sapiens
  Table A; Target 73300; HLA-A*33:01; R3HDML; ENSG00000101074; CTA
QNLSIHSGQYR

SEQ ID NO: 73301 - protein, 11 aa, Homo sapiens
  Table A; Target 73301; HLA-A*33:03; R3HDML; ENSG00000101074; CTA
QNLSIHSGQYR

SEQ ID NO: 73302 - protein, 9 aa, Homo sapiens
  Table A; Target 73302; HLA-B*07:02; R3HDML; ENSG00000101074; CTA
QPESTAMRL

SEQ ID NO: 73303 - protein, 9 aa, Homo sapiens
  Table A; Target 73303; HLA-B*35:01; R3HDML; ENSG00000101074; CTA
QPESTAMRL

SEQ ID NO: 73304 - protein, 9 aa, Homo sapiens
  Table A; Target 73304; HLA-B*35:03; R3HDML; ENSG00000101074; CTA
QPESTAMRL

SEQ ID NO: 73305 - protein, 9 aa, Homo sapiens
  Table A; Target 73305; HLA-C*07:02; R3HDML; ENSG00000101074; CTA
QPESTAMRL

SEQ ID NO: 73306 - protein, 10 aa, Homo sapiens
  Table A; Target 73306; HLA-B*07:02; R3HDML; ENSG00000101074; CTA
QPESTAMRLL

SEQ ID NO: 73307 - protein, 9 aa, Homo sapiens
  Table A; Target 73307; HLA-A*23:01; R3HDML; ENSG00000101074; CTA
QYRSVVDLM

SEQ ID NO: 73308 - protein, 9 aa, Homo sapiens
  Table A; Target 73308; HLA-A*24:02; R3HDML; ENSG00000101074; CTA
QYRSVVDLM

SEQ ID NO: 73309 - protein, 9 aa, Homo sapiens
  Table A; Target 73309; HLA-A*30:02; R3HDML; ENSG00000101074; CTA
RAAYLVCNY

SEQ ID NO: 73310 - protein, 9 aa, Homo sapiens
  Table A; Target 73310; HLA-C*02:02; R3HDML; ENSG00000101074; CTA
RAAYLVCNY

SEQ ID NO: 73311 - protein, 9 aa, Homo sapiens
  Table A; Target 73311; HLA-B*54:01; R3HDML; ENSG00000101074; CTA
RASVYPPAA

SEQ ID NO: 73312 - protein, 9 aa, Homo sapiens
  Table A; Target 73312; HLA-B*56:01; R3HDML; ENSG00000101074; CTA
RASVYPPAA

SEQ ID NO: 73313 - protein, 9 aa, Homo sapiens
  Table A; Target 73313; HLA-B*57:01; R3HDML; ENSG00000101074; CTA
RLARAAEAW

SEQ ID NO: 73314 - protein, 10 aa, Homo sapiens
  Table A; Target 73314; HLA-A*31:01; R3HDML; ENSG00000101074; CTA
RLLSGLEVPR

SEQ ID NO: 73315 - protein, 11 aa, Homo sapiens
  Table A; Target 73315; HLA-A*02:04; R3HDML; ENSG00000101074; CTA
RLLSGLEVPRY

SEQ ID NO: 73316 - protein, 11 aa, Homo sapiens
  Table A; Target 73316; HLA-A*03:01; R3HDML; ENSG00000101074; CTA
RLLSGLEVPRY

SEQ ID NO: 73317 - protein, 11 aa, Homo sapiens
  Table A; Target 73317; HLA-A*29:02; R3HDML; ENSG00000101074; CTA
RLLSGLEVPRY

SEQ ID NO: 73318 - protein, 11 aa, Homo sapiens
  Table A; Target 73318; HLA-A*30:02; R3HDML; ENSG00000101074; CTA
RLLSGLEVPRY

SEQ ID NO: 73319 - protein, 9 aa, Homo sapiens
  Table A; Target 73319; HLA-A*23:01; R3HDML; ENSG00000101074; CTA
RYVGQNLSI

SEQ ID NO: 73320 - protein, 9 aa, Homo sapiens
  Table A; Target 73320; HLA-A*24:02; R3HDML; ENSG00000101074; CTA
RYVGQNLSI

SEQ ID NO: 73321 - protein, 9 aa, Homo sapiens
  Table A; Target 73321; HLA-C*14:02; R3HDML; ENSG00000101074; CTA
RYVGQNLSI

SEQ ID NO: 73322 - protein, 9 aa, Homo sapiens
  Table A; Target 73322; HLA-B*44:02; R3HDML; ENSG00000101074; CTA
SEEKWHYLF

SEQ ID NO: 73323 - protein, 8 aa, Homo sapiens
  Table A; Target 73323; HLA-A*30:02; R3HDML; ENSG00000101074; CTA
SGLEVPRY

SEQ ID NO: 73324 - protein, 8 aa, Homo sapiens
  Table A; Target 73324; HLA-A*32:01; R3HDML; ENSG00000101074; CTA
SGLEVPRY

SEQ ID NO: 73325 - protein, 8 aa, Homo sapiens
  Table A; Target 73325; HLA-B*15:03; R3HDML; ENSG00000101074; CTA
SGLEVPRY

SEQ ID NO: 73326 - protein, 8 aa, Homo sapiens
  Table A; Target 73326; HLA-B*18:01; R3HDML; ENSG00000101074; CTA
SGLEVPRY

SEQ ID NO: 73327 - protein, 8 aa, Homo sapiens
  Table A; Target 73327; HLA-C*12:03; R3HDML; ENSG00000101074; CTA
SGLEVPRY

SEQ ID NO: 73328 - protein, 8 aa, Homo sapiens
  Table A; Target 73328; HLA-C*16:01; R3HDML; ENSG00000101074; CTA
SGLEVPRY

SEQ ID NO: 73329 - protein, 8 aa, Homo sapiens
  Table A; Target 73329; HLA-C*16:02; R3HDML; ENSG00000101074; CTA
SGLEVPRY

SEQ ID NO: 73330 - protein, 9 aa, Homo sapiens
  Table A; Target 73330; HLA-A*31:01; R3HDML; ENSG00000101074; CTA
SGLEVPRYR

SEQ ID NO: 73331 - protein, 9 aa, Homo sapiens
  Table A; Target 73331; HLA-A*33:01; R3HDML; ENSG00000101074; CTA
SGLEVPRYR

SEQ ID NO: 73332 - protein, 9 aa, Homo sapiens
  Table A; Target 73332; HLA-B*57:01; R3HDML; ENSG00000101074; CTA
SGLEVPRYR

SEQ ID NO: 73333 - protein, 8 aa, Homo sapiens
  Table A; Target 73333; HLA-B*08:01; R3HDML; ENSG00000101074; CTA
SGQYRSVV

SEQ ID NO: 73334 - protein, 10 aa, Homo sapiens
  Table A; Target 73334; HLA-A*02:03; R3HDML; ENSG00000101074; CTA
SIHSGQYRSV

SEQ ID NO: 73335 - protein, 9 aa, Homo sapiens
  Table A; Target 73335; HLA-A*25:01; R3HDML; ENSG00000101074; CTA
SISVWGNTW

SEQ ID NO: 73336 - protein, 9 aa, Homo sapiens
  Table A; Target 73336; HLA-A*32:01; R3HDML; ENSG00000101074; CTA
SISVWGNTW

SEQ ID NO: 73337 - protein, 9 aa, Homo sapiens
  Table A; Target 73337; HLA-B*56:01; R3HDML; ENSG00000101074; CTA
SPYKMGKPC

SEQ ID NO: 73338 - protein, 10 aa, Homo sapiens
  Table A; Target 73338; HLA-A*25:01; R3HDML; ENSG00000101074; CTA
SSISVWGNTW

SEQ ID NO: 73339 - protein, 10 aa, Homo sapiens
  Table A; Target 73339; HLA-B*44:02; R3HDML; ENSG00000101074; CTA
SSISVWGNTW

SEQ ID NO: 73340 - protein, 10 aa, Homo sapiens
  Table A; Target 73340; HLA-B*44:03; R3HDML; ENSG00000101074; CTA
SSISVWGNTW

SEQ ID NO: 73341 - protein, 10 aa, Homo sapiens
  Table A; Target 73341; HLA-B*57:01; R3HDML; ENSG00000101074; CTA
SSISVWGNTW

SEQ ID NO: 73342 - protein, 10 aa, Homo sapiens
  Table A; Target 73342; HLA-B*58:01; R3HDML; ENSG00000101074; CTA
SSISVWGNTW

SEQ ID NO: 73343 - protein, 10 aa, Homo sapiens
  Table A; Target 73343; HLA-C*16:04; R3HDML; ENSG00000101074; CTA
SSISVWGNTW

SEQ ID NO: 73344 - protein, 11 aa, Homo sapiens
  Table A; Target 73344; HLA-B*57:01; R3HDML; ENSG00000101074; CTA
STVGLAGLLFW

SEQ ID NO: 73345 - protein, 8 aa, Homo sapiens
  Table A; Target 73345; HLA-B*07:02; R3HDML; ENSG00000101074; CTA
SVRDMNAL

SEQ ID NO: 73346 - protein, 8 aa, Homo sapiens
  Table A; Target 73346; HLA-C*07:02; R3HDML; ENSG00000101074; CTA
SVRDMNAL

SEQ ID NO: 73347 - protein, 9 aa, Homo sapiens
  Table A; Target 73347; HLA-B*07:02; R3HDML; ENSG00000101074; CTA
SVRDMNALL

SEQ ID NO: 73348 - protein, 11 aa, Homo sapiens
  Table A; Target 73348; HLA-A*29:02; R3HDML; ENSG00000101074; CTA
SVRDMNALLDY

SEQ ID NO: 73349 - protein, 11 aa, Homo sapiens
  Table A; Target 73349; HLA-A*30:02; R3HDML; ENSG00000101074; CTA
SVRDMNALLDY

SEQ ID NO: 73350 - protein, 9 aa, Homo sapiens
  Table A; Target 73350; HLA-A*25:01; R3HDML; ENSG00000101074; CTA
SVVDLMKSW

SEQ ID NO: 73351 - protein, 9 aa, Homo sapiens
  Table A; Target 73351; HLA-A*26:01; R3HDML; ENSG00000101074; CTA
SVVDLMKSW

SEQ ID NO: 73352 - protein, 9 aa, Homo sapiens
  Table A; Target 73352; HLA-A*32:01; R3HDML; ENSG00000101074; CTA
SVVDLMKSW

SEQ ID NO: 73353 - protein, 9 aa, Homo sapiens
  Table A; Target 73353; HLA-B*44:02; R3HDML; ENSG00000101074; CTA
SVVDLMKSW

SEQ ID NO: 73354 - protein, 9 aa, Homo sapiens
  Table A; Target 73354; HLA-B*44:03; R3HDML; ENSG00000101074; CTA
SVVDLMKSW

SEQ ID NO: 73355 - protein, 9 aa, Homo sapiens
  Table A; Target 73355; HLA-B*57:01; R3HDML; ENSG00000101074; CTA
SVVDLMKSW

SEQ ID NO: 73356 - protein, 9 aa, Homo sapiens
  Table A; Target 73356; HLA-B*58:01; R3HDML; ENSG00000101074; CTA
SVVDLMKSW

SEQ ID NO: 73357 - protein, 9 aa, Homo sapiens
  Table A; Target 73357; HLA-C*16:04; R3HDML; ENSG00000101074; CTA
SVVDLMKSW

SEQ ID NO: 73358 - protein, 9 aa, Homo sapiens
  Table A; Target 73358; HLA-A*31:01; R3HDML; ENSG00000101074; CTA
SVWGNTWHR

SEQ ID NO: 73359 - protein, 9 aa, Homo sapiens
  Table A; Target 73359; HLA-A*03:01; R3HDML; ENSG00000101074; CTA
SVYPPAANM

SEQ ID NO: 73360 - protein, 9 aa, Homo sapiens
  Table A; Target 73360; HLA-A*03:02; R3HDML; ENSG00000101074; CTA
SVYPPAANM

SEQ ID NO: 73361 - protein, 9 aa, Homo sapiens
  Table A; Target 73361; HLA-A*11:01; R3HDML; ENSG00000101074; CTA
SVYPPAANM

SEQ ID NO: 73362 - protein, 9 aa, Homo sapiens
  Table A; Target 73362; HLA-A*25:01; R3HDML; ENSG00000101074; CTA
SVYPPAANM

SEQ ID NO: 73363 - protein, 9 aa, Homo sapiens
  Table A; Target 73363; HLA-A*26:01; R3HDML; ENSG00000101074; CTA
SVYPPAANM

SEQ ID NO: 73364 - protein, 9 aa, Homo sapiens
  Table A; Target 73364; HLA-A*30:02; R3HDML; ENSG00000101074; CTA
SVYPPAANM

SEQ ID NO: 73365 - protein, 9 aa, Homo sapiens
  Table A; Target 73365; HLA-A*32:01; R3HDML; ENSG00000101074; CTA
SVYPPAANM

SEQ ID NO: 73366 - protein, 9 aa, Homo sapiens
  Table A; Target 73366; HLA-A*33:01; R3HDML; ENSG00000101074; CTA
SVYPPAANM

SEQ ID NO: 73367 - protein, 9 aa, Homo sapiens
  Table A; Target 73367; HLA-A*33:03; R3HDML; ENSG00000101074; CTA
SVYPPAANM

SEQ ID NO: 73368 - protein, 9 aa, Homo sapiens
  Table A; Target 73368; HLA-B*07:02; R3HDML; ENSG00000101074; CTA
SVYPPAANM

SEQ ID NO: 73369 - protein, 9 aa, Homo sapiens
  Table A; Target 73369; HLA-B*15:01; R3HDML; ENSG00000101074; CTA
SVYPPAANM

SEQ ID NO: 73370 - protein, 9 aa, Homo sapiens
  Table A; Target 73370; HLA-B*15:03; R3HDML; ENSG00000101074; CTA
SVYPPAANM

SEQ ID NO: 73371 - protein, 9 aa, Homo sapiens
  Table A; Target 73371; HLA-B*27:05; R3HDML; ENSG00000101074; CTA
SVYPPAANM

SEQ ID NO: 73372 - protein, 9 aa, Homo sapiens
  Table A; Target 73372; HLA-B*35:01; R3HDML; ENSG00000101074; CTA
SVYPPAANM

SEQ ID NO: 73373 - protein, 9 aa, Homo sapiens
  Table A; Target 73373; HLA-B*37:01; R3HDML; ENSG00000101074; CTA
SVYPPAANM

SEQ ID NO: 73374 - protein, 9 aa, Homo sapiens
  Table A; Target 73374; HLA-B*46:01; R3HDML; ENSG00000101074; CTA
SVYPPAANM

SEQ ID NO: 73375 - protein, 9 aa, Homo sapiens
  Table A; Target 73375; HLA-B*56:01; R3HDML; ENSG00000101074; CTA
SVYPPAANM

SEQ ID NO: 73376 - protein, 9 aa, Homo sapiens
  Table A; Target 73376; HLA-C*01:02; R3HDML; ENSG00000101074; CTA
SVYPPAANM

SEQ ID NO: 73377 - protein, 9 aa, Homo sapiens
  Table A; Target 73377; HLA-C*02:02; R3HDML; ENSG00000101074; CTA
SVYPPAANM

SEQ ID NO: 73378 - protein, 9 aa, Homo sapiens
  Table A; Target 73378; HLA-C*03:03; R3HDML; ENSG00000101074; CTA
SVYPPAANM

SEQ ID NO: 73379 - protein, 9 aa, Homo sapiens
  Table A; Target 73379; HLA-C*03:04; R3HDML; ENSG00000101074; CTA
SVYPPAANM

SEQ ID NO: 73380 - protein, 9 aa, Homo sapiens
  Table A; Target 73380; HLA-C*07:04; R3HDML; ENSG00000101074; CTA
SVYPPAANM

SEQ ID NO: 73381 - protein, 9 aa, Homo sapiens
  Table A; Target 73381; HLA-C*07:06; R3HDML; ENSG00000101074; CTA
SVYPPAANM

SEQ ID NO: 73382 - protein, 9 aa, Homo sapiens
  Table A; Target 73382; HLA-C*14:02; R3HDML; ENSG00000101074; CTA
SVYPPAANM

SEQ ID NO: 73383 - protein, 9 aa, Homo sapiens
  Table A; Target 73383; HLA-C*16:04; R3HDML; ENSG00000101074; CTA
SVYPPAANM

SEQ ID NO: 73384 - protein, 11 aa, Homo sapiens
  Table A; Target 73384; HLA-A*01:01; R3HDML; ENSG00000101074; CTA
SVYPPAANMEY

SEQ ID NO: 73385 - protein, 11 aa, Homo sapiens
  Table A; Target 73385; HLA-A*03:01; R3HDML; ENSG00000101074; CTA
SVYPPAANMEY

SEQ ID NO: 73386 - protein, 11 aa, Homo sapiens
  Table A; Target 73386; HLA-A*03:02; R3HDML; ENSG00000101074; CTA
SVYPPAANMEY

SEQ ID NO: 73387 - protein, 11 aa, Homo sapiens
  Table A; Target 73387; HLA-A*11:01; R3HDML; ENSG00000101074; CTA
SVYPPAANMEY

SEQ ID NO: 73388 - protein, 11 aa, Homo sapiens
  Table A; Target 73388; HLA-A*25:01; R3HDML; ENSG00000101074; CTA
SVYPPAANMEY

SEQ ID NO: 73389 - protein, 11 aa, Homo sapiens
  Table A; Target 73389; HLA-A*26:01; R3HDML; ENSG00000101074; CTA
SVYPPAANMEY

SEQ ID NO: 73390 - protein, 11 aa, Homo sapiens
  Table A; Target 73390; HLA-A*29:02; R3HDML; ENSG00000101074; CTA
SVYPPAANMEY

SEQ ID NO: 73391 - protein, 11 aa, Homo sapiens
  Table A; Target 73391; HLA-A*30:02; R3HDML; ENSG00000101074; CTA
SVYPPAANMEY

SEQ ID NO: 73392 - protein, 11 aa, Homo sapiens
  Table A; Target 73392; HLA-A*31:01; R3HDML; ENSG00000101074; CTA
SVYPPAANMEY

SEQ ID NO: 73393 - protein, 11 aa, Homo sapiens
  Table A; Target 73393; HLA-A*32:01; R3HDML; ENSG00000101074; CTA
SVYPPAANMEY

SEQ ID NO: 73394 - protein, 11 aa, Homo sapiens
  Table A; Target 73394; HLA-B*15:01; R3HDML; ENSG00000101074; CTA
SVYPPAANMEY

SEQ ID NO: 73395 - protein, 11 aa, Homo sapiens
  Table A; Target 73395; HLA-B*15:03; R3HDML; ENSG00000101074; CTA
SVYPPAANMEY

SEQ ID NO: 73396 - protein, 11 aa, Homo sapiens
  Table A; Target 73396; HLA-B*35:01; R3HDML; ENSG00000101074; CTA
SVYPPAANMEY

SEQ ID NO: 73397 - protein, 11 aa, Homo sapiens
  Table A; Target 73397; HLA-B*46:01; R3HDML; ENSG00000101074; CTA
SVYPPAANMEY

SEQ ID NO: 73398 - protein, 11 aa, Homo sapiens
  Table A; Target 73398; HLA-B*57:01; R3HDML; ENSG00000101074; CTA
SVYPPAANMEY

SEQ ID NO: 73399 - protein, 11 aa, Homo sapiens
  Table A; Target 73399; HLA-B*58:01; R3HDML; ENSG00000101074; CTA
SVYPPAANMEY

SEQ ID NO: 73400 - protein, 11 aa, Homo sapiens
  Table A; Target 73400; HLA-C*01:02; R3HDML; ENSG00000101074; CTA
SVYPPAANMEY

SEQ ID NO: 73401 - protein, 11 aa, Homo sapiens
  Table A; Target 73401; HLA-C*02:02; R3HDML; ENSG00000101074; CTA
SVYPPAANMEY

SEQ ID NO: 73402 - protein, 11 aa, Homo sapiens
  Table A; Target 73402; HLA-C*07:04; R3HDML; ENSG00000101074; CTA
SVYPPAANMEY

SEQ ID NO: 73403 - protein, 11 aa, Homo sapiens
  Table A; Target 73403; HLA-C*07:06; R3HDML; ENSG00000101074; CTA
SVYPPAANMEY

SEQ ID NO: 73404 - protein, 11 aa, Homo sapiens
  Table A; Target 73404; HLA-C*12:03; R3HDML; ENSG00000101074; CTA
SVYPPAANMEY

SEQ ID NO: 73405 - protein, 11 aa, Homo sapiens
  Table A; Target 73405; HLA-C*14:02; R3HDML; ENSG00000101074; CTA
SVYPPAANMEY

SEQ ID NO: 73406 - protein, 11 aa, Homo sapiens
  Table A; Target 73406; HLA-C*16:01; R3HDML; ENSG00000101074; CTA
SVYPPAANMEY

SEQ ID NO: 73407 - protein, 11 aa, Homo sapiens
  Table A; Target 73407; HLA-C*16:04; R3HDML; ENSG00000101074; CTA
SVYPPAANMEY

SEQ ID NO: 73408 - protein, 10 aa, Homo sapiens
  Table A; Target 73408; HLA-C*14:02; R3HDML; ENSG00000101074; CTA
SYQGSCNSNM

SEQ ID NO: 73409 - protein, 9 aa, Homo sapiens
  Table A; Target 73409; HLA-B*08:01; R3HDML; ENSG00000101074; CTA
TAMRLLSGL

SEQ ID NO: 73410 - protein, 9 aa, Homo sapiens
  Table A; Target 73410; HLA-B*55:01; R3HDML; ENSG00000101074; CTA
TPAPAQPES

SEQ ID NO: 73411 - protein, 9 aa, Homo sapiens
  Table A; Target 73411; HLA-B*56:01; R3HDML; ENSG00000101074; CTA
TPAPAQPES

SEQ ID NO: 73412 - protein, 11 aa, Homo sapiens
  Table A; Target 73412; HLA-B*54:01; R3HDML; ENSG00000101074; CTA
TPAPAQPESTA

SEQ ID NO: 73413 - protein, 11 aa, Homo sapiens
  Table A; Target 73413; HLA-B*55:01; R3HDML; ENSG00000101074; CTA
TPAPAQPESTA

SEQ ID NO: 73414 - protein, 11 aa, Homo sapiens
  Table A; Target 73414; HLA-B*56:01; R3HDML; ENSG00000101074; CTA
TPAPAQPESTA

SEQ ID NO: 73415 - protein, 10 aa, Homo sapiens
  Table A; Target 73415; HLA-A*31:01; R3HDML; ENSG00000101074; CTA
TQMVWASSNR

SEQ ID NO: 73416 - protein, 11 aa, Homo sapiens
  Table A; Target 73416; HLA-B*38:01; R3HDML; ENSG00000101074; CTA
TQMVWASSNRL

SEQ ID NO: 73417 - protein, 9 aa, Homo sapiens
  Table A; Target 73417; HLA-B*57:01; R3HDML; ENSG00000101074; CTA
VGLAGLLFW

SEQ ID NO: 73418 - protein, 8 aa, Homo sapiens
  Table A; Target 73418; HLA-A*23:01; R3HDML; ENSG00000101074; CTA
VYPPAANM

SEQ ID NO: 73419 - protein, 8 aa, Homo sapiens
  Table A; Target 73419; HLA-A*24:02; R3HDML; ENSG00000101074; CTA
VYPPAANM

SEQ ID NO: 73420 - protein, 8 aa, Homo sapiens
  Table A; Target 73420; HLA-C*01:02; R3HDML; ENSG00000101074; CTA
VYPPAANM

SEQ ID NO: 73421 - protein, 8 aa, Homo sapiens
  Table A; Target 73421; HLA-C*04:01; R3HDML; ENSG00000101074; CTA
VYPPAANM

SEQ ID NO: 73422 - protein, 8 aa, Homo sapiens
  Table A; Target 73422; HLA-C*14:02; R3HDML; ENSG00000101074; CTA
VYPPAANM

SEQ ID NO: 73423 - protein, 10 aa, Homo sapiens
  Table A; Target 73423; HLA-A*23:01; R3HDML; ENSG00000101074; CTA
VYPPAANMEY

SEQ ID NO: 73424 - protein, 10 aa, Homo sapiens
  Table A; Target 73424; HLA-A*24:02; R3HDML; ENSG00000101074; CTA
VYPPAANMEY

SEQ ID NO: 73425 - protein, 10 aa, Homo sapiens
  Table A; Target 73425; HLA-A*29:02; R3HDML; ENSG00000101074; CTA
VYPPAANMEY

SEQ ID NO: 73426 - protein, 10 aa, Homo sapiens
  Table A; Target 73426; HLA-A*30:02; R3HDML; ENSG00000101074; CTA
VYPPAANMEY

SEQ ID NO: 73427 - protein, 10 aa, Homo sapiens
  Table A; Target 73427; HLA-B*15:01; R3HDML; ENSG00000101074; CTA
VYPPAANMEY

SEQ ID NO: 73428 - protein, 10 aa, Homo sapiens
  Table A; Target 73428; HLA-B*15:03; R3HDML; ENSG00000101074; CTA
VYPPAANMEY

SEQ ID NO: 73429 - protein, 10 aa, Homo sapiens
  Table A; Target 73429; HLA-B*46:01; R3HDML; ENSG00000101074; CTA
VYPPAANMEY

SEQ ID NO: 73430 - protein, 10 aa, Homo sapiens
  Table A; Target 73430; HLA-C*01:02; R3HDML; ENSG00000101074; CTA
VYPPAANMEY

SEQ ID NO: 73431 - protein, 10 aa, Homo sapiens
  Table A; Target 73431; HLA-C*04:01; R3HDML; ENSG00000101074; CTA
VYPPAANMEY

SEQ ID NO: 73432 - protein, 10 aa, Homo sapiens
  Table A; Target 73432; HLA-C*14:02; R3HDML; ENSG00000101074; CTA
VYPPAANMEY

SEQ ID NO: 73433 - protein, 11 aa, Homo sapiens
  Table A; Target 73433; HLA-A*23:01; R3HDML; ENSG00000101074; CTA
VYPPAANMEYM

SEQ ID NO: 73434 - protein, 11 aa, Homo sapiens
  Table A; Target 73434; HLA-A*24:02; R3HDML; ENSG00000101074; CTA
VYPPAANMEYM

SEQ ID NO: 73435 - protein, 9 aa, Homo sapiens
  Table A; Target 73435; HLA-B*35:03; R3HDML; ENSG00000101074; CTA
WAGQAVNAL

SEQ ID NO: 73436 - protein, 9 aa, Homo sapiens
  Table A; Target 73436; HLA-C*01:02; R3HDML; ENSG00000101074; CTA
WAGQAVNAL

SEQ ID NO: 73437 - protein, 9 aa, Homo sapiens
  Table A; Target 73437; HLA-C*03:03; R3HDML; ENSG00000101074; CTA
WAGQAVNAL

SEQ ID NO: 73438 - protein, 9 aa, Homo sapiens
  Table A; Target 73438; HLA-C*03:04; R3HDML; ENSG00000101074; CTA
WAGQAVNAL

SEQ ID NO: 73439 - protein, 9 aa, Homo sapiens
  Table A; Target 73439; HLA-A*02:01; R3HDML; ENSG00000101074; CTA
YLFPAPRDC

SEQ ID NO: 73440 - protein, 9 aa, Homo sapiens
  Table A; Target 73440; HLA-A*02:03; R3HDML; ENSG00000101074; CTA
YLFPAPRDC

SEQ ID NO: 73441 - protein, 9 aa, Homo sapiens
  Table A; Target 73441; HLA-A*01:01; R3HDML; ENSG00000101074; CTA
YPPAANMEY

SEQ ID NO: 73442 - protein, 9 aa, Homo sapiens
  Table A; Target 73442; HLA-A*26:01; R3HDML; ENSG00000101074; CTA
YPPAANMEY

SEQ ID NO: 73443 - protein, 9 aa, Homo sapiens
  Table A; Target 73443; HLA-A*29:02; R3HDML; ENSG00000101074; CTA
YPPAANMEY

SEQ ID NO: 73444 - protein, 9 aa, Homo sapiens
  Table A; Target 73444; HLA-B*35:01; R3HDML; ENSG00000101074; CTA
YPPAANMEY

SEQ ID NO: 73445 - protein, 9 aa, Homo sapiens
  Table A; Target 73445; HLA-B*35:03; R3HDML; ENSG00000101074; CTA
YPPAANMEY

SEQ ID NO: 73446 - protein, 9 aa, Homo sapiens
  Table A; Target 73446; HLA-B*46:01; R3HDML; ENSG00000101074; CTA
YPPAANMEY

SEQ ID NO: 73447 - protein, 9 aa, Homo sapiens
  Table A; Target 73447; HLA-B*51:01; R3HDML; ENSG00000101074; CTA
YPPAANMEY

SEQ ID NO: 73448 - protein, 9 aa, Homo sapiens
  Table A; Target 73448; HLA-B*55:01; R3HDML; ENSG00000101074; CTA
YPPAANMEY

SEQ ID NO: 73449 - protein, 9 aa, Homo sapiens
  Table A; Target 73449; HLA-C*01:02; R3HDML; ENSG00000101074; CTA
YPPAANMEY

SEQ ID NO: 73450 - protein, 9 aa, Homo sapiens
  Table A; Target 73450; HLA-C*03:03; R3HDML; ENSG00000101074; CTA
YPPAANMEY

SEQ ID NO: 73451 - protein, 9 aa, Homo sapiens
  Table A; Target 73451; HLA-C*14:02; R3HDML; ENSG00000101074; CTA
YPPAANMEY

SEQ ID NO: 73452 - protein, 10 aa, Homo sapiens
  Table A; Target 73452; HLA-B*35:03; R3HDML; ENSG00000101074; CTA
YPPAANMEYM

SEQ ID NO: 73453 - protein, 9 aa, Homo sapiens
  Table A; Target 73453; HLA-B*27:05; R3HDML; ENSG00000101074; CTA
YRSVVDLMK

SEQ ID NO: 73454 - protein, 8 aa, Homo sapiens
  Table A; Target 73454; HLA-B*13:02; R3HDML; ENSG00000101074; CTA
YVGQNLSI

SEQ ID NO: 73455 - protein, 8 aa, Homo sapiens
  Table A; Target 73455; HLA-B*51:01; R3HDML; ENSG00000101074; CTA
YVGQNLSI

SEQ ID NO: 73456 - protein, 8 aa, Homo sapiens
  Table A; Target 73456; HLA-C*07:01; R3HDML; ENSG00000101074; CTA
YVGQNLSI

SEQ ID NO: 73457 - protein, 9 aa, Homo sapiens
  Table A; Target 73457; HLA-A*01:01; RLN1; ENSG00000107018; TAA
AADSNPSEL

SEQ ID NO: 73458 - protein, 9 aa, Homo sapiens
  Table A; Target 73458; HLA-A*02:07; RLN1; ENSG00000107018; TAA
AADSNPSEL

SEQ ID NO: 73459 - protein, 9 aa, Homo sapiens
  Table A; Target 73459; HLA-A*32:01; RLN1; ENSG00000107018; TAA
AADSNPSEL

SEQ ID NO: 73460 - protein, 9 aa, Homo sapiens
  Table A; Target 73460; HLA-B*07:02; RLN1; ENSG00000107018; TAA
AADSNPSEL

SEQ ID NO: 73461 - protein, 9 aa, Homo sapiens
  Table A; Target 73461; HLA-B*35:01; RLN1; ENSG00000107018; TAA
AADSNPSEL

SEQ ID NO: 73462 - protein, 9 aa, Homo sapiens
  Table A; Target 73462; HLA-B*35:03; RLN1; ENSG00000107018; TAA
AADSNPSEL

SEQ ID NO: 73463 - protein, 9 aa, Homo sapiens
  Table A; Target 73463; HLA-B*38:01; RLN1; ENSG00000107018; TAA
AADSNPSEL

SEQ ID NO: 73464 - protein, 9 aa, Homo sapiens
  Table A; Target 73464; HLA-B*39:01; RLN1; ENSG00000107018; TAA
AADSNPSEL

SEQ ID NO: 73465 - protein, 9 aa, Homo sapiens
  Table A; Target 73465; HLA-B*40:01; RLN1; ENSG00000107018; TAA
AADSNPSEL

SEQ ID NO: 73466 - protein, 9 aa, Homo sapiens
  Table A; Target 73466; HLA-B*55:01; RLN1; ENSG00000107018; TAA
AADSNPSEL

SEQ ID NO: 73467 - protein, 9 aa, Homo sapiens
  Table A; Target 73467; HLA-B*58:01; RLN1; ENSG00000107018; TAA
AADSNPSEL

SEQ ID NO: 73468 - protein, 9 aa, Homo sapiens
  Table A; Target 73468; HLA-C*01:02; RLN1; ENSG00000107018; TAA
AADSNPSEL

SEQ ID NO: 73469 - protein, 9 aa, Homo sapiens
  Table A; Target 73469; HLA-C*02:02; RLN1; ENSG00000107018; TAA
AADSNPSEL

SEQ ID NO: 73470 - protein, 9 aa, Homo sapiens
  Table A; Target 73470; HLA-C*03:03; RLN1; ENSG00000107018; TAA
AADSNPSEL

SEQ ID NO: 73471 - protein, 9 aa, Homo sapiens
  Table A; Target 73471; HLA-C*03:04; RLN1; ENSG00000107018; TAA
AADSNPSEL

SEQ ID NO: 73472 - protein, 9 aa, Homo sapiens
  Table A; Target 73472; HLA-C*04:01; RLN1; ENSG00000107018; TAA
AADSNPSEL

SEQ ID NO: 73473 - protein, 9 aa, Homo sapiens
  Table A; Target 73473; HLA-C*05:01; RLN1; ENSG00000107018; TAA
AADSNPSEL

SEQ ID NO: 73474 - protein, 9 aa, Homo sapiens
  Table A; Target 73474; HLA-C*07:02; RLN1; ENSG00000107018; TAA
AADSNPSEL

SEQ ID NO: 73475 - protein, 9 aa, Homo sapiens
  Table A; Target 73475; HLA-C*07:04; RLN1; ENSG00000107018; TAA
AADSNPSEL

SEQ ID NO: 73476 - protein, 9 aa, Homo sapiens
  Table A; Target 73476; HLA-C*12:03; RLN1; ENSG00000107018; TAA
AADSNPSEL

SEQ ID NO: 73477 - protein, 9 aa, Homo sapiens
  Table A; Target 73477; HLA-C*14:02; RLN1; ENSG00000107018; TAA
AADSNPSEL

SEQ ID NO: 73478 - protein, 9 aa, Homo sapiens
  Table A; Target 73478; HLA-C*16:02; RLN1; ENSG00000107018; TAA
AADSNPSEL

SEQ ID NO: 73479 - protein, 9 aa, Homo sapiens
  Table A; Target 73479; HLA-C*16:04; RLN1; ENSG00000107018; TAA
AADSNPSEL

SEQ ID NO: 73480 - protein, 10 aa, Homo sapiens
  Table A; Target 73480; HLA-A*01:01; RLN1; ENSG00000107018; TAA
AADSNPSELK

SEQ ID NO: 73481 - protein, 10 aa, Homo sapiens
  Table A; Target 73481; HLA-A*03:01; RLN1; ENSG00000107018; TAA
AADSNPSELK

SEQ ID NO: 73482 - protein, 10 aa, Homo sapiens
  Table A; Target 73482; HLA-A*03:02; RLN1; ENSG00000107018; TAA
AADSNPSELK

SEQ ID NO: 73483 - protein, 10 aa, Homo sapiens
  Table A; Target 73483; HLA-A*11:01; RLN1; ENSG00000107018; TAA
AADSNPSELK

SEQ ID NO: 73484 - protein, 10 aa, Homo sapiens
  Table A; Target 73484; HLA-B*27:02; RLN1; ENSG00000107018; TAA
AADSNPSELK

SEQ ID NO: 73485 - protein, 10 aa, Homo sapiens
  Table A; Target 73485; HLA-C*05:01; RLN1; ENSG00000107018; TAA
AADSNPSELK

SEQ ID NO: 73486 - protein, 10 aa, Homo sapiens
  Table A; Target 73486; HLA-C*07:06; RLN1; ENSG00000107018; TAA
AADSNPSELK

SEQ ID NO: 73487 - protein, 11 aa, Homo sapiens
  Table A; Target 73487; HLA-A*01:01; RLN1; ENSG00000107018; TAA
AADSNPSELKY

SEQ ID NO: 73488 - protein, 11 aa, Homo sapiens
  Table A; Target 73488; HLA-A*29:02; RLN1; ENSG00000107018; TAA
AADSNPSELKY

SEQ ID NO: 73489 - protein, 11 aa, Homo sapiens
  Table A; Target 73489; HLA-A*30:02; RLN1; ENSG00000107018; TAA
AADSNPSELKY

SEQ ID NO: 73490 - protein, 11 aa, Homo sapiens
  Table A; Target 73490; HLA-B*15:01; RLN1; ENSG00000107018; TAA
AADSNPSELKY

SEQ ID NO: 73491 - protein, 11 aa, Homo sapiens
  Table A; Target 73491; HLA-B*27:05; RLN1; ENSG00000107018; TAA
AADSNPSELKY

SEQ ID NO: 73492 - protein, 11 aa, Homo sapiens
  Table A; Target 73492; HLA-B*35:01; RLN1; ENSG00000107018; TAA
AADSNPSELKY

SEQ ID NO: 73493 - protein, 11 aa, Homo sapiens
  Table A; Target 73493; HLA-B*44:03; RLN1; ENSG00000107018; TAA
AADSNPSELKY

SEQ ID NO: 73494 - protein, 11 aa, Homo sapiens
  Table A; Target 73494; HLA-B*55:01; RLN1; ENSG00000107018; TAA
AADSNPSELKY

SEQ ID NO: 73495 - protein, 11 aa, Homo sapiens
  Table A; Target 73495; HLA-B*58:01; RLN1; ENSG00000107018; TAA
AADSNPSELKY

SEQ ID NO: 73496 - protein, 11 aa, Homo sapiens
  Table A; Target 73496; HLA-C*03:03; RLN1; ENSG00000107018; TAA
AADSNPSELKY

SEQ ID NO: 73497 - protein, 11 aa, Homo sapiens
  Table A; Target 73497; HLA-C*05:01; RLN1; ENSG00000107018; TAA
AADSNPSELKY

SEQ ID NO: 73498 - protein, 11 aa, Homo sapiens
  Table A; Target 73498; HLA-C*12:03; RLN1; ENSG00000107018; TAA
AADSNPSELKY

SEQ ID NO: 73499 - protein, 11 aa, Homo sapiens
  Table A; Target 73499; HLA-C*16:02; RLN1; ENSG00000107018; TAA
AADSNPSELKY

SEQ ID NO: 73500 - protein, 11 aa, Homo sapiens
  Table A; Target 73500; HLA-C*16:04; RLN1; ENSG00000107018; TAA
AADSNPSELKY

SEQ ID NO: 73501 - protein, 10 aa, Homo sapiens
  Table A; Target 73501; HLA-A*30:01; RLN1; ENSG00000107018; TAA
AALSERQPSL

SEQ ID NO: 73502 - protein, 10 aa, Homo sapiens
  Table A; Target 73502; HLA-B*07:02; RLN1; ENSG00000107018; TAA
AALSERQPSL

SEQ ID NO: 73503 - protein, 10 aa, Homo sapiens
  Table A; Target 73503; HLA-B*58:01; RLN1; ENSG00000107018; TAA
AALSERQPSL

SEQ ID NO: 73504 - protein, 10 aa, Homo sapiens
  Table A; Target 73504; HLA-C*03:03; RLN1; ENSG00000107018; TAA
AALSERQPSL

SEQ ID NO: 73505 - protein, 10 aa, Homo sapiens
  Table A; Target 73505; HLA-C*03:04; RLN1; ENSG00000107018; TAA
AALSERQPSL

SEQ ID NO: 73506 - protein, 10 aa, Homo sapiens
  Table A; Target 73506; HLA-C*07:02; RLN1; ENSG00000107018; TAA
AALSERQPSL

SEQ ID NO: 73507 - protein, 10 aa, Homo sapiens
  Table A; Target 73507; HLA-C*16:01; RLN1; ENSG00000107018; TAA
AALSERQPSL

SEQ ID NO: 73508 - protein, 8 aa, Homo sapiens
  Table A; Target 73508; HLA-B*37:01; RLN1; ENSG00000107018; TAA
ADSNPSEL

SEQ ID NO: 73509 - protein, 9 aa, Homo sapiens
  Table A; Target 73509; HLA-A*03:02; RLN1; ENSG00000107018; TAA
ADSNPSELK

SEQ ID NO: 73510 - protein, 9 aa, Homo sapiens
  Table A; Target 73510; HLA-A*11:01; RLN1; ENSG00000107018; TAA
ADSNPSELK

SEQ ID NO: 73511 - protein, 10 aa, Homo sapiens
  Table A; Target 73511; HLA-A*11:01; RLN1; ENSG00000107018; TAA
ADSNPSELKY

SEQ ID NO: 73512 - protein, 10 aa, Homo sapiens
  Table A; Target 73512; HLA-A*29:02; RLN1; ENSG00000107018; TAA
ADSNPSELKY

SEQ ID NO: 73513 - protein, 10 aa, Homo sapiens
  Table A; Target 73513; HLA-A*30:02; RLN1; ENSG00000107018; TAA
ADSNPSELKY

SEQ ID NO: 73514 - protein, 10 aa, Homo sapiens
  Table A; Target 73514; HLA-A*32:01; RLN1; ENSG00000107018; TAA
ADSNPSELKY

SEQ ID NO: 73515 - protein, 10 aa, Homo sapiens
  Table A; Target 73515; HLA-B*15:03; RLN1; ENSG00000107018; TAA
ADSNPSELKY

SEQ ID NO: 73516 - protein, 10 aa, Homo sapiens
  Table A; Target 73516; HLA-B*27:02; RLN1; ENSG00000107018; TAA
ADSNPSELKY

SEQ ID NO: 73517 - protein, 10 aa, Homo sapiens
  Table A; Target 73517; HLA-B*27:05; RLN1; ENSG00000107018; TAA
ADSNPSELKY

SEQ ID NO: 73518 - protein, 10 aa, Homo sapiens
  Table A; Target 73518; HLA-B*37:01; RLN1; ENSG00000107018; TAA
ADSNPSELKY

SEQ ID NO: 73519 - protein, 10 aa, Homo sapiens
  Table A; Target 73519; HLA-B*39:01; RLN1; ENSG00000107018; TAA
ADSNPSELKY

SEQ ID NO: 73520 - protein, 10 aa, Homo sapiens
  Table A; Target 73520; HLA-B*44:02; RLN1; ENSG00000107018; TAA
ADSNPSELKY

SEQ ID NO: 73521 - protein, 10 aa, Homo sapiens
  Table A; Target 73521; HLA-B*44:03; RLN1; ENSG00000107018; TAA
ADSNPSELKY

SEQ ID NO: 73522 - protein, 10 aa, Homo sapiens
  Table A; Target 73522; HLA-C*04:01; RLN1; ENSG00000107018; TAA
ADSNPSELKY

SEQ ID NO: 73523 - protein, 10 aa, Homo sapiens
  Table A; Target 73523; HLA-C*07:01; RLN1; ENSG00000107018; TAA
ADSNPSELKY

SEQ ID NO: 73524 - protein, 10 aa, Homo sapiens
  Table A; Target 73524; HLA-C*07:02; RLN1; ENSG00000107018; TAA
ADSNPSELKY

SEQ ID NO: 73525 - protein, 10 aa, Homo sapiens
  Table A; Target 73525; HLA-C*07:04; RLN1; ENSG00000107018; TAA
ADSNPSELKY

SEQ ID NO: 73526 - protein, 10 aa, Homo sapiens
  Table A; Target 73526; HLA-C*12:03; RLN1; ENSG00000107018; TAA
ADSNPSELKY

SEQ ID NO: 73527 - protein, 10 aa, Homo sapiens
  Table A; Target 73527; HLA-C*16:01; RLN1; ENSG00000107018; TAA
ADSNPSELKY

SEQ ID NO: 73528 - protein, 10 aa, Homo sapiens
  Table A; Target 73528; HLA-C*16:02; RLN1; ENSG00000107018; TAA
ADSNPSELKY

SEQ ID NO: 73529 - protein, 10 aa, Homo sapiens
  Table A; Target 73529; HLA-C*16:04; RLN1; ENSG00000107018; TAA
ADSNPSELKY

SEQ ID NO: 73530 - protein, 11 aa, Homo sapiens
  Table A; Target 73530; HLA-B*44:02; RLN1; ENSG00000107018; TAA
ADSNPSELKYL

SEQ ID NO: 73531 - protein, 11 aa, Homo sapiens
  Table A; Target 73531; HLA-B*44:03; RLN1; ENSG00000107018; TAA
ADSNPSELKYL

SEQ ID NO: 73532 - protein, 11 aa, Homo sapiens
  Table A; Target 73532; HLA-C*16:02; RLN1; ENSG00000107018; TAA
ADSNPSELKYL

SEQ ID NO: 73533 - protein, 9 aa, Homo sapiens
  Table A; Target 73533; HLA-A*02:03; RLN1; ENSG00000107018; TAA
ALKDSNLSF

SEQ ID NO: 73534 - protein, 9 aa, Homo sapiens
  Table A; Target 73534; HLA-A*23:01; RLN1; ENSG00000107018; TAA
ALKDSNLSF

SEQ ID NO: 73535 - protein, 9 aa, Homo sapiens
  Table A; Target 73535; HLA-A*25:01; RLN1; ENSG00000107018; TAA
ALKDSNLSF

SEQ ID NO: 73536 - protein, 9 aa, Homo sapiens
  Table A; Target 73536; HLA-A*26:01; RLN1; ENSG00000107018; TAA
ALKDSNLSF

SEQ ID NO: 73537 - protein, 9 aa, Homo sapiens
  Table A; Target 73537; HLA-A*29:02; RLN1; ENSG00000107018; TAA
ALKDSNLSF

SEQ ID NO: 73538 - protein, 9 aa, Homo sapiens
  Table A; Target 73538; HLA-A*30:02; RLN1; ENSG00000107018; TAA
ALKDSNLSF

SEQ ID NO: 73539 - protein, 9 aa, Homo sapiens
  Table A; Target 73539; HLA-A*32:01; RLN1; ENSG00000107018; TAA
ALKDSNLSF

SEQ ID NO: 73540 - protein, 9 aa, Homo sapiens
  Table A; Target 73540; HLA-B*07:02; RLN1; ENSG00000107018; TAA
ALKDSNLSF

SEQ ID NO: 73541 - protein, 9 aa, Homo sapiens
  Table A; Target 73541; HLA-B*08:01; RLN1; ENSG00000107018; TAA
ALKDSNLSF

SEQ ID NO: 73542 - protein, 9 aa, Homo sapiens
  Table A; Target 73542; HLA-B*15:01; RLN1; ENSG00000107018; TAA
ALKDSNLSF

SEQ ID NO: 73543 - protein, 9 aa, Homo sapiens
  Table A; Target 73543; HLA-B*15:03; RLN1; ENSG00000107018; TAA
ALKDSNLSF

SEQ ID NO: 73544 - protein, 9 aa, Homo sapiens
  Table A; Target 73544; HLA-B*46:01; RLN1; ENSG00000107018; TAA
ALKDSNLSF

SEQ ID NO: 73545 - protein, 9 aa, Homo sapiens
  Table A; Target 73545; HLA-C*01:02; RLN1; ENSG00000107018; TAA
ALKDSNLSF

SEQ ID NO: 73546 - protein, 9 aa, Homo sapiens
  Table A; Target 73546; HLA-C*02:02; RLN1; ENSG00000107018; TAA
ALKDSNLSF

SEQ ID NO: 73547 - protein, 9 aa, Homo sapiens
  Table A; Target 73547; HLA-C*14:02; RLN1; ENSG00000107018; TAA
ALKDSNLSF

SEQ ID NO: 73548 - protein, 9 aa, Homo sapiens
  Table A; Target 73548; HLA-C*16:01; RLN1; ENSG00000107018; TAA
ALKDSNLSF

SEQ ID NO: 73549 - protein, 9 aa, Homo sapiens
  Table A; Target 73549; HLA-A*02:01; RLN1; ENSG00000107018; TAA
ALSERQPSL

SEQ ID NO: 73550 - protein, 9 aa, Homo sapiens
  Table A; Target 73550; HLA-A*02:03; RLN1; ENSG00000107018; TAA
ALSERQPSL

SEQ ID NO: 73551 - protein, 9 aa, Homo sapiens
  Table A; Target 73551; HLA-A*02:04; RLN1; ENSG00000107018; TAA
ALSERQPSL

SEQ ID NO: 73552 - protein, 9 aa, Homo sapiens
  Table A; Target 73552; HLA-A*02:07; RLN1; ENSG00000107018; TAA
ALSERQPSL

SEQ ID NO: 73553 - protein, 9 aa, Homo sapiens
  Table A; Target 73553; HLA-A*30:01; RLN1; ENSG00000107018; TAA
ALSERQPSL

SEQ ID NO: 73554 - protein, 9 aa, Homo sapiens
  Table A; Target 73554; HLA-A*32:01; RLN1; ENSG00000107018; TAA
ALSERQPSL

SEQ ID NO: 73555 - protein, 9 aa, Homo sapiens
  Table A; Target 73555; HLA-B*07:02; RLN1; ENSG00000107018; TAA
ALSERQPSL

SEQ ID NO: 73556 - protein, 9 aa, Homo sapiens
  Table A; Target 73556; HLA-B*08:01; RLN1; ENSG00000107018; TAA
ALSERQPSL

SEQ ID NO: 73557 - protein, 9 aa, Homo sapiens
  Table A; Target 73557; HLA-B*13:02; RLN1; ENSG00000107018; TAA
ALSERQPSL

SEQ ID NO: 73558 - protein, 9 aa, Homo sapiens
  Table A; Target 73558; HLA-B*15:01; RLN1; ENSG00000107018; TAA
ALSERQPSL

SEQ ID NO: 73559 - protein, 9 aa, Homo sapiens
  Table A; Target 73559; HLA-B*37:01; RLN1; ENSG00000107018; TAA
ALSERQPSL

SEQ ID NO: 73560 - protein, 9 aa, Homo sapiens
  Table A; Target 73560; HLA-B*46:01; RLN1; ENSG00000107018; TAA
ALSERQPSL

SEQ ID NO: 73561 - protein, 9 aa, Homo sapiens
  Table A; Target 73561; HLA-B*55:01; RLN1; ENSG00000107018; TAA
ALSERQPSL

SEQ ID NO: 73562 - protein, 9 aa, Homo sapiens
  Table A; Target 73562; HLA-C*01:02; RLN1; ENSG00000107018; TAA
ALSERQPSL

SEQ ID NO: 73563 - protein, 9 aa, Homo sapiens
  Table A; Target 73563; HLA-C*02:02; RLN1; ENSG00000107018; TAA
ALSERQPSL

SEQ ID NO: 73564 - protein, 9 aa, Homo sapiens
  Table A; Target 73564; HLA-C*03:03; RLN1; ENSG00000107018; TAA
ALSERQPSL

SEQ ID NO: 73565 - protein, 9 aa, Homo sapiens
  Table A; Target 73565; HLA-C*03:04; RLN1; ENSG00000107018; TAA
ALSERQPSL

SEQ ID NO: 73566 - protein, 9 aa, Homo sapiens
  Table A; Target 73566; HLA-C*07:02; RLN1; ENSG00000107018; TAA
ALSERQPSL

SEQ ID NO: 73567 - protein, 9 aa, Homo sapiens
  Table A; Target 73567; HLA-C*14:02; RLN1; ENSG00000107018; TAA
ALSERQPSL

SEQ ID NO: 73568 - protein, 9 aa, Homo sapiens
  Table A; Target 73568; HLA-C*16:01; RLN1; ENSG00000107018; TAA
ALSERQPSL

SEQ ID NO: 73569 - protein, 9 aa, Homo sapiens
  Table A; Target 73569; HLA-C*16:02; RLN1; ENSG00000107018; TAA
ALSERQPSL

SEQ ID NO: 73570 - protein, 8 aa, Homo sapiens
  Table A; Target 73570; HLA-A*03:02; RLN1; ENSG00000107018; TAA
ANLPPELK

SEQ ID NO: 73571 - protein, 11 aa, Homo sapiens
  Table A; Target 73571; HLA-A*31:01; RLN1; ENSG00000107018; TAA
ANLPPELKAAL

SEQ ID NO: 73572 - protein, 10 aa, Homo sapiens
  Table A; Target 73572; HLA-B*07:02; RLN1; ENSG00000107018; TAA
APQTPRPVAE

SEQ ID NO: 73573 - protein, 9 aa, Homo sapiens
  Table A; Target 73573; HLA-A*68:01; RLN1; ENSG00000107018; TAA
DAPQTPRPV

SEQ ID NO: 73574 - protein, 9 aa, Homo sapiens
  Table A; Target 73574; HLA-C*06:02; RLN1; ENSG00000107018; TAA
DAPQTPRPV

SEQ ID NO: 73575 - protein, 9 aa, Homo sapiens
  Table A; Target 73575; HLA-A*33:01; RLN1; ENSG00000107018; TAA
DDVIKLCGR

SEQ ID NO: 73576 - protein, 9 aa, Homo sapiens
  Table A; Target 73576; HLA-A*01:01; RLN1; ENSG00000107018; TAA
DSNLSFEEF

SEQ ID NO: 73577 - protein, 9 aa, Homo sapiens
  Table A; Target 73577; HLA-A*25:01; RLN1; ENSG00000107018; TAA
DSNLSFEEF

SEQ ID NO: 73578 - protein, 9 aa, Homo sapiens
  Table A; Target 73578; HLA-A*33:01; RLN1; ENSG00000107018; TAA
DSNLSFEEF

SEQ ID NO: 73579 - protein, 9 aa, Homo sapiens
  Table A; Target 73579; HLA-A*33:03; RLN1; ENSG00000107018; TAA
DSNLSFEEF

SEQ ID NO: 73580 - protein, 9 aa, Homo sapiens
  Table A; Target 73580; HLA-B*18:01; RLN1; ENSG00000107018; TAA
DSNLSFEEF

SEQ ID NO: 73581 - protein, 9 aa, Homo sapiens
  Table A; Target 73581; HLA-B*27:02; RLN1; ENSG00000107018; TAA
DSNLSFEEF

SEQ ID NO: 73582 - protein, 9 aa, Homo sapiens
  Table A; Target 73582; HLA-B*35:01; RLN1; ENSG00000107018; TAA
DSNLSFEEF

SEQ ID NO: 73583 - protein, 9 aa, Homo sapiens
  Table A; Target 73583; HLA-B*57:01; RLN1; ENSG00000107018; TAA
DSNLSFEEF

SEQ ID NO: 73584 - protein, 9 aa, Homo sapiens
  Table A; Target 73584; HLA-C*07:06; RLN1; ENSG00000107018; TAA
DSNLSFEEF

SEQ ID NO: 73585 - protein, 10 aa, Homo sapiens
  Table A; Target 73585; HLA-B*27:02; RLN1; ENSG00000107018; TAA
DSNLSFEEFK

SEQ ID NO: 73586 - protein, 9 aa, Homo sapiens
  Table A; Target 73586; HLA-A*01:01; RLN1; ENSG00000107018; TAA
DSNPSELKY

SEQ ID NO: 73587 - protein, 9 aa, Homo sapiens
  Table A; Target 73587; HLA-A*25:01; RLN1; ENSG00000107018; TAA
DSNPSELKY

SEQ ID NO: 73588 - protein, 9 aa, Homo sapiens
  Table A; Target 73588; HLA-A*26:01; RLN1; ENSG00000107018; TAA
DSNPSELKY

SEQ ID NO: 73589 - protein, 9 aa, Homo sapiens
  Table A; Target 73589; HLA-A*29:02; RLN1; ENSG00000107018; TAA
DSNPSELKY

SEQ ID NO: 73590 - protein, 9 aa, Homo sapiens
  Table A; Target 73590; HLA-A*30:02; RLN1; ENSG00000107018; TAA
DSNPSELKY

SEQ ID NO: 73591 - protein, 9 aa, Homo sapiens
  Table A; Target 73591; HLA-A*32:01; RLN1; ENSG00000107018; TAA
DSNPSELKY

SEQ ID NO: 73592 - protein, 9 aa, Homo sapiens
  Table A; Target 73592; HLA-A*33:01; RLN1; ENSG00000107018; TAA
DSNPSELKY

SEQ ID NO: 73593 - protein, 9 aa, Homo sapiens
  Table A; Target 73593; HLA-A*33:03; RLN1; ENSG00000107018; TAA
DSNPSELKY

SEQ ID NO: 73594 - protein, 9 aa, Homo sapiens
  Table A; Target 73594; HLA-B*15:01; RLN1; ENSG00000107018; TAA
DSNPSELKY

SEQ ID NO: 73595 - protein, 9 aa, Homo sapiens
  Table A; Target 73595; HLA-B*18:01; RLN1; ENSG00000107018; TAA
DSNPSELKY

SEQ ID NO: 73596 - protein, 9 aa, Homo sapiens
  Table A; Target 73596; HLA-B*35:01; RLN1; ENSG00000107018; TAA
DSNPSELKY

SEQ ID NO: 73597 - protein, 9 aa, Homo sapiens
  Table A; Target 73597; HLA-B*39:01; RLN1; ENSG00000107018; TAA
DSNPSELKY

SEQ ID NO: 73598 - protein, 9 aa, Homo sapiens
  Table A; Target 73598; HLA-B*44:02; RLN1; ENSG00000107018; TAA
DSNPSELKY

SEQ ID NO: 73599 - protein, 9 aa, Homo sapiens
  Table A; Target 73599; HLA-B*44:03; RLN1; ENSG00000107018; TAA
DSNPSELKY

SEQ ID NO: 73600 - protein, 9 aa, Homo sapiens
  Table A; Target 73600; HLA-B*58:01; RLN1; ENSG00000107018; TAA
DSNPSELKY

SEQ ID NO: 73601 - protein, 9 aa, Homo sapiens
  Table A; Target 73601; HLA-C*03:03; RLN1; ENSG00000107018; TAA
DSNPSELKY

SEQ ID NO: 73602 - protein, 9 aa, Homo sapiens
  Table A; Target 73602; HLA-C*07:01; RLN1; ENSG00000107018; TAA
DSNPSELKY

SEQ ID NO: 73603 - protein, 9 aa, Homo sapiens
  Table A; Target 73603; HLA-C*07:04; RLN1; ENSG00000107018; TAA
DSNPSELKY

SEQ ID NO: 73604 - protein, 9 aa, Homo sapiens
  Table A; Target 73604; HLA-C*07:06; RLN1; ENSG00000107018; TAA
DSNPSELKY

SEQ ID NO: 73605 - protein, 9 aa, Homo sapiens
  Table A; Target 73605; HLA-C*12:03; RLN1; ENSG00000107018; TAA
DSNPSELKY

SEQ ID NO: 73606 - protein, 9 aa, Homo sapiens
  Table A; Target 73606; HLA-C*16:01; RLN1; ENSG00000107018; TAA
DSNPSELKY

SEQ ID NO: 73607 - protein, 9 aa, Homo sapiens
  Table A; Target 73607; HLA-C*16:02; RLN1; ENSG00000107018; TAA
DSNPSELKY

SEQ ID NO: 73608 - protein, 10 aa, Homo sapiens
  Table A; Target 73608; HLA-A*25:01; RLN1; ENSG00000107018; TAA
DSNPSELKYL

SEQ ID NO: 73609 - protein, 10 aa, Homo sapiens
  Table A; Target 73609; HLA-A*33:01; RLN1; ENSG00000107018; TAA
DSNPSELKYL

SEQ ID NO: 73610 - protein, 10 aa, Homo sapiens
  Table A; Target 73610; HLA-B*40:02; RLN1; ENSG00000107018; TAA
DSNPSELKYL

SEQ ID NO: 73611 - protein, 10 aa, Homo sapiens
  Table A; Target 73611; HLA-C*07:02; RLN1; ENSG00000107018; TAA
DSNPSELKYL

SEQ ID NO: 73612 - protein, 11 aa, Homo sapiens
  Table A; Target 73612; HLA-A*33:01; RLN1; ENSG00000107018; TAA
DSNPSELKYLG

SEQ ID NO: 73613 - protein, 9 aa, Homo sapiens
  Table A; Target 73613; HLA-A*01:01; RLN1; ENSG00000107018; TAA
DTETIIIML

SEQ ID NO: 73614 - protein, 9 aa, Homo sapiens
  Table A; Target 73614; HLA-A*68:02; RLN1; ENSG00000107018; TAA
DTETIIIML

SEQ ID NO: 73615 - protein, 8 aa, Homo sapiens
  Table A; Target 73615; HLA-A*33:01; RLN1; ENSG00000107018; TAA
DTHSQKKR

SEQ ID NO: 73616 - protein, 8 aa, Homo sapiens
  Table A; Target 73616; HLA-A*33:03; RLN1; ENSG00000107018; TAA
DTHSQKKR

SEQ ID NO: 73617 - protein, 9 aa, Homo sapiens
  Table A; Target 73617; HLA-A*33:01; RLN1; ENSG00000107018; TAA
DTHSQKKRR

SEQ ID NO: 73618 - protein, 8 aa, Homo sapiens
  Table A; Target 73618; HLA-A*33:01; RLN1; ENSG00000107018; TAA
DVIKLCGR

SEQ ID NO: 73619 - protein, 8 aa, Homo sapiens
  Table A; Target 73619; HLA-A*33:03; RLN1; ENSG00000107018; TAA
DVIKLCGR

SEQ ID NO: 73620 - protein, 10 aa, Homo sapiens
  Table A; Target 73620; HLA-A*25:01; RLN1; ENSG00000107018; TAA
EAADSNPSEL

SEQ ID NO: 73621 - protein, 10 aa, Homo sapiens
  Table A; Target 73621; HLA-A*26:01; RLN1; ENSG00000107018; TAA
EAADSNPSEL

SEQ ID NO: 73622 - protein, 10 aa, Homo sapiens
  Table A; Target 73622; HLA-A*33:03; RLN1; ENSG00000107018; TAA
EAADSNPSEL

SEQ ID NO: 73623 - protein, 10 aa, Homo sapiens
  Table A; Target 73623; HLA-A*68:01; RLN1; ENSG00000107018; TAA
EAADSNPSEL

SEQ ID NO: 73624 - protein, 10 aa, Homo sapiens
  Table A; Target 73624; HLA-B*35:03; RLN1; ENSG00000107018; TAA
EAADSNPSEL

SEQ ID NO: 73625 - protein, 10 aa, Homo sapiens
  Table A; Target 73625; HLA-B*39:01; RLN1; ENSG00000107018; TAA
EAADSNPSEL

SEQ ID NO: 73626 - protein, 10 aa, Homo sapiens
  Table A; Target 73626; HLA-C*07:06; RLN1; ENSG00000107018; TAA
EAADSNPSEL

SEQ ID NO: 73627 - protein, 11 aa, Homo sapiens
  Table A; Target 73627; HLA-A*33:01; RLN1; ENSG00000107018; TAA
EAADSNPSELK

SEQ ID NO: 73628 - protein, 11 aa, Homo sapiens
  Table A; Target 73628; HLA-A*33:03; RLN1; ENSG00000107018; TAA
EAADSNPSELK

SEQ ID NO: 73629 - protein, 11 aa, Homo sapiens
  Table A; Target 73629; HLA-A*68:01; RLN1; ENSG00000107018; TAA
EAADSNPSELK

SEQ ID NO: 73630 - protein, 11 aa, Homo sapiens
  Table A; Target 73630; HLA-A*68:02; RLN1; ENSG00000107018; TAA
EAADSNPSELK

SEQ ID NO: 73631 - protein, 11 aa, Homo sapiens
  Table A; Target 73631; HLA-B*27:02; RLN1; ENSG00000107018; TAA
EAADSNPSELK

SEQ ID NO: 73632 - protein, 11 aa, Homo sapiens
  Table A; Target 73632; HLA-C*07:06; RLN1; ENSG00000107018; TAA
EAADSNPSELK

SEQ ID NO: 73633 - protein, 10 aa, Homo sapiens
  Table A; Target 73633; HLA-A*68:02; RLN1; ENSG00000107018; TAA
EDAPQTPRPV

SEQ ID NO: 73634 - protein, 9 aa, Homo sapiens
  Table A; Target 73634; HLA-C*07:01; RLN1; ENSG00000107018; TAA
EFCLLLNQF

SEQ ID NO: 73635 - protein, 10 aa, Homo sapiens
  Table A; Target 73635; HLA-A*23:01; RLN1; ENSG00000107018; TAA
EFIANLPPEL

SEQ ID NO: 73636 - protein, 9 aa, Homo sapiens
  Table A; Target 73636; HLA-A*31:01; RLN1; ENSG00000107018; TAA
EFKKLIRNR

SEQ ID NO: 73637 - protein, 9 aa, Homo sapiens
  Table A; Target 73637; HLA-A*26:01; RLN1; ENSG00000107018; TAA
EIVPSFINK

SEQ ID NO: 73638 - protein, 9 aa, Homo sapiens
  Table A; Target 73638; HLA-A*33:01; RLN1; ENSG00000107018; TAA
ELKAALSER

SEQ ID NO: 73639 - protein, 9 aa, Homo sapiens
  Table A; Target 73639; HLA-A*33:03; RLN1; ENSG00000107018; TAA
ELKAALSER

SEQ ID NO: 73640 - protein, 9 aa, Homo sapiens
  Table A; Target 73640; HLA-A*02:01; RLN1; ENSG00000107018; TAA
ELQQYVPAL

SEQ ID NO: 73641 - protein, 9 aa, Homo sapiens
  Table A; Target 73641; HLA-A*02:04; RLN1; ENSG00000107018; TAA
ELQQYVPAL

SEQ ID NO: 73642 - protein, 9 aa, Homo sapiens
  Table A; Target 73642; HLA-A*02:07; RLN1; ENSG00000107018; TAA
ELQQYVPAL

SEQ ID NO: 73643 - protein, 9 aa, Homo sapiens
  Table A; Target 73643; HLA-A*24:02; RLN1; ENSG00000107018; TAA
ELQQYVPAL

SEQ ID NO: 73644 - protein, 9 aa, Homo sapiens
  Table A; Target 73644; HLA-A*25:01; RLN1; ENSG00000107018; TAA
ELQQYVPAL

SEQ ID NO: 73645 - protein, 9 aa, Homo sapiens
  Table A; Target 73645; HLA-A*26:01; RLN1; ENSG00000107018; TAA
ELQQYVPAL

SEQ ID NO: 73646 - protein, 9 aa, Homo sapiens
  Table A; Target 73646; HLA-A*33:03; RLN1; ENSG00000107018; TAA
ELQQYVPAL

SEQ ID NO: 73647 - protein, 9 aa, Homo sapiens
  Table A; Target 73647; HLA-A*68:02; RLN1; ENSG00000107018; TAA
ELQQYVPAL

SEQ ID NO: 73648 - protein, 9 aa, Homo sapiens
  Table A; Target 73648; HLA-B*08:01; RLN1; ENSG00000107018; TAA
ELQQYVPAL

SEQ ID NO: 73649 - protein, 9 aa, Homo sapiens
  Table A; Target 73649; HLA-B*35:03; RLN1; ENSG00000107018; TAA
ELQQYVPAL

SEQ ID NO: 73650 - protein, 9 aa, Homo sapiens
  Table A; Target 73650; HLA-B*39:01; RLN1; ENSG00000107018; TAA
ELQQYVPAL

SEQ ID NO: 73651 - protein, 9 aa, Homo sapiens
  Table A; Target 73651; HLA-C*07:02; RLN1; ENSG00000107018; TAA
ELQQYVPAL

SEQ ID NO: 73652 - protein, 10 aa, Homo sapiens
  Table A; Target 73652; HLA-A*03:02; RLN1; ENSG00000107018; TAA
ELQQYVPALK

SEQ ID NO: 73653 - protein, 10 aa, Homo sapiens
  Table A; Target 73653; HLA-A*33:03; RLN1; ENSG00000107018; TAA
ELQQYVPALK

SEQ ID NO: 73654 - protein, 9 aa, Homo sapiens
  Table A; Target 73654; HLA-A*25:01; RLN1; ENSG00000107018; TAA
ELVRAQIAI

SEQ ID NO: 73655 - protein, 9 aa, Homo sapiens
  Table A; Target 73655; HLA-B*08:01; RLN1; ENSG00000107018; TAA
ELVRAQIAI

SEQ ID NO: 73656 - protein, 9 aa, Homo sapiens
  Table A; Target 73656; HLA-B*27:02; RLN1; ENSG00000107018; TAA
ERQPSLPEL

SEQ ID NO: 73657 - protein, 9 aa, Homo sapiens
  Table A; Target 73657; HLA-B*27:05; RLN1; ENSG00000107018; TAA
ERQPSLPEL

SEQ ID NO: 73658 - protein, 9 aa, Homo sapiens
  Table A; Target 73658; HLA-B*38:01; RLN1; ENSG00000107018; TAA
ERQPSLPEL

SEQ ID NO: 73659 - protein, 9 aa, Homo sapiens
  Table A; Target 73659; HLA-B*39:01; RLN1; ENSG00000107018; TAA
ERQPSLPEL

SEQ ID NO: 73660 - protein, 9 aa, Homo sapiens
  Table A; Target 73660; HLA-C*06:02; RLN1; ENSG00000107018; TAA
ERQPSLPEL

SEQ ID NO: 73661 - protein, 9 aa, Homo sapiens
  Table A; Target 73661; HLA-C*07:01; RLN1; ENSG00000107018; TAA
ERQPSLPEL

SEQ ID NO: 73662 - protein, 9 aa, Homo sapiens
  Table A; Target 73662; HLA-C*07:02; RLN1; ENSG00000107018; TAA
ERQPSLPEL

SEQ ID NO: 73663 - protein, 9 aa, Homo sapiens
  Table A; Target 73663; HLA-C*16:04; RLN1; ENSG00000107018; TAA
ERQPSLPEL

SEQ ID NO: 73664 - protein, 9 aa, Homo sapiens
  Table A; Target 73664; HLA-A*25:01; RLN1; ENSG00000107018; TAA
ETIIIMLEF

SEQ ID NO: 73665 - protein, 9 aa, Homo sapiens
  Table A; Target 73665; HLA-A*26:01; RLN1; ENSG00000107018; TAA
ETIIIMLEF

SEQ ID NO: 73666 - protein, 9 aa, Homo sapiens
  Table A; Target 73666; HLA-A*33:03; RLN1; ENSG00000107018; TAA
ETIIIMLEF

SEQ ID NO: 73667 - protein, 9 aa, Homo sapiens
  Table A; Target 73667; HLA-A*68:02; RLN1; ENSG00000107018; TAA
ETIIIMLEF

SEQ ID NO: 73668 - protein, 9 aa, Homo sapiens
  Table A; Target 73668; HLA-B*44:02; RLN1; ENSG00000107018; TAA
ETIIIMLEF

SEQ ID NO: 73669 - protein, 9 aa, Homo sapiens
  Table A; Target 73669; HLA-B*57:01; RLN1; ENSG00000107018; TAA
ETIIIMLEF

SEQ ID NO: 73670 - protein, 10 aa, Homo sapiens
  Table A; Target 73670; HLA-A*68:02; RLN1; ENSG00000107018; TAA
ETIIIMLEFI

SEQ ID NO: 73671 - protein, 9 aa, Homo sapiens
  Table A; Target 73671; HLA-A*01:01; RLN1; ENSG00000107018; TAA
FIANLPPEL

SEQ ID NO: 73672 - protein, 9 aa, Homo sapiens
  Table A; Target 73672; HLA-A*02:01; RLN1; ENSG00000107018; TAA
FIANLPPEL

SEQ ID NO: 73673 - protein, 9 aa, Homo sapiens
  Table A; Target 73673; HLA-A*02:03; RLN1; ENSG00000107018; TAA
FIANLPPEL

SEQ ID NO: 73674 - protein, 9 aa, Homo sapiens
  Table A; Target 73674; HLA-A*02:04; RLN1; ENSG00000107018; TAA
FIANLPPEL

SEQ ID NO: 73675 - protein, 9 aa, Homo sapiens
  Table A; Target 73675; HLA-A*02:07; RLN1; ENSG00000107018; TAA
FIANLPPEL

SEQ ID NO: 73676 - protein, 9 aa, Homo sapiens
  Table A; Target 73676; HLA-A*23:01; RLN1; ENSG00000107018; TAA
FIANLPPEL

SEQ ID NO: 73677 - protein, 9 aa, Homo sapiens
  Table A; Target 73677; HLA-A*24:02; RLN1; ENSG00000107018; TAA
FIANLPPEL

SEQ ID NO: 73678 - protein, 9 aa, Homo sapiens
  Table A; Target 73678; HLA-A*25:01; RLN1; ENSG00000107018; TAA
FIANLPPEL

SEQ ID NO: 73679 - protein, 9 aa, Homo sapiens
  Table A; Target 73679; HLA-A*26:01; RLN1; ENSG00000107018; TAA
FIANLPPEL

SEQ ID NO: 73680 - protein, 9 aa, Homo sapiens
  Table A; Target 73680; HLA-A*30:01; RLN1; ENSG00000107018; TAA
FIANLPPEL

SEQ ID NO: 73681 - protein, 9 aa, Homo sapiens
  Table A; Target 73681; HLA-A*32:01; RLN1; ENSG00000107018; TAA
FIANLPPEL

SEQ ID NO: 73682 - protein, 9 aa, Homo sapiens
  Table A; Target 73682; HLA-A*68:02; RLN1; ENSG00000107018; TAA
FIANLPPEL

SEQ ID NO: 73683 - protein, 9 aa, Homo sapiens
  Table A; Target 73683; HLA-B*13:02; RLN1; ENSG00000107018; TAA
FIANLPPEL

SEQ ID NO: 73684 - protein, 9 aa, Homo sapiens
  Table A; Target 73684; HLA-B*15:03; RLN1; ENSG00000107018; TAA
FIANLPPEL

SEQ ID NO: 73685 - protein, 9 aa, Homo sapiens
  Table A; Target 73685; HLA-B*27:05; RLN1; ENSG00000107018; TAA
FIANLPPEL

SEQ ID NO: 73686 - protein, 9 aa, Homo sapiens
  Table A; Target 73686; HLA-B*35:01; RLN1; ENSG00000107018; TAA
FIANLPPEL

SEQ ID NO: 73687 - protein, 9 aa, Homo sapiens
  Table A; Target 73687; HLA-B*35:03; RLN1; ENSG00000107018; TAA
FIANLPPEL

SEQ ID NO: 73688 - protein, 9 aa, Homo sapiens
  Table A; Target 73688; HLA-B*38:01; RLN1; ENSG00000107018; TAA
FIANLPPEL

SEQ ID NO: 73689 - protein, 9 aa, Homo sapiens
  Table A; Target 73689; HLA-B*39:01; RLN1; ENSG00000107018; TAA
FIANLPPEL

SEQ ID NO: 73690 - protein, 9 aa, Homo sapiens
  Table A; Target 73690; HLA-B*40:01; RLN1; ENSG00000107018; TAA
FIANLPPEL

SEQ ID NO: 73691 - protein, 9 aa, Homo sapiens
  Table A; Target 73691; HLA-B*46:01; RLN1; ENSG00000107018; TAA
FIANLPPEL

SEQ ID NO: 73692 - protein, 9 aa, Homo sapiens
  Table A; Target 73692; HLA-B*54:01; RLN1; ENSG00000107018; TAA
FIANLPPEL

SEQ ID NO: 73693 - protein, 9 aa, Homo sapiens
  Table A; Target 73693; HLA-B*55:01; RLN1; ENSG00000107018; TAA
FIANLPPEL

SEQ ID NO: 73694 - protein, 9 aa, Homo sapiens
  Table A; Target 73694; HLA-B*58:01; RLN1; ENSG00000107018; TAA
FIANLPPEL

SEQ ID NO: 73695 - protein, 9 aa, Homo sapiens
  Table A; Target 73695; HLA-C*01:02; RLN1; ENSG00000107018; TAA
FIANLPPEL

SEQ ID NO: 73696 - protein, 9 aa, Homo sapiens
  Table A; Target 73696; HLA-C*02:02; RLN1; ENSG00000107018; TAA
FIANLPPEL

SEQ ID NO: 73697 - protein, 9 aa, Homo sapiens
  Table A; Target 73697; HLA-C*03:03; RLN1; ENSG00000107018; TAA
FIANLPPEL

SEQ ID NO: 73698 - protein, 9 aa, Homo sapiens
  Table A; Target 73698; HLA-C*03:04; RLN1; ENSG00000107018; TAA
FIANLPPEL

SEQ ID NO: 73699 - protein, 9 aa, Homo sapiens
  Table A; Target 73699; HLA-C*05:01; RLN1; ENSG00000107018; TAA
FIANLPPEL

SEQ ID NO: 73700 - protein, 9 aa, Homo sapiens
  Table A; Target 73700; HLA-C*06:02; RLN1; ENSG00000107018; TAA
FIANLPPEL

SEQ ID NO: 73701 - protein, 9 aa, Homo sapiens
  Table A; Target 73701; HLA-C*07:04; RLN1; ENSG00000107018; TAA
FIANLPPEL

SEQ ID NO: 73702 - protein, 9 aa, Homo sapiens
  Table A; Target 73702; HLA-C*12:03; RLN1; ENSG00000107018; TAA
FIANLPPEL

SEQ ID NO: 73703 - protein, 9 aa, Homo sapiens
  Table A; Target 73703; HLA-C*14:02; RLN1; ENSG00000107018; TAA
FIANLPPEL

SEQ ID NO: 73704 - protein, 9 aa, Homo sapiens
  Table A; Target 73704; HLA-C*16:01; RLN1; ENSG00000107018; TAA
FIANLPPEL

SEQ ID NO: 73705 - protein, 9 aa, Homo sapiens
  Table A; Target 73705; HLA-C*16:02; RLN1; ENSG00000107018; TAA
FIANLPPEL

SEQ ID NO: 73706 - protein, 9 aa, Homo sapiens
  Table A; Target 73706; HLA-C*16:04; RLN1; ENSG00000107018; TAA
FIANLPPEL

SEQ ID NO: 73707 - protein, 10 aa, Homo sapiens
  Table A; Target 73707; HLA-A*01:01; RLN1; ENSG00000107018; TAA
FIANLPPELK

SEQ ID NO: 73708 - protein, 10 aa, Homo sapiens
  Table A; Target 73708; HLA-A*03:02; RLN1; ENSG00000107018; TAA
FIANLPPELK

SEQ ID NO: 73709 - protein, 10 aa, Homo sapiens
  Table A; Target 73709; HLA-A*11:01; RLN1; ENSG00000107018; TAA
FIANLPPELK

SEQ ID NO: 73710 - protein, 10 aa, Homo sapiens
  Table A; Target 73710; HLA-A*68:01; RLN1; ENSG00000107018; TAA
FIANLPPELK

SEQ ID NO: 73711 - protein, 10 aa, Homo sapiens
  Table A; Target 73711; HLA-A*68:02; RLN1; ENSG00000107018; TAA
FIANLPPELK

SEQ ID NO: 73712 - protein, 11 aa, Homo sapiens
  Table A; Target 73712; HLA-A*02:01; RLN1; ENSG00000107018; TAA
FIANLPPELKA

SEQ ID NO: 73713 - protein, 11 aa, Homo sapiens
  Table A; Target 73713; HLA-A*02:04; RLN1; ENSG00000107018; TAA
FIANLPPELKA

SEQ ID NO: 73714 - protein, 11 aa, Homo sapiens
  Table A; Target 73714; HLA-A*68:02; RLN1; ENSG00000107018; TAA
FIANLPPELKA

SEQ ID NO: 73715 - protein, 11 aa, Homo sapiens
  Table A; Target 73715; HLA-B*54:01; RLN1; ENSG00000107018; TAA
FIANLPPELKA

SEQ ID NO: 73716 - protein, 8 aa, Homo sapiens
  Table A; Target 73716; HLA-A*02:04; RLN1; ENSG00000107018; TAA
FLFHLLEF

SEQ ID NO: 73717 - protein, 8 aa, Homo sapiens
  Table A; Target 73717; HLA-A*29:02; RLN1; ENSG00000107018; TAA
FLFHLLEF

SEQ ID NO: 73718 - protein, 10 aa, Homo sapiens
  Table A; Target 73718; HLA-A*02:01; RLN1; ENSG00000107018; TAA
FLFHLLEFCL

SEQ ID NO: 73719 - protein, 10 aa, Homo sapiens
  Table A; Target 73719; HLA-A*02:04; RLN1; ENSG00000107018; TAA
FLFHLLEFCL

SEQ ID NO: 73720 - protein, 9 aa, Homo sapiens
  Table A; Target 73720; HLA-B*57:01; RLN1; ENSG00000107018; TAA
FSRAVAAKW

SEQ ID NO: 73721 - protein, 9 aa, Homo sapiens
  Table A; Target 73721; HLA-A*03:01; RLN1; ENSG00000107018; TAA
GCTKRSLAK

SEQ ID NO: 73722 - protein, 8 aa, Homo sapiens
  Table A; Target 73722; HLA-A*01:01; RLN1; ENSG00000107018; TAA
GLDTHSQK

SEQ ID NO: 73723 - protein, 8 aa, Homo sapiens
  Table A; Target 73723; HLA-A*03:01; RLN1; ENSG00000107018; TAA
GLDTHSQK

SEQ ID NO: 73724 - protein, 8 aa, Homo sapiens
  Table A; Target 73724; HLA-A*03:02; RLN1; ENSG00000107018; TAA
GLDTHSQK

SEQ ID NO: 73725 - protein, 8 aa, Homo sapiens
  Table A; Target 73725; HLA-C*05:01; RLN1; ENSG00000107018; TAA
GLDTHSQK

SEQ ID NO: 73726 - protein, 9 aa, Homo sapiens
  Table A; Target 73726; HLA-A*01:01; RLN1; ENSG00000107018; TAA
GLDTHSQKK

SEQ ID NO: 73727 - protein, 9 aa, Homo sapiens
  Table A; Target 73727; HLA-A*03:01; RLN1; ENSG00000107018; TAA
GLDTHSQKK

SEQ ID NO: 73728 - protein, 9 aa, Homo sapiens
  Table A; Target 73728; HLA-A*03:02; RLN1; ENSG00000107018; TAA
GLDTHSQKK

SEQ ID NO: 73729 - protein, 9 aa, Homo sapiens
  Table A; Target 73729; HLA-A*11:01; RLN1; ENSG00000107018; TAA
GLDTHSQKK

SEQ ID NO: 73730 - protein, 9 aa, Homo sapiens
  Table A; Target 73730; HLA-C*16:02; RLN1; ENSG00000107018; TAA
GLDTHSQKK

SEQ ID NO: 73731 - protein, 9 aa, Homo sapiens
  Table A; Target 73731; HLA-A*02:01; RLN1; ENSG00000107018; TAA
HLLEFCLLL

SEQ ID NO: 73732 - protein, 9 aa, Homo sapiens
  Table A; Target 73732; HLA-A*02:04; RLN1; ENSG00000107018; TAA
HLLEFCLLL

SEQ ID NO: 73733 - protein, 9 aa, Homo sapiens
  Table A; Target 73733; HLA-A*02:07; RLN1; ENSG00000107018; TAA
HLLEFCLLL

SEQ ID NO: 73734 - protein, 9 aa, Homo sapiens
  Table A; Target 73734; HLA-C*03:04; RLN1; ENSG00000107018; TAA
IAICGMSTW

SEQ ID NO: 73735 - protein, 9 aa, Homo sapiens
  Table A; Target 73735; HLA-C*16:04; RLN1; ENSG00000107018; TAA
IAICGMSTW

SEQ ID NO: 73736 - protein, 8 aa, Homo sapiens
  Table A; Target 73736; HLA-A*23:01; RLN1; ENSG00000107018; TAA
IANLPPEL

SEQ ID NO: 73737 - protein, 8 aa, Homo sapiens
  Table A; Target 73737; HLA-A*32:01; RLN1; ENSG00000107018; TAA
IANLPPEL

SEQ ID NO: 73738 - protein, 8 aa, Homo sapiens
  Table A; Target 73738; HLA-B*07:02; RLN1; ENSG00000107018; TAA
IANLPPEL

SEQ ID NO: 73739 - protein, 8 aa, Homo sapiens
  Table A; Target 73739; HLA-B*08:01; RLN1; ENSG00000107018; TAA
IANLPPEL

SEQ ID NO: 73740 - protein, 8 aa, Homo sapiens
  Table A; Target 73740; HLA-B*15:03; RLN1; ENSG00000107018; TAA
IANLPPEL

SEQ ID NO: 73741 - protein, 8 aa, Homo sapiens
  Table A; Target 73741; HLA-B*27:02; RLN1; ENSG00000107018; TAA
IANLPPEL

SEQ ID NO: 73742 - protein, 8 aa, Homo sapiens
  Table A; Target 73742; HLA-B*35:01; RLN1; ENSG00000107018; TAA
IANLPPEL

SEQ ID NO: 73743 - protein, 8 aa, Homo sapiens
  Table A; Target 73743; HLA-B*35:03; RLN1; ENSG00000107018; TAA
IANLPPEL

SEQ ID NO: 73744 - protein, 8 aa, Homo sapiens
  Table A; Target 73744; HLA-B*38:01; RLN1; ENSG00000107018; TAA
IANLPPEL

SEQ ID NO: 73745 - protein, 8 aa, Homo sapiens
  Table A; Target 73745; HLA-B*39:01; RLN1; ENSG00000107018; TAA
IANLPPEL

SEQ ID NO: 73746 - protein, 8 aa, Homo sapiens
  Table A; Target 73746; HLA-B*40:02; RLN1; ENSG00000107018; TAA
IANLPPEL

SEQ ID NO: 73747 - protein, 8 aa, Homo sapiens
  Table A; Target 73747; HLA-B*46:01; RLN1; ENSG00000107018; TAA
IANLPPEL

SEQ ID NO: 73748 - protein, 8 aa, Homo sapiens
  Table A; Target 73748; HLA-B*51:01; RLN1; ENSG00000107018; TAA
IANLPPEL

SEQ ID NO: 73749 - protein, 8 aa, Homo sapiens
  Table A; Target 73749; HLA-B*54:01; RLN1; ENSG00000107018; TAA
IANLPPEL

SEQ ID NO: 73750 - protein, 8 aa, Homo sapiens
  Table A; Target 73750; HLA-B*55:01; RLN1; ENSG00000107018; TAA
IANLPPEL

SEQ ID NO: 73751 - protein, 8 aa, Homo sapiens
  Table A; Target 73751; HLA-B*56:01; RLN1; ENSG00000107018; TAA
IANLPPEL

SEQ ID NO: 73752 - protein, 8 aa, Homo sapiens
  Table A; Target 73752; HLA-B*57:01; RLN1; ENSG00000107018; TAA
IANLPPEL

SEQ ID NO: 73753 - protein, 8 aa, Homo sapiens
  Table A; Target 73753; HLA-B*58:01; RLN1; ENSG00000107018; TAA
IANLPPEL

SEQ ID NO: 73754 - protein, 8 aa, Homo sapiens
  Table A; Target 73754; HLA-C*01:02; RLN1; ENSG00000107018; TAA
IANLPPEL

SEQ ID NO: 73755 - protein, 8 aa, Homo sapiens
  Table A; Target 73755; HLA-C*02:02; RLN1; ENSG00000107018; TAA
IANLPPEL

SEQ ID NO: 73756 - protein, 8 aa, Homo sapiens
  Table A; Target 73756; HLA-C*03:03; RLN1; ENSG00000107018; TAA
IANLPPEL

SEQ ID NO: 73757 - protein, 8 aa, Homo sapiens
  Table A; Target 73757; HLA-C*03:04; RLN1; ENSG00000107018; TAA
IANLPPEL

SEQ ID NO: 73758 - protein, 8 aa, Homo sapiens
  Table A; Target 73758; HLA-C*05:01; RLN1; ENSG00000107018; TAA
IANLPPEL

SEQ ID NO: 73759 - protein, 8 aa, Homo sapiens
  Table A; Target 73759; HLA-C*06:02; RLN1; ENSG00000107018; TAA
IANLPPEL

SEQ ID NO: 73760 - protein, 8 aa, Homo sapiens
  Table A; Target 73760; HLA-C*07:01; RLN1; ENSG00000107018; TAA
IANLPPEL

SEQ ID NO: 73761 - protein, 8 aa, Homo sapiens
  Table A; Target 73761; HLA-C*07:02; RLN1; ENSG00000107018; TAA
IANLPPEL

SEQ ID NO: 73762 - protein, 8 aa, Homo sapiens
  Table A; Target 73762; HLA-C*07:04; RLN1; ENSG00000107018; TAA
IANLPPEL

SEQ ID NO: 73763 - protein, 8 aa, Homo sapiens
  Table A; Target 73763; HLA-C*12:03; RLN1; ENSG00000107018; TAA
IANLPPEL

SEQ ID NO: 73764 - protein, 8 aa, Homo sapiens
  Table A; Target 73764; HLA-C*14:02; RLN1; ENSG00000107018; TAA
IANLPPEL

SEQ ID NO: 73765 - protein, 8 aa, Homo sapiens
  Table A; Target 73765; HLA-C*16:01; RLN1; ENSG00000107018; TAA
IANLPPEL

SEQ ID NO: 73766 - protein, 8 aa, Homo sapiens
  Table A; Target 73766; HLA-C*16:02; RLN1; ENSG00000107018; TAA
IANLPPEL

SEQ ID NO: 73767 - protein, 8 aa, Homo sapiens
  Table A; Target 73767; HLA-C*16:04; RLN1; ENSG00000107018; TAA
IANLPPEL

SEQ ID NO: 73768 - protein, 9 aa, Homo sapiens
  Table A; Target 73768; HLA-A*01:01; RLN1; ENSG00000107018; TAA
IANLPPELK

SEQ ID NO: 73769 - protein, 9 aa, Homo sapiens
  Table A; Target 73769; HLA-A*03:01; RLN1; ENSG00000107018; TAA
IANLPPELK

SEQ ID NO: 73770 - protein, 9 aa, Homo sapiens
  Table A; Target 73770; HLA-A*03:02; RLN1; ENSG00000107018; TAA
IANLPPELK

SEQ ID NO: 73771 - protein, 9 aa, Homo sapiens
  Table A; Target 73771; HLA-A*11:01; RLN1; ENSG00000107018; TAA
IANLPPELK

SEQ ID NO: 73772 - protein, 9 aa, Homo sapiens
  Table A; Target 73772; HLA-A*31:01; RLN1; ENSG00000107018; TAA
IANLPPELK

SEQ ID NO: 73773 - protein, 9 aa, Homo sapiens
  Table A; Target 73773; HLA-A*33:01; RLN1; ENSG00000107018; TAA
IANLPPELK

SEQ ID NO: 73774 - protein, 9 aa, Homo sapiens
  Table A; Target 73774; HLA-A*33:03; RLN1; ENSG00000107018; TAA
IANLPPELK

SEQ ID NO: 73775 - protein, 9 aa, Homo sapiens
  Table A; Target 73775; HLA-A*68:01; RLN1; ENSG00000107018; TAA
IANLPPELK

SEQ ID NO: 73776 - protein, 9 aa, Homo sapiens
  Table A; Target 73776; HLA-B*51:01; RLN1; ENSG00000107018; TAA
IANLPPELK

SEQ ID NO: 73777 - protein, 9 aa, Homo sapiens
  Table A; Target 73777; HLA-B*57:01; RLN1; ENSG00000107018; TAA
IANLPPELK

SEQ ID NO: 73778 - protein, 9 aa, Homo sapiens
  Table A; Target 73778; HLA-C*05:01; RLN1; ENSG00000107018; TAA
IANLPPELK

SEQ ID NO: 73779 - protein, 9 aa, Homo sapiens
  Table A; Target 73779; HLA-C*07:06; RLN1; ENSG00000107018; TAA
IANLPPELK

SEQ ID NO: 73780 - protein, 10 aa, Homo sapiens
  Table A; Target 73780; HLA-B*54:01; RLN1; ENSG00000107018; TAA
IANLPPELKA

SEQ ID NO: 73781 - protein, 10 aa, Homo sapiens
  Table A; Target 73781; HLA-B*56:01; RLN1; ENSG00000107018; TAA
IANLPPELKA

SEQ ID NO: 73782 - protein, 11 aa, Homo sapiens
  Table A; Target 73782; HLA-B*54:01; RLN1; ENSG00000107018; TAA
IANLPPELKAA

SEQ ID NO: 73783 - protein, 11 aa, Homo sapiens
  Table A; Target 73783; HLA-B*56:01; RLN1; ENSG00000107018; TAA
IANLPPELKAA

SEQ ID NO: 73784 - protein, 8 aa, Homo sapiens
  Table A; Target 73784; HLA-B*08:01; RLN1; ENSG00000107018; TAA
IGCTKRSL

SEQ ID NO: 73785 - protein, 8 aa, Homo sapiens
  Table A; Target 73785; HLA-C*16:01; RLN1; ENSG00000107018; TAA
IGCTKRSL

SEQ ID NO: 73786 - protein, 9 aa, Homo sapiens
  Table A; Target 73786; HLA-A*02:01; RLN1; ENSG00000107018; TAA
IMLEFIANL

SEQ ID NO: 73787 - protein, 9 aa, Homo sapiens
  Table A; Target 73787; HLA-A*02:03; RLN1; ENSG00000107018; TAA
IMLEFIANL

SEQ ID NO: 73788 - protein, 9 aa, Homo sapiens
  Table A; Target 73788; HLA-A*02:04; RLN1; ENSG00000107018; TAA
IMLEFIANL

SEQ ID NO: 73789 - protein, 9 aa, Homo sapiens
  Table A; Target 73789; HLA-A*02:07; RLN1; ENSG00000107018; TAA
IMLEFIANL

SEQ ID NO: 73790 - protein, 9 aa, Homo sapiens
  Table A; Target 73790; HLA-A*23:01; RLN1; ENSG00000107018; TAA
IMLEFIANL

SEQ ID NO: 73791 - protein, 9 aa, Homo sapiens
  Table A; Target 73791; HLA-A*24:02; RLN1; ENSG00000107018; TAA
IMLEFIANL

SEQ ID NO: 73792 - protein, 9 aa, Homo sapiens
  Table A; Target 73792; HLA-B*55:01; RLN1; ENSG00000107018; TAA
IMLEFIANL

SEQ ID NO: 73793 - protein, 8 aa, Homo sapiens
  Table A; Target 73793; HLA-A*03:02; RLN1; ENSG00000107018; TAA
IVPSFINK

SEQ ID NO: 73794 - protein, 8 aa, Homo sapiens
  Table A; Target 73794; HLA-B*27:02; RLN1; ENSG00000107018; TAA
IVPSFINK

SEQ ID NO: 73795 - protein, 9 aa, Homo sapiens
  Table A; Target 73795; HLA-C*16:01; RLN1; ENSG00000107018; TAA
KAALSERQP

SEQ ID NO: 73796 - protein, 9 aa, Homo sapiens
  Table A; Target 73796; HLA-C*16:02; RLN1; ENSG00000107018; TAA
KAALSERQP

SEQ ID NO: 73797 - protein, 11 aa, Homo sapiens
  Table A; Target 73797; HLA-C*16:01; RLN1; ENSG00000107018; TAA
KAALSERQPSL

SEQ ID NO: 73798 - protein, 10 aa, Homo sapiens
  Table A; Target 73798; HLA-B*27:02; RLN1; ENSG00000107018; TAA
KDSNLSFEEF

SEQ ID NO: 73799 - protein, 8 aa, Homo sapiens
  Table A; Target 73799; HLA-B*37:01; RLN1; ENSG00000107018; TAA
KDTETIII

SEQ ID NO: 73800 - protein, 9 aa, Homo sapiens
  Table A; Target 73800; HLA-A*24:02; RLN1; ENSG00000107018; TAA
KWKDDVIKL

SEQ ID NO: 73801 - protein, 10 aa, Homo sapiens
  Table A; Target 73801; HLA-C*07:01; RLN1; ENSG00000107018; TAA
KYLGLDTHSQ

SEQ ID NO: 73802 - protein, 10 aa, Homo sapiens
  Table A; Target 73802; HLA-C*07:02; RLN1; ENSG00000107018; TAA
KYLGLDTHSQ

SEQ ID NO: 73803 - protein, 11 aa, Homo sapiens
  Table A; Target 73803; HLA-A*31:01; RLN1; ENSG00000107018; TAA
KYLGLDTHSQK

SEQ ID NO: 73804 - protein, 8 aa, Homo sapiens
  Table A; Target 73804; HLA-C*04:01; RLN1; ENSG00000107018; TAA
LDTHSQKK

SEQ ID NO: 73805 - protein, 8 aa, Homo sapiens
  Table A; Target 73805; HLA-C*06:02; RLN1; ENSG00000107018; TAA
LDTHSQKK

SEQ ID NO: 73806 - protein, 8 aa, Homo sapiens
  Table A; Target 73806; HLA-C*07:01; RLN1; ENSG00000107018; TAA
LDTHSQKK

SEQ ID NO: 73807 - protein, 8 aa, Homo sapiens
  Table A; Target 73807; HLA-C*07:02; RLN1; ENSG00000107018; TAA
LDTHSQKK

SEQ ID NO: 73808 - protein, 10 aa, Homo sapiens
  Table A; Target 73808; HLA-B*18:01; RLN1; ENSG00000107018; TAA
LEFCLLLNQF

SEQ ID NO: 73809 - protein, 11 aa, Homo sapiens
  Table A; Target 73809; HLA-B*40:02; RLN1; ENSG00000107018; TAA
LEFIANLPPEL

SEQ ID NO: 73810 - protein, 9 aa, Homo sapiens
  Table A; Target 73810; HLA-A*24:02; RLN1; ENSG00000107018; TAA
LFLFHLLEF

SEQ ID NO: 73811 - protein, 9 aa, Homo sapiens
  Table A; Target 73811; HLA-A*29:02; RLN1; ENSG00000107018; TAA
LFLFHLLEF

SEQ ID NO: 73812 - protein, 8 aa, Homo sapiens
  Table A; Target 73812; HLA-C*06:02; RLN1; ENSG00000107018; TAA
LGLDTHSQ

SEQ ID NO: 73813 - protein, 9 aa, Homo sapiens
  Table A; Target 73813; HLA-A*03:01; RLN1; ENSG00000107018; TAA
LGLDTHSQK

SEQ ID NO: 73814 - protein, 9 aa, Homo sapiens
  Table A; Target 73814; HLA-A*03:02; RLN1; ENSG00000107018; TAA
LGLDTHSQK

SEQ ID NO: 73815 - protein, 9 aa, Homo sapiens
  Table A; Target 73815; HLA-A*11:01; RLN1; ENSG00000107018; TAA
LGLDTHSQK

SEQ ID NO: 73816 - protein, 9 aa, Homo sapiens
  Table A; Target 73816; HLA-B*27:02; RLN1; ENSG00000107018; TAA
LGLDTHSQK

SEQ ID NO: 73817 - protein, 9 aa, Homo sapiens
  Table A; Target 73817; HLA-B*27:05; RLN1; ENSG00000107018; TAA
LGLDTHSQK

SEQ ID NO: 73818 - protein, 9 aa, Homo sapiens
  Table A; Target 73818; HLA-C*07:06; RLN1; ENSG00000107018; TAA
LGLDTHSQK

SEQ ID NO: 73819 - protein, 10 aa, Homo sapiens
  Table A; Target 73819; HLA-A*11:01; RLN1; ENSG00000107018; TAA
LGLDTHSQKK

SEQ ID NO: 73820 - protein, 9 aa, Homo sapiens
  Table A; Target 73820; HLA-A*02:03; RLN1; ENSG00000107018; TAA
LLLNQFSRA

SEQ ID NO: 73821 - protein, 9 aa, Homo sapiens
  Table A; Target 73821; HLA-C*06:02; RLN1; ENSG00000107018; TAA
LLNQFSRAV

SEQ ID NO: 73822 - protein, 10 aa, Homo sapiens
  Table A; Target 73822; HLA-A*02:03; RLN1; ENSG00000107018; TAA
LLNQFSRAVA

SEQ ID NO: 73823 - protein, 11 aa, Homo sapiens
  Table A; Target 73823; HLA-A*02:01; RLN1; ENSG00000107018; TAA
LLNQFSRAVAA

SEQ ID NO: 73824 - protein, 11 aa, Homo sapiens
  Table A; Target 73824; HLA-A*02:03; RLN1; ENSG00000107018; TAA
LLNQFSRAVAA

SEQ ID NO: 73825 - protein, 11 aa, Homo sapiens
  Table A; Target 73825; HLA-B*54:01; RLN1; ENSG00000107018; TAA
LLNQFSRAVAA

SEQ ID NO: 73826 - protein, 8 aa, Homo sapiens
  Table A; Target 73826; HLA-B*51:01; RLN1; ENSG00000107018; TAA
LPELQQYV

SEQ ID NO: 73827 - protein, 9 aa, Homo sapiens
  Table A; Target 73827; HLA-B*54:01; RLN1; ENSG00000107018; TAA
LPELQQYVP

SEQ ID NO: 73828 - protein, 10 aa, Homo sapiens
  Table A; Target 73828; HLA-B*54:01; RLN1; ENSG00000107018; TAA
LPELQQYVPA

SEQ ID NO: 73829 - protein, 10 aa, Homo sapiens
  Table A; Target 73829; HLA-B*56:01; RLN1; ENSG00000107018; TAA
LPELQQYVPA

SEQ ID NO: 73830 - protein, 11 aa, Homo sapiens
  Table A; Target 73830; HLA-B*35:03; RLN1; ENSG00000107018; TAA
LPELQQYVPAL

SEQ ID NO: 73831 - protein, 11 aa, Homo sapiens
  Table A; Target 73831; HLA-C*07:02; RLN1; ENSG00000107018; TAA
LPELQQYVPAL

SEQ ID NO: 73832 - protein, 8 aa, Homo sapiens
  Table A; Target 73832; HLA-B*51:01; RLN1; ENSG00000107018; TAA
LPPELKAA

SEQ ID NO: 73833 - protein, 8 aa, Homo sapiens
  Table A; Target 73833; HLA-B*54:01; RLN1; ENSG00000107018; TAA
LPPELKAA

SEQ ID NO: 73834 - protein, 8 aa, Homo sapiens
  Table A; Target 73834; HLA-B*56:01; RLN1; ENSG00000107018; TAA
LPPELKAA

SEQ ID NO: 73835 - protein, 9 aa, Homo sapiens
  Table A; Target 73835; HLA-A*24:02; RLN1; ENSG00000107018; TAA
LPPELKAAL

SEQ ID NO: 73836 - protein, 9 aa, Homo sapiens
  Table A; Target 73836; HLA-B*07:02; RLN1; ENSG00000107018; TAA
LPPELKAAL

SEQ ID NO: 73837 - protein, 9 aa, Homo sapiens
  Table A; Target 73837; HLA-B*08:01; RLN1; ENSG00000107018; TAA
LPPELKAAL

SEQ ID NO: 73838 - protein, 9 aa, Homo sapiens
  Table A; Target 73838; HLA-B*35:01; RLN1; ENSG00000107018; TAA
LPPELKAAL

SEQ ID NO: 73839 - protein, 9 aa, Homo sapiens
  Table A; Target 73839; HLA-B*35:03; RLN1; ENSG00000107018; TAA
LPPELKAAL

SEQ ID NO: 73840 - protein, 9 aa, Homo sapiens
  Table A; Target 73840; HLA-B*51:01; RLN1; ENSG00000107018; TAA
LPPELKAAL

SEQ ID NO: 73841 - protein, 9 aa, Homo sapiens
  Table A; Target 73841; HLA-B*54:01; RLN1; ENSG00000107018; TAA
LPPELKAAL

SEQ ID NO: 73842 - protein, 9 aa, Homo sapiens
  Table A; Target 73842; HLA-B*56:01; RLN1; ENSG00000107018; TAA
LPPELKAAL

SEQ ID NO: 73843 - protein, 9 aa, Homo sapiens
  Table A; Target 73843; HLA-C*01:02; RLN1; ENSG00000107018; TAA
LPPELKAAL

SEQ ID NO: 73844 - protein, 9 aa, Homo sapiens
  Table A; Target 73844; HLA-C*03:03; RLN1; ENSG00000107018; TAA
LPPELKAAL

SEQ ID NO: 73845 - protein, 9 aa, Homo sapiens
  Table A; Target 73845; HLA-C*07:02; RLN1; ENSG00000107018; TAA
LPPELKAAL

SEQ ID NO: 73846 - protein, 9 aa, Homo sapiens
  Table A; Target 73846; HLA-C*14:02; RLN1; ENSG00000107018; TAA
LPPELKAAL

SEQ ID NO: 73847 - protein, 8 aa, Homo sapiens
  Table A; Target 73847; HLA-A*02:04; RLN1; ENSG00000107018; TAA
LQQYVPAL

SEQ ID NO: 73848 - protein, 8 aa, Homo sapiens
  Table A; Target 73848; HLA-B*13:02; RLN1; ENSG00000107018; TAA
LQQYVPAL

SEQ ID NO: 73849 - protein, 8 aa, Homo sapiens
  Table A; Target 73849; HLA-B*15:01; RLN1; ENSG00000107018; TAA
LQQYVPAL

SEQ ID NO: 73850 - protein, 8 aa, Homo sapiens
  Table A; Target 73850; HLA-B*37:01; RLN1; ENSG00000107018; TAA
LQQYVPAL

SEQ ID NO: 73851 - protein, 8 aa, Homo sapiens
  Table A; Target 73851; HLA-C*03:03; RLN1; ENSG00000107018; TAA
LQQYVPAL

SEQ ID NO: 73852 - protein, 8 aa, Homo sapiens
  Table A; Target 73852; HLA-C*03:04; RLN1; ENSG00000107018; TAA
LQQYVPAL

SEQ ID NO: 73853 - protein, 8 aa, Homo sapiens
  Table A; Target 73853; HLA-C*07:04; RLN1; ENSG00000107018; TAA
LQQYVPAL

SEQ ID NO: 73854 - protein, 9 aa, Homo sapiens
  Table A; Target 73854; HLA-A*03:02; RLN1; ENSG00000107018; TAA
LQQYVPALK

SEQ ID NO: 73855 - protein, 8 aa, Homo sapiens
  Table A; Target 73855; HLA-B*58:01; RLN1; ENSG00000107018; TAA
LSERQPSL

SEQ ID NO: 73856 - protein, 8 aa, Homo sapiens
  Table A; Target 73856; HLA-C*03:04; RLN1; ENSG00000107018; TAA
LSERQPSL

SEQ ID NO: 73857 - protein, 9 aa, Homo sapiens
  Table A; Target 73857; HLA-A*01:01; RLN1; ENSG00000107018; TAA
LSERQPSLP

SEQ ID NO: 73858 - protein, 9 aa, Homo sapiens
  Table A; Target 73858; HLA-B*57:01; RLN1; ENSG00000107018; TAA
LSFEEFKKL

SEQ ID NO: 73859 - protein, 9 aa, Homo sapiens
  Table A; Target 73859; HLA-C*02:02; RLN1; ENSG00000107018; TAA
LSFEEFKKL

SEQ ID NO: 73860 - protein, 10 aa, Homo sapiens
  Table A; Target 73860; HLA-B*57:01; RLN1; ENSG00000107018; TAA
LSFEEFKKLI

SEQ ID NO: 73861 - protein, 11 aa, Homo sapiens
  Table A; Target 73861; HLA-B*27:02; RLN1; ENSG00000107018; TAA
LSQEDAPQTPR

SEQ ID NO: 73862 - protein, 9 aa, Homo sapiens
  Table A; Target 73862; HLA-B*38:01; RLN1; ENSG00000107018; TAA
NKDTETIII

SEQ ID NO: 73863 - protein, 9 aa, Homo sapiens
  Table A; Target 73863; HLA-A*02:03; RLN1; ENSG00000107018; TAA
NLPPELKAA

SEQ ID NO: 73864 - protein, 9 aa, Homo sapiens
  Table A; Target 73864; HLA-A*02:07; RLN1; ENSG00000107018; TAA
NLPPELKAA

SEQ ID NO: 73865 - protein, 10 aa, Homo sapiens
  Table A; Target 73865; HLA-A*02:07; RLN1; ENSG00000107018; TAA
NLPPELKAAL

SEQ ID NO: 73866 - protein, 10 aa, Homo sapiens
  Table A; Target 73866; HLA-C*01:02; RLN1; ENSG00000107018; TAA
NLPPELKAAL

SEQ ID NO: 73867 - protein, 8 aa, Homo sapiens
  Table A; Target 73867; HLA-B*07:02; RLN1; ENSG00000107018; TAA
NPSELKYL

SEQ ID NO: 73868 - protein, 10 aa, Homo sapiens
  Table A; Target 73868; HLA-B*07:02; RLN1; ENSG00000107018; TAA
NPSELKYLGL

SEQ ID NO: 73869 - protein, 10 aa, Homo sapiens
  Table A; Target 73869; HLA-B*35:03; RLN1; ENSG00000107018; TAA
NPSELKYLGL

SEQ ID NO: 73870 - protein, 9 aa, Homo sapiens
  Table A; Target 73870; HLA-A*02:03; RLN1; ENSG00000107018; TAA
NQFSRAVAA

SEQ ID NO: 73871 - protein, 9 aa, Homo sapiens
  Table A; Target 73871; HLA-A*32:01; RLN1; ENSG00000107018; TAA
NQFSRAVAA

SEQ ID NO: 73872 - protein, 9 aa, Homo sapiens
  Table A; Target 73872; HLA-B*08:01; RLN1; ENSG00000107018; TAA
NQFSRAVAA

SEQ ID NO: 73873 - protein, 9 aa, Homo sapiens
  Table A; Target 73873; HLA-B*13:02; RLN1; ENSG00000107018; TAA
NQFSRAVAA

SEQ ID NO: 73874 - protein, 9 aa, Homo sapiens
  Table A; Target 73874; HLA-B*15:01; RLN1; ENSG00000107018; TAA
NQFSRAVAA

SEQ ID NO: 73875 - protein, 9 aa, Homo sapiens
  Table A; Target 73875; HLA-B*18:01; RLN1; ENSG00000107018; TAA
NQFSRAVAA

SEQ ID NO: 73876 - protein, 9 aa, Homo sapiens
  Table A; Target 73876; HLA-B*27:05; RLN1; ENSG00000107018; TAA
NQFSRAVAA

SEQ ID NO: 73877 - protein, 9 aa, Homo sapiens
  Table A; Target 73877; HLA-B*37:01; RLN1; ENSG00000107018; TAA
NQFSRAVAA

SEQ ID NO: 73878 - protein, 9 aa, Homo sapiens
  Table A; Target 73878; HLA-B*39:01; RLN1; ENSG00000107018; TAA
NQFSRAVAA

SEQ ID NO: 73879 - protein, 9 aa, Homo sapiens
  Table A; Target 73879; HLA-B*54:01; RLN1; ENSG00000107018; TAA
NQFSRAVAA

SEQ ID NO: 73880 - protein, 9 aa, Homo sapiens
  Table A; Target 73880; HLA-B*55:01; RLN1; ENSG00000107018; TAA
NQFSRAVAA

SEQ ID NO: 73881 - protein, 9 aa, Homo sapiens
  Table A; Target 73881; HLA-B*56:01; RLN1; ENSG00000107018; TAA
NQFSRAVAA

SEQ ID NO: 73882 - protein, 9 aa, Homo sapiens
  Table A; Target 73882; HLA-C*07:04; RLN1; ENSG00000107018; TAA
NQFSRAVAA

SEQ ID NO: 73883 - protein, 9 aa, Homo sapiens
  Table A; Target 73883; HLA-C*12:03; RLN1; ENSG00000107018; TAA
NQFSRAVAA

SEQ ID NO: 73884 - protein, 9 aa, Homo sapiens
  Table A; Target 73884; HLA-C*14:02; RLN1; ENSG00000107018; TAA
NQFSRAVAA

SEQ ID NO: 73885 - protein, 9 aa, Homo sapiens
  Table A; Target 73885; HLA-C*16:01; RLN1; ENSG00000107018; TAA
NQFSRAVAA

SEQ ID NO: 73886 - protein, 11 aa, Homo sapiens
  Table A; Target 73886; HLA-B*44:02; RLN1; ENSG00000107018; TAA
NQFSRAVAAKW

SEQ ID NO: 73887 - protein, 11 aa, Homo sapiens
  Table A; Target 73887; HLA-B*44:03; RLN1; ENSG00000107018; TAA
NQFSRAVAAKW

SEQ ID NO: 73888 - protein, 10 aa, Homo sapiens
  Table A; Target 73888; HLA-A*24:02; RLN1; ENSG00000107018; TAA
PALKDSNLSF

SEQ ID NO: 73889 - protein, 10 aa, Homo sapiens
  Table A; Target 73889; HLA-B*58:01; RLN1; ENSG00000107018; TAA
PALKDSNLSF

SEQ ID NO: 73890 - protein, 8 aa, Homo sapiens
  Table A; Target 73890; HLA-B*07:02; RLN1; ENSG00000107018; TAA
PPELKAAL

SEQ ID NO: 73891 - protein, 8 aa, Homo sapiens
  Table A; Target 73891; HLA-B*08:01; RLN1; ENSG00000107018; TAA
PPELKAAL

SEQ ID NO: 73892 - protein, 9 aa, Homo sapiens
  Table A; Target 73892; HLA-A*01:01; RLN1; ENSG00000107018; TAA
PSLPELQQY

SEQ ID NO: 73893 - protein, 9 aa, Homo sapiens
  Table A; Target 73893; HLA-A*29:02; RLN1; ENSG00000107018; TAA
PSLPELQQY

SEQ ID NO: 73894 - protein, 9 aa, Homo sapiens
  Table A; Target 73894; HLA-A*30:02; RLN1; ENSG00000107018; TAA
PSLPELQQY

SEQ ID NO: 73895 - protein, 9 aa, Homo sapiens
  Table A; Target 73895; HLA-C*07:01; RLN1; ENSG00000107018; TAA
PSLPELQQY

SEQ ID NO: 73896 - protein, 10 aa, Homo sapiens
  Table A; Target 73896; HLA-A*68:02; RLN1; ENSG00000107018; TAA
PVAEIVPSFI

SEQ ID NO: 73897 - protein, 11 aa, Homo sapiens
  Table A; Target 73897; HLA-B*39:01; RLN1; ENSG00000107018; TAA
QEDAPQTPRPV

SEQ ID NO: 73898 - protein, 11 aa, Homo sapiens
  Table A; Target 73898; HLA-C*04:01; RLN1; ENSG00000107018; TAA
QEDAPQTPRPV

SEQ ID NO: 73899 - protein, 10 aa, Homo sapiens
  Table A; Target 73899; HLA-A*24:02; RLN1; ENSG00000107018; TAA
QFSRAVAAKW

SEQ ID NO: 73900 - protein, 10 aa, Homo sapiens
  Table A; Target 73900; HLA-B*57:01; RLN1; ENSG00000107018; TAA
QFSRAVAAKW

SEQ ID NO: 73901 - protein, 10 aa, Homo sapiens
  Table A; Target 73901; HLA-A*01:01; RLN1; ENSG00000107018; TAA
QPSLPELQQY

SEQ ID NO: 73902 - protein, 10 aa, Homo sapiens
  Table A; Target 73902; HLA-B*27:02; RLN1; ENSG00000107018; TAA
QPSLPELQQY

SEQ ID NO: 73903 - protein, 10 aa, Homo sapiens
  Table A; Target 73903; HLA-B*35:01; RLN1; ENSG00000107018; TAA
QPSLPELQQY

SEQ ID NO: 73904 - protein, 10 aa, Homo sapiens
  Table A; Target 73904; HLA-B*55:01; RLN1; ENSG00000107018; TAA
QPSLPELQQY

SEQ ID NO: 73905 - protein, 10 aa, Homo sapiens
  Table A; Target 73905; HLA-C*03:03; RLN1; ENSG00000107018; TAA
QPSLPELQQY

SEQ ID NO: 73906 - protein, 11 aa, Homo sapiens
  Table A; Target 73906; HLA-B*56:01; RLN1; ENSG00000107018; TAA
QPSLPELQQYV

SEQ ID NO: 73907 - protein, 8 aa, Homo sapiens
  Table A; Target 73907; HLA-A*03:01; RLN1; ENSG00000107018; TAA
QQYVPALK

SEQ ID NO: 73908 - protein, 8 aa, Homo sapiens
  Table A; Target 73908; HLA-A*03:02; RLN1; ENSG00000107018; TAA
QQYVPALK

SEQ ID NO: 73909 - protein, 8 aa, Homo sapiens
  Table A; Target 73909; HLA-A*11:01; RLN1; ENSG00000107018; TAA
QQYVPALK

SEQ ID NO: 73910 - protein, 8 aa, Homo sapiens
  Table A; Target 73910; HLA-B*27:02; RLN1; ENSG00000107018; TAA
QQYVPALK

SEQ ID NO: 73911 - protein, 9 aa, Homo sapiens
  Table A; Target 73911; HLA-C*01:02; RLN1; ENSG00000107018; TAA
QTPRPVAEI

SEQ ID NO: 73912 - protein, 11 aa, Homo sapiens
  Table A; Target 73912; HLA-A*24:02; RLN1; ENSG00000107018; TAA
QYVPALKDSNL

SEQ ID NO: 73913 - protein, 10 aa, Homo sapiens
  Table A; Target 73913; HLA-B*40:02; RLN1; ENSG00000107018; TAA
RELVRAQIAI

SEQ ID NO: 73914 - protein, 8 aa, Homo sapiens
  Table A; Target 73914; HLA-A*02:04; RLN1; ENSG00000107018; TAA
RLFLFHLL

SEQ ID NO: 73915 - protein, 10 aa, Homo sapiens
  Table A; Target 73915; HLA-A*02:04; RLN1; ENSG00000107018; TAA
RLFLFHLLEF

SEQ ID NO: 73916 - protein, 10 aa, Homo sapiens
  Table A; Target 73916; HLA-B*57:01; RLN1; ENSG00000107018; TAA
RLFLFHLLEF

SEQ ID NO: 73917 - protein, 9 aa, Homo sapiens
  Table A; Target 73917; HLA-A*03:01; RLN1; ENSG00000107018; TAA
RPYVALFEK

SEQ ID NO: 73918 - protein, 8 aa, Homo sapiens
  Table A; Target 73918; HLA-B*13:02; RLN1; ENSG00000107018; TAA
RQPSLPEL

SEQ ID NO: 73919 - protein, 8 aa, Homo sapiens
  Table A; Target 73919; HLA-B*15:03; RLN1; ENSG00000107018; TAA
RQPSLPEL

SEQ ID NO: 73920 - protein, 11 aa, Homo sapiens
  Table A; Target 73920; HLA-A*29:02; RLN1; ENSG00000107018; TAA
RQPSLPELQQY

SEQ ID NO: 73921 - protein, 11 aa, Homo sapiens
  Table A; Target 73921; HLA-A*30:02; RLN1; ENSG00000107018; TAA
RQPSLPELQQY

SEQ ID NO: 73922 - protein, 11 aa, Homo sapiens
  Table A; Target 73922; HLA-B*15:01; RLN1; ENSG00000107018; TAA
RQPSLPELQQY

SEQ ID NO: 73923 - protein, 11 aa, Homo sapiens
  Table A; Target 73923; HLA-B*15:03; RLN1; ENSG00000107018; TAA
RQPSLPELQQY

SEQ ID NO: 73924 - protein, 11 aa, Homo sapiens
  Table A; Target 73924; HLA-C*07:04; RLN1; ENSG00000107018; TAA
RQPSLPELQQY

SEQ ID NO: 73925 - protein, 11 aa, Homo sapiens
  Table A; Target 73925; HLA-A*30:01; RLN1; ENSG00000107018; TAA
SEAADSNPSEL

SEQ ID NO: 73926 - protein, 11 aa, Homo sapiens
  Table A; Target 73926; HLA-B*40:01; RLN1; ENSG00000107018; TAA
SEAADSNPSEL

SEQ ID NO: 73927 - protein, 11 aa, Homo sapiens
  Table A; Target 73927; HLA-B*44:03; RLN1; ENSG00000107018; TAA
SEAADSNPSEL

SEQ ID NO: 73928 - protein, 11 aa, Homo sapiens
  Table A; Target 73928; HLA-C*16:04; RLN1; ENSG00000107018; TAA
SEAADSNPSEL

SEQ ID NO: 73929 - protein, 10 aa, Homo sapiens
  Table A; Target 73929; HLA-A*30:01; RLN1; ENSG00000107018; TAA
SERQPSLPEL

SEQ ID NO: 73930 - protein, 10 aa, Homo sapiens
  Table A; Target 73930; HLA-B*40:01; RLN1; ENSG00000107018; TAA
SERQPSLPEL

SEQ ID NO: 73931 - protein, 10 aa, Homo sapiens
  Table A; Target 73931; HLA-B*40:02; RLN1; ENSG00000107018; TAA
SERQPSLPEL

SEQ ID NO: 73932 - protein, 10 aa, Homo sapiens
  Table A; Target 73932; HLA-B*44:02; RLN1; ENSG00000107018; TAA
SERQPSLPEL

SEQ ID NO: 73933 - protein, 10 aa, Homo sapiens
  Table A; Target 73933; HLA-B*44:03; RLN1; ENSG00000107018; TAA
SERQPSLPEL

SEQ ID NO: 73934 - protein, 9 aa, Homo sapiens
  Table A; Target 73934; HLA-A*02:01; RLN1; ENSG00000107018; TAA
SLPELQQYV

SEQ ID NO: 73935 - protein, 9 aa, Homo sapiens
  Table A; Target 73935; HLA-A*02:03; RLN1; ENSG00000107018; TAA
SLPELQQYV

SEQ ID NO: 73936 - protein, 9 aa, Homo sapiens
  Table A; Target 73936; HLA-A*02:04; RLN1; ENSG00000107018; TAA
SLPELQQYV

SEQ ID NO: 73937 - protein, 9 aa, Homo sapiens
  Table A; Target 73937; HLA-A*02:07; RLN1; ENSG00000107018; TAA
SLPELQQYV

SEQ ID NO: 73938 - protein, 9 aa, Homo sapiens
  Table A; Target 73938; HLA-A*68:02; RLN1; ENSG00000107018; TAA
SLPELQQYV

SEQ ID NO: 73939 - protein, 9 aa, Homo sapiens
  Table A; Target 73939; HLA-B*13:02; RLN1; ENSG00000107018; TAA
SLPELQQYV

SEQ ID NO: 73940 - protein, 11 aa, Homo sapiens
  Table A; Target 73940; HLA-A*02:07; RLN1; ENSG00000107018; TAA
SLPELQQYVPA

SEQ ID NO: 73941 - protein, 10 aa, Homo sapiens
  Table A; Target 73941; HLA-A*03:02; RLN1; ENSG00000107018; TAA
SQEDAPQTPR

SEQ ID NO: 73942 - protein, 8 aa, Homo sapiens
  Table A; Target 73942; HLA-C*16:04; RLN1; ENSG00000107018; TAA
SRAVAAKW

SEQ ID NO: 73943 - protein, 8 aa, Homo sapiens
  Table A; Target 73943; HLA-A*30:01; RLN1; ENSG00000107018; TAA
TETIIIML

SEQ ID NO: 73944 - protein, 8 aa, Homo sapiens
  Table A; Target 73944; HLA-B*18:01; RLN1; ENSG00000107018; TAA
TETIIIML

SEQ ID NO: 73945 - protein, 8 aa, Homo sapiens
  Table A; Target 73945; HLA-B*37:01; RLN1; ENSG00000107018; TAA
TETIIIML

SEQ ID NO: 73946 - protein, 8 aa, Homo sapiens
  Table A; Target 73946; HLA-B*40:01; RLN1; ENSG00000107018; TAA
TETIIIML

SEQ ID NO: 73947 - protein, 8 aa, Homo sapiens
  Table A; Target 73947; HLA-B*40:02; RLN1; ENSG00000107018; TAA
TETIIIML

SEQ ID NO: 73948 - protein, 8 aa, Homo sapiens
  Table A; Target 73948; HLA-B*44:02; RLN1; ENSG00000107018; TAA
TETIIIML

SEQ ID NO: 73949 - protein, 8 aa, Homo sapiens
  Table A; Target 73949; HLA-B*49:01; RLN1; ENSG00000107018; TAA
TETIIIML

SEQ ID NO: 73950 - protein, 10 aa, Homo sapiens
  Table A; Target 73950; HLA-B*18:01; RLN1; ENSG00000107018; TAA
TETIIIMLEF

SEQ ID NO: 73951 - protein, 10 aa, Homo sapiens
  Table A; Target 73951; HLA-B*44:02; RLN1; ENSG00000107018; TAA
TETIIIMLEF

SEQ ID NO: 73952 - protein, 10 aa, Homo sapiens
  Table A; Target 73952; HLA-B*44:03; RLN1; ENSG00000107018; TAA
TETIIIMLEF

SEQ ID NO: 73953 - protein, 9 aa, Homo sapiens
  Table A; Target 73953; HLA-A*68:02; RLN1; ENSG00000107018; TAA
TIIIMLEFI

SEQ ID NO: 73954 - protein, 9 aa, Homo sapiens
  Table A; Target 73954; HLA-B*54:01; RLN1; ENSG00000107018; TAA
TPRPVAEIV

SEQ ID NO: 73955 - protein, 9 aa, Homo sapiens
  Table A; Target 73955; HLA-B*07:02; RLN1; ENSG00000107018; TAA
VPALKDSNL

SEQ ID NO: 73956 - protein, 9 aa, Homo sapiens
  Table A; Target 73956; HLA-B*08:01; RLN1; ENSG00000107018; TAA
VPALKDSNL

SEQ ID NO: 73957 - protein, 9 aa, Homo sapiens
  Table A; Target 73957; HLA-B*35:03; RLN1; ENSG00000107018; TAA
VPALKDSNL

SEQ ID NO: 73958 - protein, 9 aa, Homo sapiens
  Table A; Target 73958; HLA-B*55:01; RLN1; ENSG00000107018; TAA
VPALKDSNL

SEQ ID NO: 73959 - protein, 9 aa, Homo sapiens
  Table A; Target 73959; HLA-C*07:02; RLN1; ENSG00000107018; TAA
VPALKDSNL

SEQ ID NO: 73960 - protein, 11 aa, Homo sapiens
  Table A; Target 73960; HLA-B*07:02; RLN1; ENSG00000107018; TAA
VPALKDSNLSF

SEQ ID NO: 73961 - protein, 11 aa, Homo sapiens
  Table A; Target 73961; HLA-B*35:01; RLN1; ENSG00000107018; TAA
VPALKDSNLSF

SEQ ID NO: 73962 - protein, 11 aa, Homo sapiens
  Table A; Target 73962; HLA-C*07:02; RLN1; ENSG00000107018; TAA
VPALKDSNLSF

SEQ ID NO: 73963 - protein, 10 aa, Homo sapiens
  Table A; Target 73963; HLA-B*27:05; RLN1; ENSG00000107018; TAA
VRAQIAICGM

SEQ ID NO: 73964 - protein, 9 aa, Homo sapiens
  Table A; Target 73964; HLA-C*07:01; RLN1; ENSG00000107018; TAA
YLGLDTHSQ

SEQ ID NO: 73965 - protein, 10 aa, Homo sapiens
  Table A; Target 73965; HLA-A*01:01; RLN1; ENSG00000107018; TAA
YLGLDTHSQK

SEQ ID NO: 73966 - protein, 10 aa, Homo sapiens
  Table A; Target 73966; HLA-A*03:01; RLN1; ENSG00000107018; TAA
YLGLDTHSQK

SEQ ID NO: 73967 - protein, 10 aa, Homo sapiens
  Table A; Target 73967; HLA-A*03:02; RLN1; ENSG00000107018; TAA
YLGLDTHSQK

SEQ ID NO: 73968 - protein, 10 aa, Homo sapiens
  Table A; Target 73968; HLA-B*27:02; RLN1; ENSG00000107018; TAA
YLGLDTHSQK

SEQ ID NO: 73969 - protein, 10 aa, Homo sapiens
  Table A; Target 73969; HLA-C*07:01; RLN1; ENSG00000107018; TAA
YLGLDTHSQK

SEQ ID NO: 73970 - protein, 10 aa, Homo sapiens
  Table A; Target 73970; HLA-C*07:02; RLN1; ENSG00000107018; TAA
YLGLDTHSQK

SEQ ID NO: 73971 - protein, 10 aa, Homo sapiens
  Table A; Target 73971; HLA-C*07:04; RLN1; ENSG00000107018; TAA
YLGLDTHSQK

SEQ ID NO: 73972 - protein, 11 aa, Homo sapiens
  Table A; Target 73972; HLA-A*01:01; RLN1; ENSG00000107018; TAA
YLGLDTHSQKK

SEQ ID NO: 73973 - protein, 11 aa, Homo sapiens
  Table A; Target 73973; HLA-A*03:02; RLN1; ENSG00000107018; TAA
YLGLDTHSQKK

SEQ ID NO: 73974 - protein, 11 aa, Homo sapiens
  Table A; Target 73974; HLA-C*07:01; RLN1; ENSG00000107018; TAA
YLGLDTHSQKK

SEQ ID NO: 73975 - protein, 10 aa, Homo sapiens
  Table A; Target 73975; HLA-A*02:07; RLN1; ENSG00000107018; TAA
YVPALKDSNL

SEQ ID NO: 73976 - protein, 10 aa, Homo sapiens
  Table A; Target 73976; HLA-A*26:01; RLN1; ENSG00000107018; TAA
YVPALKDSNL

SEQ ID NO: 73977 - protein, 10 aa, Homo sapiens
  Table A; Target 73977; HLA-C*01:02; RLN1; ENSG00000107018; TAA
YVPALKDSNL

SEQ ID NO: 73978 - protein, 8 aa, Homo sapiens
  Table A; Target 73978; HLA-B*13:02; RLN1,RLN2; ENSG00000107018,ENSG00000107014; TAA,TAA
AEIVPSFI

SEQ ID NO: 73979 - protein, 8 aa, Homo sapiens
  Table A; Target 73979; HLA-B*44:02; RLN1,RLN2; ENSG00000107018,ENSG00000107014; TAA,TAA
AEIVPSFI

SEQ ID NO: 73980 - protein, 8 aa, Homo sapiens
  Table A; Target 73980; HLA-B*44:03; RLN1,RLN2; ENSG00000107018,ENSG00000107014; TAA,TAA
AEIVPSFI

SEQ ID NO: 73981 - protein, 8 aa, Homo sapiens
  Table A; Target 73981; HLA-B*49:01; RLN1,RLN2; ENSG00000107018,ENSG00000107014; TAA,TAA
AEIVPSFI

SEQ ID NO: 73982 - protein, 10 aa, Homo sapiens
  Table A; Target 73982; HLA-A*11:01; RLN1,RLN2; ENSG00000107018,ENSG00000107014; TAA,TAA
AEIVPSFINK

SEQ ID NO: 73983 - protein, 10 aa, Homo sapiens
  Table A; Target 73983; HLA-B*49:01; RLN1,RLN2; ENSG00000107018,ENSG00000107014; TAA,TAA
AEIVPSFINK

SEQ ID NO: 73984 - protein, 8 aa, Homo sapiens
  Table A; Target 73984; HLA-B*07:02; RLN1,RLN2; ENSG00000107018,ENSG00000107014; TAA,TAA
APQTPRPV

SEQ ID NO: 73985 - protein, 8 aa, Homo sapiens
  Table A; Target 73985; HLA-B*56:01; RLN1,RLN2; ENSG00000107018,ENSG00000107014; TAA,TAA
APQTPRPV

SEQ ID NO: 73986 - protein, 8 aa, Homo sapiens
  Table A; Target 73986; HLA-C*07:02; RLN1,RLN2; ENSG00000107018,ENSG00000107014; TAA,TAA
APQTPRPV

SEQ ID NO: 73987 - protein, 9 aa, Homo sapiens
  Table A; Target 73987; HLA-B*07:02; RLN1,RLN2; ENSG00000107018,ENSG00000107014; TAA,TAA
APQTPRPVA

SEQ ID NO: 73988 - protein, 9 aa, Homo sapiens
  Table A; Target 73988; HLA-B*54:01; RLN1,RLN2; ENSG00000107018,ENSG00000107014; TAA,TAA
APQTPRPVA

SEQ ID NO: 73989 - protein, 9 aa, Homo sapiens
  Table A; Target 73989; HLA-B*55:01; RLN1,RLN2; ENSG00000107018,ENSG00000107014; TAA,TAA
APQTPRPVA

SEQ ID NO: 73990 - protein, 9 aa, Homo sapiens
  Table A; Target 73990; HLA-B*56:01; RLN1,RLN2; ENSG00000107018,ENSG00000107014; TAA,TAA
APQTPRPVA

SEQ ID NO: 73991 - protein, 9 aa, Homo sapiens
  Table A; Target 73991; HLA-C*07:02; RLN1,RLN2; ENSG00000107018,ENSG00000107014; TAA,TAA
APQTPRPVA

SEQ ID NO: 73992 - protein, 9 aa, Homo sapiens
  Table A; Target 73992; HLA-C*16:01; RLN1,RLN2; ENSG00000107018,ENSG00000107014; TAA,TAA
APQTPRPVA

SEQ ID NO: 73993 - protein, 11 aa, Homo sapiens
  Table A; Target 73993; HLA-B*07:02; RLN1,RLN2; ENSG00000107018,ENSG00000107014; TAA,TAA
APQTPRPVAEI

SEQ ID NO: 73994 - protein, 11 aa, Homo sapiens
  Table A; Target 73994; HLA-C*07:02; RLN1,RLN2; ENSG00000107018,ENSG00000107014; TAA,TAA
APQTPRPVAEI

SEQ ID NO: 73995 - protein, 8 aa, Homo sapiens
  Table A; Target 73995; HLA-B*13:02; RLN1,RLN2; ENSG00000107018,ENSG00000107014; TAA,TAA
AQIAICGM

SEQ ID NO: 73996 - protein, 8 aa, Homo sapiens
  Table A; Target 73996; HLA-B*15:01; RLN1,RLN2; ENSG00000107018,ENSG00000107014; TAA,TAA
AQIAICGM

SEQ ID NO: 73997 - protein, 8 aa, Homo sapiens
  Table A; Target 73997; HLA-B*15:03; RLN1,RLN2; ENSG00000107018,ENSG00000107014; TAA,TAA
AQIAICGM

SEQ ID NO: 73998 - protein, 8 aa, Homo sapiens
  Table A; Target 73998; HLA-B*37:01; RLN1,RLN2; ENSG00000107018,ENSG00000107014; TAA,TAA
AQIAICGM

SEQ ID NO: 73999 - protein, 8 aa, Homo sapiens
  Table A; Target 73999; HLA-B*51:01; RLN1,RLN2; ENSG00000107018,ENSG00000107014; TAA,TAA
DAPQTPRP

SEQ ID NO: 74000 - protein, 9 aa, Homo sapiens
  Table A; Target 74000; HLA-B*51:01; RLN1,RLN2; ENSG00000107018,ENSG00000107014; TAA,TAA
DAPQTPRPV

SEQ ID NO: 74001 - protein, 9 aa, Homo sapiens
  Table A; Target 74001; HLA-C*01:02; RLN1,RLN2; ENSG00000107018,ENSG00000107014; TAA,TAA
DAPQTPRPV

SEQ ID NO: 74002 - protein, 10 aa, Homo sapiens
  Table A; Target 74002; HLA-B*51:01; RLN1,RLN2; ENSG00000107018,ENSG00000107014; TAA,TAA
DAPQTPRPVA

SEQ ID NO: 74003 - protein, 10 aa, Homo sapiens
  Table A; Target 74003; HLA-B*54:01; RLN1,RLN2; ENSG00000107018,ENSG00000107014; TAA,TAA
DAPQTPRPVA

SEQ ID NO: 74004 - protein, 8 aa, Homo sapiens
  Table A; Target 74004; HLA-A*33:03; RLN1,RLN2; ENSG00000107018,ENSG00000107014; TAA,TAA
EDAPQTPR

SEQ ID NO: 74005 - protein, 8 aa, Homo sapiens
  Table A; Target 74005; HLA-A*68:01; RLN1,RLN2; ENSG00000107018,ENSG00000107014; TAA,TAA
EDAPQTPR

SEQ ID NO: 74006 - protein, 10 aa, Homo sapiens
  Table A; Target 74006; HLA-C*04:01; RLN1,RLN2; ENSG00000107018,ENSG00000107014; TAA,TAA
EDAPQTPRPV

SEQ ID NO: 74007 - protein, 10 aa, Homo sapiens
  Table A; Target 74007; HLA-C*06:02; RLN1,RLN2; ENSG00000107018,ENSG00000107014; TAA,TAA
EDAPQTPRPV

SEQ ID NO: 74008 - protein, 10 aa, Homo sapiens
  Table A; Target 74008; HLA-C*07:01; RLN1,RLN2; ENSG00000107018,ENSG00000107014; TAA,TAA
EDAPQTPRPV

SEQ ID NO: 74009 - protein, 10 aa, Homo sapiens
  Table A; Target 74009; HLA-C*07:02; RLN1,RLN2; ENSG00000107018,ENSG00000107014; TAA,TAA
EDAPQTPRPV

SEQ ID NO: 74010 - protein, 9 aa, Homo sapiens
  Table A; Target 74010; HLA-A*33:01; RLN1,RLN2; ENSG00000107018,ENSG00000107014; TAA,TAA
EFKKLIRNR

SEQ ID NO: 74011 - protein, 9 aa, Homo sapiens
  Table A; Target 74011; HLA-A*33:03; RLN1,RLN2; ENSG00000107018,ENSG00000107014; TAA,TAA
EFKKLIRNR

SEQ ID NO: 74012 - protein, 9 aa, Homo sapiens
  Table A; Target 74012; HLA-A*03:01; RLN1,RLN2; ENSG00000107018,ENSG00000107014; TAA,TAA
EIVPSFINK

SEQ ID NO: 74013 - protein, 9 aa, Homo sapiens
  Table A; Target 74013; HLA-A*03:02; RLN1,RLN2; ENSG00000107018,ENSG00000107014; TAA,TAA
EIVPSFINK

SEQ ID NO: 74014 - protein, 9 aa, Homo sapiens
  Table A; Target 74014; HLA-A*11:01; RLN1,RLN2; ENSG00000107018,ENSG00000107014; TAA,TAA
EIVPSFINK

SEQ ID NO: 74015 - protein, 9 aa, Homo sapiens
  Table A; Target 74015; HLA-A*25:01; RLN1,RLN2; ENSG00000107018,ENSG00000107014; TAA,TAA
EIVPSFINK

SEQ ID NO: 74016 - protein, 9 aa, Homo sapiens
  Table A; Target 74016; HLA-A*33:01; RLN1,RLN2; ENSG00000107018,ENSG00000107014; TAA,TAA
EIVPSFINK

SEQ ID NO: 74017 - protein, 9 aa, Homo sapiens
  Table A; Target 74017; HLA-A*33:03; RLN1,RLN2; ENSG00000107018,ENSG00000107014; TAA,TAA
EIVPSFINK

SEQ ID NO: 74018 - protein, 9 aa, Homo sapiens
  Table A; Target 74018; HLA-A*68:01; RLN1,RLN2; ENSG00000107018,ENSG00000107014; TAA,TAA
EIVPSFINK

SEQ ID NO: 74019 - protein, 9 aa, Homo sapiens
  Table A; Target 74019; HLA-A*68:02; RLN1,RLN2; ENSG00000107018,ENSG00000107014; TAA,TAA
EIVPSFINK

SEQ ID NO: 74020 - protein, 9 aa, Homo sapiens
  Table A; Target 74020; HLA-C*07:06; RLN1,RLN2; ENSG00000107018,ENSG00000107014; TAA,TAA
EIVPSFINK

SEQ ID NO: 74021 - protein, 9 aa, Homo sapiens
  Table A; Target 74021; HLA-A*68:02; RLN1,RLN2; ENSG00000107018,ENSG00000107014; TAA,TAA
ELVRAQIAI

SEQ ID NO: 74022 - protein, 9 aa, Homo sapiens
  Table A; Target 74022; HLA-B*13:02; RLN1,RLN2; ENSG00000107018,ENSG00000107014; TAA,TAA
ELVRAQIAI

SEQ ID NO: 74023 - protein, 9 aa, Homo sapiens
  Table A; Target 74023; HLA-B*13:02; RLN1,RLN2; ENSG00000107018,ENSG00000107014; TAA,TAA
FINKDTETI

SEQ ID NO: 74024 - protein, 9 aa, Homo sapiens
  Table A; Target 74024; HLA-B*38:01; RLN1,RLN2; ENSG00000107018,ENSG00000107014; TAA,TAA
FINKDTETI

SEQ ID NO: 74025 - protein, 9 aa, Homo sapiens
  Table A; Target 74025; HLA-B*46:01; RLN1,RLN2; ENSG00000107018,ENSG00000107014; TAA,TAA
FINKDTETI

SEQ ID NO: 74026 - protein, 9 aa, Homo sapiens
  Table A; Target 74026; HLA-C*05:01; RLN1,RLN2; ENSG00000107018,ENSG00000107014; TAA,TAA
FINKDTETI

SEQ ID NO: 74027 - protein, 9 aa, Homo sapiens
  Table A; Target 74027; HLA-A*23:01; RLN1,RLN2; ENSG00000107018,ENSG00000107014; TAA,TAA
IAICGMSTW

SEQ ID NO: 74028 - protein, 9 aa, Homo sapiens
  Table A; Target 74028; HLA-A*24:02; RLN1,RLN2; ENSG00000107018,ENSG00000107014; TAA,TAA
IAICGMSTW

SEQ ID NO: 74029 - protein, 9 aa, Homo sapiens
  Table A; Target 74029; HLA-A*25:01; RLN1,RLN2; ENSG00000107018,ENSG00000107014; TAA,TAA
IAICGMSTW

SEQ ID NO: 74030 - protein, 9 aa, Homo sapiens
  Table A; Target 74030; HLA-A*26:01; RLN1,RLN2; ENSG00000107018,ENSG00000107014; TAA,TAA
IAICGMSTW

SEQ ID NO: 74031 - protein, 9 aa, Homo sapiens
  Table A; Target 74031; HLA-B*46:01; RLN1,RLN2; ENSG00000107018,ENSG00000107014; TAA,TAA
IAICGMSTW

SEQ ID NO: 74032 - protein, 9 aa, Homo sapiens
  Table A; Target 74032; HLA-B*51:01; RLN1,RLN2; ENSG00000107018,ENSG00000107014; TAA,TAA
IAICGMSTW

SEQ ID NO: 74033 - protein, 9 aa, Homo sapiens
  Table A; Target 74033; HLA-B*57:01; RLN1,RLN2; ENSG00000107018,ENSG00000107014; TAA,TAA
IAICGMSTW

SEQ ID NO: 74034 - protein, 9 aa, Homo sapiens
  Table A; Target 74034; HLA-B*58:01; RLN1,RLN2; ENSG00000107018,ENSG00000107014; TAA,TAA
IAICGMSTW

SEQ ID NO: 74035 - protein, 8 aa, Homo sapiens
  Table A; Target 74035; HLA-A*03:01; RLN1,RLN2; ENSG00000107018,ENSG00000107014; TAA,TAA
IVPSFINK

SEQ ID NO: 74036 - protein, 8 aa, Homo sapiens
  Table A; Target 74036; HLA-A*11:01; RLN1,RLN2; ENSG00000107018,ENSG00000107014; TAA,TAA
IVPSFINK

SEQ ID NO: 74037 - protein, 9 aa, Homo sapiens
  Table A; Target 74037; HLA-A*02:01; RLN1,RLN2; ENSG00000107018,ENSG00000107014; TAA,TAA
LLLNQFSRA

SEQ ID NO: 74038 - protein, 9 aa, Homo sapiens
  Table A; Target 74038; HLA-A*02:04; RLN1,RLN2; ENSG00000107018,ENSG00000107014; TAA,TAA
LLLNQFSRA

SEQ ID NO: 74039 - protein, 9 aa, Homo sapiens
  Table A; Target 74039; HLA-A*02:07; RLN1,RLN2; ENSG00000107018,ENSG00000107014; TAA,TAA
LLLNQFSRA

SEQ ID NO: 74040 - protein, 9 aa, Homo sapiens
  Table A; Target 74040; HLA-A*02:01; RLN1,RLN2; ENSG00000107018,ENSG00000107014; TAA,TAA
LLNQFSRAV

SEQ ID NO: 74041 - protein, 9 aa, Homo sapiens
  Table A; Target 74041; HLA-A*02:03; RLN1,RLN2; ENSG00000107018,ENSG00000107014; TAA,TAA
LLNQFSRAV

SEQ ID NO: 74042 - protein, 9 aa, Homo sapiens
  Table A; Target 74042; HLA-A*02:04; RLN1,RLN2; ENSG00000107018,ENSG00000107014; TAA,TAA
LLNQFSRAV

SEQ ID NO: 74043 - protein, 9 aa, Homo sapiens
  Table A; Target 74043; HLA-A*02:07; RLN1,RLN2; ENSG00000107018,ENSG00000107014; TAA,TAA
LLNQFSRAV

SEQ ID NO: 74044 - protein, 11 aa, Homo sapiens
  Table A; Target 74044; HLA-A*68:01; RLN1,RLN2; ENSG00000107018,ENSG00000107014; TAA,TAA
LSQEDAPQTPR

SEQ ID NO: 74045 - protein, 11 aa, Homo sapiens
  Table A; Target 74045; HLA-C*07:06; RLN1,RLN2; ENSG00000107018,ENSG00000107014; TAA,TAA
LSQEDAPQTPR

SEQ ID NO: 74046 - protein, 9 aa, Homo sapiens
  Table A; Target 74046; HLA-C*16:01; RLN1,RLN2; ENSG00000107018,ENSG00000107014; TAA,TAA
MSTWSKRSL

SEQ ID NO: 74047 - protein, 9 aa, Homo sapiens
  Table A; Target 74047; HLA-A*23:01; RLN1,RLN2; ENSG00000107018,ENSG00000107014; TAA,TAA
PVAEIVPSF

SEQ ID NO: 74048 - protein, 9 aa, Homo sapiens
  Table A; Target 74048; HLA-A*24:02; RLN1,RLN2; ENSG00000107018,ENSG00000107014; TAA,TAA
PVAEIVPSF

SEQ ID NO: 74049 - protein, 9 aa, Homo sapiens
  Table A; Target 74049; HLA-A*25:01; RLN1,RLN2; ENSG00000107018,ENSG00000107014; TAA,TAA
PVAEIVPSF

SEQ ID NO: 74050 - protein, 9 aa, Homo sapiens
  Table A; Target 74050; HLA-A*26:01; RLN1,RLN2; ENSG00000107018,ENSG00000107014; TAA,TAA
PVAEIVPSF

SEQ ID NO: 74051 - protein, 9 aa, Homo sapiens
  Table A; Target 74051; HLA-A*32:01; RLN1,RLN2; ENSG00000107018,ENSG00000107014; TAA,TAA
PVAEIVPSF

SEQ ID NO: 74052 - protein, 9 aa, Homo sapiens
  Table A; Target 74052; HLA-B*35:01; RLN1,RLN2; ENSG00000107018,ENSG00000107014; TAA,TAA
PVAEIVPSF

SEQ ID NO: 74053 - protein, 9 aa, Homo sapiens
  Table A; Target 74053; HLA-B*58:01; RLN1,RLN2; ENSG00000107018,ENSG00000107014; TAA,TAA
PVAEIVPSF

SEQ ID NO: 74054 - protein, 9 aa, Homo sapiens
  Table A; Target 74054; HLA-A*11:01; RLN1,RLN2; ENSG00000107018,ENSG00000107014; TAA,TAA
QEDAPQTPR

SEQ ID NO: 74055 - protein, 9 aa, Homo sapiens
  Table A; Target 74055; HLA-A*33:03; RLN1,RLN2; ENSG00000107018,ENSG00000107014; TAA,TAA
QEDAPQTPR

SEQ ID NO: 74056 - protein, 9 aa, Homo sapiens
  Table A; Target 74056; HLA-A*68:01; RLN1,RLN2; ENSG00000107018,ENSG00000107014; TAA,TAA
QEDAPQTPR

SEQ ID NO: 74057 - protein, 9 aa, Homo sapiens
  Table A; Target 74057; HLA-B*27:02; RLN1,RLN2; ENSG00000107018,ENSG00000107014; TAA,TAA
QEDAPQTPR

SEQ ID NO: 74058 - protein, 9 aa, Homo sapiens
  Table A; Target 74058; HLA-B*27:05; RLN1,RLN2; ENSG00000107018,ENSG00000107014; TAA,TAA
QEDAPQTPR

SEQ ID NO: 74059 - protein, 9 aa, Homo sapiens
  Table A; Target 74059; HLA-C*07:06; RLN1,RLN2; ENSG00000107018,ENSG00000107014; TAA,TAA
QEDAPQTPR

SEQ ID NO: 74060 - protein, 11 aa, Homo sapiens
  Table A; Target 74060; HLA-A*30:01; RLN1,RLN2; ENSG00000107018,ENSG00000107014; TAA,TAA
QEDAPQTPRPV

SEQ ID NO: 74061 - protein, 11 aa, Homo sapiens
  Table A; Target 74061; HLA-B*40:01; RLN1,RLN2; ENSG00000107018,ENSG00000107014; TAA,TAA
QEDAPQTPRPV

SEQ ID NO: 74062 - protein, 11 aa, Homo sapiens
  Table A; Target 74062; HLA-B*49:01; RLN1,RLN2; ENSG00000107018,ENSG00000107014; TAA,TAA
QEDAPQTPRPV

SEQ ID NO: 74063 - protein, 10 aa, Homo sapiens
  Table A; Target 74063; HLA-A*25:01; RLN1,RLN2; ENSG00000107018,ENSG00000107014; TAA,TAA
QIAICGMSTW

SEQ ID NO: 74064 - protein, 9 aa, Homo sapiens
  Table A; Target 74064; HLA-A*25:01; RLN1,RLN2; ENSG00000107018,ENSG00000107014; TAA,TAA
QTPRPVAEI

SEQ ID NO: 74065 - protein, 8 aa, Homo sapiens
  Table A; Target 74065; HLA-B*37:01; RLN1,RLN2; ENSG00000107018,ENSG00000107014; TAA,TAA
RELVRAQI

SEQ ID NO: 74066 - protein, 9 aa, Homo sapiens
  Table A; Target 74066; HLA-B*37:01; RLN1,RLN2; ENSG00000107018,ENSG00000107014; TAA,TAA
RELVRAQIA

SEQ ID NO: 74067 - protein, 10 aa, Homo sapiens
  Table A; Target 74067; HLA-B*07:02; RLN1,RLN2; ENSG00000107018,ENSG00000107014; TAA,TAA
RPVAEIVPSF

SEQ ID NO: 74068 - protein, 10 aa, Homo sapiens
  Table A; Target 74068; HLA-B*35:01; RLN1,RLN2; ENSG00000107018,ENSG00000107014; TAA,TAA
RPVAEIVPSF

SEQ ID NO: 74069 - protein, 10 aa, Homo sapiens
  Table A; Target 74069; HLA-C*07:02; RLN1,RLN2; ENSG00000107018,ENSG00000107014; TAA,TAA
RPVAEIVPSF

SEQ ID NO: 74070 - protein, 8 aa, Homo sapiens
  Table A; Target 74070; HLA-B*37:01; RLN1,RLN2; ENSG00000107018,ENSG00000107014; TAA,TAA
SELKYLGL

SEQ ID NO: 74071 - protein, 9 aa, Homo sapiens
  Table A; Target 74071; HLA-B*39:01; RLN1,RLN2; ENSG00000107018,ENSG00000107014; TAA,TAA
SQEDAPQTP

SEQ ID NO: 74072 - protein, 10 aa, Homo sapiens
  Table A; Target 74072; HLA-A*11:01; RLN1,RLN2; ENSG00000107018,ENSG00000107014; TAA,TAA
SQEDAPQTPR

SEQ ID NO: 74073 - protein, 10 aa, Homo sapiens
  Table A; Target 74073; HLA-A*68:01; RLN1,RLN2; ENSG00000107018,ENSG00000107014; TAA,TAA
SQEDAPQTPR

SEQ ID NO: 74074 - protein, 10 aa, Homo sapiens
  Table A; Target 74074; HLA-B*27:02; RLN1,RLN2; ENSG00000107018,ENSG00000107014; TAA,TAA
SQEDAPQTPR

SEQ ID NO: 74075 - protein, 10 aa, Homo sapiens
  Table A; Target 74075; HLA-B*27:05; RLN1,RLN2; ENSG00000107018,ENSG00000107014; TAA,TAA
SQEDAPQTPR

SEQ ID NO: 74076 - protein, 10 aa, Homo sapiens
  Table A; Target 74076; HLA-C*07:06; RLN1,RLN2; ENSG00000107018,ENSG00000107014; TAA,TAA
SQEDAPQTPR

SEQ ID NO: 74077 - protein, 8 aa, Homo sapiens
  Table A; Target 74077; HLA-B*08:01; RLN1,RLN2; ENSG00000107018,ENSG00000107014; TAA,TAA
STWSKRSL

SEQ ID NO: 74078 - protein, 8 aa, Homo sapiens
  Table A; Target 74078; HLA-B*07:02; RLN1,RLN2; ENSG00000107018,ENSG00000107014; TAA,TAA
TPRPVAEI

SEQ ID NO: 74079 - protein, 8 aa, Homo sapiens
  Table A; Target 74079; HLA-B*51:01; RLN1,RLN2; ENSG00000107018,ENSG00000107014; TAA,TAA
TPRPVAEI

SEQ ID NO: 74080 - protein, 8 aa, Homo sapiens
  Table A; Target 74080; HLA-B*56:01; RLN1,RLN2; ENSG00000107018,ENSG00000107014; TAA,TAA
TPRPVAEI

SEQ ID NO: 74081 - protein, 8 aa, Homo sapiens
  Table A; Target 74081; HLA-C*07:02; RLN1,RLN2; ENSG00000107018,ENSG00000107014; TAA,TAA
TPRPVAEI

SEQ ID NO: 74082 - protein, 9 aa, Homo sapiens
  Table A; Target 74082; HLA-B*07:02; RLN1,RLN2; ENSG00000107018,ENSG00000107014; TAA,TAA
TPRPVAEIV

SEQ ID NO: 74083 - protein, 9 aa, Homo sapiens
  Table A; Target 74083; HLA-B*51:01; RLN1,RLN2; ENSG00000107018,ENSG00000107014; TAA,TAA
TPRPVAEIV

SEQ ID NO: 74084 - protein, 9 aa, Homo sapiens
  Table A; Target 74084; HLA-B*56:01; RLN1,RLN2; ENSG00000107018,ENSG00000107014; TAA,TAA
TPRPVAEIV

SEQ ID NO: 74085 - protein, 9 aa, Homo sapiens
  Table A; Target 74085; HLA-C*07:02; RLN1,RLN2; ENSG00000107018,ENSG00000107014; TAA,TAA
TPRPVAEIV

SEQ ID NO: 74086 - protein, 8 aa, Homo sapiens
  Table A; Target 74086; HLA-C*05:01; RLN1,RLN2; ENSG00000107018,ENSG00000107014; TAA,TAA
VAEIVPSF

SEQ ID NO: 74087 - protein, 9 aa, Homo sapiens
  Table A; Target 74087; HLA-B*51:01; RLN1,RLN2; ENSG00000107018,ENSG00000107014; TAA,TAA
VAEIVPSFI

SEQ ID NO: 74088 - protein, 9 aa, Homo sapiens
  Table A; Target 74088; HLA-C*05:01; RLN1,RLN2; ENSG00000107018,ENSG00000107014; TAA,TAA
VAEIVPSFI

SEQ ID NO: 74089 - protein, 11 aa, Homo sapiens
  Table A; Target 74089; HLA-B*27:02; RLN1,RLN2; ENSG00000107018,ENSG00000107014; TAA,TAA
VAEIVPSFINK

SEQ ID NO: 74090 - protein, 9 aa, Homo sapiens
  Table A; Target 74090; HLA-B*27:05; RLN1,RLN2; ENSG00000107018,ENSG00000107014; TAA,TAA
VRAQIAICG

SEQ ID NO: 74091 - protein, 9 aa, Homo sapiens
  Table A; Target 74091; HLA-C*06:02; RLN1,RLN2; ENSG00000107018,ENSG00000107014; TAA,TAA
VRAQIAICG

SEQ ID NO: 74092 - protein, 9 aa, Homo sapiens
  Table A; Target 74092; HLA-C*07:02; RLN1,RLN2; ENSG00000107018,ENSG00000107014; TAA,TAA
VRAQIAICG

SEQ ID NO: 74093 - protein, 9 aa, Homo sapiens
  Table A; Target 74093; HLA-A*02:07; RLN2; ENSG00000107014; TAA
AADSSPSEL

SEQ ID NO: 74094 - protein, 9 aa, Homo sapiens
  Table A; Target 74094; HLA-A*32:01; RLN2; ENSG00000107014; TAA
AADSSPSEL

SEQ ID NO: 74095 - protein, 9 aa, Homo sapiens
  Table A; Target 74095; HLA-B*07:02; RLN2; ENSG00000107014; TAA
AADSSPSEL

SEQ ID NO: 74096 - protein, 9 aa, Homo sapiens
  Table A; Target 74096; HLA-B*35:01; RLN2; ENSG00000107014; TAA
AADSSPSEL

SEQ ID NO: 74097 - protein, 9 aa, Homo sapiens
  Table A; Target 74097; HLA-B*35:03; RLN2; ENSG00000107014; TAA
AADSSPSEL

SEQ ID NO: 74098 - protein, 9 aa, Homo sapiens
  Table A; Target 74098; HLA-B*38:01; RLN2; ENSG00000107014; TAA
AADSSPSEL

SEQ ID NO: 74099 - protein, 9 aa, Homo sapiens
  Table A; Target 74099; HLA-B*39:01; RLN2; ENSG00000107014; TAA
AADSSPSEL

SEQ ID NO: 74100 - protein, 9 aa, Homo sapiens
  Table A; Target 74100; HLA-B*40:01; RLN2; ENSG00000107014; TAA
AADSSPSEL

SEQ ID NO: 74101 - protein, 9 aa, Homo sapiens
  Table A; Target 74101; HLA-B*55:01; RLN2; ENSG00000107014; TAA
AADSSPSEL

SEQ ID NO: 74102 - protein, 9 aa, Homo sapiens
  Table A; Target 74102; HLA-C*01:02; RLN2; ENSG00000107014; TAA
AADSSPSEL

SEQ ID NO: 74103 - protein, 9 aa, Homo sapiens
  Table A; Target 74103; HLA-C*02:02; RLN2; ENSG00000107014; TAA
AADSSPSEL

SEQ ID NO: 74104 - protein, 9 aa, Homo sapiens
  Table A; Target 74104; HLA-C*03:03; RLN2; ENSG00000107014; TAA
AADSSPSEL

SEQ ID NO: 74105 - protein, 9 aa, Homo sapiens
  Table A; Target 74105; HLA-C*03:04; RLN2; ENSG00000107014; TAA
AADSSPSEL

SEQ ID NO: 74106 - protein, 9 aa, Homo sapiens
  Table A; Target 74106; HLA-C*04:01; RLN2; ENSG00000107014; TAA
AADSSPSEL

SEQ ID NO: 74107 - protein, 9 aa, Homo sapiens
  Table A; Target 74107; HLA-C*05:01; RLN2; ENSG00000107014; TAA
AADSSPSEL

SEQ ID NO: 74108 - protein, 9 aa, Homo sapiens
  Table A; Target 74108; HLA-C*07:02; RLN2; ENSG00000107014; TAA
AADSSPSEL

SEQ ID NO: 74109 - protein, 9 aa, Homo sapiens
  Table A; Target 74109; HLA-C*07:04; RLN2; ENSG00000107014; TAA
AADSSPSEL

SEQ ID NO: 74110 - protein, 9 aa, Homo sapiens
  Table A; Target 74110; HLA-C*12:03; RLN2; ENSG00000107014; TAA
AADSSPSEL

SEQ ID NO: 74111 - protein, 9 aa, Homo sapiens
  Table A; Target 74111; HLA-C*14:02; RLN2; ENSG00000107014; TAA
AADSSPSEL

SEQ ID NO: 74112 - protein, 9 aa, Homo sapiens
  Table A; Target 74112; HLA-C*16:02; RLN2; ENSG00000107014; TAA
AADSSPSEL

SEQ ID NO: 74113 - protein, 9 aa, Homo sapiens
  Table A; Target 74113; HLA-C*16:04; RLN2; ENSG00000107014; TAA
AADSSPSEL

SEQ ID NO: 74114 - protein, 10 aa, Homo sapiens
  Table A; Target 74114; HLA-A*01:01; RLN2; ENSG00000107014; TAA
AADSSPSELK

SEQ ID NO: 74115 - protein, 10 aa, Homo sapiens
  Table A; Target 74115; HLA-A*03:01; RLN2; ENSG00000107014; TAA
AADSSPSELK

SEQ ID NO: 74116 - protein, 10 aa, Homo sapiens
  Table A; Target 74116; HLA-A*03:02; RLN2; ENSG00000107014; TAA
AADSSPSELK

SEQ ID NO: 74117 - protein, 10 aa, Homo sapiens
  Table A; Target 74117; HLA-A*11:01; RLN2; ENSG00000107014; TAA
AADSSPSELK

SEQ ID NO: 74118 - protein, 10 aa, Homo sapiens
  Table A; Target 74118; HLA-C*05:01; RLN2; ENSG00000107014; TAA
AADSSPSELK

SEQ ID NO: 74119 - protein, 10 aa, Homo sapiens
  Table A; Target 74119; HLA-C*07:06; RLN2; ENSG00000107014; TAA
AADSSPSELK

SEQ ID NO: 74120 - protein, 11 aa, Homo sapiens
  Table A; Target 74120; HLA-A*01:01; RLN2; ENSG00000107014; TAA
AADSSPSELKY

SEQ ID NO: 74121 - protein, 11 aa, Homo sapiens
  Table A; Target 74121; HLA-A*29:02; RLN2; ENSG00000107014; TAA
AADSSPSELKY

SEQ ID NO: 74122 - protein, 11 aa, Homo sapiens
  Table A; Target 74122; HLA-A*30:02; RLN2; ENSG00000107014; TAA
AADSSPSELKY

SEQ ID NO: 74123 - protein, 11 aa, Homo sapiens
  Table A; Target 74123; HLA-B*27:05; RLN2; ENSG00000107014; TAA
AADSSPSELKY

SEQ ID NO: 74124 - protein, 11 aa, Homo sapiens
  Table A; Target 74124; HLA-B*35:01; RLN2; ENSG00000107014; TAA
AADSSPSELKY

SEQ ID NO: 74125 - protein, 11 aa, Homo sapiens
  Table A; Target 74125; HLA-B*55:01; RLN2; ENSG00000107014; TAA
AADSSPSELKY

SEQ ID NO: 74126 - protein, 11 aa, Homo sapiens
  Table A; Target 74126; HLA-C*03:03; RLN2; ENSG00000107014; TAA
AADSSPSELKY

SEQ ID NO: 74127 - protein, 11 aa, Homo sapiens
  Table A; Target 74127; HLA-C*05:01; RLN2; ENSG00000107014; TAA
AADSSPSELKY

SEQ ID NO: 74128 - protein, 11 aa, Homo sapiens
  Table A; Target 74128; HLA-C*16:04; RLN2; ENSG00000107014; TAA
AADSSPSELKY

SEQ ID NO: 74129 - protein, 8 aa, Homo sapiens
  Table A; Target 74129; HLA-B*37:01; RLN2; ENSG00000107014; TAA
ADSSPSEL

SEQ ID NO: 74130 - protein, 9 aa, Homo sapiens
  Table A; Target 74130; HLA-A*03:02; RLN2; ENSG00000107014; TAA
ADSSPSELK

SEQ ID NO: 74131 - protein, 9 aa, Homo sapiens
  Table A; Target 74131; HLA-A*11:01; RLN2; ENSG00000107014; TAA
ADSSPSELK

SEQ ID NO: 74132 - protein, 9 aa, Homo sapiens
  Table A; Target 74132; HLA-B*27:02; RLN2; ENSG00000107014; TAA
ADSSPSELK

SEQ ID NO: 74133 - protein, 10 aa, Homo sapiens
  Table A; Target 74133; HLA-A*11:01; RLN2; ENSG00000107014; TAA
ADSSPSELKY

SEQ ID NO: 74134 - protein, 10 aa, Homo sapiens
  Table A; Target 74134; HLA-A*29:02; RLN2; ENSG00000107014; TAA
ADSSPSELKY

SEQ ID NO: 74135 - protein, 10 aa, Homo sapiens
  Table A; Target 74135; HLA-A*30:02; RLN2; ENSG00000107014; TAA
ADSSPSELKY

SEQ ID NO: 74136 - protein, 10 aa, Homo sapiens
  Table A; Target 74136; HLA-B*27:02; RLN2; ENSG00000107014; TAA
ADSSPSELKY

SEQ ID NO: 74137 - protein, 10 aa, Homo sapiens
  Table A; Target 74137; HLA-B*37:01; RLN2; ENSG00000107014; TAA
ADSSPSELKY

SEQ ID NO: 74138 - protein, 10 aa, Homo sapiens
  Table A; Target 74138; HLA-B*44:02; RLN2; ENSG00000107014; TAA
ADSSPSELKY

SEQ ID NO: 74139 - protein, 10 aa, Homo sapiens
  Table A; Target 74139; HLA-B*44:03; RLN2; ENSG00000107014; TAA
ADSSPSELKY

SEQ ID NO: 74140 - protein, 10 aa, Homo sapiens
  Table A; Target 74140; HLA-C*07:01; RLN2; ENSG00000107014; TAA
ADSSPSELKY

SEQ ID NO: 74141 - protein, 10 aa, Homo sapiens
  Table A; Target 74141; HLA-C*07:02; RLN2; ENSG00000107014; TAA
ADSSPSELKY

SEQ ID NO: 74142 - protein, 10 aa, Homo sapiens
  Table A; Target 74142; HLA-C*12:03; RLN2; ENSG00000107014; TAA
ADSSPSELKY

SEQ ID NO: 74143 - protein, 10 aa, Homo sapiens
  Table A; Target 74143; HLA-C*16:01; RLN2; ENSG00000107014; TAA
ADSSPSELKY

SEQ ID NO: 74144 - protein, 10 aa, Homo sapiens
  Table A; Target 74144; HLA-C*16:02; RLN2; ENSG00000107014; TAA
ADSSPSELKY

SEQ ID NO: 74145 - protein, 10 aa, Homo sapiens
  Table A; Target 74145; HLA-C*16:04; RLN2; ENSG00000107014; TAA
ADSSPSELKY

SEQ ID NO: 74146 - protein, 11 aa, Homo sapiens
  Table A; Target 74146; HLA-B*44:02; RLN2; ENSG00000107014; TAA
ADSSPSELKYL

SEQ ID NO: 74147 - protein, 11 aa, Homo sapiens
  Table A; Target 74147; HLA-B*44:03; RLN2; ENSG00000107014; TAA
ADSSPSELKYL

SEQ ID NO: 74148 - protein, 11 aa, Homo sapiens
  Table A; Target 74148; HLA-C*16:02; RLN2; ENSG00000107014; TAA
ADSSPSELKYL

SEQ ID NO: 74149 - protein, 8 aa, Homo sapiens
  Table A; Target 74149; HLA-B*37:01; RLN2; ENSG00000107014; TAA
ADSWMEEV

SEQ ID NO: 74150 - protein, 9 aa, Homo sapiens
  Table A; Target 74150; HLA-A*02:07; RLN2; ENSG00000107014; TAA
ALPQLQQHV

SEQ ID NO: 74151 - protein, 9 aa, Homo sapiens
  Table A; Target 74151; HLA-B*13:02; RLN2; ENSG00000107014; TAA
ALPQLQQHV

SEQ ID NO: 74152 - protein, 11 aa, Homo sapiens
  Table A; Target 74152; HLA-A*02:07; RLN2; ENSG00000107014; TAA
ALPQLQQHVPV

SEQ ID NO: 74153 - protein, 9 aa, Homo sapiens
  Table A; Target 74153; HLA-A*23:01; RLN2; ENSG00000107014; TAA
ANLPQELKL

SEQ ID NO: 74154 - protein, 10 aa, Homo sapiens
  Table A; Target 74154; HLA-A*02:03; RLN2; ENSG00000107014; TAA
AVADSWMEEV

SEQ ID NO: 74155 - protein, 9 aa, Homo sapiens
  Table A; Target 74155; HLA-A*01:01; RLN2; ENSG00000107014; TAA
DSSLLFEEF

SEQ ID NO: 74156 - protein, 9 aa, Homo sapiens
  Table A; Target 74156; HLA-A*25:01; RLN2; ENSG00000107014; TAA
DSSLLFEEF

SEQ ID NO: 74157 - protein, 9 aa, Homo sapiens
  Table A; Target 74157; HLA-A*33:01; RLN2; ENSG00000107014; TAA
DSSLLFEEF

SEQ ID NO: 74158 - protein, 9 aa, Homo sapiens
  Table A; Target 74158; HLA-B*18:01; RLN2; ENSG00000107014; TAA
DSSLLFEEF

SEQ ID NO: 74159 - protein, 9 aa, Homo sapiens
  Table A; Target 74159; HLA-B*27:02; RLN2; ENSG00000107014; TAA
DSSLLFEEF

SEQ ID NO: 74160 - protein, 9 aa, Homo sapiens
  Table A; Target 74160; HLA-B*35:01; RLN2; ENSG00000107014; TAA
DSSLLFEEF

SEQ ID NO: 74161 - protein, 10 aa, Homo sapiens
  Table A; Target 74161; HLA-B*27:02; RLN2; ENSG00000107014; TAA
DSSLLFEEFK

SEQ ID NO: 74162 - protein, 9 aa, Homo sapiens
  Table A; Target 74162; HLA-A*01:01; RLN2; ENSG00000107014; TAA
DSSPSELKY

SEQ ID NO: 74163 - protein, 9 aa, Homo sapiens
  Table A; Target 74163; HLA-A*25:01; RLN2; ENSG00000107014; TAA
DSSPSELKY

SEQ ID NO: 74164 - protein, 9 aa, Homo sapiens
  Table A; Target 74164; HLA-A*26:01; RLN2; ENSG00000107014; TAA
DSSPSELKY

SEQ ID NO: 74165 - protein, 9 aa, Homo sapiens
  Table A; Target 74165; HLA-A*29:02; RLN2; ENSG00000107014; TAA
DSSPSELKY

SEQ ID NO: 74166 - protein, 9 aa, Homo sapiens
  Table A; Target 74166; HLA-A*30:02; RLN2; ENSG00000107014; TAA
DSSPSELKY

SEQ ID NO: 74167 - protein, 9 aa, Homo sapiens
  Table A; Target 74167; HLA-A*68:01; RLN2; ENSG00000107014; TAA
DSSPSELKY

SEQ ID NO: 74168 - protein, 9 aa, Homo sapiens
  Table A; Target 74168; HLA-B*18:01; RLN2; ENSG00000107014; TAA
DSSPSELKY

SEQ ID NO: 74169 - protein, 9 aa, Homo sapiens
  Table A; Target 74169; HLA-B*35:01; RLN2; ENSG00000107014; TAA
DSSPSELKY

SEQ ID NO: 74170 - protein, 9 aa, Homo sapiens
  Table A; Target 74170; HLA-B*39:01; RLN2; ENSG00000107014; TAA
DSSPSELKY

SEQ ID NO: 74171 - protein, 9 aa, Homo sapiens
  Table A; Target 74171; HLA-B*44:03; RLN2; ENSG00000107014; TAA
DSSPSELKY

SEQ ID NO: 74172 - protein, 9 aa, Homo sapiens
  Table A; Target 74172; HLA-B*58:01; RLN2; ENSG00000107014; TAA
DSSPSELKY

SEQ ID NO: 74173 - protein, 9 aa, Homo sapiens
  Table A; Target 74173; HLA-C*03:03; RLN2; ENSG00000107014; TAA
DSSPSELKY

SEQ ID NO: 74174 - protein, 9 aa, Homo sapiens
  Table A; Target 74174; HLA-C*07:06; RLN2; ENSG00000107014; TAA
DSSPSELKY

SEQ ID NO: 74175 - protein, 9 aa, Homo sapiens
  Table A; Target 74175; HLA-C*16:01; RLN2; ENSG00000107014; TAA
DSSPSELKY

SEQ ID NO: 74176 - protein, 9 aa, Homo sapiens
  Table A; Target 74176; HLA-C*16:02; RLN2; ENSG00000107014; TAA
DSSPSELKY

SEQ ID NO: 74177 - protein, 10 aa, Homo sapiens
  Table A; Target 74177; HLA-C*07:02; RLN2; ENSG00000107014; TAA
DSSPSELKYL

SEQ ID NO: 74178 - protein, 8 aa, Homo sapiens
  Table A; Target 74178; HLA-B*51:01; RLN2; ENSG00000107014; TAA
DSWMEEVI

SEQ ID NO: 74179 - protein, 8 aa, Homo sapiens
  Table A; Target 74179; HLA-C*07:01; RLN2; ENSG00000107014; TAA
DTETINMM

SEQ ID NO: 74180 - protein, 11 aa, Homo sapiens
  Table A; Target 74180; HLA-A*25:01; RLN2; ENSG00000107014; TAA
DTETINMMSEF

SEQ ID NO: 74181 - protein, 11 aa, Homo sapiens
  Table A; Target 74181; HLA-A*26:01; RLN2; ENSG00000107014; TAA
DTETINMMSEF

SEQ ID NO: 74182 - protein, 10 aa, Homo sapiens
  Table A; Target 74182; HLA-A*25:01; RLN2; ENSG00000107014; TAA
EAADSSPSEL

SEQ ID NO: 74183 - protein, 10 aa, Homo sapiens
  Table A; Target 74183; HLA-A*26:01; RLN2; ENSG00000107014; TAA
EAADSSPSEL

SEQ ID NO: 74184 - protein, 10 aa, Homo sapiens
  Table A; Target 74184; HLA-A*68:01; RLN2; ENSG00000107014; TAA
EAADSSPSEL

SEQ ID NO: 74185 - protein, 10 aa, Homo sapiens
  Table A; Target 74185; HLA-B*39:01; RLN2; ENSG00000107014; TAA
EAADSSPSEL

SEQ ID NO: 74186 - protein, 11 aa, Homo sapiens
  Table A; Target 74186; HLA-A*11:01; RLN2; ENSG00000107014; TAA
EAADSSPSELK

SEQ ID NO: 74187 - protein, 11 aa, Homo sapiens
  Table A; Target 74187; HLA-A*33:01; RLN2; ENSG00000107014; TAA
EAADSSPSELK

SEQ ID NO: 74188 - protein, 11 aa, Homo sapiens
  Table A; Target 74188; HLA-A*33:03; RLN2; ENSG00000107014; TAA
EAADSSPSELK

SEQ ID NO: 74189 - protein, 11 aa, Homo sapiens
  Table A; Target 74189; HLA-A*68:01; RLN2; ENSG00000107014; TAA
EAADSSPSELK

SEQ ID NO: 74190 - protein, 11 aa, Homo sapiens
  Table A; Target 74190; HLA-A*68:02; RLN2; ENSG00000107014; TAA
EAADSSPSELK

SEQ ID NO: 74191 - protein, 11 aa, Homo sapiens
  Table A; Target 74191; HLA-C*07:06; RLN2; ENSG00000107014; TAA
EAADSSPSELK

SEQ ID NO: 74192 - protein, 9 aa, Homo sapiens
  Table A; Target 74192; HLA-A*26:01; RLN2; ENSG00000107014; TAA
ELKLTLSEM

SEQ ID NO: 74193 - protein, 9 aa, Homo sapiens
  Table A; Target 74193; HLA-B*08:01; RLN2; ENSG00000107014; TAA
ELKLTLSEM

SEQ ID NO: 74194 - protein, 9 aa, Homo sapiens
  Table A; Target 74194; HLA-A*02:01; RLN2; ENSG00000107014; TAA
EMQPALPQL

SEQ ID NO: 74195 - protein, 9 aa, Homo sapiens
  Table A; Target 74195; HLA-A*02:03; RLN2; ENSG00000107014; TAA
EMQPALPQL

SEQ ID NO: 74196 - protein, 9 aa, Homo sapiens
  Table A; Target 74196; HLA-A*02:04; RLN2; ENSG00000107014; TAA
EMQPALPQL

SEQ ID NO: 74197 - protein, 9 aa, Homo sapiens
  Table A; Target 74197; HLA-A*02:07; RLN2; ENSG00000107014; TAA
EMQPALPQL

SEQ ID NO: 74198 - protein, 9 aa, Homo sapiens
  Table A; Target 74198; HLA-A*03:02; RLN2; ENSG00000107014; TAA
EMQPALPQL

SEQ ID NO: 74199 - protein, 9 aa, Homo sapiens
  Table A; Target 74199; HLA-A*23:01; RLN2; ENSG00000107014; TAA
EMQPALPQL

SEQ ID NO: 74200 - protein, 9 aa, Homo sapiens
  Table A; Target 74200; HLA-A*24:02; RLN2; ENSG00000107014; TAA
EMQPALPQL

SEQ ID NO: 74201 - protein, 9 aa, Homo sapiens
  Table A; Target 74201; HLA-A*25:01; RLN2; ENSG00000107014; TAA
EMQPALPQL

SEQ ID NO: 74202 - protein, 9 aa, Homo sapiens
  Table A; Target 74202; HLA-A*26:01; RLN2; ENSG00000107014; TAA
EMQPALPQL

SEQ ID NO: 74203 - protein, 9 aa, Homo sapiens
  Table A; Target 74203; HLA-A*31:01; RLN2; ENSG00000107014; TAA
EMQPALPQL

SEQ ID NO: 74204 - protein, 9 aa, Homo sapiens
  Table A; Target 74204; HLA-A*32:01; RLN2; ENSG00000107014; TAA
EMQPALPQL

SEQ ID NO: 74205 - protein, 9 aa, Homo sapiens
  Table A; Target 74205; HLA-A*33:01; RLN2; ENSG00000107014; TAA
EMQPALPQL

SEQ ID NO: 74206 - protein, 9 aa, Homo sapiens
  Table A; Target 74206; HLA-A*33:03; RLN2; ENSG00000107014; TAA
EMQPALPQL

SEQ ID NO: 74207 - protein, 9 aa, Homo sapiens
  Table A; Target 74207; HLA-A*68:02; RLN2; ENSG00000107014; TAA
EMQPALPQL

SEQ ID NO: 74208 - protein, 9 aa, Homo sapiens
  Table A; Target 74208; HLA-B*08:01; RLN2; ENSG00000107014; TAA
EMQPALPQL

SEQ ID NO: 74209 - protein, 9 aa, Homo sapiens
  Table A; Target 74209; HLA-B*38:01; RLN2; ENSG00000107014; TAA
EMQPALPQL

SEQ ID NO: 74210 - protein, 9 aa, Homo sapiens
  Table A; Target 74210; HLA-B*39:01; RLN2; ENSG00000107014; TAA
EMQPALPQL

SEQ ID NO: 74211 - protein, 9 aa, Homo sapiens
  Table A; Target 74211; HLA-B*40:02; RLN2; ENSG00000107014; TAA
EMQPALPQL

SEQ ID NO: 74212 - protein, 9 aa, Homo sapiens
  Table A; Target 74212; HLA-B*51:01; RLN2; ENSG00000107014; TAA
EMQPALPQL

SEQ ID NO: 74213 - protein, 9 aa, Homo sapiens
  Table A; Target 74213; HLA-B*55:01; RLN2; ENSG00000107014; TAA
EMQPALPQL

SEQ ID NO: 74214 - protein, 9 aa, Homo sapiens
  Table A; Target 74214; HLA-C*04:01; RLN2; ENSG00000107014; TAA
EMQPALPQL

SEQ ID NO: 74215 - protein, 9 aa, Homo sapiens
  Table A; Target 74215; HLA-C*06:02; RLN2; ENSG00000107014; TAA
EMQPALPQL

SEQ ID NO: 74216 - protein, 9 aa, Homo sapiens
  Table A; Target 74216; HLA-C*07:04; RLN2; ENSG00000107014; TAA
EMQPALPQL

SEQ ID NO: 74217 - protein, 9 aa, Homo sapiens
  Table A; Target 74217; HLA-C*14:02; RLN2; ENSG00000107014; TAA
EMQPALPQL

SEQ ID NO: 74218 - protein, 9 aa, Homo sapiens
  Table A; Target 74218; HLA-A*25:01; RLN2; ENSG00000107014; TAA
ETINMMSEF

SEQ ID NO: 74219 - protein, 9 aa, Homo sapiens
  Table A; Target 74219; HLA-A*26:01; RLN2; ENSG00000107014; TAA
ETINMMSEF

SEQ ID NO: 74220 - protein, 9 aa, Homo sapiens
  Table A; Target 74220; HLA-A*33:01; RLN2; ENSG00000107014; TAA
ETINMMSEF

SEQ ID NO: 74221 - protein, 9 aa, Homo sapiens
  Table A; Target 74221; HLA-A*33:03; RLN2; ENSG00000107014; TAA
ETINMMSEF

SEQ ID NO: 74222 - protein, 9 aa, Homo sapiens
  Table A; Target 74222; HLA-A*68:01; RLN2; ENSG00000107014; TAA
ETINMMSEF

SEQ ID NO: 74223 - protein, 9 aa, Homo sapiens
  Table A; Target 74223; HLA-A*68:02; RLN2; ENSG00000107014; TAA
ETINMMSEF

SEQ ID NO: 74224 - protein, 9 aa, Homo sapiens
  Table A; Target 74224; HLA-B*18:01; RLN2; ENSG00000107014; TAA
ETINMMSEF

SEQ ID NO: 74225 - protein, 9 aa, Homo sapiens
  Table A; Target 74225; HLA-B*44:03; RLN2; ENSG00000107014; TAA
ETINMMSEF

SEQ ID NO: 74226 - protein, 9 aa, Homo sapiens
  Table A; Target 74226; HLA-B*46:01; RLN2; ENSG00000107014; TAA
ETINMMSEF

SEQ ID NO: 74227 - protein, 9 aa, Homo sapiens
  Table A; Target 74227; HLA-B*58:01; RLN2; ENSG00000107014; TAA
ETINMMSEF

SEQ ID NO: 74228 - protein, 9 aa, Homo sapiens
  Table A; Target 74228; HLA-C*07:06; RLN2; ENSG00000107014; TAA
ETINMMSEF

SEQ ID NO: 74229 - protein, 10 aa, Homo sapiens
  Table A; Target 74229; HLA-A*26:01; RLN2; ENSG00000107014; TAA
ETINMMSEFV

SEQ ID NO: 74230 - protein, 10 aa, Homo sapiens
  Table A; Target 74230; HLA-A*68:02; RLN2; ENSG00000107014; TAA
ETINMMSEFV

SEQ ID NO: 74231 - protein, 8 aa, Homo sapiens
  Table A; Target 74231; HLA-A*33:03; RLN2; ENSG00000107014; TAA
EVIKLCGR

SEQ ID NO: 74232 - protein, 9 aa, Homo sapiens
  Table A; Target 74232; HLA-A*02:03; RLN2; ENSG00000107014; TAA
FINKDTETI

SEQ ID NO: 74233 - protein, 9 aa, Homo sapiens
  Table A; Target 74233; HLA-A*02:07; RLN2; ENSG00000107014; TAA
FINKDTETI

SEQ ID NO: 74234 - protein, 9 aa, Homo sapiens
  Table A; Target 74234; HLA-A*25:01; RLN2; ENSG00000107014; TAA
FINKDTETI

SEQ ID NO: 74235 - protein, 9 aa, Homo sapiens
  Table A; Target 74235; HLA-B*35:03; RLN2; ENSG00000107014; TAA
FINKDTETI

SEQ ID NO: 74236 - protein, 9 aa, Homo sapiens
  Table A; Target 74236; HLA-B*51:01; RLN2; ENSG00000107014; TAA
FINKDTETI

SEQ ID NO: 74237 - protein, 9 aa, Homo sapiens
  Table A; Target 74237; HLA-B*58:01; RLN2; ENSG00000107014; TAA
FINKDTETI

SEQ ID NO: 74238 - protein, 9 aa, Homo sapiens
  Table A; Target 74238; HLA-A*25:01; RLN2; ENSG00000107014; TAA
FSRAVADSW

SEQ ID NO: 74239 - protein, 9 aa, Homo sapiens
  Table A; Target 74239; HLA-A*32:01; RLN2; ENSG00000107014; TAA
FSRAVADSW

SEQ ID NO: 74240 - protein, 9 aa, Homo sapiens
  Table A; Target 74240; HLA-B*57:01; RLN2; ENSG00000107014; TAA
FSRAVADSW

SEQ ID NO: 74241 - protein, 9 aa, Homo sapiens
  Table A; Target 74241; HLA-B*58:01; RLN2; ENSG00000107014; TAA
FSRAVADSW

SEQ ID NO: 74242 - protein, 9 aa, Homo sapiens
  Table A; Target 74242; HLA-A*01:01; RLN2; ENSG00000107014; TAA
FVANLPQEL

SEQ ID NO: 74243 - protein, 9 aa, Homo sapiens
  Table A; Target 74243; HLA-A*02:01; RLN2; ENSG00000107014; TAA
FVANLPQEL

SEQ ID NO: 74244 - protein, 9 aa, Homo sapiens
  Table A; Target 74244; HLA-A*02:03; RLN2; ENSG00000107014; TAA
FVANLPQEL

SEQ ID NO: 74245 - protein, 9 aa, Homo sapiens
  Table A; Target 74245; HLA-A*02:04; RLN2; ENSG00000107014; TAA
FVANLPQEL

SEQ ID NO: 74246 - protein, 9 aa, Homo sapiens
  Table A; Target 74246; HLA-A*02:07; RLN2; ENSG00000107014; TAA
FVANLPQEL

SEQ ID NO: 74247 - protein, 9 aa, Homo sapiens
  Table A; Target 74247; HLA-A*23:01; RLN2; ENSG00000107014; TAA
FVANLPQEL

SEQ ID NO: 74248 - protein, 9 aa, Homo sapiens
  Table A; Target 74248; HLA-A*24:02; RLN2; ENSG00000107014; TAA
FVANLPQEL

SEQ ID NO: 74249 - protein, 9 aa, Homo sapiens
  Table A; Target 74249; HLA-A*25:01; RLN2; ENSG00000107014; TAA
FVANLPQEL

SEQ ID NO: 74250 - protein, 9 aa, Homo sapiens
  Table A; Target 74250; HLA-A*26:01; RLN2; ENSG00000107014; TAA
FVANLPQEL

SEQ ID NO: 74251 - protein, 9 aa, Homo sapiens
  Table A; Target 74251; HLA-A*29:02; RLN2; ENSG00000107014; TAA
FVANLPQEL

SEQ ID NO: 74252 - protein, 9 aa, Homo sapiens
  Table A; Target 74252; HLA-A*30:01; RLN2; ENSG00000107014; TAA
FVANLPQEL

SEQ ID NO: 74253 - protein, 9 aa, Homo sapiens
  Table A; Target 74253; HLA-A*32:01; RLN2; ENSG00000107014; TAA
FVANLPQEL

SEQ ID NO: 74254 - protein, 9 aa, Homo sapiens
  Table A; Target 74254; HLA-A*33:03; RLN2; ENSG00000107014; TAA
FVANLPQEL

SEQ ID NO: 74255 - protein, 9 aa, Homo sapiens
  Table A; Target 74255; HLA-A*68:01; RLN2; ENSG00000107014; TAA
FVANLPQEL

SEQ ID NO: 74256 - protein, 9 aa, Homo sapiens
  Table A; Target 74256; HLA-A*68:02; RLN2; ENSG00000107014; TAA
FVANLPQEL

SEQ ID NO: 74257 - protein, 9 aa, Homo sapiens
  Table A; Target 74257; HLA-B*13:02; RLN2; ENSG00000107014; TAA
FVANLPQEL

SEQ ID NO: 74258 - protein, 9 aa, Homo sapiens
  Table A; Target 74258; HLA-B*15:01; RLN2; ENSG00000107014; TAA
FVANLPQEL

SEQ ID NO: 74259 - protein, 9 aa, Homo sapiens
  Table A; Target 74259; HLA-B*15:03; RLN2; ENSG00000107014; TAA
FVANLPQEL

SEQ ID NO: 74260 - protein, 9 aa, Homo sapiens
  Table A; Target 74260; HLA-B*27:05; RLN2; ENSG00000107014; TAA
FVANLPQEL

SEQ ID NO: 74261 - protein, 9 aa, Homo sapiens
  Table A; Target 74261; HLA-B*35:01; RLN2; ENSG00000107014; TAA
FVANLPQEL

SEQ ID NO: 74262 - protein, 9 aa, Homo sapiens
  Table A; Target 74262; HLA-B*35:03; RLN2; ENSG00000107014; TAA
FVANLPQEL

SEQ ID NO: 74263 - protein, 9 aa, Homo sapiens
  Table A; Target 74263; HLA-B*38:01; RLN2; ENSG00000107014; TAA
FVANLPQEL

SEQ ID NO: 74264 - protein, 9 aa, Homo sapiens
  Table A; Target 74264; HLA-B*39:01; RLN2; ENSG00000107014; TAA
FVANLPQEL

SEQ ID NO: 74265 - protein, 9 aa, Homo sapiens
  Table A; Target 74265; HLA-B*40:01; RLN2; ENSG00000107014; TAA
FVANLPQEL

SEQ ID NO: 74266 - protein, 9 aa, Homo sapiens
  Table A; Target 74266; HLA-B*40:02; RLN2; ENSG00000107014; TAA
FVANLPQEL

SEQ ID NO: 74267 - protein, 9 aa, Homo sapiens
  Table A; Target 74267; HLA-B*46:01; RLN2; ENSG00000107014; TAA
FVANLPQEL

SEQ ID NO: 74268 - protein, 9 aa, Homo sapiens
  Table A; Target 74268; HLA-B*54:01; RLN2; ENSG00000107014; TAA
FVANLPQEL

SEQ ID NO: 74269 - protein, 9 aa, Homo sapiens
  Table A; Target 74269; HLA-B*55:01; RLN2; ENSG00000107014; TAA
FVANLPQEL

SEQ ID NO: 74270 - protein, 9 aa, Homo sapiens
  Table A; Target 74270; HLA-B*58:01; RLN2; ENSG00000107014; TAA
FVANLPQEL

SEQ ID NO: 74271 - protein, 9 aa, Homo sapiens
  Table A; Target 74271; HLA-C*01:02; RLN2; ENSG00000107014; TAA
FVANLPQEL

SEQ ID NO: 74272 - protein, 9 aa, Homo sapiens
  Table A; Target 74272; HLA-C*02:02; RLN2; ENSG00000107014; TAA
FVANLPQEL

SEQ ID NO: 74273 - protein, 9 aa, Homo sapiens
  Table A; Target 74273; HLA-C*03:03; RLN2; ENSG00000107014; TAA
FVANLPQEL

SEQ ID NO: 74274 - protein, 9 aa, Homo sapiens
  Table A; Target 74274; HLA-C*03:04; RLN2; ENSG00000107014; TAA
FVANLPQEL

SEQ ID NO: 74275 - protein, 9 aa, Homo sapiens
  Table A; Target 74275; HLA-C*05:01; RLN2; ENSG00000107014; TAA
FVANLPQEL

SEQ ID NO: 74276 - protein, 9 aa, Homo sapiens
  Table A; Target 74276; HLA-C*06:02; RLN2; ENSG00000107014; TAA
FVANLPQEL

SEQ ID NO: 74277 - protein, 9 aa, Homo sapiens
  Table A; Target 74277; HLA-C*07:02; RLN2; ENSG00000107014; TAA
FVANLPQEL

SEQ ID NO: 74278 - protein, 9 aa, Homo sapiens
  Table A; Target 74278; HLA-C*07:04; RLN2; ENSG00000107014; TAA
FVANLPQEL

SEQ ID NO: 74279 - protein, 9 aa, Homo sapiens
  Table A; Target 74279; HLA-C*07:06; RLN2; ENSG00000107014; TAA
FVANLPQEL

SEQ ID NO: 74280 - protein, 9 aa, Homo sapiens
  Table A; Target 74280; HLA-C*12:03; RLN2; ENSG00000107014; TAA
FVANLPQEL

SEQ ID NO: 74281 - protein, 9 aa, Homo sapiens
  Table A; Target 74281; HLA-C*14:02; RLN2; ENSG00000107014; TAA
FVANLPQEL

SEQ ID NO: 74282 - protein, 9 aa, Homo sapiens
  Table A; Target 74282; HLA-C*16:01; RLN2; ENSG00000107014; TAA
FVANLPQEL

SEQ ID NO: 74283 - protein, 9 aa, Homo sapiens
  Table A; Target 74283; HLA-C*16:02; RLN2; ENSG00000107014; TAA
FVANLPQEL

SEQ ID NO: 74284 - protein, 9 aa, Homo sapiens
  Table A; Target 74284; HLA-C*16:04; RLN2; ENSG00000107014; TAA
FVANLPQEL

SEQ ID NO: 74285 - protein, 10 aa, Homo sapiens
  Table A; Target 74285; HLA-A*03:02; RLN2; ENSG00000107014; TAA
FVANLPQELK

SEQ ID NO: 74286 - protein, 10 aa, Homo sapiens
  Table A; Target 74286; HLA-A*11:01; RLN2; ENSG00000107014; TAA
FVANLPQELK

SEQ ID NO: 74287 - protein, 10 aa, Homo sapiens
  Table A; Target 74287; HLA-A*68:01; RLN2; ENSG00000107014; TAA
FVANLPQELK

SEQ ID NO: 74288 - protein, 10 aa, Homo sapiens
  Table A; Target 74288; HLA-A*68:02; RLN2; ENSG00000107014; TAA
FVANLPQELK

SEQ ID NO: 74289 - protein, 11 aa, Homo sapiens
  Table A; Target 74289; HLA-A*02:01; RLN2; ENSG00000107014; TAA
FVANLPQELKL

SEQ ID NO: 74290 - protein, 11 aa, Homo sapiens
  Table A; Target 74290; HLA-A*02:04; RLN2; ENSG00000107014; TAA
FVANLPQELKL

SEQ ID NO: 74291 - protein, 11 aa, Homo sapiens
  Table A; Target 74291; HLA-A*02:07; RLN2; ENSG00000107014; TAA
FVANLPQELKL

SEQ ID NO: 74292 - protein, 11 aa, Homo sapiens
  Table A; Target 74292; HLA-A*29:02; RLN2; ENSG00000107014; TAA
FVANLPQELKL

SEQ ID NO: 74293 - protein, 11 aa, Homo sapiens
  Table A; Target 74293; HLA-A*68:02; RLN2; ENSG00000107014; TAA
FVANLPQELKL

SEQ ID NO: 74294 - protein, 8 aa, Homo sapiens
  Table A; Target 74294; HLA-A*03:01; RLN2; ENSG00000107014; TAA
GLDTHSRK

SEQ ID NO: 74295 - protein, 9 aa, Homo sapiens
  Table A; Target 74295; HLA-A*03:01; RLN2; ENSG00000107014; TAA
GLDTHSRKK

SEQ ID NO: 74296 - protein, 9 aa, Homo sapiens
  Table A; Target 74296; HLA-A*03:02; RLN2; ENSG00000107014; TAA
GLDTHSRKK

SEQ ID NO: 74297 - protein, 9 aa, Homo sapiens
  Table A; Target 74297; HLA-A*02:04; RLN2; ENSG00000107014; TAA
HLLGVCLLL

SEQ ID NO: 74298 - protein, 10 aa, Homo sapiens
  Table A; Target 74298; HLA-C*01:02; RLN2; ENSG00000107014; TAA
HVPVLKDSSL

SEQ ID NO: 74299 - protein, 8 aa, Homo sapiens
  Table A; Target 74299; HLA-B*37:01; RLN2; ENSG00000107014; TAA
KDTETINM

SEQ ID NO: 74300 - protein, 9 aa, Homo sapiens
  Table A; Target 74300; HLA-A*30:01; RLN2; ENSG00000107014; TAA
KDTETINMM

SEQ ID NO: 74301 - protein, 9 aa, Homo sapiens
  Table A; Target 74301; HLA-B*37:01; RLN2; ENSG00000107014; TAA
KDTETINMM

SEQ ID NO: 74302 - protein, 9 aa, Homo sapiens
  Table A; Target 74302; HLA-C*16:02; RLN2; ENSG00000107014; TAA
KDTETINMM

SEQ ID NO: 74303 - protein, 10 aa, Homo sapiens
  Table A; Target 74303; HLA-A*31:01; RLN2; ENSG00000107014; TAA
KYLGLDTHSR

SEQ ID NO: 74304 - protein, 10 aa, Homo sapiens
  Table A; Target 74304; HLA-A*33:01; RLN2; ENSG00000107014; TAA
KYLGLDTHSR

SEQ ID NO: 74305 - protein, 10 aa, Homo sapiens
  Table A; Target 74305; HLA-A*33:03; RLN2; ENSG00000107014; TAA
KYLGLDTHSR

SEQ ID NO: 74306 - protein, 11 aa, Homo sapiens
  Table A; Target 74306; HLA-A*31:01; RLN2; ENSG00000107014; TAA
KYLGLDTHSRK

SEQ ID NO: 74307 - protein, 9 aa, Homo sapiens
  Table A; Target 74307; HLA-B*27:05; RLN2; ENSG00000107014; TAA
LGLDTHSRK

SEQ ID NO: 74308 - protein, 9 aa, Homo sapiens
  Table A; Target 74308; HLA-A*02:01; RLN2; ENSG00000107014; TAA
LLFEEFKKL

SEQ ID NO: 74309 - protein, 9 aa, Homo sapiens
  Table A; Target 74309; HLA-A*02:03; RLN2; ENSG00000107014; TAA
LLFEEFKKL

SEQ ID NO: 74310 - protein, 9 aa, Homo sapiens
  Table A; Target 74310; HLA-A*02:04; RLN2; ENSG00000107014; TAA
LLFEEFKKL

SEQ ID NO: 74311 - protein, 9 aa, Homo sapiens
  Table A; Target 74311; HLA-A*02:07; RLN2; ENSG00000107014; TAA
LLFEEFKKL

SEQ ID NO: 74312 - protein, 10 aa, Homo sapiens
  Table A; Target 74312; HLA-A*02:01; RLN2; ENSG00000107014; TAA
LLFEEFKKLI

SEQ ID NO: 74313 - protein, 10 aa, Homo sapiens
  Table A; Target 74313; HLA-A*02:03; RLN2; ENSG00000107014; TAA
LLFEEFKKLI

SEQ ID NO: 74314 - protein, 10 aa, Homo sapiens
  Table A; Target 74314; HLA-A*02:04; RLN2; ENSG00000107014; TAA
LLFEEFKKLI

SEQ ID NO: 74315 - protein, 9 aa, Homo sapiens
  Table A; Target 74315; HLA-A*02:01; RLN2; ENSG00000107014; TAA
LPQELKLTL

SEQ ID NO: 74316 - protein, 9 aa, Homo sapiens
  Table A; Target 74316; HLA-A*23:01; RLN2; ENSG00000107014; TAA
LPQELKLTL

SEQ ID NO: 74317 - protein, 9 aa, Homo sapiens
  Table A; Target 74317; HLA-B*07:02; RLN2; ENSG00000107014; TAA
LPQELKLTL

SEQ ID NO: 74318 - protein, 9 aa, Homo sapiens
  Table A; Target 74318; HLA-B*08:01; RLN2; ENSG00000107014; TAA
LPQELKLTL

SEQ ID NO: 74319 - protein, 9 aa, Homo sapiens
  Table A; Target 74319; HLA-B*18:01; RLN2; ENSG00000107014; TAA
LPQELKLTL

SEQ ID NO: 74320 - protein, 9 aa, Homo sapiens
  Table A; Target 74320; HLA-B*35:01; RLN2; ENSG00000107014; TAA
LPQELKLTL

SEQ ID NO: 74321 - protein, 9 aa, Homo sapiens
  Table A; Target 74321; HLA-B*35:03; RLN2; ENSG00000107014; TAA
LPQELKLTL

SEQ ID NO: 74322 - protein, 9 aa, Homo sapiens
  Table A; Target 74322; HLA-B*51:01; RLN2; ENSG00000107014; TAA
LPQELKLTL

SEQ ID NO: 74323 - protein, 9 aa, Homo sapiens
  Table A; Target 74323; HLA-B*54:01; RLN2; ENSG00000107014; TAA
LPQELKLTL

SEQ ID NO: 74324 - protein, 9 aa, Homo sapiens
  Table A; Target 74324; HLA-B*55:01; RLN2; ENSG00000107014; TAA
LPQELKLTL

SEQ ID NO: 74325 - protein, 9 aa, Homo sapiens
  Table A; Target 74325; HLA-B*56:01; RLN2; ENSG00000107014; TAA
LPQELKLTL

SEQ ID NO: 74326 - protein, 9 aa, Homo sapiens
  Table A; Target 74326; HLA-C*03:03; RLN2; ENSG00000107014; TAA
LPQELKLTL

SEQ ID NO: 74327 - protein, 9 aa, Homo sapiens
  Table A; Target 74327; HLA-C*03:04; RLN2; ENSG00000107014; TAA
LPQELKLTL

SEQ ID NO: 74328 - protein, 9 aa, Homo sapiens
  Table A; Target 74328; HLA-C*04:01; RLN2; ENSG00000107014; TAA
LPQELKLTL

SEQ ID NO: 74329 - protein, 9 aa, Homo sapiens
  Table A; Target 74329; HLA-C*07:02; RLN2; ENSG00000107014; TAA
LPQELKLTL

SEQ ID NO: 74330 - protein, 9 aa, Homo sapiens
  Table A; Target 74330; HLA-C*14:02; RLN2; ENSG00000107014; TAA
LPQELKLTL

SEQ ID NO: 74331 - protein, 9 aa, Homo sapiens
  Table A; Target 74331; HLA-C*16:01; RLN2; ENSG00000107014; TAA
LPQELKLTL

SEQ ID NO: 74332 - protein, 9 aa, Homo sapiens
  Table A; Target 74332; HLA-C*16:02; RLN2; ENSG00000107014; TAA
LPQELKLTL

SEQ ID NO: 74333 - protein, 8 aa, Homo sapiens
  Table A; Target 74333; HLA-B*51:01; RLN2; ENSG00000107014; TAA
LPQLQQHV

SEQ ID NO: 74334 - protein, 8 aa, Homo sapiens
  Table A; Target 74334; HLA-B*56:01; RLN2; ENSG00000107014; TAA
LPQLQQHV

SEQ ID NO: 74335 - protein, 9 aa, Homo sapiens
  Table A; Target 74335; HLA-B*54:01; RLN2; ENSG00000107014; TAA
LPQLQQHVP

SEQ ID NO: 74336 - protein, 9 aa, Homo sapiens
  Table A; Target 74336; HLA-B*56:01; RLN2; ENSG00000107014; TAA
LPQLQQHVP

SEQ ID NO: 74337 - protein, 10 aa, Homo sapiens
  Table A; Target 74337; HLA-B*54:01; RLN2; ENSG00000107014; TAA
LPQLQQHVPV

SEQ ID NO: 74338 - protein, 10 aa, Homo sapiens
  Table A; Target 74338; HLA-B*56:01; RLN2; ENSG00000107014; TAA
LPQLQQHVPV

SEQ ID NO: 74339 - protein, 11 aa, Homo sapiens
  Table A; Target 74339; HLA-B*07:02; RLN2; ENSG00000107014; TAA
LPQLQQHVPVL

SEQ ID NO: 74340 - protein, 11 aa, Homo sapiens
  Table A; Target 74340; HLA-C*07:02; RLN2; ENSG00000107014; TAA
LPQLQQHVPVL

SEQ ID NO: 74341 - protein, 8 aa, Homo sapiens
  Table A; Target 74341; HLA-B*15:01; RLN2; ENSG00000107014; TAA
LQQHVPVL

SEQ ID NO: 74342 - protein, 8 aa, Homo sapiens
  Table A; Target 74342; HLA-C*07:04; RLN2; ENSG00000107014; TAA
LQQHVPVL

SEQ ID NO: 74343 - protein, 9 aa, Homo sapiens
  Table A; Target 74343; HLA-A*03:02; RLN2; ENSG00000107014; TAA
LQQHVPVLK

SEQ ID NO: 74344 - protein, 9 aa, Homo sapiens
  Table A; Target 74344; HLA-A*11:01; RLN2; ENSG00000107014; TAA
LQQHVPVLK

SEQ ID NO: 74345 - protein, 8 aa, Homo sapiens
  Table A; Target 74345; HLA-C*03:04; RLN2; ENSG00000107014; TAA
LSEMQPAL

SEQ ID NO: 74346 - protein, 9 aa, Homo sapiens
  Table A; Target 74346; HLA-A*01:01; RLN2; ENSG00000107014; TAA
LSEMQPALP

SEQ ID NO: 74347 - protein, 9 aa, Homo sapiens
  Table A; Target 74347; HLA-B*49:01; RLN2; ENSG00000107014; TAA
MEEVIKLCG

SEQ ID NO: 74348 - protein, 9 aa, Homo sapiens
  Table A; Target 74348; HLA-A*02:01; RLN2; ENSG00000107014; TAA
MMSEFVANL

SEQ ID NO: 74349 - protein, 9 aa, Homo sapiens
  Table A; Target 74349; HLA-A*02:03; RLN2; ENSG00000107014; TAA
MMSEFVANL

SEQ ID NO: 74350 - protein, 9 aa, Homo sapiens
  Table A; Target 74350; HLA-A*02:04; RLN2; ENSG00000107014; TAA
MMSEFVANL

SEQ ID NO: 74351 - protein, 9 aa, Homo sapiens
  Table A; Target 74351; HLA-A*02:07; RLN2; ENSG00000107014; TAA
MMSEFVANL

SEQ ID NO: 74352 - protein, 9 aa, Homo sapiens
  Table A; Target 74352; HLA-A*23:01; RLN2; ENSG00000107014; TAA
MMSEFVANL

SEQ ID NO: 74353 - protein, 9 aa, Homo sapiens
  Table A; Target 74353; HLA-A*26:01; RLN2; ENSG00000107014; TAA
MMSEFVANL

SEQ ID NO: 74354 - protein, 9 aa, Homo sapiens
  Table A; Target 74354; HLA-A*32:01; RLN2; ENSG00000107014; TAA
MMSEFVANL

SEQ ID NO: 74355 - protein, 9 aa, Homo sapiens
  Table A; Target 74355; HLA-A*68:02; RLN2; ENSG00000107014; TAA
MMSEFVANL

SEQ ID NO: 74356 - protein, 9 aa, Homo sapiens
  Table A; Target 74356; HLA-B*13:02; RLN2; ENSG00000107014; TAA
MMSEFVANL

SEQ ID NO: 74357 - protein, 9 aa, Homo sapiens
  Table A; Target 74357; HLA-B*27:05; RLN2; ENSG00000107014; TAA
MMSEFVANL

SEQ ID NO: 74358 - protein, 9 aa, Homo sapiens
  Table A; Target 74358; HLA-B*35:03; RLN2; ENSG00000107014; TAA
MMSEFVANL

SEQ ID NO: 74359 - protein, 9 aa, Homo sapiens
  Table A; Target 74359; HLA-B*37:01; RLN2; ENSG00000107014; TAA
MMSEFVANL

SEQ ID NO: 74360 - protein, 9 aa, Homo sapiens
  Table A; Target 74360; HLA-B*38:01; RLN2; ENSG00000107014; TAA
MMSEFVANL

SEQ ID NO: 74361 - protein, 9 aa, Homo sapiens
  Table A; Target 74361; HLA-B*55:01; RLN2; ENSG00000107014; TAA
MMSEFVANL

SEQ ID NO: 74362 - protein, 9 aa, Homo sapiens
  Table A; Target 74362; HLA-C*01:02; RLN2; ENSG00000107014; TAA
MMSEFVANL

SEQ ID NO: 74363 - protein, 9 aa, Homo sapiens
  Table A; Target 74363; HLA-C*02:02; RLN2; ENSG00000107014; TAA
MMSEFVANL

SEQ ID NO: 74364 - protein, 9 aa, Homo sapiens
  Table A; Target 74364; HLA-C*06:02; RLN2; ENSG00000107014; TAA
MMSEFVANL

SEQ ID NO: 74365 - protein, 9 aa, Homo sapiens
  Table A; Target 74365; HLA-C*07:04; RLN2; ENSG00000107014; TAA
MMSEFVANL

SEQ ID NO: 74366 - protein, 9 aa, Homo sapiens
  Table A; Target 74366; HLA-C*12:03; RLN2; ENSG00000107014; TAA
MMSEFVANL

SEQ ID NO: 74367 - protein, 9 aa, Homo sapiens
  Table A; Target 74367; HLA-C*14:02; RLN2; ENSG00000107014; TAA
MMSEFVANL

SEQ ID NO: 74368 - protein, 9 aa, Homo sapiens
  Table A; Target 74368; HLA-C*16:02; RLN2; ENSG00000107014; TAA
MMSEFVANL

SEQ ID NO: 74369 - protein, 8 aa, Homo sapiens
  Table A; Target 74369; HLA-A*02:07; RLN2; ENSG00000107014; TAA
MQPALPQL

SEQ ID NO: 74370 - protein, 8 aa, Homo sapiens
  Table A; Target 74370; HLA-B*13:02; RLN2; ENSG00000107014; TAA
MQPALPQL

SEQ ID NO: 74371 - protein, 8 aa, Homo sapiens
  Table A; Target 74371; HLA-B*40:02; RLN2; ENSG00000107014; TAA
MQPALPQL

SEQ ID NO: 74372 - protein, 8 aa, Homo sapiens
  Table A; Target 74372; HLA-B*51:01; RLN2; ENSG00000107014; TAA
MQPALPQL

SEQ ID NO: 74373 - protein, 8 aa, Homo sapiens
  Table A; Target 74373; HLA-C*06:02; RLN2; ENSG00000107014; TAA
MQPALPQL

SEQ ID NO: 74374 - protein, 8 aa, Homo sapiens
  Table A; Target 74374; HLA-C*07:01; RLN2; ENSG00000107014; TAA
MQPALPQL

SEQ ID NO: 74375 - protein, 8 aa, Homo sapiens
  Table A; Target 74375; HLA-C*07:04; RLN2; ENSG00000107014; TAA
MQPALPQL

SEQ ID NO: 74376 - protein, 8 aa, Homo sapiens
  Table A; Target 74376; HLA-C*16:02; RLN2; ENSG00000107014; TAA
MQPALPQL

SEQ ID NO: 74377 - protein, 9 aa, Homo sapiens
  Table A; Target 74377; HLA-B*38:01; RLN2; ENSG00000107014; TAA
NKDTETINM

SEQ ID NO: 74378 - protein, 10 aa, Homo sapiens
  Table A; Target 74378; HLA-A*02:07; RLN2; ENSG00000107014; TAA
NLPQELKLTL

SEQ ID NO: 74379 - protein, 10 aa, Homo sapiens
  Table A; Target 74379; HLA-A*02:04; RLN2; ENSG00000107014; TAA
NMMSEFVANL

SEQ ID NO: 74380 - protein, 11 aa, Homo sapiens
  Table A; Target 74380; HLA-A*25:01; RLN2; ENSG00000107014; TAA
NQFSRAVADSW

SEQ ID NO: 74381 - protein, 11 aa, Homo sapiens
  Table A; Target 74381; HLA-B*44:02; RLN2; ENSG00000107014; TAA
NQFSRAVADSW

SEQ ID NO: 74382 - protein, 11 aa, Homo sapiens
  Table A; Target 74382; HLA-C*16:04; RLN2; ENSG00000107014; TAA
NQFSRAVADSW

SEQ ID NO: 74383 - protein, 10 aa, Homo sapiens
  Table A; Target 74383; HLA-A*30:01; RLN2; ENSG00000107014; TAA
QELKLTLSEM

SEQ ID NO: 74384 - protein, 10 aa, Homo sapiens
  Table A; Target 74384; HLA-B*40:01; RLN2; ENSG00000107014; TAA
QELKLTLSEM

SEQ ID NO: 74385 - protein, 10 aa, Homo sapiens
  Table A; Target 74385; HLA-B*44:03; RLN2; ENSG00000107014; TAA
QELKLTLSEM

SEQ ID NO: 74386 - protein, 11 aa, Homo sapiens
  Table A; Target 74386; HLA-B*38:01; RLN2; ENSG00000107014; TAA
QHVPVLKDSSL

SEQ ID NO: 74387 - protein, 9 aa, Homo sapiens
  Table A; Target 74387; HLA-A*02:01; RLN2; ENSG00000107014; TAA
QLQQHVPVL

SEQ ID NO: 74388 - protein, 9 aa, Homo sapiens
  Table A; Target 74388; HLA-A*02:03; RLN2; ENSG00000107014; TAA
QLQQHVPVL

SEQ ID NO: 74389 - protein, 9 aa, Homo sapiens
  Table A; Target 74389; HLA-A*02:04; RLN2; ENSG00000107014; TAA
QLQQHVPVL

SEQ ID NO: 74390 - protein, 9 aa, Homo sapiens
  Table A; Target 74390; HLA-A*02:07; RLN2; ENSG00000107014; TAA
QLQQHVPVL

SEQ ID NO: 74391 - protein, 9 aa, Homo sapiens
  Table A; Target 74391; HLA-A*23:01; RLN2; ENSG00000107014; TAA
QLQQHVPVL

SEQ ID NO: 74392 - protein, 9 aa, Homo sapiens
  Table A; Target 74392; HLA-A*24:02; RLN2; ENSG00000107014; TAA
QLQQHVPVL

SEQ ID NO: 74393 - protein, 9 aa, Homo sapiens
  Table A; Target 74393; HLA-A*32:01; RLN2; ENSG00000107014; TAA
QLQQHVPVL

SEQ ID NO: 74394 - protein, 9 aa, Homo sapiens
  Table A; Target 74394; HLA-B*08:01; RLN2; ENSG00000107014; TAA
QLQQHVPVL

SEQ ID NO: 74395 - protein, 9 aa, Homo sapiens
  Table A; Target 74395; HLA-B*37:01; RLN2; ENSG00000107014; TAA
QLQQHVPVL

SEQ ID NO: 74396 - protein, 9 aa, Homo sapiens
  Table A; Target 74396; HLA-B*38:01; RLN2; ENSG00000107014; TAA
QLQQHVPVL

SEQ ID NO: 74397 - protein, 9 aa, Homo sapiens
  Table A; Target 74397; HLA-B*55:01; RLN2; ENSG00000107014; TAA
QLQQHVPVL

SEQ ID NO: 74398 - protein, 9 aa, Homo sapiens
  Table A; Target 74398; HLA-C*16:02; RLN2; ENSG00000107014; TAA
QLQQHVPVL

SEQ ID NO: 74399 - protein, 10 aa, Homo sapiens
  Table A; Target 74399; HLA-A*03:01; RLN2; ENSG00000107014; TAA
QLQQHVPVLK

SEQ ID NO: 74400 - protein, 10 aa, Homo sapiens
  Table A; Target 74400; HLA-A*03:02; RLN2; ENSG00000107014; TAA
QLQQHVPVLK

SEQ ID NO: 74401 - protein, 9 aa, Homo sapiens
  Table A; Target 74401; HLA-A*03:01; RLN2; ENSG00000107014; TAA
QLYSALANK

SEQ ID NO: 74402 - protein, 9 aa, Homo sapiens
  Table A; Target 74402; HLA-A*03:02; RLN2; ENSG00000107014; TAA
QLYSALANK

SEQ ID NO: 74403 - protein, 9 aa, Homo sapiens
  Table A; Target 74403; HLA-A*11:01; RLN2; ENSG00000107014; TAA
QLYSALANK

SEQ ID NO: 74404 - protein, 9 aa, Homo sapiens
  Table A; Target 74404; HLA-A*31:01; RLN2; ENSG00000107014; TAA
QLYSALANK

SEQ ID NO: 74405 - protein, 9 aa, Homo sapiens
  Table A; Target 74405; HLA-A*33:03; RLN2; ENSG00000107014; TAA
QLYSALANK

SEQ ID NO: 74406 - protein, 9 aa, Homo sapiens
  Table A; Target 74406; HLA-A*68:01; RLN2; ENSG00000107014; TAA
QLYSALANK

SEQ ID NO: 74407 - protein, 9 aa, Homo sapiens
  Table A; Target 74407; HLA-B*27:02; RLN2; ENSG00000107014; TAA
QLYSALANK

SEQ ID NO: 74408 - protein, 9 aa, Homo sapiens
  Table A; Target 74408; HLA-B*27:05; RLN2; ENSG00000107014; TAA
QLYSALANK

SEQ ID NO: 74409 - protein, 11 aa, Homo sapiens
  Table A; Target 74409; HLA-B*56:01; RLN2; ENSG00000107014; TAA
QPALPQLQQHV

SEQ ID NO: 74410 - protein, 8 aa, Homo sapiens
  Table A; Target 74410; HLA-A*03:02; RLN2; ENSG00000107014; TAA
QQHVPVLK

SEQ ID NO: 74411 - protein, 8 aa, Homo sapiens
  Table A; Target 74411; HLA-A*02:04; RLN2; ENSG00000107014; TAA
RLFFFHLL

SEQ ID NO: 74412 - protein, 10 aa, Homo sapiens
  Table A; Target 74412; HLA-A*02:03; RLN2; ENSG00000107014; TAA
RLFFFHLLGV

SEQ ID NO: 74413 - protein, 10 aa, Homo sapiens
  Table A; Target 74413; HLA-A*02:04; RLN2; ENSG00000107014; TAA
RLFFFHLLGV

SEQ ID NO: 74414 - protein, 10 aa, Homo sapiens
  Table A; Target 74414; HLA-A*03:01; RLN2; ENSG00000107014; TAA
RQLYSALANK

SEQ ID NO: 74415 - protein, 10 aa, Homo sapiens
  Table A; Target 74415; HLA-A*03:02; RLN2; ENSG00000107014; TAA
RQLYSALANK

SEQ ID NO: 74416 - protein, 10 aa, Homo sapiens
  Table A; Target 74416; HLA-A*11:01; RLN2; ENSG00000107014; TAA
RQLYSALANK

SEQ ID NO: 74417 - protein, 11 aa, Homo sapiens
  Table A; Target 74417; HLA-A*30:01; RLN2; ENSG00000107014; TAA
SEAADSSPSEL

SEQ ID NO: 74418 - protein, 11 aa, Homo sapiens
  Table A; Target 74418; HLA-B*40:01; RLN2; ENSG00000107014; TAA
SEAADSSPSEL

SEQ ID NO: 74419 - protein, 8 aa, Homo sapiens
  Table A; Target 74419; HLA-B*18:01; RLN2; ENSG00000107014; TAA
SEFVANLP

SEQ ID NO: 74420 - protein, 8 aa, Homo sapiens
  Table A; Target 74420; HLA-B*49:01; RLN2; ENSG00000107014; TAA
SEFVANLP

SEQ ID NO: 74421 - protein, 11 aa, Homo sapiens
  Table A; Target 74421; HLA-A*30:01; RLN2; ENSG00000107014; TAA
SEFVANLPQEL

SEQ ID NO: 74422 - protein, 11 aa, Homo sapiens
  Table A; Target 74422; HLA-B*18:01; RLN2; ENSG00000107014; TAA
SEFVANLPQEL

SEQ ID NO: 74423 - protein, 11 aa, Homo sapiens
  Table A; Target 74423; HLA-B*40:01; RLN2; ENSG00000107014; TAA
SEFVANLPQEL

SEQ ID NO: 74424 - protein, 11 aa, Homo sapiens
  Table A; Target 74424; HLA-B*40:02; RLN2; ENSG00000107014; TAA
SEFVANLPQEL

SEQ ID NO: 74425 - protein, 11 aa, Homo sapiens
  Table A; Target 74425; HLA-B*44:02; RLN2; ENSG00000107014; TAA
SEFVANLPQEL

SEQ ID NO: 74426 - protein, 11 aa, Homo sapiens
  Table A; Target 74426; HLA-B*44:03; RLN2; ENSG00000107014; TAA
SEFVANLPQEL

SEQ ID NO: 74427 - protein, 11 aa, Homo sapiens
  Table A; Target 74427; HLA-B*49:01; RLN2; ENSG00000107014; TAA
SEFVANLPQEL

SEQ ID NO: 74428 - protein, 11 aa, Homo sapiens
  Table A; Target 74428; HLA-C*16:04; RLN2; ENSG00000107014; TAA
SEFVANLPQEL

SEQ ID NO: 74429 - protein, 10 aa, Homo sapiens
  Table A; Target 74429; HLA-A*30:01; RLN2; ENSG00000107014; TAA
SEMQPALPQL

SEQ ID NO: 74430 - protein, 10 aa, Homo sapiens
  Table A; Target 74430; HLA-B*18:01; RLN2; ENSG00000107014; TAA
SEMQPALPQL

SEQ ID NO: 74431 - protein, 10 aa, Homo sapiens
  Table A; Target 74431; HLA-B*27:02; RLN2; ENSG00000107014; TAA
SEMQPALPQL

SEQ ID NO: 74432 - protein, 10 aa, Homo sapiens
  Table A; Target 74432; HLA-B*27:05; RLN2; ENSG00000107014; TAA
SEMQPALPQL

SEQ ID NO: 74433 - protein, 10 aa, Homo sapiens
  Table A; Target 74433; HLA-B*40:01; RLN2; ENSG00000107014; TAA
SEMQPALPQL

SEQ ID NO: 74434 - protein, 10 aa, Homo sapiens
  Table A; Target 74434; HLA-B*40:02; RLN2; ENSG00000107014; TAA
SEMQPALPQL

SEQ ID NO: 74435 - protein, 10 aa, Homo sapiens
  Table A; Target 74435; HLA-B*44:02; RLN2; ENSG00000107014; TAA
SEMQPALPQL

SEQ ID NO: 74436 - protein, 10 aa, Homo sapiens
  Table A; Target 74436; HLA-B*44:03; RLN2; ENSG00000107014; TAA
SEMQPALPQL

SEQ ID NO: 74437 - protein, 10 aa, Homo sapiens
  Table A; Target 74437; HLA-B*49:01; RLN2; ENSG00000107014; TAA
SEMQPALPQL

SEQ ID NO: 74438 - protein, 10 aa, Homo sapiens
  Table A; Target 74438; HLA-C*16:04; RLN2; ENSG00000107014; TAA
SEMQPALPQL

SEQ ID NO: 74439 - protein, 9 aa, Homo sapiens
  Table A; Target 74439; HLA-A*02:04; RLN2; ENSG00000107014; TAA
SLLFEEFKK

SEQ ID NO: 74440 - protein, 10 aa, Homo sapiens
  Table A; Target 74440; HLA-A*02:04; RLN2; ENSG00000107014; TAA
SLLFEEFKKL

SEQ ID NO: 74441 - protein, 8 aa, Homo sapiens
  Table A; Target 74441; HLA-B*07:02; RLN2; ENSG00000107014; TAA
SPSELKYL

SEQ ID NO: 74442 - protein, 10 aa, Homo sapiens
  Table A; Target 74442; HLA-B*07:02; RLN2; ENSG00000107014; TAA
SPSELKYLGL

SEQ ID NO: 74443 - protein, 10 aa, Homo sapiens
  Table A; Target 74443; HLA-B*56:01; RLN2; ENSG00000107014; TAA
SPSELKYLGL

SEQ ID NO: 74444 - protein, 10 aa, Homo sapiens
  Table A; Target 74444; HLA-C*07:02; RLN2; ENSG00000107014; TAA
SPSELKYLGL

SEQ ID NO: 74445 - protein, 8 aa, Homo sapiens
  Table A; Target 74445; HLA-C*16:04; RLN2; ENSG00000107014; TAA
SRAVADSW

SEQ ID NO: 74446 - protein, 8 aa, Homo sapiens
  Table A; Target 74446; HLA-B*57:01; RLN2; ENSG00000107014; TAA
SSLLFEEF

SEQ ID NO: 74447 - protein, 9 aa, Homo sapiens
  Table A; Target 74447; HLA-A*11:01; RLN2; ENSG00000107014; TAA
SSLLFEEFK

SEQ ID NO: 74448 - protein, 8 aa, Homo sapiens
  Table A; Target 74448; HLA-C*01:02; RLN2; ENSG00000107014; TAA
SSPSELKY

SEQ ID NO: 74449 - protein, 9 aa, Homo sapiens
  Table A; Target 74449; HLA-A*02:07; RLN2; ENSG00000107014; TAA
SSPSELKYL

SEQ ID NO: 74450 - protein, 9 aa, Homo sapiens
  Table A; Target 74450; HLA-A*23:01; RLN2; ENSG00000107014; TAA
SWMEEVIKL

SEQ ID NO: 74451 - protein, 9 aa, Homo sapiens
  Table A; Target 74451; HLA-A*24:02; RLN2; ENSG00000107014; TAA
SWMEEVIKL

SEQ ID NO: 74452 - protein, 10 aa, Homo sapiens
  Table A; Target 74452; HLA-A*30:01; RLN2; ENSG00000107014; TAA
TETINMMSEF

SEQ ID NO: 74453 - protein, 10 aa, Homo sapiens
  Table A; Target 74453; HLA-B*18:01; RLN2; ENSG00000107014; TAA
TETINMMSEF

SEQ ID NO: 74454 - protein, 10 aa, Homo sapiens
  Table A; Target 74454; HLA-B*27:02; RLN2; ENSG00000107014; TAA
TETINMMSEF

SEQ ID NO: 74455 - protein, 10 aa, Homo sapiens
  Table A; Target 74455; HLA-B*40:01; RLN2; ENSG00000107014; TAA
TETINMMSEF

SEQ ID NO: 74456 - protein, 10 aa, Homo sapiens
  Table A; Target 74456; HLA-B*44:02; RLN2; ENSG00000107014; TAA
TETINMMSEF

SEQ ID NO: 74457 - protein, 10 aa, Homo sapiens
  Table A; Target 74457; HLA-B*44:03; RLN2; ENSG00000107014; TAA
TETINMMSEF

SEQ ID NO: 74458 - protein, 10 aa, Homo sapiens
  Table A; Target 74458; HLA-B*49:01; RLN2; ENSG00000107014; TAA
TETINMMSEF

SEQ ID NO: 74459 - protein, 8 aa, Homo sapiens
  Table A; Target 74459; HLA-C*05:01; RLN2; ENSG00000107014; TAA
TINMMSEF

SEQ ID NO: 74460 - protein, 9 aa, Homo sapiens
  Table A; Target 74460; HLA-A*02:01; RLN2; ENSG00000107014; TAA
TLSEMQPAL

SEQ ID NO: 74461 - protein, 9 aa, Homo sapiens
  Table A; Target 74461; HLA-A*02:03; RLN2; ENSG00000107014; TAA
TLSEMQPAL

SEQ ID NO: 74462 - protein, 9 aa, Homo sapiens
  Table A; Target 74462; HLA-A*02:04; RLN2; ENSG00000107014; TAA
TLSEMQPAL

SEQ ID NO: 74463 - protein, 9 aa, Homo sapiens
  Table A; Target 74463; HLA-A*02:07; RLN2; ENSG00000107014; TAA
TLSEMQPAL

SEQ ID NO: 74464 - protein, 9 aa, Homo sapiens
  Table A; Target 74464; HLA-A*23:01; RLN2; ENSG00000107014; TAA
TLSEMQPAL

SEQ ID NO: 74465 - protein, 9 aa, Homo sapiens
  Table A; Target 74465; HLA-A*30:01; RLN2; ENSG00000107014; TAA
TLSEMQPAL

SEQ ID NO: 74466 - protein, 9 aa, Homo sapiens
  Table A; Target 74466; HLA-A*32:01; RLN2; ENSG00000107014; TAA
TLSEMQPAL

SEQ ID NO: 74467 - protein, 9 aa, Homo sapiens
  Table A; Target 74467; HLA-A*68:02; RLN2; ENSG00000107014; TAA
TLSEMQPAL

SEQ ID NO: 74468 - protein, 9 aa, Homo sapiens
  Table A; Target 74468; HLA-B*13:02; RLN2; ENSG00000107014; TAA
TLSEMQPAL

SEQ ID NO: 74469 - protein, 9 aa, Homo sapiens
  Table A; Target 74469; HLA-B*15:01; RLN2; ENSG00000107014; TAA
TLSEMQPAL

SEQ ID NO: 74470 - protein, 9 aa, Homo sapiens
  Table A; Target 74470; HLA-B*18:01; RLN2; ENSG00000107014; TAA
TLSEMQPAL

SEQ ID NO: 74471 - protein, 9 aa, Homo sapiens
  Table A; Target 74471; HLA-B*27:05; RLN2; ENSG00000107014; TAA
TLSEMQPAL

SEQ ID NO: 74472 - protein, 9 aa, Homo sapiens
  Table A; Target 74472; HLA-B*35:01; RLN2; ENSG00000107014; TAA
TLSEMQPAL

SEQ ID NO: 74473 - protein, 9 aa, Homo sapiens
  Table A; Target 74473; HLA-B*35:03; RLN2; ENSG00000107014; TAA
TLSEMQPAL

SEQ ID NO: 74474 - protein, 9 aa, Homo sapiens
  Table A; Target 74474; HLA-B*37:01; RLN2; ENSG00000107014; TAA
TLSEMQPAL

SEQ ID NO: 74475 - protein, 9 aa, Homo sapiens
  Table A; Target 74475; HLA-B*38:01; RLN2; ENSG00000107014; TAA
TLSEMQPAL

SEQ ID NO: 74476 - protein, 9 aa, Homo sapiens
  Table A; Target 74476; HLA-B*39:01; RLN2; ENSG00000107014; TAA
TLSEMQPAL

SEQ ID NO: 74477 - protein, 9 aa, Homo sapiens
  Table A; Target 74477; HLA-B*40:01; RLN2; ENSG00000107014; TAA
TLSEMQPAL

SEQ ID NO: 74478 - protein, 9 aa, Homo sapiens
  Table A; Target 74478; HLA-B*40:02; RLN2; ENSG00000107014; TAA
TLSEMQPAL

SEQ ID NO: 74479 - protein, 9 aa, Homo sapiens
  Table A; Target 74479; HLA-B*55:01; RLN2; ENSG00000107014; TAA
TLSEMQPAL

SEQ ID NO: 74480 - protein, 9 aa, Homo sapiens
  Table A; Target 74480; HLA-C*01:02; RLN2; ENSG00000107014; TAA
TLSEMQPAL

SEQ ID NO: 74481 - protein, 9 aa, Homo sapiens
  Table A; Target 74481; HLA-C*02:02; RLN2; ENSG00000107014; TAA
TLSEMQPAL

SEQ ID NO: 74482 - protein, 9 aa, Homo sapiens
  Table A; Target 74482; HLA-C*03:03; RLN2; ENSG00000107014; TAA
TLSEMQPAL

SEQ ID NO: 74483 - protein, 9 aa, Homo sapiens
  Table A; Target 74483; HLA-C*03:04; RLN2; ENSG00000107014; TAA
TLSEMQPAL

SEQ ID NO: 74484 - protein, 9 aa, Homo sapiens
  Table A; Target 74484; HLA-C*05:01; RLN2; ENSG00000107014; TAA
TLSEMQPAL

SEQ ID NO: 74485 - protein, 9 aa, Homo sapiens
  Table A; Target 74485; HLA-C*06:02; RLN2; ENSG00000107014; TAA
TLSEMQPAL

SEQ ID NO: 74486 - protein, 9 aa, Homo sapiens
  Table A; Target 74486; HLA-C*07:02; RLN2; ENSG00000107014; TAA
TLSEMQPAL

SEQ ID NO: 74487 - protein, 9 aa, Homo sapiens
  Table A; Target 74487; HLA-C*07:04; RLN2; ENSG00000107014; TAA
TLSEMQPAL

SEQ ID NO: 74488 - protein, 9 aa, Homo sapiens
  Table A; Target 74488; HLA-C*12:03; RLN2; ENSG00000107014; TAA
TLSEMQPAL

SEQ ID NO: 74489 - protein, 9 aa, Homo sapiens
  Table A; Target 74489; HLA-C*14:02; RLN2; ENSG00000107014; TAA
TLSEMQPAL

SEQ ID NO: 74490 - protein, 9 aa, Homo sapiens
  Table A; Target 74490; HLA-C*16:01; RLN2; ENSG00000107014; TAA
TLSEMQPAL

SEQ ID NO: 74491 - protein, 9 aa, Homo sapiens
  Table A; Target 74491; HLA-C*16:02; RLN2; ENSG00000107014; TAA
TLSEMQPAL

SEQ ID NO: 74492 - protein, 9 aa, Homo sapiens
  Table A; Target 74492; HLA-C*16:04; RLN2; ENSG00000107014; TAA
TLSEMQPAL

SEQ ID NO: 74493 - protein, 9 aa, Homo sapiens
  Table A; Target 74493; HLA-A*02:07; RLN2; ENSG00000107014; TAA
VADSWMEEV

SEQ ID NO: 74494 - protein, 9 aa, Homo sapiens
  Table A; Target 74494; HLA-C*05:01; RLN2; ENSG00000107014; TAA
VADSWMEEV

SEQ ID NO: 74495 - protein, 8 aa, Homo sapiens
  Table A; Target 74495; HLA-B*07:02; RLN2; ENSG00000107014; TAA
VANLPQEL

SEQ ID NO: 74496 - protein, 8 aa, Homo sapiens
  Table A; Target 74496; HLA-B*08:01; RLN2; ENSG00000107014; TAA
VANLPQEL

SEQ ID NO: 74497 - protein, 8 aa, Homo sapiens
  Table A; Target 74497; HLA-B*35:03; RLN2; ENSG00000107014; TAA
VANLPQEL

SEQ ID NO: 74498 - protein, 8 aa, Homo sapiens
  Table A; Target 74498; HLA-B*39:01; RLN2; ENSG00000107014; TAA
VANLPQEL

SEQ ID NO: 74499 - protein, 8 aa, Homo sapiens
  Table A; Target 74499; HLA-B*46:01; RLN2; ENSG00000107014; TAA
VANLPQEL

SEQ ID NO: 74500 - protein, 8 aa, Homo sapiens
  Table A; Target 74500; HLA-B*51:01; RLN2; ENSG00000107014; TAA
VANLPQEL

SEQ ID NO: 74501 - protein, 8 aa, Homo sapiens
  Table A; Target 74501; HLA-B*56:01; RLN2; ENSG00000107014; TAA
VANLPQEL

SEQ ID NO: 74502 - protein, 8 aa, Homo sapiens
  Table A; Target 74502; HLA-B*58:01; RLN2; ENSG00000107014; TAA
VANLPQEL

SEQ ID NO: 74503 - protein, 8 aa, Homo sapiens
  Table A; Target 74503; HLA-C*01:02; RLN2; ENSG00000107014; TAA
VANLPQEL

SEQ ID NO: 74504 - protein, 8 aa, Homo sapiens
  Table A; Target 74504; HLA-C*02:02; RLN2; ENSG00000107014; TAA
VANLPQEL

SEQ ID NO: 74505 - protein, 8 aa, Homo sapiens
  Table A; Target 74505; HLA-C*03:03; RLN2; ENSG00000107014; TAA
VANLPQEL

SEQ ID NO: 74506 - protein, 8 aa, Homo sapiens
  Table A; Target 74506; HLA-C*03:04; RLN2; ENSG00000107014; TAA
VANLPQEL

SEQ ID NO: 74507 - protein, 8 aa, Homo sapiens
  Table A; Target 74507; HLA-C*05:01; RLN2; ENSG00000107014; TAA
VANLPQEL

SEQ ID NO: 74508 - protein, 8 aa, Homo sapiens
  Table A; Target 74508; HLA-C*07:01; RLN2; ENSG00000107014; TAA
VANLPQEL

SEQ ID NO: 74509 - protein, 8 aa, Homo sapiens
  Table A; Target 74509; HLA-C*07:04; RLN2; ENSG00000107014; TAA
VANLPQEL

SEQ ID NO: 74510 - protein, 8 aa, Homo sapiens
  Table A; Target 74510; HLA-C*12:03; RLN2; ENSG00000107014; TAA
VANLPQEL

SEQ ID NO: 74511 - protein, 8 aa, Homo sapiens
  Table A; Target 74511; HLA-C*14:02; RLN2; ENSG00000107014; TAA
VANLPQEL

SEQ ID NO: 74512 - protein, 8 aa, Homo sapiens
  Table A; Target 74512; HLA-C*16:01; RLN2; ENSG00000107014; TAA
VANLPQEL

SEQ ID NO: 74513 - protein, 8 aa, Homo sapiens
  Table A; Target 74513; HLA-C*16:02; RLN2; ENSG00000107014; TAA
VANLPQEL

SEQ ID NO: 74514 - protein, 8 aa, Homo sapiens
  Table A; Target 74514; HLA-C*16:04; RLN2; ENSG00000107014; TAA
VANLPQEL

SEQ ID NO: 74515 - protein, 9 aa, Homo sapiens
  Table A; Target 74515; HLA-A*01:01; RLN2; ENSG00000107014; TAA
VANLPQELK

SEQ ID NO: 74516 - protein, 9 aa, Homo sapiens
  Table A; Target 74516; HLA-A*03:01; RLN2; ENSG00000107014; TAA
VANLPQELK

SEQ ID NO: 74517 - protein, 9 aa, Homo sapiens
  Table A; Target 74517; HLA-A*03:02; RLN2; ENSG00000107014; TAA
VANLPQELK

SEQ ID NO: 74518 - protein, 9 aa, Homo sapiens
  Table A; Target 74518; HLA-A*11:01; RLN2; ENSG00000107014; TAA
VANLPQELK

SEQ ID NO: 74519 - protein, 9 aa, Homo sapiens
  Table A; Target 74519; HLA-A*68:01; RLN2; ENSG00000107014; TAA
VANLPQELK

SEQ ID NO: 74520 - protein, 9 aa, Homo sapiens
  Table A; Target 74520; HLA-C*07:06; RLN2; ENSG00000107014; TAA
VANLPQELK

SEQ ID NO: 74521 - protein, 10 aa, Homo sapiens
  Table A; Target 74521; HLA-C*03:03; RLN2; ENSG00000107014; TAA
VANLPQELKL

SEQ ID NO: 74522 - protein, 10 aa, Homo sapiens
  Table A; Target 74522; HLA-C*03:04; RLN2; ENSG00000107014; TAA
VANLPQELKL

SEQ ID NO: 74523 - protein, 10 aa, Homo sapiens
  Table A; Target 74523; HLA-C*16:01; RLN2; ENSG00000107014; TAA
VANLPQELKL

SEQ ID NO: 74524 - protein, 10 aa, Homo sapiens
  Table A; Target 74524; HLA-C*16:02; RLN2; ENSG00000107014; TAA
VANLPQELKL

SEQ ID NO: 74525 - protein, 8 aa, Homo sapiens
  Table A; Target 74525; HLA-B*08:01; RLN2; ENSG00000107014; TAA
VGCTKRSL

SEQ ID NO: 74526 - protein, 8 aa, Homo sapiens
  Table A; Target 74526; HLA-C*16:01; RLN2; ENSG00000107014; TAA
VGCTKRSL

SEQ ID NO: 74527 - protein, 9 aa, Homo sapiens
  Table A; Target 74527; HLA-A*23:01; RLN2; ENSG00000107014; TAA
VLKDSSLLF

SEQ ID NO: 74528 - protein, 9 aa, Homo sapiens
  Table A; Target 74528; HLA-A*24:02; RLN2; ENSG00000107014; TAA
VLKDSSLLF

SEQ ID NO: 74529 - protein, 9 aa, Homo sapiens
  Table A; Target 74529; HLA-A*29:02; RLN2; ENSG00000107014; TAA
VLKDSSLLF

SEQ ID NO: 74530 - protein, 9 aa, Homo sapiens
  Table A; Target 74530; HLA-B*46:01; RLN2; ENSG00000107014; TAA
VLKDSSLLF

SEQ ID NO: 74531 - protein, 9 aa, Homo sapiens
  Table A; Target 74531; HLA-B*07:02; RLN2; ENSG00000107014; TAA
VPVLKDSSL

SEQ ID NO: 74532 - protein, 9 aa, Homo sapiens
  Table A; Target 74532; HLA-B*08:01; RLN2; ENSG00000107014; TAA
VPVLKDSSL

SEQ ID NO: 74533 - protein, 9 aa, Homo sapiens
  Table A; Target 74533; HLA-B*35:01; RLN2; ENSG00000107014; TAA
VPVLKDSSL

SEQ ID NO: 74534 - protein, 9 aa, Homo sapiens
  Table A; Target 74534; HLA-B*35:03; RLN2; ENSG00000107014; TAA
VPVLKDSSL

SEQ ID NO: 74535 - protein, 9 aa, Homo sapiens
  Table A; Target 74535; HLA-B*55:01; RLN2; ENSG00000107014; TAA
VPVLKDSSL

SEQ ID NO: 74536 - protein, 9 aa, Homo sapiens
  Table A; Target 74536; HLA-B*56:01; RLN2; ENSG00000107014; TAA
VPVLKDSSL

SEQ ID NO: 74537 - protein, 9 aa, Homo sapiens
  Table A; Target 74537; HLA-C*07:02; RLN2; ENSG00000107014; TAA
VPVLKDSSL

SEQ ID NO: 74538 - protein, 9 aa, Homo sapiens
  Table A; Target 74538; HLA-C*14:02; RLN2; ENSG00000107014; TAA
VPVLKDSSL

SEQ ID NO: 74539 - protein, 9 aa, Homo sapiens
  Table A; Target 74539; HLA-A*01:01; RLN2; ENSG00000107014; TAA
YLGLDTHSR

SEQ ID NO: 74540 - protein, 9 aa, Homo sapiens
  Table A; Target 74540; HLA-A*31:01; RLN2; ENSG00000107014; TAA
YLGLDTHSR

SEQ ID NO: 74541 - protein, 9 aa, Homo sapiens
  Table A; Target 74541; HLA-A*33:01; RLN2; ENSG00000107014; TAA
YLGLDTHSR

SEQ ID NO: 74542 - protein, 9 aa, Homo sapiens
  Table A; Target 74542; HLA-A*33:03; RLN2; ENSG00000107014; TAA
YLGLDTHSR

SEQ ID NO: 74543 - protein, 10 aa, Homo sapiens
  Table A; Target 74543; HLA-A*01:01; RLN2; ENSG00000107014; TAA
YLGLDTHSRK

SEQ ID NO: 74544 - protein, 11 aa, Homo sapiens
  Table A; Target 74544; HLA-A*29:02; RNASE10; ENSG00000182545; TAA
AFIHEDLNTVK

SEQ ID NO: 74545 - protein, 11 aa, Homo sapiens
  Table A; Target 74545; HLA-A*31:01; RNASE10; ENSG00000182545; TAA
AFIHEDLNTVK

SEQ ID NO: 74546 - protein, 9 aa, Homo sapiens
  Table A; Target 74546; HLA-A*29:02; RNASE10; ENSG00000182545; TAA
ALFQSNKDY

SEQ ID NO: 74547 - protein, 9 aa, Homo sapiens
  Table A; Target 74547; HLA-A*30:02; RNASE10; ENSG00000182545; TAA
ALFQSNKDY

SEQ ID NO: 74548 - protein, 9 aa, Homo sapiens
  Table A; Target 74548; HLA-B*15:01; RNASE10; ENSG00000182545; TAA
ALFQSNKDY

SEQ ID NO: 74549 - protein, 9 aa, Homo sapiens
  Table A; Target 74549; HLA-B*15:03; RNASE10; ENSG00000182545; TAA
ALFQSNKDY

SEQ ID NO: 74550 - protein, 9 aa, Homo sapiens
  Table A; Target 74550; HLA-B*46:01; RNASE10; ENSG00000182545; TAA
ALFQSNKDY

SEQ ID NO: 74551 - protein, 9 aa, Homo sapiens
  Table A; Target 74551; HLA-C*16:04; RNASE10; ENSG00000182545; TAA
ALFQSNKDY

SEQ ID NO: 74552 - protein, 10 aa, Homo sapiens
  Table A; Target 74552; HLA-A*02:01; RNASE10; ENSG00000182545; TAA
ALFQSNKDYL

SEQ ID NO: 74553 - protein, 10 aa, Homo sapiens
  Table A; Target 74553; HLA-A*02:03; RNASE10; ENSG00000182545; TAA
ALFQSNKDYL

SEQ ID NO: 74554 - protein, 10 aa, Homo sapiens
  Table A; Target 74554; HLA-A*02:04; RNASE10; ENSG00000182545; TAA
ALFQSNKDYL

SEQ ID NO: 74555 - protein, 10 aa, Homo sapiens
  Table A; Target 74555; HLA-A*02:07; RNASE10; ENSG00000182545; TAA
ALFQSNKDYL

SEQ ID NO: 74556 - protein, 10 aa, Homo sapiens
  Table A; Target 74556; HLA-B*27:05; RNASE10; ENSG00000182545; TAA
ALFQSNKDYL

SEQ ID NO: 74557 - protein, 9 aa, Homo sapiens
  Table A; Target 74557; HLA-A*03:01; RNASE10; ENSG00000182545; TAA
ASALFQSNK

SEQ ID NO: 74558 - protein, 9 aa, Homo sapiens
  Table A; Target 74558; HLA-A*03:02; RNASE10; ENSG00000182545; TAA
ASALFQSNK

SEQ ID NO: 74559 - protein, 9 aa, Homo sapiens
  Table A; Target 74559; HLA-B*27:02; RNASE10; ENSG00000182545; TAA
ASALFQSNK

SEQ ID NO: 74560 - protein, 9 aa, Homo sapiens
  Table A; Target 74560; HLA-C*07:06; RNASE10; ENSG00000182545; TAA
ASALFQSNK

SEQ ID NO: 74561 - protein, 11 aa, Homo sapiens
  Table A; Target 74561; HLA-A*30:02; RNASE10; ENSG00000182545; TAA
ASALFQSNKDY

SEQ ID NO: 74562 - protein, 11 aa, Homo sapiens
  Table A; Target 74562; HLA-C*12:03; RNASE10; ENSG00000182545; TAA
ASALFQSNKDY

SEQ ID NO: 74563 - protein, 10 aa, Homo sapiens
  Table A; Target 74563; HLA-B*27:05; RNASE10; ENSG00000182545; TAA
AVLEESDQPL

SEQ ID NO: 74564 - protein, 10 aa, Homo sapiens
  Table A; Target 74564; HLA-B*35:03; RNASE10; ENSG00000182545; TAA
AVLEESDQPL

SEQ ID NO: 74565 - protein, 9 aa, Homo sapiens
  Table A; Target 74565; HLA-B*49:01; RNASE10; ENSG00000182545; TAA
CELSQPDQV

SEQ ID NO: 74566 - protein, 9 aa, Homo sapiens
  Table A; Target 74566; HLA-C*04:01; RNASE10; ENSG00000182545; TAA
CNDMMAHKM

SEQ ID NO: 74567 - protein, 8 aa, Homo sapiens
  Table A; Target 74567; HLA-B*18:01; RNASE10; ENSG00000182545; TAA
DEVGGNKM

SEQ ID NO: 74568 - protein, 9 aa, Homo sapiens
  Table A; Target 74568; HLA-A*30:01; RNASE10; ENSG00000182545; TAA
DEVGGNKML

SEQ ID NO: 74569 - protein, 9 aa, Homo sapiens
  Table A; Target 74569; HLA-B*18:01; RNASE10; ENSG00000182545; TAA
DEVGGNKML

SEQ ID NO: 74570 - protein, 9 aa, Homo sapiens
  Table A; Target 74570; HLA-B*40:01; RNASE10; ENSG00000182545; TAA
DEVGGNKML

SEQ ID NO: 74571 - protein, 9 aa, Homo sapiens
  Table A; Target 74571; HLA-B*44:02; RNASE10; ENSG00000182545; TAA
DEVGGNKML

SEQ ID NO: 74572 - protein, 9 aa, Homo sapiens
  Table A; Target 74572; HLA-B*44:03; RNASE10; ENSG00000182545; TAA
DEVGGNKML

SEQ ID NO: 74573 - protein, 9 aa, Homo sapiens
  Table A; Target 74573; HLA-B*35:03; RNASE10; ENSG00000182545; TAA
DGTQTTETL

SEQ ID NO: 74574 - protein, 9 aa, Homo sapiens
  Table A; Target 74574; HLA-B*51:01; RNASE10; ENSG00000182545; TAA
DGTQTTETL

SEQ ID NO: 74575 - protein, 8 aa, Homo sapiens
  Table A; Target 74575; HLA-B*08:01; RNASE10; ENSG00000182545; TAA
DLNTVKAV

SEQ ID NO: 74576 - protein, 8 aa, Homo sapiens
  Table A; Target 74576; HLA-B*51:01; RNASE10; ENSG00000182545; TAA
DLNTVKAV

SEQ ID NO: 74577 - protein, 9 aa, Homo sapiens
  Table A; Target 74577; HLA-B*08:01; RNASE10; ENSG00000182545; TAA
DLNTVKAVC

SEQ ID NO: 74578 - protein, 10 aa, Homo sapiens
  Table A; Target 74578; HLA-A*33:01; RNASE10; ENSG00000182545; TAA
DLNTVKAVCN

SEQ ID NO: 74579 - protein, 8 aa, Homo sapiens
  Table A; Target 74579; HLA-B*08:01; RNASE10; ENSG00000182545; TAA
DMMAHKMK

SEQ ID NO: 74580 - protein, 9 aa, Homo sapiens
  Table A; Target 74580; HLA-B*35:03; RNASE10; ENSG00000182545; TAA
DPILGEDEV

SEQ ID NO: 74581 - protein, 9 aa, Homo sapiens
  Table A; Target 74581; HLA-B*51:01; RNASE10; ENSG00000182545; TAA
DPILGEDEV

SEQ ID NO: 74582 - protein, 9 aa, Homo sapiens
  Table A; Target 74582; HLA-A*26:01; RNASE10; ENSG00000182545; TAA
DQVTPNCNY

SEQ ID NO: 74583 - protein, 9 aa, Homo sapiens
  Table A; Target 74583; HLA-B*15:03; RNASE10; ENSG00000182545; TAA
DQVTPNCNY

SEQ ID NO: 74584 - protein, 9 aa, Homo sapiens
  Table A; Target 74584; HLA-B*18:01; RNASE10; ENSG00000182545; TAA
DQVTPNCNY

SEQ ID NO: 74585 - protein, 9 aa, Homo sapiens
  Table A; Target 74585; HLA-B*39:01; RNASE10; ENSG00000182545; TAA
DQVTPNCNY

SEQ ID NO: 74586 - protein, 10 aa, Homo sapiens
  Table A; Target 74586; HLA-A*33:01; RNASE10; ENSG00000182545; TAA
DYLRLDQTDR

SEQ ID NO: 74587 - protein, 9 aa, Homo sapiens
  Table A; Target 74587; HLA-A*33:01; RNASE10; ENSG00000182545; TAA
ECNDMMAHK

SEQ ID NO: 74588 - protein, 9 aa, Homo sapiens
  Table A; Target 74588; HLA-A*33:03; RNASE10; ENSG00000182545; TAA
ECNDMMAHK

SEQ ID NO: 74589 - protein, 10 aa, Homo sapiens
  Table A; Target 74589; HLA-A*26:01; RNASE10; ENSG00000182545; TAA
ECNDMMAHKM

SEQ ID NO: 74590 - protein, 10 aa, Homo sapiens
  Table A; Target 74590; HLA-A*25:01; RNASE10; ENSG00000182545; TAA
EESDQPLNEF

SEQ ID NO: 74591 - protein, 10 aa, Homo sapiens
  Table A; Target 74591; HLA-B*18:01; RNASE10; ENSG00000182545; TAA
EESDQPLNEF

SEQ ID NO: 74592 - protein, 10 aa, Homo sapiens
  Table A; Target 74592; HLA-B*44:02; RNASE10; ENSG00000182545; TAA
EESDQPLNEF

SEQ ID NO: 74593 - protein, 10 aa, Homo sapiens
  Table A; Target 74593; HLA-B*44:03; RNASE10; ENSG00000182545; TAA
EESDQPLNEF

SEQ ID NO: 74594 - protein, 10 aa, Homo sapiens
  Table A; Target 74594; HLA-C*16:04; RNASE10; ENSG00000182545; TAA
EESDQPLNEF

SEQ ID NO: 74595 - protein, 11 aa, Homo sapiens
  Table A; Target 74595; HLA-B*27:02; RNASE10; ENSG00000182545; TAA
EESDQPLNEFW

SEQ ID NO: 74596 - protein, 11 aa, Homo sapiens
  Table A; Target 74596; HLA-B*44:02; RNASE10; ENSG00000182545; TAA
EESDQPLNEFW

SEQ ID NO: 74597 - protein, 11 aa, Homo sapiens
  Table A; Target 74597; HLA-B*44:03; RNASE10; ENSG00000182545; TAA
EESDQPLNEFW

SEQ ID NO: 74598 - protein, 11 aa, Homo sapiens
  Table A; Target 74598; HLA-C*16:04; RNASE10; ENSG00000182545; TAA
EESDQPLNEFW

SEQ ID NO: 74599 - protein, 11 aa, Homo sapiens
  Table A; Target 74599; HLA-B*38:01; RNASE10; ENSG00000182545; TAA
EGDGTQTTETL

SEQ ID NO: 74600 - protein, 11 aa, Homo sapiens
  Table A; Target 74600; HLA-B*39:01; RNASE10; ENSG00000182545; TAA
EGDGTQTTETL

SEQ ID NO: 74601 - protein, 11 aa, Homo sapiens
  Table A; Target 74601; HLA-C*05:01; RNASE10; ENSG00000182545; TAA
EGDGTQTTETL

SEQ ID NO: 74602 - protein, 10 aa, Homo sapiens
  Table A; Target 74602; HLA-A*25:01; RNASE10; ENSG00000182545; TAA
EPSQSCIAQY

SEQ ID NO: 74603 - protein, 10 aa, Homo sapiens
  Table A; Target 74603; HLA-A*26:01; RNASE10; ENSG00000182545; TAA
EPSQSCIAQY

SEQ ID NO: 74604 - protein, 10 aa, Homo sapiens
  Table A; Target 74604; HLA-A*33:03; RNASE10; ENSG00000182545; TAA
EPSQSCIAQY

SEQ ID NO: 74605 - protein, 10 aa, Homo sapiens
  Table A; Target 74605; HLA-A*68:01; RNASE10; ENSG00000182545; TAA
EPSQSCIAQY

SEQ ID NO: 74606 - protein, 10 aa, Homo sapiens
  Table A; Target 74606; HLA-B*35:01; RNASE10; ENSG00000182545; TAA
EPSQSCIAQY

SEQ ID NO: 74607 - protein, 9 aa, Homo sapiens
  Table A; Target 74607; HLA-A*01:01; RNASE10; ENSG00000182545; TAA
ESDQPLNEF

SEQ ID NO: 74608 - protein, 9 aa, Homo sapiens
  Table A; Target 74608; HLA-C*05:01; RNASE10; ENSG00000182545; TAA
ESDQPLNEF

SEQ ID NO: 74609 - protein, 8 aa, Homo sapiens
  Table A; Target 74609; HLA-A*33:01; RNASE10; ENSG00000182545; TAA
ETLVLSNK

SEQ ID NO: 74610 - protein, 8 aa, Homo sapiens
  Table A; Target 74610; HLA-A*33:03; RNASE10; ENSG00000182545; TAA
ETLVLSNK

SEQ ID NO: 74611 - protein, 9 aa, Homo sapiens
  Table A; Target 74611; HLA-A*26:01; RNASE10; ENSG00000182545; TAA
EVGGNKMLR

SEQ ID NO: 74612 - protein, 9 aa, Homo sapiens
  Table A; Target 74612; HLA-A*33:01; RNASE10; ENSG00000182545; TAA
EVGGNKMLR

SEQ ID NO: 74613 - protein, 9 aa, Homo sapiens
  Table A; Target 74613; HLA-A*33:03; RNASE10; ENSG00000182545; TAA
EVGGNKMLR

SEQ ID NO: 74614 - protein, 9 aa, Homo sapiens
  Table A; Target 74614; HLA-A*68:01; RNASE10; ENSG00000182545; TAA
EVGGNKMLR

SEQ ID NO: 74615 - protein, 9 aa, Homo sapiens
  Table A; Target 74615; HLA-C*07:06; RNASE10; ENSG00000182545; TAA
EVGGNKMLR

SEQ ID NO: 74616 - protein, 9 aa, Homo sapiens
  Table A; Target 74616; HLA-A*24:02; RNASE10; ENSG00000182545; TAA
FFMLLMLLL

SEQ ID NO: 74617 - protein, 9 aa, Homo sapiens
  Table A; Target 74617; HLA-A*02:03; RNASE10; ENSG00000182545; TAA
FIHEDLNTV

SEQ ID NO: 74618 - protein, 9 aa, Homo sapiens
  Table A; Target 74618; HLA-A*02:04; RNASE10; ENSG00000182545; TAA
FIHEDLNTV

SEQ ID NO: 74619 - protein, 9 aa, Homo sapiens
  Table A; Target 74619; HLA-A*02:07; RNASE10; ENSG00000182545; TAA
FIHEDLNTV

SEQ ID NO: 74620 - protein, 9 aa, Homo sapiens
  Table A; Target 74620; HLA-A*25:01; RNASE10; ENSG00000182545; TAA
FIHEDLNTV

SEQ ID NO: 74621 - protein, 9 aa, Homo sapiens
  Table A; Target 74621; HLA-A*26:01; RNASE10; ENSG00000182545; TAA
FIHEDLNTV

SEQ ID NO: 74622 - protein, 9 aa, Homo sapiens
  Table A; Target 74622; HLA-A*30:01; RNASE10; ENSG00000182545; TAA
FIHEDLNTV

SEQ ID NO: 74623 - protein, 9 aa, Homo sapiens
  Table A; Target 74623; HLA-B*08:01; RNASE10; ENSG00000182545; TAA
FIHEDLNTV

SEQ ID NO: 74624 - protein, 9 aa, Homo sapiens
  Table A; Target 74624; HLA-B*13:02; RNASE10; ENSG00000182545; TAA
FIHEDLNTV

SEQ ID NO: 74625 - protein, 9 aa, Homo sapiens
  Table A; Target 74625; HLA-B*27:05; RNASE10; ENSG00000182545; TAA
FIHEDLNTV

SEQ ID NO: 74626 - protein, 9 aa, Homo sapiens
  Table A; Target 74626; HLA-B*35:03; RNASE10; ENSG00000182545; TAA
FIHEDLNTV

SEQ ID NO: 74627 - protein, 9 aa, Homo sapiens
  Table A; Target 74627; HLA-B*38:01; RNASE10; ENSG00000182545; TAA
FIHEDLNTV

SEQ ID NO: 74628 - protein, 9 aa, Homo sapiens
  Table A; Target 74628; HLA-B*39:01; RNASE10; ENSG00000182545; TAA
FIHEDLNTV

SEQ ID NO: 74629 - protein, 9 aa, Homo sapiens
  Table A; Target 74629; HLA-B*40:02; RNASE10; ENSG00000182545; TAA
FIHEDLNTV

SEQ ID NO: 74630 - protein, 9 aa, Homo sapiens
  Table A; Target 74630; HLA-B*46:01; RNASE10; ENSG00000182545; TAA
FIHEDLNTV

SEQ ID NO: 74631 - protein, 9 aa, Homo sapiens
  Table A; Target 74631; HLA-B*49:01; RNASE10; ENSG00000182545; TAA
FIHEDLNTV

SEQ ID NO: 74632 - protein, 9 aa, Homo sapiens
  Table A; Target 74632; HLA-B*51:01; RNASE10; ENSG00000182545; TAA
FIHEDLNTV

SEQ ID NO: 74633 - protein, 9 aa, Homo sapiens
  Table A; Target 74633; HLA-B*54:01; RNASE10; ENSG00000182545; TAA
FIHEDLNTV

SEQ ID NO: 74634 - protein, 9 aa, Homo sapiens
  Table A; Target 74634; HLA-B*55:01; RNASE10; ENSG00000182545; TAA
FIHEDLNTV

SEQ ID NO: 74635 - protein, 9 aa, Homo sapiens
  Table A; Target 74635; HLA-B*56:01; RNASE10; ENSG00000182545; TAA
FIHEDLNTV

SEQ ID NO: 74636 - protein, 9 aa, Homo sapiens
  Table A; Target 74636; HLA-C*01:02; RNASE10; ENSG00000182545; TAA
FIHEDLNTV

SEQ ID NO: 74637 - protein, 9 aa, Homo sapiens
  Table A; Target 74637; HLA-C*02:02; RNASE10; ENSG00000182545; TAA
FIHEDLNTV

SEQ ID NO: 74638 - protein, 9 aa, Homo sapiens
  Table A; Target 74638; HLA-C*03:03; RNASE10; ENSG00000182545; TAA
FIHEDLNTV

SEQ ID NO: 74639 - protein, 9 aa, Homo sapiens
  Table A; Target 74639; HLA-C*03:04; RNASE10; ENSG00000182545; TAA
FIHEDLNTV

SEQ ID NO: 74640 - protein, 9 aa, Homo sapiens
  Table A; Target 74640; HLA-C*05:01; RNASE10; ENSG00000182545; TAA
FIHEDLNTV

SEQ ID NO: 74641 - protein, 9 aa, Homo sapiens
  Table A; Target 74641; HLA-C*12:03; RNASE10; ENSG00000182545; TAA
FIHEDLNTV

SEQ ID NO: 74642 - protein, 9 aa, Homo sapiens
  Table A; Target 74642; HLA-C*14:02; RNASE10; ENSG00000182545; TAA
FIHEDLNTV

SEQ ID NO: 74643 - protein, 9 aa, Homo sapiens
  Table A; Target 74643; HLA-C*16:02; RNASE10; ENSG00000182545; TAA
FIHEDLNTV

SEQ ID NO: 74644 - protein, 9 aa, Homo sapiens
  Table A; Target 74644; HLA-C*16:04; RNASE10; ENSG00000182545; TAA
FIHEDLNTV

SEQ ID NO: 74645 - protein, 10 aa, Homo sapiens
  Table A; Target 74645; HLA-A*01:01; RNASE10; ENSG00000182545; TAA
FIHEDLNTVK

SEQ ID NO: 74646 - protein, 10 aa, Homo sapiens
  Table A; Target 74646; HLA-A*03:01; RNASE10; ENSG00000182545; TAA
FIHEDLNTVK

SEQ ID NO: 74647 - protein, 10 aa, Homo sapiens
  Table A; Target 74647; HLA-A*68:01; RNASE10; ENSG00000182545; TAA
FIHEDLNTVK

SEQ ID NO: 74648 - protein, 10 aa, Homo sapiens
  Table A; Target 74648; HLA-A*68:02; RNASE10; ENSG00000182545; TAA
FIHEDLNTVK

SEQ ID NO: 74649 - protein, 11 aa, Homo sapiens
  Table A; Target 74649; HLA-B*54:01; RNASE10; ENSG00000182545; TAA
FIHEDLNTVKA

SEQ ID NO: 74650 - protein, 8 aa, Homo sapiens
  Table A; Target 74650; HLA-B*38:01; RNASE10; ENSG00000182545; TAA
FQSNKDYL

SEQ ID NO: 74651 - protein, 8 aa, Homo sapiens
  Table A; Target 74651; HLA-B*39:01; RNASE10; ENSG00000182545; TAA
FQSNKDYL

SEQ ID NO: 74652 - protein, 10 aa, Homo sapiens
  Table A; Target 74652; HLA-A*30:01; RNASE10; ENSG00000182545; TAA
GEDEVGGNKM

SEQ ID NO: 74653 - protein, 10 aa, Homo sapiens
  Table A; Target 74653; HLA-B*27:05; RNASE10; ENSG00000182545; TAA
GEDEVGGNKM

SEQ ID NO: 74654 - protein, 10 aa, Homo sapiens
  Table A; Target 74654; HLA-B*38:01; RNASE10; ENSG00000182545; TAA
GEDEVGGNKM

SEQ ID NO: 74655 - protein, 10 aa, Homo sapiens
  Table A; Target 74655; HLA-B*40:02; RNASE10; ENSG00000182545; TAA
GEDEVGGNKM

SEQ ID NO: 74656 - protein, 10 aa, Homo sapiens
  Table A; Target 74656; HLA-B*44:02; RNASE10; ENSG00000182545; TAA
GEDEVGGNKM

SEQ ID NO: 74657 - protein, 10 aa, Homo sapiens
  Table A; Target 74657; HLA-B*44:03; RNASE10; ENSG00000182545; TAA
GEDEVGGNKM

SEQ ID NO: 74658 - protein, 10 aa, Homo sapiens
  Table A; Target 74658; HLA-B*49:01; RNASE10; ENSG00000182545; TAA
GEDEVGGNKM

SEQ ID NO: 74659 - protein, 10 aa, Homo sapiens
  Table A; Target 74659; HLA-C*16:04; RNASE10; ENSG00000182545; TAA
GEDEVGGNKM

SEQ ID NO: 74660 - protein, 11 aa, Homo sapiens
  Table A; Target 74660; HLA-A*30:01; RNASE10; ENSG00000182545; TAA
GEDEVGGNKML

SEQ ID NO: 74661 - protein, 11 aa, Homo sapiens
  Table A; Target 74661; HLA-B*27:05; RNASE10; ENSG00000182545; TAA
GEDEVGGNKML

SEQ ID NO: 74662 - protein, 11 aa, Homo sapiens
  Table A; Target 74662; HLA-B*40:02; RNASE10; ENSG00000182545; TAA
GEDEVGGNKML

SEQ ID NO: 74663 - protein, 11 aa, Homo sapiens
  Table A; Target 74663; HLA-B*44:02; RNASE10; ENSG00000182545; TAA
GEDEVGGNKML

SEQ ID NO: 74664 - protein, 11 aa, Homo sapiens
  Table A; Target 74664; HLA-B*44:03; RNASE10; ENSG00000182545; TAA
GEDEVGGNKML

SEQ ID NO: 74665 - protein, 11 aa, Homo sapiens
  Table A; Target 74665; HLA-B*49:01; RNASE10; ENSG00000182545; TAA
GEDEVGGNKML

SEQ ID NO: 74666 - protein, 11 aa, Homo sapiens
  Table A; Target 74666; HLA-C*12:03; RNASE10; ENSG00000182545; TAA
GEDEVGGNKML

SEQ ID NO: 74667 - protein, 11 aa, Homo sapiens
  Table A; Target 74667; HLA-C*16:04; RNASE10; ENSG00000182545; TAA
GEDEVGGNKML

SEQ ID NO: 74668 - protein, 9 aa, Homo sapiens
  Table A; Target 74668; HLA-A*02:01; RNASE10; ENSG00000182545; TAA
GLGLGLHMA

SEQ ID NO: 74669 - protein, 9 aa, Homo sapiens
  Table A; Target 74669; HLA-A*02:03; RNASE10; ENSG00000182545; TAA
GLGLGLHMA

SEQ ID NO: 74670 - protein, 9 aa, Homo sapiens
  Table A; Target 74670; HLA-A*02:01; RNASE10; ENSG00000182545; TAA
GLGLHMATA

SEQ ID NO: 74671 - protein, 9 aa, Homo sapiens
  Table A; Target 74671; HLA-A*02:03; RNASE10; ENSG00000182545; TAA
GLGLHMATA

SEQ ID NO: 74672 - protein, 10 aa, Homo sapiens
  Table A; Target 74672; HLA-A*02:03; RNASE10; ENSG00000182545; TAA
GLGMGLGLGL

SEQ ID NO: 74673 - protein, 8 aa, Homo sapiens
  Table A; Target 74673; HLA-B*13:02; RNASE10; ENSG00000182545; TAA
GLHMATAV

SEQ ID NO: 74674 - protein, 9 aa, Homo sapiens
  Table A; Target 74674; HLA-A*30:01; RNASE10; ENSG00000182545; TAA
HEDLNTVKA

SEQ ID NO: 74675 - protein, 9 aa, Homo sapiens
  Table A; Target 74675; HLA-B*18:01; RNASE10; ENSG00000182545; TAA
HEDLNTVKA

SEQ ID NO: 74676 - protein, 9 aa, Homo sapiens
  Table A; Target 74676; HLA-B*40:01; RNASE10; ENSG00000182545; TAA
HEDLNTVKA

SEQ ID NO: 74677 - protein, 9 aa, Homo sapiens
  Table A; Target 74677; HLA-B*40:02; RNASE10; ENSG00000182545; TAA
HEDLNTVKA

SEQ ID NO: 74678 - protein, 9 aa, Homo sapiens
  Table A; Target 74678; HLA-B*49:01; RNASE10; ENSG00000182545; TAA
HEDLNTVKA

SEQ ID NO: 74679 - protein, 10 aa, Homo sapiens
  Table A; Target 74679; HLA-A*30:01; RNASE10; ENSG00000182545; TAA
HEDLNTVKAV

SEQ ID NO: 74680 - protein, 10 aa, Homo sapiens
  Table A; Target 74680; HLA-B*40:01; RNASE10; ENSG00000182545; TAA
HEDLNTVKAV

SEQ ID NO: 74681 - protein, 10 aa, Homo sapiens
  Table A; Target 74681; HLA-B*40:02; RNASE10; ENSG00000182545; TAA
HEDLNTVKAV

SEQ ID NO: 74682 - protein, 10 aa, Homo sapiens
  Table A; Target 74682; HLA-B*49:01; RNASE10; ENSG00000182545; TAA
HEDLNTVKAV

SEQ ID NO: 74683 - protein, 8 aa, Homo sapiens
  Table A; Target 74683; HLA-B*39:01; RNASE10; ENSG00000182545; TAA
IHEDLNTV

SEQ ID NO: 74684 - protein, 8 aa, Homo sapiens
  Table A; Target 74684; HLA-C*05:01; RNASE10; ENSG00000182545; TAA
IHEDLNTV

SEQ ID NO: 74685 - protein, 9 aa, Homo sapiens
  Table A; Target 74685; HLA-B*27:05; RNASE10; ENSG00000182545; TAA
IHEDLNTVK

SEQ ID NO: 74686 - protein, 9 aa, Homo sapiens
  Table A; Target 74686; HLA-B*38:01; RNASE10; ENSG00000182545; TAA
IHEDLNTVK

SEQ ID NO: 74687 - protein, 9 aa, Homo sapiens
  Table A; Target 74687; HLA-B*39:01; RNASE10; ENSG00000182545; TAA
IHEDLNTVK

SEQ ID NO: 74688 - protein, 10 aa, Homo sapiens
  Table A; Target 74688; HLA-B*38:01; RNASE10; ENSG00000182545; TAA
IHEDLNTVKA

SEQ ID NO: 74689 - protein, 11 aa, Homo sapiens
  Table A; Target 74689; HLA-B*38:01; RNASE10; ENSG00000182545; TAA
IHEDLNTVKAV

SEQ ID NO: 74690 - protein, 11 aa, Homo sapiens
  Table A; Target 74690; HLA-A*03:02; RNASE10; ENSG00000182545; TAA
ILGEDEVGGNK

SEQ ID NO: 74691 - protein, 11 aa, Homo sapiens
  Table A; Target 74691; HLA-B*27:02; RNASE10; ENSG00000182545; TAA
ILGEDEVGGNK

SEQ ID NO: 74692 - protein, 9 aa, Homo sapiens
  Table A; Target 74692; HLA-A*23:01; RNASE10; ENSG00000182545; TAA
KAVCNSPVI

SEQ ID NO: 74693 - protein, 9 aa, Homo sapiens
  Table A; Target 74693; HLA-B*58:01; RNASE10; ENSG00000182545; TAA
KAVCNSPVI

SEQ ID NO: 74694 - protein, 9 aa, Homo sapiens
  Table A; Target 74694; HLA-C*16:02; RNASE10; ENSG00000182545; TAA
KAVCNSPVI

SEQ ID NO: 74695 - protein, 11 aa, Homo sapiens
  Table A; Target 74695; HLA-A*30:02; RNASE10; ENSG00000182545; TAA
KEPSQSCIAQY

SEQ ID NO: 74696 - protein, 11 aa, Homo sapiens
  Table A; Target 74696; HLA-B*44:02; RNASE10; ENSG00000182545; TAA
KEPSQSCIAQY

SEQ ID NO: 74697 - protein, 11 aa, Homo sapiens
  Table A; Target 74697; HLA-B*44:03; RNASE10; ENSG00000182545; TAA
KEPSQSCIAQY

SEQ ID NO: 74698 - protein, 11 aa, Homo sapiens
  Table A; Target 74698; HLA-C*04:01; RNASE10; ENSG00000182545; TAA
KEPSQSCIAQY

SEQ ID NO: 74699 - protein, 11 aa, Homo sapiens
  Table A; Target 74699; HLA-C*07:01; RNASE10; ENSG00000182545; TAA
KEPSQSCIAQY

SEQ ID NO: 74700 - protein, 11 aa, Homo sapiens
  Table A; Target 74700; HLA-C*16:04; RNASE10; ENSG00000182545; TAA
KEPSQSCIAQY

SEQ ID NO: 74701 - protein, 8 aa, Homo sapiens
  Table A; Target 74701; HLA-B*27:02; RNASE10; ENSG00000182545; TAA
KEVVQPGW

SEQ ID NO: 74702 - protein, 8 aa, Homo sapiens
  Table A; Target 74702; HLA-B*37:01; RNASE10; ENSG00000182545; TAA
KEVVQPGW

SEQ ID NO: 74703 - protein, 8 aa, Homo sapiens
  Table A; Target 74703; HLA-B*44:02; RNASE10; ENSG00000182545; TAA
KEVVQPGW

SEQ ID NO: 74704 - protein, 8 aa, Homo sapiens
  Table A; Target 74704; HLA-B*44:03; RNASE10; ENSG00000182545; TAA
KEVVQPGW

SEQ ID NO: 74705 - protein, 8 aa, Homo sapiens
  Table A; Target 74705; HLA-B*58:01; RNASE10; ENSG00000182545; TAA
KEVVQPGW

SEQ ID NO: 74706 - protein, 8 aa, Homo sapiens
  Table A; Target 74706; HLA-C*16:04; RNASE10; ENSG00000182545; TAA
KEVVQPGW

SEQ ID NO: 74707 - protein, 8 aa, Homo sapiens
  Table A; Target 74707; HLA-B*37:01; RNASE10; ENSG00000182545; TAA
KLNLVQIF

SEQ ID NO: 74708 - protein, 9 aa, Homo sapiens
  Table A; Target 74708; HLA-A*02:04; RNASE10; ENSG00000182545; TAA
KLNLVQIFF

SEQ ID NO: 74709 - protein, 9 aa, Homo sapiens
  Table A; Target 74709; HLA-A*02:07; RNASE10; ENSG00000182545; TAA
KLNLVQIFF

SEQ ID NO: 74710 - protein, 9 aa, Homo sapiens
  Table A; Target 74710; HLA-A*03:01; RNASE10; ENSG00000182545; TAA
KLNLVQIFF

SEQ ID NO: 74711 - protein, 9 aa, Homo sapiens
  Table A; Target 74711; HLA-B*57:01; RNASE10; ENSG00000182545; TAA
KLNLVQIFF

SEQ ID NO: 74712 - protein, 10 aa, Homo sapiens
  Table A; Target 74712; HLA-A*02:04; RNASE10; ENSG00000182545; TAA
KLNLVQIFFM

SEQ ID NO: 74713 - protein, 9 aa, Homo sapiens
  Table A; Target 74713; HLA-A*32:01; RNASE10; ENSG00000182545; TAA
KMKEPSQSC

SEQ ID NO: 74714 - protein, 9 aa, Homo sapiens
  Table A; Target 74714; HLA-B*46:01; RNASE10; ENSG00000182545; TAA
KMKEPSQSC

SEQ ID NO: 74715 - protein, 9 aa, Homo sapiens
  Table A; Target 74715; HLA-B*55:01; RNASE10; ENSG00000182545; TAA
KMKEPSQSC

SEQ ID NO: 74716 - protein, 9 aa, Homo sapiens
  Table A; Target 74716; HLA-A*24:02; RNASE10; ENSG00000182545; TAA
KMLRASALF

SEQ ID NO: 74717 - protein, 9 aa, Homo sapiens
  Table A; Target 74717; HLA-B*57:01; RNASE10; ENSG00000182545; TAA
KMLRASALF

SEQ ID NO: 74718 - protein, 8 aa, Homo sapiens
  Table A; Target 74718; HLA-C*14:02; RNASE10; ENSG00000182545; TAA
LFQSNKDY

SEQ ID NO: 74719 - protein, 9 aa, Homo sapiens
  Table A; Target 74719; HLA-C*14:02; RNASE10; ENSG00000182545; TAA
LFQSNKDYL

SEQ ID NO: 74720 - protein, 8 aa, Homo sapiens
  Table A; Target 74720; HLA-C*07:04; RNASE10; ENSG00000182545; TAA
LLGLGMGL

SEQ ID NO: 74721 - protein, 9 aa, Homo sapiens
  Table A; Target 74721; HLA-A*02:01; RNASE10; ENSG00000182545; TAA
LLLGLGMGL

SEQ ID NO: 74722 - protein, 9 aa, Homo sapiens
  Table A; Target 74722; HLA-A*02:04; RNASE10; ENSG00000182545; TAA
LLLGLGMGL

SEQ ID NO: 74723 - protein, 9 aa, Homo sapiens
  Table A; Target 74723; HLA-A*02:07; RNASE10; ENSG00000182545; TAA
LLLGLGMGL

SEQ ID NO: 74724 - protein, 11 aa, Homo sapiens
  Table A; Target 74724; HLA-A*02:04; RNASE10; ENSG00000182545; TAA
LLLGLGMGLGL

SEQ ID NO: 74725 - protein, 11 aa, Homo sapiens
  Table A; Target 74725; HLA-B*57:01; RNASE10; ENSG00000182545; TAA
LSNKEVVQPGW

SEQ ID NO: 74726 - protein, 11 aa, Homo sapiens
  Table A; Target 74726; HLA-B*58:01; RNASE10; ENSG00000182545; TAA
LSNKEVVQPGW

SEQ ID NO: 74727 - protein, 9 aa, Homo sapiens
  Table A; Target 74727; HLA-A*02:04; RNASE10; ENSG00000182545; TAA
LVQIFFMLL

SEQ ID NO: 74728 - protein, 10 aa, Homo sapiens
  Table A; Target 74728; HLA-B*54:01; RNASE10; ENSG00000182545; TAA
MGLGLGLHMA

SEQ ID NO: 74729 - protein, 10 aa, Homo sapiens
  Table A; Target 74729; HLA-A*02:01; RNASE10; ENSG00000182545; TAA
MLLLGLGMGL

SEQ ID NO: 74730 - protein, 10 aa, Homo sapiens
  Table A; Target 74730; HLA-A*02:04; RNASE10; ENSG00000182545; TAA
MLLLGLGMGL

SEQ ID NO: 74731 - protein, 9 aa, Homo sapiens
  Table A; Target 74731; HLA-A*02:04; RNASE10; ENSG00000182545; TAA
MLLMLLLGL

SEQ ID NO: 74732 - protein, 8 aa, Homo sapiens
  Table A; Target 74732; HLA-A*30:01; RNASE10; ENSG00000182545; TAA
NDMMAHKM

SEQ ID NO: 74733 - protein, 8 aa, Homo sapiens
  Table A; Target 74733; HLA-B*08:01; RNASE10; ENSG00000182545; TAA
NDMMAHKM

SEQ ID NO: 74734 - protein, 8 aa, Homo sapiens
  Table A; Target 74734; HLA-B*18:01; RNASE10; ENSG00000182545; TAA
NDMMAHKM

SEQ ID NO: 74735 - protein, 8 aa, Homo sapiens
  Table A; Target 74735; HLA-B*37:01; RNASE10; ENSG00000182545; TAA
NDMMAHKM

SEQ ID NO: 74736 - protein, 8 aa, Homo sapiens
  Table A; Target 74736; HLA-C*07:01; RNASE10; ENSG00000182545; TAA
NDMMAHKM

SEQ ID NO: 74737 - protein, 9 aa, Homo sapiens
  Table A; Target 74737; HLA-B*08:01; RNASE10; ENSG00000182545; TAA
NKMLRASAL

SEQ ID NO: 74738 - protein, 9 aa, Homo sapiens
  Table A; Target 74738; HLA-A*02:01; RNASE10; ENSG00000182545; TAA
NLVQIFFML

SEQ ID NO: 74739 - protein, 9 aa, Homo sapiens
  Table A; Target 74739; HLA-A*02:04; RNASE10; ENSG00000182545; TAA
NLVQIFFML

SEQ ID NO: 74740 - protein, 9 aa, Homo sapiens
  Table A; Target 74740; HLA-A*02:07; RNASE10; ENSG00000182545; TAA
NLVQIFFML

SEQ ID NO: 74741 - protein, 9 aa, Homo sapiens
  Table A; Target 74741; HLA-C*07:02; RNASE10; ENSG00000182545; TAA
NSPVIACEL

SEQ ID NO: 74742 - protein, 9 aa, Homo sapiens
  Table A; Target 74742; HLA-A*24:02; RNASE10; ENSG00000182545; TAA
NYLTSVIKK

SEQ ID NO: 74743 - protein, 9 aa, Homo sapiens
  Table A; Target 74743; HLA-A*33:01; RNASE10; ENSG00000182545; TAA
NYLTSVIKK

SEQ ID NO: 74744 - protein, 9 aa, Homo sapiens
  Table A; Target 74744; HLA-A*33:03; RNASE10; ENSG00000182545; TAA
NYLTSVIKK

SEQ ID NO: 74745 - protein, 10 aa, Homo sapiens
  Table A; Target 74745; HLA-C*04:01; RNASE10; ENSG00000182545; TAA
PDQVTPNCNY

SEQ ID NO: 74746 - protein, 9 aa, Homo sapiens
  Table A; Target 74746; HLA-C*04:01; RNASE10; ENSG00000182545; TAA
PFDLTLCEL

SEQ ID NO: 74747 - protein, 9 aa, Homo sapiens
  Table A; Target 74747; HLA-A*30:02; RNASE10; ENSG00000182545; TAA
PSQSCIAQY

SEQ ID NO: 74748 - protein, 9 aa, Homo sapiens
  Table A; Target 74748; HLA-C*07:01; RNASE10; ENSG00000182545; TAA
PSQSCIAQY

SEQ ID NO: 74749 - protein, 9 aa, Homo sapiens
  Table A; Target 74749; HLA-B*35:03; RNASE10; ENSG00000182545; TAA
QPDQVTPNC

SEQ ID NO: 74750 - protein, 9 aa, Homo sapiens
  Table A; Target 74750; HLA-B*55:01; RNASE10; ENSG00000182545; TAA
QPDQVTPNC

SEQ ID NO: 74751 - protein, 11 aa, Homo sapiens
  Table A; Target 74751; HLA-A*01:01; RNASE10; ENSG00000182545; TAA
QPDQVTPNCNY

SEQ ID NO: 74752 - protein, 11 aa, Homo sapiens
  Table A; Target 74752; HLA-B*35:01; RNASE10; ENSG00000182545; TAA
QPDQVTPNCNY

SEQ ID NO: 74753 - protein, 11 aa, Homo sapiens
  Table A; Target 74753; HLA-B*35:03; RNASE10; ENSG00000182545; TAA
QPDQVTPNCNY

SEQ ID NO: 74754 - protein, 11 aa, Homo sapiens
  Table A; Target 74754; HLA-B*55:01; RNASE10; ENSG00000182545; TAA
QPDQVTPNCNY

SEQ ID NO: 74755 - protein, 8 aa, Homo sapiens
  Table A; Target 74755; HLA-C*03:04; RNASE10; ENSG00000182545; TAA
QTTETLVL

SEQ ID NO: 74756 - protein, 11 aa, Homo sapiens
  Table A; Target 74756; HLA-A*03:02; RNASE10; ENSG00000182545; TAA
QTTETLVLSNK

SEQ ID NO: 74757 - protein, 11 aa, Homo sapiens
  Table A; Target 74757; HLA-A*11:01; RNASE10; ENSG00000182545; TAA
QTTETLVLSNK

SEQ ID NO: 74758 - protein, 11 aa, Homo sapiens
  Table A; Target 74758; HLA-A*68:01; RNASE10; ENSG00000182545; TAA
QTTETLVLSNK

SEQ ID NO: 74759 - protein, 11 aa, Homo sapiens
  Table A; Target 74759; HLA-B*27:02; RNASE10; ENSG00000182545; TAA
QTTETLVLSNK

SEQ ID NO: 74760 - protein, 9 aa, Homo sapiens
  Table A; Target 74760; HLA-C*16:02; RNASE10; ENSG00000182545; TAA
QVTPNCNYL

SEQ ID NO: 74761 - protein, 9 aa, Homo sapiens
  Table A; Target 74761; HLA-A*23:01; RNASE10; ENSG00000182545; TAA
QYAFIHEDL

SEQ ID NO: 74762 - protein, 9 aa, Homo sapiens
  Table A; Target 74762; HLA-A*24:02; RNASE10; ENSG00000182545; TAA
QYAFIHEDL

SEQ ID NO: 74763 - protein, 10 aa, Homo sapiens
  Table A; Target 74763; HLA-A*03:02; RNASE10; ENSG00000182545; TAA
RASALFQSNK

SEQ ID NO: 74764 - protein, 10 aa, Homo sapiens
  Table A; Target 74764; HLA-A*11:01; RNASE10; ENSG00000182545; TAA
RASALFQSNK

SEQ ID NO: 74765 - protein, 8 aa, Homo sapiens
  Table A; Target 74765; HLA-B*56:01; RNASE10; ENSG00000182545; TAA
RPFDLTLC

SEQ ID NO: 74766 - protein, 10 aa, Homo sapiens
  Table A; Target 74766; HLA-B*07:02; RNASE10; ENSG00000182545; TAA
RPFDLTLCEL

SEQ ID NO: 74767 - protein, 10 aa, Homo sapiens
  Table A; Target 74767; HLA-B*56:01; RNASE10; ENSG00000182545; TAA
RPFDLTLCEL

SEQ ID NO: 74768 - protein, 8 aa, Homo sapiens
  Table A; Target 74768; HLA-A*11:01; RNASE10; ENSG00000182545; TAA
SALFQSNK

SEQ ID NO: 74769 - protein, 10 aa, Homo sapiens
  Table A; Target 74769; HLA-A*30:02; RNASE10; ENSG00000182545; TAA
SALFQSNKDY

SEQ ID NO: 74770 - protein, 8 aa, Homo sapiens
  Table A; Target 74770; HLA-B*37:01; RNASE10; ENSG00000182545; TAA
SDQPLNEF

SEQ ID NO: 74771 - protein, 9 aa, Homo sapiens
  Table A; Target 74771; HLA-B*44:02; RNASE10; ENSG00000182545; TAA
SDQPLNEFW

SEQ ID NO: 74772 - protein, 9 aa, Homo sapiens
  Table A; Target 74772; HLA-B*44:03; RNASE10; ENSG00000182545; TAA
SDQPLNEFW

SEQ ID NO: 74773 - protein, 10 aa, Homo sapiens
  Table A; Target 74773; HLA-A*25:01; RNASE10; ENSG00000182545; TAA
SNKEVVQPGW

SEQ ID NO: 74774 - protein, 8 aa, Homo sapiens
  Table A; Target 74774; HLA-B*07:02; RNASE10; ENSG00000182545; TAA
SPVIACEL

SEQ ID NO: 74775 - protein, 8 aa, Homo sapiens
  Table A; Target 74775; HLA-B*08:01; RNASE10; ENSG00000182545; TAA
SPVIACEL

SEQ ID NO: 74776 - protein, 8 aa, Homo sapiens
  Table A; Target 74776; HLA-B*35:01; RNASE10; ENSG00000182545; TAA
SPVIACEL

SEQ ID NO: 74777 - protein, 8 aa, Homo sapiens
  Table A; Target 74777; HLA-B*35:03; RNASE10; ENSG00000182545; TAA
SPVIACEL

SEQ ID NO: 74778 - protein, 8 aa, Homo sapiens
  Table A; Target 74778; HLA-C*07:02; RNASE10; ENSG00000182545; TAA
SPVIACEL

SEQ ID NO: 74779 - protein, 8 aa, Homo sapiens
  Table A; Target 74779; HLA-A*30:02; RNASE10; ENSG00000182545; TAA
SQSCIAQY

SEQ ID NO: 74780 - protein, 8 aa, Homo sapiens
  Table A; Target 74780; HLA-B*15:01; RNASE10; ENSG00000182545; TAA
SQSCIAQY

SEQ ID NO: 74781 - protein, 8 aa, Homo sapiens
  Table A; Target 74781; HLA-B*15:03; RNASE10; ENSG00000182545; TAA
SQSCIAQY

SEQ ID NO: 74782 - protein, 9 aa, Homo sapiens
  Table A; Target 74782; HLA-B*07:02; RNASE10; ENSG00000182545; TAA
SSRPFDLTL

SEQ ID NO: 74783 - protein, 9 aa, Homo sapiens
  Table A; Target 74783; HLA-B*40:02; RNASE10; ENSG00000182545; TAA
SSRPFDLTL

SEQ ID NO: 74784 - protein, 9 aa, Homo sapiens
  Table A; Target 74784; HLA-B*57:01; RNASE10; ENSG00000182545; TAA
SSRPFDLTL

SEQ ID NO: 74785 - protein, 9 aa, Homo sapiens
  Table A; Target 74785; HLA-C*03:04; RNASE10; ENSG00000182545; TAA
SSRPFDLTL

SEQ ID NO: 74786 - protein, 9 aa, Homo sapiens
  Table A; Target 74786; HLA-C*07:02; RNASE10; ENSG00000182545; TAA
SSRPFDLTL

SEQ ID NO: 74787 - protein, 9 aa, Homo sapiens
  Table A; Target 74787; HLA-C*16:02; RNASE10; ENSG00000182545; TAA
SSRPFDLTL

SEQ ID NO: 74788 - protein, 8 aa, Homo sapiens
  Table A; Target 74788; HLA-B*08:01; RNASE10; ENSG00000182545; TAA
SVIKKHII

SEQ ID NO: 74789 - protein, 11 aa, Homo sapiens
  Table A; Target 74789; HLA-B*27:02; RNASE10; ENSG00000182545; TAA
TAVLEESDQPL

SEQ ID NO: 74790 - protein, 11 aa, Homo sapiens
  Table A; Target 74790; HLA-B*27:05; RNASE10; ENSG00000182545; TAA
TAVLEESDQPL

SEQ ID NO: 74791 - protein, 11 aa, Homo sapiens
  Table A; Target 74791; HLA-B*35:03; RNASE10; ENSG00000182545; TAA
TAVLEESDQPL

SEQ ID NO: 74792 - protein, 11 aa, Homo sapiens
  Table A; Target 74792; HLA-B*39:01; RNASE10; ENSG00000182545; TAA
TAVLEESDQPL

SEQ ID NO: 74793 - protein, 11 aa, Homo sapiens
  Table A; Target 74793; HLA-C*03:03; RNASE10; ENSG00000182545; TAA
TAVLEESDQPL

SEQ ID NO: 74794 - protein, 10 aa, Homo sapiens
  Table A; Target 74794; HLA-B*56:01; RNASE10; ENSG00000182545; TAA
TPNCNYLTSV

SEQ ID NO: 74795 - protein, 8 aa, Homo sapiens
  Table A; Target 74795; HLA-B*13:02; RNASE10; ENSG00000182545; TAA
TQTTETLV

SEQ ID NO: 74796 - protein, 9 aa, Homo sapiens
  Table A; Target 74796; HLA-A*30:01; RNASE10; ENSG00000182545; TAA
TQTTETLVL

SEQ ID NO: 74797 - protein, 9 aa, Homo sapiens
  Table A; Target 74797; HLA-B*13:02; RNASE10; ENSG00000182545; TAA
TQTTETLVL

SEQ ID NO: 74798 - protein, 9 aa, Homo sapiens
  Table A; Target 74798; HLA-B*15:01; RNASE10; ENSG00000182545; TAA
TQTTETLVL

SEQ ID NO: 74799 - protein, 9 aa, Homo sapiens
  Table A; Target 74799; HLA-B*15:03; RNASE10; ENSG00000182545; TAA
TQTTETLVL

SEQ ID NO: 74800 - protein, 9 aa, Homo sapiens
  Table A; Target 74800; HLA-B*27:05; RNASE10; ENSG00000182545; TAA
TQTTETLVL

SEQ ID NO: 74801 - protein, 9 aa, Homo sapiens
  Table A; Target 74801; HLA-B*35:03; RNASE10; ENSG00000182545; TAA
TQTTETLVL

SEQ ID NO: 74802 - protein, 9 aa, Homo sapiens
  Table A; Target 74802; HLA-B*38:01; RNASE10; ENSG00000182545; TAA
TQTTETLVL

SEQ ID NO: 74803 - protein, 9 aa, Homo sapiens
  Table A; Target 74803; HLA-B*39:01; RNASE10; ENSG00000182545; TAA
TQTTETLVL

SEQ ID NO: 74804 - protein, 9 aa, Homo sapiens
  Table A; Target 74804; HLA-B*40:01; RNASE10; ENSG00000182545; TAA
TQTTETLVL

SEQ ID NO: 74805 - protein, 9 aa, Homo sapiens
  Table A; Target 74805; HLA-C*02:02; RNASE10; ENSG00000182545; TAA
TQTTETLVL

SEQ ID NO: 74806 - protein, 9 aa, Homo sapiens
  Table A; Target 74806; HLA-C*03:03; RNASE10; ENSG00000182545; TAA
TQTTETLVL

SEQ ID NO: 74807 - protein, 9 aa, Homo sapiens
  Table A; Target 74807; HLA-C*05:01; RNASE10; ENSG00000182545; TAA
TQTTETLVL

SEQ ID NO: 74808 - protein, 9 aa, Homo sapiens
  Table A; Target 74808; HLA-C*07:04; RNASE10; ENSG00000182545; TAA
TQTTETLVL

SEQ ID NO: 74809 - protein, 9 aa, Homo sapiens
  Table A; Target 74809; HLA-A*01:01; RNASE10; ENSG00000182545; TAA
TTETLVLSN

SEQ ID NO: 74810 - protein, 10 aa, Homo sapiens
  Table A; Target 74810; HLA-A*03:02; RNASE10; ENSG00000182545; TAA
TTETLVLSNK

SEQ ID NO: 74811 - protein, 10 aa, Homo sapiens
  Table A; Target 74811; HLA-A*11:01; RNASE10; ENSG00000182545; TAA
TTETLVLSNK

SEQ ID NO: 74812 - protein, 10 aa, Homo sapiens
  Table A; Target 74812; HLA-B*27:02; RNASE10; ENSG00000182545; TAA
TTETLVLSNK

SEQ ID NO: 74813 - protein, 9 aa, Homo sapiens
  Table A; Target 74813; HLA-B*35:03; RNASE10; ENSG00000182545; TAA
VLEESDQPL

SEQ ID NO: 74814 - protein, 9 aa, Homo sapiens
  Table A; Target 74814; HLA-C*05:01; RNASE10; ENSG00000182545; TAA
VLEESDQPL

SEQ ID NO: 74815 - protein, 8 aa, Homo sapiens
  Table A; Target 74815; HLA-B*08:01; RNASE10; ENSG00000182545; TAA
YAFIHEDL

SEQ ID NO: 74816 - protein, 8 aa, Homo sapiens
  Table A; Target 74816; HLA-B*40:02; RNASE10; ENSG00000182545; TAA
YAFIHEDL

SEQ ID NO: 74817 - protein, 8 aa, Homo sapiens
  Table A; Target 74817; HLA-B*51:01; RNASE10; ENSG00000182545; TAA
YAFIHEDL

SEQ ID NO: 74818 - protein, 8 aa, Homo sapiens
  Table A; Target 74818; HLA-B*54:01; RNASE10; ENSG00000182545; TAA
YAFIHEDL

SEQ ID NO: 74819 - protein, 8 aa, Homo sapiens
  Table A; Target 74819; HLA-C*02:02; RNASE10; ENSG00000182545; TAA
YAFIHEDL

SEQ ID NO: 74820 - protein, 8 aa, Homo sapiens
  Table A; Target 74820; HLA-C*03:03; RNASE10; ENSG00000182545; TAA
YAFIHEDL

SEQ ID NO: 74821 - protein, 8 aa, Homo sapiens
  Table A; Target 74821; HLA-C*03:04; RNASE10; ENSG00000182545; TAA
YAFIHEDL

SEQ ID NO: 74822 - protein, 8 aa, Homo sapiens
  Table A; Target 74822; HLA-C*07:01; RNASE10; ENSG00000182545; TAA
YAFIHEDL

SEQ ID NO: 74823 - protein, 8 aa, Homo sapiens
  Table A; Target 74823; HLA-C*07:04; RNASE10; ENSG00000182545; TAA
YAFIHEDL

SEQ ID NO: 74824 - protein, 8 aa, Homo sapiens
  Table A; Target 74824; HLA-C*12:03; RNASE10; ENSG00000182545; TAA
YAFIHEDL

SEQ ID NO: 74825 - protein, 8 aa, Homo sapiens
  Table A; Target 74825; HLA-C*16:01; RNASE10; ENSG00000182545; TAA
YAFIHEDL

SEQ ID NO: 74826 - protein, 8 aa, Homo sapiens
  Table A; Target 74826; HLA-C*16:04; RNASE10; ENSG00000182545; TAA
YAFIHEDL

SEQ ID NO: 74827 - protein, 11 aa, Homo sapiens
  Table A; Target 74827; HLA-A*02:01; RNASE10; ENSG00000182545; TAA
YAFIHEDLNTV

SEQ ID NO: 74828 - protein, 11 aa, Homo sapiens
  Table A; Target 74828; HLA-A*02:03; RNASE10; ENSG00000182545; TAA
YAFIHEDLNTV

SEQ ID NO: 74829 - protein, 11 aa, Homo sapiens
  Table A; Target 74829; HLA-A*02:04; RNASE10; ENSG00000182545; TAA
YAFIHEDLNTV

SEQ ID NO: 74830 - protein, 11 aa, Homo sapiens
  Table A; Target 74830; HLA-B*51:01; RNASE10; ENSG00000182545; TAA
YAFIHEDLNTV

SEQ ID NO: 74831 - protein, 11 aa, Homo sapiens
  Table A; Target 74831; HLA-B*54:01; RNASE10; ENSG00000182545; TAA
YAFIHEDLNTV

SEQ ID NO: 74832 - protein, 11 aa, Homo sapiens
  Table A; Target 74832; HLA-C*02:02; RNASE10; ENSG00000182545; TAA
YAFIHEDLNTV

SEQ ID NO: 74833 - protein, 11 aa, Homo sapiens
  Table A; Target 74833; HLA-C*12:03; RNASE10; ENSG00000182545; TAA
YAFIHEDLNTV

SEQ ID NO: 74834 - protein, 8 aa, Homo sapiens
  Table A; Target 74834; HLA-A*03:01; RNASE10; ENSG00000182545; TAA
YLTSVIKK

SEQ ID NO: 74835 - protein, 8 aa, Homo sapiens
  Table A; Target 74835; HLA-A*03:02; RNASE10; ENSG00000182545; TAA
YLTSVIKK

SEQ ID NO: 74836 - protein, 9 aa, Homo sapiens
  Table A; Target 74836; HLA-C*16:02; RNASE10; ENSG00000182545; TAA
YLTSVIKKH

SEQ ID NO: 74837 - protein, 9 aa, Homo sapiens
  Table A; Target 74837; HLA-B*37:01; SEPT14; ENSG00000154997; TAA
ADTISKNDL

SEQ ID NO: 74838 - protein, 9 aa, Homo sapiens
  Table A; Target 74838; HLA-B*40:02; SEPT14; ENSG00000154997; TAA
ADTISKNDL

SEQ ID NO: 74839 - protein, 9 aa, Homo sapiens
  Table A; Target 74839; HLA-A*30:01; SEPT14; ENSG00000154997; TAA
AEKELQDKF

SEQ ID NO: 74840 - protein, 9 aa, Homo sapiens
  Table A; Target 74840; HLA-B*18:01; SEPT14; ENSG00000154997; TAA
AEKELQDKF

SEQ ID NO: 74841 - protein, 9 aa, Homo sapiens
  Table A; Target 74841; HLA-B*27:02; SEPT14; ENSG00000154997; TAA
AEKELQDKF

SEQ ID NO: 74842 - protein, 9 aa, Homo sapiens
  Table A; Target 74842; HLA-B*37:01; SEPT14; ENSG00000154997; TAA
AEKELQDKF

SEQ ID NO: 74843 - protein, 9 aa, Homo sapiens
  Table A; Target 74843; HLA-B*40:01; SEPT14; ENSG00000154997; TAA
AEKELQDKF

SEQ ID NO: 74844 - protein, 9 aa, Homo sapiens
  Table A; Target 74844; HLA-B*40:02; SEPT14; ENSG00000154997; TAA
AEKELQDKF

SEQ ID NO: 74845 - protein, 9 aa, Homo sapiens
  Table A; Target 74845; HLA-B*44:02; SEPT14; ENSG00000154997; TAA
AEKELQDKF

SEQ ID NO: 74846 - protein, 9 aa, Homo sapiens
  Table A; Target 74846; HLA-B*44:03; SEPT14; ENSG00000154997; TAA
AEKELQDKF

SEQ ID NO: 74847 - protein, 9 aa, Homo sapiens
  Table A; Target 74847; HLA-B*49:01; SEPT14; ENSG00000154997; TAA
AEKELQDKF

SEQ ID NO: 74848 - protein, 9 aa, Homo sapiens
  Table A; Target 74848; HLA-C*02:02; SEPT14; ENSG00000154997; TAA
AEKELQDKF

SEQ ID NO: 74849 - protein, 9 aa, Homo sapiens
  Table A; Target 74849; HLA-C*16:04; SEPT14; ENSG00000154997; TAA
AEKELQDKF

SEQ ID NO: 74850 - protein, 9 aa, Homo sapiens
  Table A; Target 74850; HLA-B*27:05; SEPT14; ENSG00000154997; TAA
ANSSVSGLL

SEQ ID NO: 74851 - protein, 9 aa, Homo sapiens
  Table A; Target 74851; HLA-B*39:01; SEPT14; ENSG00000154997; TAA
ANSSVSGLL

SEQ ID NO: 74852 - protein, 9 aa, Homo sapiens
  Table A; Target 74852; HLA-C*07:02; SEPT14; ENSG00000154997; TAA
ANSSVSGLL

SEQ ID NO: 74853 - protein, 10 aa, Homo sapiens
  Table A; Target 74853; HLA-B*27:05; SEPT14; ENSG00000154997; TAA
AQANSSVSGL

SEQ ID NO: 74854 - protein, 10 aa, Homo sapiens
  Table A; Target 74854; HLA-B*39:01; SEPT14; ENSG00000154997; TAA
AQANSSVSGL

SEQ ID NO: 74855 - protein, 11 aa, Homo sapiens
  Table A; Target 74855; HLA-B*13:02; SEPT14; ENSG00000154997; TAA
AQANSSVSGLL

SEQ ID NO: 74856 - protein, 11 aa, Homo sapiens
  Table A; Target 74856; HLA-B*27:05; SEPT14; ENSG00000154997; TAA
AQANSSVSGLL

SEQ ID NO: 74857 - protein, 11 aa, Homo sapiens
  Table A; Target 74857; HLA-B*38:01; SEPT14; ENSG00000154997; TAA
AQANSSVSGLL

SEQ ID NO: 74858 - protein, 11 aa, Homo sapiens
  Table A; Target 74858; HLA-B*39:01; SEPT14; ENSG00000154997; TAA
AQANSSVSGLL

SEQ ID NO: 74859 - protein, 11 aa, Homo sapiens
  Table A; Target 74859; HLA-B*40:01; SEPT14; ENSG00000154997; TAA
AQANSSVSGLL

SEQ ID NO: 74860 - protein, 11 aa, Homo sapiens
  Table A; Target 74860; HLA-A*30:01; SEPT14; ENSG00000154997; TAA
AQFEAYLQEEL

SEQ ID NO: 74861 - protein, 11 aa, Homo sapiens
  Table A; Target 74861; HLA-B*13:02; SEPT14; ENSG00000154997; TAA
AQFEAYLQEEL

SEQ ID NO: 74862 - protein, 11 aa, Homo sapiens
  Table A; Target 74862; HLA-B*27:05; SEPT14; ENSG00000154997; TAA
AQFEAYLQEEL

SEQ ID NO: 74863 - protein, 11 aa, Homo sapiens
  Table A; Target 74863; HLA-B*38:01; SEPT14; ENSG00000154997; TAA
AQFEAYLQEEL

SEQ ID NO: 74864 - protein, 9 aa, Homo sapiens
  Table A; Target 74864; HLA-A*01:01; SEPT14; ENSG00000154997; TAA
ASYQPIVDY

SEQ ID NO: 74865 - protein, 9 aa, Homo sapiens
  Table A; Target 74865; HLA-A*03:01; SEPT14; ENSG00000154997; TAA
ASYQPIVDY

SEQ ID NO: 74866 - protein, 9 aa, Homo sapiens
  Table A; Target 74866; HLA-A*11:01; SEPT14; ENSG00000154997; TAA
ASYQPIVDY

SEQ ID NO: 74867 - protein, 9 aa, Homo sapiens
  Table A; Target 74867; HLA-A*26:01; SEPT14; ENSG00000154997; TAA
ASYQPIVDY

SEQ ID NO: 74868 - protein, 9 aa, Homo sapiens
  Table A; Target 74868; HLA-A*29:02; SEPT14; ENSG00000154997; TAA
ASYQPIVDY

SEQ ID NO: 74869 - protein, 9 aa, Homo sapiens
  Table A; Target 74869; HLA-A*30:02; SEPT14; ENSG00000154997; TAA
ASYQPIVDY

SEQ ID NO: 74870 - protein, 9 aa, Homo sapiens
  Table A; Target 74870; HLA-B*15:01; SEPT14; ENSG00000154997; TAA
ASYQPIVDY

SEQ ID NO: 74871 - protein, 9 aa, Homo sapiens
  Table A; Target 74871; HLA-B*15:03; SEPT14; ENSG00000154997; TAA
ASYQPIVDY

SEQ ID NO: 74872 - protein, 9 aa, Homo sapiens
  Table A; Target 74872; HLA-B*35:01; SEPT14; ENSG00000154997; TAA
ASYQPIVDY

SEQ ID NO: 74873 - protein, 9 aa, Homo sapiens
  Table A; Target 74873; HLA-B*46:01; SEPT14; ENSG00000154997; TAA
ASYQPIVDY

SEQ ID NO: 74874 - protein, 9 aa, Homo sapiens
  Table A; Target 74874; HLA-B*58:01; SEPT14; ENSG00000154997; TAA
ASYQPIVDY

SEQ ID NO: 74875 - protein, 9 aa, Homo sapiens
  Table A; Target 74875; HLA-C*02:02; SEPT14; ENSG00000154997; TAA
ASYQPIVDY

SEQ ID NO: 74876 - protein, 9 aa, Homo sapiens
  Table A; Target 74876; HLA-C*07:04; SEPT14; ENSG00000154997; TAA
ASYQPIVDY

SEQ ID NO: 74877 - protein, 9 aa, Homo sapiens
  Table A; Target 74877; HLA-C*12:03; SEPT14; ENSG00000154997; TAA
ASYQPIVDY

SEQ ID NO: 74878 - protein, 9 aa, Homo sapiens
  Table A; Target 74878; HLA-C*16:01; SEPT14; ENSG00000154997; TAA
ASYQPIVDY

SEQ ID NO: 74879 - protein, 9 aa, Homo sapiens
  Table A; Target 74879; HLA-C*16:04; SEPT14; ENSG00000154997; TAA
ASYQPIVDY

SEQ ID NO: 74880 - protein, 10 aa, Homo sapiens
  Table A; Target 74880; HLA-B*58:01; SEPT14; ENSG00000154997; TAA
ATFKEAEKEL

SEQ ID NO: 74881 - protein, 9 aa, Homo sapiens
  Table A; Target 74881; HLA-A*02:01; SEPT14; ENSG00000154997; TAA
AVVGSTDEV

SEQ ID NO: 74882 - protein, 9 aa, Homo sapiens
  Table A; Target 74882; HLA-A*02:03; SEPT14; ENSG00000154997; TAA
AVVGSTDEV

SEQ ID NO: 74883 - protein, 9 aa, Homo sapiens
  Table A; Target 74883; HLA-A*02:07; SEPT14; ENSG00000154997; TAA
AVVGSTDEV

SEQ ID NO: 74884 - protein, 9 aa, Homo sapiens
  Table A; Target 74884; HLA-A*26:01; SEPT14; ENSG00000154997; TAA
AVVGSTDEV

SEQ ID NO: 74885 - protein, 9 aa, Homo sapiens
  Table A; Target 74885; HLA-B*13:02; SEPT14; ENSG00000154997; TAA
AVVGSTDEV

SEQ ID NO: 74886 - protein, 9 aa, Homo sapiens
  Table A; Target 74886; HLA-B*27:05; SEPT14; ENSG00000154997; TAA
AVVGSTDEV

SEQ ID NO: 74887 - protein, 9 aa, Homo sapiens
  Table A; Target 74887; HLA-B*55:01; SEPT14; ENSG00000154997; TAA
AVVGSTDEV

SEQ ID NO: 74888 - protein, 9 aa, Homo sapiens
  Table A; Target 74888; HLA-C*01:02; SEPT14; ENSG00000154997; TAA
AVVGSTDEV

SEQ ID NO: 74889 - protein, 9 aa, Homo sapiens
  Table A; Target 74889; HLA-C*12:03; SEPT14; ENSG00000154997; TAA
AVVGSTDEV

SEQ ID NO: 74890 - protein, 9 aa, Homo sapiens
  Table A; Target 74890; HLA-C*16:04; SEPT14; ENSG00000154997; TAA
AVVGSTDEV

SEQ ID NO: 74891 - protein, 10 aa, Homo sapiens
  Table A; Target 74891; HLA-A*03:02; SEPT14; ENSG00000154997; TAA
AVVGSTDEVK

SEQ ID NO: 74892 - protein, 10 aa, Homo sapiens
  Table A; Target 74892; HLA-A*11:01; SEPT14; ENSG00000154997; TAA
AVVGSTDEVK

SEQ ID NO: 74893 - protein, 10 aa, Homo sapiens
  Table A; Target 74893; HLA-A*68:01; SEPT14; ENSG00000154997; TAA
AVVGSTDEVK

SEQ ID NO: 74894 - protein, 10 aa, Homo sapiens
  Table A; Target 74894; HLA-C*07:06; SEPT14; ENSG00000154997; TAA
AVVGSTDEVK

SEQ ID NO: 74895 - protein, 9 aa, Homo sapiens
  Table A; Target 74895; HLA-A*23:01; SEPT14; ENSG00000154997; TAA
AYLQEELKI

SEQ ID NO: 74896 - protein, 9 aa, Homo sapiens
  Table A; Target 74896; HLA-A*24:02; SEPT14; ENSG00000154997; TAA
AYLQEELKI

SEQ ID NO: 74897 - protein, 11 aa, Homo sapiens
  Table A; Target 74897; HLA-A*31:01; SEPT14; ENSG00000154997; TAA
AYLQEELKIKR

SEQ ID NO: 74898 - protein, 11 aa, Homo sapiens
  Table A; Target 74898; HLA-A*33:01; SEPT14; ENSG00000154997; TAA
AYLQEELKIKR

SEQ ID NO: 74899 - protein, 9 aa, Homo sapiens
  Table A; Target 74899; HLA-A*31:01; SEPT14; ENSG00000154997; TAA
CLPNQLVSR

SEQ ID NO: 74900 - protein, 9 aa, Homo sapiens
  Table A; Target 74900; HLA-A*33:01; SEPT14; ENSG00000154997; TAA
CLPNQLVSR

SEQ ID NO: 74901 - protein, 9 aa, Homo sapiens
  Table A; Target 74901; HLA-A*33:03; SEPT14; ENSG00000154997; TAA
CLPNQLVSR

SEQ ID NO: 74902 - protein, 11 aa, Homo sapiens
  Table A; Target 74902; HLA-A*31:01; SEPT14; ENSG00000154997; TAA
CQREEEELKQR

SEQ ID NO: 74903 - protein, 10 aa, Homo sapiens
  Table A; Target 74903; HLA-A*11:01; SEPT14; ENSG00000154997; TAA
CTNMENLKEK

SEQ ID NO: 74904 - protein, 9 aa, Homo sapiens
  Table A; Target 74904; HLA-A*03:01; SEPT14; ENSG00000154997; TAA
CVGETGIGK

SEQ ID NO: 74905 - protein, 9 aa, Homo sapiens
  Table A; Target 74905; HLA-A*03:02; SEPT14; ENSG00000154997; TAA
CVGETGIGK

SEQ ID NO: 74906 - protein, 9 aa, Homo sapiens
  Table A; Target 74906; HLA-A*11:01; SEPT14; ENSG00000154997; TAA
CVGETGIGK

SEQ ID NO: 74907 - protein, 9 aa, Homo sapiens
  Table A; Target 74907; HLA-A*68:01; SEPT14; ENSG00000154997; TAA
CVGETGIGK

SEQ ID NO: 74908 - protein, 9 aa, Homo sapiens
  Table A; Target 74908; HLA-C*07:06; SEPT14; ENSG00000154997; TAA
CVGETGIGK

SEQ ID NO: 74909 - protein, 9 aa, Homo sapiens
  Table A; Target 74909; HLA-A*33:01; SEPT14; ENSG00000154997; TAA
DAQFEAYLQ

SEQ ID NO: 74910 - protein, 8 aa, Homo sapiens
  Table A; Target 74910; HLA-B*18:01; SEPT14; ENSG00000154997; TAA
DEETAAQA

SEQ ID NO: 74911 - protein, 8 aa, Homo sapiens
  Table A; Target 74911; HLA-B*18:01; SEPT14; ENSG00000154997; TAA
DEVKVGKR

SEQ ID NO: 74912 - protein, 9 aa, Homo sapiens
  Table A; Target 74912; HLA-B*18:01; SEPT14; ENSG00000154997; TAA
DEVKVGKRM

SEQ ID NO: 74913 - protein, 9 aa, Homo sapiens
  Table A; Target 74913; HLA-B*44:02; SEPT14; ENSG00000154997; TAA
DEVKVGKRM

SEQ ID NO: 74914 - protein, 9 aa, Homo sapiens
  Table A; Target 74914; HLA-B*44:03; SEPT14; ENSG00000154997; TAA
DEVKVGKRM

SEQ ID NO: 74915 - protein, 8 aa, Homo sapiens
  Table A; Target 74915; HLA-A*33:01; SEPT14; ENSG00000154997; TAA
DLQTFKNK

SEQ ID NO: 74916 - protein, 9 aa, Homo sapiens
  Table A; Target 74916; HLA-B*08:01; SEPT14; ENSG00000154997; TAA
DLQTFKNKI

SEQ ID NO: 74917 - protein, 8 aa, Homo sapiens
  Table A; Target 74917; HLA-B*08:01; SEPT14; ENSG00000154997; TAA
DMLLCTNM

SEQ ID NO: 74918 - protein, 8 aa, Homo sapiens
  Table A; Target 74918; HLA-A*33:01; SEPT14; ENSG00000154997; TAA
DNKSSHFY

SEQ ID NO: 74919 - protein, 8 aa, Homo sapiens
  Table A; Target 74919; HLA-C*07:01; SEPT14; ENSG00000154997; TAA
DNKSSHFY

SEQ ID NO: 74920 - protein, 9 aa, Homo sapiens
  Table A; Target 74920; HLA-A*33:01; SEPT14; ENSG00000154997; TAA
DNKSSHFYS

SEQ ID NO: 74921 - protein, 9 aa, Homo sapiens
  Table A; Target 74921; HLA-A*25:01; SEPT14; ENSG00000154997; TAA
DQIDKEASY

SEQ ID NO: 74922 - protein, 9 aa, Homo sapiens
  Table A; Target 74922; HLA-A*26:01; SEPT14; ENSG00000154997; TAA
DQIDKEASY

SEQ ID NO: 74923 - protein, 9 aa, Homo sapiens
  Table A; Target 74923; HLA-A*30:02; SEPT14; ENSG00000154997; TAA
DQIDKEASY

SEQ ID NO: 74924 - protein, 9 aa, Homo sapiens
  Table A; Target 74924; HLA-A*32:01; SEPT14; ENSG00000154997; TAA
DQIDKEASY

SEQ ID NO: 74925 - protein, 9 aa, Homo sapiens
  Table A; Target 74925; HLA-B*15:01; SEPT14; ENSG00000154997; TAA
DQIDKEASY

SEQ ID NO: 74926 - protein, 9 aa, Homo sapiens
  Table A; Target 74926; HLA-B*15:03; SEPT14; ENSG00000154997; TAA
DQIDKEASY

SEQ ID NO: 74927 - protein, 9 aa, Homo sapiens
  Table A; Target 74927; HLA-B*18:01; SEPT14; ENSG00000154997; TAA
DQIDKEASY

SEQ ID NO: 74928 - protein, 9 aa, Homo sapiens
  Table A; Target 74928; HLA-B*35:01; SEPT14; ENSG00000154997; TAA
DQIDKEASY

SEQ ID NO: 74929 - protein, 9 aa, Homo sapiens
  Table A; Target 74929; HLA-B*39:01; SEPT14; ENSG00000154997; TAA
DQIDKEASY

SEQ ID NO: 74930 - protein, 9 aa, Homo sapiens
  Table A; Target 74930; HLA-B*44:02; SEPT14; ENSG00000154997; TAA
DQIDKEASY

SEQ ID NO: 74931 - protein, 9 aa, Homo sapiens
  Table A; Target 74931; HLA-B*44:03; SEPT14; ENSG00000154997; TAA
DQIDKEASY

SEQ ID NO: 74932 - protein, 9 aa, Homo sapiens
  Table A; Target 74932; HLA-C*07:04; SEPT14; ENSG00000154997; TAA
DQIDKEASY

SEQ ID NO: 74933 - protein, 9 aa, Homo sapiens
  Table A; Target 74933; HLA-C*07:06; SEPT14; ENSG00000154997; TAA
DQIDKEASY

SEQ ID NO: 74934 - protein, 9 aa, Homo sapiens
  Table A; Target 74934; HLA-C*14:02; SEPT14; ENSG00000154997; TAA
DQIDKEASY

SEQ ID NO: 74935 - protein, 9 aa, Homo sapiens
  Table A; Target 74935; HLA-A*33:01; SEPT14; ENSG00000154997; TAA
DSKVNIIPL

SEQ ID NO: 74936 - protein, 8 aa, Homo sapiens
  Table A; Target 74936; HLA-B*08:01; SEPT14; ENSG00000154997; TAA
DSRVHVCL

SEQ ID NO: 74937 - protein, 9 aa, Homo sapiens
  Table A; Target 74937; HLA-A*33:01; SEPT14; ENSG00000154997; TAA
DSRVHVCLY

SEQ ID NO: 74938 - protein, 9 aa, Homo sapiens
  Table A; Target 74938; HLA-C*07:01; SEPT14; ENSG00000154997; TAA
DSRVHVCLY

SEQ ID NO: 74939 - protein, 8 aa, Homo sapiens
  Table A; Target 74939; HLA-B*08:01; SEPT14; ENSG00000154997; TAA
DTISKNDL

SEQ ID NO: 74940 - protein, 9 aa, Homo sapiens
  Table A; Target 74940; HLA-A*26:01; SEPT14; ENSG00000154997; TAA
DTISKNDLQ

SEQ ID NO: 74941 - protein, 9 aa, Homo sapiens
  Table A; Target 74941; HLA-A*33:01; SEPT14; ENSG00000154997; TAA
DTISKNDLQ

SEQ ID NO: 74942 - protein, 11 aa, Homo sapiens
  Table A; Target 74942; HLA-A*25:01; SEPT14; ENSG00000154997; TAA
DTISKNDLQTF

SEQ ID NO: 74943 - protein, 11 aa, Homo sapiens
  Table A; Target 74943; HLA-A*26:01; SEPT14; ENSG00000154997; TAA
DTISKNDLQTF

SEQ ID NO: 74944 - protein, 11 aa, Homo sapiens
  Table A; Target 74944; HLA-A*33:01; SEPT14; ENSG00000154997; TAA
DTISKNDLQTF

SEQ ID NO: 74945 - protein, 11 aa, Homo sapiens
  Table A; Target 74945; HLA-A*33:03; SEPT14; ENSG00000154997; TAA
DTISKNDLQTF

SEQ ID NO: 74946 - protein, 11 aa, Homo sapiens
  Table A; Target 74946; HLA-A*68:01; SEPT14; ENSG00000154997; TAA
DTISKNDLQTF

SEQ ID NO: 74947 - protein, 11 aa, Homo sapiens
  Table A; Target 74947; HLA-A*68:02; SEPT14; ENSG00000154997; TAA
DTISKNDLQTF

SEQ ID NO: 74948 - protein, 11 aa, Homo sapiens
  Table A; Target 74948; HLA-B*38:01; SEPT14; ENSG00000154997; TAA
DTISKNDLQTF

SEQ ID NO: 74949 - protein, 11 aa, Homo sapiens
  Table A; Target 74949; HLA-B*57:01; SEPT14; ENSG00000154997; TAA
DTISKNDLQTF

SEQ ID NO: 74950 - protein, 11 aa, Homo sapiens
  Table A; Target 74950; HLA-B*58:01; SEPT14; ENSG00000154997; TAA
DTISKNDLQTF

SEQ ID NO: 74951 - protein, 11 aa, Homo sapiens
  Table A; Target 74951; HLA-C*07:06; SEPT14; ENSG00000154997; TAA
DTISKNDLQTF

SEQ ID NO: 74952 - protein, 9 aa, Homo sapiens
  Table A; Target 74952; HLA-A*01:01; SEPT14; ENSG00000154997; TAA
DTLFNTNLK

SEQ ID NO: 74953 - protein, 9 aa, Homo sapiens
  Table A; Target 74953; HLA-A*03:02; SEPT14; ENSG00000154997; TAA
DTLFNTNLK

SEQ ID NO: 74954 - protein, 9 aa, Homo sapiens
  Table A; Target 74954; HLA-A*11:01; SEPT14; ENSG00000154997; TAA
DTLFNTNLK

SEQ ID NO: 74955 - protein, 9 aa, Homo sapiens
  Table A; Target 74955; HLA-A*33:01; SEPT14; ENSG00000154997; TAA
DTLFNTNLK

SEQ ID NO: 74956 - protein, 9 aa, Homo sapiens
  Table A; Target 74956; HLA-A*33:03; SEPT14; ENSG00000154997; TAA
DTLFNTNLK

SEQ ID NO: 74957 - protein, 9 aa, Homo sapiens
  Table A; Target 74957; HLA-A*68:01; SEPT14; ENSG00000154997; TAA
DTLFNTNLK

SEQ ID NO: 74958 - protein, 9 aa, Homo sapiens
  Table A; Target 74958; HLA-C*07:06; SEPT14; ENSG00000154997; TAA
DTLFNTNLK

SEQ ID NO: 74959 - protein, 11 aa, Homo sapiens
  Table A; Target 74959; HLA-C*07:01; SEPT14; ENSG00000154997; TAA
DTLFNTNLKDN

SEQ ID NO: 74960 - protein, 9 aa, Homo sapiens
  Table A; Target 74960; HLA-A*33:01; SEPT14; ENSG00000154997; TAA
DTQKENNIR

SEQ ID NO: 74961 - protein, 9 aa, Homo sapiens
  Table A; Target 74961; HLA-A*33:03; SEPT14; ENSG00000154997; TAA
DTQKENNIR

SEQ ID NO: 74962 - protein, 9 aa, Homo sapiens
  Table A; Target 74962; HLA-A*68:01; SEPT14; ENSG00000154997; TAA
DTQKENNIR

SEQ ID NO: 74963 - protein, 9 aa, Homo sapiens
  Table A; Target 74963; HLA-A*26:01; SEPT14; ENSG00000154997; TAA
DVGPNNQPV

SEQ ID NO: 74964 - protein, 11 aa, Homo sapiens
  Table A; Target 74964; HLA-A*25:01; SEPT14; ENSG00000154997; TAA
DVGPNNQPVSF

SEQ ID NO: 74965 - protein, 11 aa, Homo sapiens
  Table A; Target 74965; HLA-A*26:01; SEPT14; ENSG00000154997; TAA
DVGPNNQPVSF

SEQ ID NO: 74966 - protein, 11 aa, Homo sapiens
  Table A; Target 74966; HLA-A*33:01; SEPT14; ENSG00000154997; TAA
DVGPNNQPVSF

SEQ ID NO: 74967 - protein, 11 aa, Homo sapiens
  Table A; Target 74967; HLA-A*33:03; SEPT14; ENSG00000154997; TAA
DVGPNNQPVSF

SEQ ID NO: 74968 - protein, 11 aa, Homo sapiens
  Table A; Target 74968; HLA-A*68:01; SEPT14; ENSG00000154997; TAA
DVGPNNQPVSF

SEQ ID NO: 74969 - protein, 11 aa, Homo sapiens
  Table A; Target 74969; HLA-C*07:06; SEPT14; ENSG00000154997; TAA
DVGPNNQPVSF

SEQ ID NO: 74970 - protein, 10 aa, Homo sapiens
  Table A; Target 74970; HLA-A*23:01; SEPT14; ENSG00000154997; TAA
DYIDAQFEAY

SEQ ID NO: 74971 - protein, 10 aa, Homo sapiens
  Table A; Target 74971; HLA-A*25:01; SEPT14; ENSG00000154997; TAA
DYIDAQFEAY

SEQ ID NO: 74972 - protein, 10 aa, Homo sapiens
  Table A; Target 74972; HLA-A*26:01; SEPT14; ENSG00000154997; TAA
DYIDAQFEAY

SEQ ID NO: 74973 - protein, 10 aa, Homo sapiens
  Table A; Target 74973; HLA-A*29:02; SEPT14; ENSG00000154997; TAA
DYIDAQFEAY

SEQ ID NO: 74974 - protein, 10 aa, Homo sapiens
  Table A; Target 74974; HLA-A*30:02; SEPT14; ENSG00000154997; TAA
DYIDAQFEAY

SEQ ID NO: 74975 - protein, 10 aa, Homo sapiens
  Table A; Target 74975; HLA-A*33:01; SEPT14; ENSG00000154997; TAA
DYIDAQFEAY

SEQ ID NO: 74976 - protein, 10 aa, Homo sapiens
  Table A; Target 74976; HLA-A*33:03; SEPT14; ENSG00000154997; TAA
DYIDAQFEAY

SEQ ID NO: 74977 - protein, 10 aa, Homo sapiens
  Table A; Target 74977; HLA-B*18:01; SEPT14; ENSG00000154997; TAA
DYIDAQFEAY

SEQ ID NO: 74978 - protein, 10 aa, Homo sapiens
  Table A; Target 74978; HLA-C*14:02; SEPT14; ENSG00000154997; TAA
DYIDAQFEAY

SEQ ID NO: 74979 - protein, 8 aa, Homo sapiens
  Table A; Target 74979; HLA-B*51:01; SEPT14; ENSG00000154997; TAA
EASYQPIV

SEQ ID NO: 74980 - protein, 10 aa, Homo sapiens
  Table A; Target 74980; HLA-A*25:01; SEPT14; ENSG00000154997; TAA
EASYQPIVDY

SEQ ID NO: 74981 - protein, 10 aa, Homo sapiens
  Table A; Target 74981; HLA-A*26:01; SEPT14; ENSG00000154997; TAA
EASYQPIVDY

SEQ ID NO: 74982 - protein, 10 aa, Homo sapiens
  Table A; Target 74982; HLA-A*68:01; SEPT14; ENSG00000154997; TAA
EASYQPIVDY

SEQ ID NO: 74983 - protein, 10 aa, Homo sapiens
  Table A; Target 74983; HLA-B*35:01; SEPT14; ENSG00000154997; TAA
EASYQPIVDY

SEQ ID NO: 74984 - protein, 10 aa, Homo sapiens
  Table A; Target 74984; HLA-C*07:06; SEPT14; ENSG00000154997; TAA
EASYQPIVDY

SEQ ID NO: 74985 - protein, 11 aa, Homo sapiens
  Table A; Target 74985; HLA-A*68:02; SEPT14; ENSG00000154997; TAA
EASYQPIVDYI

SEQ ID NO: 74986 - protein, 9 aa, Homo sapiens
  Table A; Target 74986; HLA-A*33:03; SEPT14; ENSG00000154997; TAA
EATFKEAEK

SEQ ID NO: 74987 - protein, 9 aa, Homo sapiens
  Table A; Target 74987; HLA-A*68:01; SEPT14; ENSG00000154997; TAA
EATFKEAEK

SEQ ID NO: 74988 - protein, 9 aa, Homo sapiens
  Table A; Target 74988; HLA-C*07:06; SEPT14; ENSG00000154997; TAA
EATFKEAEK

SEQ ID NO: 74989 - protein, 8 aa, Homo sapiens
  Table A; Target 74989; HLA-B*08:01; SEPT14; ENSG00000154997; TAA
EAYLQEEL

SEQ ID NO: 74990 - protein, 8 aa, Homo sapiens
  Table A; Target 74990; HLA-B*27:05; SEPT14; ENSG00000154997; TAA
EAYLQEEL

SEQ ID NO: 74991 - protein, 8 aa, Homo sapiens
  Table A; Target 74991; HLA-B*35:01; SEPT14; ENSG00000154997; TAA
EAYLQEEL

SEQ ID NO: 74992 - protein, 8 aa, Homo sapiens
  Table A; Target 74992; HLA-B*35:03; SEPT14; ENSG00000154997; TAA
EAYLQEEL

SEQ ID NO: 74993 - protein, 8 aa, Homo sapiens
  Table A; Target 74993; HLA-B*39:01; SEPT14; ENSG00000154997; TAA
EAYLQEEL

SEQ ID NO: 74994 - protein, 8 aa, Homo sapiens
  Table A; Target 74994; HLA-B*51:01; SEPT14; ENSG00000154997; TAA
EAYLQEEL

SEQ ID NO: 74995 - protein, 8 aa, Homo sapiens
  Table A; Target 74995; HLA-C*01:02; SEPT14; ENSG00000154997; TAA
EAYLQEEL

SEQ ID NO: 74996 - protein, 8 aa, Homo sapiens
  Table A; Target 74996; HLA-C*03:03; SEPT14; ENSG00000154997; TAA
EAYLQEEL

SEQ ID NO: 74997 - protein, 8 aa, Homo sapiens
  Table A; Target 74997; HLA-C*03:04; SEPT14; ENSG00000154997; TAA
EAYLQEEL

SEQ ID NO: 74998 - protein, 8 aa, Homo sapiens
  Table A; Target 74998; HLA-C*05:01; SEPT14; ENSG00000154997; TAA
EAYLQEEL

SEQ ID NO: 74999 - protein, 8 aa, Homo sapiens
  Table A; Target 74999; HLA-C*07:01; SEPT14; ENSG00000154997; TAA
EAYLQEEL

SEQ ID NO: 75000 - protein, 8 aa, Homo sapiens
  Table A; Target 75000; HLA-C*12:03; SEPT14; ENSG00000154997; TAA
EAYLQEEL

SEQ ID NO: 75001 - protein, 8 aa, Homo sapiens
  Table A; Target 75001; HLA-C*14:02; SEPT14; ENSG00000154997; TAA
EAYLQEEL

SEQ ID NO: 75002 - protein, 8 aa, Homo sapiens
  Table A; Target 75002; HLA-C*16:04; SEPT14; ENSG00000154997; TAA
EAYLQEEL

SEQ ID NO: 75003 - protein, 9 aa, Homo sapiens
  Table A; Target 75003; HLA-A*33:01; SEPT14; ENSG00000154997; TAA
EAYLQEELK

SEQ ID NO: 75004 - protein, 9 aa, Homo sapiens
  Table A; Target 75004; HLA-A*33:03; SEPT14; ENSG00000154997; TAA
EAYLQEELK

SEQ ID NO: 75005 - protein, 9 aa, Homo sapiens
  Table A; Target 75005; HLA-A*68:01; SEPT14; ENSG00000154997; TAA
EAYLQEELK

SEQ ID NO: 75006 - protein, 9 aa, Homo sapiens
  Table A; Target 75006; HLA-B*27:02; SEPT14; ENSG00000154997; TAA
EAYLQEELK

SEQ ID NO: 75007 - protein, 9 aa, Homo sapiens
  Table A; Target 75007; HLA-C*07:06; SEPT14; ENSG00000154997; TAA
EAYLQEELK

SEQ ID NO: 75008 - protein, 10 aa, Homo sapiens
  Table A; Target 75008; HLA-B*51:01; SEPT14; ENSG00000154997; TAA
EAYLQEELKI

SEQ ID NO: 75009 - protein, 11 aa, Homo sapiens
  Table A; Target 75009; HLA-A*33:01; SEPT14; ENSG00000154997; TAA
EAYLQEELKIK

SEQ ID NO: 75010 - protein, 11 aa, Homo sapiens
  Table A; Target 75010; HLA-A*33:03; SEPT14; ENSG00000154997; TAA
EAYLQEELKIK

SEQ ID NO: 75011 - protein, 10 aa, Homo sapiens
  Table A; Target 75011; HLA-A*31:01; SEPT14; ENSG00000154997; TAA
ECLPNQLVSR

SEQ ID NO: 75012 - protein, 10 aa, Homo sapiens
  Table A; Target 75012; HLA-A*33:01; SEPT14; ENSG00000154997; TAA
ECLPNQLVSR

SEQ ID NO: 75013 - protein, 10 aa, Homo sapiens
  Table A; Target 75013; HLA-A*33:03; SEPT14; ENSG00000154997; TAA
ECLPNQLVSR

SEQ ID NO: 75014 - protein, 10 aa, Homo sapiens
  Table A; Target 75014; HLA-A*68:01; SEPT14; ENSG00000154997; TAA
ECLPNQLVSR

SEQ ID NO: 75015 - protein, 10 aa, Homo sapiens
  Table A; Target 75015; HLA-B*27:02; SEPT14; ENSG00000154997; TAA
ECLPNQLVSR

SEQ ID NO: 75016 - protein, 10 aa, Homo sapiens
  Table A; Target 75016; HLA-C*07:06; SEPT14; ENSG00000154997; TAA
ECLPNQLVSR

SEQ ID NO: 75017 - protein, 9 aa, Homo sapiens
  Table A; Target 75017; HLA-B*18:01; SEPT14; ENSG00000154997; TAA
EEEELKQRF

SEQ ID NO: 75018 - protein, 9 aa, Homo sapiens
  Table A; Target 75018; HLA-B*37:01; SEPT14; ENSG00000154997; TAA
EEEELKQRF

SEQ ID NO: 75019 - protein, 9 aa, Homo sapiens
  Table A; Target 75019; HLA-B*44:02; SEPT14; ENSG00000154997; TAA
EEEELKQRF

SEQ ID NO: 75020 - protein, 9 aa, Homo sapiens
  Table A; Target 75020; HLA-B*44:03; SEPT14; ENSG00000154997; TAA
EEEELKQRF

SEQ ID NO: 75021 - protein, 9 aa, Homo sapiens
  Table A; Target 75021; HLA-C*16:04; SEPT14; ENSG00000154997; TAA
EEEELKQRF

SEQ ID NO: 75022 - protein, 10 aa, Homo sapiens
  Table A; Target 75022; HLA-B*44:02; SEPT14; ENSG00000154997; TAA
EEEELKQRFM

SEQ ID NO: 75023 - protein, 10 aa, Homo sapiens
  Table A; Target 75023; HLA-B*44:03; SEPT14; ENSG00000154997; TAA
EEEELKQRFM

SEQ ID NO: 75024 - protein, 8 aa, Homo sapiens
  Table A; Target 75024; HLA-B*18:01; SEPT14; ENSG00000154997; TAA
EEELKQRF

SEQ ID NO: 75025 - protein, 8 aa, Homo sapiens
  Table A; Target 75025; HLA-B*44:02; SEPT14; ENSG00000154997; TAA
EEELKQRF

SEQ ID NO: 75026 - protein, 8 aa, Homo sapiens
  Table A; Target 75026; HLA-B*44:03; SEPT14; ENSG00000154997; TAA
EEELKQRF

SEQ ID NO: 75027 - protein, 9 aa, Homo sapiens
  Table A; Target 75027; HLA-B*44:02; SEPT14; ENSG00000154997; TAA
EEELKQRFM

SEQ ID NO: 75028 - protein, 9 aa, Homo sapiens
  Table A; Target 75028; HLA-B*44:03; SEPT14; ENSG00000154997; TAA
EEELKQRFM

SEQ ID NO: 75029 - protein, 9 aa, Homo sapiens
  Table A; Target 75029; HLA-B*44:02; SEPT14; ENSG00000154997; TAA
EELKIKRSL

SEQ ID NO: 75030 - protein, 9 aa, Homo sapiens
  Table A; Target 75030; HLA-B*44:03; SEPT14; ENSG00000154997; TAA
EELKIKRSL

SEQ ID NO: 75031 - protein, 11 aa, Homo sapiens
  Table A; Target 75031; HLA-B*39:01; SEPT14; ENSG00000154997; TAA
EETAAQANSSV

SEQ ID NO: 75032 - protein, 11 aa, Homo sapiens
  Table A; Target 75032; HLA-B*49:01; SEPT14; ENSG00000154997; TAA
EETAAQANSSV

SEQ ID NO: 75033 - protein, 8 aa, Homo sapiens
  Table A; Target 75033; HLA-A*33:03; SEPT14; ENSG00000154997; TAA
EFYDQCQR

SEQ ID NO: 75034 - protein, 10 aa, Homo sapiens
  Table A; Target 75034; HLA-A*25:01; SEPT14; ENSG00000154997; TAA
EIFEAKRQEF

SEQ ID NO: 75035 - protein, 10 aa, Homo sapiens
  Table A; Target 75035; HLA-A*26:01; SEPT14; ENSG00000154997; TAA
EIFEAKRQEF

SEQ ID NO: 75036 - protein, 9 aa, Homo sapiens
  Table A; Target 75036; HLA-A*25:01; SEPT14; ENSG00000154997; TAA
ELISNGIQI

SEQ ID NO: 75037 - protein, 9 aa, Homo sapiens
  Table A; Target 75037; HLA-A*26:01; SEPT14; ENSG00000154997; TAA
ELISNGIQI

SEQ ID NO: 75038 - protein, 9 aa, Homo sapiens
  Table A; Target 75038; HLA-A*68:02; SEPT14; ENSG00000154997; TAA
ELISNGIQI

SEQ ID NO: 75039 - protein, 9 aa, Homo sapiens
  Table A; Target 75039; HLA-B*13:02; SEPT14; ENSG00000154997; TAA
ELISNGIQI

SEQ ID NO: 75040 - protein, 10 aa, Homo sapiens
  Table A; Target 75040; HLA-A*01:01; SEPT14; ENSG00000154997; TAA
ELISNGIQIY

SEQ ID NO: 75041 - protein, 10 aa, Homo sapiens
  Table A; Target 75041; HLA-A*25:01; SEPT14; ENSG00000154997; TAA
ELISNGIQIY

SEQ ID NO: 75042 - protein, 10 aa, Homo sapiens
  Table A; Target 75042; HLA-A*26:01; SEPT14; ENSG00000154997; TAA
ELISNGIQIY

SEQ ID NO: 75043 - protein, 10 aa, Homo sapiens
  Table A; Target 75043; HLA-A*29:02; SEPT14; ENSG00000154997; TAA
ELISNGIQIY

SEQ ID NO: 75044 - protein, 10 aa, Homo sapiens
  Table A; Target 75044; HLA-A*30:02; SEPT14; ENSG00000154997; TAA
ELISNGIQIY

SEQ ID NO: 75045 - protein, 10 aa, Homo sapiens
  Table A; Target 75045; HLA-B*15:01; SEPT14; ENSG00000154997; TAA
ELISNGIQIY

SEQ ID NO: 75046 - protein, 10 aa, Homo sapiens
  Table A; Target 75046; HLA-B*15:03; SEPT14; ENSG00000154997; TAA
ELISNGIQIY

SEQ ID NO: 75047 - protein, 10 aa, Homo sapiens
  Table A; Target 75047; HLA-B*18:01; SEPT14; ENSG00000154997; TAA
ELISNGIQIY

SEQ ID NO: 75048 - protein, 10 aa, Homo sapiens
  Table A; Target 75048; HLA-B*44:02; SEPT14; ENSG00000154997; TAA
ELISNGIQIY

SEQ ID NO: 75049 - protein, 10 aa, Homo sapiens
  Table A; Target 75049; HLA-B*44:03; SEPT14; ENSG00000154997; TAA
ELISNGIQIY

SEQ ID NO: 75050 - protein, 10 aa, Homo sapiens
  Table A; Target 75050; HLA-C*07:04; SEPT14; ENSG00000154997; TAA
ELISNGIQIY

SEQ ID NO: 75051 - protein, 10 aa, Homo sapiens
  Table A; Target 75051; HLA-C*16:04; SEPT14; ENSG00000154997; TAA
ELISNGIQIY

SEQ ID NO: 75052 - protein, 8 aa, Homo sapiens
  Table A; Target 75052; HLA-B*08:01; SEPT14; ENSG00000154997; TAA
ELKIKRSL

SEQ ID NO: 75053 - protein, 9 aa, Homo sapiens
  Table A; Target 75053; HLA-A*33:01; SEPT14; ENSG00000154997; TAA
ELKQRFMQR

SEQ ID NO: 75054 - protein, 9 aa, Homo sapiens
  Table A; Target 75054; HLA-A*33:03; SEPT14; ENSG00000154997; TAA
ELKQRFMQR

SEQ ID NO: 75055 - protein, 9 aa, Homo sapiens
  Table A; Target 75055; HLA-A*02:04; SEPT14; ENSG00000154997; TAA
ELQDKFEHL

SEQ ID NO: 75056 - protein, 9 aa, Homo sapiens
  Table A; Target 75056; HLA-A*02:07; SEPT14; ENSG00000154997; TAA
ELQDKFEHL

SEQ ID NO: 75057 - protein, 9 aa, Homo sapiens
  Table A; Target 75057; HLA-A*24:02; SEPT14; ENSG00000154997; TAA
ELQDKFEHL

SEQ ID NO: 75058 - protein, 9 aa, Homo sapiens
  Table A; Target 75058; HLA-A*25:01; SEPT14; ENSG00000154997; TAA
ELQDKFEHL

SEQ ID NO: 75059 - protein, 9 aa, Homo sapiens
  Table A; Target 75059; HLA-A*26:01; SEPT14; ENSG00000154997; TAA
ELQDKFEHL

SEQ ID NO: 75060 - protein, 9 aa, Homo sapiens
  Table A; Target 75060; HLA-A*33:01; SEPT14; ENSG00000154997; TAA
ELQDKFEHL

SEQ ID NO: 75061 - protein, 9 aa, Homo sapiens
  Table A; Target 75061; HLA-A*33:03; SEPT14; ENSG00000154997; TAA
ELQDKFEHL

SEQ ID NO: 75062 - protein, 9 aa, Homo sapiens
  Table A; Target 75062; HLA-A*68:02; SEPT14; ENSG00000154997; TAA
ELQDKFEHL

SEQ ID NO: 75063 - protein, 9 aa, Homo sapiens
  Table A; Target 75063; HLA-B*08:01; SEPT14; ENSG00000154997; TAA
ELQDKFEHL

SEQ ID NO: 75064 - protein, 10 aa, Homo sapiens
  Table A; Target 75064; HLA-A*33:01; SEPT14; ENSG00000154997; TAA
ELQDKFEHLK

SEQ ID NO: 75065 - protein, 9 aa, Homo sapiens
  Table A; Target 75065; HLA-A*02:01; SEPT14; ENSG00000154997; TAA
ELQESNVQL

SEQ ID NO: 75066 - protein, 9 aa, Homo sapiens
  Table A; Target 75066; HLA-A*02:04; SEPT14; ENSG00000154997; TAA
ELQESNVQL

SEQ ID NO: 75067 - protein, 9 aa, Homo sapiens
  Table A; Target 75067; HLA-A*02:07; SEPT14; ENSG00000154997; TAA
ELQESNVQL

SEQ ID NO: 75068 - protein, 9 aa, Homo sapiens
  Table A; Target 75068; HLA-A*33:03; SEPT14; ENSG00000154997; TAA
ELQESNVQL

SEQ ID NO: 75069 - protein, 9 aa, Homo sapiens
  Table A; Target 75069; HLA-B*27:05; SEPT14; ENSG00000154997; TAA
ELQESNVQL

SEQ ID NO: 75070 - protein, 9 aa, Homo sapiens
  Table A; Target 75070; HLA-B*35:03; SEPT14; ENSG00000154997; TAA
ELQESNVQL

SEQ ID NO: 75071 - protein, 9 aa, Homo sapiens
  Table A; Target 75071; HLA-B*38:01; SEPT14; ENSG00000154997; TAA
ELQESNVQL

SEQ ID NO: 75072 - protein, 9 aa, Homo sapiens
  Table A; Target 75072; HLA-B*39:01; SEPT14; ENSG00000154997; TAA
ELQESNVQL

SEQ ID NO: 75073 - protein, 9 aa, Homo sapiens
  Table A; Target 75073; HLA-B*55:01; SEPT14; ENSG00000154997; TAA
ELQESNVQL

SEQ ID NO: 75074 - protein, 10 aa, Homo sapiens
  Table A; Target 75074; HLA-A*03:02; SEPT14; ENSG00000154997; TAA
ELQESNVQLK

SEQ ID NO: 75075 - protein, 10 aa, Homo sapiens
  Table A; Target 75075; HLA-A*33:01; SEPT14; ENSG00000154997; TAA
ELQESNVQLK

SEQ ID NO: 75076 - protein, 10 aa, Homo sapiens
  Table A; Target 75076; HLA-A*33:03; SEPT14; ENSG00000154997; TAA
ELQESNVQLK

SEQ ID NO: 75077 - protein, 10 aa, Homo sapiens
  Table A; Target 75077; HLA-A*68:01; SEPT14; ENSG00000154997; TAA
ELQESNVQLK

SEQ ID NO: 75078 - protein, 10 aa, Homo sapiens
  Table A; Target 75078; HLA-B*27:02; SEPT14; ENSG00000154997; TAA
ELQESNVQLK

SEQ ID NO: 75079 - protein, 10 aa, Homo sapiens
  Table A; Target 75079; HLA-C*07:06; SEPT14; ENSG00000154997; TAA
ELQESNVQLK

SEQ ID NO: 75080 - protein, 11 aa, Homo sapiens
  Table A; Target 75080; HLA-A*02:07; SEPT14; ENSG00000154997; TAA
ELQESNVQLKL

SEQ ID NO: 75081 - protein, 10 aa, Homo sapiens
  Table A; Target 75081; HLA-A*25:01; SEPT14; ENSG00000154997; TAA
ETAAQANSSV

SEQ ID NO: 75082 - protein, 10 aa, Homo sapiens
  Table A; Target 75082; HLA-A*26:01; SEPT14; ENSG00000154997; TAA
ETAAQANSSV

SEQ ID NO: 75083 - protein, 10 aa, Homo sapiens
  Table A; Target 75083; HLA-A*68:01; SEPT14; ENSG00000154997; TAA
ETAAQANSSV

SEQ ID NO: 75084 - protein, 9 aa, Homo sapiens
  Table A; Target 75084; HLA-A*25:01; SEPT14; ENSG00000154997; TAA
ETVGYGDQI

SEQ ID NO: 75085 - protein, 9 aa, Homo sapiens
  Table A; Target 75085; HLA-A*26:01; SEPT14; ENSG00000154997; TAA
ETVGYGDQI

SEQ ID NO: 75086 - protein, 9 aa, Homo sapiens
  Table A; Target 75086; HLA-A*68:01; SEPT14; ENSG00000154997; TAA
ETVGYGDQI

SEQ ID NO: 75087 - protein, 9 aa, Homo sapiens
  Table A; Target 75087; HLA-A*68:02; SEPT14; ENSG00000154997; TAA
ETVGYGDQI

SEQ ID NO: 75088 - protein, 9 aa, Homo sapiens
  Table A; Target 75088; HLA-B*38:01; SEPT14; ENSG00000154997; TAA
ETVGYGDQI

SEQ ID NO: 75089 - protein, 9 aa, Homo sapiens
  Table A; Target 75089; HLA-B*39:01; SEPT14; ENSG00000154997; TAA
ETVGYGDQI

SEQ ID NO: 75090 - protein, 11 aa, Homo sapiens
  Table A; Target 75090; HLA-A*68:01; SEPT14; ENSG00000154997; TAA
ETVGYGDQIDK

SEQ ID NO: 75091 - protein, 11 aa, Homo sapiens
  Table A; Target 75091; HLA-A*68:02; SEPT14; ENSG00000154997; TAA
ETVGYGDQIDK

SEQ ID NO: 75092 - protein, 11 aa, Homo sapiens
  Table A; Target 75092; HLA-B*27:02; SEPT14; ENSG00000154997; TAA
ETVGYGDQIDK

SEQ ID NO: 75093 - protein, 8 aa, Homo sapiens
  Table A; Target 75093; HLA-B*08:01; SEPT14; ENSG00000154997; TAA
EVKVGKRM

SEQ ID NO: 75094 - protein, 10 aa, Homo sapiens
  Table A; Target 75094; HLA-A*33:03; SEPT14; ENSG00000154997; TAA
EVKVGKRMVR

SEQ ID NO: 75095 - protein, 9 aa, Homo sapiens
  Table A; Target 75095; HLA-A*33:01; SEPT14; ENSG00000154997; TAA
EYHDSRVHV

SEQ ID NO: 75096 - protein, 9 aa, Homo sapiens
  Table A; Target 75096; HLA-A*33:03; SEPT14; ENSG00000154997; TAA
EYHDSRVHV

SEQ ID NO: 75097 - protein, 10 aa, Homo sapiens
  Table A; Target 75097; HLA-C*01:02; SEPT14; ENSG00000154997; TAA
FAVVGSTDEV

SEQ ID NO: 75098 - protein, 10 aa, Homo sapiens
  Table A; Target 75098; HLA-C*03:03; SEPT14; ENSG00000154997; TAA
FAVVGSTDEV

SEQ ID NO: 75099 - protein, 10 aa, Homo sapiens
  Table A; Target 75099; HLA-C*03:04; SEPT14; ENSG00000154997; TAA
FAVVGSTDEV

SEQ ID NO: 75100 - protein, 8 aa, Homo sapiens
  Table A; Target 75100; HLA-B*37:01; SEPT14; ENSG00000154997; TAA
FEAKRQEF

SEQ ID NO: 75101 - protein, 8 aa, Homo sapiens
  Table A; Target 75101; HLA-C*16:01; SEPT14; ENSG00000154997; TAA
FEAKRQEF

SEQ ID NO: 75102 - protein, 9 aa, Homo sapiens
  Table A; Target 75102; HLA-A*01:01; SEPT14; ENSG00000154997; TAA
FEAKRQEFY

SEQ ID NO: 75103 - protein, 9 aa, Homo sapiens
  Table A; Target 75103; HLA-A*29:02; SEPT14; ENSG00000154997; TAA
FEAKRQEFY

SEQ ID NO: 75104 - protein, 9 aa, Homo sapiens
  Table A; Target 75104; HLA-B*44:02; SEPT14; ENSG00000154997; TAA
FEAKRQEFY

SEQ ID NO: 75105 - protein, 9 aa, Homo sapiens
  Table A; Target 75105; HLA-B*44:03; SEPT14; ENSG00000154997; TAA
FEAKRQEFY

SEQ ID NO: 75106 - protein, 9 aa, Homo sapiens
  Table A; Target 75106; HLA-C*02:02; SEPT14; ENSG00000154997; TAA
FEAKRQEFY

SEQ ID NO: 75107 - protein, 9 aa, Homo sapiens
  Table A; Target 75107; HLA-C*16:04; SEPT14; ENSG00000154997; TAA
FEAKRQEFY

SEQ ID NO: 75108 - protein, 9 aa, Homo sapiens
  Table A; Target 75108; HLA-A*30:01; SEPT14; ENSG00000154997; TAA
FEAYLQEEL

SEQ ID NO: 75109 - protein, 9 aa, Homo sapiens
  Table A; Target 75109; HLA-A*68:02; SEPT14; ENSG00000154997; TAA
FEAYLQEEL

SEQ ID NO: 75110 - protein, 9 aa, Homo sapiens
  Table A; Target 75110; HLA-B*18:01; SEPT14; ENSG00000154997; TAA
FEAYLQEEL

SEQ ID NO: 75111 - protein, 9 aa, Homo sapiens
  Table A; Target 75111; HLA-B*35:03; SEPT14; ENSG00000154997; TAA
FEAYLQEEL

SEQ ID NO: 75112 - protein, 9 aa, Homo sapiens
  Table A; Target 75112; HLA-B*37:01; SEPT14; ENSG00000154997; TAA
FEAYLQEEL

SEQ ID NO: 75113 - protein, 9 aa, Homo sapiens
  Table A; Target 75113; HLA-B*38:01; SEPT14; ENSG00000154997; TAA
FEAYLQEEL

SEQ ID NO: 75114 - protein, 9 aa, Homo sapiens
  Table A; Target 75114; HLA-B*40:01; SEPT14; ENSG00000154997; TAA
FEAYLQEEL

SEQ ID NO: 75115 - protein, 9 aa, Homo sapiens
  Table A; Target 75115; HLA-B*40:02; SEPT14; ENSG00000154997; TAA
FEAYLQEEL

SEQ ID NO: 75116 - protein, 9 aa, Homo sapiens
  Table A; Target 75116; HLA-B*44:02; SEPT14; ENSG00000154997; TAA
FEAYLQEEL

SEQ ID NO: 75117 - protein, 9 aa, Homo sapiens
  Table A; Target 75117; HLA-B*44:03; SEPT14; ENSG00000154997; TAA
FEAYLQEEL

SEQ ID NO: 75118 - protein, 9 aa, Homo sapiens
  Table A; Target 75118; HLA-B*49:01; SEPT14; ENSG00000154997; TAA
FEAYLQEEL

SEQ ID NO: 75119 - protein, 9 aa, Homo sapiens
  Table A; Target 75119; HLA-C*02:02; SEPT14; ENSG00000154997; TAA
FEAYLQEEL

SEQ ID NO: 75120 - protein, 9 aa, Homo sapiens
  Table A; Target 75120; HLA-C*07:04; SEPT14; ENSG00000154997; TAA
FEAYLQEEL

SEQ ID NO: 75121 - protein, 9 aa, Homo sapiens
  Table A; Target 75121; HLA-C*16:04; SEPT14; ENSG00000154997; TAA
FEAYLQEEL

SEQ ID NO: 75122 - protein, 10 aa, Homo sapiens
  Table A; Target 75122; HLA-B*27:02; SEPT14; ENSG00000154997; TAA
FEAYLQEELK

SEQ ID NO: 75123 - protein, 8 aa, Homo sapiens
  Table A; Target 75123; HLA-A*30:01; SEPT14; ENSG00000154997; TAA
FECLPNQL

SEQ ID NO: 75124 - protein, 8 aa, Homo sapiens
  Table A; Target 75124; HLA-B*18:01; SEPT14; ENSG00000154997; TAA
FECLPNQL

SEQ ID NO: 75125 - protein, 8 aa, Homo sapiens
  Table A; Target 75125; HLA-B*37:01; SEPT14; ENSG00000154997; TAA
FECLPNQL

SEQ ID NO: 75126 - protein, 8 aa, Homo sapiens
  Table A; Target 75126; HLA-B*40:02; SEPT14; ENSG00000154997; TAA
FECLPNQL

SEQ ID NO: 75127 - protein, 9 aa, Homo sapiens
  Table A; Target 75127; HLA-B*49:01; SEPT14; ENSG00000154997; TAA
FECLPNQLV

SEQ ID NO: 75128 - protein, 8 aa, Homo sapiens
  Table A; Target 75128; HLA-B*49:01; SEPT14; ENSG00000154997; TAA
FEYHDSRV

SEQ ID NO: 75129 - protein, 10 aa, Homo sapiens
  Table A; Target 75129; HLA-A*68:02; SEPT14; ENSG00000154997; TAA
FEYHDSRVHV

SEQ ID NO: 75130 - protein, 10 aa, Homo sapiens
  Table A; Target 75130; HLA-B*49:01; SEPT14; ENSG00000154997; TAA
FEYHDSRVHV

SEQ ID NO: 75131 - protein, 9 aa, Homo sapiens
  Table A; Target 75131; HLA-A*01:01; SEPT14; ENSG00000154997; TAA
FISPTGHSL

SEQ ID NO: 75132 - protein, 9 aa, Homo sapiens
  Table A; Target 75132; HLA-A*02:01; SEPT14; ENSG00000154997; TAA
FISPTGHSL

SEQ ID NO: 75133 - protein, 9 aa, Homo sapiens
  Table A; Target 75133; HLA-A*02:03; SEPT14; ENSG00000154997; TAA
FISPTGHSL

SEQ ID NO: 75134 - protein, 9 aa, Homo sapiens
  Table A; Target 75134; HLA-A*02:04; SEPT14; ENSG00000154997; TAA
FISPTGHSL

SEQ ID NO: 75135 - protein, 9 aa, Homo sapiens
  Table A; Target 75135; HLA-A*02:07; SEPT14; ENSG00000154997; TAA
FISPTGHSL

SEQ ID NO: 75136 - protein, 9 aa, Homo sapiens
  Table A; Target 75136; HLA-A*23:01; SEPT14; ENSG00000154997; TAA
FISPTGHSL

SEQ ID NO: 75137 - protein, 9 aa, Homo sapiens
  Table A; Target 75137; HLA-A*24:02; SEPT14; ENSG00000154997; TAA
FISPTGHSL

SEQ ID NO: 75138 - protein, 9 aa, Homo sapiens
  Table A; Target 75138; HLA-A*25:01; SEPT14; ENSG00000154997; TAA
FISPTGHSL

SEQ ID NO: 75139 - protein, 9 aa, Homo sapiens
  Table A; Target 75139; HLA-A*26:01; SEPT14; ENSG00000154997; TAA
FISPTGHSL

SEQ ID NO: 75140 - protein, 9 aa, Homo sapiens
  Table A; Target 75140; HLA-A*30:01; SEPT14; ENSG00000154997; TAA
FISPTGHSL

SEQ ID NO: 75141 - protein, 9 aa, Homo sapiens
  Table A; Target 75141; HLA-A*32:01; SEPT14; ENSG00000154997; TAA
FISPTGHSL

SEQ ID NO: 75142 - protein, 9 aa, Homo sapiens
  Table A; Target 75142; HLA-A*68:01; SEPT14; ENSG00000154997; TAA
FISPTGHSL

SEQ ID NO: 75143 - protein, 9 aa, Homo sapiens
  Table A; Target 75143; HLA-A*68:02; SEPT14; ENSG00000154997; TAA
FISPTGHSL

SEQ ID NO: 75144 - protein, 9 aa, Homo sapiens
  Table A; Target 75144; HLA-B*07:02; SEPT14; ENSG00000154997; TAA
FISPTGHSL

SEQ ID NO: 75145 - protein, 9 aa, Homo sapiens
  Table A; Target 75145; HLA-B*08:01; SEPT14; ENSG00000154997; TAA
FISPTGHSL

SEQ ID NO: 75146 - protein, 9 aa, Homo sapiens
  Table A; Target 75146; HLA-B*13:02; SEPT14; ENSG00000154997; TAA
FISPTGHSL

SEQ ID NO: 75147 - protein, 9 aa, Homo sapiens
  Table A; Target 75147; HLA-B*15:01; SEPT14; ENSG00000154997; TAA
FISPTGHSL

SEQ ID NO: 75148 - protein, 9 aa, Homo sapiens
  Table A; Target 75148; HLA-B*15:03; SEPT14; ENSG00000154997; TAA
FISPTGHSL

SEQ ID NO: 75149 - protein, 9 aa, Homo sapiens
  Table A; Target 75149; HLA-B*27:05; SEPT14; ENSG00000154997; TAA
FISPTGHSL

SEQ ID NO: 75150 - protein, 9 aa, Homo sapiens
  Table A; Target 75150; HLA-B*35:01; SEPT14; ENSG00000154997; TAA
FISPTGHSL

SEQ ID NO: 75151 - protein, 9 aa, Homo sapiens
  Table A; Target 75151; HLA-B*35:03; SEPT14; ENSG00000154997; TAA
FISPTGHSL

SEQ ID NO: 75152 - protein, 9 aa, Homo sapiens
  Table A; Target 75152; HLA-B*37:01; SEPT14; ENSG00000154997; TAA
FISPTGHSL

SEQ ID NO: 75153 - protein, 9 aa, Homo sapiens
  Table A; Target 75153; HLA-B*38:01; SEPT14; ENSG00000154997; TAA
FISPTGHSL

SEQ ID NO: 75154 - protein, 9 aa, Homo sapiens
  Table A; Target 75154; HLA-B*39:01; SEPT14; ENSG00000154997; TAA
FISPTGHSL

SEQ ID NO: 75155 - protein, 9 aa, Homo sapiens
  Table A; Target 75155; HLA-B*40:01; SEPT14; ENSG00000154997; TAA
FISPTGHSL

SEQ ID NO: 75156 - protein, 9 aa, Homo sapiens
  Table A; Target 75156; HLA-B*40:02; SEPT14; ENSG00000154997; TAA
FISPTGHSL

SEQ ID NO: 75157 - protein, 9 aa, Homo sapiens
  Table A; Target 75157; HLA-B*46:01; SEPT14; ENSG00000154997; TAA
FISPTGHSL

SEQ ID NO: 75158 - protein, 9 aa, Homo sapiens
  Table A; Target 75158; HLA-B*55:01; SEPT14; ENSG00000154997; TAA
FISPTGHSL

SEQ ID NO: 75159 - protein, 9 aa, Homo sapiens
  Table A; Target 75159; HLA-B*58:01; SEPT14; ENSG00000154997; TAA
FISPTGHSL

SEQ ID NO: 75160 - protein, 9 aa, Homo sapiens
  Table A; Target 75160; HLA-C*01:02; SEPT14; ENSG00000154997; TAA
FISPTGHSL

SEQ ID NO: 75161 - protein, 9 aa, Homo sapiens
  Table A; Target 75161; HLA-C*02:02; SEPT14; ENSG00000154997; TAA
FISPTGHSL

SEQ ID NO: 75162 - protein, 9 aa, Homo sapiens
  Table A; Target 75162; HLA-C*03:03; SEPT14; ENSG00000154997; TAA
FISPTGHSL

SEQ ID NO: 75163 - protein, 9 aa, Homo sapiens
  Table A; Target 75163; HLA-C*03:04; SEPT14; ENSG00000154997; TAA
FISPTGHSL

SEQ ID NO: 75164 - protein, 9 aa, Homo sapiens
  Table A; Target 75164; HLA-C*04:01; SEPT14; ENSG00000154997; TAA
FISPTGHSL

SEQ ID NO: 75165 - protein, 9 aa, Homo sapiens
  Table A; Target 75165; HLA-C*05:01; SEPT14; ENSG00000154997; TAA
FISPTGHSL

SEQ ID NO: 75166 - protein, 9 aa, Homo sapiens
  Table A; Target 75166; HLA-C*07:02; SEPT14; ENSG00000154997; TAA
FISPTGHSL

SEQ ID NO: 75167 - protein, 9 aa, Homo sapiens
  Table A; Target 75167; HLA-C*07:04; SEPT14; ENSG00000154997; TAA
FISPTGHSL

SEQ ID NO: 75168 - protein, 9 aa, Homo sapiens
  Table A; Target 75168; HLA-C*07:06; SEPT14; ENSG00000154997; TAA
FISPTGHSL

SEQ ID NO: 75169 - protein, 9 aa, Homo sapiens
  Table A; Target 75169; HLA-C*12:03; SEPT14; ENSG00000154997; TAA
FISPTGHSL

SEQ ID NO: 75170 - protein, 9 aa, Homo sapiens
  Table A; Target 75170; HLA-C*14:02; SEPT14; ENSG00000154997; TAA
FISPTGHSL

SEQ ID NO: 75171 - protein, 9 aa, Homo sapiens
  Table A; Target 75171; HLA-C*16:01; SEPT14; ENSG00000154997; TAA
FISPTGHSL

SEQ ID NO: 75172 - protein, 9 aa, Homo sapiens
  Table A; Target 75172; HLA-C*16:02; SEPT14; ENSG00000154997; TAA
FISPTGHSL

SEQ ID NO: 75173 - protein, 9 aa, Homo sapiens
  Table A; Target 75173; HLA-C*16:04; SEPT14; ENSG00000154997; TAA
FISPTGHSL

SEQ ID NO: 75174 - protein, 10 aa, Homo sapiens
  Table A; Target 75174; HLA-A*01:01; SEPT14; ENSG00000154997; TAA
FISPTGHSLK

SEQ ID NO: 75175 - protein, 9 aa, Homo sapiens
  Table A; Target 75175; HLA-A*33:03; SEPT14; ENSG00000154997; TAA
FNTNLKDNK

SEQ ID NO: 75176 - protein, 9 aa, Homo sapiens
  Table A; Target 75176; HLA-C*16:01; SEPT14; ENSG00000154997; TAA
FNTNLKDNK

SEQ ID NO: 75177 - protein, 8 aa, Homo sapiens
  Table A; Target 75177; HLA-B*27:02; SEPT14; ENSG00000154997; TAA
FQEIFEAK

SEQ ID NO: 75178 - protein, 9 aa, Homo sapiens
  Table A; Target 75178; HLA-A*01:01; SEPT14; ENSG00000154997; TAA
FTDVGPNNQ

SEQ ID NO: 75179 - protein, 10 aa, Homo sapiens
  Table A; Target 75179; HLA-A*01:01; SEPT14; ENSG00000154997; TAA
FTDVGPNNQP

SEQ ID NO: 75180 - protein, 10 aa, Homo sapiens
  Table A; Target 75180; HLA-B*27:05; SEPT14; ENSG00000154997; TAA
FTDVGPNNQP

SEQ ID NO: 75181 - protein, 10 aa, Homo sapiens
  Table A; Target 75181; HLA-C*05:01; SEPT14; ENSG00000154997; TAA
FTDVGPNNQP

SEQ ID NO: 75182 - protein, 11 aa, Homo sapiens
  Table A; Target 75182; HLA-A*01:01; SEPT14; ENSG00000154997; TAA
FTDVGPNNQPV

SEQ ID NO: 75183 - protein, 11 aa, Homo sapiens
  Table A; Target 75183; HLA-B*27:05; SEPT14; ENSG00000154997; TAA
FTDVGPNNQPV

SEQ ID NO: 75184 - protein, 11 aa, Homo sapiens
  Table A; Target 75184; HLA-B*35:03; SEPT14; ENSG00000154997; TAA
FTDVGPNNQPV

SEQ ID NO: 75185 - protein, 11 aa, Homo sapiens
  Table A; Target 75185; HLA-C*04:01; SEPT14; ENSG00000154997; TAA
FTDVGPNNQPV

SEQ ID NO: 75186 - protein, 8 aa, Homo sapiens
  Table A; Target 75186; HLA-A*68:02; SEPT14; ENSG00000154997; TAA
FTFNILCV

SEQ ID NO: 75187 - protein, 8 aa, Homo sapiens
  Table A; Target 75187; HLA-B*54:01; SEPT14; ENSG00000154997; TAA
FTFNILCV

SEQ ID NO: 75188 - protein, 8 aa, Homo sapiens
  Table A; Target 75188; HLA-B*08:01; SEPT14; ENSG00000154997; TAA
FVKLRDML

SEQ ID NO: 75189 - protein, 9 aa, Homo sapiens
  Table A; Target 75189; HLA-B*08:01; SEPT14; ENSG00000154997; TAA
FVKLRDMLL

SEQ ID NO: 75190 - protein, 9 aa, Homo sapiens
  Table A; Target 75190; HLA-A*02:01; SEPT14; ENSG00000154997; TAA
FYSNVGLQI

SEQ ID NO: 75191 - protein, 9 aa, Homo sapiens
  Table A; Target 75191; HLA-A*23:01; SEPT14; ENSG00000154997; TAA
FYSNVGLQI

SEQ ID NO: 75192 - protein, 9 aa, Homo sapiens
  Table A; Target 75192; HLA-A*24:02; SEPT14; ENSG00000154997; TAA
FYSNVGLQI

SEQ ID NO: 75193 - protein, 9 aa, Homo sapiens
  Table A; Target 75193; HLA-A*29:02; SEPT14; ENSG00000154997; TAA
FYSNVGLQI

SEQ ID NO: 75194 - protein, 9 aa, Homo sapiens
  Table A; Target 75194; HLA-A*30:01; SEPT14; ENSG00000154997; TAA
FYSNVGLQI

SEQ ID NO: 75195 - protein, 9 aa, Homo sapiens
  Table A; Target 75195; HLA-A*68:02; SEPT14; ENSG00000154997; TAA
FYSNVGLQI

SEQ ID NO: 75196 - protein, 9 aa, Homo sapiens
  Table A; Target 75196; HLA-B*13:02; SEPT14; ENSG00000154997; TAA
FYSNVGLQI

SEQ ID NO: 75197 - protein, 9 aa, Homo sapiens
  Table A; Target 75197; HLA-B*35:03; SEPT14; ENSG00000154997; TAA
FYSNVGLQI

SEQ ID NO: 75198 - protein, 9 aa, Homo sapiens
  Table A; Target 75198; HLA-B*38:01; SEPT14; ENSG00000154997; TAA
FYSNVGLQI

SEQ ID NO: 75199 - protein, 9 aa, Homo sapiens
  Table A; Target 75199; HLA-C*02:02; SEPT14; ENSG00000154997; TAA
FYSNVGLQI

SEQ ID NO: 75200 - protein, 9 aa, Homo sapiens
  Table A; Target 75200; HLA-C*03:03; SEPT14; ENSG00000154997; TAA
FYSNVGLQI

SEQ ID NO: 75201 - protein, 9 aa, Homo sapiens
  Table A; Target 75201; HLA-C*03:04; SEPT14; ENSG00000154997; TAA
FYSNVGLQI

SEQ ID NO: 75202 - protein, 9 aa, Homo sapiens
  Table A; Target 75202; HLA-C*04:01; SEPT14; ENSG00000154997; TAA
FYSNVGLQI

SEQ ID NO: 75203 - protein, 9 aa, Homo sapiens
  Table A; Target 75203; HLA-C*06:02; SEPT14; ENSG00000154997; TAA
FYSNVGLQI

SEQ ID NO: 75204 - protein, 9 aa, Homo sapiens
  Table A; Target 75204; HLA-C*07:04; SEPT14; ENSG00000154997; TAA
FYSNVGLQI

SEQ ID NO: 75205 - protein, 9 aa, Homo sapiens
  Table A; Target 75205; HLA-C*14:02; SEPT14; ENSG00000154997; TAA
FYSNVGLQI

SEQ ID NO: 75206 - protein, 9 aa, Homo sapiens
  Table A; Target 75206; HLA-C*16:02; SEPT14; ENSG00000154997; TAA
FYSNVGLQI

SEQ ID NO: 75207 - protein, 9 aa, Homo sapiens
  Table A; Target 75207; HLA-C*16:04; SEPT14; ENSG00000154997; TAA
FYSNVGLQI

SEQ ID NO: 75208 - protein, 10 aa, Homo sapiens
  Table A; Target 75208; HLA-A*30:02; SEPT14; ENSG00000154997; TAA
GDQIDKEASY

SEQ ID NO: 75209 - protein, 10 aa, Homo sapiens
  Table A; Target 75209; HLA-B*44:02; SEPT14; ENSG00000154997; TAA
GDQIDKEASY

SEQ ID NO: 75210 - protein, 10 aa, Homo sapiens
  Table A; Target 75210; HLA-B*44:03; SEPT14; ENSG00000154997; TAA
GDQIDKEASY

SEQ ID NO: 75211 - protein, 9 aa, Homo sapiens
  Table A; Target 75211; HLA-C*16:02; SEPT14; ENSG00000154997; TAA
GDTQKENNI

SEQ ID NO: 75212 - protein, 9 aa, Homo sapiens
  Table A; Target 75212; HLA-A*30:01; SEPT14; ENSG00000154997; TAA
GETGIGKST

SEQ ID NO: 75213 - protein, 9 aa, Homo sapiens
  Table A; Target 75213; HLA-B*40:01; SEPT14; ENSG00000154997; TAA
GETGIGKST

SEQ ID NO: 75214 - protein, 9 aa, Homo sapiens
  Table A; Target 75214; HLA-B*40:02; SEPT14; ENSG00000154997; TAA
GETGIGKST

SEQ ID NO: 75215 - protein, 9 aa, Homo sapiens
  Table A; Target 75215; HLA-B*44:02; SEPT14; ENSG00000154997; TAA
GETGIGKST

SEQ ID NO: 75216 - protein, 9 aa, Homo sapiens
  Table A; Target 75216; HLA-B*44:03; SEPT14; ENSG00000154997; TAA
GETGIGKST

SEQ ID NO: 75217 - protein, 9 aa, Homo sapiens
  Table A; Target 75217; HLA-B*49:01; SEPT14; ENSG00000154997; TAA
GETGIGKST

SEQ ID NO: 75218 - protein, 9 aa, Homo sapiens
  Table A; Target 75218; HLA-C*16:02; SEPT14; ENSG00000154997; TAA
GETGIGKST

SEQ ID NO: 75219 - protein, 9 aa, Homo sapiens
  Table A; Target 75219; HLA-C*16:04; SEPT14; ENSG00000154997; TAA
GETGIGKST

SEQ ID NO: 75220 - protein, 10 aa, Homo sapiens
  Table A; Target 75220; HLA-A*30:01; SEPT14; ENSG00000154997; TAA
GETGIGKSTL

SEQ ID NO: 75221 - protein, 10 aa, Homo sapiens
  Table A; Target 75221; HLA-B*40:01; SEPT14; ENSG00000154997; TAA
GETGIGKSTL

SEQ ID NO: 75222 - protein, 10 aa, Homo sapiens
  Table A; Target 75222; HLA-B*40:02; SEPT14; ENSG00000154997; TAA
GETGIGKSTL

SEQ ID NO: 75223 - protein, 10 aa, Homo sapiens
  Table A; Target 75223; HLA-B*44:02; SEPT14; ENSG00000154997; TAA
GETGIGKSTL

SEQ ID NO: 75224 - protein, 10 aa, Homo sapiens
  Table A; Target 75224; HLA-B*44:03; SEPT14; ENSG00000154997; TAA
GETGIGKSTL

SEQ ID NO: 75225 - protein, 10 aa, Homo sapiens
  Table A; Target 75225; HLA-B*49:01; SEPT14; ENSG00000154997; TAA
GETGIGKSTL

SEQ ID NO: 75226 - protein, 11 aa, Homo sapiens
  Table A; Target 75226; HLA-A*30:01; SEPT14; ENSG00000154997; TAA
GETGIGKSTLI

SEQ ID NO: 75227 - protein, 11 aa, Homo sapiens
  Table A; Target 75227; HLA-B*40:01; SEPT14; ENSG00000154997; TAA
GETGIGKSTLI

SEQ ID NO: 75228 - protein, 11 aa, Homo sapiens
  Table A; Target 75228; HLA-B*49:01; SEPT14; ENSG00000154997; TAA
GETGIGKSTLI

SEQ ID NO: 75229 - protein, 9 aa, Homo sapiens
  Table A; Target 75229; HLA-B*15:03; SEPT14; ENSG00000154997; TAA
GKSTLIDTL

SEQ ID NO: 75230 - protein, 9 aa, Homo sapiens
  Table A; Target 75230; HLA-B*38:01; SEPT14; ENSG00000154997; TAA
GKSTLIDTL

SEQ ID NO: 75231 - protein, 9 aa, Homo sapiens
  Table A; Target 75231; HLA-A*02:01; SEPT14; ENSG00000154997; TAA
GLQIQTYEL

SEQ ID NO: 75232 - protein, 9 aa, Homo sapiens
  Table A; Target 75232; HLA-A*02:03; SEPT14; ENSG00000154997; TAA
GLQIQTYEL

SEQ ID NO: 75233 - protein, 9 aa, Homo sapiens
  Table A; Target 75233; HLA-A*02:04; SEPT14; ENSG00000154997; TAA
GLQIQTYEL

SEQ ID NO: 75234 - protein, 9 aa, Homo sapiens
  Table A; Target 75234; HLA-A*02:07; SEPT14; ENSG00000154997; TAA
GLQIQTYEL

SEQ ID NO: 75235 - protein, 9 aa, Homo sapiens
  Table A; Target 75235; HLA-B*13:02; SEPT14; ENSG00000154997; TAA
GLQIQTYEL

SEQ ID NO: 75236 - protein, 9 aa, Homo sapiens
  Table A; Target 75236; HLA-B*15:01; SEPT14; ENSG00000154997; TAA
GLQIQTYEL

SEQ ID NO: 75237 - protein, 9 aa, Homo sapiens
  Table A; Target 75237; HLA-B*55:01; SEPT14; ENSG00000154997; TAA
GLQIQTYEL

SEQ ID NO: 75238 - protein, 9 aa, Homo sapiens
  Table A; Target 75238; HLA-A*32:01; SEPT14; ENSG00000154997; TAA
GPNNQPVSF

SEQ ID NO: 75239 - protein, 9 aa, Homo sapiens
  Table A; Target 75239; HLA-B*07:02; SEPT14; ENSG00000154997; TAA
GPNNQPVSF

SEQ ID NO: 75240 - protein, 9 aa, Homo sapiens
  Table A; Target 75240; HLA-B*15:01; SEPT14; ENSG00000154997; TAA
GPNNQPVSF

SEQ ID NO: 75241 - protein, 9 aa, Homo sapiens
  Table A; Target 75241; HLA-B*15:03; SEPT14; ENSG00000154997; TAA
GPNNQPVSF

SEQ ID NO: 75242 - protein, 9 aa, Homo sapiens
  Table A; Target 75242; HLA-B*35:01; SEPT14; ENSG00000154997; TAA
GPNNQPVSF

SEQ ID NO: 75243 - protein, 9 aa, Homo sapiens
  Table A; Target 75243; HLA-B*35:03; SEPT14; ENSG00000154997; TAA
GPNNQPVSF

SEQ ID NO: 75244 - protein, 9 aa, Homo sapiens
  Table A; Target 75244; HLA-B*44:03; SEPT14; ENSG00000154997; TAA
GPNNQPVSF

SEQ ID NO: 75245 - protein, 9 aa, Homo sapiens
  Table A; Target 75245; HLA-B*55:01; SEPT14; ENSG00000154997; TAA
GPNNQPVSF

SEQ ID NO: 75246 - protein, 9 aa, Homo sapiens
  Table A; Target 75246; HLA-B*56:01; SEPT14; ENSG00000154997; TAA
GPNNQPVSF

SEQ ID NO: 75247 - protein, 9 aa, Homo sapiens
  Table A; Target 75247; HLA-C*07:02; SEPT14; ENSG00000154997; TAA
GPNNQPVSF

SEQ ID NO: 75248 - protein, 9 aa, Homo sapiens
  Table A; Target 75248; HLA-C*07:04; SEPT14; ENSG00000154997; TAA
GPNNQPVSF

SEQ ID NO: 75249 - protein, 9 aa, Homo sapiens
  Table A; Target 75249; HLA-C*14:02; SEPT14; ENSG00000154997; TAA
GPNNQPVSF

SEQ ID NO: 75250 - protein, 9 aa, Homo sapiens
  Table A; Target 75250; HLA-C*16:04; SEPT14; ENSG00000154997; TAA
GPNNQPVSF

SEQ ID NO: 75251 - protein, 10 aa, Homo sapiens
  Table A; Target 75251; HLA-A*03:01; SEPT14; ENSG00000154997; TAA
GSTDEVKVGK

SEQ ID NO: 75252 - protein, 10 aa, Homo sapiens
  Table A; Target 75252; HLA-A*03:02; SEPT14; ENSG00000154997; TAA
GSTDEVKVGK

SEQ ID NO: 75253 - protein, 10 aa, Homo sapiens
  Table A; Target 75253; HLA-A*11:01; SEPT14; ENSG00000154997; TAA
GSTDEVKVGK

SEQ ID NO: 75254 - protein, 10 aa, Homo sapiens
  Table A; Target 75254; HLA-A*31:01; SEPT14; ENSG00000154997; TAA
GSTDEVKVGK

SEQ ID NO: 75255 - protein, 10 aa, Homo sapiens
  Table A; Target 75255; HLA-A*68:01; SEPT14; ENSG00000154997; TAA
GSTDEVKVGK

SEQ ID NO: 75256 - protein, 10 aa, Homo sapiens
  Table A; Target 75256; HLA-B*27:02; SEPT14; ENSG00000154997; TAA
GSTDEVKVGK

SEQ ID NO: 75257 - protein, 10 aa, Homo sapiens
  Table A; Target 75257; HLA-B*27:05; SEPT14; ENSG00000154997; TAA
GSTDEVKVGK

SEQ ID NO: 75258 - protein, 10 aa, Homo sapiens
  Table A; Target 75258; HLA-B*57:01; SEPT14; ENSG00000154997; TAA
GSTDEVKVGK

SEQ ID NO: 75259 - protein, 10 aa, Homo sapiens
  Table A; Target 75259; HLA-C*07:06; SEPT14; ENSG00000154997; TAA
GSTDEVKVGK

SEQ ID NO: 75260 - protein, 8 aa, Homo sapiens
  Table A; Target 75260; HLA-B*37:01; SEPT14; ENSG00000154997; TAA
HDSRVHVC

SEQ ID NO: 75261 - protein, 8 aa, Homo sapiens
  Table A; Target 75261; HLA-C*14:02; SEPT14; ENSG00000154997; TAA
HFYSNVGL

SEQ ID NO: 75262 - protein, 10 aa, Homo sapiens
  Table A; Target 75262; HLA-A*23:01; SEPT14; ENSG00000154997; TAA
HFYSNVGLQI

SEQ ID NO: 75263 - protein, 9 aa, Homo sapiens
  Table A; Target 75263; HLA-A*31:01; SEPT14; ENSG00000154997; TAA
HTQHYECYR

SEQ ID NO: 75264 - protein, 9 aa, Homo sapiens
  Table A; Target 75264; HLA-A*33:01; SEPT14; ENSG00000154997; TAA
HTQHYECYR

SEQ ID NO: 75265 - protein, 9 aa, Homo sapiens
  Table A; Target 75265; HLA-A*33:03; SEPT14; ENSG00000154997; TAA
HTQHYECYR

SEQ ID NO: 75266 - protein, 9 aa, Homo sapiens
  Table A; Target 75266; HLA-A*02:07; SEPT14; ENSG00000154997; TAA
HYPWGVLQV

SEQ ID NO: 75267 - protein, 9 aa, Homo sapiens
  Table A; Target 75267; HLA-A*24:02; SEPT14; ENSG00000154997; TAA
HYPWGVLQV

SEQ ID NO: 75268 - protein, 9 aa, Homo sapiens
  Table A; Target 75268; HLA-A*68:02; SEPT14; ENSG00000154997; TAA
HYPWGVLQV

SEQ ID NO: 75269 - protein, 9 aa, Homo sapiens
  Table A; Target 75269; HLA-A*03:01; SEPT14; ENSG00000154997; TAA
IAKADTISK

SEQ ID NO: 75270 - protein, 9 aa, Homo sapiens
  Table A; Target 75270; HLA-A*03:02; SEPT14; ENSG00000154997; TAA
IAKADTISK

SEQ ID NO: 75271 - protein, 9 aa, Homo sapiens
  Table A; Target 75271; HLA-A*11:01; SEPT14; ENSG00000154997; TAA
IAKADTISK

SEQ ID NO: 75272 - protein, 9 aa, Homo sapiens
  Table A; Target 75272; HLA-A*31:01; SEPT14; ENSG00000154997; TAA
IAKADTISK

SEQ ID NO: 75273 - protein, 9 aa, Homo sapiens
  Table A; Target 75273; HLA-A*33:01; SEPT14; ENSG00000154997; TAA
IAKADTISK

SEQ ID NO: 75274 - protein, 9 aa, Homo sapiens
  Table A; Target 75274; HLA-A*33:03; SEPT14; ENSG00000154997; TAA
IAKADTISK

SEQ ID NO: 75275 - protein, 9 aa, Homo sapiens
  Table A; Target 75275; HLA-A*68:01; SEPT14; ENSG00000154997; TAA
IAKADTISK

SEQ ID NO: 75276 - protein, 9 aa, Homo sapiens
  Table A; Target 75276; HLA-B*46:01; SEPT14; ENSG00000154997; TAA
IAKADTISK

SEQ ID NO: 75277 - protein, 9 aa, Homo sapiens
  Table A; Target 75277; HLA-B*57:01; SEPT14; ENSG00000154997; TAA
IAKADTISK

SEQ ID NO: 75278 - protein, 9 aa, Homo sapiens
  Table A; Target 75278; HLA-B*58:01; SEPT14; ENSG00000154997; TAA
IAKADTISK

SEQ ID NO: 75279 - protein, 9 aa, Homo sapiens
  Table A; Target 75279; HLA-C*02:02; SEPT14; ENSG00000154997; TAA
IAKADTISK

SEQ ID NO: 75280 - protein, 9 aa, Homo sapiens
  Table A; Target 75280; HLA-C*03:03; SEPT14; ENSG00000154997; TAA
IAKADTISK

SEQ ID NO: 75281 - protein, 9 aa, Homo sapiens
  Table A; Target 75281; HLA-C*03:04; SEPT14; ENSG00000154997; TAA
IAKADTISK

SEQ ID NO: 75282 - protein, 9 aa, Homo sapiens
  Table A; Target 75282; HLA-C*06:02; SEPT14; ENSG00000154997; TAA
IAKADTISK

SEQ ID NO: 75283 - protein, 9 aa, Homo sapiens
  Table A; Target 75283; HLA-C*07:06; SEPT14; ENSG00000154997; TAA
IAKADTISK

SEQ ID NO: 75284 - protein, 9 aa, Homo sapiens
  Table A; Target 75284; HLA-C*12:03; SEPT14; ENSG00000154997; TAA
IAKADTISK

SEQ ID NO: 75285 - protein, 9 aa, Homo sapiens
  Table A; Target 75285; HLA-C*16:01; SEPT14; ENSG00000154997; TAA
IAKADTISK

SEQ ID NO: 75286 - protein, 9 aa, Homo sapiens
  Table A; Target 75286; HLA-C*16:02; SEPT14; ENSG00000154997; TAA
IAKADTISK

SEQ ID NO: 75287 - protein, 8 aa, Homo sapiens
  Table A; Target 75287; HLA-B*15:03; SEPT14; ENSG00000154997; TAA
IDAQFEAY

SEQ ID NO: 75288 - protein, 8 aa, Homo sapiens
  Table A; Target 75288; HLA-B*18:01; SEPT14; ENSG00000154997; TAA
IDAQFEAY

SEQ ID NO: 75289 - protein, 8 aa, Homo sapiens
  Table A; Target 75289; HLA-B*37:01; SEPT14; ENSG00000154997; TAA
IDAQFEAY

SEQ ID NO: 75290 - protein, 8 aa, Homo sapiens
  Table A; Target 75290; HLA-C*07:01; SEPT14; ENSG00000154997; TAA
IDAQFEAY

SEQ ID NO: 75291 - protein, 9 aa, Homo sapiens
  Table A; Target 75291; HLA-A*68:02; SEPT14; ENSG00000154997; TAA
IDAQFEAYL

SEQ ID NO: 75292 - protein, 9 aa, Homo sapiens
  Table A; Target 75292; HLA-C*06:02; SEPT14; ENSG00000154997; TAA
IDAQFEAYL

SEQ ID NO: 75293 - protein, 8 aa, Homo sapiens
  Table A; Target 75293; HLA-C*07:01; SEPT14; ENSG00000154997; TAA
IDTLFNTN

SEQ ID NO: 75294 - protein, 9 aa, Homo sapiens
  Table A; Target 75294; HLA-A*30:01; SEPT14; ENSG00000154997; TAA
IDTLFNTNL

SEQ ID NO: 75295 - protein, 9 aa, Homo sapiens
  Table A; Target 75295; HLA-B*13:02; SEPT14; ENSG00000154997; TAA
IDTLFNTNL

SEQ ID NO: 75296 - protein, 9 aa, Homo sapiens
  Table A; Target 75296; HLA-B*37:01; SEPT14; ENSG00000154997; TAA
IDTLFNTNL

SEQ ID NO: 75297 - protein, 9 aa, Homo sapiens
  Table A; Target 75297; HLA-B*40:01; SEPT14; ENSG00000154997; TAA
IDTLFNTNL

SEQ ID NO: 75298 - protein, 9 aa, Homo sapiens
  Table A; Target 75298; HLA-B*40:02; SEPT14; ENSG00000154997; TAA
IDTLFNTNL

SEQ ID NO: 75299 - protein, 9 aa, Homo sapiens
  Table A; Target 75299; HLA-B*49:01; SEPT14; ENSG00000154997; TAA
IDTLFNTNL

SEQ ID NO: 75300 - protein, 9 aa, Homo sapiens
  Table A; Target 75300; HLA-C*06:02; SEPT14; ENSG00000154997; TAA
IDTLFNTNL

SEQ ID NO: 75301 - protein, 9 aa, Homo sapiens
  Table A; Target 75301; HLA-C*07:01; SEPT14; ENSG00000154997; TAA
IDTLFNTNL

SEQ ID NO: 75302 - protein, 9 aa, Homo sapiens
  Table A; Target 75302; HLA-C*07:04; SEPT14; ENSG00000154997; TAA
IDTLFNTNL

SEQ ID NO: 75303 - protein, 9 aa, Homo sapiens
  Table A; Target 75303; HLA-C*16:02; SEPT14; ENSG00000154997; TAA
IDTLFNTNL

SEQ ID NO: 75304 - protein, 10 aa, Homo sapiens
  Table A; Target 75304; HLA-B*27:02; SEPT14; ENSG00000154997; TAA
IDTLFNTNLK

SEQ ID NO: 75305 - protein, 10 aa, Homo sapiens
  Table A; Target 75305; HLA-C*07:01; SEPT14; ENSG00000154997; TAA
IDTLFNTNLK

SEQ ID NO: 75306 - protein, 9 aa, Homo sapiens
  Table A; Target 75306; HLA-A*23:01; SEPT14; ENSG00000154997; TAA
IFEAKRQEF

SEQ ID NO: 75307 - protein, 9 aa, Homo sapiens
  Table A; Target 75307; HLA-A*24:02; SEPT14; ENSG00000154997; TAA
IFEAKRQEF

SEQ ID NO: 75308 - protein, 11 aa, Homo sapiens
  Table A; Target 75308; HLA-A*02:07; SEPT14; ENSG00000154997; TAA
IIPLIAKADTI

SEQ ID NO: 75309 - protein, 11 aa, Homo sapiens
  Table A; Target 75309; HLA-A*03:01; SEPT14; ENSG00000154997; TAA
ILCVGETGIGK

SEQ ID NO: 75310 - protein, 11 aa, Homo sapiens
  Table A; Target 75310; HLA-A*03:02; SEPT14; ENSG00000154997; TAA
ILCVGETGIGK

SEQ ID NO: 75311 - protein, 11 aa, Homo sapiens
  Table A; Target 75311; HLA-B*27:02; SEPT14; ENSG00000154997; TAA
ILCVGETGIGK

SEQ ID NO: 75312 - protein, 10 aa, Homo sapiens
  Table A; Target 75312; HLA-A*02:01; SEPT14; ENSG00000154997; TAA
IMSELISNGI

SEQ ID NO: 75313 - protein, 10 aa, Homo sapiens
  Table A; Target 75313; HLA-A*02:03; SEPT14; ENSG00000154997; TAA
IMSELISNGI

SEQ ID NO: 75314 - protein, 10 aa, Homo sapiens
  Table A; Target 75314; HLA-B*13:02; SEPT14; ENSG00000154997; TAA
IMSELISNGI

SEQ ID NO: 75315 - protein, 10 aa, Homo sapiens
  Table A; Target 75315; HLA-B*35:03; SEPT14; ENSG00000154997; TAA
IPLIAKADTI

SEQ ID NO: 75316 - protein, 10 aa, Homo sapiens
  Table A; Target 75316; HLA-B*51:01; SEPT14; ENSG00000154997; TAA
IPLIAKADTI

SEQ ID NO: 75317 - protein, 9 aa, Homo sapiens
  Table A; Target 75317; HLA-A*23:01; SEPT14; ENSG00000154997; TAA
ISKNDLQTF

SEQ ID NO: 75318 - protein, 9 aa, Homo sapiens
  Table A; Target 75318; HLA-A*24:02; SEPT14; ENSG00000154997; TAA
ISKNDLQTF

SEQ ID NO: 75319 - protein, 9 aa, Homo sapiens
  Table A; Target 75319; HLA-A*25:01; SEPT14; ENSG00000154997; TAA
ISKNDLQTF

SEQ ID NO: 75320 - protein, 9 aa, Homo sapiens
  Table A; Target 75320; HLA-A*26:01; SEPT14; ENSG00000154997; TAA
ISKNDLQTF

SEQ ID NO: 75321 - protein, 9 aa, Homo sapiens
  Table A; Target 75321; HLA-A*30:02; SEPT14; ENSG00000154997; TAA
ISKNDLQTF

SEQ ID NO: 75322 - protein, 9 aa, Homo sapiens
  Table A; Target 75322; HLA-A*31:01; SEPT14; ENSG00000154997; TAA
ISKNDLQTF

SEQ ID NO: 75323 - protein, 9 aa, Homo sapiens
  Table A; Target 75323; HLA-A*32:01; SEPT14; ENSG00000154997; TAA
ISKNDLQTF

SEQ ID NO: 75324 - protein, 9 aa, Homo sapiens
  Table A; Target 75324; HLA-A*33:01; SEPT14; ENSG00000154997; TAA
ISKNDLQTF

SEQ ID NO: 75325 - protein, 9 aa, Homo sapiens
  Table A; Target 75325; HLA-A*33:03; SEPT14; ENSG00000154997; TAA
ISKNDLQTF

SEQ ID NO: 75326 - protein, 9 aa, Homo sapiens
  Table A; Target 75326; HLA-B*15:01; SEPT14; ENSG00000154997; TAA
ISKNDLQTF

SEQ ID NO: 75327 - protein, 9 aa, Homo sapiens
  Table A; Target 75327; HLA-B*15:03; SEPT14; ENSG00000154997; TAA
ISKNDLQTF

SEQ ID NO: 75328 - protein, 9 aa, Homo sapiens
  Table A; Target 75328; HLA-B*40:02; SEPT14; ENSG00000154997; TAA
ISKNDLQTF

SEQ ID NO: 75329 - protein, 9 aa, Homo sapiens
  Table A; Target 75329; HLA-B*46:01; SEPT14; ENSG00000154997; TAA
ISKNDLQTF

SEQ ID NO: 75330 - protein, 9 aa, Homo sapiens
  Table A; Target 75330; HLA-B*57:01; SEPT14; ENSG00000154997; TAA
ISKNDLQTF

SEQ ID NO: 75331 - protein, 9 aa, Homo sapiens
  Table A; Target 75331; HLA-B*58:01; SEPT14; ENSG00000154997; TAA
ISKNDLQTF

SEQ ID NO: 75332 - protein, 9 aa, Homo sapiens
  Table A; Target 75332; HLA-C*01:02; SEPT14; ENSG00000154997; TAA
ISKNDLQTF

SEQ ID NO: 75333 - protein, 9 aa, Homo sapiens
  Table A; Target 75333; HLA-C*02:02; SEPT14; ENSG00000154997; TAA
ISKNDLQTF

SEQ ID NO: 75334 - protein, 9 aa, Homo sapiens
  Table A; Target 75334; HLA-C*03:04; SEPT14; ENSG00000154997; TAA
ISKNDLQTF

SEQ ID NO: 75335 - protein, 9 aa, Homo sapiens
  Table A; Target 75335; HLA-C*05:01; SEPT14; ENSG00000154997; TAA
ISKNDLQTF

SEQ ID NO: 75336 - protein, 9 aa, Homo sapiens
  Table A; Target 75336; HLA-C*07:04; SEPT14; ENSG00000154997; TAA
ISKNDLQTF

SEQ ID NO: 75337 - protein, 9 aa, Homo sapiens
  Table A; Target 75337; HLA-C*12:03; SEPT14; ENSG00000154997; TAA
ISKNDLQTF

SEQ ID NO: 75338 - protein, 9 aa, Homo sapiens
  Table A; Target 75338; HLA-C*14:02; SEPT14; ENSG00000154997; TAA
ISKNDLQTF

SEQ ID NO: 75339 - protein, 9 aa, Homo sapiens
  Table A; Target 75339; HLA-C*16:01; SEPT14; ENSG00000154997; TAA
ISKNDLQTF

SEQ ID NO: 75340 - protein, 9 aa, Homo sapiens
  Table A; Target 75340; HLA-C*16:02; SEPT14; ENSG00000154997; TAA
ISKNDLQTF

SEQ ID NO: 75341 - protein, 9 aa, Homo sapiens
  Table A; Target 75341; HLA-C*16:04; SEPT14; ENSG00000154997; TAA
ISKNDLQTF

SEQ ID NO: 75342 - protein, 10 aa, Homo sapiens
  Table A; Target 75342; HLA-A*03:01; SEPT14; ENSG00000154997; TAA
ISKNDLQTFK

SEQ ID NO: 75343 - protein, 8 aa, Homo sapiens
  Table A; Target 75343; HLA-A*01:01; SEPT14; ENSG00000154997; TAA
ISNGIQIY

SEQ ID NO: 75344 - protein, 8 aa, Homo sapiens
  Table A; Target 75344; HLA-A*30:02; SEPT14; ENSG00000154997; TAA
ISNGIQIY

SEQ ID NO: 75345 - protein, 8 aa, Homo sapiens
  Table A; Target 75345; HLA-B*15:01; SEPT14; ENSG00000154997; TAA
ISNGIQIY

SEQ ID NO: 75346 - protein, 8 aa, Homo sapiens
  Table A; Target 75346; HLA-B*15:03; SEPT14; ENSG00000154997; TAA
ISNGIQIY

SEQ ID NO: 75347 - protein, 8 aa, Homo sapiens
  Table A; Target 75347; HLA-B*46:01; SEPT14; ENSG00000154997; TAA
ISNGIQIY

SEQ ID NO: 75348 - protein, 8 aa, Homo sapiens
  Table A; Target 75348; HLA-B*57:01; SEPT14; ENSG00000154997; TAA
ISNGIQIY

SEQ ID NO: 75349 - protein, 8 aa, Homo sapiens
  Table A; Target 75349; HLA-B*58:01; SEPT14; ENSG00000154997; TAA
ISNGIQIY

SEQ ID NO: 75350 - protein, 8 aa, Homo sapiens
  Table A; Target 75350; HLA-C*02:02; SEPT14; ENSG00000154997; TAA
ISNGIQIY

SEQ ID NO: 75351 - protein, 8 aa, Homo sapiens
  Table A; Target 75351; HLA-C*07:01; SEPT14; ENSG00000154997; TAA
ISNGIQIY

SEQ ID NO: 75352 - protein, 8 aa, Homo sapiens
  Table A; Target 75352; HLA-C*07:04; SEPT14; ENSG00000154997; TAA
ISNGIQIY

SEQ ID NO: 75353 - protein, 8 aa, Homo sapiens
  Table A; Target 75353; HLA-C*12:03; SEPT14; ENSG00000154997; TAA
ISNGIQIY

SEQ ID NO: 75354 - protein, 8 aa, Homo sapiens
  Table A; Target 75354; HLA-C*16:01; SEPT14; ENSG00000154997; TAA
ISNGIQIY

SEQ ID NO: 75355 - protein, 8 aa, Homo sapiens
  Table A; Target 75355; HLA-C*16:02; SEPT14; ENSG00000154997; TAA
ISNGIQIY

SEQ ID NO: 75356 - protein, 10 aa, Homo sapiens
  Table A; Target 75356; HLA-A*02:04; SEPT14; ENSG00000154997; TAA
ISNGIQIYQL

SEQ ID NO: 75357 - protein, 10 aa, Homo sapiens
  Table A; Target 75357; HLA-A*23:01; SEPT14; ENSG00000154997; TAA
ISNGIQIYQL

SEQ ID NO: 75358 - protein, 10 aa, Homo sapiens
  Table A; Target 75358; HLA-A*68:02; SEPT14; ENSG00000154997; TAA
ISNGIQIYQL

SEQ ID NO: 75359 - protein, 8 aa, Homo sapiens
  Table A; Target 75359; HLA-A*32:01; SEPT14; ENSG00000154997; TAA
ISPTGHSL

SEQ ID NO: 75360 - protein, 8 aa, Homo sapiens
  Table A; Target 75360; HLA-B*07:02; SEPT14; ENSG00000154997; TAA
ISPTGHSL

SEQ ID NO: 75361 - protein, 8 aa, Homo sapiens
  Table A; Target 75361; HLA-B*08:01; SEPT14; ENSG00000154997; TAA
ISPTGHSL

SEQ ID NO: 75362 - protein, 8 aa, Homo sapiens
  Table A; Target 75362; HLA-B*15:03; SEPT14; ENSG00000154997; TAA
ISPTGHSL

SEQ ID NO: 75363 - protein, 8 aa, Homo sapiens
  Table A; Target 75363; HLA-B*39:01; SEPT14; ENSG00000154997; TAA
ISPTGHSL

SEQ ID NO: 75364 - protein, 8 aa, Homo sapiens
  Table A; Target 75364; HLA-B*40:02; SEPT14; ENSG00000154997; TAA
ISPTGHSL

SEQ ID NO: 75365 - protein, 8 aa, Homo sapiens
  Table A; Target 75365; HLA-B*46:01; SEPT14; ENSG00000154997; TAA
ISPTGHSL

SEQ ID NO: 75366 - protein, 8 aa, Homo sapiens
  Table A; Target 75366; HLA-B*51:01; SEPT14; ENSG00000154997; TAA
ISPTGHSL

SEQ ID NO: 75367 - protein, 8 aa, Homo sapiens
  Table A; Target 75367; HLA-B*58:01; SEPT14; ENSG00000154997; TAA
ISPTGHSL

SEQ ID NO: 75368 - protein, 8 aa, Homo sapiens
  Table A; Target 75368; HLA-C*01:02; SEPT14; ENSG00000154997; TAA
ISPTGHSL

SEQ ID NO: 75369 - protein, 8 aa, Homo sapiens
  Table A; Target 75369; HLA-C*02:02; SEPT14; ENSG00000154997; TAA
ISPTGHSL

SEQ ID NO: 75370 - protein, 8 aa, Homo sapiens
  Table A; Target 75370; HLA-C*03:03; SEPT14; ENSG00000154997; TAA
ISPTGHSL

SEQ ID NO: 75371 - protein, 8 aa, Homo sapiens
  Table A; Target 75371; HLA-C*03:04; SEPT14; ENSG00000154997; TAA
ISPTGHSL

SEQ ID NO: 75372 - protein, 8 aa, Homo sapiens
  Table A; Target 75372; HLA-C*04:01; SEPT14; ENSG00000154997; TAA
ISPTGHSL

SEQ ID NO: 75373 - protein, 8 aa, Homo sapiens
  Table A; Target 75373; HLA-C*05:01; SEPT14; ENSG00000154997; TAA
ISPTGHSL

SEQ ID NO: 75374 - protein, 8 aa, Homo sapiens
  Table A; Target 75374; HLA-C*06:02; SEPT14; ENSG00000154997; TAA
ISPTGHSL

SEQ ID NO: 75375 - protein, 8 aa, Homo sapiens
  Table A; Target 75375; HLA-C*07:01; SEPT14; ENSG00000154997; TAA
ISPTGHSL

SEQ ID NO: 75376 - protein, 8 aa, Homo sapiens
  Table A; Target 75376; HLA-C*07:02; SEPT14; ENSG00000154997; TAA
ISPTGHSL

SEQ ID NO: 75377 - protein, 8 aa, Homo sapiens
  Table A; Target 75377; HLA-C*12:03; SEPT14; ENSG00000154997; TAA
ISPTGHSL

SEQ ID NO: 75378 - protein, 8 aa, Homo sapiens
  Table A; Target 75378; HLA-C*14:02; SEPT14; ENSG00000154997; TAA
ISPTGHSL

SEQ ID NO: 75379 - protein, 8 aa, Homo sapiens
  Table A; Target 75379; HLA-C*16:01; SEPT14; ENSG00000154997; TAA
ISPTGHSL

SEQ ID NO: 75380 - protein, 8 aa, Homo sapiens
  Table A; Target 75380; HLA-C*16:02; SEPT14; ENSG00000154997; TAA
ISPTGHSL

SEQ ID NO: 75381 - protein, 9 aa, Homo sapiens
  Table A; Target 75381; HLA-A*11:01; SEPT14; ENSG00000154997; TAA
ISPTGHSLK

SEQ ID NO: 75382 - protein, 11 aa, Homo sapiens
  Table A; Target 75382; HLA-C*01:02; SEPT14; ENSG00000154997; TAA
ISPTGHSLKSL

SEQ ID NO: 75383 - protein, 11 aa, Homo sapiens
  Table A; Target 75383; HLA-C*07:02; SEPT14; ENSG00000154997; TAA
ISPTGHSLKSL

SEQ ID NO: 75384 - protein, 9 aa, Homo sapiens
  Table A; Target 75384; HLA-A*01:01; SEPT14; ENSG00000154997; TAA
IVDYIDAQF

SEQ ID NO: 75385 - protein, 9 aa, Homo sapiens
  Table A; Target 75385; HLA-A*02:07; SEPT14; ENSG00000154997; TAA
IVDYIDAQF

SEQ ID NO: 75386 - protein, 9 aa, Homo sapiens
  Table A; Target 75386; HLA-A*23:01; SEPT14; ENSG00000154997; TAA
IVDYIDAQF

SEQ ID NO: 75387 - protein, 9 aa, Homo sapiens
  Table A; Target 75387; HLA-A*32:01; SEPT14; ENSG00000154997; TAA
IVDYIDAQF

SEQ ID NO: 75388 - protein, 9 aa, Homo sapiens
  Table A; Target 75388; HLA-B*35:01; SEPT14; ENSG00000154997; TAA
IVDYIDAQF

SEQ ID NO: 75389 - protein, 9 aa, Homo sapiens
  Table A; Target 75389; HLA-B*35:03; SEPT14; ENSG00000154997; TAA
IVDYIDAQF

SEQ ID NO: 75390 - protein, 9 aa, Homo sapiens
  Table A; Target 75390; HLA-B*38:01; SEPT14; ENSG00000154997; TAA
IVDYIDAQF

SEQ ID NO: 75391 - protein, 9 aa, Homo sapiens
  Table A; Target 75391; HLA-B*55:01; SEPT14; ENSG00000154997; TAA
IVDYIDAQF

SEQ ID NO: 75392 - protein, 9 aa, Homo sapiens
  Table A; Target 75392; HLA-C*04:01; SEPT14; ENSG00000154997; TAA
IVDYIDAQF

SEQ ID NO: 75393 - protein, 9 aa, Homo sapiens
  Table A; Target 75393; HLA-C*05:01; SEPT14; ENSG00000154997; TAA
IVDYIDAQF

SEQ ID NO: 75394 - protein, 9 aa, Homo sapiens
  Table A; Target 75394; HLA-C*07:04; SEPT14; ENSG00000154997; TAA
IVDYIDAQF

SEQ ID NO: 75395 - protein, 10 aa, Homo sapiens
  Table A; Target 75395; HLA-B*40:01; SEPT14; ENSG00000154997; TAA
KADTISKNDL

SEQ ID NO: 75396 - protein, 10 aa, Homo sapiens
  Table A; Target 75396; HLA-C*05:01; SEPT14; ENSG00000154997; TAA
KADTISKNDL

SEQ ID NO: 75397 - protein, 8 aa, Homo sapiens
  Table A; Target 75397; HLA-B*37:01; SEPT14; ENSG00000154997; TAA
KDNKSSHF

SEQ ID NO: 75398 - protein, 9 aa, Homo sapiens
  Table A; Target 75398; HLA-A*30:02; SEPT14; ENSG00000154997; TAA
KDNKSSHFY

SEQ ID NO: 75399 - protein, 9 aa, Homo sapiens
  Table A; Target 75399; HLA-B*44:03; SEPT14; ENSG00000154997; TAA
KDNKSSHFY

SEQ ID NO: 75400 - protein, 9 aa, Homo sapiens
  Table A; Target 75400; HLA-A*30:01; SEPT14; ENSG00000154997; TAA
KEASYQPIV

SEQ ID NO: 75401 - protein, 9 aa, Homo sapiens
  Table A; Target 75401; HLA-B*40:01; SEPT14; ENSG00000154997; TAA
KEASYQPIV

SEQ ID NO: 75402 - protein, 9 aa, Homo sapiens
  Table A; Target 75402; HLA-B*40:02; SEPT14; ENSG00000154997; TAA
KEASYQPIV

SEQ ID NO: 75403 - protein, 9 aa, Homo sapiens
  Table A; Target 75403; HLA-B*49:01; SEPT14; ENSG00000154997; TAA
KEASYQPIV

SEQ ID NO: 75404 - protein, 11 aa, Homo sapiens
  Table A; Target 75404; HLA-B*44:02; SEPT14; ENSG00000154997; TAA
KEASYQPIVDY

SEQ ID NO: 75405 - protein, 11 aa, Homo sapiens
  Table A; Target 75405; HLA-B*44:03; SEPT14; ENSG00000154997; TAA
KEASYQPIVDY

SEQ ID NO: 75406 - protein, 10 aa, Homo sapiens
  Table A; Target 75406; HLA-B*40:02; SEPT14; ENSG00000154997; TAA
KEKEATFKEA

SEQ ID NO: 75407 - protein, 9 aa, Homo sapiens
  Table A; Target 75407; HLA-B*44:02; SEPT14; ENSG00000154997; TAA
KEKTHTQHY

SEQ ID NO: 75408 - protein, 10 aa, Homo sapiens
  Table A; Target 75408; HLA-A*30:01; SEPT14; ENSG00000154997; TAA
KELQDKFEHL

SEQ ID NO: 75409 - protein, 10 aa, Homo sapiens
  Table A; Target 75409; HLA-B*40:01; SEPT14; ENSG00000154997; TAA
KELQDKFEHL

SEQ ID NO: 75410 - protein, 10 aa, Homo sapiens
  Table A; Target 75410; HLA-B*40:02; SEPT14; ENSG00000154997; TAA
KELQDKFEHL

SEQ ID NO: 75411 - protein, 8 aa, Homo sapiens
  Table A; Target 75411; HLA-A*02:01; SEPT14; ENSG00000154997; TAA
KLTVVETV

SEQ ID NO: 75412 - protein, 8 aa, Homo sapiens
  Table A; Target 75412; HLA-A*02:03; SEPT14; ENSG00000154997; TAA
KLTVVETV

SEQ ID NO: 75413 - protein, 8 aa, Homo sapiens
  Table A; Target 75413; HLA-A*32:01; SEPT14; ENSG00000154997; TAA
KLTVVETV

SEQ ID NO: 75414 - protein, 8 aa, Homo sapiens
  Table A; Target 75414; HLA-B*13:02; SEPT14; ENSG00000154997; TAA
KLTVVETV

SEQ ID NO: 75415 - protein, 8 aa, Homo sapiens
  Table A; Target 75415; HLA-B*37:01; SEPT14; ENSG00000154997; TAA
KLTVVETV

SEQ ID NO: 75416 - protein, 8 aa, Homo sapiens
  Table A; Target 75416; HLA-B*55:01; SEPT14; ENSG00000154997; TAA
KLTVVETV

SEQ ID NO: 75417 - protein, 8 aa, Homo sapiens
  Table A; Target 75417; HLA-C*06:02; SEPT14; ENSG00000154997; TAA
KLTVVETV

SEQ ID NO: 75418 - protein, 8 aa, Homo sapiens
  Table A; Target 75418; HLA-C*16:02; SEPT14; ENSG00000154997; TAA
KLTVVETV

SEQ ID NO: 75419 - protein, 10 aa, Homo sapiens
  Table A; Target 75419; HLA-A*01:01; SEPT14; ENSG00000154997; TAA
KLTVVETVGY

SEQ ID NO: 75420 - protein, 10 aa, Homo sapiens
  Table A; Target 75420; HLA-A*29:02; SEPT14; ENSG00000154997; TAA
KLTVVETVGY

SEQ ID NO: 75421 - protein, 10 aa, Homo sapiens
  Table A; Target 75421; HLA-A*30:02; SEPT14; ENSG00000154997; TAA
KLTVVETVGY

SEQ ID NO: 75422 - protein, 10 aa, Homo sapiens
  Table A; Target 75422; HLA-A*32:01; SEPT14; ENSG00000154997; TAA
KLTVVETVGY

SEQ ID NO: 75423 - protein, 10 aa, Homo sapiens
  Table A; Target 75423; HLA-B*07:02; SEPT14; ENSG00000154997; TAA
KLTVVETVGY

SEQ ID NO: 75424 - protein, 10 aa, Homo sapiens
  Table A; Target 75424; HLA-B*15:01; SEPT14; ENSG00000154997; TAA
KLTVVETVGY

SEQ ID NO: 75425 - protein, 10 aa, Homo sapiens
  Table A; Target 75425; HLA-B*15:03; SEPT14; ENSG00000154997; TAA
KLTVVETVGY

SEQ ID NO: 75426 - protein, 10 aa, Homo sapiens
  Table A; Target 75426; HLA-B*27:02; SEPT14; ENSG00000154997; TAA
KLTVVETVGY

SEQ ID NO: 75427 - protein, 10 aa, Homo sapiens
  Table A; Target 75427; HLA-B*27:05; SEPT14; ENSG00000154997; TAA
KLTVVETVGY

SEQ ID NO: 75428 - protein, 10 aa, Homo sapiens
  Table A; Target 75428; HLA-B*58:01; SEPT14; ENSG00000154997; TAA
KLTVVETVGY

SEQ ID NO: 75429 - protein, 10 aa, Homo sapiens
  Table A; Target 75429; HLA-C*04:01; SEPT14; ENSG00000154997; TAA
KLTVVETVGY

SEQ ID NO: 75430 - protein, 10 aa, Homo sapiens
  Table A; Target 75430; HLA-C*06:02; SEPT14; ENSG00000154997; TAA
KLTVVETVGY

SEQ ID NO: 75431 - protein, 10 aa, Homo sapiens
  Table A; Target 75431; HLA-C*07:01; SEPT14; ENSG00000154997; TAA
KLTVVETVGY

SEQ ID NO: 75432 - protein, 10 aa, Homo sapiens
  Table A; Target 75432; HLA-C*07:04; SEPT14; ENSG00000154997; TAA
KLTVVETVGY

SEQ ID NO: 75433 - protein, 8 aa, Homo sapiens
  Table A; Target 75433; HLA-B*08:01; SEPT14; ENSG00000154997; TAA
KNKIMSEL

SEQ ID NO: 75434 - protein, 8 aa, Homo sapiens
  Table A; Target 75434; HLA-B*57:01; SEPT14; ENSG00000154997; TAA
KSLDLLTM

SEQ ID NO: 75435 - protein, 8 aa, Homo sapiens
  Table A; Target 75435; HLA-B*58:01; SEPT14; ENSG00000154997; TAA
KSLDLLTM

SEQ ID NO: 75436 - protein, 9 aa, Homo sapiens
  Table A; Target 75436; HLA-A*03:01; SEPT14; ENSG00000154997; TAA
KSLDLLTMK

SEQ ID NO: 75437 - protein, 9 aa, Homo sapiens
  Table A; Target 75437; HLA-A*03:02; SEPT14; ENSG00000154997; TAA
KSLDLLTMK

SEQ ID NO: 75438 - protein, 9 aa, Homo sapiens
  Table A; Target 75438; HLA-A*11:01; SEPT14; ENSG00000154997; TAA
KSLDLLTMK

SEQ ID NO: 75439 - protein, 9 aa, Homo sapiens
  Table A; Target 75439; HLA-A*31:01; SEPT14; ENSG00000154997; TAA
KSLDLLTMK

SEQ ID NO: 75440 - protein, 9 aa, Homo sapiens
  Table A; Target 75440; HLA-B*57:01; SEPT14; ENSG00000154997; TAA
KSLDLLTMK

SEQ ID NO: 75441 - protein, 10 aa, Homo sapiens
  Table A; Target 75441; HLA-C*06:02; SEPT14; ENSG00000154997; TAA
KSLDLLTMKN

SEQ ID NO: 75442 - protein, 8 aa, Homo sapiens
  Table A; Target 75442; HLA-B*58:01; SEPT14; ENSG00000154997; TAA
KSTLIDTL

SEQ ID NO: 75443 - protein, 8 aa, Homo sapiens
  Table A; Target 75443; HLA-C*16:01; SEPT14; ENSG00000154997; TAA
KSTLIDTL

SEQ ID NO: 75444 - protein, 9 aa, Homo sapiens
  Table A; Target 75444; HLA-A*23:01; SEPT14; ENSG00000154997; TAA
KSTLIDTLF

SEQ ID NO: 75445 - protein, 9 aa, Homo sapiens
  Table A; Target 75445; HLA-A*24:02; SEPT14; ENSG00000154997; TAA
KSTLIDTLF

SEQ ID NO: 75446 - protein, 9 aa, Homo sapiens
  Table A; Target 75446; HLA-B*57:01; SEPT14; ENSG00000154997; TAA
KSTLIDTLF

SEQ ID NO: 75447 - protein, 9 aa, Homo sapiens
  Table A; Target 75447; HLA-B*58:01; SEPT14; ENSG00000154997; TAA
KSTLIDTLF

SEQ ID NO: 75448 - protein, 10 aa, Homo sapiens
  Table A; Target 75448; HLA-A*30:02; SEPT14; ENSG00000154997; TAA
KTHTQHYECY

SEQ ID NO: 75449 - protein, 8 aa, Homo sapiens
  Table A; Target 75449; HLA-B*13:02; SEPT14; ENSG00000154997; TAA
KVNIIPLI

SEQ ID NO: 75450 - protein, 9 aa, Homo sapiens
  Table A; Target 75450; HLA-B*56:01; SEPT14; ENSG00000154997; TAA
KVNIIPLIA

SEQ ID NO: 75451 - protein, 10 aa, Homo sapiens
  Table A; Target 75451; HLA-A*03:01; SEPT14; ENSG00000154997; TAA
KVNIIPLIAK

SEQ ID NO: 75452 - protein, 10 aa, Homo sapiens
  Table A; Target 75452; HLA-A*03:02; SEPT14; ENSG00000154997; TAA
KVNIIPLIAK

SEQ ID NO: 75453 - protein, 10 aa, Homo sapiens
  Table A; Target 75453; HLA-A*11:01; SEPT14; ENSG00000154997; TAA
KVNIIPLIAK

SEQ ID NO: 75454 - protein, 10 aa, Homo sapiens
  Table A; Target 75454; HLA-A*31:01; SEPT14; ENSG00000154997; TAA
KVNIIPLIAK

SEQ ID NO: 75455 - protein, 10 aa, Homo sapiens
  Table A; Target 75455; HLA-A*33:01; SEPT14; ENSG00000154997; TAA
KVNIIPLIAK

SEQ ID NO: 75456 - protein, 10 aa, Homo sapiens
  Table A; Target 75456; HLA-B*57:01; SEPT14; ENSG00000154997; TAA
KVNIIPLIAK

SEQ ID NO: 75457 - protein, 10 aa, Homo sapiens
  Table A; Target 75457; HLA-A*11:01; SEPT14; ENSG00000154997; TAA
LCVGETGIGK

SEQ ID NO: 75458 - protein, 8 aa, Homo sapiens
  Table A; Target 75458; HLA-B*37:01; SEPT14; ENSG00000154997; TAA
LDSKVNII

SEQ ID NO: 75459 - protein, 10 aa, Homo sapiens
  Table A; Target 75459; HLA-A*03:01; SEPT14; ENSG00000154997; TAA
LIAKADTISK

SEQ ID NO: 75460 - protein, 10 aa, Homo sapiens
  Table A; Target 75460; HLA-A*03:02; SEPT14; ENSG00000154997; TAA
LIAKADTISK

SEQ ID NO: 75461 - protein, 10 aa, Homo sapiens
  Table A; Target 75461; HLA-A*02:07; SEPT14; ENSG00000154997; TAA
LIDTLFNTNL

SEQ ID NO: 75462 - protein, 10 aa, Homo sapiens
  Table A; Target 75462; HLA-C*05:01; SEPT14; ENSG00000154997; TAA
LIDTLFNTNL

SEQ ID NO: 75463 - protein, 9 aa, Homo sapiens
  Table A; Target 75463; HLA-A*01:01; SEPT14; ENSG00000154997; TAA
LISNGIQIY

SEQ ID NO: 75464 - protein, 9 aa, Homo sapiens
  Table A; Target 75464; HLA-A*25:01; SEPT14; ENSG00000154997; TAA
LISNGIQIY

SEQ ID NO: 75465 - protein, 9 aa, Homo sapiens
  Table A; Target 75465; HLA-A*29:02; SEPT14; ENSG00000154997; TAA
LISNGIQIY

SEQ ID NO: 75466 - protein, 9 aa, Homo sapiens
  Table A; Target 75466; HLA-A*30:02; SEPT14; ENSG00000154997; TAA
LISNGIQIY

SEQ ID NO: 75467 - protein, 9 aa, Homo sapiens
  Table A; Target 75467; HLA-A*32:01; SEPT14; ENSG00000154997; TAA
LISNGIQIY

SEQ ID NO: 75468 - protein, 9 aa, Homo sapiens
  Table A; Target 75468; HLA-B*15:01; SEPT14; ENSG00000154997; TAA
LISNGIQIY

SEQ ID NO: 75469 - protein, 9 aa, Homo sapiens
  Table A; Target 75469; HLA-B*15:03; SEPT14; ENSG00000154997; TAA
LISNGIQIY

SEQ ID NO: 75470 - protein, 9 aa, Homo sapiens
  Table A; Target 75470; HLA-B*35:01; SEPT14; ENSG00000154997; TAA
LISNGIQIY

SEQ ID NO: 75471 - protein, 9 aa, Homo sapiens
  Table A; Target 75471; HLA-B*46:01; SEPT14; ENSG00000154997; TAA
LISNGIQIY

SEQ ID NO: 75472 - protein, 9 aa, Homo sapiens
  Table A; Target 75472; HLA-B*57:01; SEPT14; ENSG00000154997; TAA
LISNGIQIY

SEQ ID NO: 75473 - protein, 9 aa, Homo sapiens
  Table A; Target 75473; HLA-B*58:01; SEPT14; ENSG00000154997; TAA
LISNGIQIY

SEQ ID NO: 75474 - protein, 9 aa, Homo sapiens
  Table A; Target 75474; HLA-C*02:02; SEPT14; ENSG00000154997; TAA
LISNGIQIY

SEQ ID NO: 75475 - protein, 9 aa, Homo sapiens
  Table A; Target 75475; HLA-C*07:04; SEPT14; ENSG00000154997; TAA
LISNGIQIY

SEQ ID NO: 75476 - protein, 9 aa, Homo sapiens
  Table A; Target 75476; HLA-C*12:03; SEPT14; ENSG00000154997; TAA
LISNGIQIY

SEQ ID NO: 75477 - protein, 9 aa, Homo sapiens
  Table A; Target 75477; HLA-C*14:02; SEPT14; ENSG00000154997; TAA
LISNGIQIY

SEQ ID NO: 75478 - protein, 9 aa, Homo sapiens
  Table A; Target 75478; HLA-C*16:01; SEPT14; ENSG00000154997; TAA
LISNGIQIY

SEQ ID NO: 75479 - protein, 11 aa, Homo sapiens
  Table A; Target 75479; HLA-A*02:04; SEPT14; ENSG00000154997; TAA
LISNGIQIYQL

SEQ ID NO: 75480 - protein, 11 aa, Homo sapiens
  Table A; Target 75480; HLA-B*15:03; SEPT14; ENSG00000154997; TAA
LKLTVVETVGY

SEQ ID NO: 75481 - protein, 11 aa, Homo sapiens
  Table A; Target 75481; HLA-C*07:01; SEPT14; ENSG00000154997; TAA
LKLTVVETVGY

SEQ ID NO: 75482 - protein, 8 aa, Homo sapiens
  Table A; Target 75482; HLA-B*54:01; SEPT14; ENSG00000154997; TAA
LPFAVVGS

SEQ ID NO: 75483 - protein, 9 aa, Homo sapiens
  Table A; Target 75483; HLA-B*35:01; SEPT14; ENSG00000154997; TAA
LPFAVVGST

SEQ ID NO: 75484 - protein, 9 aa, Homo sapiens
  Table A; Target 75484; HLA-B*35:03; SEPT14; ENSG00000154997; TAA
LPFAVVGST

SEQ ID NO: 75485 - protein, 9 aa, Homo sapiens
  Table A; Target 75485; HLA-B*51:01; SEPT14; ENSG00000154997; TAA
LPFAVVGST

SEQ ID NO: 75486 - protein, 9 aa, Homo sapiens
  Table A; Target 75486; HLA-B*54:01; SEPT14; ENSG00000154997; TAA
LPFAVVGST

SEQ ID NO: 75487 - protein, 9 aa, Homo sapiens
  Table A; Target 75487; HLA-B*56:01; SEPT14; ENSG00000154997; TAA
LPFAVVGST

SEQ ID NO: 75488 - protein, 8 aa, Homo sapiens
  Table A; Target 75488; HLA-A*33:01; SEPT14; ENSG00000154997; TAA
LPNQLVSR

SEQ ID NO: 75489 - protein, 8 aa, Homo sapiens
  Table A; Target 75489; HLA-A*33:03; SEPT14; ENSG00000154997; TAA
LPNQLVSR

SEQ ID NO: 75490 - protein, 8 aa, Homo sapiens
  Table A; Target 75490; HLA-B*35:01; SEPT14; ENSG00000154997; TAA
LPNQLVSR

SEQ ID NO: 75491 - protein, 8 aa, Homo sapiens
  Table A; Target 75491; HLA-B*54:01; SEPT14; ENSG00000154997; TAA
LPNQLVSR

SEQ ID NO: 75492 - protein, 8 aa, Homo sapiens
  Table A; Target 75492; HLA-B*56:01; SEPT14; ENSG00000154997; TAA
LPNQLVSR

SEQ ID NO: 75493 - protein, 10 aa, Homo sapiens
  Table A; Target 75493; HLA-B*51:01; SEPT14; ENSG00000154997; TAA
LPNQLVSRSI

SEQ ID NO: 75494 - protein, 9 aa, Homo sapiens
  Table A; Target 75494; HLA-B*35:01; SEPT14; ENSG00000154997; TAA
LPTDEETAA

SEQ ID NO: 75495 - protein, 9 aa, Homo sapiens
  Table A; Target 75495; HLA-B*35:03; SEPT14; ENSG00000154997; TAA
LPTDEETAA

SEQ ID NO: 75496 - protein, 9 aa, Homo sapiens
  Table A; Target 75496; HLA-B*54:01; SEPT14; ENSG00000154997; TAA
LPTDEETAA

SEQ ID NO: 75497 - protein, 9 aa, Homo sapiens
  Table A; Target 75497; HLA-B*55:01; SEPT14; ENSG00000154997; TAA
LPTDEETAA

SEQ ID NO: 75498 - protein, 9 aa, Homo sapiens
  Table A; Target 75498; HLA-B*56:01; SEPT14; ENSG00000154997; TAA
LPTDEETAA

SEQ ID NO: 75499 - protein, 11 aa, Homo sapiens
  Table A; Target 75499; HLA-B*54:01; SEPT14; ENSG00000154997; TAA
LPTDEETAAQA

SEQ ID NO: 75500 - protein, 11 aa, Homo sapiens
  Table A; Target 75500; HLA-B*56:01; SEPT14; ENSG00000154997; TAA
LPTDEETAAQA

SEQ ID NO: 75501 - protein, 8 aa, Homo sapiens
  Table A; Target 75501; HLA-C*05:01; SEPT14; ENSG00000154997; TAA
LQESNVQL

SEQ ID NO: 75502 - protein, 9 aa, Homo sapiens
  Table A; Target 75502; HLA-A*03:02; SEPT14; ENSG00000154997; TAA
LQESNVQLK

SEQ ID NO: 75503 - protein, 9 aa, Homo sapiens
  Table A; Target 75503; HLA-A*11:01; SEPT14; ENSG00000154997; TAA
LQESNVQLK

SEQ ID NO: 75504 - protein, 10 aa, Homo sapiens
  Table A; Target 75504; HLA-B*38:01; SEPT14; ENSG00000154997; TAA
LQESNVQLKL

SEQ ID NO: 75505 - protein, 8 aa, Homo sapiens
  Table A; Target 75505; HLA-A*30:01; SEPT14; ENSG00000154997; TAA
LQIQTYEL

SEQ ID NO: 75506 - protein, 8 aa, Homo sapiens
  Table A; Target 75506; HLA-B*13:02; SEPT14; ENSG00000154997; TAA
LQIQTYEL

SEQ ID NO: 75507 - protein, 8 aa, Homo sapiens
  Table A; Target 75507; HLA-B*15:01; SEPT14; ENSG00000154997; TAA
LQIQTYEL

SEQ ID NO: 75508 - protein, 8 aa, Homo sapiens
  Table A; Target 75508; HLA-B*46:01; SEPT14; ENSG00000154997; TAA
LQIQTYEL

SEQ ID NO: 75509 - protein, 8 aa, Homo sapiens
  Table A; Target 75509; HLA-C*03:03; SEPT14; ENSG00000154997; TAA
LQIQTYEL

SEQ ID NO: 75510 - protein, 9 aa, Homo sapiens
  Table A; Target 75510; HLA-A*03:01; SEPT14; ENSG00000154997; TAA
LTMKNLDSK

SEQ ID NO: 75511 - protein, 9 aa, Homo sapiens
  Table A; Target 75511; HLA-A*03:02; SEPT14; ENSG00000154997; TAA
LTMKNLDSK

SEQ ID NO: 75512 - protein, 9 aa, Homo sapiens
  Table A; Target 75512; HLA-A*11:01; SEPT14; ENSG00000154997; TAA
LTMKNLDSK

SEQ ID NO: 75513 - protein, 9 aa, Homo sapiens
  Table A; Target 75513; HLA-B*57:01; SEPT14; ENSG00000154997; TAA
LTTIGHFGF

SEQ ID NO: 75514 - protein, 9 aa, Homo sapiens
  Table A; Target 75514; HLA-A*01:01; SEPT14; ENSG00000154997; TAA
LTVVETVGY

SEQ ID NO: 75515 - protein, 9 aa, Homo sapiens
  Table A; Target 75515; HLA-A*25:01; SEPT14; ENSG00000154997; TAA
LTVVETVGY

SEQ ID NO: 75516 - protein, 9 aa, Homo sapiens
  Table A; Target 75516; HLA-A*26:01; SEPT14; ENSG00000154997; TAA
LTVVETVGY

SEQ ID NO: 75517 - protein, 9 aa, Homo sapiens
  Table A; Target 75517; HLA-A*29:02; SEPT14; ENSG00000154997; TAA
LTVVETVGY

SEQ ID NO: 75518 - protein, 9 aa, Homo sapiens
  Table A; Target 75518; HLA-A*30:02; SEPT14; ENSG00000154997; TAA
LTVVETVGY

SEQ ID NO: 75519 - protein, 9 aa, Homo sapiens
  Table A; Target 75519; HLA-A*32:01; SEPT14; ENSG00000154997; TAA
LTVVETVGY

SEQ ID NO: 75520 - protein, 9 aa, Homo sapiens
  Table A; Target 75520; HLA-B*15:01; SEPT14; ENSG00000154997; TAA
LTVVETVGY

SEQ ID NO: 75521 - protein, 9 aa, Homo sapiens
  Table A; Target 75521; HLA-B*15:03; SEPT14; ENSG00000154997; TAA
LTVVETVGY

SEQ ID NO: 75522 - protein, 9 aa, Homo sapiens
  Table A; Target 75522; HLA-B*27:02; SEPT14; ENSG00000154997; TAA
LTVVETVGY

SEQ ID NO: 75523 - protein, 9 aa, Homo sapiens
  Table A; Target 75523; HLA-B*27:05; SEPT14; ENSG00000154997; TAA
LTVVETVGY

SEQ ID NO: 75524 - protein, 9 aa, Homo sapiens
  Table A; Target 75524; HLA-B*35:01; SEPT14; ENSG00000154997; TAA
LTVVETVGY

SEQ ID NO: 75525 - protein, 9 aa, Homo sapiens
  Table A; Target 75525; HLA-B*46:01; SEPT14; ENSG00000154997; TAA
LTVVETVGY

SEQ ID NO: 75526 - protein, 9 aa, Homo sapiens
  Table A; Target 75526; HLA-B*55:01; SEPT14; ENSG00000154997; TAA
LTVVETVGY

SEQ ID NO: 75527 - protein, 9 aa, Homo sapiens
  Table A; Target 75527; HLA-B*57:01; SEPT14; ENSG00000154997; TAA
LTVVETVGY

SEQ ID NO: 75528 - protein, 9 aa, Homo sapiens
  Table A; Target 75528; HLA-B*58:01; SEPT14; ENSG00000154997; TAA
LTVVETVGY

SEQ ID NO: 75529 - protein, 9 aa, Homo sapiens
  Table A; Target 75529; HLA-C*02:02; SEPT14; ENSG00000154997; TAA
LTVVETVGY

SEQ ID NO: 75530 - protein, 9 aa, Homo sapiens
  Table A; Target 75530; HLA-C*04:01; SEPT14; ENSG00000154997; TAA
LTVVETVGY

SEQ ID NO: 75531 - protein, 9 aa, Homo sapiens
  Table A; Target 75531; HLA-C*07:01; SEPT14; ENSG00000154997; TAA
LTVVETVGY

SEQ ID NO: 75532 - protein, 9 aa, Homo sapiens
  Table A; Target 75532; HLA-C*07:04; SEPT14; ENSG00000154997; TAA
LTVVETVGY

SEQ ID NO: 75533 - protein, 9 aa, Homo sapiens
  Table A; Target 75533; HLA-C*07:06; SEPT14; ENSG00000154997; TAA
LTVVETVGY

SEQ ID NO: 75534 - protein, 9 aa, Homo sapiens
  Table A; Target 75534; HLA-C*12:03; SEPT14; ENSG00000154997; TAA
LTVVETVGY

SEQ ID NO: 75535 - protein, 9 aa, Homo sapiens
  Table A; Target 75535; HLA-C*16:01; SEPT14; ENSG00000154997; TAA
LTVVETVGY

SEQ ID NO: 75536 - protein, 9 aa, Homo sapiens
  Table A; Target 75536; HLA-C*16:04; SEPT14; ENSG00000154997; TAA
LTVVETVGY

SEQ ID NO: 75537 - protein, 10 aa, Homo sapiens
  Table A; Target 75537; HLA-A*32:01; SEPT14; ENSG00000154997; TAA
LVSRSIRQGF

SEQ ID NO: 75538 - protein, 8 aa, Homo sapiens
  Table A; Target 75538; HLA-C*07:01; SEPT14; ENSG00000154997; TAA
LYFISPTG

SEQ ID NO: 75539 - protein, 9 aa, Homo sapiens
  Table A; Target 75539; HLA-A*29:02; SEPT14; ENSG00000154997; TAA
LYFISPTGH

SEQ ID NO: 75540 - protein, 9 aa, Homo sapiens
  Table A; Target 75540; HLA-A*31:01; SEPT14; ENSG00000154997; TAA
LYFISPTGH

SEQ ID NO: 75541 - protein, 9 aa, Homo sapiens
  Table A; Target 75541; HLA-C*14:02; SEPT14; ENSG00000154997; TAA
LYFISPTGH

SEQ ID NO: 75542 - protein, 11 aa, Homo sapiens
  Table A; Target 75542; HLA-A*23:01; SEPT14; ENSG00000154997; TAA
LYFISPTGHSL

SEQ ID NO: 75543 - protein, 11 aa, Homo sapiens
  Table A; Target 75543; HLA-A*24:02; SEPT14; ENSG00000154997; TAA
LYFISPTGHSL

SEQ ID NO: 75544 - protein, 11 aa, Homo sapiens
  Table A; Target 75544; HLA-C*14:02; SEPT14; ENSG00000154997; TAA
LYFISPTGHSL

SEQ ID NO: 75545 - protein, 8 aa, Homo sapiens
  Table A; Target 75545; HLA-C*03:03; SEPT14; ENSG00000154997; TAA
MAERTMAM

SEQ ID NO: 75546 - protein, 8 aa, Homo sapiens
  Table A; Target 75546; HLA-C*03:04; SEPT14; ENSG00000154997; TAA
MAERTMAM

SEQ ID NO: 75547 - protein, 8 aa, Homo sapiens
  Table A; Target 75547; HLA-C*05:01; SEPT14; ENSG00000154997; TAA
MAERTMAM

SEQ ID NO: 75548 - protein, 9 aa, Homo sapiens
  Table A; Target 75548; HLA-B*35:01; SEPT14; ENSG00000154997; TAA
MAMPTQIPA

SEQ ID NO: 75549 - protein, 9 aa, Homo sapiens
  Table A; Target 75549; HLA-B*35:03; SEPT14; ENSG00000154997; TAA
MAMPTQIPA

SEQ ID NO: 75550 - protein, 9 aa, Homo sapiens
  Table A; Target 75550; HLA-B*46:01; SEPT14; ENSG00000154997; TAA
MAMPTQIPA

SEQ ID NO: 75551 - protein, 9 aa, Homo sapiens
  Table A; Target 75551; HLA-B*54:01; SEPT14; ENSG00000154997; TAA
MAMPTQIPA

SEQ ID NO: 75552 - protein, 9 aa, Homo sapiens
  Table A; Target 75552; HLA-B*55:01; SEPT14; ENSG00000154997; TAA
MAMPTQIPA

SEQ ID NO: 75553 - protein, 9 aa, Homo sapiens
  Table A; Target 75553; HLA-B*56:01; SEPT14; ENSG00000154997; TAA
MAMPTQIPA

SEQ ID NO: 75554 - protein, 9 aa, Homo sapiens
  Table A; Target 75554; HLA-C*02:02; SEPT14; ENSG00000154997; TAA
MAMPTQIPA

SEQ ID NO: 75555 - protein, 9 aa, Homo sapiens
  Table A; Target 75555; HLA-C*03:03; SEPT14; ENSG00000154997; TAA
MAMPTQIPA

SEQ ID NO: 75556 - protein, 9 aa, Homo sapiens
  Table A; Target 75556; HLA-C*03:04; SEPT14; ENSG00000154997; TAA
MAMPTQIPA

SEQ ID NO: 75557 - protein, 9 aa, Homo sapiens
  Table A; Target 75557; HLA-C*16:01; SEPT14; ENSG00000154997; TAA
MAMPTQIPA

SEQ ID NO: 75558 - protein, 9 aa, Homo sapiens
  Table A; Target 75558; HLA-C*06:02; SEPT14; ENSG00000154997; TAA
MGFTDVGPN

SEQ ID NO: 75559 - protein, 9 aa, Homo sapiens
  Table A; Target 75559; HLA-B*54:01; SEPT14; ENSG00000154997; TAA
MPTQIPADG

SEQ ID NO: 75560 - protein, 9 aa, Homo sapiens
  Table A; Target 75560; HLA-B*56:01; SEPT14; ENSG00000154997; TAA
MPTQIPADG

SEQ ID NO: 75561 - protein, 9 aa, Homo sapiens
  Table A; Target 75561; HLA-A*01:01; SEPT14; ENSG00000154997; TAA
MSELISNGI

SEQ ID NO: 75562 - protein, 9 aa, Homo sapiens
  Table A; Target 75562; HLA-A*02:03; SEPT14; ENSG00000154997; TAA
NIIPLIAKA

SEQ ID NO: 75563 - protein, 9 aa, Homo sapiens
  Table A; Target 75563; HLA-A*02:04; SEPT14; ENSG00000154997; TAA
NIIPLIAKA

SEQ ID NO: 75564 - protein, 9 aa, Homo sapiens
  Table A; Target 75564; HLA-A*02:07; SEPT14; ENSG00000154997; TAA
NIIPLIAKA

SEQ ID NO: 75565 - protein, 9 aa, Homo sapiens
  Table A; Target 75565; HLA-A*68:02; SEPT14; ENSG00000154997; TAA
NIIPLIAKA

SEQ ID NO: 75566 - protein, 8 aa, Homo sapiens
  Table A; Target 75566; HLA-C*05:01; SEPT14; ENSG00000154997; TAA
NLDSKVNI

SEQ ID NO: 75567 - protein, 9 aa, Homo sapiens
  Table A; Target 75567; HLA-A*02:01; SEPT14; ENSG00000154997; TAA
NLDSKVNII

SEQ ID NO: 75568 - protein, 9 aa, Homo sapiens
  Table A; Target 75568; HLA-A*02:03; SEPT14; ENSG00000154997; TAA
NLDSKVNII

SEQ ID NO: 75569 - protein, 9 aa, Homo sapiens
  Table A; Target 75569; HLA-A*02:04; SEPT14; ENSG00000154997; TAA
NLDSKVNII

SEQ ID NO: 75570 - protein, 9 aa, Homo sapiens
  Table A; Target 75570; HLA-A*02:07; SEPT14; ENSG00000154997; TAA
NLDSKVNII

SEQ ID NO: 75571 - protein, 9 aa, Homo sapiens
  Table A; Target 75571; HLA-B*08:01; SEPT14; ENSG00000154997; TAA
NLDSKVNII

SEQ ID NO: 75572 - protein, 9 aa, Homo sapiens
  Table A; Target 75572; HLA-B*38:01; SEPT14; ENSG00000154997; TAA
NLDSKVNII

SEQ ID NO: 75573 - protein, 9 aa, Homo sapiens
  Table A; Target 75573; HLA-B*55:01; SEPT14; ENSG00000154997; TAA
NLDSKVNII

SEQ ID NO: 75574 - protein, 9 aa, Homo sapiens
  Table A; Target 75574; HLA-C*05:01; SEPT14; ENSG00000154997; TAA
NLDSKVNII

SEQ ID NO: 75575 - protein, 9 aa, Homo sapiens
  Table A; Target 75575; HLA-C*16:02; SEPT14; ENSG00000154997; TAA
NLDSKVNII

SEQ ID NO: 75576 - protein, 11 aa, Homo sapiens
  Table A; Target 75576; HLA-A*33:01; SEPT14; ENSG00000154997; TAA
NLDSKVNIIPL

SEQ ID NO: 75577 - protein, 11 aa, Homo sapiens
  Table A; Target 75577; HLA-A*29:02; SEPT14; ENSG00000154997; TAA
NLKDNKSSHFY

SEQ ID NO: 75578 - protein, 11 aa, Homo sapiens
  Table A; Target 75578; HLA-A*30:02; SEPT14; ENSG00000154997; TAA
NLKDNKSSHFY

SEQ ID NO: 75579 - protein, 8 aa, Homo sapiens
  Table A; Target 75579; HLA-B*08:01; SEPT14; ENSG00000154997; TAA
NLKEKTHT

SEQ ID NO: 75580 - protein, 9 aa, Homo sapiens
  Table A; Target 75580; HLA-B*08:01; SEPT14; ENSG00000154997; TAA
NLKEKTHTQ

SEQ ID NO: 75581 - protein, 9 aa, Homo sapiens
  Table A; Target 75581; HLA-A*02:07; SEPT14; ENSG00000154997; TAA
NQPVSFQEI

SEQ ID NO: 75582 - protein, 9 aa, Homo sapiens
  Table A; Target 75582; HLA-A*24:02; SEPT14; ENSG00000154997; TAA
NQPVSFQEI

SEQ ID NO: 75583 - protein, 9 aa, Homo sapiens
  Table A; Target 75583; HLA-B*13:02; SEPT14; ENSG00000154997; TAA
NQPVSFQEI

SEQ ID NO: 75584 - protein, 9 aa, Homo sapiens
  Table A; Target 75584; HLA-C*01:02; SEPT14; ENSG00000154997; TAA
NQPVSFQEI

SEQ ID NO: 75585 - protein, 8 aa, Homo sapiens
  Table A; Target 75585; HLA-C*05:01; SEPT14; ENSG00000154997; TAA
NSSVSGLL

SEQ ID NO: 75586 - protein, 9 aa, Homo sapiens
  Table A; Target 75586; HLA-A*01:01; SEPT14; ENSG00000154997; TAA
NVGLQIQTY

SEQ ID NO: 75587 - protein, 9 aa, Homo sapiens
  Table A; Target 75587; HLA-A*25:01; SEPT14; ENSG00000154997; TAA
NVGLQIQTY

SEQ ID NO: 75588 - protein, 9 aa, Homo sapiens
  Table A; Target 75588; HLA-A*26:01; SEPT14; ENSG00000154997; TAA
NVGLQIQTY

SEQ ID NO: 75589 - protein, 9 aa, Homo sapiens
  Table A; Target 75589; HLA-A*29:02; SEPT14; ENSG00000154997; TAA
NVGLQIQTY

SEQ ID NO: 75590 - protein, 9 aa, Homo sapiens
  Table A; Target 75590; HLA-A*30:02; SEPT14; ENSG00000154997; TAA
NVGLQIQTY

SEQ ID NO: 75591 - protein, 9 aa, Homo sapiens
  Table A; Target 75591; HLA-A*32:01; SEPT14; ENSG00000154997; TAA
NVGLQIQTY

SEQ ID NO: 75592 - protein, 9 aa, Homo sapiens
  Table A; Target 75592; HLA-A*68:01; SEPT14; ENSG00000154997; TAA
NVGLQIQTY

SEQ ID NO: 75593 - protein, 9 aa, Homo sapiens
  Table A; Target 75593; HLA-B*15:01; SEPT14; ENSG00000154997; TAA
NVGLQIQTY

SEQ ID NO: 75594 - protein, 9 aa, Homo sapiens
  Table A; Target 75594; HLA-B*15:03; SEPT14; ENSG00000154997; TAA
NVGLQIQTY

SEQ ID NO: 75595 - protein, 9 aa, Homo sapiens
  Table A; Target 75595; HLA-B*18:01; SEPT14; ENSG00000154997; TAA
NVGLQIQTY

SEQ ID NO: 75596 - protein, 9 aa, Homo sapiens
  Table A; Target 75596; HLA-B*35:01; SEPT14; ENSG00000154997; TAA
NVGLQIQTY

SEQ ID NO: 75597 - protein, 9 aa, Homo sapiens
  Table A; Target 75597; HLA-B*39:01; SEPT14; ENSG00000154997; TAA
NVGLQIQTY

SEQ ID NO: 75598 - protein, 9 aa, Homo sapiens
  Table A; Target 75598; HLA-B*44:02; SEPT14; ENSG00000154997; TAA
NVGLQIQTY

SEQ ID NO: 75599 - protein, 9 aa, Homo sapiens
  Table A; Target 75599; HLA-B*44:03; SEPT14; ENSG00000154997; TAA
NVGLQIQTY

SEQ ID NO: 75600 - protein, 9 aa, Homo sapiens
  Table A; Target 75600; HLA-C*04:01; SEPT14; ENSG00000154997; TAA
NVGLQIQTY

SEQ ID NO: 75601 - protein, 9 aa, Homo sapiens
  Table A; Target 75601; HLA-C*07:04; SEPT14; ENSG00000154997; TAA
NVGLQIQTY

SEQ ID NO: 75602 - protein, 9 aa, Homo sapiens
  Table A; Target 75602; HLA-C*07:06; SEPT14; ENSG00000154997; TAA
NVGLQIQTY

SEQ ID NO: 75603 - protein, 9 aa, Homo sapiens
  Table A; Target 75603; HLA-C*16:01; SEPT14; ENSG00000154997; TAA
NVGLQIQTY

SEQ ID NO: 75604 - protein, 9 aa, Homo sapiens
  Table A; Target 75604; HLA-C*16:04; SEPT14; ENSG00000154997; TAA
NVGLQIQTY

SEQ ID NO: 75605 - protein, 8 aa, Homo sapiens
  Table A; Target 75605; HLA-B*08:01; SEPT14; ENSG00000154997; TAA
NVQLKLTV

SEQ ID NO: 75606 - protein, 9 aa, Homo sapiens
  Table A; Target 75606; HLA-A*02:03; SEPT14; ENSG00000154997; TAA
NVQLKLTVV

SEQ ID NO: 75607 - protein, 9 aa, Homo sapiens
  Table A; Target 75607; HLA-A*02:04; SEPT14; ENSG00000154997; TAA
NVQLKLTVV

SEQ ID NO: 75608 - protein, 9 aa, Homo sapiens
  Table A; Target 75608; HLA-B*08:01; SEPT14; ENSG00000154997; TAA
NVQLKLTVV

SEQ ID NO: 75609 - protein, 9 aa, Homo sapiens
  Table A; Target 75609; HLA-A*24:02; SEPT14; ENSG00000154997; TAA
PLIAKADTI

SEQ ID NO: 75610 - protein, 9 aa, Homo sapiens
  Table A; Target 75610; HLA-B*07:02; SEPT14; ENSG00000154997; TAA
PTGHSLKSL

SEQ ID NO: 75611 - protein, 9 aa, Homo sapiens
  Table A; Target 75611; HLA-C*07:02; SEPT14; ENSG00000154997; TAA
PTGHSLKSL

SEQ ID NO: 75612 - protein, 9 aa, Homo sapiens
  Table A; Target 75612; HLA-B*07:02; SEPT14; ENSG00000154997; TAA
QANSSVSGL

SEQ ID NO: 75613 - protein, 9 aa, Homo sapiens
  Table A; Target 75613; HLA-B*35:03; SEPT14; ENSG00000154997; TAA
QANSSVSGL

SEQ ID NO: 75614 - protein, 9 aa, Homo sapiens
  Table A; Target 75614; HLA-C*01:02; SEPT14; ENSG00000154997; TAA
QANSSVSGL

SEQ ID NO: 75615 - protein, 9 aa, Homo sapiens
  Table A; Target 75615; HLA-C*03:03; SEPT14; ENSG00000154997; TAA
QANSSVSGL

SEQ ID NO: 75616 - protein, 9 aa, Homo sapiens
  Table A; Target 75616; HLA-C*03:04; SEPT14; ENSG00000154997; TAA
QANSSVSGL

SEQ ID NO: 75617 - protein, 9 aa, Homo sapiens
  Table A; Target 75617; HLA-C*12:03; SEPT14; ENSG00000154997; TAA
QANSSVSGL

SEQ ID NO: 75618 - protein, 9 aa, Homo sapiens
  Table A; Target 75618; HLA-C*14:02; SEPT14; ENSG00000154997; TAA
QANSSVSGL

SEQ ID NO: 75619 - protein, 9 aa, Homo sapiens
  Table A; Target 75619; HLA-C*16:02; SEPT14; ENSG00000154997; TAA
QANSSVSGL

SEQ ID NO: 75620 - protein, 10 aa, Homo sapiens
  Table A; Target 75620; HLA-B*40:01; SEPT14; ENSG00000154997; TAA
QANSSVSGLL

SEQ ID NO: 75621 - protein, 9 aa, Homo sapiens
  Table A; Target 75621; HLA-B*44:02; SEPT14; ENSG00000154997; TAA
QEIFEAKRQ

SEQ ID NO: 75622 - protein, 9 aa, Homo sapiens
  Table A; Target 75622; HLA-B*44:03; SEPT14; ENSG00000154997; TAA
QEIFEAKRQ

SEQ ID NO: 75623 - protein, 11 aa, Homo sapiens
  Table A; Target 75623; HLA-B*44:02; SEPT14; ENSG00000154997; TAA
QEIFEAKRQEF

SEQ ID NO: 75624 - protein, 11 aa, Homo sapiens
  Table A; Target 75624; HLA-B*44:03; SEPT14; ENSG00000154997; TAA
QEIFEAKRQEF

SEQ ID NO: 75625 - protein, 11 aa, Homo sapiens
  Table A; Target 75625; HLA-C*16:04; SEPT14; ENSG00000154997; TAA
QEIFEAKRQEF

SEQ ID NO: 75626 - protein, 9 aa, Homo sapiens
  Table A; Target 75626; HLA-A*30:01; SEPT14; ENSG00000154997; TAA
QESNVQLKL

SEQ ID NO: 75627 - protein, 9 aa, Homo sapiens
  Table A; Target 75627; HLA-A*68:02; SEPT14; ENSG00000154997; TAA
QESNVQLKL

SEQ ID NO: 75628 - protein, 9 aa, Homo sapiens
  Table A; Target 75628; HLA-B*13:02; SEPT14; ENSG00000154997; TAA
QESNVQLKL

SEQ ID NO: 75629 - protein, 9 aa, Homo sapiens
  Table A; Target 75629; HLA-B*18:01; SEPT14; ENSG00000154997; TAA
QESNVQLKL

SEQ ID NO: 75630 - protein, 9 aa, Homo sapiens
  Table A; Target 75630; HLA-B*27:02; SEPT14; ENSG00000154997; TAA
QESNVQLKL

SEQ ID NO: 75631 - protein, 9 aa, Homo sapiens
  Table A; Target 75631; HLA-B*27:05; SEPT14; ENSG00000154997; TAA
QESNVQLKL

SEQ ID NO: 75632 - protein, 9 aa, Homo sapiens
  Table A; Target 75632; HLA-B*37:01; SEPT14; ENSG00000154997; TAA
QESNVQLKL

SEQ ID NO: 75633 - protein, 9 aa, Homo sapiens
  Table A; Target 75633; HLA-B*38:01; SEPT14; ENSG00000154997; TAA
QESNVQLKL

SEQ ID NO: 75634 - protein, 9 aa, Homo sapiens
  Table A; Target 75634; HLA-B*39:01; SEPT14; ENSG00000154997; TAA
QESNVQLKL

SEQ ID NO: 75635 - protein, 9 aa, Homo sapiens
  Table A; Target 75635; HLA-B*40:01; SEPT14; ENSG00000154997; TAA
QESNVQLKL

SEQ ID NO: 75636 - protein, 9 aa, Homo sapiens
  Table A; Target 75636; HLA-B*40:02; SEPT14; ENSG00000154997; TAA
QESNVQLKL

SEQ ID NO: 75637 - protein, 9 aa, Homo sapiens
  Table A; Target 75637; HLA-B*44:02; SEPT14; ENSG00000154997; TAA
QESNVQLKL

SEQ ID NO: 75638 - protein, 9 aa, Homo sapiens
  Table A; Target 75638; HLA-B*44:03; SEPT14; ENSG00000154997; TAA
QESNVQLKL

SEQ ID NO: 75639 - protein, 9 aa, Homo sapiens
  Table A; Target 75639; HLA-B*49:01; SEPT14; ENSG00000154997; TAA
QESNVQLKL

SEQ ID NO: 75640 - protein, 9 aa, Homo sapiens
  Table A; Target 75640; HLA-B*58:01; SEPT14; ENSG00000154997; TAA
QESNVQLKL

SEQ ID NO: 75641 - protein, 9 aa, Homo sapiens
  Table A; Target 75641; HLA-C*02:02; SEPT14; ENSG00000154997; TAA
QESNVQLKL

SEQ ID NO: 75642 - protein, 9 aa, Homo sapiens
  Table A; Target 75642; HLA-C*06:02; SEPT14; ENSG00000154997; TAA
QESNVQLKL

SEQ ID NO: 75643 - protein, 9 aa, Homo sapiens
  Table A; Target 75643; HLA-C*07:04; SEPT14; ENSG00000154997; TAA
QESNVQLKL

SEQ ID NO: 75644 - protein, 9 aa, Homo sapiens
  Table A; Target 75644; HLA-C*16:01; SEPT14; ENSG00000154997; TAA
QESNVQLKL

SEQ ID NO: 75645 - protein, 9 aa, Homo sapiens
  Table A; Target 75645; HLA-C*16:02; SEPT14; ENSG00000154997; TAA
QESNVQLKL

SEQ ID NO: 75646 - protein, 9 aa, Homo sapiens
  Table A; Target 75646; HLA-C*16:04; SEPT14; ENSG00000154997; TAA
QESNVQLKL

SEQ ID NO: 75647 - protein, 10 aa, Homo sapiens
  Table A; Target 75647; HLA-B*44:03; SEPT14; ENSG00000154997; TAA
QESNVQLKLT

SEQ ID NO: 75648 - protein, 11 aa, Homo sapiens
  Table A; Target 75648; HLA-A*30:01; SEPT14; ENSG00000154997; TAA
QESNVQLKLTV

SEQ ID NO: 75649 - protein, 11 aa, Homo sapiens
  Table A; Target 75649; HLA-B*40:01; SEPT14; ENSG00000154997; TAA
QESNVQLKLTV

SEQ ID NO: 75650 - protein, 11 aa, Homo sapiens
  Table A; Target 75650; HLA-B*44:02; SEPT14; ENSG00000154997; TAA
QESNVQLKLTV

SEQ ID NO: 75651 - protein, 11 aa, Homo sapiens
  Table A; Target 75651; HLA-B*44:03; SEPT14; ENSG00000154997; TAA
QESNVQLKLTV

SEQ ID NO: 75652 - protein, 11 aa, Homo sapiens
  Table A; Target 75652; HLA-B*49:01; SEPT14; ENSG00000154997; TAA
QESNVQLKLTV

SEQ ID NO: 75653 - protein, 11 aa, Homo sapiens
  Table A; Target 75653; HLA-C*16:04; SEPT14; ENSG00000154997; TAA
QESNVQLKLTV

SEQ ID NO: 75654 - protein, 8 aa, Homo sapiens
  Table A; Target 75654; HLA-A*01:01; SEPT14; ENSG00000154997; TAA
QIDKEASY

SEQ ID NO: 75655 - protein, 8 aa, Homo sapiens
  Table A; Target 75655; HLA-C*05:01; SEPT14; ENSG00000154997; TAA
QIDKEASY

SEQ ID NO: 75656 - protein, 9 aa, Homo sapiens
  Table A; Target 75656; HLA-C*06:02; SEPT14; ENSG00000154997; TAA
QLKLTVVET

SEQ ID NO: 75657 - protein, 9 aa, Homo sapiens
  Table A; Target 75657; HLA-C*07:04; SEPT14; ENSG00000154997; TAA
QLKLTVVET

SEQ ID NO: 75658 - protein, 9 aa, Homo sapiens
  Table A; Target 75658; HLA-B*35:03; SEPT14; ENSG00000154997; TAA
QPIVDYIDA

SEQ ID NO: 75659 - protein, 9 aa, Homo sapiens
  Table A; Target 75659; HLA-B*54:01; SEPT14; ENSG00000154997; TAA
QPIVDYIDA

SEQ ID NO: 75660 - protein, 9 aa, Homo sapiens
  Table A; Target 75660; HLA-B*55:01; SEPT14; ENSG00000154997; TAA
QPIVDYIDA

SEQ ID NO: 75661 - protein, 9 aa, Homo sapiens
  Table A; Target 75661; HLA-B*56:01; SEPT14; ENSG00000154997; TAA
QPIVDYIDA

SEQ ID NO: 75662 - protein, 11 aa, Homo sapiens
  Table A; Target 75662; HLA-B*35:01; SEPT14; ENSG00000154997; TAA
QPIVDYIDAQF

SEQ ID NO: 75663 - protein, 11 aa, Homo sapiens
  Table A; Target 75663; HLA-B*35:03; SEPT14; ENSG00000154997; TAA
QPIVDYIDAQF

SEQ ID NO: 75664 - protein, 8 aa, Homo sapiens
  Table A; Target 75664; HLA-B*35:03; SEPT14; ENSG00000154997; TAA
QPVSFQEI

SEQ ID NO: 75665 - protein, 8 aa, Homo sapiens
  Table A; Target 75665; HLA-B*51:01; SEPT14; ENSG00000154997; TAA
QPVSFQEI

SEQ ID NO: 75666 - protein, 8 aa, Homo sapiens
  Table A; Target 75666; HLA-B*56:01; SEPT14; ENSG00000154997; TAA
QPVSFQEI

SEQ ID NO: 75667 - protein, 9 aa, Homo sapiens
  Table A; Target 75667; HLA-B*07:02; SEPT14; ENSG00000154997; TAA
QPVSFQEIF

SEQ ID NO: 75668 - protein, 9 aa, Homo sapiens
  Table A; Target 75668; HLA-B*35:01; SEPT14; ENSG00000154997; TAA
QPVSFQEIF

SEQ ID NO: 75669 - protein, 9 aa, Homo sapiens
  Table A; Target 75669; HLA-B*35:03; SEPT14; ENSG00000154997; TAA
QPVSFQEIF

SEQ ID NO: 75670 - protein, 9 aa, Homo sapiens
  Table A; Target 75670; HLA-B*55:01; SEPT14; ENSG00000154997; TAA
QPVSFQEIF

SEQ ID NO: 75671 - protein, 9 aa, Homo sapiens
  Table A; Target 75671; HLA-B*56:01; SEPT14; ENSG00000154997; TAA
QPVSFQEIF

SEQ ID NO: 75672 - protein, 11 aa, Homo sapiens
  Table A; Target 75672; HLA-B*54:01; SEPT14; ENSG00000154997; TAA
QPVSFQEIFEA

SEQ ID NO: 75673 - protein, 11 aa, Homo sapiens
  Table A; Target 75673; HLA-B*56:01; SEPT14; ENSG00000154997; TAA
QPVSFQEIFEA

SEQ ID NO: 75674 - protein, 10 aa, Homo sapiens
  Table A; Target 75674; HLA-B*27:02; SEPT14; ENSG00000154997; TAA
QRVKEKEATF

SEQ ID NO: 75675 - protein, 10 aa, Homo sapiens
  Table A; Target 75675; HLA-C*16:04; SEPT14; ENSG00000154997; TAA
QRVKEKEATF

SEQ ID NO: 75676 - protein, 10 aa, Homo sapiens
  Table A; Target 75676; HLA-A*68:02; SEPT14; ENSG00000154997; TAA
QTYELQESNV

SEQ ID NO: 75677 - protein, 9 aa, Homo sapiens
  Table A; Target 75677; HLA-B*37:01; SEPT14; ENSG00000154997; TAA
RDMLLCTNM

SEQ ID NO: 75678 - protein, 10 aa, Homo sapiens
  Table A; Target 75678; HLA-B*44:02; SEPT14; ENSG00000154997; TAA
REEEELKQRF

SEQ ID NO: 75679 - protein, 10 aa, Homo sapiens
  Table A; Target 75679; HLA-B*44:03; SEPT14; ENSG00000154997; TAA
REEEELKQRF

SEQ ID NO: 75680 - protein, 10 aa, Homo sapiens
  Table A; Target 75680; HLA-A*02:03; SEPT14; ENSG00000154997; TAA
RHYPWGVLQV

SEQ ID NO: 75681 - protein, 9 aa, Homo sapiens
  Table A; Target 75681; HLA-A*23:01; SEPT14; ENSG00000154997; TAA
RSIRQGFTF

SEQ ID NO: 75682 - protein, 9 aa, Homo sapiens
  Table A; Target 75682; HLA-A*24:02; SEPT14; ENSG00000154997; TAA
RSIRQGFTF

SEQ ID NO: 75683 - protein, 9 aa, Homo sapiens
  Table A; Target 75683; HLA-B*57:01; SEPT14; ENSG00000154997; TAA
RSIRQGFTF

SEQ ID NO: 75684 - protein, 9 aa, Homo sapiens
  Table A; Target 75684; HLA-B*58:01; SEPT14; ENSG00000154997; TAA
RSIRQGFTF

SEQ ID NO: 75685 - protein, 10 aa, Homo sapiens
  Table A; Target 75685; HLA-B*57:01; SEPT14; ENSG00000154997; TAA
RSLFEYHDSR

SEQ ID NO: 75686 - protein, 9 aa, Homo sapiens
  Table A; Target 75686; HLA-A*03:01; SEPT14; ENSG00000154997; TAA
RTMAMPTQI

SEQ ID NO: 75687 - protein, 9 aa, Homo sapiens
  Table A; Target 75687; HLA-A*03:02; SEPT14; ENSG00000154997; TAA
RTMAMPTQI

SEQ ID NO: 75688 - protein, 9 aa, Homo sapiens
  Table A; Target 75688; HLA-A*23:01; SEPT14; ENSG00000154997; TAA
RTMAMPTQI

SEQ ID NO: 75689 - protein, 9 aa, Homo sapiens
  Table A; Target 75689; HLA-A*24:02; SEPT14; ENSG00000154997; TAA
RTMAMPTQI

SEQ ID NO: 75690 - protein, 9 aa, Homo sapiens
  Table A; Target 75690; HLA-A*32:01; SEPT14; ENSG00000154997; TAA
RTMAMPTQI

SEQ ID NO: 75691 - protein, 9 aa, Homo sapiens
  Table A; Target 75691; HLA-B*13:02; SEPT14; ENSG00000154997; TAA
RTMAMPTQI

SEQ ID NO: 75692 - protein, 9 aa, Homo sapiens
  Table A; Target 75692; HLA-B*58:01; SEPT14; ENSG00000154997; TAA
RTMAMPTQI

SEQ ID NO: 75693 - protein, 9 aa, Homo sapiens
  Table A; Target 75693; HLA-A*25:01; SEPT14; ENSG00000154997; TAA
RVKEKEATF

SEQ ID NO: 75694 - protein, 9 aa, Homo sapiens
  Table A; Target 75694; HLA-A*30:02; SEPT14; ENSG00000154997; TAA
RVKEKEATF

SEQ ID NO: 75695 - protein, 9 aa, Homo sapiens
  Table A; Target 75695; HLA-A*32:01; SEPT14; ENSG00000154997; TAA
RVKEKEATF

SEQ ID NO: 75696 - protein, 9 aa, Homo sapiens
  Table A; Target 75696; HLA-B*07:02; SEPT14; ENSG00000154997; TAA
RVKEKEATF

SEQ ID NO: 75697 - protein, 9 aa, Homo sapiens
  Table A; Target 75697; HLA-B*08:01; SEPT14; ENSG00000154997; TAA
RVKEKEATF

SEQ ID NO: 75698 - protein, 9 aa, Homo sapiens
  Table A; Target 75698; HLA-B*15:01; SEPT14; ENSG00000154997; TAA
RVKEKEATF

SEQ ID NO: 75699 - protein, 9 aa, Homo sapiens
  Table A; Target 75699; HLA-B*46:01; SEPT14; ENSG00000154997; TAA
RVKEKEATF

SEQ ID NO: 75700 - protein, 9 aa, Homo sapiens
  Table A; Target 75700; HLA-B*57:01; SEPT14; ENSG00000154997; TAA
RVKEKEATF

SEQ ID NO: 75701 - protein, 9 aa, Homo sapiens
  Table A; Target 75701; HLA-B*58:01; SEPT14; ENSG00000154997; TAA
RVKEKEATF

SEQ ID NO: 75702 - protein, 10 aa, Homo sapiens
  Table A; Target 75702; HLA-A*03:01; SEPT14; ENSG00000154997; TAA
RVKEKEATFK

SEQ ID NO: 75703 - protein, 10 aa, Homo sapiens
  Table A; Target 75703; HLA-A*03:02; SEPT14; ENSG00000154997; TAA
RVKEKEATFK

SEQ ID NO: 75704 - protein, 10 aa, Homo sapiens
  Table A; Target 75704; HLA-A*24:02; SEPT14; ENSG00000154997; TAA
RYQKLQKMGF

SEQ ID NO: 75705 - protein, 8 aa, Homo sapiens
  Table A; Target 75705; HLA-B*18:01; SEPT14; ENSG00000154997; TAA
SELISNGI

SEQ ID NO: 75706 - protein, 8 aa, Homo sapiens
  Table A; Target 75706; HLA-B*37:01; SEPT14; ENSG00000154997; TAA
SELISNGI

SEQ ID NO: 75707 - protein, 8 aa, Homo sapiens
  Table A; Target 75707; HLA-B*49:01; SEPT14; ENSG00000154997; TAA
SELISNGI

SEQ ID NO: 75708 - protein, 10 aa, Homo sapiens
  Table A; Target 75708; HLA-A*30:01; SEPT14; ENSG00000154997; TAA
SELISNGIQI

SEQ ID NO: 75709 - protein, 10 aa, Homo sapiens
  Table A; Target 75709; HLA-B*40:01; SEPT14; ENSG00000154997; TAA
SELISNGIQI

SEQ ID NO: 75710 - protein, 10 aa, Homo sapiens
  Table A; Target 75710; HLA-B*40:02; SEPT14; ENSG00000154997; TAA
SELISNGIQI

SEQ ID NO: 75711 - protein, 10 aa, Homo sapiens
  Table A; Target 75711; HLA-B*44:02; SEPT14; ENSG00000154997; TAA
SELISNGIQI

SEQ ID NO: 75712 - protein, 10 aa, Homo sapiens
  Table A; Target 75712; HLA-B*44:03; SEPT14; ENSG00000154997; TAA
SELISNGIQI

SEQ ID NO: 75713 - protein, 10 aa, Homo sapiens
  Table A; Target 75713; HLA-B*49:01; SEPT14; ENSG00000154997; TAA
SELISNGIQI

SEQ ID NO: 75714 - protein, 11 aa, Homo sapiens
  Table A; Target 75714; HLA-B*15:03; SEPT14; ENSG00000154997; TAA
SELISNGIQIY

SEQ ID NO: 75715 - protein, 11 aa, Homo sapiens
  Table A; Target 75715; HLA-B*18:01; SEPT14; ENSG00000154997; TAA
SELISNGIQIY

SEQ ID NO: 75716 - protein, 11 aa, Homo sapiens
  Table A; Target 75716; HLA-B*27:02; SEPT14; ENSG00000154997; TAA
SELISNGIQIY

SEQ ID NO: 75717 - protein, 11 aa, Homo sapiens
  Table A; Target 75717; HLA-B*44:02; SEPT14; ENSG00000154997; TAA
SELISNGIQIY

SEQ ID NO: 75718 - protein, 11 aa, Homo sapiens
  Table A; Target 75718; HLA-B*44:03; SEPT14; ENSG00000154997; TAA
SELISNGIQIY

SEQ ID NO: 75719 - protein, 11 aa, Homo sapiens
  Table A; Target 75719; HLA-C*16:04; SEPT14; ENSG00000154997; TAA
SELISNGIQIY

SEQ ID NO: 75720 - protein, 9 aa, Homo sapiens
  Table A; Target 75720; HLA-A*03:02; SEPT14; ENSG00000154997; TAA
SFQEIFEAK

SEQ ID NO: 75721 - protein, 9 aa, Homo sapiens
  Table A; Target 75721; HLA-A*11:01; SEPT14; ENSG00000154997; TAA
SFQEIFEAK

SEQ ID NO: 75722 - protein, 9 aa, Homo sapiens
  Table A; Target 75722; HLA-A*31:01; SEPT14; ENSG00000154997; TAA
SFQEIFEAK

SEQ ID NO: 75723 - protein, 9 aa, Homo sapiens
  Table A; Target 75723; HLA-A*33:01; SEPT14; ENSG00000154997; TAA
SFQEIFEAK

SEQ ID NO: 75724 - protein, 9 aa, Homo sapiens
  Table A; Target 75724; HLA-A*33:03; SEPT14; ENSG00000154997; TAA
SFQEIFEAK

SEQ ID NO: 75725 - protein, 9 aa, Homo sapiens
  Table A; Target 75725; HLA-B*27:02; SEPT14; ENSG00000154997; TAA
SFQEIFEAK

SEQ ID NO: 75726 - protein, 9 aa, Homo sapiens
  Table A; Target 75726; HLA-C*01:02; SEPT14; ENSG00000154997; TAA
SFQEIFEAK

SEQ ID NO: 75727 - protein, 9 aa, Homo sapiens
  Table A; Target 75727; HLA-C*07:06; SEPT14; ENSG00000154997; TAA
SFQEIFEAK

SEQ ID NO: 75728 - protein, 9 aa, Homo sapiens
  Table A; Target 75728; HLA-C*14:02; SEPT14; ENSG00000154997; TAA
SFQEIFEAK

SEQ ID NO: 75729 - protein, 9 aa, Homo sapiens
  Table A; Target 75729; HLA-B*27:05; SEPT14; ENSG00000154997; TAA
SHFYSNVGL

SEQ ID NO: 75730 - protein, 9 aa, Homo sapiens
  Table A; Target 75730; HLA-B*38:01; SEPT14; ENSG00000154997; TAA
SHFYSNVGL

SEQ ID NO: 75731 - protein, 9 aa, Homo sapiens
  Table A; Target 75731; HLA-B*39:01; SEPT14; ENSG00000154997; TAA
SHFYSNVGL

SEQ ID NO: 75732 - protein, 9 aa, Homo sapiens
  Table A; Target 75732; HLA-C*07:04; SEPT14; ENSG00000154997; TAA
SHFYSNVGL

SEQ ID NO: 75733 - protein, 11 aa, Homo sapiens
  Table A; Target 75733; HLA-B*38:01; SEPT14; ENSG00000154997; TAA
SHFYSNVGLQI

SEQ ID NO: 75734 - protein, 8 aa, Homo sapiens
  Table A; Target 75734; HLA-B*08:01; SEPT14; ENSG00000154997; TAA
SIRQGFTF

SEQ ID NO: 75735 - protein, 8 aa, Homo sapiens
  Table A; Target 75735; HLA-B*37:01; SEPT14; ENSG00000154997; TAA
SIRQGFTF

SEQ ID NO: 75736 - protein, 8 aa, Homo sapiens
  Table A; Target 75736; HLA-B*15:03; SEPT14; ENSG00000154997; TAA
SKNDLQTF

SEQ ID NO: 75737 - protein, 9 aa, Homo sapiens
  Table A; Target 75737; HLA-A*68:02; SEPT14; ENSG00000154997; TAA
SKVNIIPLI

SEQ ID NO: 75738 - protein, 9 aa, Homo sapiens
  Table A; Target 75738; HLA-B*13:02; SEPT14; ENSG00000154997; TAA
SKVNIIPLI

SEQ ID NO: 75739 - protein, 10 aa, Homo sapiens
  Table A; Target 75739; HLA-A*02:07; SEPT14; ENSG00000154997; TAA
SLDLLTMKNL

SEQ ID NO: 75740 - protein, 9 aa, Homo sapiens
  Table A; Target 75740; HLA-A*02:04; SEPT14; ENSG00000154997; TAA
SLFEYHDSR

SEQ ID NO: 75741 - protein, 9 aa, Homo sapiens
  Table A; Target 75741; HLA-A*29:02; SEPT14; ENSG00000154997; TAA
SLFEYHDSR

SEQ ID NO: 75742 - protein, 9 aa, Homo sapiens
  Table A; Target 75742; HLA-A*31:01; SEPT14; ENSG00000154997; TAA
SLFEYHDSR

SEQ ID NO: 75743 - protein, 9 aa, Homo sapiens
  Table A; Target 75743; HLA-B*27:05; SEPT14; ENSG00000154997; TAA
SLFEYHDSR

SEQ ID NO: 75744 - protein, 10 aa, Homo sapiens
  Table A; Target 75744; HLA-A*02:01; SEPT14; ENSG00000154997; TAA
SLFEYHDSRV

SEQ ID NO: 75745 - protein, 10 aa, Homo sapiens
  Table A; Target 75745; HLA-A*02:03; SEPT14; ENSG00000154997; TAA
SLFEYHDSRV

SEQ ID NO: 75746 - protein, 10 aa, Homo sapiens
  Table A; Target 75746; HLA-A*02:04; SEPT14; ENSG00000154997; TAA
SLFEYHDSRV

SEQ ID NO: 75747 - protein, 10 aa, Homo sapiens
  Table A; Target 75747; HLA-A*02:07; SEPT14; ENSG00000154997; TAA
SLFEYHDSRV

SEQ ID NO: 75748 - protein, 10 aa, Homo sapiens
  Table A; Target 75748; HLA-A*68:02; SEPT14; ENSG00000154997; TAA
SLFEYHDSRV

SEQ ID NO: 75749 - protein, 10 aa, Homo sapiens
  Table A; Target 75749; HLA-A*02:01; SEPT14; ENSG00000154997; TAA
SLKSLDLLTM

SEQ ID NO: 75750 - protein, 10 aa, Homo sapiens
  Table A; Target 75750; HLA-A*02:03; SEPT14; ENSG00000154997; TAA
SLKSLDLLTM

SEQ ID NO: 75751 - protein, 10 aa, Homo sapiens
  Table A; Target 75751; HLA-A*02:04; SEPT14; ENSG00000154997; TAA
SLKSLDLLTM

SEQ ID NO: 75752 - protein, 11 aa, Homo sapiens
  Table A; Target 75752; HLA-A*03:01; SEPT14; ENSG00000154997; TAA
SLKSLDLLTMK

SEQ ID NO: 75753 - protein, 11 aa, Homo sapiens
  Table A; Target 75753; HLA-A*31:01; SEPT14; ENSG00000154997; TAA
SLKSLDLLTMK

SEQ ID NO: 75754 - protein, 10 aa, Homo sapiens
  Table A; Target 75754; HLA-A*25:01; SEPT14; ENSG00000154997; TAA
SNVGLQIQTY

SEQ ID NO: 75755 - protein, 10 aa, Homo sapiens
  Table A; Target 75755; HLA-A*26:01; SEPT14; ENSG00000154997; TAA
SNVGLQIQTY

SEQ ID NO: 75756 - protein, 10 aa, Homo sapiens
  Table A; Target 75756; HLA-A*29:02; SEPT14; ENSG00000154997; TAA
SNVGLQIQTY

SEQ ID NO: 75757 - protein, 10 aa, Homo sapiens
  Table A; Target 75757; HLA-A*30:02; SEPT14; ENSG00000154997; TAA
SNVGLQIQTY

SEQ ID NO: 75758 - protein, 10 aa, Homo sapiens
  Table A; Target 75758; HLA-B*15:01; SEPT14; ENSG00000154997; TAA
SNVGLQIQTY

SEQ ID NO: 75759 - protein, 10 aa, Homo sapiens
  Table A; Target 75759; HLA-B*15:03; SEPT14; ENSG00000154997; TAA
SNVGLQIQTY

SEQ ID NO: 75760 - protein, 10 aa, Homo sapiens
  Table A; Target 75760; HLA-B*27:02; SEPT14; ENSG00000154997; TAA
SNVGLQIQTY

SEQ ID NO: 75761 - protein, 10 aa, Homo sapiens
  Table A; Target 75761; HLA-B*35:01; SEPT14; ENSG00000154997; TAA
SNVGLQIQTY

SEQ ID NO: 75762 - protein, 10 aa, Homo sapiens
  Table A; Target 75762; HLA-B*44:02; SEPT14; ENSG00000154997; TAA
SNVGLQIQTY

SEQ ID NO: 75763 - protein, 10 aa, Homo sapiens
  Table A; Target 75763; HLA-B*44:03; SEPT14; ENSG00000154997; TAA
SNVGLQIQTY

SEQ ID NO: 75764 - protein, 10 aa, Homo sapiens
  Table A; Target 75764; HLA-C*02:02; SEPT14; ENSG00000154997; TAA
SNVGLQIQTY

SEQ ID NO: 75765 - protein, 10 aa, Homo sapiens
  Table A; Target 75765; HLA-C*07:06; SEPT14; ENSG00000154997; TAA
SNVGLQIQTY

SEQ ID NO: 75766 - protein, 10 aa, Homo sapiens
  Table A; Target 75766; HLA-C*12:03; SEPT14; ENSG00000154997; TAA
SNVGLQIQTY

SEQ ID NO: 75767 - protein, 10 aa, Homo sapiens
  Table A; Target 75767; HLA-C*16:04; SEPT14; ENSG00000154997; TAA
SNVGLQIQTY

SEQ ID NO: 75768 - protein, 9 aa, Homo sapiens
  Table A; Target 75768; HLA-B*13:02; SEPT14; ENSG00000154997; TAA
SNVQLKLTV

SEQ ID NO: 75769 - protein, 10 aa, Homo sapiens
  Table A; Target 75769; HLA-B*07:02; SEPT14; ENSG00000154997; TAA
SPTGHSLKSL

SEQ ID NO: 75770 - protein, 10 aa, Homo sapiens
  Table A; Target 75770; HLA-C*07:02; SEPT14; ENSG00000154997; TAA
SPTGHSLKSL

SEQ ID NO: 75771 - protein, 8 aa, Homo sapiens
  Table A; Target 75771; HLA-C*07:01; SEPT14; ENSG00000154997; TAA
SRVHVCLY

SEQ ID NO: 75772 - protein, 9 aa, Homo sapiens
  Table A; Target 75772; HLA-B*46:01; SEPT14; ENSG00000154997; TAA
SSVSGLLPF

SEQ ID NO: 75773 - protein, 9 aa, Homo sapiens
  Table A; Target 75773; HLA-B*57:01; SEPT14; ENSG00000154997; TAA
SSVSGLLPF

SEQ ID NO: 75774 - protein, 9 aa, Homo sapiens
  Table A; Target 75774; HLA-A*01:01; SEPT14; ENSG00000154997; TAA
STDEVKVGK

SEQ ID NO: 75775 - protein, 9 aa, Homo sapiens
  Table A; Target 75775; HLA-A*02:07; SEPT14; ENSG00000154997; TAA
STDEVKVGK

SEQ ID NO: 75776 - protein, 9 aa, Homo sapiens
  Table A; Target 75776; HLA-A*03:01; SEPT14; ENSG00000154997; TAA
STDEVKVGK

SEQ ID NO: 75777 - protein, 9 aa, Homo sapiens
  Table A; Target 75777; HLA-A*03:02; SEPT14; ENSG00000154997; TAA
STDEVKVGK

SEQ ID NO: 75778 - protein, 9 aa, Homo sapiens
  Table A; Target 75778; HLA-A*11:01; SEPT14; ENSG00000154997; TAA
STDEVKVGK

SEQ ID NO: 75779 - protein, 9 aa, Homo sapiens
  Table A; Target 75779; HLA-A*31:01; SEPT14; ENSG00000154997; TAA
STDEVKVGK

SEQ ID NO: 75780 - protein, 9 aa, Homo sapiens
  Table A; Target 75780; HLA-A*33:01; SEPT14; ENSG00000154997; TAA
STDEVKVGK

SEQ ID NO: 75781 - protein, 9 aa, Homo sapiens
  Table A; Target 75781; HLA-A*33:03; SEPT14; ENSG00000154997; TAA
STDEVKVGK

SEQ ID NO: 75782 - protein, 9 aa, Homo sapiens
  Table A; Target 75782; HLA-A*68:01; SEPT14; ENSG00000154997; TAA
STDEVKVGK

SEQ ID NO: 75783 - protein, 9 aa, Homo sapiens
  Table A; Target 75783; HLA-C*05:01; SEPT14; ENSG00000154997; TAA
STDEVKVGK

SEQ ID NO: 75784 - protein, 9 aa, Homo sapiens
  Table A; Target 75784; HLA-C*07:06; SEPT14; ENSG00000154997; TAA
STDEVKVGK

SEQ ID NO: 75785 - protein, 10 aa, Homo sapiens
  Table A; Target 75785; HLA-A*33:03; SEPT14; ENSG00000154997; TAA
STDEVKVGKR

SEQ ID NO: 75786 - protein, 10 aa, Homo sapiens
  Table A; Target 75786; HLA-A*68:01; SEPT14; ENSG00000154997; TAA
STDEVKVGKR

SEQ ID NO: 75787 - protein, 10 aa, Homo sapiens
  Table A; Target 75787; HLA-C*07:06; SEPT14; ENSG00000154997; TAA
STDEVKVGKR

SEQ ID NO: 75788 - protein, 10 aa, Homo sapiens
  Table A; Target 75788; HLA-A*02:01; SEPT14; ENSG00000154997; TAA
SVSGLLPFAV

SEQ ID NO: 75789 - protein, 10 aa, Homo sapiens
  Table A; Target 75789; HLA-A*02:04; SEPT14; ENSG00000154997; TAA
SVSGLLPFAV

SEQ ID NO: 75790 - protein, 10 aa, Homo sapiens
  Table A; Target 75790; HLA-A*11:01; SEPT14; ENSG00000154997; TAA
SVSGLLPFAV

SEQ ID NO: 75791 - protein, 10 aa, Homo sapiens
  Table A; Target 75791; HLA-A*68:02; SEPT14; ENSG00000154997; TAA
SVSGLLPFAV

SEQ ID NO: 75792 - protein, 10 aa, Homo sapiens
  Table A; Target 75792; HLA-B*13:02; SEPT14; ENSG00000154997; TAA
SVSGLLPFAV

SEQ ID NO: 75793 - protein, 11 aa, Homo sapiens
  Table A; Target 75793; HLA-A*68:02; SEPT14; ENSG00000154997; TAA
SVSGLLPFAVV

SEQ ID NO: 75794 - protein, 8 aa, Homo sapiens
  Table A; Target 75794; HLA-A*30:02; SEPT14; ENSG00000154997; TAA
SYQPIVDY

SEQ ID NO: 75795 - protein, 8 aa, Homo sapiens
  Table A; Target 75795; HLA-C*04:01; SEPT14; ENSG00000154997; TAA
SYQPIVDY

SEQ ID NO: 75796 - protein, 8 aa, Homo sapiens
  Table A; Target 75796; HLA-C*14:02; SEPT14; ENSG00000154997; TAA
SYQPIVDY

SEQ ID NO: 75797 - protein, 9 aa, Homo sapiens
  Table A; Target 75797; HLA-A*23:01; SEPT14; ENSG00000154997; TAA
SYQPIVDYI

SEQ ID NO: 75798 - protein, 9 aa, Homo sapiens
  Table A; Target 75798; HLA-A*24:02; SEPT14; ENSG00000154997; TAA
SYQPIVDYI

SEQ ID NO: 75799 - protein, 9 aa, Homo sapiens
  Table A; Target 75799; HLA-A*31:01; SEPT14; ENSG00000154997; TAA
SYQPIVDYI

SEQ ID NO: 75800 - protein, 9 aa, Homo sapiens
  Table A; Target 75800; HLA-A*02:03; SEPT14; ENSG00000154997; TAA
TAAQANSSV

SEQ ID NO: 75801 - protein, 9 aa, Homo sapiens
  Table A; Target 75801; HLA-B*07:02; SEPT14; ENSG00000154997; TAA
TAAQANSSV

SEQ ID NO: 75802 - protein, 9 aa, Homo sapiens
  Table A; Target 75802; HLA-B*13:02; SEPT14; ENSG00000154997; TAA
TAAQANSSV

SEQ ID NO: 75803 - protein, 9 aa, Homo sapiens
  Table A; Target 75803; HLA-B*35:01; SEPT14; ENSG00000154997; TAA
TAAQANSSV

SEQ ID NO: 75804 - protein, 9 aa, Homo sapiens
  Table A; Target 75804; HLA-B*35:03; SEPT14; ENSG00000154997; TAA
TAAQANSSV

SEQ ID NO: 75805 - protein, 9 aa, Homo sapiens
  Table A; Target 75805; HLA-B*39:01; SEPT14; ENSG00000154997; TAA
TAAQANSSV

SEQ ID NO: 75806 - protein, 9 aa, Homo sapiens
  Table A; Target 75806; HLA-B*46:01; SEPT14; ENSG00000154997; TAA
TAAQANSSV

SEQ ID NO: 75807 - protein, 9 aa, Homo sapiens
  Table A; Target 75807; HLA-B*51:01; SEPT14; ENSG00000154997; TAA
TAAQANSSV

SEQ ID NO: 75808 - protein, 9 aa, Homo sapiens
  Table A; Target 75808; HLA-B*54:01; SEPT14; ENSG00000154997; TAA
TAAQANSSV

SEQ ID NO: 75809 - protein, 9 aa, Homo sapiens
  Table A; Target 75809; HLA-C*01:02; SEPT14; ENSG00000154997; TAA
TAAQANSSV

SEQ ID NO: 75810 - protein, 9 aa, Homo sapiens
  Table A; Target 75810; HLA-C*02:02; SEPT14; ENSG00000154997; TAA
TAAQANSSV

SEQ ID NO: 75811 - protein, 9 aa, Homo sapiens
  Table A; Target 75811; HLA-C*03:03; SEPT14; ENSG00000154997; TAA
TAAQANSSV

SEQ ID NO: 75812 - protein, 9 aa, Homo sapiens
  Table A; Target 75812; HLA-C*03:04; SEPT14; ENSG00000154997; TAA
TAAQANSSV

SEQ ID NO: 75813 - protein, 9 aa, Homo sapiens
  Table A; Target 75813; HLA-C*05:01; SEPT14; ENSG00000154997; TAA
TAAQANSSV

SEQ ID NO: 75814 - protein, 9 aa, Homo sapiens
  Table A; Target 75814; HLA-C*07:06; SEPT14; ENSG00000154997; TAA
TAAQANSSV

SEQ ID NO: 75815 - protein, 9 aa, Homo sapiens
  Table A; Target 75815; HLA-C*12:03; SEPT14; ENSG00000154997; TAA
TAAQANSSV

SEQ ID NO: 75816 - protein, 9 aa, Homo sapiens
  Table A; Target 75816; HLA-C*14:02; SEPT14; ENSG00000154997; TAA
TAAQANSSV

SEQ ID NO: 75817 - protein, 9 aa, Homo sapiens
  Table A; Target 75817; HLA-C*16:01; SEPT14; ENSG00000154997; TAA
TAAQANSSV

SEQ ID NO: 75818 - protein, 9 aa, Homo sapiens
  Table A; Target 75818; HLA-C*16:02; SEPT14; ENSG00000154997; TAA
TAAQANSSV

SEQ ID NO: 75819 - protein, 8 aa, Homo sapiens
  Table A; Target 75819; HLA-A*03:02; SEPT14; ENSG00000154997; TAA
TDEVKVGK

SEQ ID NO: 75820 - protein, 8 aa, Homo sapiens
  Table A; Target 75820; HLA-A*11:01; SEPT14; ENSG00000154997; TAA
TDEVKVGK

SEQ ID NO: 75821 - protein, 8 aa, Homo sapiens
  Table A; Target 75821; HLA-B*27:02; SEPT14; ENSG00000154997; TAA
TDEVKVGK

SEQ ID NO: 75822 - protein, 8 aa, Homo sapiens
  Table A; Target 75822; HLA-B*37:01; SEPT14; ENSG00000154997; TAA
TDEVKVGK

SEQ ID NO: 75823 - protein, 8 aa, Homo sapiens
  Table A; Target 75823; HLA-C*04:01; SEPT14; ENSG00000154997; TAA
TDEVKVGK

SEQ ID NO: 75824 - protein, 8 aa, Homo sapiens
  Table A; Target 75824; HLA-C*07:01; SEPT14; ENSG00000154997; TAA
TDEVKVGK

SEQ ID NO: 75825 - protein, 10 aa, Homo sapiens
  Table A; Target 75825; HLA-C*04:01; SEPT14; ENSG00000154997; TAA
TDVGPNNQPV

SEQ ID NO: 75826 - protein, 10 aa, Homo sapiens
  Table A; Target 75826; HLA-C*06:02; SEPT14; ENSG00000154997; TAA
TDVGPNNQPV

SEQ ID NO: 75827 - protein, 11 aa, Homo sapiens
  Table A; Target 75827; HLA-B*39:01; SEPT14; ENSG00000154997; TAA
TDVGPNNQPVS

SEQ ID NO: 75828 - protein, 9 aa, Homo sapiens
  Table A; Target 75828; HLA-C*14:02; SEPT14; ENSG00000154997; TAA
TFKEAEKEL

SEQ ID NO: 75829 - protein, 8 aa, Homo sapiens
  Table A; Target 75829; HLA-B*08:01; SEPT14; ENSG00000154997; TAA
TGIGKSTL

SEQ ID NO: 75830 - protein, 9 aa, Homo sapiens
  Table A; Target 75830; HLA-B*13:02; SEPT14; ENSG00000154997; TAA
TGIGKSTLI

SEQ ID NO: 75831 - protein, 9 aa, Homo sapiens
  Table A; Target 75831; HLA-B*51:01; SEPT14; ENSG00000154997; TAA
TGIGKSTLI

SEQ ID NO: 75832 - protein, 9 aa, Homo sapiens
  Table A; Target 75832; HLA-C*06:02; SEPT14; ENSG00000154997; TAA
TGIGKSTLI

SEQ ID NO: 75833 - protein, 9 aa, Homo sapiens
  Table A; Target 75833; HLA-B*38:01; SEPT14; ENSG00000154997; TAA
THTQHYECY

SEQ ID NO: 75834 - protein, 10 aa, Homo sapiens
  Table A; Target 75834; HLA-A*25:01; SEPT14; ENSG00000154997; TAA
TISKNDLQTF

SEQ ID NO: 75835 - protein, 10 aa, Homo sapiens
  Table A; Target 75835; HLA-A*32:01; SEPT14; ENSG00000154997; TAA
TISKNDLQTF

SEQ ID NO: 75836 - protein, 10 aa, Homo sapiens
  Table A; Target 75836; HLA-B*15:01; SEPT14; ENSG00000154997; TAA
TISKNDLQTF

SEQ ID NO: 75837 - protein, 10 aa, Homo sapiens
  Table A; Target 75837; HLA-B*38:01; SEPT14; ENSG00000154997; TAA
TISKNDLQTF

SEQ ID NO: 75838 - protein, 10 aa, Homo sapiens
  Table A; Target 75838; HLA-B*39:01; SEPT14; ENSG00000154997; TAA
TISKNDLQTF

SEQ ID NO: 75839 - protein, 10 aa, Homo sapiens
  Table A; Target 75839; HLA-B*57:01; SEPT14; ENSG00000154997; TAA
TISKNDLQTF

SEQ ID NO: 75840 - protein, 10 aa, Homo sapiens
  Table A; Target 75840; HLA-B*58:01; SEPT14; ENSG00000154997; TAA
TISKNDLQTF

SEQ ID NO: 75841 - protein, 10 aa, Homo sapiens
  Table A; Target 75841; HLA-C*07:04; SEPT14; ENSG00000154997; TAA
TISKNDLQTF

SEQ ID NO: 75842 - protein, 11 aa, Homo sapiens
  Table A; Target 75842; HLA-A*03:01; SEPT14; ENSG00000154997; TAA
TISKNDLQTFK

SEQ ID NO: 75843 - protein, 11 aa, Homo sapiens
  Table A; Target 75843; HLA-A*03:02; SEPT14; ENSG00000154997; TAA
TISKNDLQTFK

SEQ ID NO: 75844 - protein, 11 aa, Homo sapiens
  Table A; Target 75844; HLA-A*11:01; SEPT14; ENSG00000154997; TAA
TISKNDLQTFK

SEQ ID NO: 75845 - protein, 8 aa, Homo sapiens
  Table A; Target 75845; HLA-A*03:01; SEPT14; ENSG00000154997; TAA
TLFNTNLK

SEQ ID NO: 75846 - protein, 8 aa, Homo sapiens
  Table A; Target 75846; HLA-A*03:02; SEPT14; ENSG00000154997; TAA
TLFNTNLK

SEQ ID NO: 75847 - protein, 11 aa, Homo sapiens
  Table A; Target 75847; HLA-A*03:02; SEPT14; ENSG00000154997; TAA
TLFNTNLKDNK

SEQ ID NO: 75848 - protein, 9 aa, Homo sapiens
  Table A; Target 75848; HLA-A*02:01; SEPT14; ENSG00000154997; TAA
TLIDTLFNT

SEQ ID NO: 75849 - protein, 9 aa, Homo sapiens
  Table A; Target 75849; HLA-A*02:03; SEPT14; ENSG00000154997; TAA
TLIDTLFNT

SEQ ID NO: 75850 - protein, 9 aa, Homo sapiens
  Table A; Target 75850; HLA-A*02:04; SEPT14; ENSG00000154997; TAA
TLIDTLFNT

SEQ ID NO: 75851 - protein, 11 aa, Homo sapiens
  Table A; Target 75851; HLA-A*02:01; SEPT14; ENSG00000154997; TAA
TLIDTLFNTNL

SEQ ID NO: 75852 - protein, 11 aa, Homo sapiens
  Table A; Target 75852; HLA-A*02:03; SEPT14; ENSG00000154997; TAA
TLIDTLFNTNL

SEQ ID NO: 75853 - protein, 11 aa, Homo sapiens
  Table A; Target 75853; HLA-A*02:04; SEPT14; ENSG00000154997; TAA
TLIDTLFNTNL

SEQ ID NO: 75854 - protein, 11 aa, Homo sapiens
  Table A; Target 75854; HLA-A*02:07; SEPT14; ENSG00000154997; TAA
TLIDTLFNTNL

SEQ ID NO: 75855 - protein, 11 aa, Homo sapiens
  Table A; Target 75855; HLA-A*23:01; SEPT14; ENSG00000154997; TAA
TLIDTLFNTNL

SEQ ID NO: 75856 - protein, 11 aa, Homo sapiens
  Table A; Target 75856; HLA-A*68:02; SEPT14; ENSG00000154997; TAA
TLIDTLFNTNL

SEQ ID NO: 75857 - protein, 9 aa, Homo sapiens
  Table A; Target 75857; HLA-A*02:03; SEPT14; ENSG00000154997; TAA
TMKNLDSKV

SEQ ID NO: 75858 - protein, 9 aa, Homo sapiens
  Table A; Target 75858; HLA-A*03:02; SEPT14; ENSG00000154997; TAA
TNMENLKEK

SEQ ID NO: 75859 - protein, 9 aa, Homo sapiens
  Table A; Target 75859; HLA-A*11:01; SEPT14; ENSG00000154997; TAA
TNMENLKEK

SEQ ID NO: 75860 - protein, 9 aa, Homo sapiens
  Table A; Target 75860; HLA-A*33:01; SEPT14; ENSG00000154997; TAA
TNMENLKEK

SEQ ID NO: 75861 - protein, 9 aa, Homo sapiens
  Table A; Target 75861; HLA-A*33:03; SEPT14; ENSG00000154997; TAA
TNMENLKEK

SEQ ID NO: 75862 - protein, 10 aa, Homo sapiens
  Table A; Target 75862; HLA-B*38:01; SEPT14; ENSG00000154997; TAA
TQIPADGDTQ

SEQ ID NO: 75863 - protein, 8 aa, Homo sapiens
  Table A; Target 75863; HLA-B*57:01; SEPT14; ENSG00000154997; TAA
TTIGHFGF

SEQ ID NO: 75864 - protein, 10 aa, Homo sapiens
  Table A; Target 75864; HLA-A*03:02; SEPT14; ENSG00000154997; TAA
TVGYGDQIDK

SEQ ID NO: 75865 - protein, 10 aa, Homo sapiens
  Table A; Target 75865; HLA-A*11:01; SEPT14; ENSG00000154997; TAA
TVGYGDQIDK

SEQ ID NO: 75866 - protein, 10 aa, Homo sapiens
  Table A; Target 75866; HLA-A*68:01; SEPT14; ENSG00000154997; TAA
TVGYGDQIDK

SEQ ID NO: 75867 - protein, 10 aa, Homo sapiens
  Table A; Target 75867; HLA-B*27:02; SEPT14; ENSG00000154997; TAA
TVGYGDQIDK

SEQ ID NO: 75868 - protein, 8 aa, Homo sapiens
  Table A; Target 75868; HLA-A*25:01; SEPT14; ENSG00000154997; TAA
TVVETVGY

SEQ ID NO: 75869 - protein, 8 aa, Homo sapiens
  Table A; Target 75869; HLA-A*26:01; SEPT14; ENSG00000154997; TAA
TVVETVGY

SEQ ID NO: 75870 - protein, 8 aa, Homo sapiens
  Table A; Target 75870; HLA-A*30:02; SEPT14; ENSG00000154997; TAA
TVVETVGY

SEQ ID NO: 75871 - protein, 8 aa, Homo sapiens
  Table A; Target 75871; HLA-A*32:01; SEPT14; ENSG00000154997; TAA
TVVETVGY

SEQ ID NO: 75872 - protein, 8 aa, Homo sapiens
  Table A; Target 75872; HLA-B*15:01; SEPT14; ENSG00000154997; TAA
TVVETVGY

SEQ ID NO: 75873 - protein, 8 aa, Homo sapiens
  Table A; Target 75873; HLA-B*15:03; SEPT14; ENSG00000154997; TAA
TVVETVGY

SEQ ID NO: 75874 - protein, 8 aa, Homo sapiens
  Table A; Target 75874; HLA-B*18:01; SEPT14; ENSG00000154997; TAA
TVVETVGY

SEQ ID NO: 75875 - protein, 8 aa, Homo sapiens
  Table A; Target 75875; HLA-B*35:01; SEPT14; ENSG00000154997; TAA
TVVETVGY

SEQ ID NO: 75876 - protein, 8 aa, Homo sapiens
  Table A; Target 75876; HLA-B*39:01; SEPT14; ENSG00000154997; TAA
TVVETVGY

SEQ ID NO: 75877 - protein, 8 aa, Homo sapiens
  Table A; Target 75877; HLA-B*44:03; SEPT14; ENSG00000154997; TAA
TVVETVGY

SEQ ID NO: 75878 - protein, 8 aa, Homo sapiens
  Table A; Target 75878; HLA-B*46:01; SEPT14; ENSG00000154997; TAA
TVVETVGY

SEQ ID NO: 75879 - protein, 8 aa, Homo sapiens
  Table A; Target 75879; HLA-B*58:01; SEPT14; ENSG00000154997; TAA
TVVETVGY

SEQ ID NO: 75880 - protein, 8 aa, Homo sapiens
  Table A; Target 75880; HLA-C*02:02; SEPT14; ENSG00000154997; TAA
TVVETVGY

SEQ ID NO: 75881 - protein, 8 aa, Homo sapiens
  Table A; Target 75881; HLA-C*07:04; SEPT14; ENSG00000154997; TAA
TVVETVGY

SEQ ID NO: 75882 - protein, 8 aa, Homo sapiens
  Table A; Target 75882; HLA-C*07:06; SEPT14; ENSG00000154997; TAA
TVVETVGY

SEQ ID NO: 75883 - protein, 8 aa, Homo sapiens
  Table A; Target 75883; HLA-C*14:02; SEPT14; ENSG00000154997; TAA
TVVETVGY

SEQ ID NO: 75884 - protein, 9 aa, Homo sapiens
  Table A; Target 75884; HLA-A*26:01; SEPT14; ENSG00000154997; TAA
TVVETVGYG

SEQ ID NO: 75885 - protein, 11 aa, Homo sapiens
  Table A; Target 75885; HLA-C*04:01; SEPT14; ENSG00000154997; TAA
TVVETVGYGDQ

SEQ ID NO: 75886 - protein, 9 aa, Homo sapiens
  Table A; Target 75886; HLA-C*04:01; SEPT14; ENSG00000154997; TAA
TYELQESNV

SEQ ID NO: 75887 - protein, 9 aa, Homo sapiens
  Table A; Target 75887; HLA-C*14:02; SEPT14; ENSG00000154997; TAA
TYELQESNV

SEQ ID NO: 75888 - protein, 11 aa, Homo sapiens
  Table A; Target 75888; HLA-C*04:01; SEPT14; ENSG00000154997; TAA
TYELQESNVQL

SEQ ID NO: 75889 - protein, 8 aa, Homo sapiens
  Table A; Target 75889; HLA-B*18:01; SEPT14; ENSG00000154997; TAA
VDYIDAQF

SEQ ID NO: 75890 - protein, 8 aa, Homo sapiens
  Table A; Target 75890; HLA-B*37:01; SEPT14; ENSG00000154997; TAA
VDYIDAQF

SEQ ID NO: 75891 - protein, 8 aa, Homo sapiens
  Table A; Target 75891; HLA-C*07:04; SEPT14; ENSG00000154997; TAA
VDYIDAQF

SEQ ID NO: 75892 - protein, 9 aa, Homo sapiens
  Table A; Target 75892; HLA-A*30:01; SEPT14; ENSG00000154997; TAA
VENENHCDF

SEQ ID NO: 75893 - protein, 9 aa, Homo sapiens
  Table A; Target 75893; HLA-B*18:01; SEPT14; ENSG00000154997; TAA
VENENHCDF

SEQ ID NO: 75894 - protein, 9 aa, Homo sapiens
  Table A; Target 75894; HLA-B*27:02; SEPT14; ENSG00000154997; TAA
VENENHCDF

SEQ ID NO: 75895 - protein, 9 aa, Homo sapiens
  Table A; Target 75895; HLA-B*37:01; SEPT14; ENSG00000154997; TAA
VENENHCDF

SEQ ID NO: 75896 - protein, 9 aa, Homo sapiens
  Table A; Target 75896; HLA-B*40:01; SEPT14; ENSG00000154997; TAA
VENENHCDF

SEQ ID NO: 75897 - protein, 9 aa, Homo sapiens
  Table A; Target 75897; HLA-B*40:02; SEPT14; ENSG00000154997; TAA
VENENHCDF

SEQ ID NO: 75898 - protein, 9 aa, Homo sapiens
  Table A; Target 75898; HLA-B*44:02; SEPT14; ENSG00000154997; TAA
VENENHCDF

SEQ ID NO: 75899 - protein, 9 aa, Homo sapiens
  Table A; Target 75899; HLA-B*44:03; SEPT14; ENSG00000154997; TAA
VENENHCDF

SEQ ID NO: 75900 - protein, 9 aa, Homo sapiens
  Table A; Target 75900; HLA-C*14:02; SEPT14; ENSG00000154997; TAA
VENENHCDF

SEQ ID NO: 75901 - protein, 9 aa, Homo sapiens
  Table A; Target 75901; HLA-C*16:04; SEPT14; ENSG00000154997; TAA
VENENHCDF

SEQ ID NO: 75902 - protein, 10 aa, Homo sapiens
  Table A; Target 75902; HLA-B*40:01; SEPT14; ENSG00000154997; TAA
VETVGYGDQI

SEQ ID NO: 75903 - protein, 10 aa, Homo sapiens
  Table A; Target 75903; HLA-B*49:01; SEPT14; ENSG00000154997; TAA
VETVGYGDQI

SEQ ID NO: 75904 - protein, 8 aa, Homo sapiens
  Table A; Target 75904; HLA-C*05:01; SEPT14; ENSG00000154997; TAA
VGETGIGK

SEQ ID NO: 75905 - protein, 11 aa, Homo sapiens
  Table A; Target 75905; HLA-C*01:02; SEPT14; ENSG00000154997; TAA
VGETGIGKSTL

SEQ ID NO: 75906 - protein, 8 aa, Homo sapiens
  Table A; Target 75906; HLA-A*30:02; SEPT14; ENSG00000154997; TAA
VGLQIQTY

SEQ ID NO: 75907 - protein, 8 aa, Homo sapiens
  Table A; Target 75907; HLA-B*15:01; SEPT14; ENSG00000154997; TAA
VGLQIQTY

SEQ ID NO: 75908 - protein, 8 aa, Homo sapiens
  Table A; Target 75908; HLA-B*15:03; SEPT14; ENSG00000154997; TAA
VGLQIQTY

SEQ ID NO: 75909 - protein, 8 aa, Homo sapiens
  Table A; Target 75909; HLA-B*18:01; SEPT14; ENSG00000154997; TAA
VGLQIQTY

SEQ ID NO: 75910 - protein, 8 aa, Homo sapiens
  Table A; Target 75910; HLA-B*39:01; SEPT14; ENSG00000154997; TAA
VGLQIQTY

SEQ ID NO: 75911 - protein, 8 aa, Homo sapiens
  Table A; Target 75911; HLA-B*46:01; SEPT14; ENSG00000154997; TAA
VGLQIQTY

SEQ ID NO: 75912 - protein, 8 aa, Homo sapiens
  Table A; Target 75912; HLA-C*04:01; SEPT14; ENSG00000154997; TAA
VGLQIQTY

SEQ ID NO: 75913 - protein, 8 aa, Homo sapiens
  Table A; Target 75913; HLA-C*07:01; SEPT14; ENSG00000154997; TAA
VGLQIQTY

SEQ ID NO: 75914 - protein, 8 aa, Homo sapiens
  Table A; Target 75914; HLA-C*07:04; SEPT14; ENSG00000154997; TAA
VGLQIQTY

SEQ ID NO: 75915 - protein, 8 aa, Homo sapiens
  Table A; Target 75915; HLA-C*12:03; SEPT14; ENSG00000154997; TAA
VGLQIQTY

SEQ ID NO: 75916 - protein, 8 aa, Homo sapiens
  Table A; Target 75916; HLA-C*14:02; SEPT14; ENSG00000154997; TAA
VGLQIQTY

SEQ ID NO: 75917 - protein, 8 aa, Homo sapiens
  Table A; Target 75917; HLA-C*01:02; SEPT14; ENSG00000154997; TAA
VGPNNQPV

SEQ ID NO: 75918 - protein, 10 aa, Homo sapiens
  Table A; Target 75918; HLA-A*23:01; SEPT14; ENSG00000154997; TAA
VGPNNQPVSF

SEQ ID NO: 75919 - protein, 10 aa, Homo sapiens
  Table A; Target 75919; HLA-A*24:02; SEPT14; ENSG00000154997; TAA
VGPNNQPVSF

SEQ ID NO: 75920 - protein, 10 aa, Homo sapiens
  Table A; Target 75920; HLA-B*46:01; SEPT14; ENSG00000154997; TAA
VGPNNQPVSF

SEQ ID NO: 75921 - protein, 10 aa, Homo sapiens
  Table A; Target 75921; HLA-C*01:02; SEPT14; ENSG00000154997; TAA
VGPNNQPVSF

SEQ ID NO: 75922 - protein, 10 aa, Homo sapiens
  Table A; Target 75922; HLA-C*07:02; SEPT14; ENSG00000154997; TAA
VGPNNQPVSF

SEQ ID NO: 75923 - protein, 10 aa, Homo sapiens
  Table A; Target 75923; HLA-C*14:02; SEPT14; ENSG00000154997; TAA
VGPNNQPVSF

SEQ ID NO: 75924 - protein, 11 aa, Homo sapiens
  Table A; Target 75924; HLA-A*03:02; SEPT14; ENSG00000154997; TAA
VGSTDEVKVGK

SEQ ID NO: 75925 - protein, 11 aa, Homo sapiens
  Table A; Target 75925; HLA-A*11:01; SEPT14; ENSG00000154997; TAA
VGSTDEVKVGK

SEQ ID NO: 75926 - protein, 11 aa, Homo sapiens
  Table A; Target 75926; HLA-B*27:02; SEPT14; ENSG00000154997; TAA
VGSTDEVKVGK

SEQ ID NO: 75927 - protein, 11 aa, Homo sapiens
  Table A; Target 75927; HLA-B*27:05; SEPT14; ENSG00000154997; TAA
VGSTDEVKVGK

SEQ ID NO: 75928 - protein, 11 aa, Homo sapiens
  Table A; Target 75928; HLA-C*07:06; SEPT14; ENSG00000154997; TAA
VGSTDEVKVGK

SEQ ID NO: 75929 - protein, 9 aa, Homo sapiens
  Table A; Target 75929; HLA-A*03:01; SEPT14; ENSG00000154997; TAA
VGYGDQIDK

SEQ ID NO: 75930 - protein, 9 aa, Homo sapiens
  Table A; Target 75930; HLA-A*03:02; SEPT14; ENSG00000154997; TAA
VGYGDQIDK

SEQ ID NO: 75931 - protein, 9 aa, Homo sapiens
  Table A; Target 75931; HLA-A*11:01; SEPT14; ENSG00000154997; TAA
VGYGDQIDK

SEQ ID NO: 75932 - protein, 9 aa, Homo sapiens
  Table A; Target 75932; HLA-B*27:02; SEPT14; ENSG00000154997; TAA
VGYGDQIDK

SEQ ID NO: 75933 - protein, 9 aa, Homo sapiens
  Table A; Target 75933; HLA-B*27:05; SEPT14; ENSG00000154997; TAA
VGYGDQIDK

SEQ ID NO: 75934 - protein, 9 aa, Homo sapiens
  Table A; Target 75934; HLA-A*03:01; SEPT14; ENSG00000154997; TAA
VNIIPLIAK

SEQ ID NO: 75935 - protein, 9 aa, Homo sapiens
  Table A; Target 75935; HLA-A*03:02; SEPT14; ENSG00000154997; TAA
VNIIPLIAK

SEQ ID NO: 75936 - protein, 9 aa, Homo sapiens
  Table A; Target 75936; HLA-A*11:01; SEPT14; ENSG00000154997; TAA
VNIIPLIAK

SEQ ID NO: 75937 - protein, 9 aa, Homo sapiens
  Table A; Target 75937; HLA-A*33:01; SEPT14; ENSG00000154997; TAA
VNIIPLIAK

SEQ ID NO: 75938 - protein, 9 aa, Homo sapiens
  Table A; Target 75938; HLA-A*33:03; SEPT14; ENSG00000154997; TAA
VNIIPLIAK

SEQ ID NO: 75939 - protein, 9 aa, Homo sapiens
  Table A; Target 75939; HLA-B*27:02; SEPT14; ENSG00000154997; TAA
VNIIPLIAK

SEQ ID NO: 75940 - protein, 8 aa, Homo sapiens
  Table A; Target 75940; HLA-B*13:02; SEPT14; ENSG00000154997; TAA
VQLKLTVV

SEQ ID NO: 75941 - protein, 9 aa, Homo sapiens
  Table A; Target 75941; HLA-B*54:01; SEPT14; ENSG00000154997; TAA
VSFQEIFEA

SEQ ID NO: 75942 - protein, 10 aa, Homo sapiens
  Table A; Target 75942; HLA-A*01:01; SEPT14; ENSG00000154997; TAA
VSFQEIFEAK

SEQ ID NO: 75943 - protein, 10 aa, Homo sapiens
  Table A; Target 75943; HLA-A*03:01; SEPT14; ENSG00000154997; TAA
VSFQEIFEAK

SEQ ID NO: 75944 - protein, 10 aa, Homo sapiens
  Table A; Target 75944; HLA-A*03:02; SEPT14; ENSG00000154997; TAA
VSFQEIFEAK

SEQ ID NO: 75945 - protein, 10 aa, Homo sapiens
  Table A; Target 75945; HLA-A*11:01; SEPT14; ENSG00000154997; TAA
VSFQEIFEAK

SEQ ID NO: 75946 - protein, 10 aa, Homo sapiens
  Table A; Target 75946; HLA-B*27:02; SEPT14; ENSG00000154997; TAA
VSFQEIFEAK

SEQ ID NO: 75947 - protein, 10 aa, Homo sapiens
  Table A; Target 75947; HLA-B*57:01; SEPT14; ENSG00000154997; TAA
VSFQEIFEAK

SEQ ID NO: 75948 - protein, 9 aa, Homo sapiens
  Table A; Target 75948; HLA-B*13:02; SEPT14; ENSG00000154997; TAA
VSGLLPFAV

SEQ ID NO: 75949 - protein, 9 aa, Homo sapiens
  Table A; Target 75949; HLA-C*12:03; SEPT14; ENSG00000154997; TAA
VSGLLPFAV

SEQ ID NO: 75950 - protein, 9 aa, Homo sapiens
  Table A; Target 75950; HLA-A*32:01; SEPT14; ENSG00000154997; TAA
VSRSIRQGF

SEQ ID NO: 75951 - protein, 9 aa, Homo sapiens
  Table A; Target 75951; HLA-B*57:01; SEPT14; ENSG00000154997; TAA
VSRSIRQGF

SEQ ID NO: 75952 - protein, 11 aa, Homo sapiens
  Table A; Target 75952; HLA-A*24:02; SEPT14; ENSG00000154997; TAA
VSRSIRQGFTF

SEQ ID NO: 75953 - protein, 11 aa, Homo sapiens
  Table A; Target 75953; HLA-B*57:01; SEPT14; ENSG00000154997; TAA
VSRSIRQGFTF

SEQ ID NO: 75954 - protein, 11 aa, Homo sapiens
  Table A; Target 75954; HLA-A*01:01; SEPT14; ENSG00000154997; TAA
VVETVGYGDQI

SEQ ID NO: 75955 - protein, 8 aa, Homo sapiens
  Table A; Target 75955; HLA-A*02:01; SEPT14; ENSG00000154997; TAA
VVGSTDEV

SEQ ID NO: 75956 - protein, 8 aa, Homo sapiens
  Table A; Target 75956; HLA-C*05:01; SEPT14; ENSG00000154997; TAA
VVGSTDEV

SEQ ID NO: 75957 - protein, 9 aa, Homo sapiens
  Table A; Target 75957; HLA-A*03:02; SEPT14; ENSG00000154997; TAA
VVGSTDEVK

SEQ ID NO: 75958 - protein, 9 aa, Homo sapiens
  Table A; Target 75958; HLA-A*11:01; SEPT14; ENSG00000154997; TAA
VVGSTDEVK

SEQ ID NO: 75959 - protein, 8 aa, Homo sapiens
  Table A; Target 75959; HLA-A*30:01; SEPT14; ENSG00000154997; TAA
YELQESNV

SEQ ID NO: 75960 - protein, 8 aa, Homo sapiens
  Table A; Target 75960; HLA-B*13:02; SEPT14; ENSG00000154997; TAA
YELQESNV

SEQ ID NO: 75961 - protein, 8 aa, Homo sapiens
  Table A; Target 75961; HLA-B*40:02; SEPT14; ENSG00000154997; TAA
YELQESNV

SEQ ID NO: 75962 - protein, 8 aa, Homo sapiens
  Table A; Target 75962; HLA-B*49:01; SEPT14; ENSG00000154997; TAA
YELQESNV

SEQ ID NO: 75963 - protein, 9 aa, Homo sapiens
  Table A; Target 75963; HLA-B*49:01; SEPT14; ENSG00000154997; TAA
YELQESNVQ

SEQ ID NO: 75964 - protein, 10 aa, Homo sapiens
  Table A; Target 75964; HLA-A*23:01; SEPT14; ENSG00000154997; TAA
YELQESNVQL

SEQ ID NO: 75965 - protein, 10 aa, Homo sapiens
  Table A; Target 75965; HLA-A*30:01; SEPT14; ENSG00000154997; TAA
YELQESNVQL

SEQ ID NO: 75966 - protein, 10 aa, Homo sapiens
  Table A; Target 75966; HLA-B*18:01; SEPT14; ENSG00000154997; TAA
YELQESNVQL

SEQ ID NO: 75967 - protein, 10 aa, Homo sapiens
  Table A; Target 75967; HLA-B*27:02; SEPT14; ENSG00000154997; TAA
YELQESNVQL

SEQ ID NO: 75968 - protein, 10 aa, Homo sapiens
  Table A; Target 75968; HLA-B*27:05; SEPT14; ENSG00000154997; TAA
YELQESNVQL

SEQ ID NO: 75969 - protein, 10 aa, Homo sapiens
  Table A; Target 75969; HLA-B*37:01; SEPT14; ENSG00000154997; TAA
YELQESNVQL

SEQ ID NO: 75970 - protein, 10 aa, Homo sapiens
  Table A; Target 75970; HLA-B*38:01; SEPT14; ENSG00000154997; TAA
YELQESNVQL

SEQ ID NO: 75971 - protein, 10 aa, Homo sapiens
  Table A; Target 75971; HLA-B*39:01; SEPT14; ENSG00000154997; TAA
YELQESNVQL

SEQ ID NO: 75972 - protein, 10 aa, Homo sapiens
  Table A; Target 75972; HLA-B*40:01; SEPT14; ENSG00000154997; TAA
YELQESNVQL

SEQ ID NO: 75973 - protein, 10 aa, Homo sapiens
  Table A; Target 75973; HLA-B*40:02; SEPT14; ENSG00000154997; TAA
YELQESNVQL

SEQ ID NO: 75974 - protein, 10 aa, Homo sapiens
  Table A; Target 75974; HLA-B*44:02; SEPT14; ENSG00000154997; TAA
YELQESNVQL

SEQ ID NO: 75975 - protein, 10 aa, Homo sapiens
  Table A; Target 75975; HLA-B*44:03; SEPT14; ENSG00000154997; TAA
YELQESNVQL

SEQ ID NO: 75976 - protein, 10 aa, Homo sapiens
  Table A; Target 75976; HLA-B*49:01; SEPT14; ENSG00000154997; TAA
YELQESNVQL

SEQ ID NO: 75977 - protein, 10 aa, Homo sapiens
  Table A; Target 75977; HLA-C*03:04; SEPT14; ENSG00000154997; TAA
YELQESNVQL

SEQ ID NO: 75978 - protein, 11 aa, Homo sapiens
  Table A; Target 75978; HLA-A*03:02; SEPT14; ENSG00000154997; TAA
YELQESNVQLK

SEQ ID NO: 75979 - protein, 11 aa, Homo sapiens
  Table A; Target 75979; HLA-A*11:01; SEPT14; ENSG00000154997; TAA
YELQESNVQLK

SEQ ID NO: 75980 - protein, 11 aa, Homo sapiens
  Table A; Target 75980; HLA-B*27:02; SEPT14; ENSG00000154997; TAA
YELQESNVQLK

SEQ ID NO: 75981 - protein, 11 aa, Homo sapiens
  Table A; Target 75981; HLA-B*49:01; SEPT14; ENSG00000154997; TAA
YELQESNVQLK

SEQ ID NO: 75982 - protein, 10 aa, Homo sapiens
  Table A; Target 75982; HLA-A*23:01; SEPT14; ENSG00000154997; TAA
YFISPTGHSL

SEQ ID NO: 75983 - protein, 10 aa, Homo sapiens
  Table A; Target 75983; HLA-A*24:02; SEPT14; ENSG00000154997; TAA
YFISPTGHSL

SEQ ID NO: 75984 - protein, 10 aa, Homo sapiens
  Table A; Target 75984; HLA-A*25:01; SEPT14; ENSG00000154997; TAA
YFISPTGHSL

SEQ ID NO: 75985 - protein, 10 aa, Homo sapiens
  Table A; Target 75985; HLA-A*29:02; SEPT14; ENSG00000154997; TAA
YFISPTGHSL

SEQ ID NO: 75986 - protein, 10 aa, Homo sapiens
  Table A; Target 75986; HLA-A*30:01; SEPT14; ENSG00000154997; TAA
YFISPTGHSL

SEQ ID NO: 75987 - protein, 10 aa, Homo sapiens
  Table A; Target 75987; HLA-A*32:01; SEPT14; ENSG00000154997; TAA
YFISPTGHSL

SEQ ID NO: 75988 - protein, 10 aa, Homo sapiens
  Table A; Target 75988; HLA-B*07:02; SEPT14; ENSG00000154997; TAA
YFISPTGHSL

SEQ ID NO: 75989 - protein, 10 aa, Homo sapiens
  Table A; Target 75989; HLA-B*15:03; SEPT14; ENSG00000154997; TAA
YFISPTGHSL

SEQ ID NO: 75990 - protein, 10 aa, Homo sapiens
  Table A; Target 75990; HLA-B*35:01; SEPT14; ENSG00000154997; TAA
YFISPTGHSL

SEQ ID NO: 75991 - protein, 10 aa, Homo sapiens
  Table A; Target 75991; HLA-B*35:03; SEPT14; ENSG00000154997; TAA
YFISPTGHSL

SEQ ID NO: 75992 - protein, 10 aa, Homo sapiens
  Table A; Target 75992; HLA-B*38:01; SEPT14; ENSG00000154997; TAA
YFISPTGHSL

SEQ ID NO: 75993 - protein, 10 aa, Homo sapiens
  Table A; Target 75993; HLA-B*40:02; SEPT14; ENSG00000154997; TAA
YFISPTGHSL

SEQ ID NO: 75994 - protein, 10 aa, Homo sapiens
  Table A; Target 75994; HLA-B*46:01; SEPT14; ENSG00000154997; TAA
YFISPTGHSL

SEQ ID NO: 75995 - protein, 10 aa, Homo sapiens
  Table A; Target 75995; HLA-B*58:01; SEPT14; ENSG00000154997; TAA
YFISPTGHSL

SEQ ID NO: 75996 - protein, 10 aa, Homo sapiens
  Table A; Target 75996; HLA-C*01:02; SEPT14; ENSG00000154997; TAA
YFISPTGHSL

SEQ ID NO: 75997 - protein, 10 aa, Homo sapiens
  Table A; Target 75997; HLA-C*02:02; SEPT14; ENSG00000154997; TAA
YFISPTGHSL

SEQ ID NO: 75998 - protein, 10 aa, Homo sapiens
  Table A; Target 75998; HLA-C*03:03; SEPT14; ENSG00000154997; TAA
YFISPTGHSL

SEQ ID NO: 75999 - protein, 10 aa, Homo sapiens
  Table A; Target 75999; HLA-C*03:04; SEPT14; ENSG00000154997; TAA
YFISPTGHSL

SEQ ID NO: 76000 - protein, 10 aa, Homo sapiens
  Table A; Target 76000; HLA-C*04:01; SEPT14; ENSG00000154997; TAA
YFISPTGHSL

SEQ ID NO: 76001 - protein, 10 aa, Homo sapiens
  Table A; Target 76001; HLA-C*07:02; SEPT14; ENSG00000154997; TAA
YFISPTGHSL

SEQ ID NO: 76002 - protein, 10 aa, Homo sapiens
  Table A; Target 76002; HLA-C*07:04; SEPT14; ENSG00000154997; TAA
YFISPTGHSL

SEQ ID NO: 76003 - protein, 10 aa, Homo sapiens
  Table A; Target 76003; HLA-C*12:03; SEPT14; ENSG00000154997; TAA
YFISPTGHSL

SEQ ID NO: 76004 - protein, 10 aa, Homo sapiens
  Table A; Target 76004; HLA-C*14:02; SEPT14; ENSG00000154997; TAA
YFISPTGHSL

SEQ ID NO: 76005 - protein, 10 aa, Homo sapiens
  Table A; Target 76005; HLA-C*16:01; SEPT14; ENSG00000154997; TAA
YFISPTGHSL

SEQ ID NO: 76006 - protein, 10 aa, Homo sapiens
  Table A; Target 76006; HLA-C*16:02; SEPT14; ENSG00000154997; TAA
YFISPTGHSL

SEQ ID NO: 76007 - protein, 11 aa, Homo sapiens
  Table A; Target 76007; HLA-A*24:02; SEPT14; ENSG00000154997; TAA
YFISPTGHSLK

SEQ ID NO: 76008 - protein, 11 aa, Homo sapiens
  Table A; Target 76008; HLA-A*29:02; SEPT14; ENSG00000154997; TAA
YFISPTGHSLK

SEQ ID NO: 76009 - protein, 11 aa, Homo sapiens
  Table A; Target 76009; HLA-A*31:01; SEPT14; ENSG00000154997; TAA
YFISPTGHSLK

SEQ ID NO: 76010 - protein, 11 aa, Homo sapiens
  Table A; Target 76010; HLA-A*33:01; SEPT14; ENSG00000154997; TAA
YFISPTGHSLK

SEQ ID NO: 76011 - protein, 11 aa, Homo sapiens
  Table A; Target 76011; HLA-A*33:03; SEPT14; ENSG00000154997; TAA
YFISPTGHSLK

SEQ ID NO: 76012 - protein, 11 aa, Homo sapiens
  Table A; Target 76012; HLA-A*01:01; SEPT14; ENSG00000154997; TAA
YGDQIDKEASY

SEQ ID NO: 76013 - protein, 10 aa, Homo sapiens
  Table A; Target 76013; HLA-B*38:01; SEPT14; ENSG00000154997; TAA
YHDSRVHVCL

SEQ ID NO: 76014 - protein, 9 aa, Homo sapiens
  Table A; Target 76014; HLA-A*01:01; SEPT14; ENSG00000154997; TAA
YIDAQFEAY

SEQ ID NO: 76015 - protein, 9 aa, Homo sapiens
  Table A; Target 76015; HLA-A*02:07; SEPT14; ENSG00000154997; TAA
YIDAQFEAY

SEQ ID NO: 76016 - protein, 9 aa, Homo sapiens
  Table A; Target 76016; HLA-A*25:01; SEPT14; ENSG00000154997; TAA
YIDAQFEAY

SEQ ID NO: 76017 - protein, 9 aa, Homo sapiens
  Table A; Target 76017; HLA-A*26:01; SEPT14; ENSG00000154997; TAA
YIDAQFEAY

SEQ ID NO: 76018 - protein, 9 aa, Homo sapiens
  Table A; Target 76018; HLA-A*29:02; SEPT14; ENSG00000154997; TAA
YIDAQFEAY

SEQ ID NO: 76019 - protein, 9 aa, Homo sapiens
  Table A; Target 76019; HLA-A*30:02; SEPT14; ENSG00000154997; TAA
YIDAQFEAY

SEQ ID NO: 76020 - protein, 9 aa, Homo sapiens
  Table A; Target 76020; HLA-A*32:01; SEPT14; ENSG00000154997; TAA
YIDAQFEAY

SEQ ID NO: 76021 - protein, 9 aa, Homo sapiens
  Table A; Target 76021; HLA-B*15:01; SEPT14; ENSG00000154997; TAA
YIDAQFEAY

SEQ ID NO: 76022 - protein, 9 aa, Homo sapiens
  Table A; Target 76022; HLA-B*15:03; SEPT14; ENSG00000154997; TAA
YIDAQFEAY

SEQ ID NO: 76023 - protein, 9 aa, Homo sapiens
  Table A; Target 76023; HLA-B*18:01; SEPT14; ENSG00000154997; TAA
YIDAQFEAY

SEQ ID NO: 76024 - protein, 9 aa, Homo sapiens
  Table A; Target 76024; HLA-B*35:01; SEPT14; ENSG00000154997; TAA
YIDAQFEAY

SEQ ID NO: 76025 - protein, 9 aa, Homo sapiens
  Table A; Target 76025; HLA-B*46:01; SEPT14; ENSG00000154997; TAA
YIDAQFEAY

SEQ ID NO: 76026 - protein, 9 aa, Homo sapiens
  Table A; Target 76026; HLA-B*58:01; SEPT14; ENSG00000154997; TAA
YIDAQFEAY

SEQ ID NO: 76027 - protein, 9 aa, Homo sapiens
  Table A; Target 76027; HLA-C*02:02; SEPT14; ENSG00000154997; TAA
YIDAQFEAY

SEQ ID NO: 76028 - protein, 9 aa, Homo sapiens
  Table A; Target 76028; HLA-C*03:03; SEPT14; ENSG00000154997; TAA
YIDAQFEAY

SEQ ID NO: 76029 - protein, 9 aa, Homo sapiens
  Table A; Target 76029; HLA-C*05:01; SEPT14; ENSG00000154997; TAA
YIDAQFEAY

SEQ ID NO: 76030 - protein, 9 aa, Homo sapiens
  Table A; Target 76030; HLA-C*07:04; SEPT14; ENSG00000154997; TAA
YIDAQFEAY

SEQ ID NO: 76031 - protein, 10 aa, Homo sapiens
  Table A; Target 76031; HLA-A*01:01; SEPT14; ENSG00000154997; TAA
YIDAQFEAYL

SEQ ID NO: 76032 - protein, 10 aa, Homo sapiens
  Table A; Target 76032; HLA-A*02:01; SEPT14; ENSG00000154997; TAA
YIDAQFEAYL

SEQ ID NO: 76033 - protein, 10 aa, Homo sapiens
  Table A; Target 76033; HLA-A*02:07; SEPT14; ENSG00000154997; TAA
YIDAQFEAYL

SEQ ID NO: 76034 - protein, 8 aa, Homo sapiens
  Table A; Target 76034; HLA-A*02:01; SEPT14; ENSG00000154997; TAA
YLQEELKI

SEQ ID NO: 76035 - protein, 8 aa, Homo sapiens
  Table A; Target 76035; HLA-A*02:04; SEPT14; ENSG00000154997; TAA
YLQEELKI

SEQ ID NO: 76036 - protein, 8 aa, Homo sapiens
  Table A; Target 76036; HLA-B*13:02; SEPT14; ENSG00000154997; TAA
YLQEELKI

SEQ ID NO: 76037 - protein, 10 aa, Homo sapiens
  Table A; Target 76037; HLA-A*31:01; SEPT14; ENSG00000154997; TAA
YLQEELKIKR

SEQ ID NO: 76038 - protein, 10 aa, Homo sapiens
  Table A; Target 76038; HLA-A*33:01; SEPT14; ENSG00000154997; TAA
YLQEELKIKR

SEQ ID NO: 76039 - protein, 10 aa, Homo sapiens
  Table A; Target 76039; HLA-A*33:03; SEPT14; ENSG00000154997; TAA
YLQEELKIKR

SEQ ID NO: 76040 - protein, 8 aa, Homo sapiens
  Table A; Target 76040; HLA-A*30:01; SEPT14; ENSG00000154997; TAA
YPWGVLQV

SEQ ID NO: 76041 - protein, 8 aa, Homo sapiens
  Table A; Target 76041; HLA-B*51:01; SEPT14; ENSG00000154997; TAA
YPWGVLQV

SEQ ID NO: 76042 - protein, 8 aa, Homo sapiens
  Table A; Target 76042; HLA-B*54:01; SEPT14; ENSG00000154997; TAA
YPWGVLQV

SEQ ID NO: 76043 - protein, 8 aa, Homo sapiens
  Table A; Target 76043; HLA-B*56:01; SEPT14; ENSG00000154997; TAA
YPWGVLQV

SEQ ID NO: 76044 - protein, 10 aa, Homo sapiens
  Table A; Target 76044; HLA-B*54:01; SEPT14; ENSG00000154997; TAA
YPWGVLQVEN

SEQ ID NO: 76045 - protein, 9 aa, Homo sapiens
  Table A; Target 76045; HLA-B*08:01; SEPT14; ENSG00000154997; TAA
YQKLQKMGF

SEQ ID NO: 76046 - protein, 9 aa, Homo sapiens
  Table A; Target 76046; HLA-B*15:01; SEPT14; ENSG00000154997; TAA
YQKLQKMGF

SEQ ID NO: 76047 - protein, 9 aa, Homo sapiens
  Table A; Target 76047; HLA-B*13:02; SEPT14; ENSG00000154997; TAA
YQLPTDEET

SEQ ID NO: 76048 - protein, 9 aa, Homo sapiens
  Table A; Target 76048; HLA-B*27:05; SEPT14; ENSG00000154997; TAA
YQLPTDEET

SEQ ID NO: 76049 - protein, 10 aa, Homo sapiens
  Table A; Target 76049; HLA-B*39:01; SEPT14; ENSG00000154997; TAA
YQLPTDEETA

SEQ ID NO: 76050 - protein, 11 aa, Homo sapiens
  Table A; Target 76050; HLA-B*27:05; SEPT14; ENSG00000154997; TAA
YQLPTDEETAA

SEQ ID NO: 76051 - protein, 11 aa, Homo sapiens
  Table A; Target 76051; HLA-B*39:01; SEPT14; ENSG00000154997; TAA
YQLPTDEETAA

SEQ ID NO: 76052 - protein, 8 aa, Homo sapiens
  Table A; Target 76052; HLA-B*13:02; SEPT14; ENSG00000154997; TAA
YQPIVDYI

SEQ ID NO: 76053 - protein, 8 aa, Homo sapiens
  Table A; Target 76053; HLA-B*49:01; SEPT14; ENSG00000154997; TAA
YQPIVDYI

SEQ ID NO: 76054 - protein, 8 aa, Homo sapiens
  Table A; Target 76054; HLA-B*51:01; SEPT14; ENSG00000154997; TAA
YQPIVDYI

SEQ ID NO: 76055 - protein, 9 aa, Homo sapiens
  Table A; Target 76055; HLA-B*08:01; SEPT14; ENSG00000154997; TAA
YRYQKLQKM

SEQ ID NO: 76056 - protein, 8 aa, Homo sapiens
  Table A; Target 76056; HLA-B*13:02; SEPT14; ENSG00000154997; TAA
YSNVGLQI

SEQ ID NO: 76057 - protein, 8 aa, Homo sapiens
  Table A; Target 76057; HLA-B*40:02; SEPT14; ENSG00000154997; TAA
YSNVGLQI

SEQ ID NO: 76058 - protein, 8 aa, Homo sapiens
  Table A; Target 76058; HLA-B*51:01; SEPT14; ENSG00000154997; TAA
YSNVGLQI

SEQ ID NO: 76059 - protein, 8 aa, Homo sapiens
  Table A; Target 76059; HLA-B*58:01; SEPT14; ENSG00000154997; TAA
YSNVGLQI

SEQ ID NO: 76060 - protein, 8 aa, Homo sapiens
  Table A; Target 76060; HLA-C*03:03; SEPT14; ENSG00000154997; TAA
YSNVGLQI

SEQ ID NO: 76061 - protein, 8 aa, Homo sapiens
  Table A; Target 76061; HLA-C*03:04; SEPT14; ENSG00000154997; TAA
YSNVGLQI

SEQ ID NO: 76062 - protein, 8 aa, Homo sapiens
  Table A; Target 76062; HLA-C*05:01; SEPT14; ENSG00000154997; TAA
YSNVGLQI

SEQ ID NO: 76063 - protein, 8 aa, Homo sapiens
  Table A; Target 76063; HLA-C*16:02; SEPT14; ENSG00000154997; TAA
YSNVGLQI

SEQ ID NO: 76064 - protein, 11 aa, Homo sapiens
  Table A; Target 76064; HLA-A*01:01; SEPT14; ENSG00000154997; TAA
YSNVGLQIQTY

SEQ ID NO: 76065 - protein, 11 aa, Homo sapiens
  Table A; Target 76065; HLA-A*25:01; SEPT14; ENSG00000154997; TAA
YSNVGLQIQTY

SEQ ID NO: 76066 - protein, 11 aa, Homo sapiens
  Table A; Target 76066; HLA-A*26:01; SEPT14; ENSG00000154997; TAA
YSNVGLQIQTY

SEQ ID NO: 76067 - protein, 11 aa, Homo sapiens
  Table A; Target 76067; HLA-A*29:02; SEPT14; ENSG00000154997; TAA
YSNVGLQIQTY

SEQ ID NO: 76068 - protein, 11 aa, Homo sapiens
  Table A; Target 76068; HLA-A*30:02; SEPT14; ENSG00000154997; TAA
YSNVGLQIQTY

SEQ ID NO: 76069 - protein, 11 aa, Homo sapiens
  Table A; Target 76069; HLA-A*32:01; SEPT14; ENSG00000154997; TAA
YSNVGLQIQTY

SEQ ID NO: 76070 - protein, 11 aa, Homo sapiens
  Table A; Target 76070; HLA-B*15:01; SEPT14; ENSG00000154997; TAA
YSNVGLQIQTY

SEQ ID NO: 76071 - protein, 11 aa, Homo sapiens
  Table A; Target 76071; HLA-B*46:01; SEPT14; ENSG00000154997; TAA
YSNVGLQIQTY

SEQ ID NO: 76072 - protein, 11 aa, Homo sapiens
  Table A; Target 76072; HLA-B*57:01; SEPT14; ENSG00000154997; TAA
YSNVGLQIQTY

SEQ ID NO: 76073 - protein, 11 aa, Homo sapiens
  Table A; Target 76073; HLA-B*58:01; SEPT14; ENSG00000154997; TAA
YSNVGLQIQTY

SEQ ID NO: 76074 - protein, 11 aa, Homo sapiens
  Table A; Target 76074; HLA-C*07:01; SEPT14; ENSG00000154997; TAA
YSNVGLQIQTY

SEQ ID NO: 76075 - protein, 11 aa, Homo sapiens
  Table A; Target 76075; HLA-C*12:03; SEPT14; ENSG00000154997; TAA
YSNVGLQIQTY

SEQ ID NO: 76076 - protein, 11 aa, Homo sapiens
  Table A; Target 76076; HLA-C*14:02; SEPT14; ENSG00000154997; TAA
YSNVGLQIQTY

SEQ ID NO: 76077 - protein, 11 aa, Homo sapiens
  Table A; Target 76077; HLA-C*16:02; SEPT14; ENSG00000154997; TAA
YSNVGLQIQTY

SEQ ID NO: 76078 - protein, 11 aa, Homo sapiens
  Table A; Target 76078; HLA-C*16:04; SEPT14; ENSG00000154997; TAA
YSNVGLQIQTY

SEQ ID NO: 76079 - protein, 9 aa, Homo sapiens
  Table A; Target 76079; HLA-C*16:02; SEPT14,EGFR-SEPT14 Fusion; ENSG00000154997,EGFR-SEPT14; TAA,EGFR-SEPT14
AASEALQTQ

SEQ ID NO: 76080 - protein, 10 aa, Homo sapiens
  Table A; Target 76080; HLA-A*11:01; SEPT14,EGFR-SEPT14 Fusion; ENSG00000154997,EGFR-SEPT14; TAA,EGFR-SEPT14
AASEALQTQL

SEQ ID NO: 76081 - protein, 10 aa, Homo sapiens
  Table A; Target 76081; HLA-A*30:01; SEPT14,EGFR-SEPT14 Fusion; ENSG00000154997,EGFR-SEPT14; TAA,EGFR-SEPT14
AASEALQTQL

SEQ ID NO: 76082 - protein, 10 aa, Homo sapiens
  Table A; Target 76082; HLA-A*68:02; SEPT14,EGFR-SEPT14 Fusion; ENSG00000154997,EGFR-SEPT14; TAA,EGFR-SEPT14
AASEALQTQL

SEQ ID NO: 76083 - protein, 10 aa, Homo sapiens
  Table A; Target 76083; HLA-B*07:02; SEPT14,EGFR-SEPT14 Fusion; ENSG00000154997,EGFR-SEPT14; TAA,EGFR-SEPT14
AASEALQTQL

SEQ ID NO: 76084 - protein, 10 aa, Homo sapiens
  Table A; Target 76084; HLA-B*27:02; SEPT14,EGFR-SEPT14 Fusion; ENSG00000154997,EGFR-SEPT14; TAA,EGFR-SEPT14
AASEALQTQL

SEQ ID NO: 76085 - protein, 10 aa, Homo sapiens
  Table A; Target 76085; HLA-B*27:05; SEPT14,EGFR-SEPT14 Fusion; ENSG00000154997,EGFR-SEPT14; TAA,EGFR-SEPT14
AASEALQTQL

SEQ ID NO: 76086 - protein, 10 aa, Homo sapiens
  Table A; Target 76086; HLA-B*35:03; SEPT14,EGFR-SEPT14 Fusion; ENSG00000154997,EGFR-SEPT14; TAA,EGFR-SEPT14
AASEALQTQL

SEQ ID NO: 76087 - protein, 10 aa, Homo sapiens
  Table A; Target 76087; HLA-B*38:01; SEPT14,EGFR-SEPT14 Fusion; ENSG00000154997,EGFR-SEPT14; TAA,EGFR-SEPT14
AASEALQTQL

SEQ ID NO: 76088 - protein, 10 aa, Homo sapiens
  Table A; Target 76088; HLA-B*39:01; SEPT14,EGFR-SEPT14 Fusion; ENSG00000154997,EGFR-SEPT14; TAA,EGFR-SEPT14
AASEALQTQL

SEQ ID NO: 76089 - protein, 10 aa, Homo sapiens
  Table A; Target 76089; HLA-B*40:01; SEPT14,EGFR-SEPT14 Fusion; ENSG00000154997,EGFR-SEPT14; TAA,EGFR-SEPT14
AASEALQTQL

SEQ ID NO: 76090 - protein, 10 aa, Homo sapiens
  Table A; Target 76090; HLA-B*58:01; SEPT14,EGFR-SEPT14 Fusion; ENSG00000154997,EGFR-SEPT14; TAA,EGFR-SEPT14
AASEALQTQL

SEQ ID NO: 76091 - protein, 10 aa, Homo sapiens
  Table A; Target 76091; HLA-C*02:02; SEPT14,EGFR-SEPT14 Fusion; ENSG00000154997,EGFR-SEPT14; TAA,EGFR-SEPT14
AASEALQTQL

SEQ ID NO: 76092 - protein, 10 aa, Homo sapiens
  Table A; Target 76092; HLA-C*03:03; SEPT14,EGFR-SEPT14 Fusion; ENSG00000154997,EGFR-SEPT14; TAA,EGFR-SEPT14
AASEALQTQL

SEQ ID NO: 76093 - protein, 10 aa, Homo sapiens
  Table A; Target 76093; HLA-C*03:04; SEPT14,EGFR-SEPT14 Fusion; ENSG00000154997,EGFR-SEPT14; TAA,EGFR-SEPT14
AASEALQTQL

SEQ ID NO: 76094 - protein, 10 aa, Homo sapiens
  Table A; Target 76094; HLA-C*05:01; SEPT14,EGFR-SEPT14 Fusion; ENSG00000154997,EGFR-SEPT14; TAA,EGFR-SEPT14
AASEALQTQL

SEQ ID NO: 76095 - protein, 10 aa, Homo sapiens
  Table A; Target 76095; HLA-C*07:06; SEPT14,EGFR-SEPT14 Fusion; ENSG00000154997,EGFR-SEPT14; TAA,EGFR-SEPT14
AASEALQTQL

SEQ ID NO: 76096 - protein, 10 aa, Homo sapiens
  Table A; Target 76096; HLA-C*12:03; SEPT14,EGFR-SEPT14 Fusion; ENSG00000154997,EGFR-SEPT14; TAA,EGFR-SEPT14
AASEALQTQL

SEQ ID NO: 76097 - protein, 10 aa, Homo sapiens
  Table A; Target 76097; HLA-C*16:02; SEPT14,EGFR-SEPT14 Fusion; ENSG00000154997,EGFR-SEPT14; TAA,EGFR-SEPT14
AASEALQTQL

SEQ ID NO: 76098 - protein, 10 aa, Homo sapiens
  Table A; Target 76098; HLA-C*16:04; SEPT14,EGFR-SEPT14 Fusion; ENSG00000154997,EGFR-SEPT14; TAA,EGFR-SEPT14
AASEALQTQL

SEQ ID NO: 76099 - protein, 11 aa, Homo sapiens
  Table A; Target 76099; HLA-A*03:02; SEPT14,EGFR-SEPT14 Fusion; ENSG00000154997,EGFR-SEPT14; TAA,EGFR-SEPT14
ALQTQLSTDTK

SEQ ID NO: 76100 - protein, 11 aa, Homo sapiens
  Table A; Target 76100; HLA-A*11:01; SEPT14,EGFR-SEPT14 Fusion; ENSG00000154997,EGFR-SEPT14; TAA,EGFR-SEPT14
ALQTQLSTDTK

SEQ ID NO: 76101 - protein, 11 aa, Homo sapiens
  Table A; Target 76101; HLA-B*27:02; SEPT14,EGFR-SEPT14 Fusion; ENSG00000154997,EGFR-SEPT14; TAA,EGFR-SEPT14
ALQTQLSTDTK

SEQ ID NO: 76102 - protein, 11 aa, Homo sapiens
  Table A; Target 76102; HLA-B*27:05; SEPT14,EGFR-SEPT14 Fusion; ENSG00000154997,EGFR-SEPT14; TAA,EGFR-SEPT14
ALQTQLSTDTK

SEQ ID NO: 76103 - protein, 11 aa, Homo sapiens
  Table A; Target 76103; HLA-C*06:02; SEPT14,EGFR-SEPT14 Fusion; ENSG00000154997,EGFR-SEPT14; TAA,EGFR-SEPT14
ALQTQLSTDTK

SEQ ID NO: 76104 - protein, 9 aa, Homo sapiens
  Table A; Target 76104; HLA-A*01:01; SEPT14,EGFR-SEPT14 Fusion; ENSG00000154997,EGFR-SEPT14; TAA,EGFR-SEPT14
ASEALQTQL

SEQ ID NO: 76105 - protein, 9 aa, Homo sapiens
  Table A; Target 76105; HLA-B*38:01; SEPT14,EGFR-SEPT14 Fusion; ENSG00000154997,EGFR-SEPT14; TAA,EGFR-SEPT14
ASEALQTQL

SEQ ID NO: 76106 - protein, 9 aa, Homo sapiens
  Table A; Target 76106; HLA-B*40:01; SEPT14,EGFR-SEPT14 Fusion; ENSG00000154997,EGFR-SEPT14; TAA,EGFR-SEPT14
ASEALQTQL

SEQ ID NO: 76107 - protein, 9 aa, Homo sapiens
  Table A; Target 76107; HLA-B*58:01; SEPT14,EGFR-SEPT14 Fusion; ENSG00000154997,EGFR-SEPT14; TAA,EGFR-SEPT14
ASEALQTQL

SEQ ID NO: 76108 - protein, 9 aa, Homo sapiens
  Table A; Target 76108; HLA-C*04:01; SEPT14,EGFR-SEPT14 Fusion; ENSG00000154997,EGFR-SEPT14; TAA,EGFR-SEPT14
ASEALQTQL

SEQ ID NO: 76109 - protein, 9 aa, Homo sapiens
  Table A; Target 76109; HLA-C*05:01; SEPT14,EGFR-SEPT14 Fusion; ENSG00000154997,EGFR-SEPT14; TAA,EGFR-SEPT14
ASEALQTQL

SEQ ID NO: 76110 - protein, 9 aa, Homo sapiens
  Table A; Target 76110; HLA-C*07:04; SEPT14,EGFR-SEPT14 Fusion; ENSG00000154997,EGFR-SEPT14; TAA,EGFR-SEPT14
ASEALQTQL

SEQ ID NO: 76111 - protein, 8 aa, Homo sapiens
  Table A; Target 76111; HLA-A*33:01; SEPT14,EGFR-SEPT14 Fusion; ENSG00000154997,EGFR-SEPT14; TAA,EGFR-SEPT14
DTKKDKHR

SEQ ID NO: 76112 - protein, 8 aa, Homo sapiens
  Table A; Target 76112; HLA-A*01:01; SEPT14,EGFR-SEPT14 Fusion; ENSG00000154997,EGFR-SEPT14; TAA,EGFR-SEPT14
EGEIIDFY

SEQ ID NO: 76113 - protein, 9 aa, Homo sapiens
  Table A; Target 76113; HLA-B*27:02; SEPT14,EGFR-SEPT14 Fusion; ENSG00000154997,EGFR-SEPT14; TAA,EGFR-SEPT14
EGEIIDFYK

SEQ ID NO: 76114 - protein, 9 aa, Homo sapiens
  Table A; Target 76114; HLA-A*33:03; SEPT14,EGFR-SEPT14 Fusion; ENSG00000154997,EGFR-SEPT14; TAA,EGFR-SEPT14
EIIDFYKMK

SEQ ID NO: 76115 - protein, 9 aa, Homo sapiens
  Table A; Target 76115; HLA-A*30:01; SEPT14,EGFR-SEPT14 Fusion; ENSG00000154997,EGFR-SEPT14; TAA,EGFR-SEPT14
GEIIDFYKM

SEQ ID NO: 76116 - protein, 9 aa, Homo sapiens
  Table A; Target 76116; HLA-B*18:01; SEPT14,EGFR-SEPT14 Fusion; ENSG00000154997,EGFR-SEPT14; TAA,EGFR-SEPT14
GEIIDFYKM

SEQ ID NO: 76117 - protein, 9 aa, Homo sapiens
  Table A; Target 76117; HLA-B*37:01; SEPT14,EGFR-SEPT14 Fusion; ENSG00000154997,EGFR-SEPT14; TAA,EGFR-SEPT14
GEIIDFYKM

SEQ ID NO: 76118 - protein, 9 aa, Homo sapiens
  Table A; Target 76118; HLA-B*40:01; SEPT14,EGFR-SEPT14 Fusion; ENSG00000154997,EGFR-SEPT14; TAA,EGFR-SEPT14
GEIIDFYKM

SEQ ID NO: 76119 - protein, 9 aa, Homo sapiens
  Table A; Target 76119; HLA-B*40:02; SEPT14,EGFR-SEPT14 Fusion; ENSG00000154997,EGFR-SEPT14; TAA,EGFR-SEPT14
GEIIDFYKM

SEQ ID NO: 76120 - protein, 9 aa, Homo sapiens
  Table A; Target 76120; HLA-B*44:02; SEPT14,EGFR-SEPT14 Fusion; ENSG00000154997,EGFR-SEPT14; TAA,EGFR-SEPT14
GEIIDFYKM

SEQ ID NO: 76121 - protein, 9 aa, Homo sapiens
  Table A; Target 76121; HLA-B*44:03; SEPT14,EGFR-SEPT14 Fusion; ENSG00000154997,EGFR-SEPT14; TAA,EGFR-SEPT14
GEIIDFYKM

SEQ ID NO: 76122 - protein, 9 aa, Homo sapiens
  Table A; Target 76122; HLA-B*49:01; SEPT14,EGFR-SEPT14 Fusion; ENSG00000154997,EGFR-SEPT14; TAA,EGFR-SEPT14
GEIIDFYKM

SEQ ID NO: 76123 - protein, 9 aa, Homo sapiens
  Table A; Target 76123; HLA-A*02:04; SEPT14,EGFR-SEPT14 Fusion; ENSG00000154997,EGFR-SEPT14; TAA,EGFR-SEPT14
IQQEEIRKL

SEQ ID NO: 76124 - protein, 9 aa, Homo sapiens
  Table A; Target 76124; HLA-B*15:01; SEPT14,EGFR-SEPT14 Fusion; ENSG00000154997,EGFR-SEPT14; TAA,EGFR-SEPT14
IQQEEIRKL

SEQ ID NO: 76125 - protein, 9 aa, Homo sapiens
  Table A; Target 76125; HLA-B*38:01; SEPT14,EGFR-SEPT14 Fusion; ENSG00000154997,EGFR-SEPT14; TAA,EGFR-SEPT14
IQQEEIRKL

SEQ ID NO: 76126 - protein, 9 aa, Homo sapiens
  Table A; Target 76126; HLA-C*16:02; SEPT14,EGFR-SEPT14 Fusion; ENSG00000154997,EGFR-SEPT14; TAA,EGFR-SEPT14
IQQEEIRKL

SEQ ID NO: 76127 - protein, 9 aa, Homo sapiens
  Table A; Target 76127; HLA-C*16:02; SEPT14,EGFR-SEPT14 Fusion; ENSG00000154997,EGFR-SEPT14; TAA,EGFR-SEPT14
KAASEALQT

SEQ ID NO: 76128 - protein, 11 aa, Homo sapiens
  Table A; Target 76128; HLA-A*30:01; SEPT14,EGFR-SEPT14 Fusion; ENSG00000154997,EGFR-SEPT14; TAA,EGFR-SEPT14
KAASEALQTQL

SEQ ID NO: 76129 - protein, 11 aa, Homo sapiens
  Table A; Target 76129; HLA-A*31:01; SEPT14,EGFR-SEPT14 Fusion; ENSG00000154997,EGFR-SEPT14; TAA,EGFR-SEPT14
KAASEALQTQL

SEQ ID NO: 76130 - protein, 11 aa, Homo sapiens
  Table A; Target 76130; HLA-B*15:01; SEPT14,EGFR-SEPT14 Fusion; ENSG00000154997,EGFR-SEPT14; TAA,EGFR-SEPT14
KAASEALQTQL

SEQ ID NO: 76131 - protein, 11 aa, Homo sapiens
  Table A; Target 76131; HLA-B*27:05; SEPT14,EGFR-SEPT14 Fusion; ENSG00000154997,EGFR-SEPT14; TAA,EGFR-SEPT14
KAASEALQTQL

SEQ ID NO: 76132 - protein, 11 aa, Homo sapiens
  Table A; Target 76132; HLA-B*40:01; SEPT14,EGFR-SEPT14 Fusion; ENSG00000154997,EGFR-SEPT14; TAA,EGFR-SEPT14
KAASEALQTQL

SEQ ID NO: 76133 - protein, 11 aa, Homo sapiens
  Table A; Target 76133; HLA-B*55:01; SEPT14,EGFR-SEPT14 Fusion; ENSG00000154997,EGFR-SEPT14; TAA,EGFR-SEPT14
KAASEALQTQL

SEQ ID NO: 76134 - protein, 11 aa, Homo sapiens
  Table A; Target 76134; HLA-B*57:01; SEPT14,EGFR-SEPT14 Fusion; ENSG00000154997,EGFR-SEPT14; TAA,EGFR-SEPT14
KAASEALQTQL

SEQ ID NO: 76135 - protein, 11 aa, Homo sapiens
  Table A; Target 76135; HLA-B*58:01; SEPT14,EGFR-SEPT14 Fusion; ENSG00000154997,EGFR-SEPT14; TAA,EGFR-SEPT14
KAASEALQTQL

SEQ ID NO: 76136 - protein, 11 aa, Homo sapiens
  Table A; Target 76136; HLA-C*02:02; SEPT14,EGFR-SEPT14 Fusion; ENSG00000154997,EGFR-SEPT14; TAA,EGFR-SEPT14
KAASEALQTQL

SEQ ID NO: 76137 - protein, 11 aa, Homo sapiens
  Table A; Target 76137; HLA-C*06:02; SEPT14,EGFR-SEPT14 Fusion; ENSG00000154997,EGFR-SEPT14; TAA,EGFR-SEPT14
KAASEALQTQL

SEQ ID NO: 76138 - protein, 11 aa, Homo sapiens
  Table A; Target 76138; HLA-C*07:04; SEPT14,EGFR-SEPT14 Fusion; ENSG00000154997,EGFR-SEPT14; TAA,EGFR-SEPT14
KAASEALQTQL

SEQ ID NO: 76139 - protein, 11 aa, Homo sapiens
  Table A; Target 76139; HLA-C*12:03; SEPT14,EGFR-SEPT14 Fusion; ENSG00000154997,EGFR-SEPT14; TAA,EGFR-SEPT14
KAASEALQTQL

SEQ ID NO: 76140 - protein, 11 aa, Homo sapiens
  Table A; Target 76140; HLA-C*16:02; SEPT14,EGFR-SEPT14 Fusion; ENSG00000154997,EGFR-SEPT14; TAA,EGFR-SEPT14
KAASEALQTQL

SEQ ID NO: 76141 - protein, 11 aa, Homo sapiens
  Table A; Target 76141; HLA-C*16:04; SEPT14,EGFR-SEPT14 Fusion; ENSG00000154997,EGFR-SEPT14; TAA,EGFR-SEPT14
KAASEALQTQL

SEQ ID NO: 76142 - protein, 8 aa, Homo sapiens
  Table A; Target 76142; HLA-B*13:02; SEPT14,EGFR-SEPT14 Fusion; ENSG00000154997,EGFR-SEPT14; TAA,EGFR-SEPT14
KMIQQEEI

SEQ ID NO: 76143 - protein, 10 aa, Homo sapiens
  Table A; Target 76143; HLA-A*03:01; SEPT14,EGFR-SEPT14 Fusion; ENSG00000154997,EGFR-SEPT14; TAA,EGFR-SEPT14
KMIQQEEIRK

SEQ ID NO: 76144 - protein, 10 aa, Homo sapiens
  Table A; Target 76144; HLA-A*03:02; SEPT14,EGFR-SEPT14 Fusion; ENSG00000154997,EGFR-SEPT14; TAA,EGFR-SEPT14
KMIQQEEIRK

SEQ ID NO: 76145 - protein, 11 aa, Homo sapiens
  Table A; Target 76145; HLA-A*02:01; SEPT14,EGFR-SEPT14 Fusion; ENSG00000154997,EGFR-SEPT14; TAA,EGFR-SEPT14
KMIQQEEIRKL

SEQ ID NO: 76146 - protein, 11 aa, Homo sapiens
  Table A; Target 76146; HLA-A*02:03; SEPT14,EGFR-SEPT14 Fusion; ENSG00000154997,EGFR-SEPT14; TAA,EGFR-SEPT14
KMIQQEEIRKL

SEQ ID NO: 76147 - protein, 11 aa, Homo sapiens
  Table A; Target 76147; HLA-A*03:01; SEPT14,EGFR-SEPT14 Fusion; ENSG00000154997,EGFR-SEPT14; TAA,EGFR-SEPT14
KMIQQEEIRKL

SEQ ID NO: 76148 - protein, 11 aa, Homo sapiens
  Table A; Target 76148; HLA-A*31:01; SEPT14,EGFR-SEPT14 Fusion; ENSG00000154997,EGFR-SEPT14; TAA,EGFR-SEPT14
KMIQQEEIRKL

SEQ ID NO: 76149 - protein, 9 aa, Homo sapiens
  Table A; Target 76149; HLA-A*02:03; SEPT14,EGFR-SEPT14 Fusion; ENSG00000154997,EGFR-SEPT14; TAA,EGFR-SEPT14
KMKAASEAL

SEQ ID NO: 76150 - protein, 9 aa, Homo sapiens
  Table A; Target 76150; HLA-A*32:01; SEPT14,EGFR-SEPT14 Fusion; ENSG00000154997,EGFR-SEPT14; TAA,EGFR-SEPT14
KMKAASEAL

SEQ ID NO: 76151 - protein, 9 aa, Homo sapiens
  Table A; Target 76151; HLA-B*07:02; SEPT14,EGFR-SEPT14 Fusion; ENSG00000154997,EGFR-SEPT14; TAA,EGFR-SEPT14
KMKAASEAL

SEQ ID NO: 76152 - protein, 9 aa, Homo sapiens
  Table A; Target 76152; HLA-B*08:01; SEPT14,EGFR-SEPT14 Fusion; ENSG00000154997,EGFR-SEPT14; TAA,EGFR-SEPT14
KMKAASEAL

SEQ ID NO: 76153 - protein, 9 aa, Homo sapiens
  Table A; Target 76153; HLA-B*15:01; SEPT14,EGFR-SEPT14 Fusion; ENSG00000154997,EGFR-SEPT14; TAA,EGFR-SEPT14
KMKAASEAL

SEQ ID NO: 76154 - protein, 9 aa, Homo sapiens
  Table A; Target 76154; HLA-B*40:02; SEPT14,EGFR-SEPT14 Fusion; ENSG00000154997,EGFR-SEPT14; TAA,EGFR-SEPT14
KMKAASEAL

SEQ ID NO: 76155 - protein, 9 aa, Homo sapiens
  Table A; Target 76155; HLA-B*46:01; SEPT14,EGFR-SEPT14 Fusion; ENSG00000154997,EGFR-SEPT14; TAA,EGFR-SEPT14
KMKAASEAL

SEQ ID NO: 76156 - protein, 9 aa, Homo sapiens
  Table A; Target 76156; HLA-C*01:02; SEPT14,EGFR-SEPT14 Fusion; ENSG00000154997,EGFR-SEPT14; TAA,EGFR-SEPT14
KMKAASEAL

SEQ ID NO: 76157 - protein, 9 aa, Homo sapiens
  Table A; Target 76157; HLA-C*06:02; SEPT14,EGFR-SEPT14 Fusion; ENSG00000154997,EGFR-SEPT14; TAA,EGFR-SEPT14
KMKAASEAL

SEQ ID NO: 76158 - protein, 9 aa, Homo sapiens
  Table A; Target 76158; HLA-C*14:02; SEPT14,EGFR-SEPT14 Fusion; ENSG00000154997,EGFR-SEPT14; TAA,EGFR-SEPT14
KMKAASEAL

SEQ ID NO: 76159 - protein, 10 aa, Homo sapiens
  Table A; Target 76159; HLA-A*30:02; SEPT14,EGFR-SEPT14 Fusion; ENSG00000154997,EGFR-SEPT14; TAA,EGFR-SEPT14
KQLEGEIIDF

SEQ ID NO: 76160 - protein, 10 aa, Homo sapiens
  Table A; Target 76160; HLA-A*32:01; SEPT14,EGFR-SEPT14 Fusion; ENSG00000154997,EGFR-SEPT14; TAA,EGFR-SEPT14
KQLEGEIIDF

SEQ ID NO: 76161 - protein, 10 aa, Homo sapiens
  Table A; Target 76161; HLA-B*15:01; SEPT14,EGFR-SEPT14 Fusion; ENSG00000154997,EGFR-SEPT14; TAA,EGFR-SEPT14
KQLEGEIIDF

SEQ ID NO: 76162 - protein, 10 aa, Homo sapiens
  Table A; Target 76162; HLA-B*15:03; SEPT14,EGFR-SEPT14 Fusion; ENSG00000154997,EGFR-SEPT14; TAA,EGFR-SEPT14
KQLEGEIIDF

SEQ ID NO: 76163 - protein, 10 aa, Homo sapiens
  Table A; Target 76163; HLA-B*27:02; SEPT14,EGFR-SEPT14 Fusion; ENSG00000154997,EGFR-SEPT14; TAA,EGFR-SEPT14
KQLEGEIIDF

SEQ ID NO: 76164 - protein, 10 aa, Homo sapiens
  Table A; Target 76164; HLA-B*57:01; SEPT14,EGFR-SEPT14 Fusion; ENSG00000154997,EGFR-SEPT14; TAA,EGFR-SEPT14
KQLEGEIIDF

SEQ ID NO: 76165 - protein, 10 aa, Homo sapiens
  Table A; Target 76165; HLA-B*58:01; SEPT14,EGFR-SEPT14 Fusion; ENSG00000154997,EGFR-SEPT14; TAA,EGFR-SEPT14
KQLEGEIIDF

SEQ ID NO: 76166 - protein, 11 aa, Homo sapiens
  Table A; Target 76166; HLA-A*29:02; SEPT14,EGFR-SEPT14 Fusion; ENSG00000154997,EGFR-SEPT14; TAA,EGFR-SEPT14
KQLEGEIIDFY

SEQ ID NO: 76167 - protein, 11 aa, Homo sapiens
  Table A; Target 76167; HLA-A*30:02; SEPT14,EGFR-SEPT14 Fusion; ENSG00000154997,EGFR-SEPT14; TAA,EGFR-SEPT14
KQLEGEIIDFY

SEQ ID NO: 76168 - protein, 11 aa, Homo sapiens
  Table A; Target 76168; HLA-A*32:01; SEPT14,EGFR-SEPT14 Fusion; ENSG00000154997,EGFR-SEPT14; TAA,EGFR-SEPT14
KQLEGEIIDFY

SEQ ID NO: 76169 - protein, 11 aa, Homo sapiens
  Table A; Target 76169; HLA-B*15:01; SEPT14,EGFR-SEPT14 Fusion; ENSG00000154997,EGFR-SEPT14; TAA,EGFR-SEPT14
KQLEGEIIDFY

SEQ ID NO: 76170 - protein, 11 aa, Homo sapiens
  Table A; Target 76170; HLA-C*16:04; SEPT14,EGFR-SEPT14 Fusion; ENSG00000154997,EGFR-SEPT14; TAA,EGFR-SEPT14
KQLEGEIIDFY

SEQ ID NO: 76171 - protein, 8 aa, Homo sapiens
  Table A; Target 76171; HLA-B*18:01; SEPT14,EGFR-SEPT14 Fusion; ENSG00000154997,EGFR-SEPT14; TAA,EGFR-SEPT14
LEGEIIDF

SEQ ID NO: 76172 - protein, 8 aa, Homo sapiens
  Table A; Target 76172; HLA-B*37:01; SEPT14,EGFR-SEPT14 Fusion; ENSG00000154997,EGFR-SEPT14; TAA,EGFR-SEPT14
LEGEIIDF

SEQ ID NO: 76173 - protein, 8 aa, Homo sapiens
  Table A; Target 76173; HLA-C*12:03; SEPT14,EGFR-SEPT14 Fusion; ENSG00000154997,EGFR-SEPT14; TAA,EGFR-SEPT14
LEGEIIDF

SEQ ID NO: 76174 - protein, 9 aa, Homo sapiens
  Table A; Target 76174; HLA-A*01:01; SEPT14,EGFR-SEPT14 Fusion; ENSG00000154997,EGFR-SEPT14; TAA,EGFR-SEPT14
LEGEIIDFY

SEQ ID NO: 76175 - protein, 9 aa, Homo sapiens
  Table A; Target 76175; HLA-A*29:02; SEPT14,EGFR-SEPT14 Fusion; ENSG00000154997,EGFR-SEPT14; TAA,EGFR-SEPT14
LEGEIIDFY

SEQ ID NO: 76176 - protein, 9 aa, Homo sapiens
  Table A; Target 76176; HLA-B*18:01; SEPT14,EGFR-SEPT14 Fusion; ENSG00000154997,EGFR-SEPT14; TAA,EGFR-SEPT14
LEGEIIDFY

SEQ ID NO: 76177 - protein, 9 aa, Homo sapiens
  Table A; Target 76177; HLA-B*27:02; SEPT14,EGFR-SEPT14 Fusion; ENSG00000154997,EGFR-SEPT14; TAA,EGFR-SEPT14
LEGEIIDFY

SEQ ID NO: 76178 - protein, 9 aa, Homo sapiens
  Table A; Target 76178; HLA-B*44:02; SEPT14,EGFR-SEPT14 Fusion; ENSG00000154997,EGFR-SEPT14; TAA,EGFR-SEPT14
LEGEIIDFY

SEQ ID NO: 76179 - protein, 9 aa, Homo sapiens
  Table A; Target 76179; HLA-B*44:03; SEPT14,EGFR-SEPT14 Fusion; ENSG00000154997,EGFR-SEPT14; TAA,EGFR-SEPT14
LEGEIIDFY

SEQ ID NO: 76180 - protein, 9 aa, Homo sapiens
  Table A; Target 76180; HLA-C*07:01; SEPT14,EGFR-SEPT14 Fusion; ENSG00000154997,EGFR-SEPT14; TAA,EGFR-SEPT14
LEGEIIDFY

SEQ ID NO: 76181 - protein, 9 aa, Homo sapiens
  Table A; Target 76181; HLA-C*16:04; SEPT14,EGFR-SEPT14 Fusion; ENSG00000154997,EGFR-SEPT14; TAA,EGFR-SEPT14
LEGEIIDFY

SEQ ID NO: 76182 - protein, 10 aa, Homo sapiens
  Table A; Target 76182; HLA-B*27:02; SEPT14,EGFR-SEPT14 Fusion; ENSG00000154997,EGFR-SEPT14; TAA,EGFR-SEPT14
LEGEIIDFYK

SEQ ID NO: 76183 - protein, 8 aa, Homo sapiens
  Table A; Target 76183; HLA-C*05:01; SEPT14,EGFR-SEPT14 Fusion; ENSG00000154997,EGFR-SEPT14; TAA,EGFR-SEPT14
LQDKFEHL

SEQ ID NO: 76184 - protein, 10 aa, Homo sapiens
  Table A; Target 76184; HLA-B*27:02; SEPT14,EGFR-SEPT14 Fusion; ENSG00000154997,EGFR-SEPT14; TAA,EGFR-SEPT14
LQTQLSTDTK

SEQ ID NO: 76185 - protein, 9 aa, Homo sapiens
  Table A; Target 76185; HLA-A*03:02; SEPT14,EGFR-SEPT14 Fusion; ENSG00000154997,EGFR-SEPT14; TAA,EGFR-SEPT14
MIQQEEIRK

SEQ ID NO: 76186 - protein, 8 aa, Homo sapiens
  Table A; Target 76186; HLA-C*07:01; SEPT14,EGFR-SEPT14 Fusion; ENSG00000154997,EGFR-SEPT14; TAA,EGFR-SEPT14
QDKFEHLK

SEQ ID NO: 76187 - protein, 10 aa, Homo sapiens
  Table A; Target 76187; HLA-A*01:01; SEPT14,EGFR-SEPT14 Fusion; ENSG00000154997,EGFR-SEPT14; TAA,EGFR-SEPT14
QLEGEIIDFY

SEQ ID NO: 76188 - protein, 9 aa, Homo sapiens
  Table A; Target 76188; HLA-A*01:01; SEPT14,EGFR-SEPT14 Fusion; ENSG00000154997,EGFR-SEPT14; TAA,EGFR-SEPT14
QTQLSTDTK

SEQ ID NO: 76189 - protein, 9 aa, Homo sapiens
  Table A; Target 76189; HLA-A*03:02; SEPT14,EGFR-SEPT14 Fusion; ENSG00000154997,EGFR-SEPT14; TAA,EGFR-SEPT14
QTQLSTDTK

SEQ ID NO: 76190 - protein, 9 aa, Homo sapiens
  Table A; Target 76190; HLA-A*11:01; SEPT14,EGFR-SEPT14 Fusion; ENSG00000154997,EGFR-SEPT14; TAA,EGFR-SEPT14
QTQLSTDTK

SEQ ID NO: 76191 - protein, 9 aa, Homo sapiens
  Table A; Target 76191; HLA-B*27:02; SEPT14,EGFR-SEPT14 Fusion; ENSG00000154997,EGFR-SEPT14; TAA,EGFR-SEPT14
QTQLSTDTK

SEQ ID NO: 76192 - protein, 9 aa, Homo sapiens
  Table A; Target 76192; HLA-C*07:06; SEPT14,EGFR-SEPT14 Fusion; ENSG00000154997,EGFR-SEPT14; TAA,EGFR-SEPT14
QTQLSTDTK

SEQ ID NO: 76193 - protein, 10 aa, Homo sapiens
  Table A; Target 76193; HLA-A*03:02; SEPT14,EGFR-SEPT14 Fusion; ENSG00000154997,EGFR-SEPT14; TAA,EGFR-SEPT14
QTQLSTDTKK

SEQ ID NO: 76194 - protein, 10 aa, Homo sapiens
  Table A; Target 76194; HLA-A*11:01; SEPT14,EGFR-SEPT14 Fusion; ENSG00000154997,EGFR-SEPT14; TAA,EGFR-SEPT14
QTQLSTDTKK

SEQ ID NO: 76195 - protein, 8 aa, Homo sapiens
  Table A; Target 76195; HLA-A*30:01; SEPT14,EGFR-SEPT14 Fusion; ENSG00000154997,EGFR-SEPT14; TAA,EGFR-SEPT14
SEALQTQL

SEQ ID NO: 76196 - protein, 8 aa, Homo sapiens
  Table A; Target 76196; HLA-B*18:01; SEPT14,EGFR-SEPT14 Fusion; ENSG00000154997,EGFR-SEPT14; TAA,EGFR-SEPT14
SEALQTQL

SEQ ID NO: 76197 - protein, 8 aa, Homo sapiens
  Table A; Target 76197; HLA-B*37:01; SEPT14,EGFR-SEPT14 Fusion; ENSG00000154997,EGFR-SEPT14; TAA,EGFR-SEPT14
SEALQTQL

SEQ ID NO: 76198 - protein, 8 aa, Homo sapiens
  Table A; Target 76198; HLA-B*39:01; SEPT14,EGFR-SEPT14 Fusion; ENSG00000154997,EGFR-SEPT14; TAA,EGFR-SEPT14
SEALQTQL

SEQ ID NO: 76199 - protein, 8 aa, Homo sapiens
  Table A; Target 76199; HLA-B*40:01; SEPT14,EGFR-SEPT14 Fusion; ENSG00000154997,EGFR-SEPT14; TAA,EGFR-SEPT14
SEALQTQL

SEQ ID NO: 76200 - protein, 8 aa, Homo sapiens
  Table A; Target 76200; HLA-B*40:02; SEPT14,EGFR-SEPT14 Fusion; ENSG00000154997,EGFR-SEPT14; TAA,EGFR-SEPT14
SEALQTQL

SEQ ID NO: 76201 - protein, 8 aa, Homo sapiens
  Table A; Target 76201; HLA-B*44:02; SEPT14,EGFR-SEPT14 Fusion; ENSG00000154997,EGFR-SEPT14; TAA,EGFR-SEPT14
SEALQTQL

SEQ ID NO: 76202 - protein, 8 aa, Homo sapiens
  Table A; Target 76202; HLA-B*44:03; SEPT14,EGFR-SEPT14 Fusion; ENSG00000154997,EGFR-SEPT14; TAA,EGFR-SEPT14
SEALQTQL

SEQ ID NO: 76203 - protein, 8 aa, Homo sapiens
  Table A; Target 76203; HLA-B*49:01; SEPT14,EGFR-SEPT14 Fusion; ENSG00000154997,EGFR-SEPT14; TAA,EGFR-SEPT14
SEALQTQL

SEQ ID NO: 76204 - protein, 9 aa, Homo sapiens
  Table A; Target 76204; HLA-B*49:01; SEPT14,EGFR-SEPT14 Fusion; ENSG00000154997,EGFR-SEPT14; TAA,EGFR-SEPT14
SEALQTQLS

SEQ ID NO: 76205 - protein, 10 aa, Homo sapiens
  Table A; Target 76205; HLA-B*15:03; SEPT14,EGFR-SEPT14 Fusion; ENSG00000154997,EGFR-SEPT14; TAA,EGFR-SEPT14
YKMKAASEAL

SEQ ID NO: 76206 - protein, 10 aa, Homo sapiens
  Table A; Target 76206; HLA-A*26:01; SLC13A1; ENSG00000081800; TAA
ACAEVIKQEY

SEQ ID NO: 76207 - protein, 10 aa, Homo sapiens
  Table A; Target 76207; HLA-A*29:02; SLC13A1; ENSG00000081800; TAA
ACAEVIKQEY

SEQ ID NO: 76208 - protein, 10 aa, Homo sapiens
  Table A; Target 76208; HLA-A*30:02; SLC13A1; ENSG00000081800; TAA
ACAEVIKQEY

SEQ ID NO: 76209 - protein, 10 aa, Homo sapiens
  Table A; Target 76209; HLA-A*32:01; SLC13A1; ENSG00000081800; TAA
ACAEVIKQEY

SEQ ID NO: 76210 - protein, 10 aa, Homo sapiens
  Table A; Target 76210; HLA-B*15:01; SLC13A1; ENSG00000081800; TAA
ACAEVIKQEY

SEQ ID NO: 76211 - protein, 10 aa, Homo sapiens
  Table A; Target 76211; HLA-B*15:03; SLC13A1; ENSG00000081800; TAA
ACAEVIKQEY

SEQ ID NO: 76212 - protein, 10 aa, Homo sapiens
  Table A; Target 76212; HLA-B*44:02; SLC13A1; ENSG00000081800; TAA
ACAEVIKQEY

SEQ ID NO: 76213 - protein, 10 aa, Homo sapiens
  Table A; Target 76213; HLA-B*44:03; SLC13A1; ENSG00000081800; TAA
ACAEVIKQEY

SEQ ID NO: 76214 - protein, 10 aa, Homo sapiens
  Table A; Target 76214; HLA-B*46:01; SLC13A1; ENSG00000081800; TAA
ACAEVIKQEY

SEQ ID NO: 76215 - protein, 10 aa, Homo sapiens
  Table A; Target 76215; HLA-B*58:01; SLC13A1; ENSG00000081800; TAA
ACAEVIKQEY

SEQ ID NO: 76216 - protein, 10 aa, Homo sapiens
  Table A; Target 76216; HLA-C*02:02; SLC13A1; ENSG00000081800; TAA
ACAEVIKQEY

SEQ ID NO: 76217 - protein, 10 aa, Homo sapiens
  Table A; Target 76217; HLA-C*12:03; SLC13A1; ENSG00000081800; TAA
ACAEVIKQEY

SEQ ID NO: 76218 - protein, 10 aa, Homo sapiens
  Table A; Target 76218; HLA-C*16:01; SLC13A1; ENSG00000081800; TAA
ACAEVIKQEY

SEQ ID NO: 76219 - protein, 10 aa, Homo sapiens
  Table A; Target 76219; HLA-C*16:02; SLC13A1; ENSG00000081800; TAA
ACAEVIKQEY

SEQ ID NO: 76220 - protein, 10 aa, Homo sapiens
  Table A; Target 76220; HLA-C*16:04; SLC13A1; ENSG00000081800; TAA
ACAEVIKQEY

SEQ ID NO: 76221 - protein, 10 aa, Homo sapiens
  Table A; Target 76221; HLA-A*30:01; SLC13A1; ENSG00000081800; TAA
AEAEVEATQM

SEQ ID NO: 76222 - protein, 10 aa, Homo sapiens
  Table A; Target 76222; HLA-B*40:01; SLC13A1; ENSG00000081800; TAA
AEAEVEATQM

SEQ ID NO: 76223 - protein, 10 aa, Homo sapiens
  Table A; Target 76223; HLA-B*44:02; SLC13A1; ENSG00000081800; TAA
AEAEVEATQM

SEQ ID NO: 76224 - protein, 10 aa, Homo sapiens
  Table A; Target 76224; HLA-B*44:03; SLC13A1; ENSG00000081800; TAA
AEAEVEATQM

SEQ ID NO: 76225 - protein, 10 aa, Homo sapiens
  Table A; Target 76225; HLA-B*49:01; SLC13A1; ENSG00000081800; TAA
AEAEVEATQM

SEQ ID NO: 76226 - protein, 10 aa, Homo sapiens
  Table A; Target 76226; HLA-C*16:04; SLC13A1; ENSG00000081800; TAA
AEAEVEATQM

SEQ ID NO: 76227 - protein, 9 aa, Homo sapiens
  Table A; Target 76227; HLA-A*30:01; SLC13A1; ENSG00000081800; TAA
AEAIHVNPL

SEQ ID NO: 76228 - protein, 9 aa, Homo sapiens
  Table A; Target 76228; HLA-B*37:01; SLC13A1; ENSG00000081800; TAA
AEAIHVNPL

SEQ ID NO: 76229 - protein, 9 aa, Homo sapiens
  Table A; Target 76229; HLA-B*40:01; SLC13A1; ENSG00000081800; TAA
AEAIHVNPL

SEQ ID NO: 76230 - protein, 9 aa, Homo sapiens
  Table A; Target 76230; HLA-B*40:02; SLC13A1; ENSG00000081800; TAA
AEAIHVNPL

SEQ ID NO: 76231 - protein, 9 aa, Homo sapiens
  Table A; Target 76231; HLA-B*49:01; SLC13A1; ENSG00000081800; TAA
AEAIHVNPL

SEQ ID NO: 76232 - protein, 10 aa, Homo sapiens
  Table A; Target 76232; HLA-B*44:02; SLC13A1; ENSG00000081800; TAA
AEAIHVNPLY

SEQ ID NO: 76233 - protein, 10 aa, Homo sapiens
  Table A; Target 76233; HLA-B*44:03; SLC13A1; ENSG00000081800; TAA
AEAIHVNPLY

SEQ ID NO: 76234 - protein, 10 aa, Homo sapiens
  Table A; Target 76234; HLA-C*16:04; SLC13A1; ENSG00000081800; TAA
AEAIHVNPLY

SEQ ID NO: 76235 - protein, 8 aa, Homo sapiens
  Table A; Target 76235; HLA-A*30:01; SLC13A1; ENSG00000081800; TAA
AEAVVQQI

SEQ ID NO: 76236 - protein, 8 aa, Homo sapiens
  Table A; Target 76236; HLA-B*37:01; SLC13A1; ENSG00000081800; TAA
AEAVVQQI

SEQ ID NO: 76237 - protein, 8 aa, Homo sapiens
  Table A; Target 76237; HLA-B*44:03; SLC13A1; ENSG00000081800; TAA
AEAVVQQI

SEQ ID NO: 76238 - protein, 8 aa, Homo sapiens
  Table A; Target 76238; HLA-B*49:01; SLC13A1; ENSG00000081800; TAA
AEAVVQQI

SEQ ID NO: 76239 - protein, 9 aa, Homo sapiens
  Table A; Target 76239; HLA-A*30:01; SLC13A1; ENSG00000081800; TAA
AEAVVQQII

SEQ ID NO: 76240 - protein, 9 aa, Homo sapiens
  Table A; Target 76240; HLA-B*13:02; SLC13A1; ENSG00000081800; TAA
AEAVVQQII

SEQ ID NO: 76241 - protein, 9 aa, Homo sapiens
  Table A; Target 76241; HLA-B*40:01; SLC13A1; ENSG00000081800; TAA
AEAVVQQII

SEQ ID NO: 76242 - protein, 9 aa, Homo sapiens
  Table A; Target 76242; HLA-B*44:02; SLC13A1; ENSG00000081800; TAA
AEAVVQQII

SEQ ID NO: 76243 - protein, 9 aa, Homo sapiens
  Table A; Target 76243; HLA-B*44:03; SLC13A1; ENSG00000081800; TAA
AEAVVQQII

SEQ ID NO: 76244 - protein, 9 aa, Homo sapiens
  Table A; Target 76244; HLA-B*49:01; SLC13A1; ENSG00000081800; TAA
AEAVVQQII

SEQ ID NO: 76245 - protein, 9 aa, Homo sapiens
  Table A; Target 76245; HLA-C*16:04; SLC13A1; ENSG00000081800; TAA
AEAVVQQII

SEQ ID NO: 76246 - protein, 9 aa, Homo sapiens
  Table A; Target 76246; HLA-B*49:01; SLC13A1; ENSG00000081800; TAA
AECAYTLFV

SEQ ID NO: 76247 - protein, 8 aa, Homo sapiens
  Table A; Target 76247; HLA-A*30:01; SLC13A1; ENSG00000081800; TAA
AEVEATQM

SEQ ID NO: 76248 - protein, 8 aa, Homo sapiens
  Table A; Target 76248; HLA-B*18:01; SLC13A1; ENSG00000081800; TAA
AEVEATQM

SEQ ID NO: 76249 - protein, 8 aa, Homo sapiens
  Table A; Target 76249; HLA-B*37:01; SLC13A1; ENSG00000081800; TAA
AEVEATQM

SEQ ID NO: 76250 - protein, 8 aa, Homo sapiens
  Table A; Target 76250; HLA-B*40:01; SLC13A1; ENSG00000081800; TAA
AEVEATQM

SEQ ID NO: 76251 - protein, 8 aa, Homo sapiens
  Table A; Target 76251; HLA-B*44:02; SLC13A1; ENSG00000081800; TAA
AEVEATQM

SEQ ID NO: 76252 - protein, 8 aa, Homo sapiens
  Table A; Target 76252; HLA-B*44:03; SLC13A1; ENSG00000081800; TAA
AEVEATQM

SEQ ID NO: 76253 - protein, 8 aa, Homo sapiens
  Table A; Target 76253; HLA-B*49:01; SLC13A1; ENSG00000081800; TAA
AEVEATQM

SEQ ID NO: 76254 - protein, 9 aa, Homo sapiens
  Table A; Target 76254; HLA-A*30:01; SLC13A1; ENSG00000081800; TAA
AEVEATQMT

SEQ ID NO: 76255 - protein, 9 aa, Homo sapiens
  Table A; Target 76255; HLA-B*44:03; SLC13A1; ENSG00000081800; TAA
AEVEATQMT

SEQ ID NO: 76256 - protein, 9 aa, Homo sapiens
  Table A; Target 76256; HLA-B*49:01; SLC13A1; ENSG00000081800; TAA
AEVEATQMT

SEQ ID NO: 76257 - protein, 10 aa, Homo sapiens
  Table A; Target 76257; HLA-A*25:01; SLC13A1; ENSG00000081800; TAA
AEVEATQMTY

SEQ ID NO: 76258 - protein, 10 aa, Homo sapiens
  Table A; Target 76258; HLA-A*30:01; SLC13A1; ENSG00000081800; TAA
AEVEATQMTY

SEQ ID NO: 76259 - protein, 10 aa, Homo sapiens
  Table A; Target 76259; HLA-A*30:02; SLC13A1; ENSG00000081800; TAA
AEVEATQMTY

SEQ ID NO: 76260 - protein, 10 aa, Homo sapiens
  Table A; Target 76260; HLA-B*15:01; SLC13A1; ENSG00000081800; TAA
AEVEATQMTY

SEQ ID NO: 76261 - protein, 10 aa, Homo sapiens
  Table A; Target 76261; HLA-B*15:03; SLC13A1; ENSG00000081800; TAA
AEVEATQMTY

SEQ ID NO: 76262 - protein, 10 aa, Homo sapiens
  Table A; Target 76262; HLA-B*18:01; SLC13A1; ENSG00000081800; TAA
AEVEATQMTY

SEQ ID NO: 76263 - protein, 10 aa, Homo sapiens
  Table A; Target 76263; HLA-B*27:02; SLC13A1; ENSG00000081800; TAA
AEVEATQMTY

SEQ ID NO: 76264 - protein, 10 aa, Homo sapiens
  Table A; Target 76264; HLA-B*40:01; SLC13A1; ENSG00000081800; TAA
AEVEATQMTY

SEQ ID NO: 76265 - protein, 10 aa, Homo sapiens
  Table A; Target 76265; HLA-B*44:02; SLC13A1; ENSG00000081800; TAA
AEVEATQMTY

SEQ ID NO: 76266 - protein, 10 aa, Homo sapiens
  Table A; Target 76266; HLA-B*44:03; SLC13A1; ENSG00000081800; TAA
AEVEATQMTY

SEQ ID NO: 76267 - protein, 10 aa, Homo sapiens
  Table A; Target 76267; HLA-B*49:01; SLC13A1; ENSG00000081800; TAA
AEVEATQMTY

SEQ ID NO: 76268 - protein, 10 aa, Homo sapiens
  Table A; Target 76268; HLA-C*02:02; SLC13A1; ENSG00000081800; TAA
AEVEATQMTY

SEQ ID NO: 76269 - protein, 10 aa, Homo sapiens
  Table A; Target 76269; HLA-C*16:04; SLC13A1; ENSG00000081800; TAA
AEVEATQMTY

SEQ ID NO: 76270 - protein, 11 aa, Homo sapiens
  Table A; Target 76270; HLA-A*30:01; SLC13A1; ENSG00000081800; TAA
AEVEATQMTYF

SEQ ID NO: 76271 - protein, 11 aa, Homo sapiens
  Table A; Target 76271; HLA-B*40:01; SLC13A1; ENSG00000081800; TAA
AEVEATQMTYF

SEQ ID NO: 76272 - protein, 11 aa, Homo sapiens
  Table A; Target 76272; HLA-B*44:02; SLC13A1; ENSG00000081800; TAA
AEVEATQMTYF

SEQ ID NO: 76273 - protein, 11 aa, Homo sapiens
  Table A; Target 76273; HLA-B*44:03; SLC13A1; ENSG00000081800; TAA
AEVEATQMTYF

SEQ ID NO: 76274 - protein, 11 aa, Homo sapiens
  Table A; Target 76274; HLA-B*49:01; SLC13A1; ENSG00000081800; TAA
AEVEATQMTYF

SEQ ID NO: 76275 - protein, 11 aa, Homo sapiens
  Table A; Target 76275; HLA-C*16:04; SLC13A1; ENSG00000081800; TAA
AEVEATQMTYF

SEQ ID NO: 76276 - protein, 8 aa, Homo sapiens
  Table A; Target 76276; HLA-B*15:03; SLC13A1; ENSG00000081800; TAA
AEVIKQEY

SEQ ID NO: 76277 - protein, 8 aa, Homo sapiens
  Table A; Target 76277; HLA-B*18:01; SLC13A1; ENSG00000081800; TAA
AEVIKQEY

SEQ ID NO: 76278 - protein, 8 aa, Homo sapiens
  Table A; Target 76278; HLA-B*27:02; SLC13A1; ENSG00000081800; TAA
AEVIKQEY

SEQ ID NO: 76279 - protein, 8 aa, Homo sapiens
  Table A; Target 76279; HLA-B*37:01; SLC13A1; ENSG00000081800; TAA
AEVIKQEY

SEQ ID NO: 76280 - protein, 8 aa, Homo sapiens
  Table A; Target 76280; HLA-B*44:02; SLC13A1; ENSG00000081800; TAA
AEVIKQEY

SEQ ID NO: 76281 - protein, 8 aa, Homo sapiens
  Table A; Target 76281; HLA-B*44:03; SLC13A1; ENSG00000081800; TAA
AEVIKQEY

SEQ ID NO: 76282 - protein, 8 aa, Homo sapiens
  Table A; Target 76282; HLA-C*16:01; SLC13A1; ENSG00000081800; TAA
AEVIKQEY

SEQ ID NO: 76283 - protein, 8 aa, Homo sapiens
  Table A; Target 76283; HLA-C*16:04; SLC13A1; ENSG00000081800; TAA
AEVIKQEY

SEQ ID NO: 76284 - protein, 8 aa, Homo sapiens
  Table A; Target 76284; HLA-A*30:02; SLC13A1; ENSG00000081800; TAA
AIHVNPLY

SEQ ID NO: 76285 - protein, 9 aa, Homo sapiens
  Table A; Target 76285; HLA-B*13:02; SLC13A1; ENSG00000081800; TAA
AIHVNPLYI

SEQ ID NO: 76286 - protein, 9 aa, Homo sapiens
  Table A; Target 76286; HLA-A*02:07; SLC13A1; ENSG00000081800; TAA
ALFSEYPGF

SEQ ID NO: 76287 - protein, 10 aa, Homo sapiens
  Table A; Target 76287; HLA-A*02:03; SLC13A1; ENSG00000081800; TAA
ALFSEYPGFA

SEQ ID NO: 76288 - protein, 9 aa, Homo sapiens
  Table A; Target 76288; HLA-C*01:02; SLC13A1; ENSG00000081800; TAA
ALPLSVTAL

SEQ ID NO: 76289 - protein, 9 aa, Homo sapiens
  Table A; Target 76289; HLA-A*02:01; SLC13A1; ENSG00000081800; TAA
AMVMPIAEA

SEQ ID NO: 76290 - protein, 9 aa, Homo sapiens
  Table A; Target 76290; HLA-A*02:03; SLC13A1; ENSG00000081800; TAA
AMVMPIAEA

SEQ ID NO: 76291 - protein, 9 aa, Homo sapiens
  Table A; Target 76291; HLA-B*56:01; SLC13A1; ENSG00000081800; TAA
AMVMPIAEA

SEQ ID NO: 76292 - protein, 11 aa, Homo sapiens
  Table A; Target 76292; HLA-A*29:02; SLC13A1; ENSG00000081800; TAA
ANPPNAIVFSY

SEQ ID NO: 76293 - protein, 9 aa, Homo sapiens
  Table A; Target 76293; HLA-B*07:02; SLC13A1; ENSG00000081800; TAA
APAMSNETM

SEQ ID NO: 76294 - protein, 9 aa, Homo sapiens
  Table A; Target 76294; HLA-B*35:03; SLC13A1; ENSG00000081800; TAA
APAMSNETM

SEQ ID NO: 76295 - protein, 9 aa, Homo sapiens
  Table A; Target 76295; HLA-A*23:01; SLC13A1; ENSG00000081800; TAA
ASNPATITL

SEQ ID NO: 76296 - protein, 9 aa, Homo sapiens
  Table A; Target 76296; HLA-A*32:01; SLC13A1; ENSG00000081800; TAA
ASNPATITL

SEQ ID NO: 76297 - protein, 9 aa, Homo sapiens
  Table A; Target 76297; HLA-B*15:01; SLC13A1; ENSG00000081800; TAA
ASNPATITL

SEQ ID NO: 76298 - protein, 9 aa, Homo sapiens
  Table A; Target 76298; HLA-B*46:01; SLC13A1; ENSG00000081800; TAA
ASNPATITL

SEQ ID NO: 76299 - protein, 9 aa, Homo sapiens
  Table A; Target 76299; HLA-B*58:01; SLC13A1; ENSG00000081800; TAA
ASNPATITL

SEQ ID NO: 76300 - protein, 9 aa, Homo sapiens
  Table A; Target 76300; HLA-C*01:02; SLC13A1; ENSG00000081800; TAA
ASNPATITL

SEQ ID NO: 76301 - protein, 9 aa, Homo sapiens
  Table A; Target 76301; HLA-C*02:02; SLC13A1; ENSG00000081800; TAA
ASNPATITL

SEQ ID NO: 76302 - protein, 9 aa, Homo sapiens
  Table A; Target 76302; HLA-C*03:03; SLC13A1; ENSG00000081800; TAA
ASNPATITL

SEQ ID NO: 76303 - protein, 9 aa, Homo sapiens
  Table A; Target 76303; HLA-C*03:04; SLC13A1; ENSG00000081800; TAA
ASNPATITL

SEQ ID NO: 76304 - protein, 9 aa, Homo sapiens
  Table A; Target 76304; HLA-C*05:01; SLC13A1; ENSG00000081800; TAA
ASNPATITL

SEQ ID NO: 76305 - protein, 9 aa, Homo sapiens
  Table A; Target 76305; HLA-C*16:01; SLC13A1; ENSG00000081800; TAA
ASNPATITL

SEQ ID NO: 76306 - protein, 9 aa, Homo sapiens
  Table A; Target 76306; HLA-C*16:04; SLC13A1; ENSG00000081800; TAA
ASNPATITL

SEQ ID NO: 76307 - protein, 10 aa, Homo sapiens
  Table A; Target 76307; HLA-A*23:01; SLC13A1; ENSG00000081800; TAA
ASNPATITLF

SEQ ID NO: 76308 - protein, 10 aa, Homo sapiens
  Table A; Target 76308; HLA-A*30:02; SLC13A1; ENSG00000081800; TAA
ASNPATITLF

SEQ ID NO: 76309 - protein, 10 aa, Homo sapiens
  Table A; Target 76309; HLA-B*58:01; SLC13A1; ENSG00000081800; TAA
ASNPATITLF

SEQ ID NO: 76310 - protein, 8 aa, Homo sapiens
  Table A; Target 76310; HLA-C*05:01; SLC13A1; ENSG00000081800; TAA
ATDSTVAL

SEQ ID NO: 76311 - protein, 9 aa, Homo sapiens
  Table A; Target 76311; HLA-A*01:01; SLC13A1; ENSG00000081800; TAA
ATDSTVALL

SEQ ID NO: 76312 - protein, 9 aa, Homo sapiens
  Table A; Target 76312; HLA-A*02:07; SLC13A1; ENSG00000081800; TAA
ATDSTVALL

SEQ ID NO: 76313 - protein, 9 aa, Homo sapiens
  Table A; Target 76313; HLA-C*05:01; SLC13A1; ENSG00000081800; TAA
ATDSTVALL

SEQ ID NO: 76314 - protein, 10 aa, Homo sapiens
  Table A; Target 76314; HLA-A*01:01; SLC13A1; ENSG00000081800; TAA
ATDSTVALLI

SEQ ID NO: 76315 - protein, 10 aa, Homo sapiens
  Table A; Target 76315; HLA-A*25:01; SLC13A1; ENSG00000081800; TAA
AVVMLGICTW

SEQ ID NO: 76316 - protein, 9 aa, Homo sapiens
  Table A; Target 76316; HLA-A*23:01; SLC13A1; ENSG00000081800; TAA
AYFKDFHLL

SEQ ID NO: 76317 - protein, 9 aa, Homo sapiens
  Table A; Target 76317; HLA-A*24:02; SLC13A1; ENSG00000081800; TAA
AYFKDFHLL

SEQ ID NO: 76318 - protein, 10 aa, Homo sapiens
  Table A; Target 76318; HLA-A*23:01; SLC13A1; ENSG00000081800; TAA
AYTLFVVATF

SEQ ID NO: 76319 - protein, 10 aa, Homo sapiens
  Table A; Target 76319; HLA-A*24:02; SLC13A1; ENSG00000081800; TAA
AYTLFVVATF

SEQ ID NO: 76320 - protein, 9 aa, Homo sapiens
  Table A; Target 76320; HLA-A*01:01; SLC13A1; ENSG00000081800; TAA
CAEVIKQEY

SEQ ID NO: 76321 - protein, 9 aa, Homo sapiens
  Table A; Target 76321; HLA-A*29:02; SLC13A1; ENSG00000081800; TAA
CAEVIKQEY

SEQ ID NO: 76322 - protein, 9 aa, Homo sapiens
  Table A; Target 76322; HLA-A*30:02; SLC13A1; ENSG00000081800; TAA
CAEVIKQEY

SEQ ID NO: 76323 - protein, 9 aa, Homo sapiens
  Table A; Target 76323; HLA-B*15:01; SLC13A1; ENSG00000081800; TAA
CAEVIKQEY

SEQ ID NO: 76324 - protein, 9 aa, Homo sapiens
  Table A; Target 76324; HLA-B*15:03; SLC13A1; ENSG00000081800; TAA
CAEVIKQEY

SEQ ID NO: 76325 - protein, 9 aa, Homo sapiens
  Table A; Target 76325; HLA-B*18:01; SLC13A1; ENSG00000081800; TAA
CAEVIKQEY

SEQ ID NO: 76326 - protein, 9 aa, Homo sapiens
  Table A; Target 76326; HLA-B*35:01; SLC13A1; ENSG00000081800; TAA
CAEVIKQEY

SEQ ID NO: 76327 - protein, 9 aa, Homo sapiens
  Table A; Target 76327; HLA-B*46:01; SLC13A1; ENSG00000081800; TAA
CAEVIKQEY

SEQ ID NO: 76328 - protein, 9 aa, Homo sapiens
  Table A; Target 76328; HLA-B*55:01; SLC13A1; ENSG00000081800; TAA
CAEVIKQEY

SEQ ID NO: 76329 - protein, 9 aa, Homo sapiens
  Table A; Target 76329; HLA-B*58:01; SLC13A1; ENSG00000081800; TAA
CAEVIKQEY

SEQ ID NO: 76330 - protein, 9 aa, Homo sapiens
  Table A; Target 76330; HLA-C*01:02; SLC13A1; ENSG00000081800; TAA
CAEVIKQEY

SEQ ID NO: 76331 - protein, 9 aa, Homo sapiens
  Table A; Target 76331; HLA-C*02:02; SLC13A1; ENSG00000081800; TAA
CAEVIKQEY

SEQ ID NO: 76332 - protein, 9 aa, Homo sapiens
  Table A; Target 76332; HLA-C*03:03; SLC13A1; ENSG00000081800; TAA
CAEVIKQEY

SEQ ID NO: 76333 - protein, 9 aa, Homo sapiens
  Table A; Target 76333; HLA-C*07:06; SLC13A1; ENSG00000081800; TAA
CAEVIKQEY

SEQ ID NO: 76334 - protein, 9 aa, Homo sapiens
  Table A; Target 76334; HLA-C*12:03; SLC13A1; ENSG00000081800; TAA
CAEVIKQEY

SEQ ID NO: 76335 - protein, 9 aa, Homo sapiens
  Table A; Target 76335; HLA-C*16:01; SLC13A1; ENSG00000081800; TAA
CAEVIKQEY

SEQ ID NO: 76336 - protein, 9 aa, Homo sapiens
  Table A; Target 76336; HLA-C*16:02; SLC13A1; ENSG00000081800; TAA
CAEVIKQEY

SEQ ID NO: 76337 - protein, 9 aa, Homo sapiens
  Table A; Target 76337; HLA-C*16:04; SLC13A1; ENSG00000081800; TAA
CAEVIKQEY

SEQ ID NO: 76338 - protein, 9 aa, Homo sapiens
  Table A; Target 76338; HLA-B*44:02; SLC13A1; ENSG00000081800; TAA
CEESGLSKW

SEQ ID NO: 76339 - protein, 9 aa, Homo sapiens
  Table A; Target 76339; HLA-B*44:03; SLC13A1; ENSG00000081800; TAA
CEESGLSKW

SEQ ID NO: 76340 - protein, 9 aa, Homo sapiens
  Table A; Target 76340; HLA-B*18:01; SLC13A1; ENSG00000081800; TAA
DESVNGHEI

SEQ ID NO: 76341 - protein, 9 aa, Homo sapiens
  Table A; Target 76341; HLA-B*49:01; SLC13A1; ENSG00000081800; TAA
DESVNGHEI

SEQ ID NO: 76342 - protein, 10 aa, Homo sapiens
  Table A; Target 76342; HLA-A*25:01; SLC13A1; ENSG00000081800; TAA
DIAILVGGGF

SEQ ID NO: 76343 - protein, 10 aa, Homo sapiens
  Table A; Target 76343; HLA-A*26:01; SLC13A1; ENSG00000081800; TAA
DIAILVGGGF

SEQ ID NO: 76344 - protein, 8 aa, Homo sapiens
  Table A; Target 76344; HLA-A*25:01; SLC13A1; ENSG00000081800; TAA
DLYTYPSW

SEQ ID NO: 76345 - protein, 8 aa, Homo sapiens
  Table A; Target 76345; HLA-B*51:01; SLC13A1; ENSG00000081800; TAA
DSTVALLI

SEQ ID NO: 76346 - protein, 8 aa, Homo sapiens
  Table A; Target 76346; HLA-A*33:03; SLC13A1; ENSG00000081800; TAA
DYSPLITW

SEQ ID NO: 76347 - protein, 9 aa, Homo sapiens
  Table A; Target 76347; HLA-A*33:01; SLC13A1; ENSG00000081800; TAA
DYSPLITWK

SEQ ID NO: 76348 - protein, 9 aa, Homo sapiens
  Table A; Target 76348; HLA-A*33:03; SLC13A1; ENSG00000081800; TAA
DYSPLITWK

SEQ ID NO: 76349 - protein, 9 aa, Homo sapiens
  Table A; Target 76349; HLA-B*55:01; SLC13A1; ENSG00000081800; TAA
EAEVEATQM

SEQ ID NO: 76350 - protein, 9 aa, Homo sapiens
  Table A; Target 76350; HLA-C*05:01; SLC13A1; ENSG00000081800; TAA
EAEVEATQM

SEQ ID NO: 76351 - protein, 11 aa, Homo sapiens
  Table A; Target 76351; HLA-A*01:01; SLC13A1; ENSG00000081800; TAA
EAEVEATQMTY

SEQ ID NO: 76352 - protein, 11 aa, Homo sapiens
  Table A; Target 76352; HLA-B*35:01; SLC13A1; ENSG00000081800; TAA
EAEVEATQMTY

SEQ ID NO: 76353 - protein, 9 aa, Homo sapiens
  Table A; Target 76353; HLA-A*25:01; SLC13A1; ENSG00000081800; TAA
EAIHVNPLY

SEQ ID NO: 76354 - protein, 9 aa, Homo sapiens
  Table A; Target 76354; HLA-A*26:01; SLC13A1; ENSG00000081800; TAA
EAIHVNPLY

SEQ ID NO: 76355 - protein, 9 aa, Homo sapiens
  Table A; Target 76355; HLA-A*29:02; SLC13A1; ENSG00000081800; TAA
EAIHVNPLY

SEQ ID NO: 76356 - protein, 9 aa, Homo sapiens
  Table A; Target 76356; HLA-A*30:02; SLC13A1; ENSG00000081800; TAA
EAIHVNPLY

SEQ ID NO: 76357 - protein, 9 aa, Homo sapiens
  Table A; Target 76357; HLA-B*35:01; SLC13A1; ENSG00000081800; TAA
EAIHVNPLY

SEQ ID NO: 76358 - protein, 9 aa, Homo sapiens
  Table A; Target 76358; HLA-B*54:01; SLC13A1; ENSG00000081800; TAA
EALPLSVTA

SEQ ID NO: 76359 - protein, 9 aa, Homo sapiens
  Table A; Target 76359; HLA-B*56:01; SLC13A1; ENSG00000081800; TAA
EALPLSVTA

SEQ ID NO: 76360 - protein, 10 aa, Homo sapiens
  Table A; Target 76360; HLA-A*25:01; SLC13A1; ENSG00000081800; TAA
EALPLSVTAL

SEQ ID NO: 76361 - protein, 8 aa, Homo sapiens
  Table A; Target 76361; HLA-B*51:01; SLC13A1; ENSG00000081800; TAA
EAVVQQII

SEQ ID NO: 76362 - protein, 8 aa, Homo sapiens
  Table A; Target 76362; HLA-B*44:02; SLC13A1; ENSG00000081800; TAA
EESGLSKW

SEQ ID NO: 76363 - protein, 8 aa, Homo sapiens
  Table A; Target 76363; HLA-B*44:03; SLC13A1; ENSG00000081800; TAA
EESGLSKW

SEQ ID NO: 76364 - protein, 9 aa, Homo sapiens
  Table A; Target 76364; HLA-B*44:02; SLC13A1; ENSG00000081800; TAA
EESGLSKWI

SEQ ID NO: 76365 - protein, 9 aa, Homo sapiens
  Table A; Target 76365; HLA-A*68:02; SLC13A1; ENSG00000081800; TAA
EIVTLVLFI

SEQ ID NO: 76366 - protein, 9 aa, Homo sapiens
  Table A; Target 76366; HLA-B*15:03; SLC13A1; ENSG00000081800; TAA
EKTKPVPGY

SEQ ID NO: 76367 - protein, 11 aa, Homo sapiens
  Table A; Target 76367; HLA-A*33:03; SLC13A1; ENSG00000081800; TAA
ESVNGHEINER

SEQ ID NO: 76368 - protein, 11 aa, Homo sapiens
  Table A; Target 76368; HLA-A*68:01; SLC13A1; ENSG00000081800; TAA
ESVNGHEINER

SEQ ID NO: 76369 - protein, 11 aa, Homo sapiens
  Table A; Target 76369; HLA-C*07:06; SLC13A1; ENSG00000081800; TAA
ESVNGHEINER

SEQ ID NO: 76370 - protein, 9 aa, Homo sapiens
  Table A; Target 76370; HLA-A*25:01; SLC13A1; ENSG00000081800; TAA
EVASNPATI

SEQ ID NO: 76371 - protein, 9 aa, Homo sapiens
  Table A; Target 76371; HLA-A*26:01; SLC13A1; ENSG00000081800; TAA
EVASNPATI

SEQ ID NO: 76372 - protein, 9 aa, Homo sapiens
  Table A; Target 76372; HLA-A*68:01; SLC13A1; ENSG00000081800; TAA
EVASNPATI

SEQ ID NO: 76373 - protein, 9 aa, Homo sapiens
  Table A; Target 76373; HLA-A*68:02; SLC13A1; ENSG00000081800; TAA
EVASNPATI

SEQ ID NO: 76374 - protein, 11 aa, Homo sapiens
  Table A; Target 76374; HLA-A*25:01; SLC13A1; ENSG00000081800; TAA
EVASNPATITL

SEQ ID NO: 76375 - protein, 11 aa, Homo sapiens
  Table A; Target 76375; HLA-A*26:01; SLC13A1; ENSG00000081800; TAA
EVASNPATITL

SEQ ID NO: 76376 - protein, 11 aa, Homo sapiens
  Table A; Target 76376; HLA-A*68:01; SLC13A1; ENSG00000081800; TAA
EVASNPATITL

SEQ ID NO: 76377 - protein, 11 aa, Homo sapiens
  Table A; Target 76377; HLA-A*68:02; SLC13A1; ENSG00000081800; TAA
EVASNPATITL

SEQ ID NO: 76378 - protein, 11 aa, Homo sapiens
  Table A; Target 76378; HLA-C*07:06; SLC13A1; ENSG00000081800; TAA
EVASNPATITL

SEQ ID NO: 76379 - protein, 9 aa, Homo sapiens
  Table A; Target 76379; HLA-A*01:01; SLC13A1; ENSG00000081800; TAA
EVEATQMTY

SEQ ID NO: 76380 - protein, 9 aa, Homo sapiens
  Table A; Target 76380; HLA-A*25:01; SLC13A1; ENSG00000081800; TAA
EVEATQMTY

SEQ ID NO: 76381 - protein, 9 aa, Homo sapiens
  Table A; Target 76381; HLA-A*26:01; SLC13A1; ENSG00000081800; TAA
EVEATQMTY

SEQ ID NO: 76382 - protein, 9 aa, Homo sapiens
  Table A; Target 76382; HLA-A*30:02; SLC13A1; ENSG00000081800; TAA
EVEATQMTY

SEQ ID NO: 76383 - protein, 9 aa, Homo sapiens
  Table A; Target 76383; HLA-A*33:03; SLC13A1; ENSG00000081800; TAA
EVEATQMTY

SEQ ID NO: 76384 - protein, 9 aa, Homo sapiens
  Table A; Target 76384; HLA-A*68:01; SLC13A1; ENSG00000081800; TAA
EVEATQMTY

SEQ ID NO: 76385 - protein, 9 aa, Homo sapiens
  Table A; Target 76385; HLA-B*18:01; SLC13A1; ENSG00000081800; TAA
EVEATQMTY

SEQ ID NO: 76386 - protein, 9 aa, Homo sapiens
  Table A; Target 76386; HLA-B*35:01; SLC13A1; ENSG00000081800; TAA
EVEATQMTY

SEQ ID NO: 76387 - protein, 9 aa, Homo sapiens
  Table A; Target 76387; HLA-C*07:06; SLC13A1; ENSG00000081800; TAA
EVEATQMTY

SEQ ID NO: 76388 - protein, 10 aa, Homo sapiens
  Table A; Target 76388; HLA-A*25:01; SLC13A1; ENSG00000081800; TAA
EVEATQMTYF

SEQ ID NO: 76389 - protein, 10 aa, Homo sapiens
  Table A; Target 76389; HLA-A*26:01; SLC13A1; ENSG00000081800; TAA
EVEATQMTYF

SEQ ID NO: 76390 - protein, 9 aa, Homo sapiens
  Table A; Target 76390; HLA-A*33:03; SLC13A1; ENSG00000081800; TAA
EVIKQEYQK

SEQ ID NO: 76391 - protein, 9 aa, Homo sapiens
  Table A; Target 76391; HLA-A*68:01; SLC13A1; ENSG00000081800; TAA
EVIKQEYQK

SEQ ID NO: 76392 - protein, 10 aa, Homo sapiens
  Table A; Target 76392; HLA-A*25:01; SLC13A1; ENSG00000081800; TAA
EVIKQEYQKL

SEQ ID NO: 76393 - protein, 10 aa, Homo sapiens
  Table A; Target 76393; HLA-A*26:01; SLC13A1; ENSG00000081800; TAA
EVIKQEYQKL

SEQ ID NO: 76394 - protein, 10 aa, Homo sapiens
  Table A; Target 76394; HLA-A*68:01; SLC13A1; ENSG00000081800; TAA
EVIKQEYQKL

SEQ ID NO: 76395 - protein, 9 aa, Homo sapiens
  Table A; Target 76395; HLA-A*33:03; SLC13A1; ENSG00000081800; TAA
EYQKLGPIR

SEQ ID NO: 76396 - protein, 9 aa, Homo sapiens
  Table A; Target 76396; HLA-A*01:01; SLC13A1; ENSG00000081800; TAA
FAEYFNTRY

SEQ ID NO: 76397 - protein, 8 aa, Homo sapiens
  Table A; Target 76397; HLA-B*54:01; SLC13A1; ENSG00000081800; TAA
FAFLLPVA

SEQ ID NO: 76398 - protein, 8 aa, Homo sapiens
  Table A; Target 76398; HLA-B*56:01; SLC13A1; ENSG00000081800; TAA
FAFLLPVA

SEQ ID NO: 76399 - protein, 9 aa, Homo sapiens
  Table A; Target 76399; HLA-A*23:01; SLC13A1; ENSG00000081800; TAA
FATDSTVAL

SEQ ID NO: 76400 - protein, 9 aa, Homo sapiens
  Table A; Target 76400; HLA-A*30:01; SLC13A1; ENSG00000081800; TAA
FATDSTVAL

SEQ ID NO: 76401 - protein, 9 aa, Homo sapiens
  Table A; Target 76401; HLA-B*15:03; SLC13A1; ENSG00000081800; TAA
FATDSTVAL

SEQ ID NO: 76402 - protein, 9 aa, Homo sapiens
  Table A; Target 76402; HLA-B*27:05; SLC13A1; ENSG00000081800; TAA
FATDSTVAL

SEQ ID NO: 76403 - protein, 9 aa, Homo sapiens
  Table A; Target 76403; HLA-B*35:01; SLC13A1; ENSG00000081800; TAA
FATDSTVAL

SEQ ID NO: 76404 - protein, 9 aa, Homo sapiens
  Table A; Target 76404; HLA-B*35:03; SLC13A1; ENSG00000081800; TAA
FATDSTVAL

SEQ ID NO: 76405 - protein, 9 aa, Homo sapiens
  Table A; Target 76405; HLA-B*39:01; SLC13A1; ENSG00000081800; TAA
FATDSTVAL

SEQ ID NO: 76406 - protein, 9 aa, Homo sapiens
  Table A; Target 76406; HLA-B*40:01; SLC13A1; ENSG00000081800; TAA
FATDSTVAL

SEQ ID NO: 76407 - protein, 9 aa, Homo sapiens
  Table A; Target 76407; HLA-B*46:01; SLC13A1; ENSG00000081800; TAA
FATDSTVAL

SEQ ID NO: 76408 - protein, 9 aa, Homo sapiens
  Table A; Target 76408; HLA-C*01:02; SLC13A1; ENSG00000081800; TAA
FATDSTVAL

SEQ ID NO: 76409 - protein, 9 aa, Homo sapiens
  Table A; Target 76409; HLA-C*02:02; SLC13A1; ENSG00000081800; TAA
FATDSTVAL

SEQ ID NO: 76410 - protein, 9 aa, Homo sapiens
  Table A; Target 76410; HLA-C*03:03; SLC13A1; ENSG00000081800; TAA
FATDSTVAL

SEQ ID NO: 76411 - protein, 9 aa, Homo sapiens
  Table A; Target 76411; HLA-C*03:04; SLC13A1; ENSG00000081800; TAA
FATDSTVAL

SEQ ID NO: 76412 - protein, 9 aa, Homo sapiens
  Table A; Target 76412; HLA-C*05:01; SLC13A1; ENSG00000081800; TAA
FATDSTVAL

SEQ ID NO: 76413 - protein, 9 aa, Homo sapiens
  Table A; Target 76413; HLA-C*07:04; SLC13A1; ENSG00000081800; TAA
FATDSTVAL

SEQ ID NO: 76414 - protein, 9 aa, Homo sapiens
  Table A; Target 76414; HLA-C*12:03; SLC13A1; ENSG00000081800; TAA
FATDSTVAL

SEQ ID NO: 76415 - protein, 9 aa, Homo sapiens
  Table A; Target 76415; HLA-C*14:02; SLC13A1; ENSG00000081800; TAA
FATDSTVAL

SEQ ID NO: 76416 - protein, 9 aa, Homo sapiens
  Table A; Target 76416; HLA-C*16:01; SLC13A1; ENSG00000081800; TAA
FATDSTVAL

SEQ ID NO: 76417 - protein, 9 aa, Homo sapiens
  Table A; Target 76417; HLA-C*16:02; SLC13A1; ENSG00000081800; TAA
FATDSTVAL

SEQ ID NO: 76418 - protein, 9 aa, Homo sapiens
  Table A; Target 76418; HLA-C*16:04; SLC13A1; ENSG00000081800; TAA
FATDSTVAL

SEQ ID NO: 76419 - protein, 9 aa, Homo sapiens
  Table A; Target 76419; HLA-A*23:01; SLC13A1; ENSG00000081800; TAA
FFLIPAKTL

SEQ ID NO: 76420 - protein, 8 aa, Homo sapiens
  Table A; Target 76420; HLA-A*29:02; SLC13A1; ENSG00000081800; TAA
FFSYILVY

SEQ ID NO: 76421 - protein, 8 aa, Homo sapiens
  Table A; Target 76421; HLA-A*02:04; SLC13A1; ENSG00000081800; TAA
FLFVVFTV

SEQ ID NO: 76422 - protein, 9 aa, Homo sapiens
  Table A; Target 76422; HLA-A*02:03; SLC13A1; ENSG00000081800; TAA
FLFVVFTVL

SEQ ID NO: 76423 - protein, 9 aa, Homo sapiens
  Table A; Target 76423; HLA-A*02:04; SLC13A1; ENSG00000081800; TAA
FLFVVFTVL

SEQ ID NO: 76424 - protein, 9 aa, Homo sapiens
  Table A; Target 76424; HLA-A*02:07; SLC13A1; ENSG00000081800; TAA
FLFVVFTVL

SEQ ID NO: 76425 - protein, 9 aa, Homo sapiens
  Table A; Target 76425; HLA-A*02:07; SLC13A1; ENSG00000081800; TAA
FLPILSPLA

SEQ ID NO: 76426 - protein, 9 aa, Homo sapiens
  Table A; Target 76426; HLA-A*02:07; SLC13A1; ENSG00000081800; TAA
FMPWDIAIL

SEQ ID NO: 76427 - protein, 9 aa, Homo sapiens
  Table A; Target 76427; HLA-B*35:01; SLC13A1; ENSG00000081800; TAA
FPAALIILL

SEQ ID NO: 76428 - protein, 9 aa, Homo sapiens
  Table A; Target 76428; HLA-B*35:03; SLC13A1; ENSG00000081800; TAA
FPAALIILL

SEQ ID NO: 76429 - protein, 11 aa, Homo sapiens
  Table A; Target 76429; HLA-B*57:01; SLC13A1; ENSG00000081800; TAA
FSRDPGFVPGW

SEQ ID NO: 76430 - protein, 9 aa, Homo sapiens
  Table A; Target 76430; HLA-A*68:02; SLC13A1; ENSG00000081800; TAA
FTFSFPAAL

SEQ ID NO: 76431 - protein, 9 aa, Homo sapiens
  Table A; Target 76431; HLA-C*02:02; SLC13A1; ENSG00000081800; TAA
FTFSFPAAL

SEQ ID NO: 76432 - protein, 9 aa, Homo sapiens
  Table A; Target 76432; HLA-C*03:03; SLC13A1; ENSG00000081800; TAA
FTFSFPAAL

SEQ ID NO: 76433 - protein, 9 aa, Homo sapiens
  Table A; Target 76433; HLA-C*03:04; SLC13A1; ENSG00000081800; TAA
FTFSFPAAL

SEQ ID NO: 76434 - protein, 8 aa, Homo sapiens
  Table A; Target 76434; HLA-B*18:01; SLC13A1; ENSG00000081800; TAA
GEIVAFDY

SEQ ID NO: 76435 - protein, 8 aa, Homo sapiens
  Table A; Target 76435; HLA-C*14:02; SLC13A1; ENSG00000081800; TAA
GFMSSTAF

SEQ ID NO: 76436 - protein, 9 aa, Homo sapiens
  Table A; Target 76436; HLA-C*14:02; SLC13A1; ENSG00000081800; TAA
GFMSSTAFL

SEQ ID NO: 76437 - protein, 9 aa, Homo sapiens
  Table A; Target 76437; HLA-B*15:03; SLC13A1; ENSG00000081800; TAA
GKISSKVEL

SEQ ID NO: 76438 - protein, 9 aa, Homo sapiens
  Table A; Target 76438; HLA-A*02:01; SLC13A1; ENSG00000081800; TAA
GLGVNIVGV

SEQ ID NO: 76439 - protein, 9 aa, Homo sapiens
  Table A; Target 76439; HLA-A*02:03; SLC13A1; ENSG00000081800; TAA
GLGVNIVGV

SEQ ID NO: 76440 - protein, 9 aa, Homo sapiens
  Table A; Target 76440; HLA-A*02:04; SLC13A1; ENSG00000081800; TAA
GLGVNIVGV

SEQ ID NO: 76441 - protein, 9 aa, Homo sapiens
  Table A; Target 76441; HLA-B*13:02; SLC13A1; ENSG00000081800; TAA
GLGVNIVGV

SEQ ID NO: 76442 - protein, 9 aa, Homo sapiens
  Table A; Target 76442; HLA-B*55:01; SLC13A1; ENSG00000081800; TAA
GLGVNIVGV

SEQ ID NO: 76443 - protein, 9 aa, Homo sapiens
  Table A; Target 76443; HLA-A*03:01; SLC13A1; ENSG00000081800; TAA
GLSKWIGNK

SEQ ID NO: 76444 - protein, 9 aa, Homo sapiens
  Table A; Target 76444; HLA-B*13:02; SLC13A1; ENSG00000081800; TAA
GSTNHGLEI

SEQ ID NO: 76445 - protein, 11 aa, Homo sapiens
  Table A; Target 76445; HLA-A*01:01; SLC13A1; ENSG00000081800; TAA
GTSTNLIFAEY

SEQ ID NO: 76446 - protein, 11 aa, Homo sapiens
  Table A; Target 76446; HLA-A*29:02; SLC13A1; ENSG00000081800; TAA
GTSTNLIFAEY

SEQ ID NO: 76447 - protein, 11 aa, Homo sapiens
  Table A; Target 76447; HLA-A*30:02; SLC13A1; ENSG00000081800; TAA
GTSTNLIFAEY

SEQ ID NO: 76448 - protein, 9 aa, Homo sapiens
  Table A; Target 76448; HLA-B*13:02; SLC13A1; ENSG00000081800; TAA
GVAVVMLGI

SEQ ID NO: 76449 - protein, 9 aa, Homo sapiens
  Table A; Target 76449; HLA-B*13:02; SLC13A1; ENSG00000081800; TAA
GVICLATSI

SEQ ID NO: 76450 - protein, 9 aa, Homo sapiens
  Table A; Target 76450; HLA-A*32:01; SLC13A1; ENSG00000081800; TAA
GVNIVGVAV

SEQ ID NO: 76451 - protein, 9 aa, Homo sapiens
  Table A; Target 76451; HLA-B*13:02; SLC13A1; ENSG00000081800; TAA
GVNIVGVAV

SEQ ID NO: 76452 - protein, 9 aa, Homo sapiens
  Table A; Target 76452; HLA-B*46:01; SLC13A1; ENSG00000081800; TAA
GVNIVGVAV

SEQ ID NO: 76453 - protein, 9 aa, Homo sapiens
  Table A; Target 76453; HLA-A*25:01; SLC13A1; ENSG00000081800; TAA
HTKEAECAY

SEQ ID NO: 76454 - protein, 9 aa, Homo sapiens
  Table A; Target 76454; HLA-A*26:01; SLC13A1; ENSG00000081800; TAA
HTKEAECAY

SEQ ID NO: 76455 - protein, 9 aa, Homo sapiens
  Table A; Target 76455; HLA-A*30:02; SLC13A1; ENSG00000081800; TAA
HTKEAECAY

SEQ ID NO: 76456 - protein, 9 aa, Homo sapiens
  Table A; Target 76456; HLA-B*46:01; SLC13A1; ENSG00000081800; TAA
HTKEAECAY

SEQ ID NO: 76457 - protein, 9 aa, Homo sapiens
  Table A; Target 76457; HLA-B*51:01; SLC13A1; ENSG00000081800; TAA
IAEAVVQQI

SEQ ID NO: 76458 - protein, 9 aa, Homo sapiens
  Table A; Target 76458; HLA-C*05:01; SLC13A1; ENSG00000081800; TAA
IAEAVVQQI

SEQ ID NO: 76459 - protein, 9 aa, Homo sapiens
  Table A; Target 76459; HLA-A*23:01; SLC13A1; ENSG00000081800; TAA
IAILVGGGF

SEQ ID NO: 76460 - protein, 9 aa, Homo sapiens
  Table A; Target 76460; HLA-B*46:01; SLC13A1; ENSG00000081800; TAA
IAILVGGGF

SEQ ID NO: 76461 - protein, 9 aa, Homo sapiens
  Table A; Target 76461; HLA-C*03:04; SLC13A1; ENSG00000081800; TAA
IAILVGGGF

SEQ ID NO: 76462 - protein, 11 aa, Homo sapiens
  Table A; Target 76462; HLA-C*03:03; SLC13A1; ENSG00000081800; TAA
IAILVGGGFAL

SEQ ID NO: 76463 - protein, 11 aa, Homo sapiens
  Table A; Target 76463; HLA-C*03:04; SLC13A1; ENSG00000081800; TAA
IAILVGGGFAL

SEQ ID NO: 76464 - protein, 9 aa, Homo sapiens
  Table A; Target 76464; HLA-B*51:01; SLC13A1; ENSG00000081800; TAA
IALKMVMMV

SEQ ID NO: 76465 - protein, 8 aa, Homo sapiens
  Table A; Target 76465; HLA-B*37:01; SLC13A1; ENSG00000081800; TAA
IDMVKAGL

SEQ ID NO: 76466 - protein, 9 aa, Homo sapiens
  Table A; Target 76466; HLA-A*33:03; SLC13A1; ENSG00000081800; TAA
IFAEYFNTR

SEQ ID NO: 76467 - protein, 10 aa, Homo sapiens
  Table A; Target 76467; HLA-A*29:02; SLC13A1; ENSG00000081800; TAA
IFAEYFNTRY

SEQ ID NO: 76468 - protein, 11 aa, Homo sapiens
  Table A; Target 76468; HLA-A*23:01; SLC13A1; ENSG00000081800; TAA
ILIPSTLCTSF

SEQ ID NO: 76469 - protein, 9 aa, Homo sapiens
  Table A; Target 76469; HLA-B*13:02; SLC13A1; ENSG00000081800; TAA
ILSPLAEAI

SEQ ID NO: 76470 - protein, 9 aa, Homo sapiens
  Table A; Target 76470; HLA-A*02:01; SLC13A1; ENSG00000081800; TAA
ILVGGGFAL

SEQ ID NO: 76471 - protein, 9 aa, Homo sapiens
  Table A; Target 76471; HLA-A*02:04; SLC13A1; ENSG00000081800; TAA
ILVGGGFAL

SEQ ID NO: 76472 - protein, 9 aa, Homo sapiens
  Table A; Target 76472; HLA-A*23:01; SLC13A1; ENSG00000081800; TAA
ILVGGGFAL

SEQ ID NO: 76473 - protein, 9 aa, Homo sapiens
  Table A; Target 76473; HLA-B*35:03; SLC13A1; ENSG00000081800; TAA
ILVGGGFAL

SEQ ID NO: 76474 - protein, 9 aa, Homo sapiens
  Table A; Target 76474; HLA-C*03:03; SLC13A1; ENSG00000081800; TAA
ILVGGGFAL

SEQ ID NO: 76475 - protein, 9 aa, Homo sapiens
  Table A; Target 76475; HLA-C*03:04; SLC13A1; ENSG00000081800; TAA
ILVGGGFAL

SEQ ID NO: 76476 - protein, 8 aa, Homo sapiens
  Table A; Target 76476; HLA-B*51:01; SLC13A1; ENSG00000081800; TAA
IPAKTLTK

SEQ ID NO: 76477 - protein, 11 aa, Homo sapiens
  Table A; Target 76477; HLA-B*56:01; SLC13A1; ENSG00000081800; TAA
IPAKTLTKTTP

SEQ ID NO: 76478 - protein, 9 aa, Homo sapiens
  Table A; Target 76478; HLA-B*18:01; SLC13A1; ENSG00000081800; TAA
IPSTLCTSF

SEQ ID NO: 76479 - protein, 9 aa, Homo sapiens
  Table A; Target 76479; HLA-B*35:01; SLC13A1; ENSG00000081800; TAA
IPSTLCTSF

SEQ ID NO: 76480 - protein, 9 aa, Homo sapiens
  Table A; Target 76480; HLA-B*55:01; SLC13A1; ENSG00000081800; TAA
IPSTLCTSF

SEQ ID NO: 76481 - protein, 9 aa, Homo sapiens
  Table A; Target 76481; HLA-C*03:04; SLC13A1; ENSG00000081800; TAA
ISSLMVTSL

SEQ ID NO: 76482 - protein, 9 aa, Homo sapiens
  Table A; Target 76482; HLA-B*57:01; SLC13A1; ENSG00000081800; TAA
ITWKEFQSF

SEQ ID NO: 76483 - protein, 9 aa, Homo sapiens
  Table A; Target 76483; HLA-A*03:01; SLC13A1; ENSG00000081800; TAA
IVFSYGHLK

SEQ ID NO: 76484 - protein, 8 aa, Homo sapiens
  Table A; Target 76484; HLA-C*14:02; SLC13A1; ENSG00000081800; TAA
IVGVAVVM

SEQ ID NO: 76485 - protein, 10 aa, Homo sapiens
  Table A; Target 76485; HLA-A*29:02; SLC13A1; ENSG00000081800; TAA
IVPMFDLYTY

SEQ ID NO: 76486 - protein, 11 aa, Homo sapiens
  Table A; Target 76486; HLA-A*30:02; SLC13A1; ENSG00000081800; TAA
KACAEVIKQEY

SEQ ID NO: 76487 - protein, 9 aa, Homo sapiens
  Table A; Target 76487; HLA-A*30:01; SLC13A1; ENSG00000081800; TAA
KEAECAYTL

SEQ ID NO: 76488 - protein, 9 aa, Homo sapiens
  Table A; Target 76488; HLA-B*37:01; SLC13A1; ENSG00000081800; TAA
KEAECAYTL

SEQ ID NO: 76489 - protein, 9 aa, Homo sapiens
  Table A; Target 76489; HLA-B*40:01; SLC13A1; ENSG00000081800; TAA
KEAECAYTL

SEQ ID NO: 76490 - protein, 9 aa, Homo sapiens
  Table A; Target 76490; HLA-B*40:02; SLC13A1; ENSG00000081800; TAA
KEAECAYTL

SEQ ID NO: 76491 - protein, 9 aa, Homo sapiens
  Table A; Target 76491; HLA-B*44:02; SLC13A1; ENSG00000081800; TAA
KEAECAYTL

SEQ ID NO: 76492 - protein, 9 aa, Homo sapiens
  Table A; Target 76492; HLA-B*44:03; SLC13A1; ENSG00000081800; TAA
KEAECAYTL

SEQ ID NO: 76493 - protein, 9 aa, Homo sapiens
  Table A; Target 76493; HLA-B*49:01; SLC13A1; ENSG00000081800; TAA
KEAECAYTL

SEQ ID NO: 76494 - protein, 10 aa, Homo sapiens
  Table A; Target 76494; HLA-A*30:02; SLC13A1; ENSG00000081800; TAA
KEKTKPVPGY

SEQ ID NO: 76495 - protein, 9 aa, Homo sapiens
  Table A; Target 76495; HLA-A*29:02; SLC13A1; ENSG00000081800; TAA
KFFSYILVY

SEQ ID NO: 76496 - protein, 10 aa, Homo sapiens
  Table A; Target 76496; HLA-A*03:01; SLC13A1; ENSG00000081800; TAA
KISSKVELEK

SEQ ID NO: 76497 - protein, 10 aa, Homo sapiens
  Table A; Target 76497; HLA-A*03:02; SLC13A1; ENSG00000081800; TAA
KISSKVELEK

SEQ ID NO: 76498 - protein, 8 aa, Homo sapiens
  Table A; Target 76498; HLA-A*30:02; SLC13A1; ENSG00000081800; TAA
KTKPVPGY

SEQ ID NO: 76499 - protein, 8 aa, Homo sapiens
  Table A; Target 76499; HLA-A*32:01; SLC13A1; ENSG00000081800; TAA
KTKPVPGY

SEQ ID NO: 76500 - protein, 8 aa, Homo sapiens
  Table A; Target 76500; HLA-B*58:01; SLC13A1; ENSG00000081800; TAA
KTKPVPGY

SEQ ID NO: 76501 - protein, 10 aa, Homo sapiens
  Table A; Target 76501; HLA-A*31:01; SLC13A1; ENSG00000081800; TAA
KTKPVPGYNN

SEQ ID NO: 76502 - protein, 11 aa, Homo sapiens
  Table A; Target 76502; HLA-B*57:01; SLC13A1; ENSG00000081800; TAA
KTTPTGEIVAF

SEQ ID NO: 76503 - protein, 11 aa, Homo sapiens
  Table A; Target 76503; HLA-B*58:01; SLC13A1; ENSG00000081800; TAA
KTTPTGEIVAF

SEQ ID NO: 76504 - protein, 10 aa, Homo sapiens
  Table A; Target 76504; HLA-B*58:01; SLC13A1; ENSG00000081800; TAA
KVIDMVKAGL

SEQ ID NO: 76505 - protein, 8 aa, Homo sapiens
  Table A; Target 76505; HLA-B*58:01; SLC13A1; ENSG00000081800; TAA
LATSIEKW

SEQ ID NO: 76506 - protein, 9 aa, Homo sapiens
  Table A; Target 76506; HLA-B*46:01; SLC13A1; ENSG00000081800; TAA
LGFMSSTAF

SEQ ID NO: 76507 - protein, 9 aa, Homo sapiens
  Table A; Target 76507; HLA-C*02:02; SLC13A1; ENSG00000081800; TAA
LGFMSSTAF

SEQ ID NO: 76508 - protein, 9 aa, Homo sapiens
  Table A; Target 76508; HLA-A*02:04; SLC13A1; ENSG00000081800; TAA
LLIGLLFFL

SEQ ID NO: 76509 - protein, 9 aa, Homo sapiens
  Table A; Target 76509; HLA-A*02:04; SLC13A1; ENSG00000081800; TAA
LLLIGVICL

SEQ ID NO: 76510 - protein, 10 aa, Homo sapiens
  Table A; Target 76510; HLA-A*02:07; SLC13A1; ENSG00000081800; TAA
LLPSLMLPMF

SEQ ID NO: 76511 - protein, 9 aa, Homo sapiens
  Table A; Target 76511; HLA-A*02:01; SLC13A1; ENSG00000081800; TAA
LMVTSLTEV

SEQ ID NO: 76512 - protein, 9 aa, Homo sapiens
  Table A; Target 76512; HLA-A*02:03; SLC13A1; ENSG00000081800; TAA
LMVTSLTEV

SEQ ID NO: 76513 - protein, 9 aa, Homo sapiens
  Table A; Target 76513; HLA-A*02:07; SLC13A1; ENSG00000081800; TAA
LMVTSLTEV

SEQ ID NO: 76514 - protein, 9 aa, Homo sapiens
  Table A; Target 76514; HLA-B*46:01; SLC13A1; ENSG00000081800; TAA
LMVTSLTEV

SEQ ID NO: 76515 - protein, 9 aa, Homo sapiens
  Table A; Target 76515; HLA-B*55:01; SLC13A1; ENSG00000081800; TAA
LMVTSLTEV

SEQ ID NO: 76516 - protein, 9 aa, Homo sapiens
  Table A; Target 76516; HLA-B*51:01; SLC13A1; ENSG00000081800; TAA
LPAWLIILI

SEQ ID NO: 76517 - protein, 8 aa, Homo sapiens
  Table A; Target 76517; HLA-B*54:01; SLC13A1; ENSG00000081800; TAA
LPILSPLA

SEQ ID NO: 76518 - protein, 8 aa, Homo sapiens
  Table A; Target 76518; HLA-B*56:01; SLC13A1; ENSG00000081800; TAA
LPILSPLA

SEQ ID NO: 76519 - protein, 10 aa, Homo sapiens
  Table A; Target 76519; HLA-B*54:01; SLC13A1; ENSG00000081800; TAA
LPILSPLAEA

SEQ ID NO: 76520 - protein, 10 aa, Homo sapiens
  Table A; Target 76520; HLA-B*56:01; SLC13A1; ENSG00000081800; TAA
LPILSPLAEA

SEQ ID NO: 76521 - protein, 9 aa, Homo sapiens
  Table A; Target 76521; HLA-B*51:01; SLC13A1; ENSG00000081800; TAA
LPLPIVLHT

SEQ ID NO: 76522 - protein, 8 aa, Homo sapiens
  Table A; Target 76522; HLA-B*07:02; SLC13A1; ENSG00000081800; TAA
LPLSVTAL

SEQ ID NO: 76523 - protein, 8 aa, Homo sapiens
  Table A; Target 76523; HLA-B*35:01; SLC13A1; ENSG00000081800; TAA
LPLSVTAL

SEQ ID NO: 76524 - protein, 8 aa, Homo sapiens
  Table A; Target 76524; HLA-B*35:03; SLC13A1; ENSG00000081800; TAA
LPLSVTAL

SEQ ID NO: 76525 - protein, 8 aa, Homo sapiens
  Table A; Target 76525; HLA-B*51:01; SLC13A1; ENSG00000081800; TAA
LPLSVTAL

SEQ ID NO: 76526 - protein, 9 aa, Homo sapiens
  Table A; Target 76526; HLA-B*35:03; SLC13A1; ENSG00000081800; TAA
LPLSVTALL

SEQ ID NO: 76527 - protein, 9 aa, Homo sapiens
  Table A; Target 76527; HLA-B*54:01; SLC13A1; ENSG00000081800; TAA
LPVANPPNA

SEQ ID NO: 76528 - protein, 9 aa, Homo sapiens
  Table A; Target 76528; HLA-B*56:01; SLC13A1; ENSG00000081800; TAA
LPVANPPNA

SEQ ID NO: 76529 - protein, 10 aa, Homo sapiens
  Table A; Target 76529; HLA-B*07:02; SLC13A1; ENSG00000081800; TAA
LPVANPPNAI

SEQ ID NO: 76530 - protein, 10 aa, Homo sapiens
  Table A; Target 76530; HLA-B*51:01; SLC13A1; ENSG00000081800; TAA
LPVANPPNAI

SEQ ID NO: 76531 - protein, 10 aa, Homo sapiens
  Table A; Target 76531; HLA-B*56:01; SLC13A1; ENSG00000081800; TAA
LPVANPPNAI

SEQ ID NO: 76532 - protein, 9 aa, Homo sapiens
  Table A; Target 76532; HLA-B*46:01; SLC13A1; ENSG00000081800; TAA
LSNTSTAAM

SEQ ID NO: 76533 - protein, 9 aa, Homo sapiens
  Table A; Target 76533; HLA-C*01:02; SLC13A1; ENSG00000081800; TAA
LSNTSTAAM

SEQ ID NO: 76534 - protein, 9 aa, Homo sapiens
  Table A; Target 76534; HLA-C*03:03; SLC13A1; ENSG00000081800; TAA
LSNTSTAAM

SEQ ID NO: 76535 - protein, 9 aa, Homo sapiens
  Table A; Target 76535; HLA-C*03:04; SLC13A1; ENSG00000081800; TAA
LSNTSTAAM

SEQ ID NO: 76536 - protein, 9 aa, Homo sapiens
  Table A; Target 76536; HLA-C*14:02; SLC13A1; ENSG00000081800; TAA
LSNTSTAAM

SEQ ID NO: 76537 - protein, 9 aa, Homo sapiens
  Table A; Target 76537; HLA-A*01:01; SLC13A1; ENSG00000081800; TAA
LTEALPLSV

SEQ ID NO: 76538 - protein, 8 aa, Homo sapiens
  Table A; Target 76538; HLA-C*03:04; SLC13A1; ENSG00000081800; TAA
LVGGGFAL

SEQ ID NO: 76539 - protein, 9 aa, Homo sapiens
  Table A; Target 76539; HLA-A*23:01; SLC13A1; ENSG00000081800; TAA
LYILIPSTL

SEQ ID NO: 76540 - protein, 9 aa, Homo sapiens
  Table A; Target 76540; HLA-A*24:02; SLC13A1; ENSG00000081800; TAA
LYILIPSTL

SEQ ID NO: 76541 - protein, 9 aa, Homo sapiens
  Table A; Target 76541; HLA-C*14:02; SLC13A1; ENSG00000081800; TAA
LYILIPSTL

SEQ ID NO: 76542 - protein, 9 aa, Homo sapiens
  Table A; Target 76542; HLA-A*25:01; SLC13A1; ENSG00000081800; TAA
MMVGVNPAW

SEQ ID NO: 76543 - protein, 9 aa, Homo sapiens
  Table A; Target 76543; HLA-A*32:01; SLC13A1; ENSG00000081800; TAA
MMVGVNPAW

SEQ ID NO: 76544 - protein, 9 aa, Homo sapiens
  Table A; Target 76544; HLA-B*58:01; SLC13A1; ENSG00000081800; TAA
MMVGVNPAW

SEQ ID NO: 76545 - protein, 8 aa, Homo sapiens
  Table A; Target 76545; HLA-B*51:01; SLC13A1; ENSG00000081800; TAA
MPIAEAVV

SEQ ID NO: 76546 - protein, 8 aa, Homo sapiens
  Table A; Target 76546; HLA-B*56:01; SLC13A1; ENSG00000081800; TAA
MPIAEAVV

SEQ ID NO: 76547 - protein, 9 aa, Homo sapiens
  Table A; Target 76547; HLA-B*35:01; SLC13A1; ENSG00000081800; TAA
MPIAEAVVQ

SEQ ID NO: 76548 - protein, 9 aa, Homo sapiens
  Table A; Target 76548; HLA-B*35:03; SLC13A1; ENSG00000081800; TAA
MPIAEAVVQ

SEQ ID NO: 76549 - protein, 9 aa, Homo sapiens
  Table A; Target 76549; HLA-B*55:01; SLC13A1; ENSG00000081800; TAA
MPIAEAVVQ

SEQ ID NO: 76550 - protein, 11 aa, Homo sapiens
  Table A; Target 76550; HLA-B*35:03; SLC13A1; ENSG00000081800; TAA
MPIAEAVVQQI

SEQ ID NO: 76551 - protein, 9 aa, Homo sapiens
  Table A; Target 76551; HLA-B*07:02; SLC13A1; ENSG00000081800; TAA
MPSKKVASA

SEQ ID NO: 76552 - protein, 9 aa, Homo sapiens
  Table A; Target 76552; HLA-B*08:01; SLC13A1; ENSG00000081800; TAA
MPSKKVASA

SEQ ID NO: 76553 - protein, 9 aa, Homo sapiens
  Table A; Target 76553; HLA-B*54:01; SLC13A1; ENSG00000081800; TAA
MPSKKVASA

SEQ ID NO: 76554 - protein, 9 aa, Homo sapiens
  Table A; Target 76554; HLA-B*55:01; SLC13A1; ENSG00000081800; TAA
MPSKKVASA

SEQ ID NO: 76555 - protein, 9 aa, Homo sapiens
  Table A; Target 76555; HLA-B*56:01; SLC13A1; ENSG00000081800; TAA
MPSKKVASA

SEQ ID NO: 76556 - protein, 10 aa, Homo sapiens
  Table A; Target 76556; HLA-A*30:02; SLC13A1; ENSG00000081800; TAA
MPSKKVASAY

SEQ ID NO: 76557 - protein, 10 aa, Homo sapiens
  Table A; Target 76557; HLA-B*35:01; SLC13A1; ENSG00000081800; TAA
MPSKKVASAY

SEQ ID NO: 76558 - protein, 8 aa, Homo sapiens
  Table A; Target 76558; HLA-B*35:01; SLC13A1; ENSG00000081800; TAA
MPWDIAIL

SEQ ID NO: 76559 - protein, 9 aa, Homo sapiens
  Table A; Target 76559; HLA-A*68:02; SLC13A1; ENSG00000081800; TAA
MPWDIAILV

SEQ ID NO: 76560 - protein, 9 aa, Homo sapiens
  Table A; Target 76560; HLA-B*35:01; SLC13A1; ENSG00000081800; TAA
MPWDIAILV

SEQ ID NO: 76561 - protein, 9 aa, Homo sapiens
  Table A; Target 76561; HLA-B*51:01; SLC13A1; ENSG00000081800; TAA
MPWDIAILV

SEQ ID NO: 76562 - protein, 9 aa, Homo sapiens
  Table A; Target 76562; HLA-B*54:01; SLC13A1; ENSG00000081800; TAA
MPWDIAILV

SEQ ID NO: 76563 - protein, 9 aa, Homo sapiens
  Table A; Target 76563; HLA-B*56:01; SLC13A1; ENSG00000081800; TAA
MPWDIAILV

SEQ ID NO: 76564 - protein, 10 aa, Homo sapiens
  Table A; Target 76564; HLA-B*54:01; SLC13A1; ENSG00000081800; TAA
MPWDIAILVG

SEQ ID NO: 76565 - protein, 8 aa, Homo sapiens
  Table A; Target 76565; HLA-B*54:01; SLC13A1; ENSG00000081800; TAA
MVMPIAEA

SEQ ID NO: 76566 - protein, 8 aa, Homo sapiens
  Table A; Target 76566; HLA-B*56:01; SLC13A1; ENSG00000081800; TAA
MVMPIAEA

SEQ ID NO: 76567 - protein, 9 aa, Homo sapiens
  Table A; Target 76567; HLA-A*02:01; SLC13A1; ENSG00000081800; TAA
MVMPIAEAV

SEQ ID NO: 76568 - protein, 9 aa, Homo sapiens
  Table A; Target 76568; HLA-A*02:07; SLC13A1; ENSG00000081800; TAA
MVMPIAEAV

SEQ ID NO: 76569 - protein, 9 aa, Homo sapiens
  Table A; Target 76569; HLA-A*68:02; SLC13A1; ENSG00000081800; TAA
MVMPIAEAV

SEQ ID NO: 76570 - protein, 9 aa, Homo sapiens
  Table A; Target 76570; HLA-B*13:02; SLC13A1; ENSG00000081800; TAA
MVMPIAEAV

SEQ ID NO: 76571 - protein, 9 aa, Homo sapiens
  Table A; Target 76571; HLA-B*35:03; SLC13A1; ENSG00000081800; TAA
MVMPIAEAV

SEQ ID NO: 76572 - protein, 9 aa, Homo sapiens
  Table A; Target 76572; HLA-B*46:01; SLC13A1; ENSG00000081800; TAA
MVMPIAEAV

SEQ ID NO: 76573 - protein, 9 aa, Homo sapiens
  Table A; Target 76573; HLA-B*54:01; SLC13A1; ENSG00000081800; TAA
MVMPIAEAV

SEQ ID NO: 76574 - protein, 9 aa, Homo sapiens
  Table A; Target 76574; HLA-B*56:01; SLC13A1; ENSG00000081800; TAA
MVMPIAEAV

SEQ ID NO: 76575 - protein, 9 aa, Homo sapiens
  Table A; Target 76575; HLA-C*02:02; SLC13A1; ENSG00000081800; TAA
MVMPIAEAV

SEQ ID NO: 76576 - protein, 8 aa, Homo sapiens
  Table A; Target 76576; HLA-B*56:01; SLC13A1; ENSG00000081800; TAA
MVTSLTEV

SEQ ID NO: 76577 - protein, 9 aa, Homo sapiens
  Table A; Target 76577; HLA-B*35:01; SLC13A1; ENSG00000081800; TAA
NIVGVAVVM

SEQ ID NO: 76578 - protein, 9 aa, Homo sapiens
  Table A; Target 76578; HLA-B*35:03; SLC13A1; ENSG00000081800; TAA
NIVGVAVVM

SEQ ID NO: 76579 - protein, 9 aa, Homo sapiens
  Table A; Target 76579; HLA-C*07:06; SLC13A1; ENSG00000081800; TAA
NIVGVAVVM

SEQ ID NO: 76580 - protein, 8 aa, Homo sapiens
  Table A; Target 76580; HLA-B*08:01; SLC13A1; ENSG00000081800; TAA
NLHKRIAL

SEQ ID NO: 76581 - protein, 9 aa, Homo sapiens
  Table A; Target 76581; HLA-B*35:01; SLC13A1; ENSG00000081800; TAA
NPAWLTLGF

SEQ ID NO: 76582 - protein, 10 aa, Homo sapiens
  Table A; Target 76582; HLA-B*35:01; SLC13A1; ENSG00000081800; TAA
NPPNAIVFSY

SEQ ID NO: 76583 - protein, 8 aa, Homo sapiens
  Table A; Target 76583; HLA-C*16:01; SLC13A1; ENSG00000081800; TAA
NSGMRTKY

SEQ ID NO: 76584 - protein, 8 aa, Homo sapiens
  Table A; Target 76584; HLA-B*18:01; SLC13A1; ENSG00000081800; TAA
QEIVTLVL

SEQ ID NO: 76585 - protein, 8 aa, Homo sapiens
  Table A; Target 76585; HLA-B*49:01; SLC13A1; ENSG00000081800; TAA
QEIVTLVL

SEQ ID NO: 76586 - protein, 9 aa, Homo sapiens
  Table A; Target 76586; HLA-B*18:01; SLC13A1; ENSG00000081800; TAA
QEIVTLVLF

SEQ ID NO: 76587 - protein, 9 aa, Homo sapiens
  Table A; Target 76587; HLA-B*44:02; SLC13A1; ENSG00000081800; TAA
QEIVTLVLF

SEQ ID NO: 76588 - protein, 9 aa, Homo sapiens
  Table A; Target 76588; HLA-B*44:03; SLC13A1; ENSG00000081800; TAA
QEIVTLVLF

SEQ ID NO: 76589 - protein, 9 aa, Homo sapiens
  Table A; Target 76589; HLA-B*49:01; SLC13A1; ENSG00000081800; TAA
QEYQKLGPI

SEQ ID NO: 76590 - protein, 11 aa, Homo sapiens
  Table A; Target 76590; HLA-B*44:02; SLC13A1; ENSG00000081800; TAA
QEYQKLGPIRY

SEQ ID NO: 76591 - protein, 11 aa, Homo sapiens
  Table A; Target 76591; HLA-B*44:03; SLC13A1; ENSG00000081800; TAA
QEYQKLGPIRY

SEQ ID NO: 76592 - protein, 9 aa, Homo sapiens
  Table A; Target 76592; HLA-A*31:01; SLC13A1; ENSG00000081800; TAA
RTKKGHVTR

SEQ ID NO: 76593 - protein, 9 aa, Homo sapiens
  Table A; Target 76593; HLA-A*24:02; SLC13A1; ENSG00000081800; TAA
RYQEIVTLV

SEQ ID NO: 76594 - protein, 8 aa, Homo sapiens
  Table A; Target 76594; HLA-B*37:01; SLC13A1; ENSG00000081800; TAA
SEYPGFAT

SEQ ID NO: 76595 - protein, 10 aa, Homo sapiens
  Table A; Target 76595; HLA-B*49:01; SLC13A1; ENSG00000081800; TAA
SEYPGFATDS

SEQ ID NO: 76596 - protein, 11 aa, Homo sapiens
  Table A; Target 76596; HLA-B*49:01; SLC13A1; ENSG00000081800; TAA
SEYPGFATDST

SEQ ID NO: 76597 - protein, 8 aa, Homo sapiens
  Table A; Target 76597; HLA-B*15:03; SLC13A1; ENSG00000081800; TAA
SKKVASAY

SEQ ID NO: 76598 - protein, 10 aa, Homo sapiens
  Table A; Target 76598; HLA-A*02:01; SLC13A1; ENSG00000081800; TAA
SLMVTSLTEV

SEQ ID NO: 76599 - protein, 10 aa, Homo sapiens
  Table A; Target 76599; HLA-A*02:03; SLC13A1; ENSG00000081800; TAA
SLMVTSLTEV

SEQ ID NO: 76600 - protein, 9 aa, Homo sapiens
  Table A; Target 76600; HLA-A*02:04; SLC13A1; ENSG00000081800; TAA
SLPAWLIIL

SEQ ID NO: 76601 - protein, 9 aa, Homo sapiens
  Table A; Target 76601; HLA-B*56:01; SLC13A1; ENSG00000081800; TAA
SPLAEAIHV

SEQ ID NO: 76602 - protein, 9 aa, Homo sapiens
  Table A; Target 76602; HLA-B*57:01; SLC13A1; ENSG00000081800; TAA
SSTAFLSMW

SEQ ID NO: 76603 - protein, 9 aa, Homo sapiens
  Table A; Target 76603; HLA-A*02:01; SLC13A1; ENSG00000081800; TAA
STIGGLTTI

SEQ ID NO: 76604 - protein, 9 aa, Homo sapiens
  Table A; Target 76604; HLA-A*02:03; SLC13A1; ENSG00000081800; TAA
STIGGLTTI

SEQ ID NO: 76605 - protein, 9 aa, Homo sapiens
  Table A; Target 76605; HLA-A*23:01; SLC13A1; ENSG00000081800; TAA
STIGGLTTI

SEQ ID NO: 76606 - protein, 9 aa, Homo sapiens
  Table A; Target 76606; HLA-A*25:01; SLC13A1; ENSG00000081800; TAA
STIGGLTTI

SEQ ID NO: 76607 - protein, 9 aa, Homo sapiens
  Table A; Target 76607; HLA-A*26:01; SLC13A1; ENSG00000081800; TAA
STIGGLTTI

SEQ ID NO: 76608 - protein, 9 aa, Homo sapiens
  Table A; Target 76608; HLA-A*32:01; SLC13A1; ENSG00000081800; TAA
STIGGLTTI

SEQ ID NO: 76609 - protein, 9 aa, Homo sapiens
  Table A; Target 76609; HLA-A*68:02; SLC13A1; ENSG00000081800; TAA
STIGGLTTI

SEQ ID NO: 76610 - protein, 9 aa, Homo sapiens
  Table A; Target 76610; HLA-B*13:02; SLC13A1; ENSG00000081800; TAA
STIGGLTTI

SEQ ID NO: 76611 - protein, 9 aa, Homo sapiens
  Table A; Target 76611; HLA-B*46:01; SLC13A1; ENSG00000081800; TAA
STIGGLTTI

SEQ ID NO: 76612 - protein, 9 aa, Homo sapiens
  Table A; Target 76612; HLA-B*49:01; SLC13A1; ENSG00000081800; TAA
STIGGLTTI

SEQ ID NO: 76613 - protein, 9 aa, Homo sapiens
  Table A; Target 76613; HLA-B*58:01; SLC13A1; ENSG00000081800; TAA
STIGGLTTI

SEQ ID NO: 76614 - protein, 9 aa, Homo sapiens
  Table A; Target 76614; HLA-C*03:04; SLC13A1; ENSG00000081800; TAA
STIGGLTTI

SEQ ID NO: 76615 - protein, 9 aa, Homo sapiens
  Table A; Target 76615; HLA-A*01:01; SLC13A1; ENSG00000081800; TAA
STNLIFAEY

SEQ ID NO: 76616 - protein, 9 aa, Homo sapiens
  Table A; Target 76616; HLA-A*25:01; SLC13A1; ENSG00000081800; TAA
STNLIFAEY

SEQ ID NO: 76617 - protein, 9 aa, Homo sapiens
  Table A; Target 76617; HLA-A*26:01; SLC13A1; ENSG00000081800; TAA
STNLIFAEY

SEQ ID NO: 76618 - protein, 9 aa, Homo sapiens
  Table A; Target 76618; HLA-A*29:02; SLC13A1; ENSG00000081800; TAA
STNLIFAEY

SEQ ID NO: 76619 - protein, 9 aa, Homo sapiens
  Table A; Target 76619; HLA-A*30:02; SLC13A1; ENSG00000081800; TAA
STNLIFAEY

SEQ ID NO: 76620 - protein, 9 aa, Homo sapiens
  Table A; Target 76620; HLA-A*32:01; SLC13A1; ENSG00000081800; TAA
STNLIFAEY

SEQ ID NO: 76621 - protein, 9 aa, Homo sapiens
  Table A; Target 76621; HLA-B*15:01; SLC13A1; ENSG00000081800; TAA
STNLIFAEY

SEQ ID NO: 76622 - protein, 9 aa, Homo sapiens
  Table A; Target 76622; HLA-B*46:01; SLC13A1; ENSG00000081800; TAA
STNLIFAEY

SEQ ID NO: 76623 - protein, 9 aa, Homo sapiens
  Table A; Target 76623; HLA-B*58:01; SLC13A1; ENSG00000081800; TAA
STNLIFAEY

SEQ ID NO: 76624 - protein, 9 aa, Homo sapiens
  Table A; Target 76624; HLA-C*02:02; SLC13A1; ENSG00000081800; TAA
STNLIFAEY

SEQ ID NO: 76625 - protein, 9 aa, Homo sapiens
  Table A; Target 76625; HLA-C*16:04; SLC13A1; ENSG00000081800; TAA
STNLIFAEY

SEQ ID NO: 76626 - protein, 10 aa, Homo sapiens
  Table A; Target 76626; HLA-A*31:01; SLC13A1; ENSG00000081800; TAA
SVNGHEINER

SEQ ID NO: 76627 - protein, 10 aa, Homo sapiens
  Table A; Target 76627; HLA-A*33:01; SLC13A1; ENSG00000081800; TAA
SVNGHEINER

SEQ ID NO: 76628 - protein, 10 aa, Homo sapiens
  Table A; Target 76628; HLA-A*33:03; SLC13A1; ENSG00000081800; TAA
SVNGHEINER

SEQ ID NO: 76629 - protein, 10 aa, Homo sapiens
  Table A; Target 76629; HLA-A*68:01; SLC13A1; ENSG00000081800; TAA
SVNGHEINER

SEQ ID NO: 76630 - protein, 10 aa, Homo sapiens
  Table A; Target 76630; HLA-C*07:06; SLC13A1; ENSG00000081800; TAA
SVNGHEINER

SEQ ID NO: 76631 - protein, 9 aa, Homo sapiens
  Table A; Target 76631; HLA-A*02:04; SLC13A1; ENSG00000081800; TAA
SVTALLPSL

SEQ ID NO: 76632 - protein, 9 aa, Homo sapiens
  Table A; Target 76632; HLA-A*25:01; SLC13A1; ENSG00000081800; TAA
SVTALLPSL

SEQ ID NO: 76633 - protein, 9 aa, Homo sapiens
  Table A; Target 76633; HLA-A*24:02; SLC13A1; ENSG00000081800; TAA
SYILVYRRF

SEQ ID NO: 76634 - protein, 9 aa, Homo sapiens
  Table A; Target 76634; HLA-B*54:01; SLC13A1; ENSG00000081800; TAA
TAAMVMPIA

SEQ ID NO: 76635 - protein, 9 aa, Homo sapiens
  Table A; Target 76635; HLA-B*56:01; SLC13A1; ENSG00000081800; TAA
TAAMVMPIA

SEQ ID NO: 76636 - protein, 8 aa, Homo sapiens
  Table A; Target 76636; HLA-B*37:01; SLC13A1; ENSG00000081800; TAA
TDSTVALL

SEQ ID NO: 76637 - protein, 9 aa, Homo sapiens
  Table A; Target 76637; HLA-B*13:02; SLC13A1; ENSG00000081800; TAA
TDSTVALLI

SEQ ID NO: 76638 - protein, 8 aa, Homo sapiens
  Table A; Target 76638; HLA-B*18:01; SLC13A1; ENSG00000081800; TAA
TEALPLSV

SEQ ID NO: 76639 - protein, 8 aa, Homo sapiens
  Table A; Target 76639; HLA-B*49:01; SLC13A1; ENSG00000081800; TAA
TEALPLSV

SEQ ID NO: 76640 - protein, 9 aa, Homo sapiens
  Table A; Target 76640; HLA-B*49:01; SLC13A1; ENSG00000081800; TAA
TEALPLSVT

SEQ ID NO: 76641 - protein, 11 aa, Homo sapiens
  Table A; Target 76641; HLA-A*30:01; SLC13A1; ENSG00000081800; TAA
TEALPLSVTAL

SEQ ID NO: 76642 - protein, 11 aa, Homo sapiens
  Table A; Target 76642; HLA-B*40:01; SLC13A1; ENSG00000081800; TAA
TEALPLSVTAL

SEQ ID NO: 76643 - protein, 9 aa, Homo sapiens
  Table A; Target 76643; HLA-A*30:01; SLC13A1; ENSG00000081800; TAA
TEVASNPAT

SEQ ID NO: 76644 - protein, 9 aa, Homo sapiens
  Table A; Target 76644; HLA-B*49:01; SLC13A1; ENSG00000081800; TAA
TEVASNPAT

SEQ ID NO: 76645 - protein, 10 aa, Homo sapiens
  Table A; Target 76645; HLA-A*30:01; SLC13A1; ENSG00000081800; TAA
TEVASNPATI

SEQ ID NO: 76646 - protein, 10 aa, Homo sapiens
  Table A; Target 76646; HLA-B*40:01; SLC13A1; ENSG00000081800; TAA
TEVASNPATI

SEQ ID NO: 76647 - protein, 10 aa, Homo sapiens
  Table A; Target 76647; HLA-B*49:01; SLC13A1; ENSG00000081800; TAA
TEVASNPATI

SEQ ID NO: 76648 - protein, 8 aa, Homo sapiens
  Table A; Target 76648; HLA-B*37:01; SLC13A1; ENSG00000081800; TAA
TLFVVATF

SEQ ID NO: 76649 - protein, 9 aa, Homo sapiens
  Table A; Target 76649; HLA-B*07:02; SLC13A1; ENSG00000081800; TAA
TPTGEIVAF

SEQ ID NO: 76650 - protein, 9 aa, Homo sapiens
  Table A; Target 76650; HLA-B*35:01; SLC13A1; ENSG00000081800; TAA
TPTGEIVAF

SEQ ID NO: 76651 - protein, 9 aa, Homo sapiens
  Table A; Target 76651; HLA-B*35:03; SLC13A1; ENSG00000081800; TAA
TPTGEIVAF

SEQ ID NO: 76652 - protein, 9 aa, Homo sapiens
  Table A; Target 76652; HLA-B*55:01; SLC13A1; ENSG00000081800; TAA
TPTGEIVAF

SEQ ID NO: 76653 - protein, 9 aa, Homo sapiens
  Table A; Target 76653; HLA-C*03:03; SLC13A1; ENSG00000081800; TAA
TPTGEIVAF

SEQ ID NO: 76654 - protein, 11 aa, Homo sapiens
  Table A; Target 76654; HLA-B*35:01; SLC13A1; ENSG00000081800; TAA
TPTGEIVAFDY

SEQ ID NO: 76655 - protein, 8 aa, Homo sapiens
  Table A; Target 76655; HLA-C*16:01; SLC13A1; ENSG00000081800; TAA
TSTAAMVM

SEQ ID NO: 76656 - protein, 10 aa, Homo sapiens
  Table A; Target 76656; HLA-A*26:01; SLC13A1; ENSG00000081800; TAA
TSTNLIFAEY

SEQ ID NO: 76657 - protein, 10 aa, Homo sapiens
  Table A; Target 76657; HLA-A*29:02; SLC13A1; ENSG00000081800; TAA
TSTNLIFAEY

SEQ ID NO: 76658 - protein, 10 aa, Homo sapiens
  Table A; Target 76658; HLA-A*30:02; SLC13A1; ENSG00000081800; TAA
TSTNLIFAEY

SEQ ID NO: 76659 - protein, 10 aa, Homo sapiens
  Table A; Target 76659; HLA-A*25:01; SLC13A1; ENSG00000081800; TAA
TTPTGEIVAF

SEQ ID NO: 76660 - protein, 10 aa, Homo sapiens
  Table A; Target 76660; HLA-A*26:01; SLC13A1; ENSG00000081800; TAA
TTPTGEIVAF

SEQ ID NO: 76661 - protein, 9 aa, Homo sapiens
  Table A; Target 76661; HLA-C*14:02; SLC13A1; ENSG00000081800; TAA
TYFNGSTNH

SEQ ID NO: 76662 - protein, 11 aa, Homo sapiens
  Table A; Target 76662; HLA-A*23:01; SLC13A1; ENSG00000081800; TAA
TYFNGSTNHGL

SEQ ID NO: 76663 - protein, 11 aa, Homo sapiens
  Table A; Target 76663; HLA-A*24:02; SLC13A1; ENSG00000081800; TAA
TYFNGSTNHGL

SEQ ID NO: 76664 - protein, 9 aa, Homo sapiens
  Table A; Target 76664; HLA-A*23:01; SLC13A1; ENSG00000081800; TAA
TYPSWAPAM

SEQ ID NO: 76665 - protein, 9 aa, Homo sapiens
  Table A; Target 76665; HLA-A*24:02; SLC13A1; ENSG00000081800; TAA
TYPSWAPAM

SEQ ID NO: 76666 - protein, 9 aa, Homo sapiens
  Table A; Target 76666; HLA-B*51:01; SLC13A1; ENSG00000081800; TAA
VAFDYSPLI

SEQ ID NO: 76667 - protein, 9 aa, Homo sapiens
  Table A; Target 76667; HLA-C*02:02; SLC13A1; ENSG00000081800; TAA
VAFDYSPLI

SEQ ID NO: 76668 - protein, 11 aa, Homo sapiens
  Table A; Target 76668; HLA-B*57:01; SLC13A1; ENSG00000081800; TAA
VAFDYSPLITW

SEQ ID NO: 76669 - protein, 9 aa, Homo sapiens
  Table A; Target 76669; HLA-B*46:01; SLC13A1; ENSG00000081800; TAA
VANPPNAIV

SEQ ID NO: 76670 - protein, 9 aa, Homo sapiens
  Table A; Target 76670; HLA-C*03:03; SLC13A1; ENSG00000081800; TAA
VANPPNAIV

SEQ ID NO: 76671 - protein, 9 aa, Homo sapiens
  Table A; Target 76671; HLA-C*03:04; SLC13A1; ENSG00000081800; TAA
VANPPNAIV

SEQ ID NO: 76672 - protein, 10 aa, Homo sapiens
  Table A; Target 76672; HLA-A*23:01; SLC13A1; ENSG00000081800; TAA
VANPPNAIVF

SEQ ID NO: 76673 - protein, 10 aa, Homo sapiens
  Table A; Target 76673; HLA-B*46:01; SLC13A1; ENSG00000081800; TAA
VANPPNAIVF

SEQ ID NO: 76674 - protein, 10 aa, Homo sapiens
  Table A; Target 76674; HLA-B*58:01; SLC13A1; ENSG00000081800; TAA
VANPPNAIVF

SEQ ID NO: 76675 - protein, 10 aa, Homo sapiens
  Table A; Target 76675; HLA-C*02:02; SLC13A1; ENSG00000081800; TAA
VANPPNAIVF

SEQ ID NO: 76676 - protein, 10 aa, Homo sapiens
  Table A; Target 76676; HLA-C*03:03; SLC13A1; ENSG00000081800; TAA
VANPPNAIVF

SEQ ID NO: 76677 - protein, 10 aa, Homo sapiens
  Table A; Target 76677; HLA-C*03:04; SLC13A1; ENSG00000081800; TAA
VANPPNAIVF

SEQ ID NO: 76678 - protein, 10 aa, Homo sapiens
  Table A; Target 76678; HLA-C*16:02; SLC13A1; ENSG00000081800; TAA
VANPPNAIVF

SEQ ID NO: 76679 - protein, 10 aa, Homo sapiens
  Table A; Target 76679; HLA-C*03:03; SLC13A1; ENSG00000081800; TAA
VASNPATITL

SEQ ID NO: 76680 - protein, 10 aa, Homo sapiens
  Table A; Target 76680; HLA-C*03:04; SLC13A1; ENSG00000081800; TAA
VASNPATITL

SEQ ID NO: 76681 - protein, 8 aa, Homo sapiens
  Table A; Target 76681; HLA-B*51:01; SLC13A1; ENSG00000081800; TAA
VAVVMLGI

SEQ ID NO: 76682 - protein, 8 aa, Homo sapiens
  Table A; Target 76682; HLA-B*15:03; SLC13A1; ENSG00000081800; TAA
VEATQMTY

SEQ ID NO: 76683 - protein, 8 aa, Homo sapiens
  Table A; Target 76683; HLA-B*18:01; SLC13A1; ENSG00000081800; TAA
VEATQMTY

SEQ ID NO: 76684 - protein, 8 aa, Homo sapiens
  Table A; Target 76684; HLA-B*44:02; SLC13A1; ENSG00000081800; TAA
VEATQMTY

SEQ ID NO: 76685 - protein, 8 aa, Homo sapiens
  Table A; Target 76685; HLA-B*44:03; SLC13A1; ENSG00000081800; TAA
VEATQMTY

SEQ ID NO: 76686 - protein, 8 aa, Homo sapiens
  Table A; Target 76686; HLA-C*16:04; SLC13A1; ENSG00000081800; TAA
VEATQMTY

SEQ ID NO: 76687 - protein, 9 aa, Homo sapiens
  Table A; Target 76687; HLA-A*23:01; SLC13A1; ENSG00000081800; TAA
VEATQMTYF

SEQ ID NO: 76688 - protein, 9 aa, Homo sapiens
  Table A; Target 76688; HLA-A*30:01; SLC13A1; ENSG00000081800; TAA
VEATQMTYF

SEQ ID NO: 76689 - protein, 9 aa, Homo sapiens
  Table A; Target 76689; HLA-B*18:01; SLC13A1; ENSG00000081800; TAA
VEATQMTYF

SEQ ID NO: 76690 - protein, 9 aa, Homo sapiens
  Table A; Target 76690; HLA-B*37:01; SLC13A1; ENSG00000081800; TAA
VEATQMTYF

SEQ ID NO: 76691 - protein, 9 aa, Homo sapiens
  Table A; Target 76691; HLA-B*40:01; SLC13A1; ENSG00000081800; TAA
VEATQMTYF

SEQ ID NO: 76692 - protein, 9 aa, Homo sapiens
  Table A; Target 76692; HLA-B*44:02; SLC13A1; ENSG00000081800; TAA
VEATQMTYF

SEQ ID NO: 76693 - protein, 9 aa, Homo sapiens
  Table A; Target 76693; HLA-B*44:03; SLC13A1; ENSG00000081800; TAA
VEATQMTYF

SEQ ID NO: 76694 - protein, 9 aa, Homo sapiens
  Table A; Target 76694; HLA-B*49:01; SLC13A1; ENSG00000081800; TAA
VEATQMTYF

SEQ ID NO: 76695 - protein, 9 aa, Homo sapiens
  Table A; Target 76695; HLA-C*02:02; SLC13A1; ENSG00000081800; TAA
VEATQMTYF

SEQ ID NO: 76696 - protein, 9 aa, Homo sapiens
  Table A; Target 76696; HLA-C*16:04; SLC13A1; ENSG00000081800; TAA
VEATQMTYF

SEQ ID NO: 76697 - protein, 9 aa, Homo sapiens
  Table A; Target 76697; HLA-A*30:01; SLC13A1; ENSG00000081800; TAA
VELEKNSGM

SEQ ID NO: 76698 - protein, 9 aa, Homo sapiens
  Table A; Target 76698; HLA-B*18:01; SLC13A1; ENSG00000081800; TAA
VELEKNSGM

SEQ ID NO: 76699 - protein, 9 aa, Homo sapiens
  Table A; Target 76699; HLA-B*37:01; SLC13A1; ENSG00000081800; TAA
VELEKNSGM

SEQ ID NO: 76700 - protein, 9 aa, Homo sapiens
  Table A; Target 76700; HLA-B*40:01; SLC13A1; ENSG00000081800; TAA
VELEKNSGM

SEQ ID NO: 76701 - protein, 9 aa, Homo sapiens
  Table A; Target 76701; HLA-B*49:01; SLC13A1; ENSG00000081800; TAA
VELEKNSGM

SEQ ID NO: 76702 - protein, 9 aa, Homo sapiens
  Table A; Target 76702; HLA-A*02:07; SLC13A1; ENSG00000081800; TAA
VIDMVKAGL

SEQ ID NO: 76703 - protein, 9 aa, Homo sapiens
  Table A; Target 76703; HLA-C*05:01; SLC13A1; ENSG00000081800; TAA
VIDMVKAGL

SEQ ID NO: 76704 - protein, 9 aa, Homo sapiens
  Table A; Target 76704; HLA-A*02:01; SLC13A1; ENSG00000081800; TAA
VLLPLPIVL

SEQ ID NO: 76705 - protein, 9 aa, Homo sapiens
  Table A; Target 76705; HLA-A*02:03; SLC13A1; ENSG00000081800; TAA
VLLPLPIVL

SEQ ID NO: 76706 - protein, 9 aa, Homo sapiens
  Table A; Target 76706; HLA-A*02:04; SLC13A1; ENSG00000081800; TAA
VLLPLPIVL

SEQ ID NO: 76707 - protein, 9 aa, Homo sapiens
  Table A; Target 76707; HLA-A*02:07; SLC13A1; ENSG00000081800; TAA
VLLPLPIVL

SEQ ID NO: 76708 - protein, 9 aa, Homo sapiens
  Table A; Target 76708; HLA-A*23:01; SLC13A1; ENSG00000081800; TAA
VLLPLPIVL

SEQ ID NO: 76709 - protein, 9 aa, Homo sapiens
  Table A; Target 76709; HLA-A*24:02; SLC13A1; ENSG00000081800; TAA
VLLPLPIVL

SEQ ID NO: 76710 - protein, 9 aa, Homo sapiens
  Table A; Target 76710; HLA-A*33:01; SLC13A1; ENSG00000081800; TAA
VNGHEINER

SEQ ID NO: 76711 - protein, 9 aa, Homo sapiens
  Table A; Target 76711; HLA-B*35:01; SLC13A1; ENSG00000081800; TAA
VPMFDLYTY

SEQ ID NO: 76712 - protein, 8 aa, Homo sapiens
  Table A; Target 76712; HLA-C*03:04; SLC13A1; ENSG00000081800; TAA
VTALLPSL

SEQ ID NO: 76713 - protein, 9 aa, Homo sapiens
  Table A; Target 76713; HLA-A*01:01; SLC13A1; ENSG00000081800; TAA
VTALLPSLM

SEQ ID NO: 76714 - protein, 9 aa, Homo sapiens
  Table A; Target 76714; HLA-B*08:01; SLC13A1; ENSG00000081800; TAA
YGHLKVIDM

SEQ ID NO: 76715 - protein, 9 aa, Homo sapiens
  Table A; Target 76715; HLA-B*15:03; SLC13A1; ENSG00000081800; TAA
YQKLGPIRY

SEQ ID NO: 76716 - protein, 9 aa, Homo sapiens
  Table A; Target 76716; HLA-C*02:02; SLC13A1; ENSG00000081800; TAA
YQKLGPIRY

SEQ ID NO: 76717 - protein, 9 aa, Homo sapiens
  Table A; Target 76717; HLA-A*23:01; SLC13A1; ENSG00000081800; TAA
YTLFVVATF

SEQ ID NO: 76718 - protein, 9 aa, Homo sapiens
  Table A; Target 76718; HLA-A*23:01; SLC22A9; ENSG00000149742; TAA
AALAPTFLI

SEQ ID NO: 76719 - protein, 10 aa, Homo sapiens
  Table A; Target 76719; HLA-A*29:02; SLC22A9; ENSG00000149742; TAA
AALAPTFLIY

SEQ ID NO: 76720 - protein, 10 aa, Homo sapiens
  Table A; Target 76720; HLA-A*30:02; SLC22A9; ENSG00000149742; TAA
AALAPTFLIY

SEQ ID NO: 76721 - protein, 10 aa, Homo sapiens
  Table A; Target 76721; HLA-B*15:03; SLC22A9; ENSG00000149742; TAA
AALAPTFLIY

SEQ ID NO: 76722 - protein, 10 aa, Homo sapiens
  Table A; Target 76722; HLA-B*57:01; SLC22A9; ENSG00000149742; TAA
AALAPTFLIY

SEQ ID NO: 76723 - protein, 10 aa, Homo sapiens
  Table A; Target 76723; HLA-C*02:02; SLC22A9; ENSG00000149742; TAA
AALAPTFLIY

SEQ ID NO: 76724 - protein, 10 aa, Homo sapiens
  Table A; Target 76724; HLA-C*16:04; SLC22A9; ENSG00000149742; TAA
AALAPTFLIY

SEQ ID NO: 76725 - protein, 9 aa, Homo sapiens
  Table A; Target 76725; HLA-B*08:01; SLC22A9; ENSG00000149742; TAA
AAQKKKPSL

SEQ ID NO: 76726 - protein, 9 aa, Homo sapiens
  Table A; Target 76726; HLA-C*16:01; SLC22A9; ENSG00000149742; TAA
AAQKKKPSL

SEQ ID NO: 76727 - protein, 8 aa, Homo sapiens
  Table A; Target 76727; HLA-B*37:01; SLC22A9; ENSG00000149742; TAA
AEWATHRF

SEQ ID NO: 76728 - protein, 8 aa, Homo sapiens
  Table A; Target 76728; HLA-B*44:02; SLC22A9; ENSG00000149742; TAA
AEWATHRF

SEQ ID NO: 76729 - protein, 8 aa, Homo sapiens
  Table A; Target 76729; HLA-B*44:03; SLC22A9; ENSG00000149742; TAA
AEWATHRF

SEQ ID NO: 76730 - protein, 9 aa, Homo sapiens
  Table A; Target 76730; HLA-A*24:02; SLC22A9; ENSG00000149742; TAA
AFIPGHRCW

SEQ ID NO: 76731 - protein, 9 aa, Homo sapiens
  Table A; Target 76731; HLA-A*31:01; SLC22A9; ENSG00000149742; TAA
AFLLLPETR

SEQ ID NO: 76732 - protein, 10 aa, Homo sapiens
  Table A; Target 76732; HLA-A*23:01; SLC22A9; ENSG00000149742; TAA
AFMTLAGLAF

SEQ ID NO: 76733 - protein, 10 aa, Homo sapiens
  Table A; Target 76733; HLA-A*24:02; SLC22A9; ENSG00000149742; TAA
AFMTLAGLAF

SEQ ID NO: 76734 - protein, 10 aa, Homo sapiens
  Table A; Target 76734; HLA-A*29:02; SLC22A9; ENSG00000149742; TAA
AFMTLAGLAF

SEQ ID NO: 76735 - protein, 10 aa, Homo sapiens
  Table A; Target 76735; HLA-C*14:02; SLC22A9; ENSG00000149742; TAA
AFMTLAGLAF

SEQ ID NO: 76736 - protein, 10 aa, Homo sapiens
  Table A; Target 76736; HLA-C*14:02; SLC22A9; ENSG00000149742; TAA
AFQDLLGHAG

SEQ ID NO: 76737 - protein, 8 aa, Homo sapiens
  Table A; Target 76737; HLA-B*15:03; SLC22A9; ENSG00000149742; TAA
AGALAPLM

SEQ ID NO: 76738 - protein, 8 aa, Homo sapiens
  Table A; Target 76738; HLA-B*37:01; SLC22A9; ENSG00000149742; TAA
AGALAPLM

SEQ ID NO: 76739 - protein, 8 aa, Homo sapiens
  Table A; Target 76739; HLA-C*03:04; SLC22A9; ENSG00000149742; TAA
AGALAPLM

SEQ ID NO: 76740 - protein, 8 aa, Homo sapiens
  Table A; Target 76740; HLA-C*16:01; SLC22A9; ENSG00000149742; TAA
AGALAPLM

SEQ ID NO: 76741 - protein, 10 aa, Homo sapiens
  Table A; Target 76741; HLA-B*57:01; SLC22A9; ENSG00000149742; TAA
AGLAFAIRDW

SEQ ID NO: 76742 - protein, 10 aa, Homo sapiens
  Table A; Target 76742; HLA-B*38:01; SLC22A9; ENSG00000149742; TAA
AHGNEVIPTI

SEQ ID NO: 76743 - protein, 10 aa, Homo sapiens
  Table A; Target 76743; HLA-B*39:01; SLC22A9; ENSG00000149742; TAA
AHGNEVIPTI

SEQ ID NO: 76744 - protein, 9 aa, Homo sapiens
  Table A; Target 76744; HLA-A*02:07; SLC22A9; ENSG00000149742; TAA
AIIFVPQEM

SEQ ID NO: 76745 - protein, 9 aa, Homo sapiens
  Table A; Target 76745; HLA-A*23:01; SLC22A9; ENSG00000149742; TAA
AIIFVPQEM

SEQ ID NO: 76746 - protein, 9 aa, Homo sapiens
  Table A; Target 76746; HLA-A*24:02; SLC22A9; ENSG00000149742; TAA
AIIFVPQEM

SEQ ID NO: 76747 - protein, 9 aa, Homo sapiens
  Table A; Target 76747; HLA-A*26:01; SLC22A9; ENSG00000149742; TAA
AIIFVPQEM

SEQ ID NO: 76748 - protein, 9 aa, Homo sapiens
  Table A; Target 76748; HLA-A*30:01; SLC22A9; ENSG00000149742; TAA
AIIFVPQEM

SEQ ID NO: 76749 - protein, 9 aa, Homo sapiens
  Table A; Target 76749; HLA-A*32:01; SLC22A9; ENSG00000149742; TAA
AIIFVPQEM

SEQ ID NO: 76750 - protein, 9 aa, Homo sapiens
  Table A; Target 76750; HLA-B*07:02; SLC22A9; ENSG00000149742; TAA
AIIFVPQEM

SEQ ID NO: 76751 - protein, 9 aa, Homo sapiens
  Table A; Target 76751; HLA-B*13:02; SLC22A9; ENSG00000149742; TAA
AIIFVPQEM

SEQ ID NO: 76752 - protein, 9 aa, Homo sapiens
  Table A; Target 76752; HLA-B*15:01; SLC22A9; ENSG00000149742; TAA
AIIFVPQEM

SEQ ID NO: 76753 - protein, 9 aa, Homo sapiens
  Table A; Target 76753; HLA-B*15:03; SLC22A9; ENSG00000149742; TAA
AIIFVPQEM

SEQ ID NO: 76754 - protein, 9 aa, Homo sapiens
  Table A; Target 76754; HLA-B*35:03; SLC22A9; ENSG00000149742; TAA
AIIFVPQEM

SEQ ID NO: 76755 - protein, 9 aa, Homo sapiens
  Table A; Target 76755; HLA-B*39:01; SLC22A9; ENSG00000149742; TAA
AIIFVPQEM

SEQ ID NO: 76756 - protein, 9 aa, Homo sapiens
  Table A; Target 76756; HLA-B*44:02; SLC22A9; ENSG00000149742; TAA
AIIFVPQEM

SEQ ID NO: 76757 - protein, 9 aa, Homo sapiens
  Table A; Target 76757; HLA-B*44:03; SLC22A9; ENSG00000149742; TAA
AIIFVPQEM

SEQ ID NO: 76758 - protein, 9 aa, Homo sapiens
  Table A; Target 76758; HLA-B*46:01; SLC22A9; ENSG00000149742; TAA
AIIFVPQEM

SEQ ID NO: 76759 - protein, 9 aa, Homo sapiens
  Table A; Target 76759; HLA-B*58:01; SLC22A9; ENSG00000149742; TAA
AIIFVPQEM

SEQ ID NO: 76760 - protein, 9 aa, Homo sapiens
  Table A; Target 76760; HLA-C*01:02; SLC22A9; ENSG00000149742; TAA
AIIFVPQEM

SEQ ID NO: 76761 - protein, 9 aa, Homo sapiens
  Table A; Target 76761; HLA-C*02:02; SLC22A9; ENSG00000149742; TAA
AIIFVPQEM

SEQ ID NO: 76762 - protein, 9 aa, Homo sapiens
  Table A; Target 76762; HLA-C*03:03; SLC22A9; ENSG00000149742; TAA
AIIFVPQEM

SEQ ID NO: 76763 - protein, 9 aa, Homo sapiens
  Table A; Target 76763; HLA-C*03:04; SLC22A9; ENSG00000149742; TAA
AIIFVPQEM

SEQ ID NO: 76764 - protein, 9 aa, Homo sapiens
  Table A; Target 76764; HLA-C*12:03; SLC22A9; ENSG00000149742; TAA
AIIFVPQEM

SEQ ID NO: 76765 - protein, 9 aa, Homo sapiens
  Table A; Target 76765; HLA-C*14:02; SLC22A9; ENSG00000149742; TAA
AIIFVPQEM

SEQ ID NO: 76766 - protein, 9 aa, Homo sapiens
  Table A; Target 76766; HLA-C*16:04; SLC22A9; ENSG00000149742; TAA
AIIFVPQEM

SEQ ID NO: 76767 - protein, 10 aa, Homo sapiens
  Table A; Target 76767; HLA-A*02:03; SLC22A9; ENSG00000149742; TAA
AIRDWHILQL

SEQ ID NO: 76768 - protein, 10 aa, Homo sapiens
  Table A; Target 76768; HLA-A*02:04; SLC22A9; ENSG00000149742; TAA
AIRDWHILQL

SEQ ID NO: 76769 - protein, 9 aa, Homo sapiens
  Table A; Target 76769; HLA-C*01:02; SLC22A9; ENSG00000149742; TAA
AIVGTCAAL

SEQ ID NO: 76770 - protein, 9 aa, Homo sapiens
  Table A; Target 76770; HLA-C*03:03; SLC22A9; ENSG00000149742; TAA
AIVGTCAAL

SEQ ID NO: 76771 - protein, 9 aa, Homo sapiens
  Table A; Target 76771; HLA-C*03:04; SLC22A9; ENSG00000149742; TAA
AIVGTCAAL

SEQ ID NO: 76772 - protein, 8 aa, Homo sapiens
  Table A; Target 76772; HLA-A*23:01; SLC22A9; ENSG00000149742; TAA
ALANTLAF

SEQ ID NO: 76773 - protein, 8 aa, Homo sapiens
  Table A; Target 76773; HLA-B*37:01; SLC22A9; ENSG00000149742; TAA
ALANTLAF

SEQ ID NO: 76774 - protein, 9 aa, Homo sapiens
  Table A; Target 76774; HLA-A*02:01; SLC22A9; ENSG00000149742; TAA
ALANTLAFA

SEQ ID NO: 76775 - protein, 9 aa, Homo sapiens
  Table A; Target 76775; HLA-A*02:03; SLC22A9; ENSG00000149742; TAA
ALANTLAFA

SEQ ID NO: 76776 - protein, 9 aa, Homo sapiens
  Table A; Target 76776; HLA-A*02:04; SLC22A9; ENSG00000149742; TAA
ALANTLAFA

SEQ ID NO: 76777 - protein, 9 aa, Homo sapiens
  Table A; Target 76777; HLA-B*55:01; SLC22A9; ENSG00000149742; TAA
ALANTLAFA

SEQ ID NO: 76778 - protein, 10 aa, Homo sapiens
  Table A; Target 76778; HLA-A*03:01; SLC22A9; ENSG00000149742; TAA
ALANTLAFAH

SEQ ID NO: 76779 - protein, 10 aa, Homo sapiens
  Table A; Target 76779; HLA-A*03:02; SLC22A9; ENSG00000149742; TAA
ALANTLAFAH

SEQ ID NO: 76780 - protein, 9 aa, Homo sapiens
  Table A; Target 76780; HLA-A*02:01; SLC22A9; ENSG00000149742; TAA
ALAPLMMIL

SEQ ID NO: 76781 - protein, 9 aa, Homo sapiens
  Table A; Target 76781; HLA-A*02:03; SLC22A9; ENSG00000149742; TAA
ALAPLMMIL

SEQ ID NO: 76782 - protein, 9 aa, Homo sapiens
  Table A; Target 76782; HLA-A*02:04; SLC22A9; ENSG00000149742; TAA
ALAPLMMIL

SEQ ID NO: 76783 - protein, 9 aa, Homo sapiens
  Table A; Target 76783; HLA-A*02:07; SLC22A9; ENSG00000149742; TAA
ALAPLMMIL

SEQ ID NO: 76784 - protein, 9 aa, Homo sapiens
  Table A; Target 76784; HLA-A*03:01; SLC22A9; ENSG00000149742; TAA
ALAPLMMIL

SEQ ID NO: 76785 - protein, 9 aa, Homo sapiens
  Table A; Target 76785; HLA-A*24:02; SLC22A9; ENSG00000149742; TAA
ALAPLMMIL

SEQ ID NO: 76786 - protein, 9 aa, Homo sapiens
  Table A; Target 76786; HLA-C*02:02; SLC22A9; ENSG00000149742; TAA
ALAPLMMIL

SEQ ID NO: 76787 - protein, 11 aa, Homo sapiens
  Table A; Target 76787; HLA-A*02:01; SLC22A9; ENSG00000149742; TAA
ALAPLMMILSV

SEQ ID NO: 76788 - protein, 11 aa, Homo sapiens
  Table A; Target 76788; HLA-A*02:04; SLC22A9; ENSG00000149742; TAA
ALAPLMMILSV

SEQ ID NO: 76789 - protein, 8 aa, Homo sapiens
  Table A; Target 76789; HLA-A*02:04; SLC22A9; ENSG00000149742; TAA
ALAPTFLI

SEQ ID NO: 76790 - protein, 8 aa, Homo sapiens
  Table A; Target 76790; HLA-A*23:01; SLC22A9; ENSG00000149742; TAA
ALAPTFLI

SEQ ID NO: 76791 - protein, 8 aa, Homo sapiens
  Table A; Target 76791; HLA-B*13:02; SLC22A9; ENSG00000149742; TAA
ALAPTFLI

SEQ ID NO: 76792 - protein, 9 aa, Homo sapiens
  Table A; Target 76792; HLA-A*01:01; SLC22A9; ENSG00000149742; TAA
ALAPTFLIY

SEQ ID NO: 76793 - protein, 9 aa, Homo sapiens
  Table A; Target 76793; HLA-A*03:01; SLC22A9; ENSG00000149742; TAA
ALAPTFLIY

SEQ ID NO: 76794 - protein, 9 aa, Homo sapiens
  Table A; Target 76794; HLA-A*23:01; SLC22A9; ENSG00000149742; TAA
ALAPTFLIY

SEQ ID NO: 76795 - protein, 9 aa, Homo sapiens
  Table A; Target 76795; HLA-A*24:02; SLC22A9; ENSG00000149742; TAA
ALAPTFLIY

SEQ ID NO: 76796 - protein, 9 aa, Homo sapiens
  Table A; Target 76796; HLA-A*25:01; SLC22A9; ENSG00000149742; TAA
ALAPTFLIY

SEQ ID NO: 76797 - protein, 9 aa, Homo sapiens
  Table A; Target 76797; HLA-A*26:01; SLC22A9; ENSG00000149742; TAA
ALAPTFLIY

SEQ ID NO: 76798 - protein, 9 aa, Homo sapiens
  Table A; Target 76798; HLA-A*29:02; SLC22A9; ENSG00000149742; TAA
ALAPTFLIY

SEQ ID NO: 76799 - protein, 9 aa, Homo sapiens
  Table A; Target 76799; HLA-A*30:02; SLC22A9; ENSG00000149742; TAA
ALAPTFLIY

SEQ ID NO: 76800 - protein, 9 aa, Homo sapiens
  Table A; Target 76800; HLA-A*32:01; SLC22A9; ENSG00000149742; TAA
ALAPTFLIY

SEQ ID NO: 76801 - protein, 9 aa, Homo sapiens
  Table A; Target 76801; HLA-B*15:01; SLC22A9; ENSG00000149742; TAA
ALAPTFLIY

SEQ ID NO: 76802 - protein, 9 aa, Homo sapiens
  Table A; Target 76802; HLA-B*15:03; SLC22A9; ENSG00000149742; TAA
ALAPTFLIY

SEQ ID NO: 76803 - protein, 9 aa, Homo sapiens
  Table A; Target 76803; HLA-B*35:01; SLC22A9; ENSG00000149742; TAA
ALAPTFLIY

SEQ ID NO: 76804 - protein, 9 aa, Homo sapiens
  Table A; Target 76804; HLA-B*44:03; SLC22A9; ENSG00000149742; TAA
ALAPTFLIY

SEQ ID NO: 76805 - protein, 9 aa, Homo sapiens
  Table A; Target 76805; HLA-B*46:01; SLC22A9; ENSG00000149742; TAA
ALAPTFLIY

SEQ ID NO: 76806 - protein, 9 aa, Homo sapiens
  Table A; Target 76806; HLA-B*57:01; SLC22A9; ENSG00000149742; TAA
ALAPTFLIY

SEQ ID NO: 76807 - protein, 9 aa, Homo sapiens
  Table A; Target 76807; HLA-B*58:01; SLC22A9; ENSG00000149742; TAA
ALAPTFLIY

SEQ ID NO: 76808 - protein, 9 aa, Homo sapiens
  Table A; Target 76808; HLA-C*02:02; SLC22A9; ENSG00000149742; TAA
ALAPTFLIY

SEQ ID NO: 76809 - protein, 9 aa, Homo sapiens
  Table A; Target 76809; HLA-C*07:04; SLC22A9; ENSG00000149742; TAA
ALAPTFLIY

SEQ ID NO: 76810 - protein, 9 aa, Homo sapiens
  Table A; Target 76810; HLA-C*16:01; SLC22A9; ENSG00000149742; TAA
ALAPTFLIY

SEQ ID NO: 76811 - protein, 10 aa, Homo sapiens
  Table A; Target 76811; HLA-A*02:01; SLC22A9; ENSG00000149742; TAA
ALAPTFLIYC

SEQ ID NO: 76812 - protein, 10 aa, Homo sapiens
  Table A; Target 76812; HLA-A*02:03; SLC22A9; ENSG00000149742; TAA
ALAPTFLIYC

SEQ ID NO: 76813 - protein, 10 aa, Homo sapiens
  Table A; Target 76813; HLA-A*02:04; SLC22A9; ENSG00000149742; TAA
ALAPTFLIYC

SEQ ID NO: 76814 - protein, 9 aa, Homo sapiens
  Table A; Target 76814; HLA-A*02:01; SLC22A9; ENSG00000149742; TAA
ALLRISIPL

SEQ ID NO: 76815 - protein, 9 aa, Homo sapiens
  Table A; Target 76815; HLA-A*02:04; SLC22A9; ENSG00000149742; TAA
ALLRISIPL

SEQ ID NO: 76816 - protein, 9 aa, Homo sapiens
  Table A; Target 76816; HLA-A*03:01; SLC22A9; ENSG00000149742; TAA
ALLRISIPL

SEQ ID NO: 76817 - protein, 10 aa, Homo sapiens
  Table A; Target 76817; HLA-A*02:01; SLC22A9; ENSG00000149742; TAA
ALSQDALLRI

SEQ ID NO: 76818 - protein, 10 aa, Homo sapiens
  Table A; Target 76818; HLA-A*02:03; SLC22A9; ENSG00000149742; TAA
ALSQDALLRI

SEQ ID NO: 76819 - protein, 10 aa, Homo sapiens
  Table A; Target 76819; HLA-A*02:04; SLC22A9; ENSG00000149742; TAA
ALSQDALLRI

SEQ ID NO: 76820 - protein, 10 aa, Homo sapiens
  Table A; Target 76820; HLA-B*13:02; SLC22A9; ENSG00000149742; TAA
ALSQDALLRI

SEQ ID NO: 76821 - protein, 8 aa, Homo sapiens
  Table A; Target 76821; HLA-A*23:01; SLC22A9; ENSG00000149742; TAA
AMGINATF

SEQ ID NO: 76822 - protein, 8 aa, Homo sapiens
  Table A; Target 76822; HLA-A*32:01; SLC22A9; ENSG00000149742; TAA
AMGINATF

SEQ ID NO: 76823 - protein, 8 aa, Homo sapiens
  Table A; Target 76823; HLA-B*15:01; SLC22A9; ENSG00000149742; TAA
AMGINATF

SEQ ID NO: 76824 - protein, 8 aa, Homo sapiens
  Table A; Target 76824; HLA-B*37:01; SLC22A9; ENSG00000149742; TAA
AMGINATF

SEQ ID NO: 76825 - protein, 8 aa, Homo sapiens
  Table A; Target 76825; HLA-B*46:01; SLC22A9; ENSG00000149742; TAA
AMGINATF

SEQ ID NO: 76826 - protein, 8 aa, Homo sapiens
  Table A; Target 76826; HLA-C*14:02; SLC22A9; ENSG00000149742; TAA
AMGINATF

SEQ ID NO: 76827 - protein, 8 aa, Homo sapiens
  Table A; Target 76827; HLA-C*16:01; SLC22A9; ENSG00000149742; TAA
AMGINATF

SEQ ID NO: 76828 - protein, 9 aa, Homo sapiens
  Table A; Target 76828; HLA-A*02:01; SLC22A9; ENSG00000149742; TAA
AMSLITNTI

SEQ ID NO: 76829 - protein, 9 aa, Homo sapiens
  Table A; Target 76829; HLA-A*02:03; SLC22A9; ENSG00000149742; TAA
AMSLITNTI

SEQ ID NO: 76830 - protein, 9 aa, Homo sapiens
  Table A; Target 76830; HLA-A*23:01; SLC22A9; ENSG00000149742; TAA
AMSLITNTI

SEQ ID NO: 76831 - protein, 9 aa, Homo sapiens
  Table A; Target 76831; HLA-A*24:02; SLC22A9; ENSG00000149742; TAA
AMSLITNTI

SEQ ID NO: 76832 - protein, 9 aa, Homo sapiens
  Table A; Target 76832; HLA-A*30:01; SLC22A9; ENSG00000149742; TAA
AMSLITNTI

SEQ ID NO: 76833 - protein, 9 aa, Homo sapiens
  Table A; Target 76833; HLA-A*32:01; SLC22A9; ENSG00000149742; TAA
AMSLITNTI

SEQ ID NO: 76834 - protein, 9 aa, Homo sapiens
  Table A; Target 76834; HLA-B*13:02; SLC22A9; ENSG00000149742; TAA
AMSLITNTI

SEQ ID NO: 76835 - protein, 9 aa, Homo sapiens
  Table A; Target 76835; HLA-B*37:01; SLC22A9; ENSG00000149742; TAA
AMSLITNTI

SEQ ID NO: 76836 - protein, 9 aa, Homo sapiens
  Table A; Target 76836; HLA-B*38:01; SLC22A9; ENSG00000149742; TAA
AMSLITNTI

SEQ ID NO: 76837 - protein, 9 aa, Homo sapiens
  Table A; Target 76837; HLA-B*49:01; SLC22A9; ENSG00000149742; TAA
AMSLITNTI

SEQ ID NO: 76838 - protein, 9 aa, Homo sapiens
  Table A; Target 76838; HLA-B*55:01; SLC22A9; ENSG00000149742; TAA
AMSLITNTI

SEQ ID NO: 76839 - protein, 9 aa, Homo sapiens
  Table A; Target 76839; HLA-C*06:02; SLC22A9; ENSG00000149742; TAA
AMSLITNTI

SEQ ID NO: 76840 - protein, 9 aa, Homo sapiens
  Table A; Target 76840; HLA-B*51:01; SLC22A9; ENSG00000149742; TAA
APLMMILSV

SEQ ID NO: 76841 - protein, 9 aa, Homo sapiens
  Table A; Target 76841; HLA-B*54:01; SLC22A9; ENSG00000149742; TAA
APLMMILSV

SEQ ID NO: 76842 - protein, 9 aa, Homo sapiens
  Table A; Target 76842; HLA-B*55:01; SLC22A9; ENSG00000149742; TAA
APLMMILSV

SEQ ID NO: 76843 - protein, 9 aa, Homo sapiens
  Table A; Target 76843; HLA-B*56:01; SLC22A9; ENSG00000149742; TAA
APLMMILSV

SEQ ID NO: 76844 - protein, 10 aa, Homo sapiens
  Table A; Target 76844; HLA-B*35:01; SLC22A9; ENSG00000149742; TAA
APLMMILSVY

SEQ ID NO: 76845 - protein, 8 aa, Homo sapiens
  Table A; Target 76845; HLA-B*56:01; SLC22A9; ENSG00000149742; TAA
APTFLIYC

SEQ ID NO: 76846 - protein, 8 aa, Homo sapiens
  Table A; Target 76846; HLA-B*08:01; SLC22A9; ENSG00000149742; TAA
AQKKKPSL

SEQ ID NO: 76847 - protein, 10 aa, Homo sapiens
  Table A; Target 76847; HLA-B*27:02; SLC22A9; ENSG00000149742; TAA
ARAMGINATF

SEQ ID NO: 76848 - protein, 10 aa, Homo sapiens
  Table A; Target 76848; HLA-B*27:05; SLC22A9; ENSG00000149742; TAA
ARAMGINATF

SEQ ID NO: 76849 - protein, 10 aa, Homo sapiens
  Table A; Target 76849; HLA-B*38:01; SLC22A9; ENSG00000149742; TAA
ARAMGINATF

SEQ ID NO: 76850 - protein, 10 aa, Homo sapiens
  Table A; Target 76850; HLA-B*44:02; SLC22A9; ENSG00000149742; TAA
ARAMGINATF

SEQ ID NO: 76851 - protein, 10 aa, Homo sapiens
  Table A; Target 76851; HLA-C*16:04; SLC22A9; ENSG00000149742; TAA
ARAMGINATF

SEQ ID NO: 76852 - protein, 9 aa, Homo sapiens
  Table A; Target 76852; HLA-B*38:01; SLC22A9; ENSG00000149742; TAA
ARDTLTLEI

SEQ ID NO: 76853 - protein, 9 aa, Homo sapiens
  Table A; Target 76853; HLA-B*27:05; SLC22A9; ENSG00000149742; TAA
ARWLIINNK

SEQ ID NO: 76854 - protein, 8 aa, Homo sapiens
  Table A; Target 76854; HLA-B*58:01; SLC22A9; ENSG00000149742; TAA
ASALANTL

SEQ ID NO: 76855 - protein, 8 aa, Homo sapiens
  Table A; Target 76855; HLA-C*01:02; SLC22A9; ENSG00000149742; TAA
ASALANTL

SEQ ID NO: 76856 - protein, 8 aa, Homo sapiens
  Table A; Target 76856; HLA-C*03:03; SLC22A9; ENSG00000149742; TAA
ASALANTL

SEQ ID NO: 76857 - protein, 8 aa, Homo sapiens
  Table A; Target 76857; HLA-C*03:04; SLC22A9; ENSG00000149742; TAA
ASALANTL

SEQ ID NO: 76858 - protein, 8 aa, Homo sapiens
  Table A; Target 76858; HLA-C*14:02; SLC22A9; ENSG00000149742; TAA
ASALANTL

SEQ ID NO: 76859 - protein, 8 aa, Homo sapiens
  Table A; Target 76859; HLA-C*16:01; SLC22A9; ENSG00000149742; TAA
ASALANTL

SEQ ID NO: 76860 - protein, 10 aa, Homo sapiens
  Table A; Target 76860; HLA-A*25:01; SLC22A9; ENSG00000149742; TAA
ASALANTLAF

SEQ ID NO: 76861 - protein, 10 aa, Homo sapiens
  Table A; Target 76861; HLA-B*58:01; SLC22A9; ENSG00000149742; TAA
ASALANTLAF

SEQ ID NO: 76862 - protein, 10 aa, Homo sapiens
  Table A; Target 76862; HLA-C*16:04; SLC22A9; ENSG00000149742; TAA
ASALANTLAF

SEQ ID NO: 76863 - protein, 9 aa, Homo sapiens
  Table A; Target 76863; HLA-A*02:01; SLC22A9; ENSG00000149742; TAA
ATFANIAGA

SEQ ID NO: 76864 - protein, 9 aa, Homo sapiens
  Table A; Target 76864; HLA-A*02:03; SLC22A9; ENSG00000149742; TAA
ATFANIAGA

SEQ ID NO: 76865 - protein, 9 aa, Homo sapiens
  Table A; Target 76865; HLA-B*56:01; SLC22A9; ENSG00000149742; TAA
ATFANIAGA

SEQ ID NO: 76866 - protein, 10 aa, Homo sapiens
  Table A; Target 76866; HLA-A*03:01; SLC22A9; ENSG00000149742; TAA
ATFANIAGAL

SEQ ID NO: 76867 - protein, 9 aa, Homo sapiens
  Table A; Target 76867; HLA-B*56:01; SLC22A9; ENSG00000149742; TAA
ATLGLGASA

SEQ ID NO: 76868 - protein, 9 aa, Homo sapiens
  Table A; Target 76868; HLA-C*14:02; SLC22A9; ENSG00000149742; TAA
ATLGLGASA

SEQ ID NO: 76869 - protein, 10 aa, Homo sapiens
  Table A; Target 76869; HLA-A*03:02; SLC22A9; ENSG00000149742; TAA
ATLGLGASAL

SEQ ID NO: 76870 - protein, 10 aa, Homo sapiens
  Table A; Target 76870; HLA-A*11:01; SLC22A9; ENSG00000149742; TAA
ATLGLGASAL

SEQ ID NO: 76871 - protein, 10 aa, Homo sapiens
  Table A; Target 76871; HLA-A*30:01; SLC22A9; ENSG00000149742; TAA
ATLGLGASAL

SEQ ID NO: 76872 - protein, 10 aa, Homo sapiens
  Table A; Target 76872; HLA-A*31:01; SLC22A9; ENSG00000149742; TAA
ATLGLGASAL

SEQ ID NO: 76873 - protein, 10 aa, Homo sapiens
  Table A; Target 76873; HLA-B*40:01; SLC22A9; ENSG00000149742; TAA
ATLGLGASAL

SEQ ID NO: 76874 - protein, 10 aa, Homo sapiens
  Table A; Target 76874; HLA-B*40:02; SLC22A9; ENSG00000149742; TAA
ATLGLGASAL

SEQ ID NO: 76875 - protein, 10 aa, Homo sapiens
  Table A; Target 76875; HLA-B*46:01; SLC22A9; ENSG00000149742; TAA
ATLGLGASAL

SEQ ID NO: 76876 - protein, 10 aa, Homo sapiens
  Table A; Target 76876; HLA-B*58:01; SLC22A9; ENSG00000149742; TAA
ATLGLGASAL

SEQ ID NO: 76877 - protein, 10 aa, Homo sapiens
  Table A; Target 76877; HLA-C*01:02; SLC22A9; ENSG00000149742; TAA
ATLGLGASAL

SEQ ID NO: 76878 - protein, 10 aa, Homo sapiens
  Table A; Target 76878; HLA-C*03:03; SLC22A9; ENSG00000149742; TAA
ATLGLGASAL

SEQ ID NO: 76879 - protein, 10 aa, Homo sapiens
  Table A; Target 76879; HLA-C*03:04; SLC22A9; ENSG00000149742; TAA
ATLGLGASAL

SEQ ID NO: 76880 - protein, 10 aa, Homo sapiens
  Table A; Target 76880; HLA-C*07:01; SLC22A9; ENSG00000149742; TAA
ATLGLGASAL

SEQ ID NO: 76881 - protein, 10 aa, Homo sapiens
  Table A; Target 76881; HLA-C*07:02; SLC22A9; ENSG00000149742; TAA
ATLGLGASAL

SEQ ID NO: 76882 - protein, 10 aa, Homo sapiens
  Table A; Target 76882; HLA-C*12:03; SLC22A9; ENSG00000149742; TAA
ATLGLGASAL

SEQ ID NO: 76883 - protein, 10 aa, Homo sapiens
  Table A; Target 76883; HLA-C*14:02; SLC22A9; ENSG00000149742; TAA
ATLGLGASAL

SEQ ID NO: 76884 - protein, 10 aa, Homo sapiens
  Table A; Target 76884; HLA-C*16:04; SLC22A9; ENSG00000149742; TAA
ATLGLGASAL

SEQ ID NO: 76885 - protein, 9 aa, Homo sapiens
  Table A; Target 76885; HLA-A*02:04; SLC22A9; ENSG00000149742; TAA
AVATYLHFM

SEQ ID NO: 76886 - protein, 9 aa, Homo sapiens
  Table A; Target 76886; HLA-B*13:02; SLC22A9; ENSG00000149742; TAA
AVILLANCV

SEQ ID NO: 76887 - protein, 9 aa, Homo sapiens
  Table A; Target 76887; HLA-C*06:02; SLC22A9; ENSG00000149742; TAA
AVILLANCV

SEQ ID NO: 76888 - protein, 9 aa, Homo sapiens
  Table A; Target 76888; HLA-A*24:02; SLC22A9; ENSG00000149742; TAA
AYFGLNLHV

SEQ ID NO: 76889 - protein, 9 aa, Homo sapiens
  Table A; Target 76889; HLA-A*29:02; SLC22A9; ENSG00000149742; TAA
AYFGLNLHV

SEQ ID NO: 76890 - protein, 8 aa, Homo sapiens
  Table A; Target 76890; HLA-B*15:03; SLC22A9; ENSG00000149742; TAA
CAALAPTF

SEQ ID NO: 76891 - protein, 8 aa, Homo sapiens
  Table A; Target 76891; HLA-B*51:01; SLC22A9; ENSG00000149742; TAA
CAALAPTF

SEQ ID NO: 76892 - protein, 8 aa, Homo sapiens
  Table A; Target 76892; HLA-C*03:03; SLC22A9; ENSG00000149742; TAA
CAALAPTF

SEQ ID NO: 76893 - protein, 8 aa, Homo sapiens
  Table A; Target 76893; HLA-C*03:04; SLC22A9; ENSG00000149742; TAA
CAALAPTF

SEQ ID NO: 76894 - protein, 8 aa, Homo sapiens
  Table A; Target 76894; HLA-C*16:01; SLC22A9; ENSG00000149742; TAA
CAALAPTF

SEQ ID NO: 76895 - protein, 9 aa, Homo sapiens
  Table A; Target 76895; HLA-B*37:01; SLC22A9; ENSG00000149742; TAA
CDSQSLTSV

SEQ ID NO: 76896 - protein, 9 aa, Homo sapiens
  Table A; Target 76896; HLA-B*49:01; SLC22A9; ENSG00000149742; TAA
CDSQSLTSV

SEQ ID NO: 76897 - protein, 11 aa, Homo sapiens
  Table A; Target 76897; HLA-B*27:02; SLC22A9; ENSG00000149742; TAA
CDSQSLTSVAK

SEQ ID NO: 76898 - protein, 9 aa, Homo sapiens
  Table A; Target 76898; HLA-B*49:01; SLC22A9; ENSG00000149742; TAA
CEMLHMPNI

SEQ ID NO: 76899 - protein, 10 aa, Homo sapiens
  Table A; Target 76899; HLA-B*07:02; SLC22A9; ENSG00000149742; TAA
CPSGIAFMTL

SEQ ID NO: 76900 - protein, 10 aa, Homo sapiens
  Table A; Target 76900; HLA-B*35:01; SLC22A9; ENSG00000149742; TAA
CPSGIAFMTL

SEQ ID NO: 76901 - protein, 10 aa, Homo sapiens
  Table A; Target 76901; HLA-B*35:03; SLC22A9; ENSG00000149742; TAA
CPSGIAFMTL

SEQ ID NO: 76902 - protein, 10 aa, Homo sapiens
  Table A; Target 76902; HLA-B*56:01; SLC22A9; ENSG00000149742; TAA
CPSGIAFMTL

SEQ ID NO: 76903 - protein, 9 aa, Homo sapiens
  Table A; Target 76903; HLA-A*01:01; SLC22A9; ENSG00000149742; TAA
CVAPWALKY

SEQ ID NO: 76904 - protein, 9 aa, Homo sapiens
  Table A; Target 76904; HLA-A*03:01; SLC22A9; ENSG00000149742; TAA
CVAPWALKY

SEQ ID NO: 76905 - protein, 9 aa, Homo sapiens
  Table A; Target 76905; HLA-A*11:01; SLC22A9; ENSG00000149742; TAA
CVAPWALKY

SEQ ID NO: 76906 - protein, 9 aa, Homo sapiens
  Table A; Target 76906; HLA-A*26:01; SLC22A9; ENSG00000149742; TAA
CVAPWALKY

SEQ ID NO: 76907 - protein, 9 aa, Homo sapiens
  Table A; Target 76907; HLA-A*29:02; SLC22A9; ENSG00000149742; TAA
CVAPWALKY

SEQ ID NO: 76908 - protein, 9 aa, Homo sapiens
  Table A; Target 76908; HLA-A*30:02; SLC22A9; ENSG00000149742; TAA
CVAPWALKY

SEQ ID NO: 76909 - protein, 9 aa, Homo sapiens
  Table A; Target 76909; HLA-A*32:01; SLC22A9; ENSG00000149742; TAA
CVAPWALKY

SEQ ID NO: 76910 - protein, 9 aa, Homo sapiens
  Table A; Target 76910; HLA-B*15:01; SLC22A9; ENSG00000149742; TAA
CVAPWALKY

SEQ ID NO: 76911 - protein, 9 aa, Homo sapiens
  Table A; Target 76911; HLA-B*57:01; SLC22A9; ENSG00000149742; TAA
CVAPWALKY

SEQ ID NO: 76912 - protein, 9 aa, Homo sapiens
  Table A; Target 76912; HLA-C*02:02; SLC22A9; ENSG00000149742; TAA
CVAPWALKY

SEQ ID NO: 76913 - protein, 9 aa, Homo sapiens
  Table A; Target 76913; HLA-C*12:03; SLC22A9; ENSG00000149742; TAA
CVAPWALKY

SEQ ID NO: 76914 - protein, 8 aa, Homo sapiens
  Table A; Target 76914; HLA-B*51:01; SLC22A9; ENSG00000149742; TAA
DADMEPCV

SEQ ID NO: 76915 - protein, 8 aa, Homo sapiens
  Table A; Target 76915; HLA-B*08:01; SLC22A9; ENSG00000149742; TAA
DALLRISI

SEQ ID NO: 76916 - protein, 8 aa, Homo sapiens
  Table A; Target 76916; HLA-B*51:01; SLC22A9; ENSG00000149742; TAA
DALLRISI

SEQ ID NO: 76917 - protein, 8 aa, Homo sapiens
  Table A; Target 76917; HLA-B*51:01; SLC22A9; ENSG00000149742; TAA
DGWVYDRI

SEQ ID NO: 76918 - protein, 10 aa, Homo sapiens
  Table A; Target 76918; HLA-A*25:01; SLC22A9; ENSG00000149742; TAA
DLLGHAGDLW

SEQ ID NO: 76919 - protein, 11 aa, Homo sapiens
  Table A; Target 76919; HLA-A*01:01; SLC22A9; ENSG00000149742; TAA
DMEPCVDGWVY

SEQ ID NO: 76920 - protein, 9 aa, Homo sapiens
  Table A; Target 76920; HLA-A*25:01; SLC22A9; ENSG00000149742; TAA
DPRVEVTQF

SEQ ID NO: 76921 - protein, 9 aa, Homo sapiens
  Table A; Target 76921; HLA-A*33:01; SLC22A9; ENSG00000149742; TAA
DPRVEVTQF

SEQ ID NO: 76922 - protein, 9 aa, Homo sapiens
  Table A; Target 76922; HLA-B*07:02; SLC22A9; ENSG00000149742; TAA
DPRVEVTQF

SEQ ID NO: 76923 - protein, 9 aa, Homo sapiens
  Table A; Target 76923; HLA-B*08:01; SLC22A9; ENSG00000149742; TAA
DPRVEVTQF

SEQ ID NO: 76924 - protein, 9 aa, Homo sapiens
  Table A; Target 76924; HLA-B*18:01; SLC22A9; ENSG00000149742; TAA
DPRVEVTQF

SEQ ID NO: 76925 - protein, 9 aa, Homo sapiens
  Table A; Target 76925; HLA-B*35:01; SLC22A9; ENSG00000149742; TAA
DPRVEVTQF

SEQ ID NO: 76926 - protein, 9 aa, Homo sapiens
  Table A; Target 76926; HLA-B*51:01; SLC22A9; ENSG00000149742; TAA
DPRVEVTQF

SEQ ID NO: 76927 - protein, 9 aa, Homo sapiens
  Table A; Target 76927; HLA-B*55:01; SLC22A9; ENSG00000149742; TAA
DPRVEVTQF

SEQ ID NO: 76928 - protein, 9 aa, Homo sapiens
  Table A; Target 76928; HLA-C*07:02; SLC22A9; ENSG00000149742; TAA
DPRVEVTQF

SEQ ID NO: 76929 - protein, 10 aa, Homo sapiens
  Table A; Target 76929; HLA-A*33:01; SLC22A9; ENSG00000149742; TAA
DSNMRPEKCR

SEQ ID NO: 76930 - protein, 8 aa, Homo sapiens
  Table A; Target 76930; HLA-B*51:01; SLC22A9; ENSG00000149742; TAA
DSQSLTSV

SEQ ID NO: 76931 - protein, 10 aa, Homo sapiens
  Table A; Target 76931; HLA-A*03:02; SLC22A9; ENSG00000149742; TAA
DSQSLTSVAK

SEQ ID NO: 76932 - protein, 10 aa, Homo sapiens
  Table A; Target 76932; HLA-A*11:01; SLC22A9; ENSG00000149742; TAA
DSQSLTSVAK

SEQ ID NO: 76933 - protein, 10 aa, Homo sapiens
  Table A; Target 76933; HLA-A*33:01; SLC22A9; ENSG00000149742; TAA
DSQSLTSVAK

SEQ ID NO: 76934 - protein, 10 aa, Homo sapiens
  Table A; Target 76934; HLA-A*33:03; SLC22A9; ENSG00000149742; TAA
DSQSLTSVAK

SEQ ID NO: 76935 - protein, 10 aa, Homo sapiens
  Table A; Target 76935; HLA-A*68:01; SLC22A9; ENSG00000149742; TAA
DSQSLTSVAK

SEQ ID NO: 76936 - protein, 10 aa, Homo sapiens
  Table A; Target 76936; HLA-B*27:02; SLC22A9; ENSG00000149742; TAA
DSQSLTSVAK

SEQ ID NO: 76937 - protein, 10 aa, Homo sapiens
  Table A; Target 76937; HLA-C*07:06; SLC22A9; ENSG00000149742; TAA
DSQSLTSVAK

SEQ ID NO: 76938 - protein, 11 aa, Homo sapiens
  Table A; Target 76938; HLA-A*25:01; SLC22A9; ENSG00000149742; TAA
DSQSLTSVAKF

SEQ ID NO: 76939 - protein, 11 aa, Homo sapiens
  Table A; Target 76939; HLA-A*26:01; SLC22A9; ENSG00000149742; TAA
DSQSLTSVAKF

SEQ ID NO: 76940 - protein, 11 aa, Homo sapiens
  Table A; Target 76940; HLA-A*33:01; SLC22A9; ENSG00000149742; TAA
DSQSLTSVAKF

SEQ ID NO: 76941 - protein, 10 aa, Homo sapiens
  Table A; Target 76941; HLA-A*33:01; SLC22A9; ENSG00000149742; TAA
DTIQDEKNER

SEQ ID NO: 76942 - protein, 10 aa, Homo sapiens
  Table A; Target 76942; HLA-A*33:03; SLC22A9; ENSG00000149742; TAA
DTIQDEKNER

SEQ ID NO: 76943 - protein, 10 aa, Homo sapiens
  Table A; Target 76943; HLA-A*68:01; SLC22A9; ENSG00000149742; TAA
DTIQDEKNER

SEQ ID NO: 76944 - protein, 10 aa, Homo sapiens
  Table A; Target 76944; HLA-C*07:06; SLC22A9; ENSG00000149742; TAA
DTIQDEKNER

SEQ ID NO: 76945 - protein, 11 aa, Homo sapiens
  Table A; Target 76945; HLA-A*33:01; SLC22A9; ENSG00000149742; TAA
DTIQDEKNERK

SEQ ID NO: 76946 - protein, 11 aa, Homo sapiens
  Table A; Target 76946; HLA-A*68:01; SLC22A9; ENSG00000149742; TAA
DTIQDEKNERK

SEQ ID NO: 76947 - protein, 9 aa, Homo sapiens
  Table A; Target 76947; HLA-A*11:01; SLC22A9; ENSG00000149742; TAA
DTLTLEILK

SEQ ID NO: 76948 - protein, 9 aa, Homo sapiens
  Table A; Target 76948; HLA-A*33:01; SLC22A9; ENSG00000149742; TAA
DTLTLEILK

SEQ ID NO: 76949 - protein, 9 aa, Homo sapiens
  Table A; Target 76949; HLA-A*33:03; SLC22A9; ENSG00000149742; TAA
DTLTLEILK

SEQ ID NO: 76950 - protein, 9 aa, Homo sapiens
  Table A; Target 76950; HLA-A*68:01; SLC22A9; ENSG00000149742; TAA
DTLTLEILK

SEQ ID NO: 76951 - protein, 9 aa, Homo sapiens
  Table A; Target 76951; HLA-B*27:02; SLC22A9; ENSG00000149742; TAA
DTLTLEILK

SEQ ID NO: 76952 - protein, 10 aa, Homo sapiens
  Table A; Target 76952; HLA-A*33:01; SLC22A9; ENSG00000149742; TAA
DTLTLEILKS

SEQ ID NO: 76953 - protein, 11 aa, Homo sapiens
  Table A; Target 76953; HLA-A*33:01; SLC22A9; ENSG00000149742; TAA
DTLTLEILKST

SEQ ID NO: 76954 - protein, 10 aa, Homo sapiens
  Table A; Target 76954; HLA-A*25:01; SLC22A9; ENSG00000149742; TAA
EDPRVEVTQF

SEQ ID NO: 76955 - protein, 10 aa, Homo sapiens
  Table A; Target 76955; HLA-A*26:01; SLC22A9; ENSG00000149742; TAA
EDPRVEVTQF

SEQ ID NO: 76956 - protein, 10 aa, Homo sapiens
  Table A; Target 76956; HLA-B*44:03; SLC22A9; ENSG00000149742; TAA
EDPRVEVTQF

SEQ ID NO: 76957 - protein, 9 aa, Homo sapiens
  Table A; Target 76957; HLA-B*08:01; SLC22A9; ENSG00000149742; TAA
EMQTLREVL

SEQ ID NO: 76958 - protein, 9 aa, Homo sapiens
  Table A; Target 76958; HLA-B*35:01; SLC22A9; ENSG00000149742; TAA
EPCVDGWVY

SEQ ID NO: 76959 - protein, 8 aa, Homo sapiens
  Table A; Target 76959; HLA-A*33:03; SLC22A9; ENSG00000149742; TAA
EVIPTIIR

SEQ ID NO: 76960 - protein, 8 aa, Homo sapiens
  Table A; Target 76960; HLA-A*68:01; SLC22A9; ENSG00000149742; TAA
EVIPTIIR

SEQ ID NO: 76961 - protein, 9 aa, Homo sapiens
  Table A; Target 76961; HLA-A*02:03; SLC22A9; ENSG00000149742; TAA
EVIPTIIRA

SEQ ID NO: 76962 - protein, 9 aa, Homo sapiens
  Table A; Target 76962; HLA-A*02:04; SLC22A9; ENSG00000149742; TAA
EVIPTIIRA

SEQ ID NO: 76963 - protein, 9 aa, Homo sapiens
  Table A; Target 76963; HLA-A*02:07; SLC22A9; ENSG00000149742; TAA
EVIPTIIRA

SEQ ID NO: 76964 - protein, 9 aa, Homo sapiens
  Table A; Target 76964; HLA-A*25:01; SLC22A9; ENSG00000149742; TAA
EVIPTIIRA

SEQ ID NO: 76965 - protein, 9 aa, Homo sapiens
  Table A; Target 76965; HLA-A*26:01; SLC22A9; ENSG00000149742; TAA
EVIPTIIRA

SEQ ID NO: 76966 - protein, 9 aa, Homo sapiens
  Table A; Target 76966; HLA-A*33:03; SLC22A9; ENSG00000149742; TAA
EVIPTIIRA

SEQ ID NO: 76967 - protein, 9 aa, Homo sapiens
  Table A; Target 76967; HLA-A*68:01; SLC22A9; ENSG00000149742; TAA
EVIPTIIRA

SEQ ID NO: 76968 - protein, 9 aa, Homo sapiens
  Table A; Target 76968; HLA-A*68:02; SLC22A9; ENSG00000149742; TAA
EVIPTIIRA

SEQ ID NO: 76969 - protein, 9 aa, Homo sapiens
  Table A; Target 76969; HLA-B*54:01; SLC22A9; ENSG00000149742; TAA
EVIPTIIRA

SEQ ID NO: 76970 - protein, 9 aa, Homo sapiens
  Table A; Target 76970; HLA-B*55:01; SLC22A9; ENSG00000149742; TAA
EVIPTIIRA

SEQ ID NO: 76971 - protein, 9 aa, Homo sapiens
  Table A; Target 76971; HLA-B*56:01; SLC22A9; ENSG00000149742; TAA
EVIPTIIRA

SEQ ID NO: 76972 - protein, 9 aa, Homo sapiens
  Table A; Target 76972; HLA-C*02:02; SLC22A9; ENSG00000149742; TAA
EVIPTIIRA

SEQ ID NO: 76973 - protein, 10 aa, Homo sapiens
  Table A; Target 76973; HLA-A*11:01; SLC22A9; ENSG00000149742; TAA
EVIPTIIRAR

SEQ ID NO: 76974 - protein, 10 aa, Homo sapiens
  Table A; Target 76974; HLA-A*25:01; SLC22A9; ENSG00000149742; TAA
EVIPTIIRAR

SEQ ID NO: 76975 - protein, 10 aa, Homo sapiens
  Table A; Target 76975; HLA-A*26:01; SLC22A9; ENSG00000149742; TAA
EVIPTIIRAR

SEQ ID NO: 76976 - protein, 10 aa, Homo sapiens
  Table A; Target 76976; HLA-A*31:01; SLC22A9; ENSG00000149742; TAA
EVIPTIIRAR

SEQ ID NO: 76977 - protein, 10 aa, Homo sapiens
  Table A; Target 76977; HLA-A*33:01; SLC22A9; ENSG00000149742; TAA
EVIPTIIRAR

SEQ ID NO: 76978 - protein, 10 aa, Homo sapiens
  Table A; Target 76978; HLA-A*33:03; SLC22A9; ENSG00000149742; TAA
EVIPTIIRAR

SEQ ID NO: 76979 - protein, 10 aa, Homo sapiens
  Table A; Target 76979; HLA-A*68:01; SLC22A9; ENSG00000149742; TAA
EVIPTIIRAR

SEQ ID NO: 76980 - protein, 10 aa, Homo sapiens
  Table A; Target 76980; HLA-A*68:02; SLC22A9; ENSG00000149742; TAA
EVIPTIIRAR

SEQ ID NO: 76981 - protein, 10 aa, Homo sapiens
  Table A; Target 76981; HLA-B*57:01; SLC22A9; ENSG00000149742; TAA
EVIPTIIRAR

SEQ ID NO: 76982 - protein, 10 aa, Homo sapiens
  Table A; Target 76982; HLA-C*07:06; SLC22A9; ENSG00000149742; TAA
EVIPTIIRAR

SEQ ID NO: 76983 - protein, 10 aa, Homo sapiens
  Table A; Target 76983; HLA-A*26:01; SLC22A9; ENSG00000149742; TAA
EVLATLGLGA

SEQ ID NO: 76984 - protein, 10 aa, Homo sapiens
  Table A; Target 76984; HLA-B*54:01; SLC22A9; ENSG00000149742; TAA
EVLATLGLGA

SEQ ID NO: 76985 - protein, 11 aa, Homo sapiens
  Table A; Target 76985; HLA-A*33:01; SLC22A9; ENSG00000149742; TAA
EVLATLGLGAS

SEQ ID NO: 76986 - protein, 11 aa, Homo sapiens
  Table A; Target 76986; HLA-C*04:01; SLC22A9; ENSG00000149742; TAA
EVLATLGLGAS

SEQ ID NO: 76987 - protein, 9 aa, Homo sapiens
  Table A; Target 76987; HLA-B*54:01; SLC22A9; ENSG00000149742; TAA
FAFLLLPET

SEQ ID NO: 76988 - protein, 10 aa, Homo sapiens
  Table A; Target 76988; HLA-B*54:01; SLC22A9; ENSG00000149742; TAA
FAFLLLPETR

SEQ ID NO: 76989 - protein, 8 aa, Homo sapiens
  Table A; Target 76989; HLA-B*08:01; SLC22A9; ENSG00000149742; TAA
FANIAGAL

SEQ ID NO: 76990 - protein, 8 aa, Homo sapiens
  Table A; Target 76990; HLA-B*35:01; SLC22A9; ENSG00000149742; TAA
FANIAGAL

SEQ ID NO: 76991 - protein, 8 aa, Homo sapiens
  Table A; Target 76991; HLA-B*35:03; SLC22A9; ENSG00000149742; TAA
FANIAGAL

SEQ ID NO: 76992 - protein, 8 aa, Homo sapiens
  Table A; Target 76992; HLA-B*40:01; SLC22A9; ENSG00000149742; TAA
FANIAGAL

SEQ ID NO: 76993 - protein, 8 aa, Homo sapiens
  Table A; Target 76993; HLA-B*40:02; SLC22A9; ENSG00000149742; TAA
FANIAGAL

SEQ ID NO: 76994 - protein, 8 aa, Homo sapiens
  Table A; Target 76994; HLA-B*46:01; SLC22A9; ENSG00000149742; TAA
FANIAGAL

SEQ ID NO: 76995 - protein, 8 aa, Homo sapiens
  Table A; Target 76995; HLA-C*01:02; SLC22A9; ENSG00000149742; TAA
FANIAGAL

SEQ ID NO: 76996 - protein, 8 aa, Homo sapiens
  Table A; Target 76996; HLA-C*02:02; SLC22A9; ENSG00000149742; TAA
FANIAGAL

SEQ ID NO: 76997 - protein, 8 aa, Homo sapiens
  Table A; Target 76997; HLA-C*03:03; SLC22A9; ENSG00000149742; TAA
FANIAGAL

SEQ ID NO: 76998 - protein, 8 aa, Homo sapiens
  Table A; Target 76998; HLA-C*03:04; SLC22A9; ENSG00000149742; TAA
FANIAGAL

SEQ ID NO: 76999 - protein, 8 aa, Homo sapiens
  Table A; Target 76999; HLA-C*05:01; SLC22A9; ENSG00000149742; TAA
FANIAGAL

SEQ ID NO: 77000 - protein, 8 aa, Homo sapiens
  Table A; Target 77000; HLA-C*06:02; SLC22A9; ENSG00000149742; TAA
FANIAGAL

SEQ ID NO: 77001 - protein, 8 aa, Homo sapiens
  Table A; Target 77001; HLA-C*07:02; SLC22A9; ENSG00000149742; TAA
FANIAGAL

SEQ ID NO: 77002 - protein, 8 aa, Homo sapiens
  Table A; Target 77002; HLA-C*07:04; SLC22A9; ENSG00000149742; TAA
FANIAGAL

SEQ ID NO: 77003 - protein, 8 aa, Homo sapiens
  Table A; Target 77003; HLA-C*12:03; SLC22A9; ENSG00000149742; TAA
FANIAGAL

SEQ ID NO: 77004 - protein, 8 aa, Homo sapiens
  Table A; Target 77004; HLA-C*14:02; SLC22A9; ENSG00000149742; TAA
FANIAGAL

SEQ ID NO: 77005 - protein, 8 aa, Homo sapiens
  Table A; Target 77005; HLA-C*16:01; SLC22A9; ENSG00000149742; TAA
FANIAGAL

SEQ ID NO: 77006 - protein, 8 aa, Homo sapiens
  Table A; Target 77006; HLA-C*16:02; SLC22A9; ENSG00000149742; TAA
FANIAGAL

SEQ ID NO: 77007 - protein, 8 aa, Homo sapiens
  Table A; Target 77007; HLA-C*16:04; SLC22A9; ENSG00000149742; TAA
FANIAGAL

SEQ ID NO: 77008 - protein, 9 aa, Homo sapiens
  Table A; Target 77008; HLA-B*46:01; SLC22A9; ENSG00000149742; TAA
FANIAGALA

SEQ ID NO: 77009 - protein, 9 aa, Homo sapiens
  Table A; Target 77009; HLA-B*54:01; SLC22A9; ENSG00000149742; TAA
FANIAGALA

SEQ ID NO: 77010 - protein, 9 aa, Homo sapiens
  Table A; Target 77010; HLA-C*02:02; SLC22A9; ENSG00000149742; TAA
FANIAGALA

SEQ ID NO: 77011 - protein, 9 aa, Homo sapiens
  Table A; Target 77011; HLA-C*03:03; SLC22A9; ENSG00000149742; TAA
FANIAGALA

SEQ ID NO: 77012 - protein, 9 aa, Homo sapiens
  Table A; Target 77012; HLA-C*03:04; SLC22A9; ENSG00000149742; TAA
FANIAGALA

SEQ ID NO: 77013 - protein, 9 aa, Homo sapiens
  Table A; Target 77013; HLA-A*23:01; SLC22A9; ENSG00000149742; TAA
FAVATYLHF

SEQ ID NO: 77014 - protein, 9 aa, Homo sapiens
  Table A; Target 77014; HLA-A*25:01; SLC22A9; ENSG00000149742; TAA
FAVATYLHF

SEQ ID NO: 77015 - protein, 9 aa, Homo sapiens
  Table A; Target 77015; HLA-A*26:01; SLC22A9; ENSG00000149742; TAA
FAVATYLHF

SEQ ID NO: 77016 - protein, 9 aa, Homo sapiens
  Table A; Target 77016; HLA-A*29:02; SLC22A9; ENSG00000149742; TAA
FAVATYLHF

SEQ ID NO: 77017 - protein, 9 aa, Homo sapiens
  Table A; Target 77017; HLA-B*35:01; SLC22A9; ENSG00000149742; TAA
FAVATYLHF

SEQ ID NO: 77018 - protein, 9 aa, Homo sapiens
  Table A; Target 77018; HLA-B*46:01; SLC22A9; ENSG00000149742; TAA
FAVATYLHF

SEQ ID NO: 77019 - protein, 9 aa, Homo sapiens
  Table A; Target 77019; HLA-B*57:01; SLC22A9; ENSG00000149742; TAA
FAVATYLHF

SEQ ID NO: 77020 - protein, 9 aa, Homo sapiens
  Table A; Target 77020; HLA-B*58:01; SLC22A9; ENSG00000149742; TAA
FAVATYLHF

SEQ ID NO: 77021 - protein, 9 aa, Homo sapiens
  Table A; Target 77021; HLA-C*02:02; SLC22A9; ENSG00000149742; TAA
FAVATYLHF

SEQ ID NO: 77022 - protein, 9 aa, Homo sapiens
  Table A; Target 77022; HLA-C*03:04; SLC22A9; ENSG00000149742; TAA
FAVATYLHF

SEQ ID NO: 77023 - protein, 9 aa, Homo sapiens
  Table A; Target 77023; HLA-C*16:04; SLC22A9; ENSG00000149742; TAA
FAVATYLHF

SEQ ID NO: 77024 - protein, 8 aa, Homo sapiens
  Table A; Target 77024; HLA-B*27:02; SLC22A9; ENSG00000149742; TAA
FDTIQDEK

SEQ ID NO: 77025 - protein, 9 aa, Homo sapiens
  Table A; Target 77025; HLA-A*02:04; SLC22A9; ENSG00000149742; TAA
FISGFAFLL

SEQ ID NO: 77026 - protein, 8 aa, Homo sapiens
  Table A; Target 77026; HLA-A*02:04; SLC22A9; ENSG00000149742; TAA
FLLAICLL

SEQ ID NO: 77027 - protein, 10 aa, Homo sapiens
  Table A; Target 77027; HLA-A*03:01; SLC22A9; ENSG00000149742; TAA
FLLLPETRNK

SEQ ID NO: 77028 - protein, 9 aa, Homo sapiens
  Table A; Target 77028; HLA-A*02:04; SLC22A9; ENSG00000149742; TAA
FLLQTLFGA

SEQ ID NO: 77029 - protein, 8 aa, Homo sapiens
  Table A; Target 77029; HLA-B*37:01; SLC22A9; ENSG00000149742; TAA
FLSGIAAM

SEQ ID NO: 77030 - protein, 8 aa, Homo sapiens
  Table A; Target 77030; HLA-C*07:04; SLC22A9; ENSG00000149742; TAA
FLSGIAAM

SEQ ID NO: 77031 - protein, 10 aa, Homo sapiens
  Table A; Target 77031; HLA-A*02:01; SLC22A9; ENSG00000149742; TAA
FLSGIAAMSL

SEQ ID NO: 77032 - protein, 10 aa, Homo sapiens
  Table A; Target 77032; HLA-A*02:03; SLC22A9; ENSG00000149742; TAA
FLSGIAAMSL

SEQ ID NO: 77033 - protein, 10 aa, Homo sapiens
  Table A; Target 77033; HLA-A*02:04; SLC22A9; ENSG00000149742; TAA
FLSGIAAMSL

SEQ ID NO: 77034 - protein, 10 aa, Homo sapiens
  Table A; Target 77034; HLA-A*02:07; SLC22A9; ENSG00000149742; TAA
FLSGIAAMSL

SEQ ID NO: 77035 - protein, 10 aa, Homo sapiens
  Table A; Target 77035; HLA-B*35:03; SLC22A9; ENSG00000149742; TAA
FLSGIAAMSL

SEQ ID NO: 77036 - protein, 10 aa, Homo sapiens
  Table A; Target 77036; HLA-C*01:02; SLC22A9; ENSG00000149742; TAA
FLSGIAAMSL

SEQ ID NO: 77037 - protein, 10 aa, Homo sapiens
  Table A; Target 77037; HLA-C*02:02; SLC22A9; ENSG00000149742; TAA
FLSGIAAMSL

SEQ ID NO: 77038 - protein, 10 aa, Homo sapiens
  Table A; Target 77038; HLA-C*14:02; SLC22A9; ENSG00000149742; TAA
FLSGIAAMSL

SEQ ID NO: 77039 - protein, 10 aa, Homo sapiens
  Table A; Target 77039; HLA-A*29:02; SLC22A9; ENSG00000149742; TAA
FLSIFAVATY

SEQ ID NO: 77040 - protein, 10 aa, Homo sapiens
  Table A; Target 77040; HLA-A*30:02; SLC22A9; ENSG00000149742; TAA
FLSIFAVATY

SEQ ID NO: 77041 - protein, 10 aa, Homo sapiens
  Table A; Target 77041; HLA-B*46:01; SLC22A9; ENSG00000149742; TAA
FLSIFAVATY

SEQ ID NO: 77042 - protein, 10 aa, Homo sapiens
  Table A; Target 77042; HLA-C*02:02; SLC22A9; ENSG00000149742; TAA
FLSIFAVATY

SEQ ID NO: 77043 - protein, 9 aa, Homo sapiens
  Table A; Target 77043; HLA-A*02:04; SLC22A9; ENSG00000149742; TAA
FMAYFGLNL

SEQ ID NO: 77044 - protein, 9 aa, Homo sapiens
  Table A; Target 77044; HLA-A*02:01; SLC22A9; ENSG00000149742; TAA
FMLENFTAF

SEQ ID NO: 77045 - protein, 9 aa, Homo sapiens
  Table A; Target 77045; HLA-A*02:04; SLC22A9; ENSG00000149742; TAA
FMLENFTAF

SEQ ID NO: 77046 - protein, 9 aa, Homo sapiens
  Table A; Target 77046; HLA-A*02:07; SLC22A9; ENSG00000149742; TAA
FMLENFTAF

SEQ ID NO: 77047 - protein, 9 aa, Homo sapiens
  Table A; Target 77047; HLA-A*23:01; SLC22A9; ENSG00000149742; TAA
FMLENFTAF

SEQ ID NO: 77048 - protein, 9 aa, Homo sapiens
  Table A; Target 77048; HLA-A*24:02; SLC22A9; ENSG00000149742; TAA
FMLENFTAF

SEQ ID NO: 77049 - protein, 9 aa, Homo sapiens
  Table A; Target 77049; HLA-A*25:01; SLC22A9; ENSG00000149742; TAA
FMLENFTAF

SEQ ID NO: 77050 - protein, 9 aa, Homo sapiens
  Table A; Target 77050; HLA-A*29:02; SLC22A9; ENSG00000149742; TAA
FMLENFTAF

SEQ ID NO: 77051 - protein, 9 aa, Homo sapiens
  Table A; Target 77051; HLA-B*15:03; SLC22A9; ENSG00000149742; TAA
FMLENFTAF

SEQ ID NO: 77052 - protein, 9 aa, Homo sapiens
  Table A; Target 77052; HLA-B*35:01; SLC22A9; ENSG00000149742; TAA
FMLENFTAF

SEQ ID NO: 77053 - protein, 9 aa, Homo sapiens
  Table A; Target 77053; HLA-B*46:01; SLC22A9; ENSG00000149742; TAA
FMLENFTAF

SEQ ID NO: 77054 - protein, 9 aa, Homo sapiens
  Table A; Target 77054; HLA-B*54:01; SLC22A9; ENSG00000149742; TAA
FMLENFTAF

SEQ ID NO: 77055 - protein, 9 aa, Homo sapiens
  Table A; Target 77055; HLA-C*02:02; SLC22A9; ENSG00000149742; TAA
FMLENFTAF

SEQ ID NO: 77056 - protein, 9 aa, Homo sapiens
  Table A; Target 77056; HLA-C*07:04; SLC22A9; ENSG00000149742; TAA
FMLENFTAF

SEQ ID NO: 77057 - protein, 9 aa, Homo sapiens
  Table A; Target 77057; HLA-C*14:02; SLC22A9; ENSG00000149742; TAA
FMLENFTAF

SEQ ID NO: 77058 - protein, 9 aa, Homo sapiens
  Table A; Target 77058; HLA-A*29:02; SLC22A9; ENSG00000149742; TAA
FMTLAGLAF

SEQ ID NO: 77059 - protein, 9 aa, Homo sapiens
  Table A; Target 77059; HLA-B*15:03; SLC22A9; ENSG00000149742; TAA
FMTLAGLAF

SEQ ID NO: 77060 - protein, 9 aa, Homo sapiens
  Table A; Target 77060; HLA-B*46:01; SLC22A9; ENSG00000149742; TAA
FMTLAGLAF

SEQ ID NO: 77061 - protein, 9 aa, Homo sapiens
  Table A; Target 77061; HLA-C*03:03; SLC22A9; ENSG00000149742; TAA
FMTLAGLAF

SEQ ID NO: 77062 - protein, 9 aa, Homo sapiens
  Table A; Target 77062; HLA-C*07:04; SLC22A9; ENSG00000149742; TAA
FMTLAGLAF

SEQ ID NO: 77063 - protein, 9 aa, Homo sapiens
  Table A; Target 77063; HLA-C*14:02; SLC22A9; ENSG00000149742; TAA
FMTLAGLAF

SEQ ID NO: 77064 - protein, 8 aa, Homo sapiens
  Table A; Target 77064; HLA-B*54:01; SLC22A9; ENSG00000149742; TAA
FPFISGFA

SEQ ID NO: 77065 - protein, 9 aa, Homo sapiens
  Table A; Target 77065; HLA-A*29:02; SLC22A9; ENSG00000149742; TAA
FPFISGFAF

SEQ ID NO: 77066 - protein, 9 aa, Homo sapiens
  Table A; Target 77066; HLA-B*35:01; SLC22A9; ENSG00000149742; TAA
FPFISGFAF

SEQ ID NO: 77067 - protein, 9 aa, Homo sapiens
  Table A; Target 77067; HLA-B*35:03; SLC22A9; ENSG00000149742; TAA
FPFISGFAF

SEQ ID NO: 77068 - protein, 9 aa, Homo sapiens
  Table A; Target 77068; HLA-B*54:01; SLC22A9; ENSG00000149742; TAA
FPFISGFAF

SEQ ID NO: 77069 - protein, 10 aa, Homo sapiens
  Table A; Target 77069; HLA-B*54:01; SLC22A9; ENSG00000149742; TAA
FPFISGFAFL

SEQ ID NO: 77070 - protein, 9 aa, Homo sapiens
  Table A; Target 77070; HLA-B*35:01; SLC22A9; ENSG00000149742; TAA
FPNTSDADM

SEQ ID NO: 77071 - protein, 9 aa, Homo sapiens
  Table A; Target 77071; HLA-B*35:03; SLC22A9; ENSG00000149742; TAA
FPNTSDADM

SEQ ID NO: 77072 - protein, 9 aa, Homo sapiens
  Table A; Target 77072; HLA-B*55:01; SLC22A9; ENSG00000149742; TAA
FPNTSDADM

SEQ ID NO: 77073 - protein, 9 aa, Homo sapiens
  Table A; Target 77073; HLA-C*03:03; SLC22A9; ENSG00000149742; TAA
FPNTSDADM

SEQ ID NO: 77074 - protein, 8 aa, Homo sapiens
  Table A; Target 77074; HLA-A*30:01; SLC22A9; ENSG00000149742; TAA
FQAMGITL

SEQ ID NO: 77075 - protein, 8 aa, Homo sapiens
  Table A; Target 77075; HLA-B*13:02; SLC22A9; ENSG00000149742; TAA
FQAMGITL

SEQ ID NO: 77076 - protein, 8 aa, Homo sapiens
  Table A; Target 77076; HLA-B*15:01; SLC22A9; ENSG00000149742; TAA
FQAMGITL

SEQ ID NO: 77077 - protein, 8 aa, Homo sapiens
  Table A; Target 77077; HLA-B*15:03; SLC22A9; ENSG00000149742; TAA
FQAMGITL

SEQ ID NO: 77078 - protein, 8 aa, Homo sapiens
  Table A; Target 77078; HLA-B*27:05; SLC22A9; ENSG00000149742; TAA
FQAMGITL

SEQ ID NO: 77079 - protein, 8 aa, Homo sapiens
  Table A; Target 77079; HLA-B*38:01; SLC22A9; ENSG00000149742; TAA
FQAMGITL

SEQ ID NO: 77080 - protein, 8 aa, Homo sapiens
  Table A; Target 77080; HLA-B*39:01; SLC22A9; ENSG00000149742; TAA
FQAMGITL

SEQ ID NO: 77081 - protein, 8 aa, Homo sapiens
  Table A; Target 77081; HLA-B*40:01; SLC22A9; ENSG00000149742; TAA
FQAMGITL

SEQ ID NO: 77082 - protein, 8 aa, Homo sapiens
  Table A; Target 77082; HLA-B*40:02; SLC22A9; ENSG00000149742; TAA
FQAMGITL

SEQ ID NO: 77083 - protein, 8 aa, Homo sapiens
  Table A; Target 77083; HLA-C*02:02; SLC22A9; ENSG00000149742; TAA
FQAMGITL

SEQ ID NO: 77084 - protein, 8 aa, Homo sapiens
  Table A; Target 77084; HLA-C*03:03; SLC22A9; ENSG00000149742; TAA
FQAMGITL

SEQ ID NO: 77085 - protein, 8 aa, Homo sapiens
  Table A; Target 77085; HLA-C*03:04; SLC22A9; ENSG00000149742; TAA
FQAMGITL

SEQ ID NO: 77086 - protein, 8 aa, Homo sapiens
  Table A; Target 77086; HLA-C*07:04; SLC22A9; ENSG00000149742; TAA
FQAMGITL

SEQ ID NO: 77087 - protein, 10 aa, Homo sapiens
  Table A; Target 77087; HLA-A*26:01; SLC22A9; ENSG00000149742; TAA
FQAMGITLGM

SEQ ID NO: 77088 - protein, 10 aa, Homo sapiens
  Table A; Target 77088; HLA-B*27:05; SLC22A9; ENSG00000149742; TAA
FQAMGITLGM

SEQ ID NO: 77089 - protein, 10 aa, Homo sapiens
  Table A; Target 77089; HLA-C*07:04; SLC22A9; ENSG00000149742; TAA
FQAMGITLGM

SEQ ID NO: 77090 - protein, 8 aa, Homo sapiens
  Table A; Target 77090; HLA-B*15:01; SLC22A9; ENSG00000149742; TAA
FQILQTVF

SEQ ID NO: 77091 - protein, 8 aa, Homo sapiens
  Table A; Target 77091; HLA-B*15:03; SLC22A9; ENSG00000149742; TAA
FQILQTVF

SEQ ID NO: 77092 - protein, 9 aa, Homo sapiens
  Table A; Target 77092; HLA-A*02:01; SLC22A9; ENSG00000149742; TAA
FQILQTVFL

SEQ ID NO: 77093 - protein, 9 aa, Homo sapiens
  Table A; Target 77093; HLA-A*02:04; SLC22A9; ENSG00000149742; TAA
FQILQTVFL

SEQ ID NO: 77094 - protein, 9 aa, Homo sapiens
  Table A; Target 77094; HLA-B*13:02; SLC22A9; ENSG00000149742; TAA
FQILQTVFL

SEQ ID NO: 77095 - protein, 9 aa, Homo sapiens
  Table A; Target 77095; HLA-C*02:02; SLC22A9; ENSG00000149742; TAA
FQILQTVFL

SEQ ID NO: 77096 - protein, 9 aa, Homo sapiens
  Table A; Target 77096; HLA-A*01:01; SLC22A9; ENSG00000149742; TAA
FSSTIVTEW

SEQ ID NO: 77097 - protein, 9 aa, Homo sapiens
  Table A; Target 77097; HLA-A*23:01; SLC22A9; ENSG00000149742; TAA
FSSTIVTEW

SEQ ID NO: 77098 - protein, 9 aa, Homo sapiens
  Table A; Target 77098; HLA-A*25:01; SLC22A9; ENSG00000149742; TAA
FSSTIVTEW

SEQ ID NO: 77099 - protein, 9 aa, Homo sapiens
  Table A; Target 77099; HLA-A*26:01; SLC22A9; ENSG00000149742; TAA
FSSTIVTEW

SEQ ID NO: 77100 - protein, 9 aa, Homo sapiens
  Table A; Target 77100; HLA-A*32:01; SLC22A9; ENSG00000149742; TAA
FSSTIVTEW

SEQ ID NO: 77101 - protein, 9 aa, Homo sapiens
  Table A; Target 77101; HLA-A*33:01; SLC22A9; ENSG00000149742; TAA
FSSTIVTEW

SEQ ID NO: 77102 - protein, 9 aa, Homo sapiens
  Table A; Target 77102; HLA-A*33:03; SLC22A9; ENSG00000149742; TAA
FSSTIVTEW

SEQ ID NO: 77103 - protein, 9 aa, Homo sapiens
  Table A; Target 77103; HLA-A*68:01; SLC22A9; ENSG00000149742; TAA
FSSTIVTEW

SEQ ID NO: 77104 - protein, 9 aa, Homo sapiens
  Table A; Target 77104; HLA-A*68:02; SLC22A9; ENSG00000149742; TAA
FSSTIVTEW

SEQ ID NO: 77105 - protein, 9 aa, Homo sapiens
  Table A; Target 77105; HLA-B*44:02; SLC22A9; ENSG00000149742; TAA
FSSTIVTEW

SEQ ID NO: 77106 - protein, 9 aa, Homo sapiens
  Table A; Target 77106; HLA-B*44:03; SLC22A9; ENSG00000149742; TAA
FSSTIVTEW

SEQ ID NO: 77107 - protein, 9 aa, Homo sapiens
  Table A; Target 77107; HLA-B*46:01; SLC22A9; ENSG00000149742; TAA
FSSTIVTEW

SEQ ID NO: 77108 - protein, 9 aa, Homo sapiens
  Table A; Target 77108; HLA-B*57:01; SLC22A9; ENSG00000149742; TAA
FSSTIVTEW

SEQ ID NO: 77109 - protein, 9 aa, Homo sapiens
  Table A; Target 77109; HLA-B*58:01; SLC22A9; ENSG00000149742; TAA
FSSTIVTEW

SEQ ID NO: 77110 - protein, 9 aa, Homo sapiens
  Table A; Target 77110; HLA-C*02:02; SLC22A9; ENSG00000149742; TAA
FSSTIVTEW

SEQ ID NO: 77111 - protein, 9 aa, Homo sapiens
  Table A; Target 77111; HLA-C*03:04; SLC22A9; ENSG00000149742; TAA
FSSTIVTEW

SEQ ID NO: 77112 - protein, 9 aa, Homo sapiens
  Table A; Target 77112; HLA-C*07:06; SLC22A9; ENSG00000149742; TAA
FSSTIVTEW

SEQ ID NO: 77113 - protein, 9 aa, Homo sapiens
  Table A; Target 77113; HLA-C*12:03; SLC22A9; ENSG00000149742; TAA
FSSTIVTEW

SEQ ID NO: 77114 - protein, 9 aa, Homo sapiens
  Table A; Target 77114; HLA-C*16:01; SLC22A9; ENSG00000149742; TAA
FSSTIVTEW

SEQ ID NO: 77115 - protein, 9 aa, Homo sapiens
  Table A; Target 77115; HLA-C*16:04; SLC22A9; ENSG00000149742; TAA
FSSTIVTEW

SEQ ID NO: 77116 - protein, 9 aa, Homo sapiens
  Table A; Target 77116; HLA-A*68:01; SLC22A9; ENSG00000149742; TAA
FTAFIPGHR

SEQ ID NO: 77117 - protein, 9 aa, Homo sapiens
  Table A; Target 77117; HLA-A*68:02; SLC22A9; ENSG00000149742; TAA
FTAFIPGHR

SEQ ID NO: 77118 - protein, 9 aa, Homo sapiens
  Table A; Target 77118; HLA-B*54:01; SLC22A9; ENSG00000149742; TAA
FVFMAGMMV

SEQ ID NO: 77119 - protein, 9 aa, Homo sapiens
  Table A; Target 77119; HLA-A*02:04; SLC22A9; ENSG00000149742; TAA
FVHPQWQLL

SEQ ID NO: 77120 - protein, 9 aa, Homo sapiens
  Table A; Target 77120; HLA-A*02:07; SLC22A9; ENSG00000149742; TAA
FVHPQWQLL

SEQ ID NO: 77121 - protein, 9 aa, Homo sapiens
  Table A; Target 77121; HLA-A*24:02; SLC22A9; ENSG00000149742; TAA
FVHPQWQLL

SEQ ID NO: 77122 - protein, 9 aa, Homo sapiens
  Table A; Target 77122; HLA-A*68:02; SLC22A9; ENSG00000149742; TAA
FVHPQWQLL

SEQ ID NO: 77123 - protein, 9 aa, Homo sapiens
  Table A; Target 77123; HLA-A*25:01; SLC22A9; ENSG00000149742; TAA
FVIFLTSSW

SEQ ID NO: 77124 - protein, 9 aa, Homo sapiens
  Table A; Target 77124; HLA-B*44:02; SLC22A9; ENSG00000149742; TAA
FVIFLTSSW

SEQ ID NO: 77125 - protein, 9 aa, Homo sapiens
  Table A; Target 77125; HLA-B*57:01; SLC22A9; ENSG00000149742; TAA
FVIFLTSSW

SEQ ID NO: 77126 - protein, 9 aa, Homo sapiens
  Table A; Target 77126; HLA-A*02:07; SLC22A9; ENSG00000149742; TAA
FVPQEMQTL

SEQ ID NO: 77127 - protein, 9 aa, Homo sapiens
  Table A; Target 77127; HLA-A*25:01; SLC22A9; ENSG00000149742; TAA
FVPQEMQTL

SEQ ID NO: 77128 - protein, 9 aa, Homo sapiens
  Table A; Target 77128; HLA-A*26:01; SLC22A9; ENSG00000149742; TAA
FVPQEMQTL

SEQ ID NO: 77129 - protein, 9 aa, Homo sapiens
  Table A; Target 77129; HLA-A*68:02; SLC22A9; ENSG00000149742; TAA
FVPQEMQTL

SEQ ID NO: 77130 - protein, 9 aa, Homo sapiens
  Table A; Target 77130; HLA-B*27:05; SLC22A9; ENSG00000149742; TAA
FVPQEMQTL

SEQ ID NO: 77131 - protein, 9 aa, Homo sapiens
  Table A; Target 77131; HLA-B*46:01; SLC22A9; ENSG00000149742; TAA
FVPQEMQTL

SEQ ID NO: 77132 - protein, 9 aa, Homo sapiens
  Table A; Target 77132; HLA-B*51:01; SLC22A9; ENSG00000149742; TAA
FVPQEMQTL

SEQ ID NO: 77133 - protein, 9 aa, Homo sapiens
  Table A; Target 77133; HLA-C*01:02; SLC22A9; ENSG00000149742; TAA
FVPQEMQTL

SEQ ID NO: 77134 - protein, 9 aa, Homo sapiens
  Table A; Target 77134; HLA-C*03:04; SLC22A9; ENSG00000149742; TAA
FVPQEMQTL

SEQ ID NO: 77135 - protein, 10 aa, Homo sapiens
  Table A; Target 77135; HLA-C*07:06; SLC22A9; ENSG00000149742; TAA
GALSQDALLR

SEQ ID NO: 77136 - protein, 9 aa, Homo sapiens
  Table A; Target 77136; HLA-A*30:01; SLC22A9; ENSG00000149742; TAA
GASALANTL

SEQ ID NO: 77137 - protein, 9 aa, Homo sapiens
  Table A; Target 77137; HLA-B*07:02; SLC22A9; ENSG00000149742; TAA
GASALANTL

SEQ ID NO: 77138 - protein, 9 aa, Homo sapiens
  Table A; Target 77138; HLA-B*13:02; SLC22A9; ENSG00000149742; TAA
GASALANTL

SEQ ID NO: 77139 - protein, 9 aa, Homo sapiens
  Table A; Target 77139; HLA-B*15:01; SLC22A9; ENSG00000149742; TAA
GASALANTL

SEQ ID NO: 77140 - protein, 9 aa, Homo sapiens
  Table A; Target 77140; HLA-B*15:03; SLC22A9; ENSG00000149742; TAA
GASALANTL

SEQ ID NO: 77141 - protein, 9 aa, Homo sapiens
  Table A; Target 77141; HLA-B*27:05; SLC22A9; ENSG00000149742; TAA
GASALANTL

SEQ ID NO: 77142 - protein, 9 aa, Homo sapiens
  Table A; Target 77142; HLA-B*35:01; SLC22A9; ENSG00000149742; TAA
GASALANTL

SEQ ID NO: 77143 - protein, 9 aa, Homo sapiens
  Table A; Target 77143; HLA-B*35:03; SLC22A9; ENSG00000149742; TAA
GASALANTL

SEQ ID NO: 77144 - protein, 9 aa, Homo sapiens
  Table A; Target 77144; HLA-B*38:01; SLC22A9; ENSG00000149742; TAA
GASALANTL

SEQ ID NO: 77145 - protein, 9 aa, Homo sapiens
  Table A; Target 77145; HLA-B*39:01; SLC22A9; ENSG00000149742; TAA
GASALANTL

SEQ ID NO: 77146 - protein, 9 aa, Homo sapiens
  Table A; Target 77146; HLA-B*40:01; SLC22A9; ENSG00000149742; TAA
GASALANTL

SEQ ID NO: 77147 - protein, 9 aa, Homo sapiens
  Table A; Target 77147; HLA-B*46:01; SLC22A9; ENSG00000149742; TAA
GASALANTL

SEQ ID NO: 77148 - protein, 9 aa, Homo sapiens
  Table A; Target 77148; HLA-B*58:01; SLC22A9; ENSG00000149742; TAA
GASALANTL

SEQ ID NO: 77149 - protein, 9 aa, Homo sapiens
  Table A; Target 77149; HLA-C*01:02; SLC22A9; ENSG00000149742; TAA
GASALANTL

SEQ ID NO: 77150 - protein, 9 aa, Homo sapiens
  Table A; Target 77150; HLA-C*02:02; SLC22A9; ENSG00000149742; TAA
GASALANTL

SEQ ID NO: 77151 - protein, 9 aa, Homo sapiens
  Table A; Target 77151; HLA-C*03:03; SLC22A9; ENSG00000149742; TAA
GASALANTL

SEQ ID NO: 77152 - protein, 9 aa, Homo sapiens
  Table A; Target 77152; HLA-C*03:04; SLC22A9; ENSG00000149742; TAA
GASALANTL

SEQ ID NO: 77153 - protein, 9 aa, Homo sapiens
  Table A; Target 77153; HLA-C*05:01; SLC22A9; ENSG00000149742; TAA
GASALANTL

SEQ ID NO: 77154 - protein, 9 aa, Homo sapiens
  Table A; Target 77154; HLA-C*06:02; SLC22A9; ENSG00000149742; TAA
GASALANTL

SEQ ID NO: 77155 - protein, 9 aa, Homo sapiens
  Table A; Target 77155; HLA-C*07:04; SLC22A9; ENSG00000149742; TAA
GASALANTL

SEQ ID NO: 77156 - protein, 9 aa, Homo sapiens
  Table A; Target 77156; HLA-C*07:06; SLC22A9; ENSG00000149742; TAA
GASALANTL

SEQ ID NO: 77157 - protein, 9 aa, Homo sapiens
  Table A; Target 77157; HLA-C*12:03; SLC22A9; ENSG00000149742; TAA
GASALANTL

SEQ ID NO: 77158 - protein, 9 aa, Homo sapiens
  Table A; Target 77158; HLA-C*14:02; SLC22A9; ENSG00000149742; TAA
GASALANTL

SEQ ID NO: 77159 - protein, 9 aa, Homo sapiens
  Table A; Target 77159; HLA-C*16:01; SLC22A9; ENSG00000149742; TAA
GASALANTL

SEQ ID NO: 77160 - protein, 9 aa, Homo sapiens
  Table A; Target 77160; HLA-C*16:02; SLC22A9; ENSG00000149742; TAA
GASALANTL

SEQ ID NO: 77161 - protein, 9 aa, Homo sapiens
  Table A; Target 77161; HLA-C*16:04; SLC22A9; ENSG00000149742; TAA
GASALANTL

SEQ ID NO: 77162 - protein, 11 aa, Homo sapiens
  Table A; Target 77162; HLA-A*30:02; SLC22A9; ENSG00000149742; TAA
GASALANTLAF

SEQ ID NO: 77163 - protein, 11 aa, Homo sapiens
  Table A; Target 77163; HLA-C*02:02; SLC22A9; ENSG00000149742; TAA
GASALANTLAF

SEQ ID NO: 77164 - protein, 11 aa, Homo sapiens
  Table A; Target 77164; HLA-C*16:04; SLC22A9; ENSG00000149742; TAA
GASALANTLAF

SEQ ID NO: 77165 - protein, 9 aa, Homo sapiens
  Table A; Target 77165; HLA-B*38:01; SLC22A9; ENSG00000149742; TAA
GHAGDLWRF

SEQ ID NO: 77166 - protein, 9 aa, Homo sapiens
  Table A; Target 77166; HLA-A*02:07; SLC22A9; ENSG00000149742; TAA
GINATFANI

SEQ ID NO: 77167 - protein, 9 aa, Homo sapiens
  Table A; Target 77167; HLA-A*24:02; SLC22A9; ENSG00000149742; TAA
GINATFANI

SEQ ID NO: 77168 - protein, 9 aa, Homo sapiens
  Table A; Target 77168; HLA-A*32:01; SLC22A9; ENSG00000149742; TAA
GINATFANI

SEQ ID NO: 77169 - protein, 9 aa, Homo sapiens
  Table A; Target 77169; HLA-B*13:02; SLC22A9; ENSG00000149742; TAA
GINATFANI

SEQ ID NO: 77170 - protein, 9 aa, Homo sapiens
  Table A; Target 77170; HLA-C*01:02; SLC22A9; ENSG00000149742; TAA
GINATFANI

SEQ ID NO: 77171 - protein, 9 aa, Homo sapiens
  Table A; Target 77171; HLA-A*02:01; SLC22A9; ENSG00000149742; TAA
GLNLHVQHL

SEQ ID NO: 77172 - protein, 9 aa, Homo sapiens
  Table A; Target 77172; HLA-A*02:03; SLC22A9; ENSG00000149742; TAA
GLNLHVQHL

SEQ ID NO: 77173 - protein, 9 aa, Homo sapiens
  Table A; Target 77173; HLA-A*02:04; SLC22A9; ENSG00000149742; TAA
GLNLHVQHL

SEQ ID NO: 77174 - protein, 9 aa, Homo sapiens
  Table A; Target 77174; HLA-A*02:07; SLC22A9; ENSG00000149742; TAA
GLNLHVQHL

SEQ ID NO: 77175 - protein, 9 aa, Homo sapiens
  Table A; Target 77175; HLA-B*13:02; SLC22A9; ENSG00000149742; TAA
GLNLHVQHL

SEQ ID NO: 77176 - protein, 9 aa, Homo sapiens
  Table A; Target 77176; HLA-B*37:01; SLC22A9; ENSG00000149742; TAA
GLNLHVQHL

SEQ ID NO: 77177 - protein, 9 aa, Homo sapiens
  Table A; Target 77177; HLA-B*55:01; SLC22A9; ENSG00000149742; TAA
GLNLHVQHL

SEQ ID NO: 77178 - protein, 9 aa, Homo sapiens
  Table A; Target 77178; HLA-A*30:02; SLC22A9; ENSG00000149742; TAA
GMCPSGIAF

SEQ ID NO: 77179 - protein, 9 aa, Homo sapiens
  Table A; Target 77179; HLA-B*15:01; SLC22A9; ENSG00000149742; TAA
GMCPSGIAF

SEQ ID NO: 77180 - protein, 9 aa, Homo sapiens
  Table A; Target 77180; HLA-B*15:03; SLC22A9; ENSG00000149742; TAA
GMCPSGIAF

SEQ ID NO: 77181 - protein, 9 aa, Homo sapiens
  Table A; Target 77181; HLA-C*07:04; SLC22A9; ENSG00000149742; TAA
GMCPSGIAF

SEQ ID NO: 77182 - protein, 10 aa, Homo sapiens
  Table A; Target 77182; HLA-C*04:01; SLC22A9; ENSG00000149742; TAA
GMCPSGIAFM

SEQ ID NO: 77183 - protein, 9 aa, Homo sapiens
  Table A; Target 77183; HLA-B*07:02; SLC22A9; ENSG00000149742; TAA
GMKNARDTL

SEQ ID NO: 77184 - protein, 10 aa, Homo sapiens
  Table A; Target 77184; HLA-A*02:01; SLC22A9; ENSG00000149742; TAA
GMMVGGILGG

SEQ ID NO: 77185 - protein, 10 aa, Homo sapiens
  Table A; Target 77185; HLA-A*02:03; SLC22A9; ENSG00000149742; TAA
GMMVGGILGG

SEQ ID NO: 77186 - protein, 10 aa, Homo sapiens
  Table A; Target 77186; HLA-B*57:01; SLC22A9; ENSG00000149742; TAA
GTCAALAPTF

SEQ ID NO: 77187 - protein, 9 aa, Homo sapiens
  Table A; Target 77187; HLA-B*27:05; SLC22A9; ENSG00000149742; TAA
GTFPNTSDA

SEQ ID NO: 77188 - protein, 11 aa, Homo sapiens
  Table A; Target 77188; HLA-B*27:05; SLC22A9; ENSG00000149742; TAA
GTFPNTSDADM

SEQ ID NO: 77189 - protein, 11 aa, Homo sapiens
  Table A; Target 77189; HLA-B*39:01; SLC22A9; ENSG00000149742; TAA
GTFPNTSDADM

SEQ ID NO: 77190 - protein, 9 aa, Homo sapiens
  Table A; Target 77190; HLA-A*25:01; SLC22A9; ENSG00000149742; TAA
GVFPFISGF

SEQ ID NO: 77191 - protein, 9 aa, Homo sapiens
  Table A; Target 77191; HLA-A*26:01; SLC22A9; ENSG00000149742; TAA
GVFPFISGF

SEQ ID NO: 77192 - protein, 9 aa, Homo sapiens
  Table A; Target 77192; HLA-B*15:01; SLC22A9; ENSG00000149742; TAA
GVFPFISGF

SEQ ID NO: 77193 - protein, 9 aa, Homo sapiens
  Table A; Target 77193; HLA-B*57:01; SLC22A9; ENSG00000149742; TAA
GVFPFISGF

SEQ ID NO: 77194 - protein, 9 aa, Homo sapiens
  Table A; Target 77194; HLA-C*02:02; SLC22A9; ENSG00000149742; TAA
GVFPFISGF

SEQ ID NO: 77195 - protein, 9 aa, Homo sapiens
  Table A; Target 77195; HLA-A*24:02; SLC22A9; ENSG00000149742; TAA
GWVYDRISF

SEQ ID NO: 77196 - protein, 10 aa, Homo sapiens
  Table A; Target 77196; HLA-A*24:02; SLC22A9; ENSG00000149742; TAA
HFMLENFTAF

SEQ ID NO: 77197 - protein, 9 aa, Homo sapiens
  Table A; Target 77197; HLA-A*02:01; SLC22A9; ENSG00000149742; TAA
HGNEVIPTI

SEQ ID NO: 77198 - protein, 9 aa, Homo sapiens
  Table A; Target 77198; HLA-A*02:04; SLC22A9; ENSG00000149742; TAA
HGNEVIPTI

SEQ ID NO: 77199 - protein, 9 aa, Homo sapiens
  Table A; Target 77199; HLA-A*23:01; SLC22A9; ENSG00000149742; TAA
HGNEVIPTI

SEQ ID NO: 77200 - protein, 9 aa, Homo sapiens
  Table A; Target 77200; HLA-A*30:01; SLC22A9; ENSG00000149742; TAA
HGNEVIPTI

SEQ ID NO: 77201 - protein, 9 aa, Homo sapiens
  Table A; Target 77201; HLA-A*32:01; SLC22A9; ENSG00000149742; TAA
HGNEVIPTI

SEQ ID NO: 77202 - protein, 9 aa, Homo sapiens
  Table A; Target 77202; HLA-A*68:02; SLC22A9; ENSG00000149742; TAA
HGNEVIPTI

SEQ ID NO: 77203 - protein, 9 aa, Homo sapiens
  Table A; Target 77203; HLA-B*13:02; SLC22A9; ENSG00000149742; TAA
HGNEVIPTI

SEQ ID NO: 77204 - protein, 9 aa, Homo sapiens
  Table A; Target 77204; HLA-B*18:01; SLC22A9; ENSG00000149742; TAA
HGNEVIPTI

SEQ ID NO: 77205 - protein, 9 aa, Homo sapiens
  Table A; Target 77205; HLA-B*35:01; SLC22A9; ENSG00000149742; TAA
HGNEVIPTI

SEQ ID NO: 77206 - protein, 9 aa, Homo sapiens
  Table A; Target 77206; HLA-B*35:03; SLC22A9; ENSG00000149742; TAA
HGNEVIPTI

SEQ ID NO: 77207 - protein, 9 aa, Homo sapiens
  Table A; Target 77207; HLA-B*38:01; SLC22A9; ENSG00000149742; TAA
HGNEVIPTI

SEQ ID NO: 77208 - protein, 9 aa, Homo sapiens
  Table A; Target 77208; HLA-B*39:01; SLC22A9; ENSG00000149742; TAA
HGNEVIPTI

SEQ ID NO: 77209 - protein, 9 aa, Homo sapiens
  Table A; Target 77209; HLA-B*49:01; SLC22A9; ENSG00000149742; TAA
HGNEVIPTI

SEQ ID NO: 77210 - protein, 9 aa, Homo sapiens
  Table A; Target 77210; HLA-B*51:01; SLC22A9; ENSG00000149742; TAA
HGNEVIPTI

SEQ ID NO: 77211 - protein, 9 aa, Homo sapiens
  Table A; Target 77211; HLA-B*54:01; SLC22A9; ENSG00000149742; TAA
HGNEVIPTI

SEQ ID NO: 77212 - protein, 9 aa, Homo sapiens
  Table A; Target 77212; HLA-B*55:01; SLC22A9; ENSG00000149742; TAA
HGNEVIPTI

SEQ ID NO: 77213 - protein, 9 aa, Homo sapiens
  Table A; Target 77213; HLA-B*57:01; SLC22A9; ENSG00000149742; TAA
HGNEVIPTI

SEQ ID NO: 77214 - protein, 9 aa, Homo sapiens
  Table A; Target 77214; HLA-B*58:01; SLC22A9; ENSG00000149742; TAA
HGNEVIPTI

SEQ ID NO: 77215 - protein, 9 aa, Homo sapiens
  Table A; Target 77215; HLA-C*02:02; SLC22A9; ENSG00000149742; TAA
HGNEVIPTI

SEQ ID NO: 77216 - protein, 9 aa, Homo sapiens
  Table A; Target 77216; HLA-C*03:03; SLC22A9; ENSG00000149742; TAA
HGNEVIPTI

SEQ ID NO: 77217 - protein, 9 aa, Homo sapiens
  Table A; Target 77217; HLA-C*03:04; SLC22A9; ENSG00000149742; TAA
HGNEVIPTI

SEQ ID NO: 77218 - protein, 9 aa, Homo sapiens
  Table A; Target 77218; HLA-C*07:06; SLC22A9; ENSG00000149742; TAA
HGNEVIPTI

SEQ ID NO: 77219 - protein, 9 aa, Homo sapiens
  Table A; Target 77219; HLA-C*12:03; SLC22A9; ENSG00000149742; TAA
HGNEVIPTI

SEQ ID NO: 77220 - protein, 9 aa, Homo sapiens
  Table A; Target 77220; HLA-C*16:02; SLC22A9; ENSG00000149742; TAA
HGNEVIPTI

SEQ ID NO: 77221 - protein, 9 aa, Homo sapiens
  Table A; Target 77221; HLA-C*16:04; SLC22A9; ENSG00000149742; TAA
HGNEVIPTI

SEQ ID NO: 77222 - protein, 11 aa, Homo sapiens
  Table A; Target 77222; HLA-A*33:01; SLC22A9; ENSG00000149742; TAA
HGNEVIPTIIR

SEQ ID NO: 77223 - protein, 9 aa, Homo sapiens
  Table A; Target 77223; HLA-A*02:01; SLC22A9; ENSG00000149742; TAA
HILQLVVSV

SEQ ID NO: 77224 - protein, 9 aa, Homo sapiens
  Table A; Target 77224; HLA-A*02:03; SLC22A9; ENSG00000149742; TAA
HILQLVVSV

SEQ ID NO: 77225 - protein, 9 aa, Homo sapiens
  Table A; Target 77225; HLA-A*02:04; SLC22A9; ENSG00000149742; TAA
HILQLVVSV

SEQ ID NO: 77226 - protein, 9 aa, Homo sapiens
  Table A; Target 77226; HLA-A*02:07; SLC22A9; ENSG00000149742; TAA
HILQLVVSV

SEQ ID NO: 77227 - protein, 9 aa, Homo sapiens
  Table A; Target 77227; HLA-A*30:01; SLC22A9; ENSG00000149742; TAA
HILQLVVSV

SEQ ID NO: 77228 - protein, 9 aa, Homo sapiens
  Table A; Target 77228; HLA-A*68:02; SLC22A9; ENSG00000149742; TAA
HILQLVVSV

SEQ ID NO: 77229 - protein, 9 aa, Homo sapiens
  Table A; Target 77229; HLA-B*08:01; SLC22A9; ENSG00000149742; TAA
HILQLVVSV

SEQ ID NO: 77230 - protein, 9 aa, Homo sapiens
  Table A; Target 77230; HLA-B*13:02; SLC22A9; ENSG00000149742; TAA
HILQLVVSV

SEQ ID NO: 77231 - protein, 9 aa, Homo sapiens
  Table A; Target 77231; HLA-B*51:01; SLC22A9; ENSG00000149742; TAA
HILQLVVSV

SEQ ID NO: 77232 - protein, 9 aa, Homo sapiens
  Table A; Target 77232; HLA-B*54:01; SLC22A9; ENSG00000149742; TAA
HILQLVVSV

SEQ ID NO: 77233 - protein, 9 aa, Homo sapiens
  Table A; Target 77233; HLA-B*55:01; SLC22A9; ENSG00000149742; TAA
HILQLVVSV

SEQ ID NO: 77234 - protein, 9 aa, Homo sapiens
  Table A; Target 77234; HLA-A*02:01; SLC22A9; ENSG00000149742; TAA
HLGNNVFLL

SEQ ID NO: 77235 - protein, 9 aa, Homo sapiens
  Table A; Target 77235; HLA-A*02:04; SLC22A9; ENSG00000149742; TAA
HLGNNVFLL

SEQ ID NO: 77236 - protein, 9 aa, Homo sapiens
  Table A; Target 77236; HLA-A*02:07; SLC22A9; ENSG00000149742; TAA
HLGNNVFLL

SEQ ID NO: 77237 - protein, 10 aa, Homo sapiens
  Table A; Target 77237; HLA-C*07:02; SLC22A9; ENSG00000149742; TAA
HLNGTFPNTS

SEQ ID NO: 77238 - protein, 9 aa, Homo sapiens
  Table A; Target 77238; HLA-A*02:07; SLC22A9; ENSG00000149742; TAA
IAEWATHRF

SEQ ID NO: 77239 - protein, 9 aa, Homo sapiens
  Table A; Target 77239; HLA-B*46:01; SLC22A9; ENSG00000149742; TAA
IAFMTLAGL

SEQ ID NO: 77240 - protein, 9 aa, Homo sapiens
  Table A; Target 77240; HLA-B*51:01; SLC22A9; ENSG00000149742; TAA
IAFMTLAGL

SEQ ID NO: 77241 - protein, 9 aa, Homo sapiens
  Table A; Target 77241; HLA-C*03:04; SLC22A9; ENSG00000149742; TAA
IAFMTLAGL

SEQ ID NO: 77242 - protein, 9 aa, Homo sapiens
  Table A; Target 77242; HLA-A*23:01; SLC22A9; ENSG00000149742; TAA
IAGALAPLM

SEQ ID NO: 77243 - protein, 9 aa, Homo sapiens
  Table A; Target 77243; HLA-A*26:01; SLC22A9; ENSG00000149742; TAA
IAGALAPLM

SEQ ID NO: 77244 - protein, 9 aa, Homo sapiens
  Table A; Target 77244; HLA-A*29:02; SLC22A9; ENSG00000149742; TAA
IAGALAPLM

SEQ ID NO: 77245 - protein, 9 aa, Homo sapiens
  Table A; Target 77245; HLA-B*15:03; SLC22A9; ENSG00000149742; TAA
IAGALAPLM

SEQ ID NO: 77246 - protein, 9 aa, Homo sapiens
  Table A; Target 77246; HLA-B*35:01; SLC22A9; ENSG00000149742; TAA
IAGALAPLM

SEQ ID NO: 77247 - protein, 9 aa, Homo sapiens
  Table A; Target 77247; HLA-B*35:03; SLC22A9; ENSG00000149742; TAA
IAGALAPLM

SEQ ID NO: 77248 - protein, 9 aa, Homo sapiens
  Table A; Target 77248; HLA-B*46:01; SLC22A9; ENSG00000149742; TAA
IAGALAPLM

SEQ ID NO: 77249 - protein, 9 aa, Homo sapiens
  Table A; Target 77249; HLA-B*51:01; SLC22A9; ENSG00000149742; TAA
IAGALAPLM

SEQ ID NO: 77250 - protein, 9 aa, Homo sapiens
  Table A; Target 77250; HLA-B*57:01; SLC22A9; ENSG00000149742; TAA
IAGALAPLM

SEQ ID NO: 77251 - protein, 9 aa, Homo sapiens
  Table A; Target 77251; HLA-B*58:01; SLC22A9; ENSG00000149742; TAA
IAGALAPLM

SEQ ID NO: 77252 - protein, 9 aa, Homo sapiens
  Table A; Target 77252; HLA-C*02:02; SLC22A9; ENSG00000149742; TAA
IAGALAPLM

SEQ ID NO: 77253 - protein, 9 aa, Homo sapiens
  Table A; Target 77253; HLA-C*03:03; SLC22A9; ENSG00000149742; TAA
IAGALAPLM

SEQ ID NO: 77254 - protein, 9 aa, Homo sapiens
  Table A; Target 77254; HLA-C*03:04; SLC22A9; ENSG00000149742; TAA
IAGALAPLM

SEQ ID NO: 77255 - protein, 9 aa, Homo sapiens
  Table A; Target 77255; HLA-C*04:01; SLC22A9; ENSG00000149742; TAA
IAGALAPLM

SEQ ID NO: 77256 - protein, 9 aa, Homo sapiens
  Table A; Target 77256; HLA-C*05:01; SLC22A9; ENSG00000149742; TAA
IAGALAPLM

SEQ ID NO: 77257 - protein, 9 aa, Homo sapiens
  Table A; Target 77257; HLA-C*06:02; SLC22A9; ENSG00000149742; TAA
IAGALAPLM

SEQ ID NO: 77258 - protein, 9 aa, Homo sapiens
  Table A; Target 77258; HLA-C*07:01; SLC22A9; ENSG00000149742; TAA
IAGALAPLM

SEQ ID NO: 77259 - protein, 9 aa, Homo sapiens
  Table A; Target 77259; HLA-C*07:04; SLC22A9; ENSG00000149742; TAA
IAGALAPLM

SEQ ID NO: 77260 - protein, 9 aa, Homo sapiens
  Table A; Target 77260; HLA-C*12:03; SLC22A9; ENSG00000149742; TAA
IAGALAPLM

SEQ ID NO: 77261 - protein, 9 aa, Homo sapiens
  Table A; Target 77261; HLA-C*16:01; SLC22A9; ENSG00000149742; TAA
IAGALAPLM

SEQ ID NO: 77262 - protein, 9 aa, Homo sapiens
  Table A; Target 77262; HLA-C*16:02; SLC22A9; ENSG00000149742; TAA
IAGALAPLM

SEQ ID NO: 77263 - protein, 9 aa, Homo sapiens
  Table A; Target 77263; HLA-C*16:04; SLC22A9; ENSG00000149742; TAA
IAGALAPLM

SEQ ID NO: 77264 - protein, 8 aa, Homo sapiens
  Table A; Target 77264; HLA-A*23:01; SLC22A9; ENSG00000149742; TAA
IFAVATYL

SEQ ID NO: 77265 - protein, 8 aa, Homo sapiens
  Table A; Target 77265; HLA-C*01:02; SLC22A9; ENSG00000149742; TAA
IFAVATYL

SEQ ID NO: 77266 - protein, 8 aa, Homo sapiens
  Table A; Target 77266; HLA-C*04:01; SLC22A9; ENSG00000149742; TAA
IFAVATYL

SEQ ID NO: 77267 - protein, 8 aa, Homo sapiens
  Table A; Target 77267; HLA-C*14:02; SLC22A9; ENSG00000149742; TAA
IFAVATYL

SEQ ID NO: 77268 - protein, 10 aa, Homo sapiens
  Table A; Target 77268; HLA-A*23:01; SLC22A9; ENSG00000149742; TAA
IFAVATYLHF

SEQ ID NO: 77269 - protein, 10 aa, Homo sapiens
  Table A; Target 77269; HLA-A*24:02; SLC22A9; ENSG00000149742; TAA
IFAVATYLHF

SEQ ID NO: 77270 - protein, 9 aa, Homo sapiens
  Table A; Target 77270; HLA-A*23:01; SLC22A9; ENSG00000149742; TAA
IFLTSSWLL

SEQ ID NO: 77271 - protein, 9 aa, Homo sapiens
  Table A; Target 77271; HLA-A*24:02; SLC22A9; ENSG00000149742; TAA
IFLTSSWLL

SEQ ID NO: 77272 - protein, 10 aa, Homo sapiens
  Table A; Target 77272; HLA-A*23:01; SLC22A9; ENSG00000149742; TAA
IFVPQEMQTL

SEQ ID NO: 77273 - protein, 10 aa, Homo sapiens
  Table A; Target 77273; HLA-A*24:02; SLC22A9; ENSG00000149742; TAA
IFVPQEMQTL

SEQ ID NO: 77274 - protein, 8 aa, Homo sapiens
  Table A; Target 77274; HLA-B*08:01; SLC22A9; ENSG00000149742; TAA
IIFVPQEM

SEQ ID NO: 77275 - protein, 8 aa, Homo sapiens
  Table A; Target 77275; HLA-B*15:01; SLC22A9; ENSG00000149742; TAA
IIFVPQEM

SEQ ID NO: 77276 - protein, 8 aa, Homo sapiens
  Table A; Target 77276; HLA-B*15:03; SLC22A9; ENSG00000149742; TAA
IIFVPQEM

SEQ ID NO: 77277 - protein, 8 aa, Homo sapiens
  Table A; Target 77277; HLA-B*18:01; SLC22A9; ENSG00000149742; TAA
IIFVPQEM

SEQ ID NO: 77278 - protein, 8 aa, Homo sapiens
  Table A; Target 77278; HLA-B*35:01; SLC22A9; ENSG00000149742; TAA
IIFVPQEM

SEQ ID NO: 77279 - protein, 8 aa, Homo sapiens
  Table A; Target 77279; HLA-B*39:01; SLC22A9; ENSG00000149742; TAA
IIFVPQEM

SEQ ID NO: 77280 - protein, 8 aa, Homo sapiens
  Table A; Target 77280; HLA-B*46:01; SLC22A9; ENSG00000149742; TAA
IIFVPQEM

SEQ ID NO: 77281 - protein, 8 aa, Homo sapiens
  Table A; Target 77281; HLA-C*01:02; SLC22A9; ENSG00000149742; TAA
IIFVPQEM

SEQ ID NO: 77282 - protein, 8 aa, Homo sapiens
  Table A; Target 77282; HLA-C*02:02; SLC22A9; ENSG00000149742; TAA
IIFVPQEM

SEQ ID NO: 77283 - protein, 8 aa, Homo sapiens
  Table A; Target 77283; HLA-C*03:03; SLC22A9; ENSG00000149742; TAA
IIFVPQEM

SEQ ID NO: 77284 - protein, 8 aa, Homo sapiens
  Table A; Target 77284; HLA-C*03:04; SLC22A9; ENSG00000149742; TAA
IIFVPQEM

SEQ ID NO: 77285 - protein, 8 aa, Homo sapiens
  Table A; Target 77285; HLA-C*05:01; SLC22A9; ENSG00000149742; TAA
IIFVPQEM

SEQ ID NO: 77286 - protein, 8 aa, Homo sapiens
  Table A; Target 77286; HLA-C*07:01; SLC22A9; ENSG00000149742; TAA
IIFVPQEM

SEQ ID NO: 77287 - protein, 8 aa, Homo sapiens
  Table A; Target 77287; HLA-C*07:04; SLC22A9; ENSG00000149742; TAA
IIFVPQEM

SEQ ID NO: 77288 - protein, 8 aa, Homo sapiens
  Table A; Target 77288; HLA-C*12:03; SLC22A9; ENSG00000149742; TAA
IIFVPQEM

SEQ ID NO: 77289 - protein, 8 aa, Homo sapiens
  Table A; Target 77289; HLA-C*14:02; SLC22A9; ENSG00000149742; TAA
IIFVPQEM

SEQ ID NO: 77290 - protein, 8 aa, Homo sapiens
  Table A; Target 77290; HLA-C*16:01; SLC22A9; ENSG00000149742; TAA
IIFVPQEM

SEQ ID NO: 77291 - protein, 8 aa, Homo sapiens
  Table A; Target 77291; HLA-C*16:04; SLC22A9; ENSG00000149742; TAA
IIFVPQEM

SEQ ID NO: 77292 - protein, 11 aa, Homo sapiens
  Table A; Target 77292; HLA-A*02:03; SLC22A9; ENSG00000149742; TAA
IIFVPQEMQTL

SEQ ID NO: 77293 - protein, 11 aa, Homo sapiens
  Table A; Target 77293; HLA-A*02:07; SLC22A9; ENSG00000149742; TAA
IIFVPQEMQTL

SEQ ID NO: 77294 - protein, 11 aa, Homo sapiens
  Table A; Target 77294; HLA-B*27:05; SLC22A9; ENSG00000149742; TAA
IIFVPQEMQTL

SEQ ID NO: 77295 - protein, 11 aa, Homo sapiens
  Table A; Target 77295; HLA-B*38:01; SLC22A9; ENSG00000149742; TAA
IIFVPQEMQTL

SEQ ID NO: 77296 - protein, 11 aa, Homo sapiens
  Table A; Target 77296; HLA-C*03:04; SLC22A9; ENSG00000149742; TAA
IIFVPQEMQTL

SEQ ID NO: 77297 - protein, 10 aa, Homo sapiens
  Table A; Target 77297; HLA-C*01:02; SLC22A9; ENSG00000149742; TAA
IINNKPEEGL

SEQ ID NO: 77298 - protein, 11 aa, Homo sapiens
  Table A; Target 77298; HLA-A*03:02; SLC22A9; ENSG00000149742; TAA
IINNKPEEGLK

SEQ ID NO: 77299 - protein, 9 aa, Homo sapiens
  Table A; Target 77299; HLA-A*02:07; SLC22A9; ENSG00000149742; TAA
IIYGVFPFI

SEQ ID NO: 77300 - protein, 10 aa, Homo sapiens
  Table A; Target 77300; HLA-A*30:02; SLC22A9; ENSG00000149742; TAA
ILQLVVSVPY

SEQ ID NO: 77301 - protein, 9 aa, Homo sapiens
  Table A; Target 77301; HLA-A*02:01; SLC22A9; ENSG00000149742; TAA
ILQTVFLSI

SEQ ID NO: 77302 - protein, 9 aa, Homo sapiens
  Table A; Target 77302; HLA-A*02:04; SLC22A9; ENSG00000149742; TAA
ILQTVFLSI

SEQ ID NO: 77303 - protein, 9 aa, Homo sapiens
  Table A; Target 77303; HLA-A*02:07; SLC22A9; ENSG00000149742; TAA
ILQTVFLSI

SEQ ID NO: 77304 - protein, 9 aa, Homo sapiens
  Table A; Target 77304; HLA-A*23:01; SLC22A9; ENSG00000149742; TAA
ILQTVFLSI

SEQ ID NO: 77305 - protein, 9 aa, Homo sapiens
  Table A; Target 77305; HLA-A*24:02; SLC22A9; ENSG00000149742; TAA
ILQTVFLSI

SEQ ID NO: 77306 - protein, 9 aa, Homo sapiens
  Table A; Target 77306; HLA-B*13:02; SLC22A9; ENSG00000149742; TAA
ILQTVFLSI

SEQ ID NO: 77307 - protein, 9 aa, Homo sapiens
  Table A; Target 77307; HLA-B*51:01; SLC22A9; ENSG00000149742; TAA
ILQTVFLSI

SEQ ID NO: 77308 - protein, 9 aa, Homo sapiens
  Table A; Target 77308; HLA-B*54:01; SLC22A9; ENSG00000149742; TAA
IPLDSNMRP

SEQ ID NO: 77309 - protein, 9 aa, Homo sapiens
  Table A; Target 77309; HLA-B*56:01; SLC22A9; ENSG00000149742; TAA
IPLDSNMRP

SEQ ID NO: 77310 - protein, 9 aa, Homo sapiens
  Table A; Target 77310; HLA-B*54:01; SLC22A9; ENSG00000149742; TAA
IPTIIRARA

SEQ ID NO: 77311 - protein, 9 aa, Homo sapiens
  Table A; Target 77311; HLA-B*56:01; SLC22A9; ENSG00000149742; TAA
IPTIIRARA

SEQ ID NO: 77312 - protein, 9 aa, Homo sapiens
  Table A; Target 77312; HLA-C*02:02; SLC22A9; ENSG00000149742; TAA
ISFSSTIVT

SEQ ID NO: 77313 - protein, 11 aa, Homo sapiens
  Table A; Target 77313; HLA-A*25:01; SLC22A9; ENSG00000149742; TAA
ISFSSTIVTEW

SEQ ID NO: 77314 - protein, 11 aa, Homo sapiens
  Table A; Target 77314; HLA-A*33:01; SLC22A9; ENSG00000149742; TAA
ISFSSTIVTEW

SEQ ID NO: 77315 - protein, 11 aa, Homo sapiens
  Table A; Target 77315; HLA-B*57:01; SLC22A9; ENSG00000149742; TAA
ISFSSTIVTEW

SEQ ID NO: 77316 - protein, 11 aa, Homo sapiens
  Table A; Target 77316; HLA-B*58:01; SLC22A9; ENSG00000149742; TAA
ISFSSTIVTEW

SEQ ID NO: 77317 - protein, 11 aa, Homo sapiens
  Table A; Target 77317; HLA-C*02:02; SLC22A9; ENSG00000149742; TAA
ISFSSTIVTEW

SEQ ID NO: 77318 - protein, 9 aa, Homo sapiens
  Table A; Target 77318; HLA-B*57:01; SLC22A9; ENSG00000149742; TAA
ISIPLDSNM

SEQ ID NO: 77319 - protein, 9 aa, Homo sapiens
  Table A; Target 77319; HLA-B*58:01; SLC22A9; ENSG00000149742; TAA
ISIPLDSNM

SEQ ID NO: 77320 - protein, 8 aa, Homo sapiens
  Table A; Target 77320; HLA-B*57:01; SLC22A9; ENSG00000149742; TAA
ISLLSFTR

SEQ ID NO: 77321 - protein, 9 aa, Homo sapiens
  Table A; Target 77321; HLA-A*24:02; SLC22A9; ENSG00000149742; TAA
ISLLSFTRF

SEQ ID NO: 77322 - protein, 9 aa, Homo sapiens
  Table A; Target 77322; HLA-B*57:01; SLC22A9; ENSG00000149742; TAA
ISLLSFTRF

SEQ ID NO: 77323 - protein, 8 aa, Homo sapiens
  Table A; Target 77323; HLA-A*23:01; SLC22A9; ENSG00000149742; TAA
ITNTIMLI

SEQ ID NO: 77324 - protein, 8 aa, Homo sapiens
  Table A; Target 77324; HLA-A*24:02; SLC22A9; ENSG00000149742; TAA
ITNTIMLI

SEQ ID NO: 77325 - protein, 8 aa, Homo sapiens
  Table A; Target 77325; HLA-B*51:01; SLC22A9; ENSG00000149742; TAA
ITNTIMLI

SEQ ID NO: 77326 - protein, 8 aa, Homo sapiens
  Table A; Target 77326; HLA-C*12:03; SLC22A9; ENSG00000149742; TAA
ITNTIMLI

SEQ ID NO: 77327 - protein, 11 aa, Homo sapiens
  Table A; Target 77327; HLA-B*57:01; SLC22A9; ENSG00000149742; TAA
ITNTIMLIAEW

SEQ ID NO: 77328 - protein, 8 aa, Homo sapiens
  Table A; Target 77328; HLA-C*01:02; SLC22A9; ENSG00000149742; TAA
IVGTCAAL

SEQ ID NO: 77329 - protein, 8 aa, Homo sapiens
  Table A; Target 77329; HLA-A*24:02; SLC22A9; ENSG00000149742; TAA
IYGVFPFI

SEQ ID NO: 77330 - protein, 8 aa, Homo sapiens
  Table A; Target 77330; HLA-C*16:01; SLC22A9; ENSG00000149742; TAA
KAAHRSGM

SEQ ID NO: 77331 - protein, 9 aa, Homo sapiens
  Table A; Target 77331; HLA-B*44:02; SLC22A9; ENSG00000149742; TAA
KELEAAQKK

SEQ ID NO: 77332 - protein, 9 aa, Homo sapiens
  Table A; Target 77332; HLA-B*44:03; SLC22A9; ENSG00000149742; TAA
KELEAAQKK

SEQ ID NO: 77333 - protein, 9 aa, Homo sapiens
  Table A; Target 77333; HLA-B*07:02; SLC22A9; ENSG00000149742; TAA
KPEEGLKEL

SEQ ID NO: 77334 - protein, 9 aa, Homo sapiens
  Table A; Target 77334; HLA-B*35:03; SLC22A9; ENSG00000149742; TAA
KPEEGLKEL

SEQ ID NO: 77335 - protein, 9 aa, Homo sapiens
  Table A; Target 77335; HLA-B*55:01; SLC22A9; ENSG00000149742; TAA
KPEEGLKEL

SEQ ID NO: 77336 - protein, 9 aa, Homo sapiens
  Table A; Target 77336; HLA-C*07:02; SLC22A9; ENSG00000149742; TAA
KPEEGLKEL

SEQ ID NO: 77337 - protein, 11 aa, Homo sapiens
  Table A; Target 77337; HLA-B*27:02; SLC22A9; ENSG00000149742; TAA
KPLFDTIQDEK

SEQ ID NO: 77338 - protein, 9 aa, Homo sapiens
  Table A; Target 77338; HLA-C*05:01; SLC22A9; ENSG00000149742; TAA
KQEDPRVEV

SEQ ID NO: 77339 - protein, 8 aa, Homo sapiens
  Table A; Target 77339; HLA-C*16:01; SLC22A9; ENSG00000149742; TAA
KSTMKKEL

SEQ ID NO: 77340 - protein, 9 aa, Homo sapiens
  Table A; Target 77340; HLA-B*46:01; SLC22A9; ENSG00000149742; TAA
LAFAHGNEV

SEQ ID NO: 77341 - protein, 9 aa, Homo sapiens
  Table A; Target 77341; HLA-B*51:01; SLC22A9; ENSG00000149742; TAA
LAFAHGNEV

SEQ ID NO: 77342 - protein, 9 aa, Homo sapiens
  Table A; Target 77342; HLA-B*54:01; SLC22A9; ENSG00000149742; TAA
LAFAHGNEV

SEQ ID NO: 77343 - protein, 9 aa, Homo sapiens
  Table A; Target 77343; HLA-C*02:02; SLC22A9; ENSG00000149742; TAA
LAFAHGNEV

SEQ ID NO: 77344 - protein, 9 aa, Homo sapiens
  Table A; Target 77344; HLA-C*03:03; SLC22A9; ENSG00000149742; TAA
LAFAHGNEV

SEQ ID NO: 77345 - protein, 9 aa, Homo sapiens
  Table A; Target 77345; HLA-C*03:04; SLC22A9; ENSG00000149742; TAA
LAFAHGNEV

SEQ ID NO: 77346 - protein, 9 aa, Homo sapiens
  Table A; Target 77346; HLA-C*12:03; SLC22A9; ENSG00000149742; TAA
LAFAHGNEV

SEQ ID NO: 77347 - protein, 9 aa, Homo sapiens
  Table A; Target 77347; HLA-C*16:02; SLC22A9; ENSG00000149742; TAA
LAFAHGNEV

SEQ ID NO: 77348 - protein, 9 aa, Homo sapiens
  Table A; Target 77348; HLA-C*16:04; SLC22A9; ENSG00000149742; TAA
LAFAHGNEV

SEQ ID NO: 77349 - protein, 8 aa, Homo sapiens
  Table A; Target 77349; HLA-B*57:01; SLC22A9; ENSG00000149742; TAA
LAFAIRDW

SEQ ID NO: 77350 - protein, 8 aa, Homo sapiens
  Table A; Target 77350; HLA-B*51:01; SLC22A9; ENSG00000149742; TAA
LAGLAFAI

SEQ ID NO: 77351 - protein, 10 aa, Homo sapiens
  Table A; Target 77351; HLA-C*02:02; SLC22A9; ENSG00000149742; TAA
LAIIFVPQEM

SEQ ID NO: 77352 - protein, 8 aa, Homo sapiens
  Table A; Target 77352; HLA-B*51:01; SLC22A9; ENSG00000149742; TAA
LAPLMMIL

SEQ ID NO: 77353 - protein, 9 aa, Homo sapiens
  Table A; Target 77353; HLA-A*02:07; SLC22A9; ENSG00000149742; TAA
LAPTFLIYC

SEQ ID NO: 77354 - protein, 8 aa, Homo sapiens
  Table A; Target 77354; HLA-B*54:01; SLC22A9; ENSG00000149742; TAA
LATLGLGA

SEQ ID NO: 77355 - protein, 10 aa, Homo sapiens
  Table A; Target 77355; HLA-B*54:01; SLC22A9; ENSG00000149742; TAA
LATLGLGASA

SEQ ID NO: 77356 - protein, 10 aa, Homo sapiens
  Table A; Target 77356; HLA-B*56:01; SLC22A9; ENSG00000149742; TAA
LATLGLGASA

SEQ ID NO: 77357 - protein, 8 aa, Homo sapiens
  Table A; Target 77357; HLA-B*08:01; SLC22A9; ENSG00000149742; TAA
LEILKSTM

SEQ ID NO: 77358 - protein, 8 aa, Homo sapiens
  Table A; Target 77358; HLA-B*18:01; SLC22A9; ENSG00000149742; TAA
LEILKSTM

SEQ ID NO: 77359 - protein, 8 aa, Homo sapiens
  Table A; Target 77359; HLA-B*37:01; SLC22A9; ENSG00000149742; TAA
LEILKSTM

SEQ ID NO: 77360 - protein, 8 aa, Homo sapiens
  Table A; Target 77360; HLA-B*49:01; SLC22A9; ENSG00000149742; TAA
LEILKSTM

SEQ ID NO: 77361 - protein, 8 aa, Homo sapiens
  Table A; Target 77361; HLA-B*49:01; SLC22A9; ENSG00000149742; TAA
LENFTAFI

SEQ ID NO: 77362 - protein, 10 aa, Homo sapiens
  Table A; Target 77362; HLA-A*32:01; SLC22A9; ENSG00000149742; TAA
LGASALANTL

SEQ ID NO: 77363 - protein, 10 aa, Homo sapiens
  Table A; Target 77363; HLA-B*07:02; SLC22A9; ENSG00000149742; TAA
LGASALANTL

SEQ ID NO: 77364 - protein, 10 aa, Homo sapiens
  Table A; Target 77364; HLA-B*27:05; SLC22A9; ENSG00000149742; TAA
LGASALANTL

SEQ ID NO: 77365 - protein, 10 aa, Homo sapiens
  Table A; Target 77365; HLA-C*06:02; SLC22A9; ENSG00000149742; TAA
LGASALANTL

SEQ ID NO: 77366 - protein, 10 aa, Homo sapiens
  Table A; Target 77366; HLA-C*07:02; SLC22A9; ENSG00000149742; TAA
LGASALANTL

SEQ ID NO: 77367 - protein, 8 aa, Homo sapiens
  Table A; Target 77367; HLA-B*08:01; SLC22A9; ENSG00000149742; TAA
LGLGASAL

SEQ ID NO: 77368 - protein, 8 aa, Homo sapiens
  Table A; Target 77368; HLA-C*01:02; SLC22A9; ENSG00000149742; TAA
LGLGASAL

SEQ ID NO: 77369 - protein, 8 aa, Homo sapiens
  Table A; Target 77369; HLA-C*03:03; SLC22A9; ENSG00000149742; TAA
LGLGASAL

SEQ ID NO: 77370 - protein, 8 aa, Homo sapiens
  Table A; Target 77370; HLA-C*03:04; SLC22A9; ENSG00000149742; TAA
LGLGASAL

SEQ ID NO: 77371 - protein, 8 aa, Homo sapiens
  Table A; Target 77371; HLA-C*07:04; SLC22A9; ENSG00000149742; TAA
LGLGASAL

SEQ ID NO: 77372 - protein, 8 aa, Homo sapiens
  Table A; Target 77372; HLA-C*12:03; SLC22A9; ENSG00000149742; TAA
LGLGASAL

SEQ ID NO: 77373 - protein, 8 aa, Homo sapiens
  Table A; Target 77373; HLA-C*14:02; SLC22A9; ENSG00000149742; TAA
LGLGASAL

SEQ ID NO: 77374 - protein, 10 aa, Homo sapiens
  Table A; Target 77374; HLA-C*03:04; SLC22A9; ENSG00000149742; TAA
LGMCPSGIAF

SEQ ID NO: 77375 - protein, 9 aa, Homo sapiens
  Table A; Target 77375; HLA-A*23:01; SLC22A9; ENSG00000149742; TAA
LITNTIMLI

SEQ ID NO: 77376 - protein, 9 aa, Homo sapiens
  Table A; Target 77376; HLA-A*24:02; SLC22A9; ENSG00000149742; TAA
LITNTIMLI

SEQ ID NO: 77377 - protein, 9 aa, Homo sapiens
  Table A; Target 77377; HLA-A*68:02; SLC22A9; ENSG00000149742; TAA
LITNTIMLI

SEQ ID NO: 77378 - protein, 9 aa, Homo sapiens
  Table A; Target 77378; HLA-B*13:02; SLC22A9; ENSG00000149742; TAA
LITNTIMLI

SEQ ID NO: 77379 - protein, 9 aa, Homo sapiens
  Table A; Target 77379; HLA-A*03:01; SLC22A9; ENSG00000149742; TAA
LLLPETRNK

SEQ ID NO: 77380 - protein, 9 aa, Homo sapiens
  Table A; Target 77380; HLA-A*03:02; SLC22A9; ENSG00000149742; TAA
LLLPETRNK

SEQ ID NO: 77381 - protein, 11 aa, Homo sapiens
  Table A; Target 77381; HLA-A*02:07; SLC22A9; ENSG00000149742; TAA
LLPETRNKPLF

SEQ ID NO: 77382 - protein, 11 aa, Homo sapiens
  Table A; Target 77382; HLA-A*24:02; SLC22A9; ENSG00000149742; TAA
LLPETRNKPLF

SEQ ID NO: 77383 - protein, 8 aa, Homo sapiens
  Table A; Target 77383; HLA-B*15:01; SLC22A9; ENSG00000149742; TAA
LMMILSVY

SEQ ID NO: 77384 - protein, 8 aa, Homo sapiens
  Table A; Target 77384; HLA-B*15:03; SLC22A9; ENSG00000149742; TAA
LMMILSVY

SEQ ID NO: 77385 - protein, 8 aa, Homo sapiens
  Table A; Target 77385; HLA-B*46:01; SLC22A9; ENSG00000149742; TAA
LMMILSVY

SEQ ID NO: 77386 - protein, 9 aa, Homo sapiens
  Table A; Target 77386; HLA-B*07:02; SLC22A9; ENSG00000149742; TAA
LPETRNKPL

SEQ ID NO: 77387 - protein, 9 aa, Homo sapiens
  Table A; Target 77387; HLA-B*08:01; SLC22A9; ENSG00000149742; TAA
LPETRNKPL

SEQ ID NO: 77388 - protein, 9 aa, Homo sapiens
  Table A; Target 77388; HLA-C*07:02; SLC22A9; ENSG00000149742; TAA
LPETRNKPL

SEQ ID NO: 77389 - protein, 8 aa, Homo sapiens
  Table A; Target 77389; HLA-B*51:01; SLC22A9; ENSG00000149742; TAA
LPWIIYGV

SEQ ID NO: 77390 - protein, 9 aa, Homo sapiens
  Table A; Target 77390; HLA-A*30:02; SLC22A9; ENSG00000149742; TAA
LQLVVSVPY

SEQ ID NO: 77391 - protein, 9 aa, Homo sapiens
  Table A; Target 77391; HLA-B*15:03; SLC22A9; ENSG00000149742; TAA
LQLVVSVPY

SEQ ID NO: 77392 - protein, 9 aa, Homo sapiens
  Table A; Target 77392; HLA-B*46:01; SLC22A9; ENSG00000149742; TAA
LQLVVSVPY

SEQ ID NO: 77393 - protein, 9 aa, Homo sapiens
  Table A; Target 77393; HLA-A*30:01; SLC22A9; ENSG00000149742; TAA
LQTLFGAVI

SEQ ID NO: 77394 - protein, 9 aa, Homo sapiens
  Table A; Target 77394; HLA-B*13:02; SLC22A9; ENSG00000149742; TAA
LQTLFGAVI

SEQ ID NO: 77395 - protein, 9 aa, Homo sapiens
  Table A; Target 77395; HLA-B*38:01; SLC22A9; ENSG00000149742; TAA
LQTLFGAVI

SEQ ID NO: 77396 - protein, 9 aa, Homo sapiens
  Table A; Target 77396; HLA-B*39:01; SLC22A9; ENSG00000149742; TAA
LQTLFGAVI

SEQ ID NO: 77397 - protein, 9 aa, Homo sapiens
  Table A; Target 77397; HLA-C*07:04; SLC22A9; ENSG00000149742; TAA
LQTLFGAVI

SEQ ID NO: 77398 - protein, 8 aa, Homo sapiens
  Table A; Target 77398; HLA-B*13:02; SLC22A9; ENSG00000149742; TAA
LQTVFLSI

SEQ ID NO: 77399 - protein, 9 aa, Homo sapiens
  Table A; Target 77399; HLA-C*12:03; SLC22A9; ENSG00000149742; TAA
LQVAIVGTC

SEQ ID NO: 77400 - protein, 10 aa, Homo sapiens
  Table A; Target 77400; HLA-B*27:05; SLC22A9; ENSG00000149742; TAA
LRFLSGIAAM

SEQ ID NO: 77401 - protein, 10 aa, Homo sapiens
  Table A; Target 77401; HLA-B*40:02; SLC22A9; ENSG00000149742; TAA
LRFLSGIAAM

SEQ ID NO: 77402 - protein, 9 aa, Homo sapiens
  Table A; Target 77402; HLA-B*57:01; SLC22A9; ENSG00000149742; TAA
LSFTRFANF

SEQ ID NO: 77403 - protein, 9 aa, Homo sapiens
  Table A; Target 77403; HLA-C*01:02; SLC22A9; ENSG00000149742; TAA
LSGIAAMSL

SEQ ID NO: 77404 - protein, 9 aa, Homo sapiens
  Table A; Target 77404; HLA-A*01:01; SLC22A9; ENSG00000149742; TAA
LSIFAVATY

SEQ ID NO: 77405 - protein, 9 aa, Homo sapiens
  Table A; Target 77405; HLA-A*26:01; SLC22A9; ENSG00000149742; TAA
LSIFAVATY

SEQ ID NO: 77406 - protein, 9 aa, Homo sapiens
  Table A; Target 77406; HLA-A*30:02; SLC22A9; ENSG00000149742; TAA
LSIFAVATY

SEQ ID NO: 77407 - protein, 9 aa, Homo sapiens
  Table A; Target 77407; HLA-A*32:01; SLC22A9; ENSG00000149742; TAA
LSIFAVATY

SEQ ID NO: 77408 - protein, 9 aa, Homo sapiens
  Table A; Target 77408; HLA-B*15:01; SLC22A9; ENSG00000149742; TAA
LSIFAVATY

SEQ ID NO: 77409 - protein, 9 aa, Homo sapiens
  Table A; Target 77409; HLA-B*15:03; SLC22A9; ENSG00000149742; TAA
LSIFAVATY

SEQ ID NO: 77410 - protein, 9 aa, Homo sapiens
  Table A; Target 77410; HLA-B*46:01; SLC22A9; ENSG00000149742; TAA
LSIFAVATY

SEQ ID NO: 77411 - protein, 9 aa, Homo sapiens
  Table A; Target 77411; HLA-B*57:01; SLC22A9; ENSG00000149742; TAA
LSIFAVATY

SEQ ID NO: 77412 - protein, 9 aa, Homo sapiens
  Table A; Target 77412; HLA-B*58:01; SLC22A9; ENSG00000149742; TAA
LSIFAVATY

SEQ ID NO: 77413 - protein, 9 aa, Homo sapiens
  Table A; Target 77413; HLA-C*02:02; SLC22A9; ENSG00000149742; TAA
LSIFAVATY

SEQ ID NO: 77414 - protein, 10 aa, Homo sapiens
  Table A; Target 77414; HLA-B*57:01; SLC22A9; ENSG00000149742; TAA
LSVYSPPLPW

SEQ ID NO: 77415 - protein, 10 aa, Homo sapiens
  Table A; Target 77415; HLA-B*57:01; SLC22A9; ENSG00000149742; TAA
LTLEILKSTM

SEQ ID NO: 77416 - protein, 9 aa, Homo sapiens
  Table A; Target 77416; HLA-B*57:01; SLC22A9; ENSG00000149742; TAA
LTSVAKFVF

SEQ ID NO: 77417 - protein, 9 aa, Homo sapiens
  Table A; Target 77417; HLA-C*16:01; SLC22A9; ENSG00000149742; TAA
LTSVAKFVF

SEQ ID NO: 77418 - protein, 11 aa, Homo sapiens
  Table A; Target 77418; HLA-A*02:01; SLC22A9; ENSG00000149742; TAA
LVCDSQSLTSV

SEQ ID NO: 77419 - protein, 11 aa, Homo sapiens
  Table A; Target 77419; HLA-A*02:03; SLC22A9; ENSG00000149742; TAA
LVCDSQSLTSV

SEQ ID NO: 77420 - protein, 9 aa, Homo sapiens
  Table A; Target 77420; HLA-A*68:02; SLC22A9; ENSG00000149742; TAA
LVVSVPYFV

SEQ ID NO: 77421 - protein, 8 aa, Homo sapiens
  Table A; Target 77421; HLA-B*51:01; SLC22A9; ENSG00000149742; TAA
MAYFGLNL

SEQ ID NO: 77422 - protein, 8 aa, Homo sapiens
  Table A; Target 77422; HLA-C*03:03; SLC22A9; ENSG00000149742; TAA
MAYFGLNL

SEQ ID NO: 77423 - protein, 8 aa, Homo sapiens
  Table A; Target 77423; HLA-C*03:04; SLC22A9; ENSG00000149742; TAA
MAYFGLNL

SEQ ID NO: 77424 - protein, 10 aa, Homo sapiens
  Table A; Target 77424; HLA-A*68:02; SLC22A9; ENSG00000149742; TAA
MAYFGLNLHV

SEQ ID NO: 77425 - protein, 8 aa, Homo sapiens
  Table A; Target 77425; HLA-C*01:02; SLC22A9; ENSG00000149742; TAA
MCPSGIAF

SEQ ID NO: 77426 - protein, 11 aa, Homo sapiens
  Table A; Target 77426; HLA-A*02:07; SLC22A9; ENSG00000149742; TAA
MCPSGIAFMTL

SEQ ID NO: 77427 - protein, 11 aa, Homo sapiens
  Table A; Target 77427; HLA-A*24:02; SLC22A9; ENSG00000149742; TAA
MCPSGIAFMTL

SEQ ID NO: 77428 - protein, 9 aa, Homo sapiens
  Table A; Target 77428; HLA-A*02:07; SLC22A9; ENSG00000149742; TAA
MLENFTAFI

SEQ ID NO: 77429 - protein, 9 aa, Homo sapiens
  Table A; Target 77429; HLA-A*02:04; SLC22A9; ENSG00000149742; TAA
MLLMFLLAI

SEQ ID NO: 77430 - protein, 11 aa, Homo sapiens
  Table A; Target 77430; HLA-C*04:01; SLC22A9; ENSG00000149742; TAA
MMVGGILGGHL

SEQ ID NO: 77431 - protein, 8 aa, Homo sapiens
  Table A; Target 77431; HLA-B*51:01; SLC22A9; ENSG00000149742; TAA
MPNICKRI

SEQ ID NO: 77432 - protein, 10 aa, Homo sapiens
  Table A; Target 77432; HLA-B*07:02; SLC22A9; ENSG00000149742; TAA
MPNICKRISL

SEQ ID NO: 77433 - protein, 10 aa, Homo sapiens
  Table A; Target 77433; HLA-B*08:01; SLC22A9; ENSG00000149742; TAA
MPNICKRISL

SEQ ID NO: 77434 - protein, 8 aa, Homo sapiens
  Table A; Target 77434; HLA-B*08:01; SLC22A9; ENSG00000149742; TAA
MQTLREVL

SEQ ID NO: 77435 - protein, 8 aa, Homo sapiens
  Table A; Target 77435; HLA-C*16:01; SLC22A9; ENSG00000149742; TAA
MQTLREVL

SEQ ID NO: 77436 - protein, 8 aa, Homo sapiens
  Table A; Target 77436; HLA-B*51:01; SLC22A9; ENSG00000149742; TAA
MSLITNTI

SEQ ID NO: 77437 - protein, 8 aa, Homo sapiens
  Table A; Target 77437; HLA-C*03:03; SLC22A9; ENSG00000149742; TAA
MTLAGLAF

SEQ ID NO: 77438 - protein, 8 aa, Homo sapiens
  Table A; Target 77438; HLA-C*03:04; SLC22A9; ENSG00000149742; TAA
MTLAGLAF

SEQ ID NO: 77439 - protein, 8 aa, Homo sapiens
  Table A; Target 77439; HLA-C*14:02; SLC22A9; ENSG00000149742; TAA
MTLAGLAF

SEQ ID NO: 77440 - protein, 10 aa, Homo sapiens
  Table A; Target 77440; HLA-A*68:02; SLC22A9; ENSG00000149742; TAA
MVGGILGGHL

SEQ ID NO: 77441 - protein, 10 aa, Homo sapiens
  Table A; Target 77441; HLA-C*07:01; SLC22A9; ENSG00000149742; TAA
MVGGILGGHL

SEQ ID NO: 77442 - protein, 10 aa, Homo sapiens
  Table A; Target 77442; HLA-C*07:04; SLC22A9; ENSG00000149742; TAA
MVGGILGGHL

SEQ ID NO: 77443 - protein, 8 aa, Homo sapiens
  Table A; Target 77443; HLA-B*07:02; SLC22A9; ENSG00000149742; TAA
NARDTLTL

SEQ ID NO: 77444 - protein, 8 aa, Homo sapiens
  Table A; Target 77444; HLA-B*51:01; SLC22A9; ENSG00000149742; TAA
NARDTLTL

SEQ ID NO: 77445 - protein, 8 aa, Homo sapiens
  Table A; Target 77445; HLA-C*03:04; SLC22A9; ENSG00000149742; TAA
NARDTLTL

SEQ ID NO: 77446 - protein, 10 aa, Homo sapiens
  Table A; Target 77446; HLA-A*29:02; SLC22A9; ENSG00000149742; TAA
NCVAPWALKY

SEQ ID NO: 77447 - protein, 10 aa, Homo sapiens
  Table A; Target 77447; HLA-C*07:01; SLC22A9; ENSG00000149742; TAA
NCVAPWALKY

SEQ ID NO: 77448 - protein, 8 aa, Homo sapiens
  Table A; Target 77448; HLA-A*30:01; SLC22A9; ENSG00000149742; TAA
NEVIPTII

SEQ ID NO: 77449 - protein, 8 aa, Homo sapiens
  Table A; Target 77449; HLA-B*18:01; SLC22A9; ENSG00000149742; TAA
NEVIPTII

SEQ ID NO: 77450 - protein, 8 aa, Homo sapiens
  Table A; Target 77450; HLA-B*49:01; SLC22A9; ENSG00000149742; TAA
NEVIPTII

SEQ ID NO: 77451 - protein, 9 aa, Homo sapiens
  Table A; Target 77451; HLA-B*49:01; SLC22A9; ENSG00000149742; TAA
NEVIPTIIR

SEQ ID NO: 77452 - protein, 10 aa, Homo sapiens
  Table A; Target 77452; HLA-A*30:01; SLC22A9; ENSG00000149742; TAA
NEVIPTIIRA

SEQ ID NO: 77453 - protein, 9 aa, Homo sapiens
  Table A; Target 77453; HLA-A*02:03; SLC22A9; ENSG00000149742; TAA
NIAGALAPL

SEQ ID NO: 77454 - protein, 9 aa, Homo sapiens
  Table A; Target 77454; HLA-B*07:02; SLC22A9; ENSG00000149742; TAA
NIAGALAPL

SEQ ID NO: 77455 - protein, 9 aa, Homo sapiens
  Table A; Target 77455; HLA-B*27:05; SLC22A9; ENSG00000149742; TAA
NIAGALAPL

SEQ ID NO: 77456 - protein, 9 aa, Homo sapiens
  Table A; Target 77456; HLA-B*46:01; SLC22A9; ENSG00000149742; TAA
NIAGALAPL

SEQ ID NO: 77457 - protein, 9 aa, Homo sapiens
  Table A; Target 77457; HLA-C*01:02; SLC22A9; ENSG00000149742; TAA
NIAGALAPL

SEQ ID NO: 77458 - protein, 9 aa, Homo sapiens
  Table A; Target 77458; HLA-C*07:04; SLC22A9; ENSG00000149742; TAA
NIAGALAPL

SEQ ID NO: 77459 - protein, 10 aa, Homo sapiens
  Table A; Target 77459; HLA-A*26:01; SLC22A9; ENSG00000149742; TAA
NIAGALAPLM

SEQ ID NO: 77460 - protein, 10 aa, Homo sapiens
  Table A; Target 77460; HLA-C*07:04; SLC22A9; ENSG00000149742; TAA
NIAGALAPLM

SEQ ID NO: 77461 - protein, 9 aa, Homo sapiens
  Table A; Target 77461; HLA-A*25:01; SLC22A9; ENSG00000149742; TAA
NTIMLIAEW

SEQ ID NO: 77462 - protein, 9 aa, Homo sapiens
  Table A; Target 77462; HLA-A*26:01; SLC22A9; ENSG00000149742; TAA
NTIMLIAEW

SEQ ID NO: 77463 - protein, 9 aa, Homo sapiens
  Table A; Target 77463; HLA-B*44:02; SLC22A9; ENSG00000149742; TAA
NTIMLIAEW

SEQ ID NO: 77464 - protein, 9 aa, Homo sapiens
  Table A; Target 77464; HLA-B*44:03; SLC22A9; ENSG00000149742; TAA
NTIMLIAEW

SEQ ID NO: 77465 - protein, 9 aa, Homo sapiens
  Table A; Target 77465; HLA-B*57:01; SLC22A9; ENSG00000149742; TAA
NTIMLIAEW

SEQ ID NO: 77466 - protein, 8 aa, Homo sapiens
  Table A; Target 77466; HLA-B*18:01; SLC22A9; ENSG00000149742; TAA
NVFLLQTL

SEQ ID NO: 77467 - protein, 9 aa, Homo sapiens
  Table A; Target 77467; HLA-A*29:02; SLC22A9; ENSG00000149742; TAA
NVFLLQTLF

SEQ ID NO: 77468 - protein, 8 aa, Homo sapiens
  Table A; Target 77468; HLA-A*23:01; SLC22A9; ENSG00000149742; TAA
PFISGFAF

SEQ ID NO: 77469 - protein, 9 aa, Homo sapiens
  Table A; Target 77469; HLA-A*24:02; SLC22A9; ENSG00000149742; TAA
PFISGFAFL

SEQ ID NO: 77470 - protein, 10 aa, Homo sapiens
  Table A; Target 77470; HLA-B*27:02; SLC22A9; ENSG00000149742; TAA
PLFDTIQDEK

SEQ ID NO: 77471 - protein, 9 aa, Homo sapiens
  Table A; Target 77471; HLA-A*02:07; SLC22A9; ENSG00000149742; TAA
PLPWIIYGV

SEQ ID NO: 77472 - protein, 8 aa, Homo sapiens
  Table A; Target 77472; HLA-B*07:02; SLC22A9; ENSG00000149742; TAA
PRVEVTQF

SEQ ID NO: 77473 - protein, 8 aa, Homo sapiens
  Table A; Target 77473; HLA-C*07:01; SLC22A9; ENSG00000149742; TAA
PRVEVTQF

SEQ ID NO: 77474 - protein, 8 aa, Homo sapiens
  Table A; Target 77474; HLA-C*07:02; SLC22A9; ENSG00000149742; TAA
PRVEVTQF

SEQ ID NO: 77475 - protein, 8 aa, Homo sapiens
  Table A; Target 77475; HLA-C*12:03; SLC22A9; ENSG00000149742; TAA
PRVEVTQF

SEQ ID NO: 77476 - protein, 9 aa, Homo sapiens
  Table A; Target 77476; HLA-C*07:02; SLC22A9; ENSG00000149742; TAA
PSGIAFMTL

SEQ ID NO: 77477 - protein, 9 aa, Homo sapiens
  Table A; Target 77477; HLA-A*11:01; SLC22A9; ENSG00000149742; TAA
QAMGITLGM

SEQ ID NO: 77478 - protein, 9 aa, Homo sapiens
  Table A; Target 77478; HLA-A*23:01; SLC22A9; ENSG00000149742; TAA
QAMGITLGM

SEQ ID NO: 77479 - protein, 9 aa, Homo sapiens
  Table A; Target 77479; HLA-A*25:01; SLC22A9; ENSG00000149742; TAA
QAMGITLGM

SEQ ID NO: 77480 - protein, 9 aa, Homo sapiens
  Table A; Target 77480; HLA-A*26:01; SLC22A9; ENSG00000149742; TAA
QAMGITLGM

SEQ ID NO: 77481 - protein, 9 aa, Homo sapiens
  Table A; Target 77481; HLA-A*29:02; SLC22A9; ENSG00000149742; TAA
QAMGITLGM

SEQ ID NO: 77482 - protein, 9 aa, Homo sapiens
  Table A; Target 77482; HLA-A*32:01; SLC22A9; ENSG00000149742; TAA
QAMGITLGM

SEQ ID NO: 77483 - protein, 9 aa, Homo sapiens
  Table A; Target 77483; HLA-A*68:01; SLC22A9; ENSG00000149742; TAA
QAMGITLGM

SEQ ID NO: 77484 - protein, 9 aa, Homo sapiens
  Table A; Target 77484; HLA-A*68:02; SLC22A9; ENSG00000149742; TAA
QAMGITLGM

SEQ ID NO: 77485 - protein, 9 aa, Homo sapiens
  Table A; Target 77485; HLA-B*13:02; SLC22A9; ENSG00000149742; TAA
QAMGITLGM

SEQ ID NO: 77486 - protein, 9 aa, Homo sapiens
  Table A; Target 77486; HLA-B*15:01; SLC22A9; ENSG00000149742; TAA
QAMGITLGM

SEQ ID NO: 77487 - protein, 9 aa, Homo sapiens
  Table A; Target 77487; HLA-B*15:03; SLC22A9; ENSG00000149742; TAA
QAMGITLGM

SEQ ID NO: 77488 - protein, 9 aa, Homo sapiens
  Table A; Target 77488; HLA-B*27:05; SLC22A9; ENSG00000149742; TAA
QAMGITLGM

SEQ ID NO: 77489 - protein, 9 aa, Homo sapiens
  Table A; Target 77489; HLA-B*35:01; SLC22A9; ENSG00000149742; TAA
QAMGITLGM

SEQ ID NO: 77490 - protein, 9 aa, Homo sapiens
  Table A; Target 77490; HLA-B*35:03; SLC22A9; ENSG00000149742; TAA
QAMGITLGM

SEQ ID NO: 77491 - protein, 9 aa, Homo sapiens
  Table A; Target 77491; HLA-B*38:01; SLC22A9; ENSG00000149742; TAA
QAMGITLGM

SEQ ID NO: 77492 - protein, 9 aa, Homo sapiens
  Table A; Target 77492; HLA-B*39:01; SLC22A9; ENSG00000149742; TAA
QAMGITLGM

SEQ ID NO: 77493 - protein, 9 aa, Homo sapiens
  Table A; Target 77493; HLA-B*44:03; SLC22A9; ENSG00000149742; TAA
QAMGITLGM

SEQ ID NO: 77494 - protein, 9 aa, Homo sapiens
  Table A; Target 77494; HLA-B*46:01; SLC22A9; ENSG00000149742; TAA
QAMGITLGM

SEQ ID NO: 77495 - protein, 9 aa, Homo sapiens
  Table A; Target 77495; HLA-B*55:01; SLC22A9; ENSG00000149742; TAA
QAMGITLGM

SEQ ID NO: 77496 - protein, 9 aa, Homo sapiens
  Table A; Target 77496; HLA-B*58:01; SLC22A9; ENSG00000149742; TAA
QAMGITLGM

SEQ ID NO: 77497 - protein, 9 aa, Homo sapiens
  Table A; Target 77497; HLA-C*02:02; SLC22A9; ENSG00000149742; TAA
QAMGITLGM

SEQ ID NO: 77498 - protein, 9 aa, Homo sapiens
  Table A; Target 77498; HLA-C*03:03; SLC22A9; ENSG00000149742; TAA
QAMGITLGM

SEQ ID NO: 77499 - protein, 9 aa, Homo sapiens
  Table A; Target 77499; HLA-C*03:04; SLC22A9; ENSG00000149742; TAA
QAMGITLGM

SEQ ID NO: 77500 - protein, 9 aa, Homo sapiens
  Table A; Target 77500; HLA-C*07:06; SLC22A9; ENSG00000149742; TAA
QAMGITLGM

SEQ ID NO: 77501 - protein, 9 aa, Homo sapiens
  Table A; Target 77501; HLA-C*12:03; SLC22A9; ENSG00000149742; TAA
QAMGITLGM

SEQ ID NO: 77502 - protein, 9 aa, Homo sapiens
  Table A; Target 77502; HLA-C*14:02; SLC22A9; ENSG00000149742; TAA
QAMGITLGM

SEQ ID NO: 77503 - protein, 9 aa, Homo sapiens
  Table A; Target 77503; HLA-C*16:02; SLC22A9; ENSG00000149742; TAA
QAMGITLGM

SEQ ID NO: 77504 - protein, 9 aa, Homo sapiens
  Table A; Target 77504; HLA-C*16:04; SLC22A9; ENSG00000149742; TAA
QAMGITLGM

SEQ ID NO: 77505 - protein, 9 aa, Homo sapiens
  Table A; Target 77505; HLA-B*37:01; SLC22A9; ENSG00000149742; TAA
QDALLRISI

SEQ ID NO: 77506 - protein, 9 aa, Homo sapiens
  Table A; Target 77506; HLA-B*44:02; SLC22A9; ENSG00000149742; TAA
QDALLRISI

SEQ ID NO: 77507 - protein, 9 aa, Homo sapiens
  Table A; Target 77507; HLA-B*44:03; SLC22A9; ENSG00000149742; TAA
QDALLRISI

SEQ ID NO: 77508 - protein, 11 aa, Homo sapiens
  Table A; Target 77508; HLA-B*44:02; SLC22A9; ENSG00000149742; TAA
QDLLGHAGDLW

SEQ ID NO: 77509 - protein, 8 aa, Homo sapiens
  Table A; Target 77509; HLA-B*37:01; SLC22A9; ENSG00000149742; TAA
QEDPRVEV

SEQ ID NO: 77510 - protein, 8 aa, Homo sapiens
  Table A; Target 77510; HLA-B*49:01; SLC22A9; ENSG00000149742; TAA
QEDPRVEV

SEQ ID NO: 77511 - protein, 9 aa, Homo sapiens
  Table A; Target 77511; HLA-B*37:01; SLC22A9; ENSG00000149742; TAA
QEDPRVEVT

SEQ ID NO: 77512 - protein, 9 aa, Homo sapiens
  Table A; Target 77512; HLA-B*40:01; SLC22A9; ENSG00000149742; TAA
QEDPRVEVT

SEQ ID NO: 77513 - protein, 11 aa, Homo sapiens
  Table A; Target 77513; HLA-A*30:01; SLC22A9; ENSG00000149742; TAA
QEDPRVEVTQF

SEQ ID NO: 77514 - protein, 11 aa, Homo sapiens
  Table A; Target 77514; HLA-B*18:01; SLC22A9; ENSG00000149742; TAA
QEDPRVEVTQF

SEQ ID NO: 77515 - protein, 11 aa, Homo sapiens
  Table A; Target 77515; HLA-B*37:01; SLC22A9; ENSG00000149742; TAA
QEDPRVEVTQF

SEQ ID NO: 77516 - protein, 11 aa, Homo sapiens
  Table A; Target 77516; HLA-B*38:01; SLC22A9; ENSG00000149742; TAA
QEDPRVEVTQF

SEQ ID NO: 77517 - protein, 11 aa, Homo sapiens
  Table A; Target 77517; HLA-B*39:01; SLC22A9; ENSG00000149742; TAA
QEDPRVEVTQF

SEQ ID NO: 77518 - protein, 11 aa, Homo sapiens
  Table A; Target 77518; HLA-B*40:01; SLC22A9; ENSG00000149742; TAA
QEDPRVEVTQF

SEQ ID NO: 77519 - protein, 11 aa, Homo sapiens
  Table A; Target 77519; HLA-B*44:02; SLC22A9; ENSG00000149742; TAA
QEDPRVEVTQF

SEQ ID NO: 77520 - protein, 11 aa, Homo sapiens
  Table A; Target 77520; HLA-B*44:03; SLC22A9; ENSG00000149742; TAA
QEDPRVEVTQF

SEQ ID NO: 77521 - protein, 11 aa, Homo sapiens
  Table A; Target 77521; HLA-C*16:04; SLC22A9; ENSG00000149742; TAA
QEDPRVEVTQF

SEQ ID NO: 77522 - protein, 9 aa, Homo sapiens
  Table A; Target 77522; HLA-B*49:01; SLC22A9; ENSG00000149742; TAA
QEMQTLREV

SEQ ID NO: 77523 - protein, 10 aa, Homo sapiens
  Table A; Target 77523; HLA-A*30:01; SLC22A9; ENSG00000149742; TAA
QEMQTLREVL

SEQ ID NO: 77524 - protein, 10 aa, Homo sapiens
  Table A; Target 77524; HLA-B*40:01; SLC22A9; ENSG00000149742; TAA
QEMQTLREVL

SEQ ID NO: 77525 - protein, 10 aa, Homo sapiens
  Table A; Target 77525; HLA-B*40:02; SLC22A9; ENSG00000149742; TAA
QEMQTLREVL

SEQ ID NO: 77526 - protein, 10 aa, Homo sapiens
  Table A; Target 77526; HLA-B*44:02; SLC22A9; ENSG00000149742; TAA
QEMQTLREVL

SEQ ID NO: 77527 - protein, 10 aa, Homo sapiens
  Table A; Target 77527; HLA-B*44:03; SLC22A9; ENSG00000149742; TAA
QEMQTLREVL

SEQ ID NO: 77528 - protein, 10 aa, Homo sapiens
  Table A; Target 77528; HLA-B*49:01; SLC22A9; ENSG00000149742; TAA
QEMQTLREVL

SEQ ID NO: 77529 - protein, 9 aa, Homo sapiens
  Table A; Target 77529; HLA-B*38:01; SLC22A9; ENSG00000149742; TAA
QHLGNNVFL

SEQ ID NO: 77530 - protein, 9 aa, Homo sapiens
  Table A; Target 77530; HLA-B*39:01; SLC22A9; ENSG00000149742; TAA
QHLGNNVFL

SEQ ID NO: 77531 - protein, 9 aa, Homo sapiens
  Table A; Target 77531; HLA-A*23:01; SLC22A9; ENSG00000149742; TAA
QLVVSVPYF

SEQ ID NO: 77532 - protein, 9 aa, Homo sapiens
  Table A; Target 77532; HLA-A*25:01; SLC22A9; ENSG00000149742; TAA
QLVVSVPYF

SEQ ID NO: 77533 - protein, 9 aa, Homo sapiens
  Table A; Target 77533; HLA-A*26:01; SLC22A9; ENSG00000149742; TAA
QLVVSVPYF

SEQ ID NO: 77534 - protein, 8 aa, Homo sapiens
  Table A; Target 77534; HLA-A*03:02; SLC22A9; ENSG00000149742; TAA
QSLTSVAK

SEQ ID NO: 77535 - protein, 8 aa, Homo sapiens
  Table A; Target 77535; HLA-A*11:01; SLC22A9; ENSG00000149742; TAA
QSLTSVAK

SEQ ID NO: 77536 - protein, 9 aa, Homo sapiens
  Table A; Target 77536; HLA-A*23:01; SLC22A9; ENSG00000149742; TAA
QSLTSVAKF

SEQ ID NO: 77537 - protein, 9 aa, Homo sapiens
  Table A; Target 77537; HLA-A*24:02; SLC22A9; ENSG00000149742; TAA
QSLTSVAKF

SEQ ID NO: 77538 - protein, 9 aa, Homo sapiens
  Table A; Target 77538; HLA-A*25:01; SLC22A9; ENSG00000149742; TAA
QSLTSVAKF

SEQ ID NO: 77539 - protein, 9 aa, Homo sapiens
  Table A; Target 77539; HLA-A*26:01; SLC22A9; ENSG00000149742; TAA
QSLTSVAKF

SEQ ID NO: 77540 - protein, 9 aa, Homo sapiens
  Table A; Target 77540; HLA-A*30:02; SLC22A9; ENSG00000149742; TAA
QSLTSVAKF

SEQ ID NO: 77541 - protein, 9 aa, Homo sapiens
  Table A; Target 77541; HLA-A*32:01; SLC22A9; ENSG00000149742; TAA
QSLTSVAKF

SEQ ID NO: 77542 - protein, 9 aa, Homo sapiens
  Table A; Target 77542; HLA-A*33:01; SLC22A9; ENSG00000149742; TAA
QSLTSVAKF

SEQ ID NO: 77543 - protein, 9 aa, Homo sapiens
  Table A; Target 77543; HLA-A*33:03; SLC22A9; ENSG00000149742; TAA
QSLTSVAKF

SEQ ID NO: 77544 - protein, 9 aa, Homo sapiens
  Table A; Target 77544; HLA-B*37:01; SLC22A9; ENSG00000149742; TAA
QSLTSVAKF

SEQ ID NO: 77545 - protein, 9 aa, Homo sapiens
  Table A; Target 77545; HLA-B*44:02; SLC22A9; ENSG00000149742; TAA
QSLTSVAKF

SEQ ID NO: 77546 - protein, 9 aa, Homo sapiens
  Table A; Target 77546; HLA-B*44:03; SLC22A9; ENSG00000149742; TAA
QSLTSVAKF

SEQ ID NO: 77547 - protein, 9 aa, Homo sapiens
  Table A; Target 77547; HLA-B*57:01; SLC22A9; ENSG00000149742; TAA
QSLTSVAKF

SEQ ID NO: 77548 - protein, 9 aa, Homo sapiens
  Table A; Target 77548; HLA-B*58:01; SLC22A9; ENSG00000149742; TAA
QSLTSVAKF

SEQ ID NO: 77549 - protein, 9 aa, Homo sapiens
  Table A; Target 77549; HLA-C*16:04; SLC22A9; ENSG00000149742; TAA
QSLTSVAKF

SEQ ID NO: 77550 - protein, 11 aa, Homo sapiens
  Table A; Target 77550; HLA-B*57:01; SLC22A9; ENSG00000149742; TAA
QSLTSVAKFVF

SEQ ID NO: 77551 - protein, 10 aa, Homo sapiens
  Table A; Target 77551; HLA-B*57:01; SLC22A9; ENSG00000149742; TAA
QTLREVLATL

SEQ ID NO: 77552 - protein, 10 aa, Homo sapiens
  Table A; Target 77552; HLA-A*68:02; SLC22A9; ENSG00000149742; TAA
QTVFLSIFAV

SEQ ID NO: 77553 - protein, 9 aa, Homo sapiens
  Table A; Target 77553; HLA-B*13:02; SLC22A9; ENSG00000149742; TAA
QVAIVGTCA

SEQ ID NO: 77554 - protein, 9 aa, Homo sapiens
  Table A; Target 77554; HLA-B*15:03; SLC22A9; ENSG00000149742; TAA
QVAIVGTCA

SEQ ID NO: 77555 - protein, 9 aa, Homo sapiens
  Table A; Target 77555; HLA-B*54:01; SLC22A9; ENSG00000149742; TAA
QVAIVGTCA

SEQ ID NO: 77556 - protein, 9 aa, Homo sapiens
  Table A; Target 77556; HLA-B*56:01; SLC22A9; ENSG00000149742; TAA
QVAIVGTCA

SEQ ID NO: 77557 - protein, 9 aa, Homo sapiens
  Table A; Target 77557; HLA-A*23:01; SLC22A9; ENSG00000149742; TAA
RAMGINATF

SEQ ID NO: 77558 - protein, 9 aa, Homo sapiens
  Table A; Target 77558; HLA-A*24:02; SLC22A9; ENSG00000149742; TAA
RAMGINATF

SEQ ID NO: 77559 - protein, 9 aa, Homo sapiens
  Table A; Target 77559; HLA-A*25:01; SLC22A9; ENSG00000149742; TAA
RAMGINATF

SEQ ID NO: 77560 - protein, 9 aa, Homo sapiens
  Table A; Target 77560; HLA-A*26:01; SLC22A9; ENSG00000149742; TAA
RAMGINATF

SEQ ID NO: 77561 - protein, 9 aa, Homo sapiens
  Table A; Target 77561; HLA-A*29:02; SLC22A9; ENSG00000149742; TAA
RAMGINATF

SEQ ID NO: 77562 - protein, 9 aa, Homo sapiens
  Table A; Target 77562; HLA-A*30:02; SLC22A9; ENSG00000149742; TAA
RAMGINATF

SEQ ID NO: 77563 - protein, 9 aa, Homo sapiens
  Table A; Target 77563; HLA-A*31:01; SLC22A9; ENSG00000149742; TAA
RAMGINATF

SEQ ID NO: 77564 - protein, 9 aa, Homo sapiens
  Table A; Target 77564; HLA-A*32:01; SLC22A9; ENSG00000149742; TAA
RAMGINATF

SEQ ID NO: 77565 - protein, 9 aa, Homo sapiens
  Table A; Target 77565; HLA-B*07:02; SLC22A9; ENSG00000149742; TAA
RAMGINATF

SEQ ID NO: 77566 - protein, 9 aa, Homo sapiens
  Table A; Target 77566; HLA-B*08:01; SLC22A9; ENSG00000149742; TAA
RAMGINATF

SEQ ID NO: 77567 - protein, 9 aa, Homo sapiens
  Table A; Target 77567; HLA-B*15:01; SLC22A9; ENSG00000149742; TAA
RAMGINATF

SEQ ID NO: 77568 - protein, 9 aa, Homo sapiens
  Table A; Target 77568; HLA-B*15:03; SLC22A9; ENSG00000149742; TAA
RAMGINATF

SEQ ID NO: 77569 - protein, 9 aa, Homo sapiens
  Table A; Target 77569; HLA-B*27:02; SLC22A9; ENSG00000149742; TAA
RAMGINATF

SEQ ID NO: 77570 - protein, 9 aa, Homo sapiens
  Table A; Target 77570; HLA-B*27:05; SLC22A9; ENSG00000149742; TAA
RAMGINATF

SEQ ID NO: 77571 - protein, 9 aa, Homo sapiens
  Table A; Target 77571; HLA-B*35:01; SLC22A9; ENSG00000149742; TAA
RAMGINATF

SEQ ID NO: 77572 - protein, 9 aa, Homo sapiens
  Table A; Target 77572; HLA-B*35:03; SLC22A9; ENSG00000149742; TAA
RAMGINATF

SEQ ID NO: 77573 - protein, 9 aa, Homo sapiens
  Table A; Target 77573; HLA-B*38:01; SLC22A9; ENSG00000149742; TAA
RAMGINATF

SEQ ID NO: 77574 - protein, 9 aa, Homo sapiens
  Table A; Target 77574; HLA-B*44:02; SLC22A9; ENSG00000149742; TAA
RAMGINATF

SEQ ID NO: 77575 - protein, 9 aa, Homo sapiens
  Table A; Target 77575; HLA-B*44:03; SLC22A9; ENSG00000149742; TAA
RAMGINATF

SEQ ID NO: 77576 - protein, 9 aa, Homo sapiens
  Table A; Target 77576; HLA-B*46:01; SLC22A9; ENSG00000149742; TAA
RAMGINATF

SEQ ID NO: 77577 - protein, 9 aa, Homo sapiens
  Table A; Target 77577; HLA-B*55:01; SLC22A9; ENSG00000149742; TAA
RAMGINATF

SEQ ID NO: 77578 - protein, 9 aa, Homo sapiens
  Table A; Target 77578; HLA-B*57:01; SLC22A9; ENSG00000149742; TAA
RAMGINATF

SEQ ID NO: 77579 - protein, 9 aa, Homo sapiens
  Table A; Target 77579; HLA-B*58:01; SLC22A9; ENSG00000149742; TAA
RAMGINATF

SEQ ID NO: 77580 - protein, 9 aa, Homo sapiens
  Table A; Target 77580; HLA-C*02:02; SLC22A9; ENSG00000149742; TAA
RAMGINATF

SEQ ID NO: 77581 - protein, 9 aa, Homo sapiens
  Table A; Target 77581; HLA-C*03:03; SLC22A9; ENSG00000149742; TAA
RAMGINATF

SEQ ID NO: 77582 - protein, 9 aa, Homo sapiens
  Table A; Target 77582; HLA-C*03:04; SLC22A9; ENSG00000149742; TAA
RAMGINATF

SEQ ID NO: 77583 - protein, 9 aa, Homo sapiens
  Table A; Target 77583; HLA-C*05:01; SLC22A9; ENSG00000149742; TAA
RAMGINATF

SEQ ID NO: 77584 - protein, 9 aa, Homo sapiens
  Table A; Target 77584; HLA-C*07:02; SLC22A9; ENSG00000149742; TAA
RAMGINATF

SEQ ID NO: 77585 - protein, 9 aa, Homo sapiens
  Table A; Target 77585; HLA-C*07:04; SLC22A9; ENSG00000149742; TAA
RAMGINATF

SEQ ID NO: 77586 - protein, 9 aa, Homo sapiens
  Table A; Target 77586; HLA-C*07:06; SLC22A9; ENSG00000149742; TAA
RAMGINATF

SEQ ID NO: 77587 - protein, 9 aa, Homo sapiens
  Table A; Target 77587; HLA-C*12:03; SLC22A9; ENSG00000149742; TAA
RAMGINATF

SEQ ID NO: 77588 - protein, 9 aa, Homo sapiens
  Table A; Target 77588; HLA-C*16:01; SLC22A9; ENSG00000149742; TAA
RAMGINATF

SEQ ID NO: 77589 - protein, 9 aa, Homo sapiens
  Table A; Target 77589; HLA-C*16:02; SLC22A9; ENSG00000149742; TAA
RAMGINATF

SEQ ID NO: 77590 - protein, 9 aa, Homo sapiens
  Table A; Target 77590; HLA-C*16:04; SLC22A9; ENSG00000149742; TAA
RAMGINATF

SEQ ID NO: 77591 - protein, 11 aa, Homo sapiens
  Table A; Target 77591; HLA-B*57:01; SLC22A9; ENSG00000149742; TAA
RARAMGINATF

SEQ ID NO: 77592 - protein, 8 aa, Homo sapiens
  Table A; Target 77592; HLA-B*37:01; SLC22A9; ENSG00000149742; TAA
RDTLTLEI

SEQ ID NO: 77593 - protein, 10 aa, Homo sapiens
  Table A; Target 77593; HLA-B*27:02; SLC22A9; ENSG00000149742; TAA
RDTLTLEILK

SEQ ID NO: 77594 - protein, 9 aa, Homo sapiens
  Table A; Target 77594; HLA-A*30:01; SLC22A9; ENSG00000149742; TAA
REVLATLGL

SEQ ID NO: 77595 - protein, 9 aa, Homo sapiens
  Table A; Target 77595; HLA-B*37:01; SLC22A9; ENSG00000149742; TAA
REVLATLGL

SEQ ID NO: 77596 - protein, 9 aa, Homo sapiens
  Table A; Target 77596; HLA-B*40:01; SLC22A9; ENSG00000149742; TAA
REVLATLGL

SEQ ID NO: 77597 - protein, 9 aa, Homo sapiens
  Table A; Target 77597; HLA-B*40:02; SLC22A9; ENSG00000149742; TAA
REVLATLGL

SEQ ID NO: 77598 - protein, 9 aa, Homo sapiens
  Table A; Target 77598; HLA-B*44:02; SLC22A9; ENSG00000149742; TAA
REVLATLGL

SEQ ID NO: 77599 - protein, 9 aa, Homo sapiens
  Table A; Target 77599; HLA-B*44:03; SLC22A9; ENSG00000149742; TAA
REVLATLGL

SEQ ID NO: 77600 - protein, 9 aa, Homo sapiens
  Table A; Target 77600; HLA-B*49:01; SLC22A9; ENSG00000149742; TAA
REVLATLGL

SEQ ID NO: 77601 - protein, 9 aa, Homo sapiens
  Table A; Target 77601; HLA-A*24:02; SLC22A9; ENSG00000149742; TAA
RFANFMAYF

SEQ ID NO: 77602 - protein, 9 aa, Homo sapiens
  Table A; Target 77602; HLA-A*23:01; SLC22A9; ENSG00000149742; TAA
RFLSGIAAM

SEQ ID NO: 77603 - protein, 9 aa, Homo sapiens
  Table A; Target 77603; HLA-A*24:02; SLC22A9; ENSG00000149742; TAA
RFLSGIAAM

SEQ ID NO: 77604 - protein, 9 aa, Homo sapiens
  Table A; Target 77604; HLA-B*46:01; SLC22A9; ENSG00000149742; TAA
RFLSGIAAM

SEQ ID NO: 77605 - protein, 9 aa, Homo sapiens
  Table A; Target 77605; HLA-C*01:02; SLC22A9; ENSG00000149742; TAA
RFLSGIAAM

SEQ ID NO: 77606 - protein, 9 aa, Homo sapiens
  Table A; Target 77606; HLA-C*14:02; SLC22A9; ENSG00000149742; TAA
RFLSGIAAM

SEQ ID NO: 77607 - protein, 11 aa, Homo sapiens
  Table A; Target 77607; HLA-A*23:01; SLC22A9; ENSG00000149742; TAA
RFLSGIAAMSL

SEQ ID NO: 77608 - protein, 11 aa, Homo sapiens
  Table A; Target 77608; HLA-A*24:02; SLC22A9; ENSG00000149742; TAA
RFLSGIAAMSL

SEQ ID NO: 77609 - protein, 9 aa, Homo sapiens
  Table A; Target 77609; HLA-A*23:01; SLC22A9; ENSG00000149742; TAA
RFQAMGITL

SEQ ID NO: 77610 - protein, 9 aa, Homo sapiens
  Table A; Target 77610; HLA-A*24:02; SLC22A9; ENSG00000149742; TAA
RFQAMGITL

SEQ ID NO: 77611 - protein, 9 aa, Homo sapiens
  Table A; Target 77611; HLA-C*14:02; SLC22A9; ENSG00000149742; TAA
RFQAMGITL

SEQ ID NO: 77612 - protein, 9 aa, Homo sapiens
  Table A; Target 77612; HLA-A*23:01; SLC22A9; ENSG00000149742; TAA
RFQILQTVF

SEQ ID NO: 77613 - protein, 9 aa, Homo sapiens
  Table A; Target 77613; HLA-A*24:02; SLC22A9; ENSG00000149742; TAA
RFQILQTVF

SEQ ID NO: 77614 - protein, 9 aa, Homo sapiens
  Table A; Target 77614; HLA-A*24:02; SLC22A9; ENSG00000149742; TAA
RNKPLFDTI

SEQ ID NO: 77615 - protein, 8 aa, Homo sapiens
  Table A; Target 77615; HLA-B*57:01; SLC22A9; ENSG00000149742; TAA
RRFVHPQW

SEQ ID NO: 77616 - protein, 9 aa, Homo sapiens
  Table A; Target 77616; HLA-A*11:01; SLC22A9; ENSG00000149742; TAA
SALANTLAF

SEQ ID NO: 77617 - protein, 9 aa, Homo sapiens
  Table A; Target 77617; HLA-A*23:01; SLC22A9; ENSG00000149742; TAA
SALANTLAF

SEQ ID NO: 77618 - protein, 9 aa, Homo sapiens
  Table A; Target 77618; HLA-A*24:02; SLC22A9; ENSG00000149742; TAA
SALANTLAF

SEQ ID NO: 77619 - protein, 9 aa, Homo sapiens
  Table A; Target 77619; HLA-A*25:01; SLC22A9; ENSG00000149742; TAA
SALANTLAF

SEQ ID NO: 77620 - protein, 9 aa, Homo sapiens
  Table A; Target 77620; HLA-A*26:01; SLC22A9; ENSG00000149742; TAA
SALANTLAF

SEQ ID NO: 77621 - protein, 9 aa, Homo sapiens
  Table A; Target 77621; HLA-A*29:02; SLC22A9; ENSG00000149742; TAA
SALANTLAF

SEQ ID NO: 77622 - protein, 9 aa, Homo sapiens
  Table A; Target 77622; HLA-A*30:02; SLC22A9; ENSG00000149742; TAA
SALANTLAF

SEQ ID NO: 77623 - protein, 9 aa, Homo sapiens
  Table A; Target 77623; HLA-A*32:01; SLC22A9; ENSG00000149742; TAA
SALANTLAF

SEQ ID NO: 77624 - protein, 9 aa, Homo sapiens
  Table A; Target 77624; HLA-A*33:01; SLC22A9; ENSG00000149742; TAA
SALANTLAF

SEQ ID NO: 77625 - protein, 9 aa, Homo sapiens
  Table A; Target 77625; HLA-A*33:03; SLC22A9; ENSG00000149742; TAA
SALANTLAF

SEQ ID NO: 77626 - protein, 9 aa, Homo sapiens
  Table A; Target 77626; HLA-B*07:02; SLC22A9; ENSG00000149742; TAA
SALANTLAF

SEQ ID NO: 77627 - protein, 9 aa, Homo sapiens
  Table A; Target 77627; HLA-B*08:01; SLC22A9; ENSG00000149742; TAA
SALANTLAF

SEQ ID NO: 77628 - protein, 9 aa, Homo sapiens
  Table A; Target 77628; HLA-B*15:01; SLC22A9; ENSG00000149742; TAA
SALANTLAF

SEQ ID NO: 77629 - protein, 9 aa, Homo sapiens
  Table A; Target 77629; HLA-B*15:03; SLC22A9; ENSG00000149742; TAA
SALANTLAF

SEQ ID NO: 77630 - protein, 9 aa, Homo sapiens
  Table A; Target 77630; HLA-B*18:01; SLC22A9; ENSG00000149742; TAA
SALANTLAF

SEQ ID NO: 77631 - protein, 9 aa, Homo sapiens
  Table A; Target 77631; HLA-B*27:02; SLC22A9; ENSG00000149742; TAA
SALANTLAF

SEQ ID NO: 77632 - protein, 9 aa, Homo sapiens
  Table A; Target 77632; HLA-B*35:01; SLC22A9; ENSG00000149742; TAA
SALANTLAF

SEQ ID NO: 77633 - protein, 9 aa, Homo sapiens
  Table A; Target 77633; HLA-B*35:03; SLC22A9; ENSG00000149742; TAA
SALANTLAF

SEQ ID NO: 77634 - protein, 9 aa, Homo sapiens
  Table A; Target 77634; HLA-B*37:01; SLC22A9; ENSG00000149742; TAA
SALANTLAF

SEQ ID NO: 77635 - protein, 9 aa, Homo sapiens
  Table A; Target 77635; HLA-B*38:01; SLC22A9; ENSG00000149742; TAA
SALANTLAF

SEQ ID NO: 77636 - protein, 9 aa, Homo sapiens
  Table A; Target 77636; HLA-B*39:01; SLC22A9; ENSG00000149742; TAA
SALANTLAF

SEQ ID NO: 77637 - protein, 9 aa, Homo sapiens
  Table A; Target 77637; HLA-B*44:03; SLC22A9; ENSG00000149742; TAA
SALANTLAF

SEQ ID NO: 77638 - protein, 9 aa, Homo sapiens
  Table A; Target 77638; HLA-B*46:01; SLC22A9; ENSG00000149742; TAA
SALANTLAF

SEQ ID NO: 77639 - protein, 9 aa, Homo sapiens
  Table A; Target 77639; HLA-B*54:01; SLC22A9; ENSG00000149742; TAA
SALANTLAF

SEQ ID NO: 77640 - protein, 9 aa, Homo sapiens
  Table A; Target 77640; HLA-B*55:01; SLC22A9; ENSG00000149742; TAA
SALANTLAF

SEQ ID NO: 77641 - protein, 9 aa, Homo sapiens
  Table A; Target 77641; HLA-B*56:01; SLC22A9; ENSG00000149742; TAA
SALANTLAF

SEQ ID NO: 77642 - protein, 9 aa, Homo sapiens
  Table A; Target 77642; HLA-B*57:01; SLC22A9; ENSG00000149742; TAA
SALANTLAF

SEQ ID NO: 77643 - protein, 9 aa, Homo sapiens
  Table A; Target 77643; HLA-B*58:01; SLC22A9; ENSG00000149742; TAA
SALANTLAF

SEQ ID NO: 77644 - protein, 9 aa, Homo sapiens
  Table A; Target 77644; HLA-C*01:02; SLC22A9; ENSG00000149742; TAA
SALANTLAF

SEQ ID NO: 77645 - protein, 9 aa, Homo sapiens
  Table A; Target 77645; HLA-C*02:02; SLC22A9; ENSG00000149742; TAA
SALANTLAF

SEQ ID NO: 77646 - protein, 9 aa, Homo sapiens
  Table A; Target 77646; HLA-C*03:03; SLC22A9; ENSG00000149742; TAA
SALANTLAF

SEQ ID NO: 77647 - protein, 9 aa, Homo sapiens
  Table A; Target 77647; HLA-C*03:04; SLC22A9; ENSG00000149742; TAA
SALANTLAF

SEQ ID NO: 77648 - protein, 9 aa, Homo sapiens
  Table A; Target 77648; HLA-C*05:01; SLC22A9; ENSG00000149742; TAA
SALANTLAF

SEQ ID NO: 77649 - protein, 9 aa, Homo sapiens
  Table A; Target 77649; HLA-C*07:02; SLC22A9; ENSG00000149742; TAA
SALANTLAF

SEQ ID NO: 77650 - protein, 9 aa, Homo sapiens
  Table A; Target 77650; HLA-C*07:04; SLC22A9; ENSG00000149742; TAA
SALANTLAF

SEQ ID NO: 77651 - protein, 9 aa, Homo sapiens
  Table A; Target 77651; HLA-C*07:06; SLC22A9; ENSG00000149742; TAA
SALANTLAF

SEQ ID NO: 77652 - protein, 9 aa, Homo sapiens
  Table A; Target 77652; HLA-C*12:03; SLC22A9; ENSG00000149742; TAA
SALANTLAF

SEQ ID NO: 77653 - protein, 9 aa, Homo sapiens
  Table A; Target 77653; HLA-C*14:02; SLC22A9; ENSG00000149742; TAA
SALANTLAF

SEQ ID NO: 77654 - protein, 9 aa, Homo sapiens
  Table A; Target 77654; HLA-C*16:01; SLC22A9; ENSG00000149742; TAA
SALANTLAF

SEQ ID NO: 77655 - protein, 9 aa, Homo sapiens
  Table A; Target 77655; HLA-C*16:02; SLC22A9; ENSG00000149742; TAA
SALANTLAF

SEQ ID NO: 77656 - protein, 9 aa, Homo sapiens
  Table A; Target 77656; HLA-C*16:04; SLC22A9; ENSG00000149742; TAA
SALANTLAF

SEQ ID NO: 77657 - protein, 10 aa, Homo sapiens
  Table A; Target 77657; HLA-B*56:01; SLC22A9; ENSG00000149742; TAA
SALANTLAFA

SEQ ID NO: 77658 - protein, 10 aa, Homo sapiens
  Table A; Target 77658; HLA-A*23:01; SLC22A9; ENSG00000149742; TAA
SFSSTIVTEW

SEQ ID NO: 77659 - protein, 10 aa, Homo sapiens
  Table A; Target 77659; HLA-A*24:02; SLC22A9; ENSG00000149742; TAA
SFSSTIVTEW

SEQ ID NO: 77660 - protein, 10 aa, Homo sapiens
  Table A; Target 77660; HLA-B*44:02; SLC22A9; ENSG00000149742; TAA
SFSSTIVTEW

SEQ ID NO: 77661 - protein, 8 aa, Homo sapiens
  Table A; Target 77661; HLA-A*24:02; SLC22A9; ENSG00000149742; TAA
SFTRFANF

SEQ ID NO: 77662 - protein, 8 aa, Homo sapiens
  Table A; Target 77662; HLA-C*03:03; SLC22A9; ENSG00000149742; TAA
SGIAAMSL

SEQ ID NO: 77663 - protein, 8 aa, Homo sapiens
  Table A; Target 77663; HLA-C*03:04; SLC22A9; ENSG00000149742; TAA
SGIAAMSL

SEQ ID NO: 77664 - protein, 8 aa, Homo sapiens
  Table A; Target 77664; HLA-C*14:02; SLC22A9; ENSG00000149742; TAA
SGIAAMSL

SEQ ID NO: 77665 - protein, 9 aa, Homo sapiens
  Table A; Target 77665; HLA-B*13:02; SLC22A9; ENSG00000149742; TAA
SGIAAMSLI

SEQ ID NO: 77666 - protein, 9 aa, Homo sapiens
  Table A; Target 77666; HLA-B*49:01; SLC22A9; ENSG00000149742; TAA
SGIAAMSLI

SEQ ID NO: 77667 - protein, 10 aa, Homo sapiens
  Table A; Target 77667; HLA-B*07:02; SLC22A9; ENSG00000149742; TAA
SGMKNARDTL

SEQ ID NO: 77668 - protein, 8 aa, Homo sapiens
  Table A; Target 77668; HLA-A*25:01; SLC22A9; ENSG00000149742; TAA
SIFAVATY

SEQ ID NO: 77669 - protein, 8 aa, Homo sapiens
  Table A; Target 77669; HLA-A*26:01; SLC22A9; ENSG00000149742; TAA
SIFAVATY

SEQ ID NO: 77670 - protein, 8 aa, Homo sapiens
  Table A; Target 77670; HLA-A*30:02; SLC22A9; ENSG00000149742; TAA
SIFAVATY

SEQ ID NO: 77671 - protein, 8 aa, Homo sapiens
  Table A; Target 77671; HLA-A*32:01; SLC22A9; ENSG00000149742; TAA
SIFAVATY

SEQ ID NO: 77672 - protein, 8 aa, Homo sapiens
  Table A; Target 77672; HLA-B*15:01; SLC22A9; ENSG00000149742; TAA
SIFAVATY

SEQ ID NO: 77673 - protein, 8 aa, Homo sapiens
  Table A; Target 77673; HLA-B*15:03; SLC22A9; ENSG00000149742; TAA
SIFAVATY

SEQ ID NO: 77674 - protein, 8 aa, Homo sapiens
  Table A; Target 77674; HLA-B*18:01; SLC22A9; ENSG00000149742; TAA
SIFAVATY

SEQ ID NO: 77675 - protein, 8 aa, Homo sapiens
  Table A; Target 77675; HLA-B*46:01; SLC22A9; ENSG00000149742; TAA
SIFAVATY

SEQ ID NO: 77676 - protein, 8 aa, Homo sapiens
  Table A; Target 77676; HLA-C*02:02; SLC22A9; ENSG00000149742; TAA
SIFAVATY

SEQ ID NO: 77677 - protein, 8 aa, Homo sapiens
  Table A; Target 77677; HLA-C*14:02; SLC22A9; ENSG00000149742; TAA
SIFAVATY

SEQ ID NO: 77678 - protein, 9 aa, Homo sapiens
  Table A; Target 77678; HLA-A*02:01; SLC22A9; ENSG00000149742; TAA
SIFAVATYL

SEQ ID NO: 77679 - protein, 9 aa, Homo sapiens
  Table A; Target 77679; HLA-A*02:03; SLC22A9; ENSG00000149742; TAA
SIFAVATYL

SEQ ID NO: 77680 - protein, 9 aa, Homo sapiens
  Table A; Target 77680; HLA-A*02:04; SLC22A9; ENSG00000149742; TAA
SIFAVATYL

SEQ ID NO: 77681 - protein, 9 aa, Homo sapiens
  Table A; Target 77681; HLA-A*02:07; SLC22A9; ENSG00000149742; TAA
SIFAVATYL

SEQ ID NO: 77682 - protein, 9 aa, Homo sapiens
  Table A; Target 77682; HLA-A*03:01; SLC22A9; ENSG00000149742; TAA
SIFAVATYL

SEQ ID NO: 77683 - protein, 9 aa, Homo sapiens
  Table A; Target 77683; HLA-A*03:02; SLC22A9; ENSG00000149742; TAA
SIFAVATYL

SEQ ID NO: 77684 - protein, 9 aa, Homo sapiens
  Table A; Target 77684; HLA-A*26:01; SLC22A9; ENSG00000149742; TAA
SIFAVATYL

SEQ ID NO: 77685 - protein, 9 aa, Homo sapiens
  Table A; Target 77685; HLA-A*31:01; SLC22A9; ENSG00000149742; TAA
SIFAVATYL

SEQ ID NO: 77686 - protein, 9 aa, Homo sapiens
  Table A; Target 77686; HLA-A*68:02; SLC22A9; ENSG00000149742; TAA
SIFAVATYL

SEQ ID NO: 77687 - protein, 9 aa, Homo sapiens
  Table A; Target 77687; HLA-B*13:02; SLC22A9; ENSG00000149742; TAA
SIFAVATYL

SEQ ID NO: 77688 - protein, 9 aa, Homo sapiens
  Table A; Target 77688; HLA-B*27:05; SLC22A9; ENSG00000149742; TAA
SIFAVATYL

SEQ ID NO: 77689 - protein, 9 aa, Homo sapiens
  Table A; Target 77689; HLA-B*39:01; SLC22A9; ENSG00000149742; TAA
SIFAVATYL

SEQ ID NO: 77690 - protein, 9 aa, Homo sapiens
  Table A; Target 77690; HLA-C*01:02; SLC22A9; ENSG00000149742; TAA
SIFAVATYL

SEQ ID NO: 77691 - protein, 9 aa, Homo sapiens
  Table A; Target 77691; HLA-C*02:02; SLC22A9; ENSG00000149742; TAA
SIFAVATYL

SEQ ID NO: 77692 - protein, 9 aa, Homo sapiens
  Table A; Target 77692; HLA-C*07:04; SLC22A9; ENSG00000149742; TAA
SIFAVATYL

SEQ ID NO: 77693 - protein, 9 aa, Homo sapiens
  Table A; Target 77693; HLA-C*12:03; SLC22A9; ENSG00000149742; TAA
SIFAVATYL

SEQ ID NO: 77694 - protein, 8 aa, Homo sapiens
  Table A; Target 77694; HLA-C*01:02; SLC22A9; ENSG00000149742; TAA
SIPLDSNM

SEQ ID NO: 77695 - protein, 8 aa, Homo sapiens
  Table A; Target 77695; HLA-C*05:01; SLC22A9; ENSG00000149742; TAA
SIPLDSNM

SEQ ID NO: 77696 - protein, 9 aa, Homo sapiens
  Table A; Target 77696; HLA-A*02:01; SLC22A9; ENSG00000149742; TAA
SLITNTIML

SEQ ID NO: 77697 - protein, 9 aa, Homo sapiens
  Table A; Target 77697; HLA-A*02:03; SLC22A9; ENSG00000149742; TAA
SLITNTIML

SEQ ID NO: 77698 - protein, 9 aa, Homo sapiens
  Table A; Target 77698; HLA-A*02:04; SLC22A9; ENSG00000149742; TAA
SLITNTIML

SEQ ID NO: 77699 - protein, 9 aa, Homo sapiens
  Table A; Target 77699; HLA-A*02:07; SLC22A9; ENSG00000149742; TAA
SLITNTIML

SEQ ID NO: 77700 - protein, 9 aa, Homo sapiens
  Table A; Target 77700; HLA-A*23:01; SLC22A9; ENSG00000149742; TAA
SLITNTIML

SEQ ID NO: 77701 - protein, 9 aa, Homo sapiens
  Table A; Target 77701; HLA-B*46:01; SLC22A9; ENSG00000149742; TAA
SLITNTIML

SEQ ID NO: 77702 - protein, 9 aa, Homo sapiens
  Table A; Target 77702; HLA-B*55:01; SLC22A9; ENSG00000149742; TAA
SLITNTIML

SEQ ID NO: 77703 - protein, 9 aa, Homo sapiens
  Table A; Target 77703; HLA-C*01:02; SLC22A9; ENSG00000149742; TAA
SLITNTIML

SEQ ID NO: 77704 - protein, 10 aa, Homo sapiens
  Table A; Target 77704; HLA-A*02:01; SLC22A9; ENSG00000149742; TAA
SLITNTIMLI

SEQ ID NO: 77705 - protein, 10 aa, Homo sapiens
  Table A; Target 77705; HLA-A*02:03; SLC22A9; ENSG00000149742; TAA
SLITNTIMLI

SEQ ID NO: 77706 - protein, 9 aa, Homo sapiens
  Table A; Target 77706; HLA-A*02:01; SLC22A9; ENSG00000149742; TAA
SLLSFTRFA

SEQ ID NO: 77707 - protein, 9 aa, Homo sapiens
  Table A; Target 77707; HLA-A*02:03; SLC22A9; ENSG00000149742; TAA
SLLSFTRFA

SEQ ID NO: 77708 - protein, 10 aa, Homo sapiens
  Table A; Target 77708; HLA-A*02:03; SLC22A9; ENSG00000149742; TAA
SLRFLSGIAA

SEQ ID NO: 77709 - protein, 11 aa, Homo sapiens
  Table A; Target 77709; HLA-A*02:04; SLC22A9; ENSG00000149742; TAA
SLRFLSGIAAM

SEQ ID NO: 77710 - protein, 8 aa, Homo sapiens
  Table A; Target 77710; HLA-B*37:01; SLC22A9; ENSG00000149742; TAA
SLTSVAKF

SEQ ID NO: 77711 - protein, 9 aa, Homo sapiens
  Table A; Target 77711; HLA-A*02:01; SLC22A9; ENSG00000149742; TAA
SLTSVAKFV

SEQ ID NO: 77712 - protein, 9 aa, Homo sapiens
  Table A; Target 77712; HLA-A*02:03; SLC22A9; ENSG00000149742; TAA
SLTSVAKFV

SEQ ID NO: 77713 - protein, 9 aa, Homo sapiens
  Table A; Target 77713; HLA-A*02:04; SLC22A9; ENSG00000149742; TAA
SLTSVAKFV

SEQ ID NO: 77714 - protein, 9 aa, Homo sapiens
  Table A; Target 77714; HLA-A*68:02; SLC22A9; ENSG00000149742; TAA
SLTSVAKFV

SEQ ID NO: 77715 - protein, 9 aa, Homo sapiens
  Table A; Target 77715; HLA-B*13:02; SLC22A9; ENSG00000149742; TAA
SLTSVAKFV

SEQ ID NO: 77716 - protein, 9 aa, Homo sapiens
  Table A; Target 77716; HLA-B*55:01; SLC22A9; ENSG00000149742; TAA
SLTSVAKFV

SEQ ID NO: 77717 - protein, 9 aa, Homo sapiens
  Table A; Target 77717; HLA-C*06:02; SLC22A9; ENSG00000149742; TAA
SLTSVAKFV

SEQ ID NO: 77718 - protein, 9 aa, Homo sapiens
  Table A; Target 77718; HLA-C*16:02; SLC22A9; ENSG00000149742; TAA
SLTSVAKFV

SEQ ID NO: 77719 - protein, 10 aa, Homo sapiens
  Table A; Target 77719; HLA-A*23:01; SLC22A9; ENSG00000149742; TAA
SLTSVAKFVF

SEQ ID NO: 77720 - protein, 10 aa, Homo sapiens
  Table A; Target 77720; HLA-A*24:02; SLC22A9; ENSG00000149742; TAA
SLTSVAKFVF

SEQ ID NO: 77721 - protein, 9 aa, Homo sapiens
  Table A; Target 77721; HLA-B*35:01; SLC22A9; ENSG00000149742; TAA
SPPLPWIIY

SEQ ID NO: 77722 - protein, 8 aa, Homo sapiens
  Table A; Target 77722; HLA-B*13:02; SLC22A9; ENSG00000149742; TAA
SQDALLRI

SEQ ID NO: 77723 - protein, 8 aa, Homo sapiens
  Table A; Target 77723; HLA-B*38:01; SLC22A9; ENSG00000149742; TAA
SQDALLRI

SEQ ID NO: 77724 - protein, 10 aa, Homo sapiens
  Table A; Target 77724; HLA-B*13:02; SLC22A9; ENSG00000149742; TAA
SQDALLRISI

SEQ ID NO: 77725 - protein, 10 aa, Homo sapiens
  Table A; Target 77725; HLA-B*38:01; SLC22A9; ENSG00000149742; TAA
SQDALLRISI

SEQ ID NO: 77726 - protein, 9 aa, Homo sapiens
  Table A; Target 77726; HLA-A*03:02; SLC22A9; ENSG00000149742; TAA
SQSLTSVAK

SEQ ID NO: 77727 - protein, 9 aa, Homo sapiens
  Table A; Target 77727; HLA-A*11:01; SLC22A9; ENSG00000149742; TAA
SQSLTSVAK

SEQ ID NO: 77728 - protein, 9 aa, Homo sapiens
  Table A; Target 77728; HLA-B*13:02; SLC22A9; ENSG00000149742; TAA
SQSLTSVAK

SEQ ID NO: 77729 - protein, 9 aa, Homo sapiens
  Table A; Target 77729; HLA-B*27:05; SLC22A9; ENSG00000149742; TAA
SQSLTSVAK

SEQ ID NO: 77730 - protein, 9 aa, Homo sapiens
  Table A; Target 77730; HLA-C*07:06; SLC22A9; ENSG00000149742; TAA
SQSLTSVAK

SEQ ID NO: 77731 - protein, 10 aa, Homo sapiens
  Table A; Target 77731; HLA-B*15:01; SLC22A9; ENSG00000149742; TAA
SQSLTSVAKF

SEQ ID NO: 77732 - protein, 10 aa, Homo sapiens
  Table A; Target 77732; HLA-B*38:01; SLC22A9; ENSG00000149742; TAA
SQSLTSVAKF

SEQ ID NO: 77733 - protein, 8 aa, Homo sapiens
  Table A; Target 77733; HLA-A*32:01; SLC22A9; ENSG00000149742; TAA
SSTIVTEW

SEQ ID NO: 77734 - protein, 8 aa, Homo sapiens
  Table A; Target 77734; HLA-B*37:01; SLC22A9; ENSG00000149742; TAA
SSTIVTEW

SEQ ID NO: 77735 - protein, 8 aa, Homo sapiens
  Table A; Target 77735; HLA-B*57:01; SLC22A9; ENSG00000149742; TAA
SSTIVTEW

SEQ ID NO: 77736 - protein, 8 aa, Homo sapiens
  Table A; Target 77736; HLA-B*58:01; SLC22A9; ENSG00000149742; TAA
SSTIVTEW

SEQ ID NO: 77737 - protein, 8 aa, Homo sapiens
  Table A; Target 77737; HLA-C*16:01; SLC22A9; ENSG00000149742; TAA
SSTIVTEW

SEQ ID NO: 77738 - protein, 10 aa, Homo sapiens
  Table A; Target 77738; HLA-B*57:01; SLC22A9; ENSG00000149742; TAA
SSWLLESARW

SEQ ID NO: 77739 - protein, 9 aa, Homo sapiens
  Table A; Target 77739; HLA-A*02:01; SLC22A9; ENSG00000149742; TAA
SVAKFVFMA

SEQ ID NO: 77740 - protein, 9 aa, Homo sapiens
  Table A; Target 77740; HLA-A*02:04; SLC22A9; ENSG00000149742; TAA
SVAKFVFMA

SEQ ID NO: 77741 - protein, 9 aa, Homo sapiens
  Table A; Target 77741; HLA-A*68:02; SLC22A9; ENSG00000149742; TAA
SVAKFVFMA

SEQ ID NO: 77742 - protein, 9 aa, Homo sapiens
  Table A; Target 77742; HLA-B*13:02; SLC22A9; ENSG00000149742; TAA
SVAKFVFMA

SEQ ID NO: 77743 - protein, 9 aa, Homo sapiens
  Table A; Target 77743; HLA-B*54:01; SLC22A9; ENSG00000149742; TAA
SVAKFVFMA

SEQ ID NO: 77744 - protein, 9 aa, Homo sapiens
  Table A; Target 77744; HLA-A*02:04; SLC22A9; ENSG00000149742; TAA
SVPYFVIFL

SEQ ID NO: 77745 - protein, 9 aa, Homo sapiens
  Table A; Target 77745; HLA-A*02:07; SLC22A9; ENSG00000149742; TAA
SVPYFVIFL

SEQ ID NO: 77746 - protein, 9 aa, Homo sapiens
  Table A; Target 77746; HLA-A*68:02; SLC22A9; ENSG00000149742; TAA
SVPYFVIFL

SEQ ID NO: 77747 - protein, 9 aa, Homo sapiens
  Table A; Target 77747; HLA-A*03:01; SLC22A9; ENSG00000149742; TAA
SVYSPPLPW

SEQ ID NO: 77748 - protein, 9 aa, Homo sapiens
  Table A; Target 77748; HLA-A*23:01; SLC22A9; ENSG00000149742; TAA
SVYSPPLPW

SEQ ID NO: 77749 - protein, 9 aa, Homo sapiens
  Table A; Target 77749; HLA-A*25:01; SLC22A9; ENSG00000149742; TAA
SVYSPPLPW

SEQ ID NO: 77750 - protein, 9 aa, Homo sapiens
  Table A; Target 77750; HLA-A*26:01; SLC22A9; ENSG00000149742; TAA
SVYSPPLPW

SEQ ID NO: 77751 - protein, 9 aa, Homo sapiens
  Table A; Target 77751; HLA-A*29:02; SLC22A9; ENSG00000149742; TAA
SVYSPPLPW

SEQ ID NO: 77752 - protein, 9 aa, Homo sapiens
  Table A; Target 77752; HLA-A*31:01; SLC22A9; ENSG00000149742; TAA
SVYSPPLPW

SEQ ID NO: 77753 - protein, 9 aa, Homo sapiens
  Table A; Target 77753; HLA-A*32:01; SLC22A9; ENSG00000149742; TAA
SVYSPPLPW

SEQ ID NO: 77754 - protein, 9 aa, Homo sapiens
  Table A; Target 77754; HLA-A*33:01; SLC22A9; ENSG00000149742; TAA
SVYSPPLPW

SEQ ID NO: 77755 - protein, 9 aa, Homo sapiens
  Table A; Target 77755; HLA-A*33:03; SLC22A9; ENSG00000149742; TAA
SVYSPPLPW

SEQ ID NO: 77756 - protein, 9 aa, Homo sapiens
  Table A; Target 77756; HLA-B*51:01; SLC22A9; ENSG00000149742; TAA
SVYSPPLPW

SEQ ID NO: 77757 - protein, 9 aa, Homo sapiens
  Table A; Target 77757; HLA-B*57:01; SLC22A9; ENSG00000149742; TAA
SVYSPPLPW

SEQ ID NO: 77758 - protein, 9 aa, Homo sapiens
  Table A; Target 77758; HLA-C*02:02; SLC22A9; ENSG00000149742; TAA
SVYSPPLPW

SEQ ID NO: 77759 - protein, 9 aa, Homo sapiens
  Table A; Target 77759; HLA-C*03:04; SLC22A9; ENSG00000149742; TAA
SVYSPPLPW

SEQ ID NO: 77760 - protein, 8 aa, Homo sapiens
  Table A; Target 77760; HLA-A*31:01; SLC22A9; ENSG00000149742; TAA
TAFIPGHR

SEQ ID NO: 77761 - protein, 8 aa, Homo sapiens
  Table A; Target 77761; HLA-A*33:01; SLC22A9; ENSG00000149742; TAA
TAFIPGHR

SEQ ID NO: 77762 - protein, 8 aa, Homo sapiens
  Table A; Target 77762; HLA-A*33:03; SLC22A9; ENSG00000149742; TAA
TAFIPGHR

SEQ ID NO: 77763 - protein, 10 aa, Homo sapiens
  Table A; Target 77763; HLA-B*57:01; SLC22A9; ENSG00000149742; TAA
TAFIPGHRCW

SEQ ID NO: 77764 - protein, 9 aa, Homo sapiens
  Table A; Target 77764; HLA-B*15:03; SLC22A9; ENSG00000149742; TAA
TCAALAPTF

SEQ ID NO: 77765 - protein, 9 aa, Homo sapiens
  Table A; Target 77765; HLA-B*35:01; SLC22A9; ENSG00000149742; TAA
TCAALAPTF

SEQ ID NO: 77766 - protein, 9 aa, Homo sapiens
  Table A; Target 77766; HLA-B*58:01; SLC22A9; ENSG00000149742; TAA
TCAALAPTF

SEQ ID NO: 77767 - protein, 9 aa, Homo sapiens
  Table A; Target 77767; HLA-C*16:01; SLC22A9; ENSG00000149742; TAA
TCAALAPTF

SEQ ID NO: 77768 - protein, 9 aa, Homo sapiens
  Table A; Target 77768; HLA-A*23:01; SLC22A9; ENSG00000149742; TAA
TFANIAGAL

SEQ ID NO: 77769 - protein, 9 aa, Homo sapiens
  Table A; Target 77769; HLA-A*24:02; SLC22A9; ENSG00000149742; TAA
TFANIAGAL

SEQ ID NO: 77770 - protein, 9 aa, Homo sapiens
  Table A; Target 77770; HLA-B*27:05; SLC22A9; ENSG00000149742; TAA
TFANIAGAL

SEQ ID NO: 77771 - protein, 9 aa, Homo sapiens
  Table A; Target 77771; HLA-B*35:01; SLC22A9; ENSG00000149742; TAA
TFANIAGAL

SEQ ID NO: 77772 - protein, 9 aa, Homo sapiens
  Table A; Target 77772; HLA-B*35:03; SLC22A9; ENSG00000149742; TAA
TFANIAGAL

SEQ ID NO: 77773 - protein, 9 aa, Homo sapiens
  Table A; Target 77773; HLA-B*39:01; SLC22A9; ENSG00000149742; TAA
TFANIAGAL

SEQ ID NO: 77774 - protein, 9 aa, Homo sapiens
  Table A; Target 77774; HLA-C*01:02; SLC22A9; ENSG00000149742; TAA
TFANIAGAL

SEQ ID NO: 77775 - protein, 9 aa, Homo sapiens
  Table A; Target 77775; HLA-C*04:01; SLC22A9; ENSG00000149742; TAA
TFANIAGAL

SEQ ID NO: 77776 - protein, 9 aa, Homo sapiens
  Table A; Target 77776; HLA-C*14:02; SLC22A9; ENSG00000149742; TAA
TFANIAGAL

SEQ ID NO: 77777 - protein, 9 aa, Homo sapiens
  Table A; Target 77777; HLA-C*16:02; SLC22A9; ENSG00000149742; TAA
TFANIAGAL

SEQ ID NO: 77778 - protein, 9 aa, Homo sapiens
  Table A; Target 77778; HLA-B*27:05; SLC22A9; ENSG00000149742; TAA
TGALSQDAL

SEQ ID NO: 77779 - protein, 9 aa, Homo sapiens
  Table A; Target 77779; HLA-B*35:03; SLC22A9; ENSG00000149742; TAA
TGALSQDAL

SEQ ID NO: 77780 - protein, 9 aa, Homo sapiens
  Table A; Target 77780; HLA-B*39:01; SLC22A9; ENSG00000149742; TAA
TGALSQDAL

SEQ ID NO: 77781 - protein, 9 aa, Homo sapiens
  Table A; Target 77781; HLA-C*03:03; SLC22A9; ENSG00000149742; TAA
TGALSQDAL

SEQ ID NO: 77782 - protein, 11 aa, Homo sapiens
  Table A; Target 77782; HLA-B*27:02; SLC22A9; ENSG00000149742; TAA
TGALSQDALLR

SEQ ID NO: 77783 - protein, 11 aa, Homo sapiens
  Table A; Target 77783; HLA-C*07:06; SLC22A9; ENSG00000149742; TAA
TGALSQDALLR

SEQ ID NO: 77784 - protein, 8 aa, Homo sapiens
  Table A; Target 77784; HLA-B*44:02; SLC22A9; ENSG00000149742; TAA
TIMLIAEW

SEQ ID NO: 77785 - protein, 8 aa, Homo sapiens
  Table A; Target 77785; HLA-B*57:01; SLC22A9; ENSG00000149742; TAA
TIMLIAEW

SEQ ID NO: 77786 - protein, 9 aa, Homo sapiens
  Table A; Target 77786; HLA-A*33:01; SLC22A9; ENSG00000149742; TAA
TIQDEKNER

SEQ ID NO: 77787 - protein, 9 aa, Homo sapiens
  Table A; Target 77787; HLA-A*33:03; SLC22A9; ENSG00000149742; TAA
TIQDEKNER

SEQ ID NO: 77788 - protein, 9 aa, Homo sapiens
  Table A; Target 77788; HLA-C*07:06; SLC22A9; ENSG00000149742; TAA
TIQDEKNER

SEQ ID NO: 77789 - protein, 10 aa, Homo sapiens
  Table A; Target 77789; HLA-A*03:02; SLC22A9; ENSG00000149742; TAA
TIQDEKNERK

SEQ ID NO: 77790 - protein, 9 aa, Homo sapiens
  Table A; Target 77790; HLA-A*68:02; SLC22A9; ENSG00000149742; TAA
TIVTEWDLV

SEQ ID NO: 77791 - protein, 10 aa, Homo sapiens
  Table A; Target 77791; HLA-A*02:03; SLC22A9; ENSG00000149742; TAA
TLAFAHGNEV

SEQ ID NO: 77792 - protein, 9 aa, Homo sapiens
  Table A; Target 77792; HLA-A*02:01; SLC22A9; ENSG00000149742; TAA
TLAGLAFAI

SEQ ID NO: 77793 - protein, 9 aa, Homo sapiens
  Table A; Target 77793; HLA-A*02:03; SLC22A9; ENSG00000149742; TAA
TLAGLAFAI

SEQ ID NO: 77794 - protein, 9 aa, Homo sapiens
  Table A; Target 77794; HLA-A*02:04; SLC22A9; ENSG00000149742; TAA
TLAGLAFAI

SEQ ID NO: 77795 - protein, 9 aa, Homo sapiens
  Table A; Target 77795; HLA-A*02:07; SLC22A9; ENSG00000149742; TAA
TLAGLAFAI

SEQ ID NO: 77796 - protein, 9 aa, Homo sapiens
  Table A; Target 77796; HLA-A*68:02; SLC22A9; ENSG00000149742; TAA
TLAGLAFAI

SEQ ID NO: 77797 - protein, 9 aa, Homo sapiens
  Table A; Target 77797; HLA-B*13:02; SLC22A9; ENSG00000149742; TAA
TLAGLAFAI

SEQ ID NO: 77798 - protein, 9 aa, Homo sapiens
  Table A; Target 77798; HLA-B*55:01; SLC22A9; ENSG00000149742; TAA
TLAGLAFAI

SEQ ID NO: 77799 - protein, 9 aa, Homo sapiens
  Table A; Target 77799; HLA-C*06:02; SLC22A9; ENSG00000149742; TAA
TLAGLAFAI

SEQ ID NO: 77800 - protein, 9 aa, Homo sapiens
  Table A; Target 77800; HLA-B*08:01; SLC22A9; ENSG00000149742; TAA
TLEILKSTM

SEQ ID NO: 77801 - protein, 9 aa, Homo sapiens
  Table A; Target 77801; HLA-C*07:01; SLC22A9; ENSG00000149742; TAA
TLEILKSTM

SEQ ID NO: 77802 - protein, 9 aa, Homo sapiens
  Table A; Target 77802; HLA-C*07:04; SLC22A9; ENSG00000149742; TAA
TLEILKSTM

SEQ ID NO: 77803 - protein, 9 aa, Homo sapiens
  Table A; Target 77803; HLA-A*02:01; SLC22A9; ENSG00000149742; TAA
TLFGAVILL

SEQ ID NO: 77804 - protein, 9 aa, Homo sapiens
  Table A; Target 77804; HLA-A*02:03; SLC22A9; ENSG00000149742; TAA
TLFGAVILL

SEQ ID NO: 77805 - protein, 9 aa, Homo sapiens
  Table A; Target 77805; HLA-A*02:04; SLC22A9; ENSG00000149742; TAA
TLFGAVILL

SEQ ID NO: 77806 - protein, 9 aa, Homo sapiens
  Table A; Target 77806; HLA-A*02:07; SLC22A9; ENSG00000149742; TAA
TLFGAVILL

SEQ ID NO: 77807 - protein, 9 aa, Homo sapiens
  Table A; Target 77807; HLA-A*03:01; SLC22A9; ENSG00000149742; TAA
TLFGAVILL

SEQ ID NO: 77808 - protein, 9 aa, Homo sapiens
  Table A; Target 77808; HLA-A*68:02; SLC22A9; ENSG00000149742; TAA
TLFGAVILL

SEQ ID NO: 77809 - protein, 9 aa, Homo sapiens
  Table A; Target 77809; HLA-B*13:02; SLC22A9; ENSG00000149742; TAA
TLFGAVILL

SEQ ID NO: 77810 - protein, 9 aa, Homo sapiens
  Table A; Target 77810; HLA-C*07:04; SLC22A9; ENSG00000149742; TAA
TLFGAVILL

SEQ ID NO: 77811 - protein, 10 aa, Homo sapiens
  Table A; Target 77811; HLA-A*02:03; SLC22A9; ENSG00000149742; TAA
TLFGAVILLA

SEQ ID NO: 77812 - protein, 9 aa, Homo sapiens
  Table A; Target 77812; HLA-A*02:03; SLC22A9; ENSG00000149742; TAA
TLGLGASAL

SEQ ID NO: 77813 - protein, 9 aa, Homo sapiens
  Table A; Target 77813; HLA-B*07:02; SLC22A9; ENSG00000149742; TAA
TLGLGASAL

SEQ ID NO: 77814 - protein, 9 aa, Homo sapiens
  Table A; Target 77814; HLA-B*08:01; SLC22A9; ENSG00000149742; TAA
TLGLGASAL

SEQ ID NO: 77815 - protein, 9 aa, Homo sapiens
  Table A; Target 77815; HLA-B*39:01; SLC22A9; ENSG00000149742; TAA
TLGLGASAL

SEQ ID NO: 77816 - protein, 9 aa, Homo sapiens
  Table A; Target 77816; HLA-C*01:02; SLC22A9; ENSG00000149742; TAA
TLGLGASAL

SEQ ID NO: 77817 - protein, 9 aa, Homo sapiens
  Table A; Target 77817; HLA-C*07:02; SLC22A9; ENSG00000149742; TAA
TLGLGASAL

SEQ ID NO: 77818 - protein, 9 aa, Homo sapiens
  Table A; Target 77818; HLA-C*07:04; SLC22A9; ENSG00000149742; TAA
TLGLGASAL

SEQ ID NO: 77819 - protein, 9 aa, Homo sapiens
  Table A; Target 77819; HLA-C*14:02; SLC22A9; ENSG00000149742; TAA
TLGLGASAL

SEQ ID NO: 77820 - protein, 9 aa, Homo sapiens
  Table A; Target 77820; HLA-A*02:01; SLC22A9; ENSG00000149742; TAA
TLREVLATL

SEQ ID NO: 77821 - protein, 9 aa, Homo sapiens
  Table A; Target 77821; HLA-A*02:03; SLC22A9; ENSG00000149742; TAA
TLREVLATL

SEQ ID NO: 77822 - protein, 9 aa, Homo sapiens
  Table A; Target 77822; HLA-A*02:04; SLC22A9; ENSG00000149742; TAA
TLREVLATL

SEQ ID NO: 77823 - protein, 9 aa, Homo sapiens
  Table A; Target 77823; HLA-A*02:07; SLC22A9; ENSG00000149742; TAA
TLREVLATL

SEQ ID NO: 77824 - protein, 9 aa, Homo sapiens
  Table A; Target 77824; HLA-A*31:01; SLC22A9; ENSG00000149742; TAA
TLREVLATL

SEQ ID NO: 77825 - protein, 9 aa, Homo sapiens
  Table A; Target 77825; HLA-B*07:02; SLC22A9; ENSG00000149742; TAA
TLREVLATL

SEQ ID NO: 77826 - protein, 9 aa, Homo sapiens
  Table A; Target 77826; HLA-B*08:01; SLC22A9; ENSG00000149742; TAA
TLREVLATL

SEQ ID NO: 77827 - protein, 9 aa, Homo sapiens
  Table A; Target 77827; HLA-B*46:01; SLC22A9; ENSG00000149742; TAA
TLREVLATL

SEQ ID NO: 77828 - protein, 9 aa, Homo sapiens
  Table A; Target 77828; HLA-C*07:02; SLC22A9; ENSG00000149742; TAA
TLREVLATL

SEQ ID NO: 77829 - protein, 11 aa, Homo sapiens
  Table A; Target 77829; HLA-A*02:03; SLC22A9; ENSG00000149742; TAA
TLREVLATLGL

SEQ ID NO: 77830 - protein, 9 aa, Homo sapiens
  Table A; Target 77830; HLA-A*02:03; SLC22A9; ENSG00000149742; TAA
TMKKELEAA

SEQ ID NO: 77831 - protein, 9 aa, Homo sapiens
  Table A; Target 77831; HLA-B*08:01; SLC22A9; ENSG00000149742; TAA
TMKKELEAA

SEQ ID NO: 77832 - protein, 9 aa, Homo sapiens
  Table A; Target 77832; HLA-B*55:01; SLC22A9; ENSG00000149742; TAA
TMKKELEAA

SEQ ID NO: 77833 - protein, 9 aa, Homo sapiens
  Table A; Target 77833; HLA-B*18:01; SLC22A9; ENSG00000149742; TAA
TRFANFMAY

SEQ ID NO: 77834 - protein, 9 aa, Homo sapiens
  Table A; Target 77834; HLA-B*27:02; SLC22A9; ENSG00000149742; TAA
TRFANFMAY

SEQ ID NO: 77835 - protein, 9 aa, Homo sapiens
  Table A; Target 77835; HLA-B*27:05; SLC22A9; ENSG00000149742; TAA
TRFANFMAY

SEQ ID NO: 77836 - protein, 9 aa, Homo sapiens
  Table A; Target 77836; HLA-C*02:02; SLC22A9; ENSG00000149742; TAA
TRFANFMAY

SEQ ID NO: 77837 - protein, 9 aa, Homo sapiens
  Table A; Target 77837; HLA-C*07:01; SLC22A9; ENSG00000149742; TAA
TRFANFMAY

SEQ ID NO: 77838 - protein, 9 aa, Homo sapiens
  Table A; Target 77838; HLA-C*16:04; SLC22A9; ENSG00000149742; TAA
TRFANFMAY

SEQ ID NO: 77839 - protein, 8 aa, Homo sapiens
  Table A; Target 77839; HLA-B*08:01; SLC22A9; ENSG00000149742; TAA
TSVAKFVF

SEQ ID NO: 77840 - protein, 8 aa, Homo sapiens
  Table A; Target 77840; HLA-B*57:01; SLC22A9; ENSG00000149742; TAA
TSVAKFVF

SEQ ID NO: 77841 - protein, 8 aa, Homo sapiens
  Table A; Target 77841; HLA-B*58:01; SLC22A9; ENSG00000149742; TAA
TSVAKFVF

SEQ ID NO: 77842 - protein, 8 aa, Homo sapiens
  Table A; Target 77842; HLA-C*16:01; SLC22A9; ENSG00000149742; TAA
TSVAKFVF

SEQ ID NO: 77843 - protein, 9 aa, Homo sapiens
  Table A; Target 77843; HLA-A*33:01; SLC22A9; ENSG00000149742; TAA
TSVAKFVFM

SEQ ID NO: 77844 - protein, 9 aa, Homo sapiens
  Table A; Target 77844; HLA-A*68:02; SLC22A9; ENSG00000149742; TAA
TSVAKFVFM

SEQ ID NO: 77845 - protein, 9 aa, Homo sapiens
  Table A; Target 77845; HLA-B*57:01; SLC22A9; ENSG00000149742; TAA
TSVAKFVFM

SEQ ID NO: 77846 - protein, 9 aa, Homo sapiens
  Table A; Target 77846; HLA-C*07:01; SLC22A9; ENSG00000149742; TAA
TSVAKFVFM

SEQ ID NO: 77847 - protein, 9 aa, Homo sapiens
  Table A; Target 77847; HLA-C*12:03; SLC22A9; ENSG00000149742; TAA
TSVAKFVFM

SEQ ID NO: 77848 - protein, 9 aa, Homo sapiens
  Table A; Target 77848; HLA-A*02:01; SLC22A9; ENSG00000149742; TAA
TVFLSIFAV

SEQ ID NO: 77849 - protein, 9 aa, Homo sapiens
  Table A; Target 77849; HLA-A*02:03; SLC22A9; ENSG00000149742; TAA
TVFLSIFAV

SEQ ID NO: 77850 - protein, 9 aa, Homo sapiens
  Table A; Target 77850; HLA-A*02:04; SLC22A9; ENSG00000149742; TAA
TVFLSIFAV

SEQ ID NO: 77851 - protein, 9 aa, Homo sapiens
  Table A; Target 77851; HLA-A*02:07; SLC22A9; ENSG00000149742; TAA
TVFLSIFAV

SEQ ID NO: 77852 - protein, 9 aa, Homo sapiens
  Table A; Target 77852; HLA-A*68:02; SLC22A9; ENSG00000149742; TAA
TVFLSIFAV

SEQ ID NO: 77853 - protein, 9 aa, Homo sapiens
  Table A; Target 77853; HLA-B*13:02; SLC22A9; ENSG00000149742; TAA
TVFLSIFAV

SEQ ID NO: 77854 - protein, 9 aa, Homo sapiens
  Table A; Target 77854; HLA-B*54:01; SLC22A9; ENSG00000149742; TAA
TVFLSIFAV

SEQ ID NO: 77855 - protein, 9 aa, Homo sapiens
  Table A; Target 77855; HLA-B*56:01; SLC22A9; ENSG00000149742; TAA
TVFLSIFAV

SEQ ID NO: 77856 - protein, 10 aa, Homo sapiens
  Table A; Target 77856; HLA-A*68:02; SLC22A9; ENSG00000149742; TAA
TVFLSIFAVA

SEQ ID NO: 77857 - protein, 10 aa, Homo sapiens
  Table A; Target 77857; HLA-B*54:01; SLC22A9; ENSG00000149742; TAA
TVFLSIFAVA

SEQ ID NO: 77858 - protein, 10 aa, Homo sapiens
  Table A; Target 77858; HLA-B*56:01; SLC22A9; ENSG00000149742; TAA
TVFLSIFAVA

SEQ ID NO: 77859 - protein, 10 aa, Homo sapiens
  Table A; Target 77859; HLA-A*25:01; SLC22A9; ENSG00000149742; TAA
TVSDNDTGAL

SEQ ID NO: 77860 - protein, 10 aa, Homo sapiens
  Table A; Target 77860; HLA-B*27:05; SLC22A9; ENSG00000149742; TAA
TVSDNDTGAL

SEQ ID NO: 77861 - protein, 10 aa, Homo sapiens
  Table A; Target 77861; HLA-B*39:01; SLC22A9; ENSG00000149742; TAA
TVSDNDTGAL

SEQ ID NO: 77862 - protein, 10 aa, Homo sapiens
  Table A; Target 77862; HLA-A*23:01; SLC22A9; ENSG00000149742; TAA
TYLHFMLENF

SEQ ID NO: 77863 - protein, 10 aa, Homo sapiens
  Table A; Target 77863; HLA-A*24:02; SLC22A9; ENSG00000149742; TAA
TYLHFMLENF

SEQ ID NO: 77864 - protein, 10 aa, Homo sapiens
  Table A; Target 77864; HLA-A*29:02; SLC22A9; ENSG00000149742; TAA
TYLHFMLENF

SEQ ID NO: 77865 - protein, 8 aa, Homo sapiens
  Table A; Target 77865; HLA-B*46:01; SLC22A9; ENSG00000149742; TAA
VAIVGTCA

SEQ ID NO: 77866 - protein, 8 aa, Homo sapiens
  Table A; Target 77866; HLA-B*54:01; SLC22A9; ENSG00000149742; TAA
VAIVGTCA

SEQ ID NO: 77867 - protein, 8 aa, Homo sapiens
  Table A; Target 77867; HLA-C*03:03; SLC22A9; ENSG00000149742; TAA
VAIVGTCA

SEQ ID NO: 77868 - protein, 8 aa, Homo sapiens
  Table A; Target 77868; HLA-C*03:04; SLC22A9; ENSG00000149742; TAA
VAIVGTCA

SEQ ID NO: 77869 - protein, 8 aa, Homo sapiens
  Table A; Target 77869; HLA-C*14:02; SLC22A9; ENSG00000149742; TAA
VAIVGTCA

SEQ ID NO: 77870 - protein, 9 aa, Homo sapiens
  Table A; Target 77870; HLA-B*46:01; SLC22A9; ENSG00000149742; TAA
VAIVGTCAA

SEQ ID NO: 77871 - protein, 9 aa, Homo sapiens
  Table A; Target 77871; HLA-B*54:01; SLC22A9; ENSG00000149742; TAA
VAIVGTCAA

SEQ ID NO: 77872 - protein, 9 aa, Homo sapiens
  Table A; Target 77872; HLA-B*56:01; SLC22A9; ENSG00000149742; TAA
VAIVGTCAA

SEQ ID NO: 77873 - protein, 9 aa, Homo sapiens
  Table A; Target 77873; HLA-C*01:02; SLC22A9; ENSG00000149742; TAA
VAIVGTCAA

SEQ ID NO: 77874 - protein, 9 aa, Homo sapiens
  Table A; Target 77874; HLA-C*03:03; SLC22A9; ENSG00000149742; TAA
VAIVGTCAA

SEQ ID NO: 77875 - protein, 9 aa, Homo sapiens
  Table A; Target 77875; HLA-C*03:04; SLC22A9; ENSG00000149742; TAA
VAIVGTCAA

SEQ ID NO: 77876 - protein, 9 aa, Homo sapiens
  Table A; Target 77876; HLA-C*14:02; SLC22A9; ENSG00000149742; TAA
VAIVGTCAA

SEQ ID NO: 77877 - protein, 10 aa, Homo sapiens
  Table A; Target 77877; HLA-B*46:01; SLC22A9; ENSG00000149742; TAA
VAIVGTCAAL

SEQ ID NO: 77878 - protein, 10 aa, Homo sapiens
  Table A; Target 77878; HLA-C*01:02; SLC22A9; ENSG00000149742; TAA
VAIVGTCAAL

SEQ ID NO: 77879 - protein, 10 aa, Homo sapiens
  Table A; Target 77879; HLA-C*03:03; SLC22A9; ENSG00000149742; TAA
VAIVGTCAAL

SEQ ID NO: 77880 - protein, 10 aa, Homo sapiens
  Table A; Target 77880; HLA-C*03:04; SLC22A9; ENSG00000149742; TAA
VAIVGTCAAL

SEQ ID NO: 77881 - protein, 10 aa, Homo sapiens
  Table A; Target 77881; HLA-C*14:02; SLC22A9; ENSG00000149742; TAA
VAIVGTCAAL

SEQ ID NO: 77882 - protein, 8 aa, Homo sapiens
  Table A; Target 77882; HLA-B*54:01; SLC22A9; ENSG00000149742; TAA
VAKFVFMA

SEQ ID NO: 77883 - protein, 8 aa, Homo sapiens
  Table A; Target 77883; HLA-B*51:01; SLC22A9; ENSG00000149742; TAA
VAPWALKY

SEQ ID NO: 77884 - protein, 8 aa, Homo sapiens
  Table A; Target 77884; HLA-C*07:01; SLC22A9; ENSG00000149742; TAA
VAPWALKY

SEQ ID NO: 77885 - protein, 10 aa, Homo sapiens
  Table A; Target 77885; HLA-A*02:01; SLC22A9; ENSG00000149742; TAA
VCDSQSLTSV

SEQ ID NO: 77886 - protein, 10 aa, Homo sapiens
  Table A; Target 77886; HLA-B*55:01; SLC22A9; ENSG00000149742; TAA
VCDSQSLTSV

SEQ ID NO: 77887 - protein, 10 aa, Homo sapiens
  Table A; Target 77887; HLA-C*04:01; SLC22A9; ENSG00000149742; TAA
VCDSQSLTSV

SEQ ID NO: 77888 - protein, 10 aa, Homo sapiens
  Table A; Target 77888; HLA-C*05:01; SLC22A9; ENSG00000149742; TAA
VCDSQSLTSV

SEQ ID NO: 77889 - protein, 8 aa, Homo sapiens
  Table A; Target 77889; HLA-A*23:01; SLC22A9; ENSG00000149742; TAA
VFLLQTLF

SEQ ID NO: 77890 - protein, 8 aa, Homo sapiens
  Table A; Target 77890; HLA-A*24:02; SLC22A9; ENSG00000149742; TAA
VFLLQTLF

SEQ ID NO: 77891 - protein, 11 aa, Homo sapiens
  Table A; Target 77891; HLA-A*29:02; SLC22A9; ENSG00000149742; TAA
VFLSIFAVATY

SEQ ID NO: 77892 - protein, 8 aa, Homo sapiens
  Table A; Target 77892; HLA-C*14:02; SLC22A9; ENSG00000149742; TAA
VFMAGMMV

SEQ ID NO: 77893 - protein, 10 aa, Homo sapiens
  Table A; Target 77893; HLA-A*23:01; SLC22A9; ENSG00000149742; TAA
VFPFISGFAF

SEQ ID NO: 77894 - protein, 10 aa, Homo sapiens
  Table A; Target 77894; HLA-A*24:02; SLC22A9; ENSG00000149742; TAA
VFPFISGFAF

SEQ ID NO: 77895 - protein, 10 aa, Homo sapiens
  Table A; Target 77895; HLA-A*29:02; SLC22A9; ENSG00000149742; TAA
VFPFISGFAF

SEQ ID NO: 77896 - protein, 11 aa, Homo sapiens
  Table A; Target 77896; HLA-A*24:02; SLC22A9; ENSG00000149742; TAA
VFPFISGFAFL

SEQ ID NO: 77897 - protein, 9 aa, Homo sapiens
  Table A; Target 77897; HLA-B*27:05; SLC22A9; ENSG00000149742; TAA
VHILDNDTV

SEQ ID NO: 77898 - protein, 9 aa, Homo sapiens
  Table A; Target 77898; HLA-B*38:01; SLC22A9; ENSG00000149742; TAA
VHILDNDTV

SEQ ID NO: 77899 - protein, 9 aa, Homo sapiens
  Table A; Target 77899; HLA-B*39:01; SLC22A9; ENSG00000149742; TAA
VHILDNDTV

SEQ ID NO: 77900 - protein, 8 aa, Homo sapiens
  Table A; Target 77900; HLA-B*57:01; SLC22A9; ENSG00000149742; TAA
VIFLTSSW

SEQ ID NO: 77901 - protein, 9 aa, Homo sapiens
  Table A; Target 77901; HLA-A*03:01; SLC22A9; ENSG00000149742; TAA
VIPTIIRAR

SEQ ID NO: 77902 - protein, 9 aa, Homo sapiens
  Table A; Target 77902; HLA-A*31:01; SLC22A9; ENSG00000149742; TAA
VIPTIIRAR

SEQ ID NO: 77903 - protein, 9 aa, Homo sapiens
  Table A; Target 77903; HLA-A*33:03; SLC22A9; ENSG00000149742; TAA
VIPTIIRAR

SEQ ID NO: 77904 - protein, 9 aa, Homo sapiens
  Table A; Target 77904; HLA-A*02:03; SLC22A9; ENSG00000149742; TAA
VLATLGLGA

SEQ ID NO: 77905 - protein, 9 aa, Homo sapiens
  Table A; Target 77905; HLA-B*13:02; SLC22A9; ENSG00000149742; TAA
VLATLGLGA

SEQ ID NO: 77906 - protein, 8 aa, Homo sapiens
  Table A; Target 77906; HLA-B*07:02; SLC22A9; ENSG00000149742; TAA
VPQEMQTL

SEQ ID NO: 77907 - protein, 8 aa, Homo sapiens
  Table A; Target 77907; HLA-B*08:01; SLC22A9; ENSG00000149742; TAA
VPQEMQTL

SEQ ID NO: 77908 - protein, 8 aa, Homo sapiens
  Table A; Target 77908; HLA-B*35:03; SLC22A9; ENSG00000149742; TAA
VPQEMQTL

SEQ ID NO: 77909 - protein, 8 aa, Homo sapiens
  Table A; Target 77909; HLA-B*51:01; SLC22A9; ENSG00000149742; TAA
VPQEMQTL

SEQ ID NO: 77910 - protein, 8 aa, Homo sapiens
  Table A; Target 77910; HLA-B*56:01; SLC22A9; ENSG00000149742; TAA
VPQEMQTL

SEQ ID NO: 77911 - protein, 8 aa, Homo sapiens
  Table A; Target 77911; HLA-C*07:02; SLC22A9; ENSG00000149742; TAA
VPQEMQTL

SEQ ID NO: 77912 - protein, 9 aa, Homo sapiens
  Table A; Target 77912; HLA-A*33:03; SLC22A9; ENSG00000149742; TAA
VPQEMQTLR

SEQ ID NO: 77913 - protein, 9 aa, Homo sapiens
  Table A; Target 77913; HLA-A*68:01; SLC22A9; ENSG00000149742; TAA
VPQEMQTLR

SEQ ID NO: 77914 - protein, 9 aa, Homo sapiens
  Table A; Target 77914; HLA-C*07:06; SLC22A9; ENSG00000149742; TAA
VPQEMQTLR

SEQ ID NO: 77915 - protein, 8 aa, Homo sapiens
  Table A; Target 77915; HLA-B*51:01; SLC22A9; ENSG00000149742; TAA
VPYFVIFL

SEQ ID NO: 77916 - protein, 8 aa, Homo sapiens
  Table A; Target 77916; HLA-B*13:02; SLC22A9; ENSG00000149742; TAA
VQHLGNNV

SEQ ID NO: 77917 - protein, 9 aa, Homo sapiens
  Table A; Target 77917; HLA-A*32:01; SLC22A9; ENSG00000149742; TAA
VQHLGNNVF

SEQ ID NO: 77918 - protein, 9 aa, Homo sapiens
  Table A; Target 77918; HLA-B*15:01; SLC22A9; ENSG00000149742; TAA
VQHLGNNVF

SEQ ID NO: 77919 - protein, 9 aa, Homo sapiens
  Table A; Target 77919; HLA-B*15:03; SLC22A9; ENSG00000149742; TAA
VQHLGNNVF

SEQ ID NO: 77920 - protein, 9 aa, Homo sapiens
  Table A; Target 77920; HLA-B*38:01; SLC22A9; ENSG00000149742; TAA
VQHLGNNVF

SEQ ID NO: 77921 - protein, 9 aa, Homo sapiens
  Table A; Target 77921; HLA-B*46:01; SLC22A9; ENSG00000149742; TAA
VQHLGNNVF

SEQ ID NO: 77922 - protein, 9 aa, Homo sapiens
  Table A; Target 77922; HLA-C*07:04; SLC22A9; ENSG00000149742; TAA
VQHLGNNVF

SEQ ID NO: 77923 - protein, 9 aa, Homo sapiens
  Table A; Target 77923; HLA-A*01:01; SLC22A9; ENSG00000149742; TAA
VSDNDTGAL

SEQ ID NO: 77924 - protein, 9 aa, Homo sapiens
  Table A; Target 77924; HLA-C*03:03; SLC22A9; ENSG00000149742; TAA
VSDNDTGAL

SEQ ID NO: 77925 - protein, 9 aa, Homo sapiens
  Table A; Target 77925; HLA-C*03:04; SLC22A9; ENSG00000149742; TAA
VSDNDTGAL

SEQ ID NO: 77926 - protein, 9 aa, Homo sapiens
  Table A; Target 77926; HLA-C*05:01; SLC22A9; ENSG00000149742; TAA
VSDNDTGAL

SEQ ID NO: 77927 - protein, 9 aa, Homo sapiens
  Table A; Target 77927; HLA-B*57:01; SLC22A9; ENSG00000149742; TAA
VSVPYFVIF

SEQ ID NO: 77928 - protein, 9 aa, Homo sapiens
  Table A; Target 77928; HLA-C*02:02; SLC22A9; ENSG00000149742; TAA
VSVPYFVIF

SEQ ID NO: 77929 - protein, 9 aa, Homo sapiens
  Table A; Target 77929; HLA-C*12:03; SLC22A9; ENSG00000149742; TAA
VSVPYFVIF

SEQ ID NO: 77930 - protein, 9 aa, Homo sapiens
  Table A; Target 77930; HLA-B*13:02; SLC22A9; ENSG00000149742; TAA
VVSVPYFVI

SEQ ID NO: 77931 - protein, 9 aa, Homo sapiens
  Table A; Target 77931; HLA-A*23:01; SLC22A9; ENSG00000149742; TAA
VYSPPLPWI

SEQ ID NO: 77932 - protein, 9 aa, Homo sapiens
  Table A; Target 77932; HLA-A*24:02; SLC22A9; ENSG00000149742; TAA
VYSPPLPWI

SEQ ID NO: 77933 - protein, 10 aa, Homo sapiens
  Table A; Target 77933; HLA-A*23:01; SLC22A9; ENSG00000149742; TAA
VYSPPLPWII

SEQ ID NO: 77934 - protein, 10 aa, Homo sapiens
  Table A; Target 77934; HLA-A*24:02; SLC22A9; ENSG00000149742; TAA
VYSPPLPWII

SEQ ID NO: 77935 - protein, 11 aa, Homo sapiens
  Table A; Target 77935; HLA-A*24:02; SLC22A9; ENSG00000149742; TAA
VYSPPLPWIIY

SEQ ID NO: 77936 - protein, 11 aa, Homo sapiens
  Table A; Target 77936; HLA-A*29:02; SLC22A9; ENSG00000149742; TAA
VYSPPLPWIIY

SEQ ID NO: 77937 - protein, 8 aa, Homo sapiens
  Table A; Target 77937; HLA-B*08:01; SLC22A9; ENSG00000149742; TAA
WVYDRISF

SEQ ID NO: 77938 - protein, 9 aa, Homo sapiens
  Table A; Target 77938; HLA-A*02:04; SLC22A9; ENSG00000149742; TAA
YLHFMLENF

SEQ ID NO: 77939 - protein, 9 aa, Homo sapiens
  Table A; Target 77939; HLA-A*02:07; SLC22A9; ENSG00000149742; TAA
YLHFMLENF

SEQ ID NO: 77940 - protein, 9 aa, Homo sapiens
  Table A; Target 77940; HLA-A*02:01; SLC22A9; ENSG00000149742; TAA
YLQVAIVGT

SEQ ID NO: 77941 - protein, 9 aa, Homo sapiens
  Table A; Target 77941; HLA-A*02:03; SLC22A9; ENSG00000149742; TAA
YLQVAIVGT

SEQ ID NO: 77942 - protein, 9 aa, Homo sapiens
  Table A; Target 77942; HLA-A*02:04; SLC22A9; ENSG00000149742; TAA
YLQVAIVGT

SEQ ID NO: 77943 - protein, 10 aa, Homo sapiens
  Table A; Target 77943; HLA-A*02:03; SLC22A9; ENSG00000149742; TAA
YLQVAIVGTC

SEQ ID NO: 77944 - protein, 9 aa, Homo sapiens
  Table A; Target 77944; HLA-B*08:01; SLC22A9; ENSG00000149742; TAA
YMNRRASQM

SEQ ID NO: 77945 - protein, 9 aa, Homo sapiens
  Table A; Target 77945; HLA-A*02:07; SLC22A9; ENSG00000149742; TAA
YSPPLPWII

SEQ ID NO: 77946 - protein, 9 aa, Homo sapiens
  Table A; Target 77946; HLA-A*24:02; SLC22A9; ENSG00000149742; TAA
YSPPLPWII

SEQ ID NO: 77947 - protein, 9 aa, Homo sapiens
  Table A; Target 77947; HLA-A*68:02; SLC22A9; ENSG00000149742; TAA
YSPPLPWII

SEQ ID NO: 77948 - protein, 10 aa, Homo sapiens
  Table A; Target 77948; HLA-A*29:02; SLC22A9; ENSG00000149742; TAA
YSPPLPWIIY

SEQ ID NO: 77949 - protein, 9 aa, Homo sapiens
  Table A; Target 77949; HLA-C*05:01; SLC45A2; ENSG00000164175; TAA
AADFIDGPI

SEQ ID NO: 77950 - protein, 10 aa, Homo sapiens
  Table A; Target 77950; HLA-A*11:01; SLC45A2; ENSG00000164175; TAA
AADFIDGPIK

SEQ ID NO: 77951 - protein, 8 aa, Homo sapiens
  Table A; Target 77951; HLA-A*33:03; SLC45A2; ENSG00000164175; TAA
AALIANPR

SEQ ID NO: 77952 - protein, 8 aa, Homo sapiens
  Table A; Target 77952; HLA-C*07:06; SLC45A2; ENSG00000164175; TAA
AALIANPR

SEQ ID NO: 77953 - protein, 8 aa, Homo sapiens
  Table A; Target 77953; HLA-A*23:01; SLC45A2; ENSG00000164175; TAA
AAYVTPVL

SEQ ID NO: 77954 - protein, 8 aa, Homo sapiens
  Table A; Target 77954; HLA-A*30:01; SLC45A2; ENSG00000164175; TAA
AAYVTPVL

SEQ ID NO: 77955 - protein, 8 aa, Homo sapiens
  Table A; Target 77955; HLA-A*32:01; SLC45A2; ENSG00000164175; TAA
AAYVTPVL

SEQ ID NO: 77956 - protein, 8 aa, Homo sapiens
  Table A; Target 77956; HLA-B*08:01; SLC45A2; ENSG00000164175; TAA
AAYVTPVL

SEQ ID NO: 77957 - protein, 8 aa, Homo sapiens
  Table A; Target 77957; HLA-B*13:02; SLC45A2; ENSG00000164175; TAA
AAYVTPVL

SEQ ID NO: 77958 - protein, 8 aa, Homo sapiens
  Table A; Target 77958; HLA-B*15:01; SLC45A2; ENSG00000164175; TAA
AAYVTPVL

SEQ ID NO: 77959 - protein, 8 aa, Homo sapiens
  Table A; Target 77959; HLA-B*15:03; SLC45A2; ENSG00000164175; TAA
AAYVTPVL

SEQ ID NO: 77960 - protein, 8 aa, Homo sapiens
  Table A; Target 77960; HLA-B*35:01; SLC45A2; ENSG00000164175; TAA
AAYVTPVL

SEQ ID NO: 77961 - protein, 8 aa, Homo sapiens
  Table A; Target 77961; HLA-B*35:03; SLC45A2; ENSG00000164175; TAA
AAYVTPVL

SEQ ID NO: 77962 - protein, 8 aa, Homo sapiens
  Table A; Target 77962; HLA-B*37:01; SLC45A2; ENSG00000164175; TAA
AAYVTPVL

SEQ ID NO: 77963 - protein, 8 aa, Homo sapiens
  Table A; Target 77963; HLA-B*39:01; SLC45A2; ENSG00000164175; TAA
AAYVTPVL

SEQ ID NO: 77964 - protein, 8 aa, Homo sapiens
  Table A; Target 77964; HLA-B*40:01; SLC45A2; ENSG00000164175; TAA
AAYVTPVL

SEQ ID NO: 77965 - protein, 8 aa, Homo sapiens
  Table A; Target 77965; HLA-B*40:02; SLC45A2; ENSG00000164175; TAA
AAYVTPVL

SEQ ID NO: 77966 - protein, 8 aa, Homo sapiens
  Table A; Target 77966; HLA-B*46:01; SLC45A2; ENSG00000164175; TAA
AAYVTPVL

SEQ ID NO: 77967 - protein, 8 aa, Homo sapiens
  Table A; Target 77967; HLA-B*51:01; SLC45A2; ENSG00000164175; TAA
AAYVTPVL

SEQ ID NO: 77968 - protein, 8 aa, Homo sapiens
  Table A; Target 77968; HLA-B*54:01; SLC45A2; ENSG00000164175; TAA
AAYVTPVL

SEQ ID NO: 77969 - protein, 8 aa, Homo sapiens
  Table A; Target 77969; HLA-B*58:01; SLC45A2; ENSG00000164175; TAA
AAYVTPVL

SEQ ID NO: 77970 - protein, 8 aa, Homo sapiens
  Table A; Target 77970; HLA-C*01:02; SLC45A2; ENSG00000164175; TAA
AAYVTPVL

SEQ ID NO: 77971 - protein, 8 aa, Homo sapiens
  Table A; Target 77971; HLA-C*02:02; SLC45A2; ENSG00000164175; TAA
AAYVTPVL

SEQ ID NO: 77972 - protein, 8 aa, Homo sapiens
  Table A; Target 77972; HLA-C*03:03; SLC45A2; ENSG00000164175; TAA
AAYVTPVL

SEQ ID NO: 77973 - protein, 8 aa, Homo sapiens
  Table A; Target 77973; HLA-C*03:04; SLC45A2; ENSG00000164175; TAA
AAYVTPVL

SEQ ID NO: 77974 - protein, 8 aa, Homo sapiens
  Table A; Target 77974; HLA-C*05:01; SLC45A2; ENSG00000164175; TAA
AAYVTPVL

SEQ ID NO: 77975 - protein, 8 aa, Homo sapiens
  Table A; Target 77975; HLA-C*07:01; SLC45A2; ENSG00000164175; TAA
AAYVTPVL

SEQ ID NO: 77976 - protein, 8 aa, Homo sapiens
  Table A; Target 77976; HLA-C*07:02; SLC45A2; ENSG00000164175; TAA
AAYVTPVL

SEQ ID NO: 77977 - protein, 8 aa, Homo sapiens
  Table A; Target 77977; HLA-C*12:03; SLC45A2; ENSG00000164175; TAA
AAYVTPVL

SEQ ID NO: 77978 - protein, 8 aa, Homo sapiens
  Table A; Target 77978; HLA-C*14:02; SLC45A2; ENSG00000164175; TAA
AAYVTPVL

SEQ ID NO: 77979 - protein, 8 aa, Homo sapiens
  Table A; Target 77979; HLA-C*16:01; SLC45A2; ENSG00000164175; TAA
AAYVTPVL

SEQ ID NO: 77980 - protein, 8 aa, Homo sapiens
  Table A; Target 77980; HLA-C*16:02; SLC45A2; ENSG00000164175; TAA
AAYVTPVL

SEQ ID NO: 77981 - protein, 8 aa, Homo sapiens
  Table A; Target 77981; HLA-C*16:04; SLC45A2; ENSG00000164175; TAA
AAYVTPVL

SEQ ID NO: 77982 - protein, 9 aa, Homo sapiens
  Table A; Target 77982; HLA-A*01:01; SLC45A2; ENSG00000164175; TAA
AAYVTPVLL

SEQ ID NO: 77983 - protein, 9 aa, Homo sapiens
  Table A; Target 77983; HLA-A*02:01; SLC45A2; ENSG00000164175; TAA
AAYVTPVLL

SEQ ID NO: 77984 - protein, 9 aa, Homo sapiens
  Table A; Target 77984; HLA-A*02:03; SLC45A2; ENSG00000164175; TAA
AAYVTPVLL

SEQ ID NO: 77985 - protein, 9 aa, Homo sapiens
  Table A; Target 77985; HLA-A*02:04; SLC45A2; ENSG00000164175; TAA
AAYVTPVLL

SEQ ID NO: 77986 - protein, 9 aa, Homo sapiens
  Table A; Target 77986; HLA-A*02:07; SLC45A2; ENSG00000164175; TAA
AAYVTPVLL

SEQ ID NO: 77987 - protein, 9 aa, Homo sapiens
  Table A; Target 77987; HLA-A*03:01; SLC45A2; ENSG00000164175; TAA
AAYVTPVLL

SEQ ID NO: 77988 - protein, 9 aa, Homo sapiens
  Table A; Target 77988; HLA-A*03:02; SLC45A2; ENSG00000164175; TAA
AAYVTPVLL

SEQ ID NO: 77989 - protein, 9 aa, Homo sapiens
  Table A; Target 77989; HLA-A*11:01; SLC45A2; ENSG00000164175; TAA
AAYVTPVLL

SEQ ID NO: 77990 - protein, 9 aa, Homo sapiens
  Table A; Target 77990; HLA-A*23:01; SLC45A2; ENSG00000164175; TAA
AAYVTPVLL

SEQ ID NO: 77991 - protein, 9 aa, Homo sapiens
  Table A; Target 77991; HLA-A*24:02; SLC45A2; ENSG00000164175; TAA
AAYVTPVLL

SEQ ID NO: 77992 - protein, 9 aa, Homo sapiens
  Table A; Target 77992; HLA-A*30:01; SLC45A2; ENSG00000164175; TAA
AAYVTPVLL

SEQ ID NO: 77993 - protein, 9 aa, Homo sapiens
  Table A; Target 77993; HLA-A*31:01; SLC45A2; ENSG00000164175; TAA
AAYVTPVLL

SEQ ID NO: 77994 - protein, 9 aa, Homo sapiens
  Table A; Target 77994; HLA-A*32:01; SLC45A2; ENSG00000164175; TAA
AAYVTPVLL

SEQ ID NO: 77995 - protein, 9 aa, Homo sapiens
  Table A; Target 77995; HLA-A*68:01; SLC45A2; ENSG00000164175; TAA
AAYVTPVLL

SEQ ID NO: 77996 - protein, 9 aa, Homo sapiens
  Table A; Target 77996; HLA-A*68:02; SLC45A2; ENSG00000164175; TAA
AAYVTPVLL

SEQ ID NO: 77997 - protein, 9 aa, Homo sapiens
  Table A; Target 77997; HLA-B*07:02; SLC45A2; ENSG00000164175; TAA
AAYVTPVLL

SEQ ID NO: 77998 - protein, 9 aa, Homo sapiens
  Table A; Target 77998; HLA-B*08:01; SLC45A2; ENSG00000164175; TAA
AAYVTPVLL

SEQ ID NO: 77999 - protein, 9 aa, Homo sapiens
  Table A; Target 77999; HLA-B*13:02; SLC45A2; ENSG00000164175; TAA
AAYVTPVLL

SEQ ID NO: 78000 - protein, 9 aa, Homo sapiens
  Table A; Target 78000; HLA-B*15:01; SLC45A2; ENSG00000164175; TAA
AAYVTPVLL

SEQ ID NO: 78001 - protein, 9 aa, Homo sapiens
  Table A; Target 78001; HLA-B*15:03; SLC45A2; ENSG00000164175; TAA
AAYVTPVLL

SEQ ID NO: 78002 - protein, 9 aa, Homo sapiens
  Table A; Target 78002; HLA-B*27:02; SLC45A2; ENSG00000164175; TAA
AAYVTPVLL

SEQ ID NO: 78003 - protein, 9 aa, Homo sapiens
  Table A; Target 78003; HLA-B*35:01; SLC45A2; ENSG00000164175; TAA
AAYVTPVLL

SEQ ID NO: 78004 - protein, 9 aa, Homo sapiens
  Table A; Target 78004; HLA-B*35:03; SLC45A2; ENSG00000164175; TAA
AAYVTPVLL

SEQ ID NO: 78005 - protein, 9 aa, Homo sapiens
  Table A; Target 78005; HLA-B*37:01; SLC45A2; ENSG00000164175; TAA
AAYVTPVLL

SEQ ID NO: 78006 - protein, 9 aa, Homo sapiens
  Table A; Target 78006; HLA-B*38:01; SLC45A2; ENSG00000164175; TAA
AAYVTPVLL

SEQ ID NO: 78007 - protein, 9 aa, Homo sapiens
  Table A; Target 78007; HLA-B*39:01; SLC45A2; ENSG00000164175; TAA
AAYVTPVLL

SEQ ID NO: 78008 - protein, 9 aa, Homo sapiens
  Table A; Target 78008; HLA-B*40:01; SLC45A2; ENSG00000164175; TAA
AAYVTPVLL

SEQ ID NO: 78009 - protein, 9 aa, Homo sapiens
  Table A; Target 78009; HLA-B*40:02; SLC45A2; ENSG00000164175; TAA
AAYVTPVLL

SEQ ID NO: 78010 - protein, 9 aa, Homo sapiens
  Table A; Target 78010; HLA-B*46:01; SLC45A2; ENSG00000164175; TAA
AAYVTPVLL

SEQ ID NO: 78011 - protein, 9 aa, Homo sapiens
  Table A; Target 78011; HLA-B*49:01; SLC45A2; ENSG00000164175; TAA
AAYVTPVLL

SEQ ID NO: 78012 - protein, 9 aa, Homo sapiens
  Table A; Target 78012; HLA-B*51:01; SLC45A2; ENSG00000164175; TAA
AAYVTPVLL

SEQ ID NO: 78013 - protein, 9 aa, Homo sapiens
  Table A; Target 78013; HLA-B*55:01; SLC45A2; ENSG00000164175; TAA
AAYVTPVLL

SEQ ID NO: 78014 - protein, 9 aa, Homo sapiens
  Table A; Target 78014; HLA-B*57:01; SLC45A2; ENSG00000164175; TAA
AAYVTPVLL

SEQ ID NO: 78015 - protein, 9 aa, Homo sapiens
  Table A; Target 78015; HLA-B*58:01; SLC45A2; ENSG00000164175; TAA
AAYVTPVLL

SEQ ID NO: 78016 - protein, 9 aa, Homo sapiens
  Table A; Target 78016; HLA-C*01:02; SLC45A2; ENSG00000164175; TAA
AAYVTPVLL

SEQ ID NO: 78017 - protein, 9 aa, Homo sapiens
  Table A; Target 78017; HLA-C*02:02; SLC45A2; ENSG00000164175; TAA
AAYVTPVLL

SEQ ID NO: 78018 - protein, 9 aa, Homo sapiens
  Table A; Target 78018; HLA-C*03:03; SLC45A2; ENSG00000164175; TAA
AAYVTPVLL

SEQ ID NO: 78019 - protein, 9 aa, Homo sapiens
  Table A; Target 78019; HLA-C*03:04; SLC45A2; ENSG00000164175; TAA
AAYVTPVLL

SEQ ID NO: 78020 - protein, 9 aa, Homo sapiens
  Table A; Target 78020; HLA-C*04:01; SLC45A2; ENSG00000164175; TAA
AAYVTPVLL

SEQ ID NO: 78021 - protein, 9 aa, Homo sapiens
  Table A; Target 78021; HLA-C*05:01; SLC45A2; ENSG00000164175; TAA
AAYVTPVLL

SEQ ID NO: 78022 - protein, 9 aa, Homo sapiens
  Table A; Target 78022; HLA-C*06:02; SLC45A2; ENSG00000164175; TAA
AAYVTPVLL

SEQ ID NO: 78023 - protein, 9 aa, Homo sapiens
  Table A; Target 78023; HLA-C*07:04; SLC45A2; ENSG00000164175; TAA
AAYVTPVLL

SEQ ID NO: 78024 - protein, 9 aa, Homo sapiens
  Table A; Target 78024; HLA-C*07:06; SLC45A2; ENSG00000164175; TAA
AAYVTPVLL

SEQ ID NO: 78025 - protein, 9 aa, Homo sapiens
  Table A; Target 78025; HLA-C*12:03; SLC45A2; ENSG00000164175; TAA
AAYVTPVLL

SEQ ID NO: 78026 - protein, 9 aa, Homo sapiens
  Table A; Target 78026; HLA-C*14:02; SLC45A2; ENSG00000164175; TAA
AAYVTPVLL

SEQ ID NO: 78027 - protein, 9 aa, Homo sapiens
  Table A; Target 78027; HLA-C*16:01; SLC45A2; ENSG00000164175; TAA
AAYVTPVLL

SEQ ID NO: 78028 - protein, 9 aa, Homo sapiens
  Table A; Target 78028; HLA-C*16:02; SLC45A2; ENSG00000164175; TAA
AAYVTPVLL

SEQ ID NO: 78029 - protein, 9 aa, Homo sapiens
  Table A; Target 78029; HLA-C*16:04; SLC45A2; ENSG00000164175; TAA
AAYVTPVLL

SEQ ID NO: 78030 - protein, 9 aa, Homo sapiens
  Table A; Target 78030; HLA-A*02:07; SLC45A2; ENSG00000164175; TAA
ADDGPFDSV

SEQ ID NO: 78031 - protein, 9 aa, Homo sapiens
  Table A; Target 78031; HLA-B*49:01; SLC45A2; ENSG00000164175; TAA
ADDGPFDSV

SEQ ID NO: 78032 - protein, 9 aa, Homo sapiens
  Table A; Target 78032; HLA-C*05:01; SLC45A2; ENSG00000164175; TAA
ADDGPFDSV

SEQ ID NO: 78033 - protein, 9 aa, Homo sapiens
  Table A; Target 78033; HLA-A*11:01; SLC45A2; ENSG00000164175; TAA
ADFIDGPIK

SEQ ID NO: 78034 - protein, 10 aa, Homo sapiens
  Table A; Target 78034; HLA-A*30:01; SLC45A2; ENSG00000164175; TAA
ADFIDGPIKA

SEQ ID NO: 78035 - protein, 10 aa, Homo sapiens
  Table A; Target 78035; HLA-B*40:02; SLC45A2; ENSG00000164175; TAA
ADFIDGPIKA

SEQ ID NO: 78036 - protein, 11 aa, Homo sapiens
  Table A; Target 78036; HLA-A*30:02; SLC45A2; ENSG00000164175; TAA
ADFIDGPIKAY

SEQ ID NO: 78037 - protein, 11 aa, Homo sapiens
  Table A; Target 78037; HLA-B*44:02; SLC45A2; ENSG00000164175; TAA
ADFIDGPIKAY

SEQ ID NO: 78038 - protein, 11 aa, Homo sapiens
  Table A; Target 78038; HLA-B*44:03; SLC45A2; ENSG00000164175; TAA
ADFIDGPIKAY

SEQ ID NO: 78039 - protein, 11 aa, Homo sapiens
  Table A; Target 78039; HLA-C*12:03; SLC45A2; ENSG00000164175; TAA
ADFIDGPIKAY

SEQ ID NO: 78040 - protein, 11 aa, Homo sapiens
  Table A; Target 78040; HLA-C*16:04; SLC45A2; ENSG00000164175; TAA
ADFIDGPIKAY

SEQ ID NO: 78041 - protein, 8 aa, Homo sapiens
  Table A; Target 78041; HLA-C*16:01; SLC45A2; ENSG00000164175; TAA
AEQTRRAM

SEQ ID NO: 78042 - protein, 10 aa, Homo sapiens
  Table A; Target 78042; HLA-A*30:01; SLC45A2; ENSG00000164175; TAA
AEQTRRAMTL

SEQ ID NO: 78043 - protein, 10 aa, Homo sapiens
  Table A; Target 78043; HLA-B*37:01; SLC45A2; ENSG00000164175; TAA
AEQTRRAMTL

SEQ ID NO: 78044 - protein, 10 aa, Homo sapiens
  Table A; Target 78044; HLA-B*40:01; SLC45A2; ENSG00000164175; TAA
AEQTRRAMTL

SEQ ID NO: 78045 - protein, 10 aa, Homo sapiens
  Table A; Target 78045; HLA-B*40:02; SLC45A2; ENSG00000164175; TAA
AEQTRRAMTL

SEQ ID NO: 78046 - protein, 10 aa, Homo sapiens
  Table A; Target 78046; HLA-B*44:02; SLC45A2; ENSG00000164175; TAA
AEQTRRAMTL

SEQ ID NO: 78047 - protein, 8 aa, Homo sapiens
  Table A; Target 78047; HLA-A*23:01; SLC45A2; ENSG00000164175; TAA
AFLSNMLF

SEQ ID NO: 78048 - protein, 9 aa, Homo sapiens
  Table A; Target 78048; HLA-A*23:01; SLC45A2; ENSG00000164175; TAA
AFLSNMLFF

SEQ ID NO: 78049 - protein, 9 aa, Homo sapiens
  Table A; Target 78049; HLA-A*24:02; SLC45A2; ENSG00000164175; TAA
AFLSNMLFF

SEQ ID NO: 78050 - protein, 9 aa, Homo sapiens
  Table A; Target 78050; HLA-A*29:02; SLC45A2; ENSG00000164175; TAA
AFLSNMLFF

SEQ ID NO: 78051 - protein, 9 aa, Homo sapiens
  Table A; Target 78051; HLA-A*30:01; SLC45A2; ENSG00000164175; TAA
AGTVVVVVI

SEQ ID NO: 78052 - protein, 9 aa, Homo sapiens
  Table A; Target 78052; HLA-A*32:01; SLC45A2; ENSG00000164175; TAA
AGTVVVVVI

SEQ ID NO: 78053 - protein, 9 aa, Homo sapiens
  Table A; Target 78053; HLA-B*13:02; SLC45A2; ENSG00000164175; TAA
AGTVVVVVI

SEQ ID NO: 78054 - protein, 9 aa, Homo sapiens
  Table A; Target 78054; HLA-B*40:01; SLC45A2; ENSG00000164175; TAA
AGTVVVVVI

SEQ ID NO: 78055 - protein, 9 aa, Homo sapiens
  Table A; Target 78055; HLA-B*49:01; SLC45A2; ENSG00000164175; TAA
AGTVVVVVI

SEQ ID NO: 78056 - protein, 9 aa, Homo sapiens
  Table A; Target 78056; HLA-B*58:01; SLC45A2; ENSG00000164175; TAA
AGTVVVVVI

SEQ ID NO: 78057 - protein, 9 aa, Homo sapiens
  Table A; Target 78057; HLA-C*02:02; SLC45A2; ENSG00000164175; TAA
AGTVVVVVI

SEQ ID NO: 78058 - protein, 9 aa, Homo sapiens
  Table A; Target 78058; HLA-C*04:01; SLC45A2; ENSG00000164175; TAA
AGTVVVVVI

SEQ ID NO: 78059 - protein, 9 aa, Homo sapiens
  Table A; Target 78059; HLA-C*06:02; SLC45A2; ENSG00000164175; TAA
AGTVVVVVI

SEQ ID NO: 78060 - protein, 9 aa, Homo sapiens
  Table A; Target 78060; HLA-C*12:03; SLC45A2; ENSG00000164175; TAA
AGTVVVVVI

SEQ ID NO: 78061 - protein, 9 aa, Homo sapiens
  Table A; Target 78061; HLA-C*16:02; SLC45A2; ENSG00000164175; TAA
AGTVVVVVI

SEQ ID NO: 78062 - protein, 9 aa, Homo sapiens
  Table A; Target 78062; HLA-C*16:04; SLC45A2; ENSG00000164175; TAA
AGTVVVVVI

SEQ ID NO: 78063 - protein, 8 aa, Homo sapiens
  Table A; Target 78063; HLA-B*38:01; SLC45A2; ENSG00000164175; TAA
AHNSTEFL

SEQ ID NO: 78064 - protein, 9 aa, Homo sapiens
  Table A; Target 78064; HLA-B*38:01; SLC45A2; ENSG00000164175; TAA
AHNSTEFLI

SEQ ID NO: 78065 - protein, 9 aa, Homo sapiens
  Table A; Target 78065; HLA-A*02:07; SLC45A2; ENSG00000164175; TAA
AIDWAHLEL

SEQ ID NO: 78066 - protein, 9 aa, Homo sapiens
  Table A; Target 78066; HLA-C*05:01; SLC45A2; ENSG00000164175; TAA
AIDWAHLEL

SEQ ID NO: 78067 - protein, 9 aa, Homo sapiens
  Table A; Target 78067; HLA-A*02:01; SLC45A2; ENSG00000164175; TAA
AISVTMIGV

SEQ ID NO: 78068 - protein, 9 aa, Homo sapiens
  Table A; Target 78068; HLA-A*02:03; SLC45A2; ENSG00000164175; TAA
AISVTMIGV

SEQ ID NO: 78069 - protein, 9 aa, Homo sapiens
  Table A; Target 78069; HLA-A*02:07; SLC45A2; ENSG00000164175; TAA
AISVTMIGV

SEQ ID NO: 78070 - protein, 9 aa, Homo sapiens
  Table A; Target 78070; HLA-B*13:02; SLC45A2; ENSG00000164175; TAA
AISVTMIGV

SEQ ID NO: 78071 - protein, 9 aa, Homo sapiens
  Table A; Target 78071; HLA-A*02:01; SLC45A2; ENSG00000164175; TAA
ALFTGFGGA

SEQ ID NO: 78072 - protein, 9 aa, Homo sapiens
  Table A; Target 78072; HLA-A*02:03; SLC45A2; ENSG00000164175; TAA
ALFTGFGGA

SEQ ID NO: 78073 - protein, 9 aa, Homo sapiens
  Table A; Target 78073; HLA-A*02:07; SLC45A2; ENSG00000164175; TAA
ALFTGFGGA

SEQ ID NO: 78074 - protein, 9 aa, Homo sapiens
  Table A; Target 78074; HLA-B*55:01; SLC45A2; ENSG00000164175; TAA
ALFTGFGGA

SEQ ID NO: 78075 - protein, 9 aa, Homo sapiens
  Table A; Target 78075; HLA-B*56:01; SLC45A2; ENSG00000164175; TAA
ALFTGFGGA

SEQ ID NO: 78076 - protein, 10 aa, Homo sapiens
  Table A; Target 78076; HLA-A*02:01; SLC45A2; ENSG00000164175; TAA
ALFTGFGGAL

SEQ ID NO: 78077 - protein, 10 aa, Homo sapiens
  Table A; Target 78077; HLA-A*02:03; SLC45A2; ENSG00000164175; TAA
ALFTGFGGAL

SEQ ID NO: 78078 - protein, 10 aa, Homo sapiens
  Table A; Target 78078; HLA-A*02:04; SLC45A2; ENSG00000164175; TAA
ALFTGFGGAL

SEQ ID NO: 78079 - protein, 10 aa, Homo sapiens
  Table A; Target 78079; HLA-A*02:07; SLC45A2; ENSG00000164175; TAA
ALFTGFGGAL

SEQ ID NO: 78080 - protein, 10 aa, Homo sapiens
  Table A; Target 78080; HLA-A*03:01; SLC45A2; ENSG00000164175; TAA
ALFTGFGGAL

SEQ ID NO: 78081 - protein, 10 aa, Homo sapiens
  Table A; Target 78081; HLA-B*27:05; SLC45A2; ENSG00000164175; TAA
ALFTGFGGAL

SEQ ID NO: 78082 - protein, 10 aa, Homo sapiens
  Table A; Target 78082; HLA-B*46:01; SLC45A2; ENSG00000164175; TAA
ALFTGFGGAL

SEQ ID NO: 78083 - protein, 10 aa, Homo sapiens
  Table A; Target 78083; HLA-C*01:02; SLC45A2; ENSG00000164175; TAA
ALFTGFGGAL

SEQ ID NO: 78084 - protein, 9 aa, Homo sapiens
  Table A; Target 78084; HLA-A*03:01; SLC45A2; ENSG00000164175; TAA
ALIANPRRK

SEQ ID NO: 78085 - protein, 9 aa, Homo sapiens
  Table A; Target 78085; HLA-A*03:02; SLC45A2; ENSG00000164175; TAA
ALIANPRRK

SEQ ID NO: 78086 - protein, 9 aa, Homo sapiens
  Table A; Target 78086; HLA-A*01:01; SLC45A2; ENSG00000164175; TAA
ALVNMPPHY

SEQ ID NO: 78087 - protein, 9 aa, Homo sapiens
  Table A; Target 78087; HLA-A*03:01; SLC45A2; ENSG00000164175; TAA
ALVNMPPHY

SEQ ID NO: 78088 - protein, 9 aa, Homo sapiens
  Table A; Target 78088; HLA-A*23:01; SLC45A2; ENSG00000164175; TAA
ALVNMPPHY

SEQ ID NO: 78089 - protein, 9 aa, Homo sapiens
  Table A; Target 78089; HLA-A*26:01; SLC45A2; ENSG00000164175; TAA
ALVNMPPHY

SEQ ID NO: 78090 - protein, 9 aa, Homo sapiens
  Table A; Target 78090; HLA-A*29:02; SLC45A2; ENSG00000164175; TAA
ALVNMPPHY

SEQ ID NO: 78091 - protein, 9 aa, Homo sapiens
  Table A; Target 78091; HLA-A*30:02; SLC45A2; ENSG00000164175; TAA
ALVNMPPHY

SEQ ID NO: 78092 - protein, 9 aa, Homo sapiens
  Table A; Target 78092; HLA-A*32:01; SLC45A2; ENSG00000164175; TAA
ALVNMPPHY

SEQ ID NO: 78093 - protein, 9 aa, Homo sapiens
  Table A; Target 78093; HLA-B*15:01; SLC45A2; ENSG00000164175; TAA
ALVNMPPHY

SEQ ID NO: 78094 - protein, 9 aa, Homo sapiens
  Table A; Target 78094; HLA-B*15:03; SLC45A2; ENSG00000164175; TAA
ALVNMPPHY

SEQ ID NO: 78095 - protein, 9 aa, Homo sapiens
  Table A; Target 78095; HLA-B*44:03; SLC45A2; ENSG00000164175; TAA
ALVNMPPHY

SEQ ID NO: 78096 - protein, 9 aa, Homo sapiens
  Table A; Target 78096; HLA-B*46:01; SLC45A2; ENSG00000164175; TAA
ALVNMPPHY

SEQ ID NO: 78097 - protein, 9 aa, Homo sapiens
  Table A; Target 78097; HLA-B*58:01; SLC45A2; ENSG00000164175; TAA
ALVNMPPHY

SEQ ID NO: 78098 - protein, 9 aa, Homo sapiens
  Table A; Target 78098; HLA-C*02:02; SLC45A2; ENSG00000164175; TAA
ALVNMPPHY

SEQ ID NO: 78099 - protein, 9 aa, Homo sapiens
  Table A; Target 78099; HLA-C*12:03; SLC45A2; ENSG00000164175; TAA
ALVNMPPHY

SEQ ID NO: 78100 - protein, 9 aa, Homo sapiens
  Table A; Target 78100; HLA-C*16:01; SLC45A2; ENSG00000164175; TAA
ALVNMPPHY

SEQ ID NO: 78101 - protein, 9 aa, Homo sapiens
  Table A; Target 78101; HLA-C*16:02; SLC45A2; ENSG00000164175; TAA
ALVNMPPHY

SEQ ID NO: 78102 - protein, 9 aa, Homo sapiens
  Table A; Target 78102; HLA-C*16:04; SLC45A2; ENSG00000164175; TAA
ALVNMPPHY

SEQ ID NO: 78103 - protein, 10 aa, Homo sapiens
  Table A; Target 78103; HLA-A*03:01; SLC45A2; ENSG00000164175; TAA
ALVNMPPHYR

SEQ ID NO: 78104 - protein, 10 aa, Homo sapiens
  Table A; Target 78104; HLA-A*31:01; SLC45A2; ENSG00000164175; TAA
ALVNMPPHYR

SEQ ID NO: 78105 - protein, 11 aa, Homo sapiens
  Table A; Target 78105; HLA-A*29:02; SLC45A2; ENSG00000164175; TAA
ALVNMPPHYRY

SEQ ID NO: 78106 - protein, 9 aa, Homo sapiens
  Table A; Target 78106; HLA-A*02:01; SLC45A2; ENSG00000164175; TAA
ALYLNGATV

SEQ ID NO: 78107 - protein, 9 aa, Homo sapiens
  Table A; Target 78107; HLA-A*02:03; SLC45A2; ENSG00000164175; TAA
ALYLNGATV

SEQ ID NO: 78108 - protein, 9 aa, Homo sapiens
  Table A; Target 78108; HLA-A*02:04; SLC45A2; ENSG00000164175; TAA
ALYLNGATV

SEQ ID NO: 78109 - protein, 9 aa, Homo sapiens
  Table A; Target 78109; HLA-A*02:07; SLC45A2; ENSG00000164175; TAA
ALYLNGATV

SEQ ID NO: 78110 - protein, 9 aa, Homo sapiens
  Table A; Target 78110; HLA-A*30:01; SLC45A2; ENSG00000164175; TAA
ALYLNGATV

SEQ ID NO: 78111 - protein, 9 aa, Homo sapiens
  Table A; Target 78111; HLA-B*13:02; SLC45A2; ENSG00000164175; TAA
ALYLNGATV

SEQ ID NO: 78112 - protein, 9 aa, Homo sapiens
  Table A; Target 78112; HLA-B*37:01; SLC45A2; ENSG00000164175; TAA
ALYLNGATV

SEQ ID NO: 78113 - protein, 9 aa, Homo sapiens
  Table A; Target 78113; HLA-B*40:02; SLC45A2; ENSG00000164175; TAA
ALYLNGATV

SEQ ID NO: 78114 - protein, 9 aa, Homo sapiens
  Table A; Target 78114; HLA-B*46:01; SLC45A2; ENSG00000164175; TAA
ALYLNGATV

SEQ ID NO: 78115 - protein, 9 aa, Homo sapiens
  Table A; Target 78115; HLA-B*49:01; SLC45A2; ENSG00000164175; TAA
ALYLNGATV

SEQ ID NO: 78116 - protein, 9 aa, Homo sapiens
  Table A; Target 78116; HLA-B*51:01; SLC45A2; ENSG00000164175; TAA
ALYLNGATV

SEQ ID NO: 78117 - protein, 9 aa, Homo sapiens
  Table A; Target 78117; HLA-B*55:01; SLC45A2; ENSG00000164175; TAA
ALYLNGATV

SEQ ID NO: 78118 - protein, 9 aa, Homo sapiens
  Table A; Target 78118; HLA-B*56:01; SLC45A2; ENSG00000164175; TAA
ALYLNGATV

SEQ ID NO: 78119 - protein, 9 aa, Homo sapiens
  Table A; Target 78119; HLA-C*01:02; SLC45A2; ENSG00000164175; TAA
ALYLNGATV

SEQ ID NO: 78120 - protein, 9 aa, Homo sapiens
  Table A; Target 78120; HLA-C*02:02; SLC45A2; ENSG00000164175; TAA
ALYLNGATV

SEQ ID NO: 78121 - protein, 9 aa, Homo sapiens
  Table A; Target 78121; HLA-C*03:03; SLC45A2; ENSG00000164175; TAA
ALYLNGATV

SEQ ID NO: 78122 - protein, 9 aa, Homo sapiens
  Table A; Target 78122; HLA-C*07:02; SLC45A2; ENSG00000164175; TAA
ALYLNGATV

SEQ ID NO: 78123 - protein, 9 aa, Homo sapiens
  Table A; Target 78123; HLA-C*14:02; SLC45A2; ENSG00000164175; TAA
ALYLNGATV

SEQ ID NO: 78124 - protein, 9 aa, Homo sapiens
  Table A; Target 78124; HLA-C*16:02; SLC45A2; ENSG00000164175; TAA
ALYLNGATV

SEQ ID NO: 78125 - protein, 10 aa, Homo sapiens
  Table A; Target 78125; HLA-A*02:01; SLC45A2; ENSG00000164175; TAA
ALYLNGATVV

SEQ ID NO: 78126 - protein, 10 aa, Homo sapiens
  Table A; Target 78126; HLA-A*02:03; SLC45A2; ENSG00000164175; TAA
ALYLNGATVV

SEQ ID NO: 78127 - protein, 10 aa, Homo sapiens
  Table A; Target 78127; HLA-A*02:04; SLC45A2; ENSG00000164175; TAA
ALYLNGATVV

SEQ ID NO: 78128 - protein, 10 aa, Homo sapiens
  Table A; Target 78128; HLA-A*30:01; SLC45A2; ENSG00000164175; TAA
ALYLNGATVV

SEQ ID NO: 78129 - protein, 10 aa, Homo sapiens
  Table A; Target 78129; HLA-B*13:02; SLC45A2; ENSG00000164175; TAA
ALYLNGATVV

SEQ ID NO: 78130 - protein, 10 aa, Homo sapiens
  Table A; Target 78130; HLA-B*40:02; SLC45A2; ENSG00000164175; TAA
ALYLNGATVV

SEQ ID NO: 78131 - protein, 10 aa, Homo sapiens
  Table A; Target 78131; HLA-B*49:01; SLC45A2; ENSG00000164175; TAA
ALYLNGATVV

SEQ ID NO: 78132 - protein, 10 aa, Homo sapiens
  Table A; Target 78132; HLA-B*55:01; SLC45A2; ENSG00000164175; TAA
ALYLNGATVV

SEQ ID NO: 78133 - protein, 11 aa, Homo sapiens
  Table A; Target 78133; HLA-B*56:01; SLC45A2; ENSG00000164175; TAA
ALYLNGATVVA

SEQ ID NO: 78134 - protein, 9 aa, Homo sapiens
  Table A; Target 78134; HLA-A*29:02; SLC45A2; ENSG00000164175; TAA
AMFGREFCY

SEQ ID NO: 78135 - protein, 9 aa, Homo sapiens
  Table A; Target 78135; HLA-A*30:02; SLC45A2; ENSG00000164175; TAA
AMFGREFCY

SEQ ID NO: 78136 - protein, 9 aa, Homo sapiens
  Table A; Target 78136; HLA-B*15:01; SLC45A2; ENSG00000164175; TAA
AMFGREFCY

SEQ ID NO: 78137 - protein, 10 aa, Homo sapiens
  Table A; Target 78137; HLA-A*02:01; SLC45A2; ENSG00000164175; TAA
AMFGREFCYA

SEQ ID NO: 78138 - protein, 10 aa, Homo sapiens
  Table A; Target 78138; HLA-A*02:03; SLC45A2; ENSG00000164175; TAA
AMFGREFCYA

SEQ ID NO: 78139 - protein, 8 aa, Homo sapiens
  Table A; Target 78139; HLA-A*03:02; SLC45A2; ENSG00000164175; TAA
AMQGAKNK

SEQ ID NO: 78140 - protein, 8 aa, Homo sapiens
  Table A; Target 78140; HLA-B*08:01; SLC45A2; ENSG00000164175; TAA
AMTLKSLL

SEQ ID NO: 78141 - protein, 8 aa, Homo sapiens
  Table A; Target 78141; HLA-B*37:01; SLC45A2; ENSG00000164175; TAA
AMTLKSLL

SEQ ID NO: 78142 - protein, 8 aa, Homo sapiens
  Table A; Target 78142; HLA-C*16:01; SLC45A2; ENSG00000164175; TAA
AMTLKSLL

SEQ ID NO: 78143 - protein, 9 aa, Homo sapiens
  Table A; Target 78143; HLA-A*03:01; SLC45A2; ENSG00000164175; TAA
AMTLKSLLR

SEQ ID NO: 78144 - protein, 9 aa, Homo sapiens
  Table A; Target 78144; HLA-A*31:01; SLC45A2; ENSG00000164175; TAA
AMTLKSLLR

SEQ ID NO: 78145 - protein, 10 aa, Homo sapiens
  Table A; Target 78145; HLA-B*35:03; SLC45A2; ENSG00000164175; TAA
APGGDPDNSV

SEQ ID NO: 78146 - protein, 10 aa, Homo sapiens
  Table A; Target 78146; HLA-B*55:01; SLC45A2; ENSG00000164175; TAA
APGGDPDNSV

SEQ ID NO: 78147 - protein, 10 aa, Homo sapiens
  Table A; Target 78147; HLA-B*56:01; SLC45A2; ENSG00000164175; TAA
APGGDPDNSV

SEQ ID NO: 78148 - protein, 10 aa, Homo sapiens
  Table A; Target 78148; HLA-C*07:02; SLC45A2; ENSG00000164175; TAA
APGGDPDNSV

SEQ ID NO: 78149 - protein, 9 aa, Homo sapiens
  Table A; Target 78149; HLA-A*30:01; SLC45A2; ENSG00000164175; TAA
AQILVGGGL

SEQ ID NO: 78150 - protein, 9 aa, Homo sapiens
  Table A; Target 78150; HLA-B*13:02; SLC45A2; ENSG00000164175; TAA
AQILVGGGL

SEQ ID NO: 78151 - protein, 9 aa, Homo sapiens
  Table A; Target 78151; HLA-B*15:01; SLC45A2; ENSG00000164175; TAA
AQILVGGGL

SEQ ID NO: 78152 - protein, 9 aa, Homo sapiens
  Table A; Target 78152; HLA-B*15:03; SLC45A2; ENSG00000164175; TAA
AQILVGGGL

SEQ ID NO: 78153 - protein, 9 aa, Homo sapiens
  Table A; Target 78153; HLA-B*27:02; SLC45A2; ENSG00000164175; TAA
AQILVGGGL

SEQ ID NO: 78154 - protein, 9 aa, Homo sapiens
  Table A; Target 78154; HLA-B*27:05; SLC45A2; ENSG00000164175; TAA
AQILVGGGL

SEQ ID NO: 78155 - protein, 9 aa, Homo sapiens
  Table A; Target 78155; HLA-B*37:01; SLC45A2; ENSG00000164175; TAA
AQILVGGGL

SEQ ID NO: 78156 - protein, 9 aa, Homo sapiens
  Table A; Target 78156; HLA-B*38:01; SLC45A2; ENSG00000164175; TAA
AQILVGGGL

SEQ ID NO: 78157 - protein, 9 aa, Homo sapiens
  Table A; Target 78157; HLA-B*39:01; SLC45A2; ENSG00000164175; TAA
AQILVGGGL

SEQ ID NO: 78158 - protein, 9 aa, Homo sapiens
  Table A; Target 78158; HLA-B*40:01; SLC45A2; ENSG00000164175; TAA
AQILVGGGL

SEQ ID NO: 78159 - protein, 9 aa, Homo sapiens
  Table A; Target 78159; HLA-B*40:02; SLC45A2; ENSG00000164175; TAA
AQILVGGGL

SEQ ID NO: 78160 - protein, 9 aa, Homo sapiens
  Table A; Target 78160; HLA-B*44:02; SLC45A2; ENSG00000164175; TAA
AQILVGGGL

SEQ ID NO: 78161 - protein, 9 aa, Homo sapiens
  Table A; Target 78161; HLA-B*44:03; SLC45A2; ENSG00000164175; TAA
AQILVGGGL

SEQ ID NO: 78162 - protein, 9 aa, Homo sapiens
  Table A; Target 78162; HLA-C*03:03; SLC45A2; ENSG00000164175; TAA
AQILVGGGL

SEQ ID NO: 78163 - protein, 9 aa, Homo sapiens
  Table A; Target 78163; HLA-C*03:04; SLC45A2; ENSG00000164175; TAA
AQILVGGGL

SEQ ID NO: 78164 - protein, 9 aa, Homo sapiens
  Table A; Target 78164; HLA-C*16:04; SLC45A2; ENSG00000164175; TAA
AQILVGGGL

SEQ ID NO: 78165 - protein, 11 aa, Homo sapiens
  Table A; Target 78165; HLA-A*23:01; SLC45A2; ENSG00000164175; TAA
AQILVGGGLGF

SEQ ID NO: 78166 - protein, 11 aa, Homo sapiens
  Table A; Target 78166; HLA-A*24:02; SLC45A2; ENSG00000164175; TAA
AQILVGGGLGF

SEQ ID NO: 78167 - protein, 11 aa, Homo sapiens
  Table A; Target 78167; HLA-A*26:01; SLC45A2; ENSG00000164175; TAA
AQILVGGGLGF

SEQ ID NO: 78168 - protein, 11 aa, Homo sapiens
  Table A; Target 78168; HLA-A*32:01; SLC45A2; ENSG00000164175; TAA
AQILVGGGLGF

SEQ ID NO: 78169 - protein, 11 aa, Homo sapiens
  Table A; Target 78169; HLA-B*13:02; SLC45A2; ENSG00000164175; TAA
AQILVGGGLGF

SEQ ID NO: 78170 - protein, 11 aa, Homo sapiens
  Table A; Target 78170; HLA-B*15:01; SLC45A2; ENSG00000164175; TAA
AQILVGGGLGF

SEQ ID NO: 78171 - protein, 11 aa, Homo sapiens
  Table A; Target 78171; HLA-B*15:03; SLC45A2; ENSG00000164175; TAA
AQILVGGGLGF

SEQ ID NO: 78172 - protein, 11 aa, Homo sapiens
  Table A; Target 78172; HLA-B*27:02; SLC45A2; ENSG00000164175; TAA
AQILVGGGLGF

SEQ ID NO: 78173 - protein, 11 aa, Homo sapiens
  Table A; Target 78173; HLA-B*27:05; SLC45A2; ENSG00000164175; TAA
AQILVGGGLGF

SEQ ID NO: 78174 - protein, 11 aa, Homo sapiens
  Table A; Target 78174; HLA-B*38:01; SLC45A2; ENSG00000164175; TAA
AQILVGGGLGF

SEQ ID NO: 78175 - protein, 11 aa, Homo sapiens
  Table A; Target 78175; HLA-B*39:01; SLC45A2; ENSG00000164175; TAA
AQILVGGGLGF

SEQ ID NO: 78176 - protein, 11 aa, Homo sapiens
  Table A; Target 78176; HLA-B*44:02; SLC45A2; ENSG00000164175; TAA
AQILVGGGLGF

SEQ ID NO: 78177 - protein, 11 aa, Homo sapiens
  Table A; Target 78177; HLA-B*44:03; SLC45A2; ENSG00000164175; TAA
AQILVGGGLGF

SEQ ID NO: 78178 - protein, 11 aa, Homo sapiens
  Table A; Target 78178; HLA-B*58:01; SLC45A2; ENSG00000164175; TAA
AQILVGGGLGF

SEQ ID NO: 78179 - protein, 11 aa, Homo sapiens
  Table A; Target 78179; HLA-C*04:01; SLC45A2; ENSG00000164175; TAA
AQILVGGGLGF

SEQ ID NO: 78180 - protein, 11 aa, Homo sapiens
  Table A; Target 78180; HLA-C*07:04; SLC45A2; ENSG00000164175; TAA
AQILVGGGLGF

SEQ ID NO: 78181 - protein, 11 aa, Homo sapiens
  Table A; Target 78181; HLA-C*16:04; SLC45A2; ENSG00000164175; TAA
AQILVGGGLGF

SEQ ID NO: 78182 - protein, 9 aa, Homo sapiens
  Table A; Target 78182; HLA-A*11:01; SLC45A2; ENSG00000164175; TAA
ATLTCMVQL

SEQ ID NO: 78183 - protein, 9 aa, Homo sapiens
  Table A; Target 78183; HLA-A*23:01; SLC45A2; ENSG00000164175; TAA
ATLTCMVQL

SEQ ID NO: 78184 - protein, 8 aa, Homo sapiens
  Table A; Target 78184; HLA-A*23:01; SLC45A2; ENSG00000164175; TAA
ATVVAALI

SEQ ID NO: 78185 - protein, 8 aa, Homo sapiens
  Table A; Target 78185; HLA-C*04:01; SLC45A2; ENSG00000164175; TAA
ATVVAALI

SEQ ID NO: 78186 - protein, 9 aa, Homo sapiens
  Table A; Target 78186; HLA-A*30:02; SLC45A2; ENSG00000164175; TAA
AVALIGCCF

SEQ ID NO: 78187 - protein, 9 aa, Homo sapiens
  Table A; Target 78187; HLA-B*15:01; SLC45A2; ENSG00000164175; TAA
AVALIGCCF

SEQ ID NO: 78188 - protein, 8 aa, Homo sapiens
  Table A; Target 78188; HLA-A*23:01; SLC45A2; ENSG00000164175; TAA
AYVTPVLL

SEQ ID NO: 78189 - protein, 8 aa, Homo sapiens
  Table A; Target 78189; HLA-A*24:02; SLC45A2; ENSG00000164175; TAA
AYVTPVLL

SEQ ID NO: 78190 - protein, 8 aa, Homo sapiens
  Table A; Target 78190; HLA-C*04:01; SLC45A2; ENSG00000164175; TAA
AYVTPVLL

SEQ ID NO: 78191 - protein, 8 aa, Homo sapiens
  Table A; Target 78191; HLA-C*07:04; SLC45A2; ENSG00000164175; TAA
AYVTPVLL

SEQ ID NO: 78192 - protein, 8 aa, Homo sapiens
  Table A; Target 78192; HLA-C*14:02; SLC45A2; ENSG00000164175; TAA
AYVTPVLL

SEQ ID NO: 78193 - protein, 10 aa, Homo sapiens
  Table A; Target 78193; HLA-A*23:01; SLC45A2; ENSG00000164175; TAA
AYVTPVLLSV

SEQ ID NO: 78194 - protein, 10 aa, Homo sapiens
  Table A; Target 78194; HLA-A*24:02; SLC45A2; ENSG00000164175; TAA
AYVTPVLLSV

SEQ ID NO: 78195 - protein, 10 aa, Homo sapiens
  Table A; Target 78195; HLA-A*29:02; SLC45A2; ENSG00000164175; TAA
AYVTPVLLSV

SEQ ID NO: 78196 - protein, 9 aa, Homo sapiens
  Table A; Target 78196; HLA-A*29:02; SLC45A2; ENSG00000164175; TAA
CFVALFVRY

SEQ ID NO: 78197 - protein, 9 aa, Homo sapiens
  Table A; Target 78197; HLA-A*03:01; SLC45A2; ENSG00000164175; TAA
CINSVFSSL

SEQ ID NO: 78198 - protein, 9 aa, Homo sapiens
  Table A; Target 78198; HLA-A*25:01; SLC45A2; ENSG00000164175; TAA
CINSVFSSL

SEQ ID NO: 78199 - protein, 9 aa, Homo sapiens
  Table A; Target 78199; HLA-A*31:01; SLC45A2; ENSG00000164175; TAA
CINSVFSSL

SEQ ID NO: 78200 - protein, 9 aa, Homo sapiens
  Table A; Target 78200; HLA-A*32:01; SLC45A2; ENSG00000164175; TAA
CINSVFSSL

SEQ ID NO: 78201 - protein, 9 aa, Homo sapiens
  Table A; Target 78201; HLA-B*07:02; SLC45A2; ENSG00000164175; TAA
CINSVFSSL

SEQ ID NO: 78202 - protein, 9 aa, Homo sapiens
  Table A; Target 78202; HLA-B*15:01; SLC45A2; ENSG00000164175; TAA
CINSVFSSL

SEQ ID NO: 78203 - protein, 9 aa, Homo sapiens
  Table A; Target 78203; HLA-B*15:03; SLC45A2; ENSG00000164175; TAA
CINSVFSSL

SEQ ID NO: 78204 - protein, 9 aa, Homo sapiens
  Table A; Target 78204; HLA-B*46:01; SLC45A2; ENSG00000164175; TAA
CINSVFSSL

SEQ ID NO: 78205 - protein, 9 aa, Homo sapiens
  Table A; Target 78205; HLA-C*01:02; SLC45A2; ENSG00000164175; TAA
CINSVFSSL

SEQ ID NO: 78206 - protein, 9 aa, Homo sapiens
  Table A; Target 78206; HLA-C*02:02; SLC45A2; ENSG00000164175; TAA
CINSVFSSL

SEQ ID NO: 78207 - protein, 9 aa, Homo sapiens
  Table A; Target 78207; HLA-C*03:03; SLC45A2; ENSG00000164175; TAA
CINSVFSSL

SEQ ID NO: 78208 - protein, 9 aa, Homo sapiens
  Table A; Target 78208; HLA-C*03:04; SLC45A2; ENSG00000164175; TAA
CINSVFSSL

SEQ ID NO: 78209 - protein, 9 aa, Homo sapiens
  Table A; Target 78209; HLA-C*07:02; SLC45A2; ENSG00000164175; TAA
CINSVFSSL

SEQ ID NO: 78210 - protein, 9 aa, Homo sapiens
  Table A; Target 78210; HLA-C*14:02; SLC45A2; ENSG00000164175; TAA
CINSVFSSL

SEQ ID NO: 78211 - protein, 9 aa, Homo sapiens
  Table A; Target 78211; HLA-C*16:04; SLC45A2; ENSG00000164175; TAA
CINSVFSSL

SEQ ID NO: 78212 - protein, 10 aa, Homo sapiens
  Table A; Target 78212; HLA-A*30:02; SLC45A2; ENSG00000164175; TAA
CINSVFSSLY

SEQ ID NO: 78213 - protein, 8 aa, Homo sapiens
  Table A; Target 78213; HLA-C*14:02; SLC45A2; ENSG00000164175; TAA
CYAVEAAY

SEQ ID NO: 78214 - protein, 9 aa, Homo sapiens
  Table A; Target 78214; HLA-B*51:01; SLC45A2; ENSG00000164175; TAA
DCATLTCMV

SEQ ID NO: 78215 - protein, 8 aa, Homo sapiens
  Table A; Target 78215; HLA-B*18:01; SLC45A2; ENSG00000164175; TAA
DDGPFDSV

SEQ ID NO: 78216 - protein, 10 aa, Homo sapiens
  Table A; Target 78216; HLA-A*23:01; SLC45A2; ENSG00000164175; TAA
DFIDGPIKAY

SEQ ID NO: 78217 - protein, 10 aa, Homo sapiens
  Table A; Target 78217; HLA-A*25:01; SLC45A2; ENSG00000164175; TAA
DFIDGPIKAY

SEQ ID NO: 78218 - protein, 10 aa, Homo sapiens
  Table A; Target 78218; HLA-A*26:01; SLC45A2; ENSG00000164175; TAA
DFIDGPIKAY

SEQ ID NO: 78219 - protein, 10 aa, Homo sapiens
  Table A; Target 78219; HLA-A*29:02; SLC45A2; ENSG00000164175; TAA
DFIDGPIKAY

SEQ ID NO: 78220 - protein, 10 aa, Homo sapiens
  Table A; Target 78220; HLA-A*30:02; SLC45A2; ENSG00000164175; TAA
DFIDGPIKAY

SEQ ID NO: 78221 - protein, 10 aa, Homo sapiens
  Table A; Target 78221; HLA-A*33:01; SLC45A2; ENSG00000164175; TAA
DFIDGPIKAY

SEQ ID NO: 78222 - protein, 10 aa, Homo sapiens
  Table A; Target 78222; HLA-A*33:03; SLC45A2; ENSG00000164175; TAA
DFIDGPIKAY

SEQ ID NO: 78223 - protein, 10 aa, Homo sapiens
  Table A; Target 78223; HLA-B*18:01; SLC45A2; ENSG00000164175; TAA
DFIDGPIKAY

SEQ ID NO: 78224 - protein, 10 aa, Homo sapiens
  Table A; Target 78224; HLA-B*35:01; SLC45A2; ENSG00000164175; TAA
DFIDGPIKAY

SEQ ID NO: 78225 - protein, 10 aa, Homo sapiens
  Table A; Target 78225; HLA-B*44:02; SLC45A2; ENSG00000164175; TAA
DFIDGPIKAY

SEQ ID NO: 78226 - protein, 10 aa, Homo sapiens
  Table A; Target 78226; HLA-B*44:03; SLC45A2; ENSG00000164175; TAA
DFIDGPIKAY

SEQ ID NO: 78227 - protein, 10 aa, Homo sapiens
  Table A; Target 78227; HLA-C*14:02; SLC45A2; ENSG00000164175; TAA
DFIDGPIKAY

SEQ ID NO: 78228 - protein, 11 aa, Homo sapiens
  Table A; Target 78228; HLA-A*23:01; SLC45A2; ENSG00000164175; TAA
DFIDGPIKAYL

SEQ ID NO: 78229 - protein, 8 aa, Homo sapiens
  Table A; Target 78229; HLA-B*15:03; SLC45A2; ENSG00000164175; TAA
DFMGQIVY

SEQ ID NO: 78230 - protein, 8 aa, Homo sapiens
  Table A; Target 78230; HLA-B*18:01; SLC45A2; ENSG00000164175; TAA
DFMGQIVY

SEQ ID NO: 78231 - protein, 8 aa, Homo sapiens
  Table A; Target 78231; HLA-B*35:01; SLC45A2; ENSG00000164175; TAA
DFMGQIVY

SEQ ID NO: 78232 - protein, 8 aa, Homo sapiens
  Table A; Target 78232; HLA-C*07:01; SLC45A2; ENSG00000164175; TAA
DFMGQIVY

SEQ ID NO: 78233 - protein, 9 aa, Homo sapiens
  Table A; Target 78233; HLA-A*31:01; SLC45A2; ENSG00000164175; TAA
DFMGQIVYR

SEQ ID NO: 78234 - protein, 9 aa, Homo sapiens
  Table A; Target 78234; HLA-A*33:01; SLC45A2; ENSG00000164175; TAA
DFMGQIVYR

SEQ ID NO: 78235 - protein, 9 aa, Homo sapiens
  Table A; Target 78235; HLA-A*33:03; SLC45A2; ENSG00000164175; TAA
DFMGQIVYR

SEQ ID NO: 78236 - protein, 9 aa, Homo sapiens
  Table A; Target 78236; HLA-A*68:01; SLC45A2; ENSG00000164175; TAA
DFMGQIVYR

SEQ ID NO: 78237 - protein, 9 aa, Homo sapiens
  Table A; Target 78237; HLA-C*07:06; SLC45A2; ENSG00000164175; TAA
DFMGQIVYR

SEQ ID NO: 78238 - protein, 9 aa, Homo sapiens
  Table A; Target 78238; HLA-B*51:01; SLC45A2; ENSG00000164175; TAA
DGMYEYGSI

SEQ ID NO: 78239 - protein, 11 aa, Homo sapiens
  Table A; Target 78239; HLA-A*11:01; SLC45A2; ENSG00000164175; TAA
DGMYEYGSIEK

SEQ ID NO: 78240 - protein, 11 aa, Homo sapiens
  Table A; Target 78240; HLA-B*27:02; SLC45A2; ENSG00000164175; TAA
DGMYEYGSIEK

SEQ ID NO: 78241 - protein, 11 aa, Homo sapiens
  Table A; Target 78241; HLA-A*11:01; SLC45A2; ENSG00000164175; TAA
DGPFDSVEPPK

SEQ ID NO: 78242 - protein, 11 aa, Homo sapiens
  Table A; Target 78242; HLA-A*33:01; SLC45A2; ENSG00000164175; TAA
DGPFDSVEPPK

SEQ ID NO: 78243 - protein, 11 aa, Homo sapiens
  Table A; Target 78243; HLA-A*68:01; SLC45A2; ENSG00000164175; TAA
DGPFDSVEPPK

SEQ ID NO: 78244 - protein, 11 aa, Homo sapiens
  Table A; Target 78244; HLA-B*27:02; SLC45A2; ENSG00000164175; TAA
DGPFDSVEPPK

SEQ ID NO: 78245 - protein, 8 aa, Homo sapiens
  Table A; Target 78245; HLA-B*08:01; SLC45A2; ENSG00000164175; TAA
DGPIKAYL

SEQ ID NO: 78246 - protein, 8 aa, Homo sapiens
  Table A; Target 78246; HLA-B*51:01; SLC45A2; ENSG00000164175; TAA
DGPIKAYL

SEQ ID NO: 78247 - protein, 9 aa, Homo sapiens
  Table A; Target 78247; HLA-B*08:01; SLC45A2; ENSG00000164175; TAA
DGPIKAYLF

SEQ ID NO: 78248 - protein, 8 aa, Homo sapiens
  Table A; Target 78248; HLA-B*51:01; SLC45A2; ENSG00000164175; TAA
DPYSAHNS

SEQ ID NO: 78249 - protein, 9 aa, Homo sapiens
  Table A; Target 78249; HLA-B*51:01; SLC45A2; ENSG00000164175; TAA
DPYSAHNST

SEQ ID NO: 78250 - protein, 11 aa, Homo sapiens
  Table A; Target 78250; HLA-A*25:01; SLC45A2; ENSG00000164175; TAA
DPYSAHNSTEF

SEQ ID NO: 78251 - protein, 11 aa, Homo sapiens
  Table A; Target 78251; HLA-A*26:01; SLC45A2; ENSG00000164175; TAA
DPYSAHNSTEF

SEQ ID NO: 78252 - protein, 11 aa, Homo sapiens
  Table A; Target 78252; HLA-B*07:02; SLC45A2; ENSG00000164175; TAA
DPYSAHNSTEF

SEQ ID NO: 78253 - protein, 11 aa, Homo sapiens
  Table A; Target 78253; HLA-B*35:01; SLC45A2; ENSG00000164175; TAA
DPYSAHNSTEF

SEQ ID NO: 78254 - protein, 11 aa, Homo sapiens
  Table A; Target 78254; HLA-B*35:03; SLC45A2; ENSG00000164175; TAA
DPYSAHNSTEF

SEQ ID NO: 78255 - protein, 9 aa, Homo sapiens
  Table A; Target 78255; HLA-A*23:01; SLC45A2; ENSG00000164175; TAA
EAAYVTPVL

SEQ ID NO: 78256 - protein, 9 aa, Homo sapiens
  Table A; Target 78256; HLA-A*25:01; SLC45A2; ENSG00000164175; TAA
EAAYVTPVL

SEQ ID NO: 78257 - protein, 9 aa, Homo sapiens
  Table A; Target 78257; HLA-A*26:01; SLC45A2; ENSG00000164175; TAA
EAAYVTPVL

SEQ ID NO: 78258 - protein, 9 aa, Homo sapiens
  Table A; Target 78258; HLA-A*30:01; SLC45A2; ENSG00000164175; TAA
EAAYVTPVL

SEQ ID NO: 78259 - protein, 9 aa, Homo sapiens
  Table A; Target 78259; HLA-A*33:01; SLC45A2; ENSG00000164175; TAA
EAAYVTPVL

SEQ ID NO: 78260 - protein, 9 aa, Homo sapiens
  Table A; Target 78260; HLA-A*33:03; SLC45A2; ENSG00000164175; TAA
EAAYVTPVL

SEQ ID NO: 78261 - protein, 9 aa, Homo sapiens
  Table A; Target 78261; HLA-A*68:01; SLC45A2; ENSG00000164175; TAA
EAAYVTPVL

SEQ ID NO: 78262 - protein, 9 aa, Homo sapiens
  Table A; Target 78262; HLA-A*68:02; SLC45A2; ENSG00000164175; TAA
EAAYVTPVL

SEQ ID NO: 78263 - protein, 9 aa, Homo sapiens
  Table A; Target 78263; HLA-B*18:01; SLC45A2; ENSG00000164175; TAA
EAAYVTPVL

SEQ ID NO: 78264 - protein, 9 aa, Homo sapiens
  Table A; Target 78264; HLA-B*27:05; SLC45A2; ENSG00000164175; TAA
EAAYVTPVL

SEQ ID NO: 78265 - protein, 9 aa, Homo sapiens
  Table A; Target 78265; HLA-B*35:01; SLC45A2; ENSG00000164175; TAA
EAAYVTPVL

SEQ ID NO: 78266 - protein, 9 aa, Homo sapiens
  Table A; Target 78266; HLA-B*35:03; SLC45A2; ENSG00000164175; TAA
EAAYVTPVL

SEQ ID NO: 78267 - protein, 9 aa, Homo sapiens
  Table A; Target 78267; HLA-B*38:01; SLC45A2; ENSG00000164175; TAA
EAAYVTPVL

SEQ ID NO: 78268 - protein, 9 aa, Homo sapiens
  Table A; Target 78268; HLA-B*39:01; SLC45A2; ENSG00000164175; TAA
EAAYVTPVL

SEQ ID NO: 78269 - protein, 9 aa, Homo sapiens
  Table A; Target 78269; HLA-B*40:01; SLC45A2; ENSG00000164175; TAA
EAAYVTPVL

SEQ ID NO: 78270 - protein, 9 aa, Homo sapiens
  Table A; Target 78270; HLA-B*51:01; SLC45A2; ENSG00000164175; TAA
EAAYVTPVL

SEQ ID NO: 78271 - protein, 9 aa, Homo sapiens
  Table A; Target 78271; HLA-B*54:01; SLC45A2; ENSG00000164175; TAA
EAAYVTPVL

SEQ ID NO: 78272 - protein, 9 aa, Homo sapiens
  Table A; Target 78272; HLA-C*02:02; SLC45A2; ENSG00000164175; TAA
EAAYVTPVL

SEQ ID NO: 78273 - protein, 9 aa, Homo sapiens
  Table A; Target 78273; HLA-C*03:03; SLC45A2; ENSG00000164175; TAA
EAAYVTPVL

SEQ ID NO: 78274 - protein, 9 aa, Homo sapiens
  Table A; Target 78274; HLA-C*03:04; SLC45A2; ENSG00000164175; TAA
EAAYVTPVL

SEQ ID NO: 78275 - protein, 9 aa, Homo sapiens
  Table A; Target 78275; HLA-C*07:06; SLC45A2; ENSG00000164175; TAA
EAAYVTPVL

SEQ ID NO: 78276 - protein, 9 aa, Homo sapiens
  Table A; Target 78276; HLA-C*12:03; SLC45A2; ENSG00000164175; TAA
EAAYVTPVL

SEQ ID NO: 78277 - protein, 9 aa, Homo sapiens
  Table A; Target 78277; HLA-C*16:04; SLC45A2; ENSG00000164175; TAA
EAAYVTPVL

SEQ ID NO: 78278 - protein, 10 aa, Homo sapiens
  Table A; Target 78278; HLA-A*33:03; SLC45A2; ENSG00000164175; TAA
EAAYVTPVLL

SEQ ID NO: 78279 - protein, 10 aa, Homo sapiens
  Table A; Target 78279; HLA-A*68:01; SLC45A2; ENSG00000164175; TAA
EAAYVTPVLL

SEQ ID NO: 78280 - protein, 10 aa, Homo sapiens
  Table A; Target 78280; HLA-A*68:02; SLC45A2; ENSG00000164175; TAA
EAAYVTPVLL

SEQ ID NO: 78281 - protein, 10 aa, Homo sapiens
  Table A; Target 78281; HLA-B*35:03; SLC45A2; ENSG00000164175; TAA
EAAYVTPVLL

SEQ ID NO: 78282 - protein, 10 aa, Homo sapiens
  Table A; Target 78282; HLA-C*07:02; SLC45A2; ENSG00000164175; TAA
EAAYVTPVLL

SEQ ID NO: 78283 - protein, 10 aa, Homo sapiens
  Table A; Target 78283; HLA-C*07:06; SLC45A2; ENSG00000164175; TAA
EAAYVTPVLL

SEQ ID NO: 78284 - protein, 8 aa, Homo sapiens
  Table A; Target 78284; HLA-B*51:01; SLC45A2; ENSG00000164175; TAA
EAPLTEVA

SEQ ID NO: 78285 - protein, 9 aa, Homo sapiens
  Table A; Target 78285; HLA-A*33:03; SLC45A2; ENSG00000164175; TAA
EAPLTEVAK

SEQ ID NO: 78286 - protein, 9 aa, Homo sapiens
  Table A; Target 78286; HLA-A*68:01; SLC45A2; ENSG00000164175; TAA
EAPLTEVAK

SEQ ID NO: 78287 - protein, 9 aa, Homo sapiens
  Table A; Target 78287; HLA-C*01:02; SLC45A2; ENSG00000164175; TAA
EAPLTEVAK

SEQ ID NO: 78288 - protein, 9 aa, Homo sapiens
  Table A; Target 78288; HLA-C*07:06; SLC45A2; ENSG00000164175; TAA
EAPLTEVAK

SEQ ID NO: 78289 - protein, 9 aa, Homo sapiens
  Table A; Target 78289; HLA-A*25:01; SLC45A2; ENSG00000164175; TAA
EQTRRAMTL

SEQ ID NO: 78290 - protein, 9 aa, Homo sapiens
  Table A; Target 78290; HLA-B*08:01; SLC45A2; ENSG00000164175; TAA
EQTRRAMTL

SEQ ID NO: 78291 - protein, 9 aa, Homo sapiens
  Table A; Target 78291; HLA-A*26:01; SLC45A2; ENSG00000164175; TAA
EVAKGIPPQ

SEQ ID NO: 78292 - protein, 10 aa, Homo sapiens
  Table A; Target 78292; HLA-A*26:01; SLC45A2; ENSG00000164175; TAA
EVAKGIPPQQ

SEQ ID NO: 78293 - protein, 10 aa, Homo sapiens
  Table A; Target 78293; HLA-A*68:01; SLC45A2; ENSG00000164175; TAA
EVAKGIPPQQ

SEQ ID NO: 78294 - protein, 8 aa, Homo sapiens
  Table A; Target 78294; HLA-A*24:02; SLC45A2; ENSG00000164175; TAA
EYGSIEKV

SEQ ID NO: 78295 - protein, 8 aa, Homo sapiens
  Table A; Target 78295; HLA-C*07:01; SLC45A2; ENSG00000164175; TAA
EYGSIEKV

SEQ ID NO: 78296 - protein, 9 aa, Homo sapiens
  Table A; Target 78296; HLA-A*33:01; SLC45A2; ENSG00000164175; TAA
EYGSIEKVK

SEQ ID NO: 78297 - protein, 9 aa, Homo sapiens
  Table A; Target 78297; HLA-A*33:03; SLC45A2; ENSG00000164175; TAA
EYGSIEKVK

SEQ ID NO: 78298 - protein, 10 aa, Homo sapiens
  Table A; Target 78298; HLA-A*68:02; SLC45A2; ENSG00000164175; TAA
FAADFIDGPI

SEQ ID NO: 78299 - protein, 10 aa, Homo sapiens
  Table A; Target 78299; HLA-B*27:02; SLC45A2; ENSG00000164175; TAA
FAADFIDGPI

SEQ ID NO: 78300 - protein, 11 aa, Homo sapiens
  Table A; Target 78300; HLA-A*68:01; SLC45A2; ENSG00000164175; TAA
FAADFIDGPIK

SEQ ID NO: 78301 - protein, 11 aa, Homo sapiens
  Table A; Target 78301; HLA-B*27:02; SLC45A2; ENSG00000164175; TAA
FAADFIDGPIK

SEQ ID NO: 78302 - protein, 9 aa, Homo sapiens
  Table A; Target 78302; HLA-A*29:02; SLC45A2; ENSG00000164175; TAA
FCYAVEAAY

SEQ ID NO: 78303 - protein, 9 aa, Homo sapiens
  Table A; Target 78303; HLA-B*15:03; SLC45A2; ENSG00000164175; TAA
FCYAVEAAY

SEQ ID NO: 78304 - protein, 9 aa, Homo sapiens
  Table A; Target 78304; HLA-B*46:01; SLC45A2; ENSG00000164175; TAA
FCYAVEAAY

SEQ ID NO: 78305 - protein, 9 aa, Homo sapiens
  Table A; Target 78305; HLA-C*16:04; SLC45A2; ENSG00000164175; TAA
FCYAVEAAY

SEQ ID NO: 78306 - protein, 8 aa, Homo sapiens
  Table A; Target 78306; HLA-B*27:02; SLC45A2; ENSG00000164175; TAA
FDSVEPPK

SEQ ID NO: 78307 - protein, 10 aa, Homo sapiens
  Table A; Target 78307; HLA-A*29:02; SLC45A2; ENSG00000164175; TAA
FFFSALVLTL

SEQ ID NO: 78308 - protein, 9 aa, Homo sapiens
  Table A; Target 78308; HLA-A*23:01; SLC45A2; ENSG00000164175; TAA
FFSALVLTL

SEQ ID NO: 78309 - protein, 9 aa, Homo sapiens
  Table A; Target 78309; HLA-A*24:02; SLC45A2; ENSG00000164175; TAA
FFSALVLTL

SEQ ID NO: 78310 - protein, 9 aa, Homo sapiens
  Table A; Target 78310; HLA-A*29:02; SLC45A2; ENSG00000164175; TAA
FFSALVLTL

SEQ ID NO: 78311 - protein, 9 aa, Homo sapiens
  Table A; Target 78311; HLA-B*35:03; SLC45A2; ENSG00000164175; TAA
FFSALVLTL

SEQ ID NO: 78312 - protein, 9 aa, Homo sapiens
  Table A; Target 78312; HLA-C*01:02; SLC45A2; ENSG00000164175; TAA
FFSALVLTL

SEQ ID NO: 78313 - protein, 9 aa, Homo sapiens
  Table A; Target 78313; HLA-C*12:03; SLC45A2; ENSG00000164175; TAA
FFSALVLTL

SEQ ID NO: 78314 - protein, 9 aa, Homo sapiens
  Table A; Target 78314; HLA-C*14:02; SLC45A2; ENSG00000164175; TAA
FFSALVLTL

SEQ ID NO: 78315 - protein, 9 aa, Homo sapiens
  Table A; Target 78315; HLA-A*23:01; SLC45A2; ENSG00000164175; TAA
FFTDFMGQI

SEQ ID NO: 78316 - protein, 11 aa, Homo sapiens
  Table A; Target 78316; HLA-A*29:02; SLC45A2; ENSG00000164175; TAA
FFTDFMGQIVY

SEQ ID NO: 78317 - protein, 8 aa, Homo sapiens
  Table A; Target 78317; HLA-B*08:01; SLC45A2; ENSG00000164175; TAA
FGVMSSTL

SEQ ID NO: 78318 - protein, 8 aa, Homo sapiens
  Table A; Target 78318; HLA-B*15:03; SLC45A2; ENSG00000164175; TAA
FGVMSSTL

SEQ ID NO: 78319 - protein, 8 aa, Homo sapiens
  Table A; Target 78319; HLA-B*35:03; SLC45A2; ENSG00000164175; TAA
FGVMSSTL

SEQ ID NO: 78320 - protein, 8 aa, Homo sapiens
  Table A; Target 78320; HLA-B*40:02; SLC45A2; ENSG00000164175; TAA
FGVMSSTL

SEQ ID NO: 78321 - protein, 8 aa, Homo sapiens
  Table A; Target 78321; HLA-B*46:01; SLC45A2; ENSG00000164175; TAA
FGVMSSTL

SEQ ID NO: 78322 - protein, 8 aa, Homo sapiens
  Table A; Target 78322; HLA-C*01:02; SLC45A2; ENSG00000164175; TAA
FGVMSSTL

SEQ ID NO: 78323 - protein, 8 aa, Homo sapiens
  Table A; Target 78323; HLA-C*03:03; SLC45A2; ENSG00000164175; TAA
FGVMSSTL

SEQ ID NO: 78324 - protein, 8 aa, Homo sapiens
  Table A; Target 78324; HLA-C*03:04; SLC45A2; ENSG00000164175; TAA
FGVMSSTL

SEQ ID NO: 78325 - protein, 8 aa, Homo sapiens
  Table A; Target 78325; HLA-C*05:01; SLC45A2; ENSG00000164175; TAA
FGVMSSTL

SEQ ID NO: 78326 - protein, 8 aa, Homo sapiens
  Table A; Target 78326; HLA-C*07:02; SLC45A2; ENSG00000164175; TAA
FGVMSSTL

SEQ ID NO: 78327 - protein, 8 aa, Homo sapiens
  Table A; Target 78327; HLA-C*07:04; SLC45A2; ENSG00000164175; TAA
FGVMSSTL

SEQ ID NO: 78328 - protein, 8 aa, Homo sapiens
  Table A; Target 78328; HLA-C*12:03; SLC45A2; ENSG00000164175; TAA
FGVMSSTL

SEQ ID NO: 78329 - protein, 8 aa, Homo sapiens
  Table A; Target 78329; HLA-C*14:02; SLC45A2; ENSG00000164175; TAA
FGVMSSTL

SEQ ID NO: 78330 - protein, 8 aa, Homo sapiens
  Table A; Target 78330; HLA-C*16:01; SLC45A2; ENSG00000164175; TAA
FGVMSSTL

SEQ ID NO: 78331 - protein, 9 aa, Homo sapiens
  Table A; Target 78331; HLA-A*01:01; SLC45A2; ENSG00000164175; TAA
FGVMSSTLY

SEQ ID NO: 78332 - protein, 9 aa, Homo sapiens
  Table A; Target 78332; HLA-A*26:01; SLC45A2; ENSG00000164175; TAA
FGVMSSTLY

SEQ ID NO: 78333 - protein, 9 aa, Homo sapiens
  Table A; Target 78333; HLA-A*29:02; SLC45A2; ENSG00000164175; TAA
FGVMSSTLY

SEQ ID NO: 78334 - protein, 9 aa, Homo sapiens
  Table A; Target 78334; HLA-B*15:01; SLC45A2; ENSG00000164175; TAA
FGVMSSTLY

SEQ ID NO: 78335 - protein, 9 aa, Homo sapiens
  Table A; Target 78335; HLA-B*15:03; SLC45A2; ENSG00000164175; TAA
FGVMSSTLY

SEQ ID NO: 78336 - protein, 9 aa, Homo sapiens
  Table A; Target 78336; HLA-B*35:01; SLC45A2; ENSG00000164175; TAA
FGVMSSTLY

SEQ ID NO: 78337 - protein, 9 aa, Homo sapiens
  Table A; Target 78337; HLA-B*46:01; SLC45A2; ENSG00000164175; TAA
FGVMSSTLY

SEQ ID NO: 78338 - protein, 9 aa, Homo sapiens
  Table A; Target 78338; HLA-C*02:02; SLC45A2; ENSG00000164175; TAA
FGVMSSTLY

SEQ ID NO: 78339 - protein, 9 aa, Homo sapiens
  Table A; Target 78339; HLA-C*04:01; SLC45A2; ENSG00000164175; TAA
FGVMSSTLY

SEQ ID NO: 78340 - protein, 9 aa, Homo sapiens
  Table A; Target 78340; HLA-C*07:01; SLC45A2; ENSG00000164175; TAA
FGVMSSTLY

SEQ ID NO: 78341 - protein, 9 aa, Homo sapiens
  Table A; Target 78341; HLA-C*07:04; SLC45A2; ENSG00000164175; TAA
FGVMSSTLY

SEQ ID NO: 78342 - protein, 9 aa, Homo sapiens
  Table A; Target 78342; HLA-C*12:03; SLC45A2; ENSG00000164175; TAA
FGVMSSTLY

SEQ ID NO: 78343 - protein, 9 aa, Homo sapiens
  Table A; Target 78343; HLA-C*14:02; SLC45A2; ENSG00000164175; TAA
FGVMSSTLY

SEQ ID NO: 78344 - protein, 8 aa, Homo sapiens
  Table A; Target 78344; HLA-C*05:01; SLC45A2; ENSG00000164175; TAA
FIDGPIKA

SEQ ID NO: 78345 - protein, 9 aa, Homo sapiens
  Table A; Target 78345; HLA-A*01:01; SLC45A2; ENSG00000164175; TAA
FIDGPIKAY

SEQ ID NO: 78346 - protein, 9 aa, Homo sapiens
  Table A; Target 78346; HLA-A*02:07; SLC45A2; ENSG00000164175; TAA
FIDGPIKAY

SEQ ID NO: 78347 - protein, 9 aa, Homo sapiens
  Table A; Target 78347; HLA-A*03:01; SLC45A2; ENSG00000164175; TAA
FIDGPIKAY

SEQ ID NO: 78348 - protein, 9 aa, Homo sapiens
  Table A; Target 78348; HLA-A*03:02; SLC45A2; ENSG00000164175; TAA
FIDGPIKAY

SEQ ID NO: 78349 - protein, 9 aa, Homo sapiens
  Table A; Target 78349; HLA-A*11:01; SLC45A2; ENSG00000164175; TAA
FIDGPIKAY

SEQ ID NO: 78350 - protein, 9 aa, Homo sapiens
  Table A; Target 78350; HLA-A*25:01; SLC45A2; ENSG00000164175; TAA
FIDGPIKAY

SEQ ID NO: 78351 - protein, 9 aa, Homo sapiens
  Table A; Target 78351; HLA-A*26:01; SLC45A2; ENSG00000164175; TAA
FIDGPIKAY

SEQ ID NO: 78352 - protein, 9 aa, Homo sapiens
  Table A; Target 78352; HLA-A*29:02; SLC45A2; ENSG00000164175; TAA
FIDGPIKAY

SEQ ID NO: 78353 - protein, 9 aa, Homo sapiens
  Table A; Target 78353; HLA-A*30:02; SLC45A2; ENSG00000164175; TAA
FIDGPIKAY

SEQ ID NO: 78354 - protein, 9 aa, Homo sapiens
  Table A; Target 78354; HLA-A*31:01; SLC45A2; ENSG00000164175; TAA
FIDGPIKAY

SEQ ID NO: 78355 - protein, 9 aa, Homo sapiens
  Table A; Target 78355; HLA-A*32:01; SLC45A2; ENSG00000164175; TAA
FIDGPIKAY

SEQ ID NO: 78356 - protein, 9 aa, Homo sapiens
  Table A; Target 78356; HLA-A*33:01; SLC45A2; ENSG00000164175; TAA
FIDGPIKAY

SEQ ID NO: 78357 - protein, 9 aa, Homo sapiens
  Table A; Target 78357; HLA-B*08:01; SLC45A2; ENSG00000164175; TAA
FIDGPIKAY

SEQ ID NO: 78358 - protein, 9 aa, Homo sapiens
  Table A; Target 78358; HLA-B*15:01; SLC45A2; ENSG00000164175; TAA
FIDGPIKAY

SEQ ID NO: 78359 - protein, 9 aa, Homo sapiens
  Table A; Target 78359; HLA-B*15:03; SLC45A2; ENSG00000164175; TAA
FIDGPIKAY

SEQ ID NO: 78360 - protein, 9 aa, Homo sapiens
  Table A; Target 78360; HLA-B*18:01; SLC45A2; ENSG00000164175; TAA
FIDGPIKAY

SEQ ID NO: 78361 - protein, 9 aa, Homo sapiens
  Table A; Target 78361; HLA-B*35:01; SLC45A2; ENSG00000164175; TAA
FIDGPIKAY

SEQ ID NO: 78362 - protein, 9 aa, Homo sapiens
  Table A; Target 78362; HLA-B*39:01; SLC45A2; ENSG00000164175; TAA
FIDGPIKAY

SEQ ID NO: 78363 - protein, 9 aa, Homo sapiens
  Table A; Target 78363; HLA-B*40:01; SLC45A2; ENSG00000164175; TAA
FIDGPIKAY

SEQ ID NO: 78364 - protein, 9 aa, Homo sapiens
  Table A; Target 78364; HLA-B*44:02; SLC45A2; ENSG00000164175; TAA
FIDGPIKAY

SEQ ID NO: 78365 - protein, 9 aa, Homo sapiens
  Table A; Target 78365; HLA-B*44:03; SLC45A2; ENSG00000164175; TAA
FIDGPIKAY

SEQ ID NO: 78366 - protein, 9 aa, Homo sapiens
  Table A; Target 78366; HLA-B*46:01; SLC45A2; ENSG00000164175; TAA
FIDGPIKAY

SEQ ID NO: 78367 - protein, 9 aa, Homo sapiens
  Table A; Target 78367; HLA-B*54:01; SLC45A2; ENSG00000164175; TAA
FIDGPIKAY

SEQ ID NO: 78368 - protein, 9 aa, Homo sapiens
  Table A; Target 78368; HLA-B*55:01; SLC45A2; ENSG00000164175; TAA
FIDGPIKAY

SEQ ID NO: 78369 - protein, 9 aa, Homo sapiens
  Table A; Target 78369; HLA-B*57:01; SLC45A2; ENSG00000164175; TAA
FIDGPIKAY

SEQ ID NO: 78370 - protein, 9 aa, Homo sapiens
  Table A; Target 78370; HLA-B*58:01; SLC45A2; ENSG00000164175; TAA
FIDGPIKAY

SEQ ID NO: 78371 - protein, 9 aa, Homo sapiens
  Table A; Target 78371; HLA-C*01:02; SLC45A2; ENSG00000164175; TAA
FIDGPIKAY

SEQ ID NO: 78372 - protein, 9 aa, Homo sapiens
  Table A; Target 78372; HLA-C*02:02; SLC45A2; ENSG00000164175; TAA
FIDGPIKAY

SEQ ID NO: 78373 - protein, 9 aa, Homo sapiens
  Table A; Target 78373; HLA-C*03:03; SLC45A2; ENSG00000164175; TAA
FIDGPIKAY

SEQ ID NO: 78374 - protein, 9 aa, Homo sapiens
  Table A; Target 78374; HLA-C*03:04; SLC45A2; ENSG00000164175; TAA
FIDGPIKAY

SEQ ID NO: 78375 - protein, 9 aa, Homo sapiens
  Table A; Target 78375; HLA-C*04:01; SLC45A2; ENSG00000164175; TAA
FIDGPIKAY

SEQ ID NO: 78376 - protein, 9 aa, Homo sapiens
  Table A; Target 78376; HLA-C*05:01; SLC45A2; ENSG00000164175; TAA
FIDGPIKAY

SEQ ID NO: 78377 - protein, 9 aa, Homo sapiens
  Table A; Target 78377; HLA-C*07:04; SLC45A2; ENSG00000164175; TAA
FIDGPIKAY

SEQ ID NO: 78378 - protein, 9 aa, Homo sapiens
  Table A; Target 78378; HLA-C*12:03; SLC45A2; ENSG00000164175; TAA
FIDGPIKAY

SEQ ID NO: 78379 - protein, 9 aa, Homo sapiens
  Table A; Target 78379; HLA-C*14:02; SLC45A2; ENSG00000164175; TAA
FIDGPIKAY

SEQ ID NO: 78380 - protein, 9 aa, Homo sapiens
  Table A; Target 78380; HLA-C*16:01; SLC45A2; ENSG00000164175; TAA
FIDGPIKAY

SEQ ID NO: 78381 - protein, 9 aa, Homo sapiens
  Table A; Target 78381; HLA-C*16:02; SLC45A2; ENSG00000164175; TAA
FIDGPIKAY

SEQ ID NO: 78382 - protein, 9 aa, Homo sapiens
  Table A; Target 78382; HLA-C*16:04; SLC45A2; ENSG00000164175; TAA
FIDGPIKAY

SEQ ID NO: 78383 - protein, 10 aa, Homo sapiens
  Table A; Target 78383; HLA-A*01:01; SLC45A2; ENSG00000164175; TAA
FIDGPIKAYL

SEQ ID NO: 78384 - protein, 10 aa, Homo sapiens
  Table A; Target 78384; HLA-A*02:01; SLC45A2; ENSG00000164175; TAA
FIDGPIKAYL

SEQ ID NO: 78385 - protein, 10 aa, Homo sapiens
  Table A; Target 78385; HLA-A*02:03; SLC45A2; ENSG00000164175; TAA
FIDGPIKAYL

SEQ ID NO: 78386 - protein, 10 aa, Homo sapiens
  Table A; Target 78386; HLA-A*02:04; SLC45A2; ENSG00000164175; TAA
FIDGPIKAYL

SEQ ID NO: 78387 - protein, 10 aa, Homo sapiens
  Table A; Target 78387; HLA-A*02:07; SLC45A2; ENSG00000164175; TAA
FIDGPIKAYL

SEQ ID NO: 78388 - protein, 10 aa, Homo sapiens
  Table A; Target 78388; HLA-A*31:01; SLC45A2; ENSG00000164175; TAA
FIDGPIKAYL

SEQ ID NO: 78389 - protein, 10 aa, Homo sapiens
  Table A; Target 78389; HLA-A*68:02; SLC45A2; ENSG00000164175; TAA
FIDGPIKAYL

SEQ ID NO: 78390 - protein, 10 aa, Homo sapiens
  Table A; Target 78390; HLA-B*38:01; SLC45A2; ENSG00000164175; TAA
FIDGPIKAYL

SEQ ID NO: 78391 - protein, 10 aa, Homo sapiens
  Table A; Target 78391; HLA-C*05:01; SLC45A2; ENSG00000164175; TAA
FIDGPIKAYL

SEQ ID NO: 78392 - protein, 11 aa, Homo sapiens
  Table A; Target 78392; HLA-A*02:07; SLC45A2; ENSG00000164175; TAA
FIDGPIKAYLF

SEQ ID NO: 78393 - protein, 9 aa, Homo sapiens
  Table A; Target 78393; HLA-A*01:01; SLC45A2; ENSG00000164175; TAA
FIGLFPNVY

SEQ ID NO: 78394 - protein, 9 aa, Homo sapiens
  Table A; Target 78394; HLA-A*29:02; SLC45A2; ENSG00000164175; TAA
FIGLFPNVY

SEQ ID NO: 78395 - protein, 9 aa, Homo sapiens
  Table A; Target 78395; HLA-B*15:03; SLC45A2; ENSG00000164175; TAA
FIGLFPNVY

SEQ ID NO: 78396 - protein, 9 aa, Homo sapiens
  Table A; Target 78396; HLA-B*35:01; SLC45A2; ENSG00000164175; TAA
FIGLFPNVY

SEQ ID NO: 78397 - protein, 9 aa, Homo sapiens
  Table A; Target 78397; HLA-C*07:04; SLC45A2; ENSG00000164175; TAA
FIGLFPNVY

SEQ ID NO: 78398 - protein, 10 aa, Homo sapiens
  Table A; Target 78398; HLA-A*02:01; SLC45A2; ENSG00000164175; TAA
FLIYERGVEV

SEQ ID NO: 78399 - protein, 10 aa, Homo sapiens
  Table A; Target 78399; HLA-A*02:03; SLC45A2; ENSG00000164175; TAA
FLIYERGVEV

SEQ ID NO: 78400 - protein, 10 aa, Homo sapiens
  Table A; Target 78400; HLA-A*02:04; SLC45A2; ENSG00000164175; TAA
FLIYERGVEV

SEQ ID NO: 78401 - protein, 10 aa, Homo sapiens
  Table A; Target 78401; HLA-A*02:07; SLC45A2; ENSG00000164175; TAA
FLIYERGVEV

SEQ ID NO: 78402 - protein, 9 aa, Homo sapiens
  Table A; Target 78402; HLA-A*02:01; SLC45A2; ENSG00000164175; TAA
FLLQPVVGS

SEQ ID NO: 78403 - protein, 10 aa, Homo sapiens
  Table A; Target 78403; HLA-A*02:03; SLC45A2; ENSG00000164175; TAA
FLLQPVVGSA

SEQ ID NO: 78404 - protein, 8 aa, Homo sapiens
  Table A; Target 78404; HLA-B*37:01; SLC45A2; ENSG00000164175; TAA
FLSPILGF

SEQ ID NO: 78405 - protein, 9 aa, Homo sapiens
  Table A; Target 78405; HLA-A*02:01; SLC45A2; ENSG00000164175; TAA
FLSPILGFL

SEQ ID NO: 78406 - protein, 9 aa, Homo sapiens
  Table A; Target 78406; HLA-A*02:03; SLC45A2; ENSG00000164175; TAA
FLSPILGFL

SEQ ID NO: 78407 - protein, 9 aa, Homo sapiens
  Table A; Target 78407; HLA-A*02:04; SLC45A2; ENSG00000164175; TAA
FLSPILGFL

SEQ ID NO: 78408 - protein, 9 aa, Homo sapiens
  Table A; Target 78408; HLA-A*02:07; SLC45A2; ENSG00000164175; TAA
FLSPILGFL

SEQ ID NO: 78409 - protein, 9 aa, Homo sapiens
  Table A; Target 78409; HLA-A*68:02; SLC45A2; ENSG00000164175; TAA
FLSPILGFL

SEQ ID NO: 78410 - protein, 10 aa, Homo sapiens
  Table A; Target 78410; HLA-A*02:01; SLC45A2; ENSG00000164175; TAA
FLSPILGFLL

SEQ ID NO: 78411 - protein, 10 aa, Homo sapiens
  Table A; Target 78411; HLA-A*02:03; SLC45A2; ENSG00000164175; TAA
FLSPILGFLL

SEQ ID NO: 78412 - protein, 10 aa, Homo sapiens
  Table A; Target 78412; HLA-A*02:04; SLC45A2; ENSG00000164175; TAA
FLSPILGFLL

SEQ ID NO: 78413 - protein, 10 aa, Homo sapiens
  Table A; Target 78413; HLA-A*02:07; SLC45A2; ENSG00000164175; TAA
FLSPILGFLL

SEQ ID NO: 78414 - protein, 10 aa, Homo sapiens
  Table A; Target 78414; HLA-A*29:02; SLC45A2; ENSG00000164175; TAA
FLSPILGFLL

SEQ ID NO: 78415 - protein, 10 aa, Homo sapiens
  Table A; Target 78415; HLA-A*68:02; SLC45A2; ENSG00000164175; TAA
FLSPILGFLL

SEQ ID NO: 78416 - protein, 9 aa, Homo sapiens
  Table A; Target 78416; HLA-A*02:03; SLC45A2; ENSG00000164175; TAA
FLVNTAGTV

SEQ ID NO: 78417 - protein, 9 aa, Homo sapiens
  Table A; Target 78417; HLA-B*13:02; SLC45A2; ENSG00000164175; TAA
FLVNTAGTV

SEQ ID NO: 78418 - protein, 10 aa, Homo sapiens
  Table A; Target 78418; HLA-A*02:03; SLC45A2; ENSG00000164175; TAA
FLVNTAGTVV

SEQ ID NO: 78419 - protein, 8 aa, Homo sapiens
  Table A; Target 78419; HLA-A*31:01; SLC45A2; ENSG00000164175; TAA
FMGQIVYR

SEQ ID NO: 78420 - protein, 8 aa, Homo sapiens
  Table A; Target 78420; HLA-A*33:01; SLC45A2; ENSG00000164175; TAA
FMGQIVYR

SEQ ID NO: 78421 - protein, 8 aa, Homo sapiens
  Table A; Target 78421; HLA-A*33:03; SLC45A2; ENSG00000164175; TAA
FMGQIVYR

SEQ ID NO: 78422 - protein, 8 aa, Homo sapiens
  Table A; Target 78422; HLA-B*07:02; SLC45A2; ENSG00000164175; TAA
FPNVYSTL

SEQ ID NO: 78423 - protein, 8 aa, Homo sapiens
  Table A; Target 78423; HLA-B*08:01; SLC45A2; ENSG00000164175; TAA
FPNVYSTL

SEQ ID NO: 78424 - protein, 8 aa, Homo sapiens
  Table A; Target 78424; HLA-B*35:01; SLC45A2; ENSG00000164175; TAA
FPNVYSTL

SEQ ID NO: 78425 - protein, 8 aa, Homo sapiens
  Table A; Target 78425; HLA-B*35:03; SLC45A2; ENSG00000164175; TAA
FPNVYSTL

SEQ ID NO: 78426 - protein, 8 aa, Homo sapiens
  Table A; Target 78426; HLA-B*46:01; SLC45A2; ENSG00000164175; TAA
FPNVYSTL

SEQ ID NO: 78427 - protein, 8 aa, Homo sapiens
  Table A; Target 78427; HLA-B*51:01; SLC45A2; ENSG00000164175; TAA
FPNVYSTL

SEQ ID NO: 78428 - protein, 8 aa, Homo sapiens
  Table A; Target 78428; HLA-B*54:01; SLC45A2; ENSG00000164175; TAA
FPNVYSTL

SEQ ID NO: 78429 - protein, 8 aa, Homo sapiens
  Table A; Target 78429; HLA-B*55:01; SLC45A2; ENSG00000164175; TAA
FPNVYSTL

SEQ ID NO: 78430 - protein, 8 aa, Homo sapiens
  Table A; Target 78430; HLA-B*56:01; SLC45A2; ENSG00000164175; TAA
FPNVYSTL

SEQ ID NO: 78431 - protein, 8 aa, Homo sapiens
  Table A; Target 78431; HLA-C*03:03; SLC45A2; ENSG00000164175; TAA
FPNVYSTL

SEQ ID NO: 78432 - protein, 8 aa, Homo sapiens
  Table A; Target 78432; HLA-C*03:04; SLC45A2; ENSG00000164175; TAA
FPNVYSTL

SEQ ID NO: 78433 - protein, 8 aa, Homo sapiens
  Table A; Target 78433; HLA-C*04:01; SLC45A2; ENSG00000164175; TAA
FPNVYSTL

SEQ ID NO: 78434 - protein, 8 aa, Homo sapiens
  Table A; Target 78434; HLA-C*05:01; SLC45A2; ENSG00000164175; TAA
FPNVYSTL

SEQ ID NO: 78435 - protein, 8 aa, Homo sapiens
  Table A; Target 78435; HLA-C*07:02; SLC45A2; ENSG00000164175; TAA
FPNVYSTL

SEQ ID NO: 78436 - protein, 8 aa, Homo sapiens
  Table A; Target 78436; HLA-C*14:02; SLC45A2; ENSG00000164175; TAA
FPNVYSTL

SEQ ID NO: 78437 - protein, 9 aa, Homo sapiens
  Table A; Target 78437; HLA-B*51:01; SLC45A2; ENSG00000164175; TAA
FPNVYSTLV

SEQ ID NO: 78438 - protein, 9 aa, Homo sapiens
  Table A; Target 78438; HLA-B*54:01; SLC45A2; ENSG00000164175; TAA
FPNVYSTLV

SEQ ID NO: 78439 - protein, 9 aa, Homo sapiens
  Table A; Target 78439; HLA-B*56:01; SLC45A2; ENSG00000164175; TAA
FPNVYSTLV

SEQ ID NO: 78440 - protein, 9 aa, Homo sapiens
  Table A; Target 78440; HLA-C*02:02; SLC45A2; ENSG00000164175; TAA
FPNVYSTLV

SEQ ID NO: 78441 - protein, 10 aa, Homo sapiens
  Table A; Target 78441; HLA-B*35:01; SLC45A2; ENSG00000164175; TAA
FPNVYSTLVL

SEQ ID NO: 78442 - protein, 10 aa, Homo sapiens
  Table A; Target 78442; HLA-B*35:03; SLC45A2; ENSG00000164175; TAA
FPNVYSTLVL

SEQ ID NO: 78443 - protein, 10 aa, Homo sapiens
  Table A; Target 78443; HLA-B*51:01; SLC45A2; ENSG00000164175; TAA
FPNVYSTLVL

SEQ ID NO: 78444 - protein, 10 aa, Homo sapiens
  Table A; Target 78444; HLA-B*54:01; SLC45A2; ENSG00000164175; TAA
FPNVYSTLVL

SEQ ID NO: 78445 - protein, 8 aa, Homo sapiens
  Table A; Target 78445; HLA-A*30:02; SLC45A2; ENSG00000164175; TAA
FQKVLVSY

SEQ ID NO: 78446 - protein, 8 aa, Homo sapiens
  Table A; Target 78446; HLA-A*32:01; SLC45A2; ENSG00000164175; TAA
FQKVLVSY

SEQ ID NO: 78447 - protein, 8 aa, Homo sapiens
  Table A; Target 78447; HLA-B*08:01; SLC45A2; ENSG00000164175; TAA
FQKVLVSY

SEQ ID NO: 78448 - protein, 8 aa, Homo sapiens
  Table A; Target 78448; HLA-B*15:01; SLC45A2; ENSG00000164175; TAA
FQKVLVSY

SEQ ID NO: 78449 - protein, 8 aa, Homo sapiens
  Table A; Target 78449; HLA-B*15:03; SLC45A2; ENSG00000164175; TAA
FQKVLVSY

SEQ ID NO: 78450 - protein, 8 aa, Homo sapiens
  Table A; Target 78450; HLA-B*18:01; SLC45A2; ENSG00000164175; TAA
FQKVLVSY

SEQ ID NO: 78451 - protein, 8 aa, Homo sapiens
  Table A; Target 78451; HLA-B*46:01; SLC45A2; ENSG00000164175; TAA
FQKVLVSY

SEQ ID NO: 78452 - protein, 8 aa, Homo sapiens
  Table A; Target 78452; HLA-C*02:02; SLC45A2; ENSG00000164175; TAA
FQKVLVSY

SEQ ID NO: 78453 - protein, 8 aa, Homo sapiens
  Table A; Target 78453; HLA-C*07:04; SLC45A2; ENSG00000164175; TAA
FQKVLVSY

SEQ ID NO: 78454 - protein, 8 aa, Homo sapiens
  Table A; Target 78454; HLA-C*12:03; SLC45A2; ENSG00000164175; TAA
FQKVLVSY

SEQ ID NO: 78455 - protein, 8 aa, Homo sapiens
  Table A; Target 78455; HLA-C*14:02; SLC45A2; ENSG00000164175; TAA
FQKVLVSY

SEQ ID NO: 78456 - protein, 8 aa, Homo sapiens
  Table A; Target 78456; HLA-C*16:01; SLC45A2; ENSG00000164175; TAA
FQKVLVSY

SEQ ID NO: 78457 - protein, 8 aa, Homo sapiens
  Table A; Target 78457; HLA-C*16:04; SLC45A2; ENSG00000164175; TAA
FQKVLVSY

SEQ ID NO: 78458 - protein, 9 aa, Homo sapiens
  Table A; Target 78458; HLA-A*02:03; SLC45A2; ENSG00000164175; TAA
FQKVLVSYI

SEQ ID NO: 78459 - protein, 9 aa, Homo sapiens
  Table A; Target 78459; HLA-B*13:02; SLC45A2; ENSG00000164175; TAA
FQKVLVSYI

SEQ ID NO: 78460 - protein, 8 aa, Homo sapiens
  Table A; Target 78460; HLA-C*03:03; SLC45A2; ENSG00000164175; TAA
FSALVLTL

SEQ ID NO: 78461 - protein, 8 aa, Homo sapiens
  Table A; Target 78461; HLA-C*03:04; SLC45A2; ENSG00000164175; TAA
FSALVLTL

SEQ ID NO: 78462 - protein, 8 aa, Homo sapiens
  Table A; Target 78462; HLA-C*07:04; SLC45A2; ENSG00000164175; TAA
FSALVLTL

SEQ ID NO: 78463 - protein, 10 aa, Homo sapiens
  Table A; Target 78463; HLA-B*27:02; SLC45A2; ENSG00000164175; TAA
FSSLYSYFQK

SEQ ID NO: 78464 - protein, 8 aa, Homo sapiens
  Table A; Target 78464; HLA-C*05:01; SLC45A2; ENSG00000164175; TAA
FTDFMGQI

SEQ ID NO: 78465 - protein, 9 aa, Homo sapiens
  Table A; Target 78465; HLA-A*01:01; SLC45A2; ENSG00000164175; TAA
FTDFMGQIV

SEQ ID NO: 78466 - protein, 9 aa, Homo sapiens
  Table A; Target 78466; HLA-A*68:02; SLC45A2; ENSG00000164175; TAA
FTDFMGQIV

SEQ ID NO: 78467 - protein, 9 aa, Homo sapiens
  Table A; Target 78467; HLA-B*35:03; SLC45A2; ENSG00000164175; TAA
FTDFMGQIV

SEQ ID NO: 78468 - protein, 10 aa, Homo sapiens
  Table A; Target 78468; HLA-A*01:01; SLC45A2; ENSG00000164175; TAA
FTDFMGQIVY

SEQ ID NO: 78469 - protein, 10 aa, Homo sapiens
  Table A; Target 78469; HLA-A*29:02; SLC45A2; ENSG00000164175; TAA
FTDFMGQIVY

SEQ ID NO: 78470 - protein, 10 aa, Homo sapiens
  Table A; Target 78470; HLA-C*07:04; SLC45A2; ENSG00000164175; TAA
FTDFMGQIVY

SEQ ID NO: 78471 - protein, 8 aa, Homo sapiens
  Table A; Target 78471; HLA-B*46:01; SLC45A2; ENSG00000164175; TAA
FTGFGGAL

SEQ ID NO: 78472 - protein, 8 aa, Homo sapiens
  Table A; Target 78472; HLA-C*01:02; SLC45A2; ENSG00000164175; TAA
FTGFGGAL

SEQ ID NO: 78473 - protein, 8 aa, Homo sapiens
  Table A; Target 78473; HLA-C*03:03; SLC45A2; ENSG00000164175; TAA
FTGFGGAL

SEQ ID NO: 78474 - protein, 8 aa, Homo sapiens
  Table A; Target 78474; HLA-C*03:04; SLC45A2; ENSG00000164175; TAA
FTGFGGAL

SEQ ID NO: 78475 - protein, 8 aa, Homo sapiens
  Table A; Target 78475; HLA-C*05:01; SLC45A2; ENSG00000164175; TAA
FTGFGGAL

SEQ ID NO: 78476 - protein, 8 aa, Homo sapiens
  Table A; Target 78476; HLA-C*12:03; SLC45A2; ENSG00000164175; TAA
FTGFGGAL

SEQ ID NO: 78477 - protein, 8 aa, Homo sapiens
  Table A; Target 78477; HLA-C*14:02; SLC45A2; ENSG00000164175; TAA
FTGFGGAL

SEQ ID NO: 78478 - protein, 10 aa, Homo sapiens
  Table A; Target 78478; HLA-A*01:01; SLC45A2; ENSG00000164175; TAA
FTGFGGALGY

SEQ ID NO: 78479 - protein, 10 aa, Homo sapiens
  Table A; Target 78479; HLA-A*25:01; SLC45A2; ENSG00000164175; TAA
FTGFGGALGY

SEQ ID NO: 78480 - protein, 10 aa, Homo sapiens
  Table A; Target 78480; HLA-A*26:01; SLC45A2; ENSG00000164175; TAA
FTGFGGALGY

SEQ ID NO: 78481 - protein, 10 aa, Homo sapiens
  Table A; Target 78481; HLA-A*29:02; SLC45A2; ENSG00000164175; TAA
FTGFGGALGY

SEQ ID NO: 78482 - protein, 10 aa, Homo sapiens
  Table A; Target 78482; HLA-A*30:02; SLC45A2; ENSG00000164175; TAA
FTGFGGALGY

SEQ ID NO: 78483 - protein, 10 aa, Homo sapiens
  Table A; Target 78483; HLA-C*07:01; SLC45A2; ENSG00000164175; TAA
FTGFGGALGY

SEQ ID NO: 78484 - protein, 10 aa, Homo sapiens
  Table A; Target 78484; HLA-C*12:03; SLC45A2; ENSG00000164175; TAA
FTGFGGALGY

SEQ ID NO: 78485 - protein, 10 aa, Homo sapiens
  Table A; Target 78485; HLA-C*16:04; SLC45A2; ENSG00000164175; TAA
FTGFGGALGY

SEQ ID NO: 78486 - protein, 11 aa, Homo sapiens
  Table A; Target 78486; HLA-A*01:01; SLC45A2; ENSG00000164175; TAA
FTGFGGALGYL

SEQ ID NO: 78487 - protein, 11 aa, Homo sapiens
  Table A; Target 78487; HLA-A*68:02; SLC45A2; ENSG00000164175; TAA
FTGFGGALGYL

SEQ ID NO: 78488 - protein, 8 aa, Homo sapiens
  Table A; Target 78488; HLA-A*29:02; SLC45A2; ENSG00000164175; TAA
FVALFVRY

SEQ ID NO: 78489 - protein, 9 aa, Homo sapiens
  Table A; Target 78489; HLA-A*02:03; SLC45A2; ENSG00000164175; TAA
FVALFVRYV

SEQ ID NO: 78490 - protein, 9 aa, Homo sapiens
  Table A; Target 78490; HLA-A*02:04; SLC45A2; ENSG00000164175; TAA
FVALFVRYV

SEQ ID NO: 78491 - protein, 9 aa, Homo sapiens
  Table A; Target 78491; HLA-A*68:02; SLC45A2; ENSG00000164175; TAA
FVALFVRYV

SEQ ID NO: 78492 - protein, 9 aa, Homo sapiens
  Table A; Target 78492; HLA-C*02:02; SLC45A2; ENSG00000164175; TAA
FVALFVRYV

SEQ ID NO: 78493 - protein, 10 aa, Homo sapiens
  Table A; Target 78493; HLA-A*02:04; SLC45A2; ENSG00000164175; TAA
GAIDWAHLEL

SEQ ID NO: 78494 - protein, 10 aa, Homo sapiens
  Table A; Target 78494; HLA-C*03:03; SLC45A2; ENSG00000164175; TAA
GAIDWAHLEL

SEQ ID NO: 78495 - protein, 8 aa, Homo sapiens
  Table A; Target 78495; HLA-A*30:01; SLC45A2; ENSG00000164175; TAA
GATVVAAL

SEQ ID NO: 78496 - protein, 8 aa, Homo sapiens
  Table A; Target 78496; HLA-B*15:01; SLC45A2; ENSG00000164175; TAA
GATVVAAL

SEQ ID NO: 78497 - protein, 8 aa, Homo sapiens
  Table A; Target 78497; HLA-B*40:01; SLC45A2; ENSG00000164175; TAA
GATVVAAL

SEQ ID NO: 78498 - protein, 8 aa, Homo sapiens
  Table A; Target 78498; HLA-B*46:01; SLC45A2; ENSG00000164175; TAA
GATVVAAL

SEQ ID NO: 78499 - protein, 8 aa, Homo sapiens
  Table A; Target 78499; HLA-C*03:03; SLC45A2; ENSG00000164175; TAA
GATVVAAL

SEQ ID NO: 78500 - protein, 8 aa, Homo sapiens
  Table A; Target 78500; HLA-C*03:04; SLC45A2; ENSG00000164175; TAA
GATVVAAL

SEQ ID NO: 78501 - protein, 8 aa, Homo sapiens
  Table A; Target 78501; HLA-C*14:02; SLC45A2; ENSG00000164175; TAA
GATVVAAL

SEQ ID NO: 78502 - protein, 9 aa, Homo sapiens
  Table A; Target 78502; HLA-A*23:01; SLC45A2; ENSG00000164175; TAA
GATVVAALI

SEQ ID NO: 78503 - protein, 9 aa, Homo sapiens
  Table A; Target 78503; HLA-B*13:02; SLC45A2; ENSG00000164175; TAA
GATVVAALI

SEQ ID NO: 78504 - protein, 9 aa, Homo sapiens
  Table A; Target 78504; HLA-B*40:01; SLC45A2; ENSG00000164175; TAA
GATVVAALI

SEQ ID NO: 78505 - protein, 9 aa, Homo sapiens
  Table A; Target 78505; HLA-B*49:01; SLC45A2; ENSG00000164175; TAA
GATVVAALI

SEQ ID NO: 78506 - protein, 9 aa, Homo sapiens
  Table A; Target 78506; HLA-B*58:01; SLC45A2; ENSG00000164175; TAA
GATVVAALI

SEQ ID NO: 78507 - protein, 9 aa, Homo sapiens
  Table A; Target 78507; HLA-C*02:02; SLC45A2; ENSG00000164175; TAA
GATVVAALI

SEQ ID NO: 78508 - protein, 9 aa, Homo sapiens
  Table A; Target 78508; HLA-C*16:02; SLC45A2; ENSG00000164175; TAA
GATVVAALI

SEQ ID NO: 78509 - protein, 9 aa, Homo sapiens
  Table A; Target 78509; HLA-C*16:04; SLC45A2; ENSG00000164175; TAA
GATVVAALI

SEQ ID NO: 78510 - protein, 8 aa, Homo sapiens
  Table A; Target 78510; HLA-A*29:02; SLC45A2; ENSG00000164175; TAA
GFGGALGY

SEQ ID NO: 78511 - protein, 9 aa, Homo sapiens
  Table A; Target 78511; HLA-A*29:02; SLC45A2; ENSG00000164175; TAA
GFIGLFPNV

SEQ ID NO: 78512 - protein, 10 aa, Homo sapiens
  Table A; Target 78512; HLA-A*29:02; SLC45A2; ENSG00000164175; TAA
GFIGLFPNVY

SEQ ID NO: 78513 - protein, 10 aa, Homo sapiens
  Table A; Target 78513; HLA-A*30:02; SLC45A2; ENSG00000164175; TAA
GFIGLFPNVY

SEQ ID NO: 78514 - protein, 11 aa, Homo sapiens
  Table A; Target 78514; HLA-A*03:01; SLC45A2; ENSG00000164175; TAA
GGDPDNSVRGK

SEQ ID NO: 78515 - protein, 11 aa, Homo sapiens
  Table A; Target 78515; HLA-A*03:02; SLC45A2; ENSG00000164175; TAA
GGDPDNSVRGK

SEQ ID NO: 78516 - protein, 11 aa, Homo sapiens
  Table A; Target 78516; HLA-A*11:01; SLC45A2; ENSG00000164175; TAA
GGDPDNSVRGK

SEQ ID NO: 78517 - protein, 9 aa, Homo sapiens
  Table A; Target 78517; HLA-A*02:01; SLC45A2; ENSG00000164175; TAA
GLFPNVYST

SEQ ID NO: 78518 - protein, 9 aa, Homo sapiens
  Table A; Target 78518; HLA-A*02:03; SLC45A2; ENSG00000164175; TAA
GLFPNVYST

SEQ ID NO: 78519 - protein, 9 aa, Homo sapiens
  Table A; Target 78519; HLA-A*02:04; SLC45A2; ENSG00000164175; TAA
GLFPNVYST

SEQ ID NO: 78520 - protein, 10 aa, Homo sapiens
  Table A; Target 78520; HLA-A*02:01; SLC45A2; ENSG00000164175; TAA
GLFPNVYSTL

SEQ ID NO: 78521 - protein, 10 aa, Homo sapiens
  Table A; Target 78521; HLA-A*02:03; SLC45A2; ENSG00000164175; TAA
GLFPNVYSTL

SEQ ID NO: 78522 - protein, 10 aa, Homo sapiens
  Table A; Target 78522; HLA-A*02:04; SLC45A2; ENSG00000164175; TAA
GLFPNVYSTL

SEQ ID NO: 78523 - protein, 10 aa, Homo sapiens
  Table A; Target 78523; HLA-A*02:07; SLC45A2; ENSG00000164175; TAA
GLFPNVYSTL

SEQ ID NO: 78524 - protein, 10 aa, Homo sapiens
  Table A; Target 78524; HLA-A*03:01; SLC45A2; ENSG00000164175; TAA
GLFPNVYSTL

SEQ ID NO: 78525 - protein, 10 aa, Homo sapiens
  Table A; Target 78525; HLA-A*25:01; SLC45A2; ENSG00000164175; TAA
GLFPNVYSTL

SEQ ID NO: 78526 - protein, 10 aa, Homo sapiens
  Table A; Target 78526; HLA-B*15:01; SLC45A2; ENSG00000164175; TAA
GLFPNVYSTL

SEQ ID NO: 78527 - protein, 10 aa, Homo sapiens
  Table A; Target 78527; HLA-B*15:03; SLC45A2; ENSG00000164175; TAA
GLFPNVYSTL

SEQ ID NO: 78528 - protein, 10 aa, Homo sapiens
  Table A; Target 78528; HLA-B*40:01; SLC45A2; ENSG00000164175; TAA
GLFPNVYSTL

SEQ ID NO: 78529 - protein, 10 aa, Homo sapiens
  Table A; Target 78529; HLA-B*46:01; SLC45A2; ENSG00000164175; TAA
GLFPNVYSTL

SEQ ID NO: 78530 - protein, 10 aa, Homo sapiens
  Table A; Target 78530; HLA-C*02:02; SLC45A2; ENSG00000164175; TAA
GLFPNVYSTL

SEQ ID NO: 78531 - protein, 11 aa, Homo sapiens
  Table A; Target 78531; HLA-A*02:01; SLC45A2; ENSG00000164175; TAA
GLFPNVYSTLV

SEQ ID NO: 78532 - protein, 11 aa, Homo sapiens
  Table A; Target 78532; HLA-A*02:03; SLC45A2; ENSG00000164175; TAA
GLFPNVYSTLV

SEQ ID NO: 78533 - protein, 11 aa, Homo sapiens
  Table A; Target 78533; HLA-A*02:04; SLC45A2; ENSG00000164175; TAA
GLFPNVYSTLV

SEQ ID NO: 78534 - protein, 9 aa, Homo sapiens
  Table A; Target 78534; HLA-A*02:01; SLC45A2; ENSG00000164175; TAA
GLGFLVNTA

SEQ ID NO: 78535 - protein, 9 aa, Homo sapiens
  Table A; Target 78535; HLA-A*02:03; SLC45A2; ENSG00000164175; TAA
GLGFLVNTA

SEQ ID NO: 78536 - protein, 9 aa, Homo sapiens
  Table A; Target 78536; HLA-A*02:01; SLC45A2; ENSG00000164175; TAA
GLGTGFIGL

SEQ ID NO: 78537 - protein, 9 aa, Homo sapiens
  Table A; Target 78537; HLA-A*02:03; SLC45A2; ENSG00000164175; TAA
GLGTGFIGL

SEQ ID NO: 78538 - protein, 9 aa, Homo sapiens
  Table A; Target 78538; HLA-A*02:04; SLC45A2; ENSG00000164175; TAA
GLGTGFIGL

SEQ ID NO: 78539 - protein, 9 aa, Homo sapiens
  Table A; Target 78539; HLA-A*03:01; SLC45A2; ENSG00000164175; TAA
GLGTGFIGL

SEQ ID NO: 78540 - protein, 10 aa, Homo sapiens
  Table A; Target 78540; HLA-A*29:02; SLC45A2; ENSG00000164175; TAA
GLKGLYFTGY

SEQ ID NO: 78541 - protein, 9 aa, Homo sapiens
  Table A; Target 78541; HLA-A*02:01; SLC45A2; ENSG00000164175; TAA
GLPSSLYSI

SEQ ID NO: 78542 - protein, 9 aa, Homo sapiens
  Table A; Target 78542; HLA-A*02:03; SLC45A2; ENSG00000164175; TAA
GLPSSLYSI

SEQ ID NO: 78543 - protein, 9 aa, Homo sapiens
  Table A; Target 78543; HLA-A*02:04; SLC45A2; ENSG00000164175; TAA
GLPSSLYSI

SEQ ID NO: 78544 - protein, 9 aa, Homo sapiens
  Table A; Target 78544; HLA-A*02:07; SLC45A2; ENSG00000164175; TAA
GLPSSLYSI

SEQ ID NO: 78545 - protein, 9 aa, Homo sapiens
  Table A; Target 78545; HLA-A*23:01; SLC45A2; ENSG00000164175; TAA
GLPSSLYSI

SEQ ID NO: 78546 - protein, 9 aa, Homo sapiens
  Table A; Target 78546; HLA-A*24:02; SLC45A2; ENSG00000164175; TAA
GLPSSLYSI

SEQ ID NO: 78547 - protein, 9 aa, Homo sapiens
  Table A; Target 78547; HLA-B*13:02; SLC45A2; ENSG00000164175; TAA
GLPSSLYSI

SEQ ID NO: 78548 - protein, 9 aa, Homo sapiens
  Table A; Target 78548; HLA-B*55:01; SLC45A2; ENSG00000164175; TAA
GLPSSLYSI

SEQ ID NO: 78549 - protein, 9 aa, Homo sapiens
  Table A; Target 78549; HLA-A*02:01; SLC45A2; ENSG00000164175; TAA
GLYFTGYLL

SEQ ID NO: 78550 - protein, 9 aa, Homo sapiens
  Table A; Target 78550; HLA-A*02:04; SLC45A2; ENSG00000164175; TAA
GLYFTGYLL

SEQ ID NO: 78551 - protein, 10 aa, Homo sapiens
  Table A; Target 78551; HLA-A*29:02; SLC45A2; ENSG00000164175; TAA
GLYFTGYLLF

SEQ ID NO: 78552 - protein, 9 aa, Homo sapiens
  Table A; Target 78552; HLA-A*02:01; SLC45A2; ENSG00000164175; TAA
GMALYLNGA

SEQ ID NO: 78553 - protein, 9 aa, Homo sapiens
  Table A; Target 78553; HLA-A*02:03; SLC45A2; ENSG00000164175; TAA
GMALYLNGA

SEQ ID NO: 78554 - protein, 9 aa, Homo sapiens
  Table A; Target 78554; HLA-B*55:01; SLC45A2; ENSG00000164175; TAA
GMALYLNGA

SEQ ID NO: 78555 - protein, 10 aa, Homo sapiens
  Table A; Target 78555; HLA-A*02:01; SLC45A2; ENSG00000164175; TAA
GMYEYGSIEK

SEQ ID NO: 78556 - protein, 10 aa, Homo sapiens
  Table A; Target 78556; HLA-A*03:01; SLC45A2; ENSG00000164175; TAA
GMYEYGSIEK

SEQ ID NO: 78557 - protein, 10 aa, Homo sapiens
  Table A; Target 78557; HLA-A*03:02; SLC45A2; ENSG00000164175; TAA
GMYEYGSIEK

SEQ ID NO: 78558 - protein, 10 aa, Homo sapiens
  Table A; Target 78558; HLA-A*11:01; SLC45A2; ENSG00000164175; TAA
GMYEYGSIEK

SEQ ID NO: 78559 - protein, 10 aa, Homo sapiens
  Table A; Target 78559; HLA-A*31:01; SLC45A2; ENSG00000164175; TAA
GMYEYGSIEK

SEQ ID NO: 78560 - protein, 10 aa, Homo sapiens
  Table A; Target 78560; HLA-B*27:02; SLC45A2; ENSG00000164175; TAA
GMYEYGSIEK

SEQ ID NO: 78561 - protein, 10 aa, Homo sapiens
  Table A; Target 78561; HLA-B*27:05; SLC45A2; ENSG00000164175; TAA
GMYEYGSIEK

SEQ ID NO: 78562 - protein, 11 aa, Homo sapiens
  Table A; Target 78562; HLA-A*02:01; SLC45A2; ENSG00000164175; TAA
GMYEYGSIEKV

SEQ ID NO: 78563 - protein, 11 aa, Homo sapiens
  Table A; Target 78563; HLA-A*02:03; SLC45A2; ENSG00000164175; TAA
GMYEYGSIEKV

SEQ ID NO: 78564 - protein, 11 aa, Homo sapiens
  Table A; Target 78564; HLA-A*02:04; SLC45A2; ENSG00000164175; TAA
GMYEYGSIEKV

SEQ ID NO: 78565 - protein, 11 aa, Homo sapiens
  Table A; Target 78565; HLA-A*02:07; SLC45A2; ENSG00000164175; TAA
GMYEYGSIEKV

SEQ ID NO: 78566 - protein, 11 aa, Homo sapiens
  Table A; Target 78566; HLA-B*13:02; SLC45A2; ENSG00000164175; TAA
GMYEYGSIEKV

SEQ ID NO: 78567 - protein, 11 aa, Homo sapiens
  Table A; Target 78567; HLA-B*55:01; SLC45A2; ENSG00000164175; TAA
GMYEYGSIEKV

SEQ ID NO: 78568 - protein, 9 aa, Homo sapiens
  Table A; Target 78568; HLA-B*56:01; SLC45A2; ENSG00000164175; TAA
GPFDSVEPP

SEQ ID NO: 78569 - protein, 10 aa, Homo sapiens
  Table A; Target 78569; HLA-A*03:01; SLC45A2; ENSG00000164175; TAA
GPFDSVEPPK

SEQ ID NO: 78570 - protein, 10 aa, Homo sapiens
  Table A; Target 78570; HLA-A*03:02; SLC45A2; ENSG00000164175; TAA
GPFDSVEPPK

SEQ ID NO: 78571 - protein, 10 aa, Homo sapiens
  Table A; Target 78571; HLA-A*11:01; SLC45A2; ENSG00000164175; TAA
GPFDSVEPPK

SEQ ID NO: 78572 - protein, 10 aa, Homo sapiens
  Table A; Target 78572; HLA-A*68:01; SLC45A2; ENSG00000164175; TAA
GPFDSVEPPK

SEQ ID NO: 78573 - protein, 10 aa, Homo sapiens
  Table A; Target 78573; HLA-B*27:02; SLC45A2; ENSG00000164175; TAA
GPFDSVEPPK

SEQ ID NO: 78574 - protein, 10 aa, Homo sapiens
  Table A; Target 78574; HLA-B*27:05; SLC45A2; ENSG00000164175; TAA
GPFDSVEPPK

SEQ ID NO: 78575 - protein, 10 aa, Homo sapiens
  Table A; Target 78575; HLA-B*56:01; SLC45A2; ENSG00000164175; TAA
GPFDSVEPPK

SEQ ID NO: 78576 - protein, 10 aa, Homo sapiens
  Table A; Target 78576; HLA-C*07:06; SLC45A2; ENSG00000164175; TAA
GPFDSVEPPK

SEQ ID NO: 78577 - protein, 11 aa, Homo sapiens
  Table A; Target 78577; HLA-A*68:01; SLC45A2; ENSG00000164175; TAA
GPFDSVEPPKR

SEQ ID NO: 78578 - protein, 11 aa, Homo sapiens
  Table A; Target 78578; HLA-B*56:01; SLC45A2; ENSG00000164175; TAA
GPFDSVEPPKR

SEQ ID NO: 78579 - protein, 11 aa, Homo sapiens
  Table A; Target 78579; HLA-C*07:06; SLC45A2; ENSG00000164175; TAA
GPFDSVEPPKR

SEQ ID NO: 78580 - protein, 8 aa, Homo sapiens
  Table A; Target 78580; HLA-A*32:01; SLC45A2; ENSG00000164175; TAA
GQAGRHIY

SEQ ID NO: 78581 - protein, 8 aa, Homo sapiens
  Table A; Target 78581; HLA-B*15:01; SLC45A2; ENSG00000164175; TAA
GQAGRHIY

SEQ ID NO: 78582 - protein, 8 aa, Homo sapiens
  Table A; Target 78582; HLA-B*15:03; SLC45A2; ENSG00000164175; TAA
GQAGRHIY

SEQ ID NO: 78583 - protein, 8 aa, Homo sapiens
  Table A; Target 78583; HLA-C*16:01; SLC45A2; ENSG00000164175; TAA
GQAGRHIY

SEQ ID NO: 78584 - protein, 9 aa, Homo sapiens
  Table A; Target 78584; HLA-A*03:01; SLC45A2; ENSG00000164175; TAA
GQAGRHIYK

SEQ ID NO: 78585 - protein, 9 aa, Homo sapiens
  Table A; Target 78585; HLA-A*03:02; SLC45A2; ENSG00000164175; TAA
GQAGRHIYK

SEQ ID NO: 78586 - protein, 9 aa, Homo sapiens
  Table A; Target 78586; HLA-A*11:01; SLC45A2; ENSG00000164175; TAA
GQAGRHIYK

SEQ ID NO: 78587 - protein, 9 aa, Homo sapiens
  Table A; Target 78587; HLA-A*31:01; SLC45A2; ENSG00000164175; TAA
GQAGRHIYK

SEQ ID NO: 78588 - protein, 10 aa, Homo sapiens
  Table A; Target 78588; HLA-A*30:02; SLC45A2; ENSG00000164175; TAA
GQIVYRGDPY

SEQ ID NO: 78589 - protein, 10 aa, Homo sapiens
  Table A; Target 78589; HLA-B*15:01; SLC45A2; ENSG00000164175; TAA
GQIVYRGDPY

SEQ ID NO: 78590 - protein, 10 aa, Homo sapiens
  Table A; Target 78590; HLA-B*15:03; SLC45A2; ENSG00000164175; TAA
GQIVYRGDPY

SEQ ID NO: 78591 - protein, 10 aa, Homo sapiens
  Table A; Target 78591; HLA-B*27:05; SLC45A2; ENSG00000164175; TAA
GQIVYRGDPY

SEQ ID NO: 78592 - protein, 10 aa, Homo sapiens
  Table A; Target 78592; HLA-B*44:02; SLC45A2; ENSG00000164175; TAA
GQIVYRGDPY

SEQ ID NO: 78593 - protein, 10 aa, Homo sapiens
  Table A; Target 78593; HLA-C*02:02; SLC45A2; ENSG00000164175; TAA
GQIVYRGDPY

SEQ ID NO: 78594 - protein, 10 aa, Homo sapiens
  Table A; Target 78594; HLA-C*07:04; SLC45A2; ENSG00000164175; TAA
GQIVYRGDPY

SEQ ID NO: 78595 - protein, 10 aa, Homo sapiens
  Table A; Target 78595; HLA-C*16:01; SLC45A2; ENSG00000164175; TAA
GQIVYRGDPY

SEQ ID NO: 78596 - protein, 10 aa, Homo sapiens
  Table A; Target 78596; HLA-C*16:04; SLC45A2; ENSG00000164175; TAA
GQIVYRGDPY

SEQ ID NO: 78597 - protein, 8 aa, Homo sapiens
  Table A; Target 78597; HLA-C*16:04; SLC45A2; ENSG00000164175; TAA
GRLLGTEF

SEQ ID NO: 78598 - protein, 10 aa, Homo sapiens
  Table A; Target 78598; HLA-A*26:01; SLC45A2; ENSG00000164175; TAA
GSIEKVKNGY

SEQ ID NO: 78599 - protein, 10 aa, Homo sapiens
  Table A; Target 78599; HLA-A*29:02; SLC45A2; ENSG00000164175; TAA
GSIEKVKNGY

SEQ ID NO: 78600 - protein, 10 aa, Homo sapiens
  Table A; Target 78600; HLA-A*30:02; SLC45A2; ENSG00000164175; TAA
GSIEKVKNGY

SEQ ID NO: 78601 - protein, 10 aa, Homo sapiens
  Table A; Target 78601; HLA-A*32:01; SLC45A2; ENSG00000164175; TAA
GSIEKVKNGY

SEQ ID NO: 78602 - protein, 10 aa, Homo sapiens
  Table A; Target 78602; HLA-B*15:01; SLC45A2; ENSG00000164175; TAA
GSIEKVKNGY

SEQ ID NO: 78603 - protein, 10 aa, Homo sapiens
  Table A; Target 78603; HLA-B*58:01; SLC45A2; ENSG00000164175; TAA
GSIEKVKNGY

SEQ ID NO: 78604 - protein, 10 aa, Homo sapiens
  Table A; Target 78604; HLA-C*16:02; SLC45A2; ENSG00000164175; TAA
GSIEKVKNGY

SEQ ID NO: 78605 - protein, 10 aa, Homo sapiens
  Table A; Target 78605; HLA-C*16:04; SLC45A2; ENSG00000164175; TAA
GSIEKVKNGY

SEQ ID NO: 78606 - protein, 9 aa, Homo sapiens
  Table A; Target 78606; HLA-A*31:01; SLC45A2; ENSG00000164175; TAA
GSNSGQAGR

SEQ ID NO: 78607 - protein, 9 aa, Homo sapiens
  Table A; Target 78607; HLA-A*33:03; SLC45A2; ENSG00000164175; TAA
GSNSGQAGR

SEQ ID NO: 78608 - protein, 9 aa, Homo sapiens
  Table A; Target 78608; HLA-C*07:06; SLC45A2; ENSG00000164175; TAA
GSNSGQAGR

SEQ ID NO: 78609 - protein, 9 aa, Homo sapiens
  Table A; Target 78609; HLA-A*01:01; SLC45A2; ENSG00000164175; TAA
GTEFQVMFF

SEQ ID NO: 78610 - protein, 8 aa, Homo sapiens
  Table A; Target 78610; HLA-B*13:02; SLC45A2; ENSG00000164175; TAA
GTVVVVVI

SEQ ID NO: 78611 - protein, 8 aa, Homo sapiens
  Table A; Target 78611; HLA-B*49:01; SLC45A2; ENSG00000164175; TAA
GTVVVVVI

SEQ ID NO: 78612 - protein, 8 aa, Homo sapiens
  Table A; Target 78612; HLA-A*26:01; SLC45A2; ENSG00000164175; TAA
GVMSSTLY

SEQ ID NO: 78613 - protein, 8 aa, Homo sapiens
  Table A; Target 78613; HLA-A*29:02; SLC45A2; ENSG00000164175; TAA
GVMSSTLY

SEQ ID NO: 78614 - protein, 8 aa, Homo sapiens
  Table A; Target 78614; HLA-A*30:02; SLC45A2; ENSG00000164175; TAA
GVMSSTLY

SEQ ID NO: 78615 - protein, 8 aa, Homo sapiens
  Table A; Target 78615; HLA-B*15:01; SLC45A2; ENSG00000164175; TAA
GVMSSTLY

SEQ ID NO: 78616 - protein, 8 aa, Homo sapiens
  Table A; Target 78616; HLA-B*15:03; SLC45A2; ENSG00000164175; TAA
GVMSSTLY

SEQ ID NO: 78617 - protein, 9 aa, Homo sapiens
  Table A; Target 78617; HLA-B*13:02; SLC45A2; ENSG00000164175; TAA
GVMSSTLYT

SEQ ID NO: 78618 - protein, 10 aa, Homo sapiens
  Table A; Target 78618; HLA-A*02:01; SLC45A2; ENSG00000164175; TAA
GVMSSTLYTV

SEQ ID NO: 78619 - protein, 10 aa, Homo sapiens
  Table A; Target 78619; HLA-A*02:03; SLC45A2; ENSG00000164175; TAA
GVMSSTLYTV

SEQ ID NO: 78620 - protein, 10 aa, Homo sapiens
  Table A; Target 78620; HLA-A*02:04; SLC45A2; ENSG00000164175; TAA
GVMSSTLYTV

SEQ ID NO: 78621 - protein, 10 aa, Homo sapiens
  Table A; Target 78621; HLA-B*13:02; SLC45A2; ENSG00000164175; TAA
GVMSSTLYTV

SEQ ID NO: 78622 - protein, 10 aa, Homo sapiens
  Table A; Target 78622; HLA-B*55:01; SLC45A2; ENSG00000164175; TAA
GVMSSTLYTV

SEQ ID NO: 78623 - protein, 10 aa, Homo sapiens
  Table A; Target 78623; HLA-B*56:01; SLC45A2; ENSG00000164175; TAA
GVMSSTLYTV

SEQ ID NO: 78624 - protein, 11 aa, Homo sapiens
  Table A; Target 78624; HLA-A*23:01; SLC45A2; ENSG00000164175; TAA
GYLLFGLGTGF

SEQ ID NO: 78625 - protein, 11 aa, Homo sapiens
  Table A; Target 78625; HLA-A*24:02; SLC45A2; ENSG00000164175; TAA
GYLLFGLGTGF

SEQ ID NO: 78626 - protein, 9 aa, Homo sapiens
  Table A; Target 78626; HLA-A*23:01; SLC45A2; ENSG00000164175; TAA
GYVNPELAM

SEQ ID NO: 78627 - protein, 9 aa, Homo sapiens
  Table A; Target 78627; HLA-A*29:02; SLC45A2; ENSG00000164175; TAA
GYVNPELAM

SEQ ID NO: 78628 - protein, 9 aa, Homo sapiens
  Table A; Target 78628; HLA-A*30:02; SLC45A2; ENSG00000164175; TAA
GYVNPELAM

SEQ ID NO: 78629 - protein, 9 aa, Homo sapiens
  Table A; Target 78629; HLA-B*15:01; SLC45A2; ENSG00000164175; TAA
GYVNPELAM

SEQ ID NO: 78630 - protein, 9 aa, Homo sapiens
  Table A; Target 78630; HLA-B*15:03; SLC45A2; ENSG00000164175; TAA
GYVNPELAM

SEQ ID NO: 78631 - protein, 9 aa, Homo sapiens
  Table A; Target 78631; HLA-B*27:05; SLC45A2; ENSG00000164175; TAA
GYVNPELAM

SEQ ID NO: 78632 - protein, 9 aa, Homo sapiens
  Table A; Target 78632; HLA-B*35:03; SLC45A2; ENSG00000164175; TAA
GYVNPELAM

SEQ ID NO: 78633 - protein, 9 aa, Homo sapiens
  Table A; Target 78633; HLA-B*39:01; SLC45A2; ENSG00000164175; TAA
GYVNPELAM

SEQ ID NO: 78634 - protein, 9 aa, Homo sapiens
  Table A; Target 78634; HLA-B*46:01; SLC45A2; ENSG00000164175; TAA
GYVNPELAM

SEQ ID NO: 78635 - protein, 9 aa, Homo sapiens
  Table A; Target 78635; HLA-C*01:02; SLC45A2; ENSG00000164175; TAA
GYVNPELAM

SEQ ID NO: 78636 - protein, 9 aa, Homo sapiens
  Table A; Target 78636; HLA-C*04:01; SLC45A2; ENSG00000164175; TAA
GYVNPELAM

SEQ ID NO: 78637 - protein, 9 aa, Homo sapiens
  Table A; Target 78637; HLA-C*07:01; SLC45A2; ENSG00000164175; TAA
GYVNPELAM

SEQ ID NO: 78638 - protein, 9 aa, Homo sapiens
  Table A; Target 78638; HLA-C*07:02; SLC45A2; ENSG00000164175; TAA
GYVNPELAM

SEQ ID NO: 78639 - protein, 9 aa, Homo sapiens
  Table A; Target 78639; HLA-C*07:04; SLC45A2; ENSG00000164175; TAA
GYVNPELAM

SEQ ID NO: 78640 - protein, 9 aa, Homo sapiens
  Table A; Target 78640; HLA-C*14:02; SLC45A2; ENSG00000164175; TAA
GYVNPELAM

SEQ ID NO: 78641 - protein, 9 aa, Homo sapiens
  Table A; Target 78641; HLA-C*16:01; SLC45A2; ENSG00000164175; TAA
GYVNPELAM

SEQ ID NO: 78642 - protein, 9 aa, Homo sapiens
  Table A; Target 78642; HLA-C*03:03; SLC45A2; ENSG00000164175; TAA
HAEQTRRAM

SEQ ID NO: 78643 - protein, 9 aa, Homo sapiens
  Table A; Target 78643; HLA-C*03:04; SLC45A2; ENSG00000164175; TAA
HAEQTRRAM

SEQ ID NO: 78644 - protein, 9 aa, Homo sapiens
  Table A; Target 78644; HLA-C*16:01; SLC45A2; ENSG00000164175; TAA
HAEQTRRAM

SEQ ID NO: 78645 - protein, 10 aa, Homo sapiens
  Table A; Target 78645; HLA-B*54:01; SLC45A2; ENSG00000164175; TAA
HALFTGFGGA

SEQ ID NO: 78646 - protein, 9 aa, Homo sapiens
  Table A; Target 78646; HLA-A*02:01; SLC45A2; ENSG00000164175; TAA
HLIGWTAFL

SEQ ID NO: 78647 - protein, 9 aa, Homo sapiens
  Table A; Target 78647; HLA-A*02:03; SLC45A2; ENSG00000164175; TAA
HLIGWTAFL

SEQ ID NO: 78648 - protein, 9 aa, Homo sapiens
  Table A; Target 78648; HLA-A*02:04; SLC45A2; ENSG00000164175; TAA
HLIGWTAFL

SEQ ID NO: 78649 - protein, 9 aa, Homo sapiens
  Table A; Target 78649; HLA-A*02:07; SLC45A2; ENSG00000164175; TAA
HLIGWTAFL

SEQ ID NO: 78650 - protein, 9 aa, Homo sapiens
  Table A; Target 78650; HLA-A*68:02; SLC45A2; ENSG00000164175; TAA
HLIGWTAFL

SEQ ID NO: 78651 - protein, 9 aa, Homo sapiens
  Table A; Target 78651; HLA-A*29:02; SLC45A2; ENSG00000164175; TAA
HNSTEFLIY

SEQ ID NO: 78652 - protein, 10 aa, Homo sapiens
  Table A; Target 78652; HLA-A*01:01; SLC45A2; ENSG00000164175; TAA
HQDKEKGLHY

SEQ ID NO: 78653 - protein, 9 aa, Homo sapiens
  Table A; Target 78653; HLA-A*23:01; SLC45A2; ENSG00000164175; TAA
HYHALFTGF

SEQ ID NO: 78654 - protein, 9 aa, Homo sapiens
  Table A; Target 78654; HLA-A*24:02; SLC45A2; ENSG00000164175; TAA
HYHALFTGF

SEQ ID NO: 78655 - protein, 9 aa, Homo sapiens
  Table A; Target 78655; HLA-A*29:02; SLC45A2; ENSG00000164175; TAA
HYHALFTGF

SEQ ID NO: 78656 - protein, 9 aa, Homo sapiens
  Table A; Target 78656; HLA-A*31:01; SLC45A2; ENSG00000164175; TAA
HYHALFTGF

SEQ ID NO: 78657 - protein, 9 aa, Homo sapiens
  Table A; Target 78657; HLA-A*33:01; SLC45A2; ENSG00000164175; TAA
HYHALFTGF

SEQ ID NO: 78658 - protein, 9 aa, Homo sapiens
  Table A; Target 78658; HLA-A*33:03; SLC45A2; ENSG00000164175; TAA
HYHALFTGF

SEQ ID NO: 78659 - protein, 8 aa, Homo sapiens
  Table A; Target 78659; HLA-C*16:01; SLC45A2; ENSG00000164175; TAA
IANPRRKL

SEQ ID NO: 78660 - protein, 10 aa, Homo sapiens
  Table A; Target 78660; HLA-B*57:01; SLC45A2; ENSG00000164175; TAA
IANPRRKLVW

SEQ ID NO: 78661 - protein, 8 aa, Homo sapiens
  Table A; Target 78661; HLA-A*30:02; SLC45A2; ENSG00000164175; TAA
IDGPIKAY

SEQ ID NO: 78662 - protein, 8 aa, Homo sapiens
  Table A; Target 78662; HLA-B*07:02; SLC45A2; ENSG00000164175; TAA
IDGPIKAY

SEQ ID NO: 78663 - protein, 8 aa, Homo sapiens
  Table A; Target 78663; HLA-B*15:03; SLC45A2; ENSG00000164175; TAA
IDGPIKAY

SEQ ID NO: 78664 - protein, 8 aa, Homo sapiens
  Table A; Target 78664; HLA-B*18:01; SLC45A2; ENSG00000164175; TAA
IDGPIKAY

SEQ ID NO: 78665 - protein, 8 aa, Homo sapiens
  Table A; Target 78665; HLA-B*37:01; SLC45A2; ENSG00000164175; TAA
IDGPIKAY

SEQ ID NO: 78666 - protein, 8 aa, Homo sapiens
  Table A; Target 78666; HLA-B*44:02; SLC45A2; ENSG00000164175; TAA
IDGPIKAY

SEQ ID NO: 78667 - protein, 8 aa, Homo sapiens
  Table A; Target 78667; HLA-B*44:03; SLC45A2; ENSG00000164175; TAA
IDGPIKAY

SEQ ID NO: 78668 - protein, 8 aa, Homo sapiens
  Table A; Target 78668; HLA-C*04:01; SLC45A2; ENSG00000164175; TAA
IDGPIKAY

SEQ ID NO: 78669 - protein, 8 aa, Homo sapiens
  Table A; Target 78669; HLA-C*06:02; SLC45A2; ENSG00000164175; TAA
IDGPIKAY

SEQ ID NO: 78670 - protein, 8 aa, Homo sapiens
  Table A; Target 78670; HLA-C*07:01; SLC45A2; ENSG00000164175; TAA
IDGPIKAY

SEQ ID NO: 78671 - protein, 8 aa, Homo sapiens
  Table A; Target 78671; HLA-C*07:04; SLC45A2; ENSG00000164175; TAA
IDGPIKAY

SEQ ID NO: 78672 - protein, 8 aa, Homo sapiens
  Table A; Target 78672; HLA-C*12:03; SLC45A2; ENSG00000164175; TAA
IDGPIKAY

SEQ ID NO: 78673 - protein, 8 aa, Homo sapiens
  Table A; Target 78673; HLA-C*16:01; SLC45A2; ENSG00000164175; TAA
IDGPIKAY

SEQ ID NO: 78674 - protein, 8 aa, Homo sapiens
  Table A; Target 78674; HLA-C*16:02; SLC45A2; ENSG00000164175; TAA
IDGPIKAY

SEQ ID NO: 78675 - protein, 8 aa, Homo sapiens
  Table A; Target 78675; HLA-C*16:04; SLC45A2; ENSG00000164175; TAA
IDGPIKAY

SEQ ID NO: 78676 - protein, 9 aa, Homo sapiens
  Table A; Target 78676; HLA-A*23:01; SLC45A2; ENSG00000164175; TAA
IDGPIKAYL

SEQ ID NO: 78677 - protein, 9 aa, Homo sapiens
  Table A; Target 78677; HLA-A*68:02; SLC45A2; ENSG00000164175; TAA
IDGPIKAYL

SEQ ID NO: 78678 - protein, 9 aa, Homo sapiens
  Table A; Target 78678; HLA-B*37:01; SLC45A2; ENSG00000164175; TAA
IDGPIKAYL

SEQ ID NO: 78679 - protein, 9 aa, Homo sapiens
  Table A; Target 78679; HLA-B*38:01; SLC45A2; ENSG00000164175; TAA
IDGPIKAYL

SEQ ID NO: 78680 - protein, 9 aa, Homo sapiens
  Table A; Target 78680; HLA-B*40:02; SLC45A2; ENSG00000164175; TAA
IDGPIKAYL

SEQ ID NO: 78681 - protein, 10 aa, Homo sapiens
  Table A; Target 78681; HLA-A*24:02; SLC45A2; ENSG00000164175; TAA
IDGPIKAYLF

SEQ ID NO: 78682 - protein, 8 aa, Homo sapiens
  Table A; Target 78682; HLA-B*37:01; SLC45A2; ENSG00000164175; TAA
IDWAHLEL

SEQ ID NO: 78683 - protein, 8 aa, Homo sapiens
  Table A; Target 78683; HLA-B*40:02; SLC45A2; ENSG00000164175; TAA
IDWAHLEL

SEQ ID NO: 78684 - protein, 8 aa, Homo sapiens
  Table A; Target 78684; HLA-B*18:01; SLC45A2; ENSG00000164175; TAA
IEKVKNGY

SEQ ID NO: 78685 - protein, 8 aa, Homo sapiens
  Table A; Target 78685; HLA-B*37:01; SLC45A2; ENSG00000164175; TAA
IEKVKNGY

SEQ ID NO: 78686 - protein, 9 aa, Homo sapiens
  Table A; Target 78686; HLA-A*02:01; SLC45A2; ENSG00000164175; TAA
ILTLGVMML

SEQ ID NO: 78687 - protein, 9 aa, Homo sapiens
  Table A; Target 78687; HLA-A*02:04; SLC45A2; ENSG00000164175; TAA
ILTLGVMML

SEQ ID NO: 78688 - protein, 9 aa, Homo sapiens
  Table A; Target 78688; HLA-A*23:01; SLC45A2; ENSG00000164175; TAA
ILVGGGLGF

SEQ ID NO: 78689 - protein, 9 aa, Homo sapiens
  Table A; Target 78689; HLA-A*25:01; SLC45A2; ENSG00000164175; TAA
ILVGGGLGF

SEQ ID NO: 78690 - protein, 9 aa, Homo sapiens
  Table A; Target 78690; HLA-A*26:01; SLC45A2; ENSG00000164175; TAA
ILVGGGLGF

SEQ ID NO: 78691 - protein, 9 aa, Homo sapiens
  Table A; Target 78691; HLA-A*29:02; SLC45A2; ENSG00000164175; TAA
ILVGGGLGF

SEQ ID NO: 78692 - protein, 9 aa, Homo sapiens
  Table A; Target 78692; HLA-A*32:01; SLC45A2; ENSG00000164175; TAA
ILVGGGLGF

SEQ ID NO: 78693 - protein, 9 aa, Homo sapiens
  Table A; Target 78693; HLA-B*15:01; SLC45A2; ENSG00000164175; TAA
ILVGGGLGF

SEQ ID NO: 78694 - protein, 9 aa, Homo sapiens
  Table A; Target 78694; HLA-B*15:03; SLC45A2; ENSG00000164175; TAA
ILVGGGLGF

SEQ ID NO: 78695 - protein, 9 aa, Homo sapiens
  Table A; Target 78695; HLA-B*46:01; SLC45A2; ENSG00000164175; TAA
ILVGGGLGF

SEQ ID NO: 78696 - protein, 9 aa, Homo sapiens
  Table A; Target 78696; HLA-C*02:02; SLC45A2; ENSG00000164175; TAA
ILVGGGLGF

SEQ ID NO: 78697 - protein, 9 aa, Homo sapiens
  Table A; Target 78697; HLA-C*07:04; SLC45A2; ENSG00000164175; TAA
ILVGGGLGF

SEQ ID NO: 78698 - protein, 9 aa, Homo sapiens
  Table A; Target 78698; HLA-C*14:02; SLC45A2; ENSG00000164175; TAA
ILVGGGLGF

SEQ ID NO: 78699 - protein, 10 aa, Homo sapiens
  Table A; Target 78699; HLA-A*02:01; SLC45A2; ENSG00000164175; TAA
ILVGGGLGFL

SEQ ID NO: 78700 - protein, 10 aa, Homo sapiens
  Table A; Target 78700; HLA-A*02:03; SLC45A2; ENSG00000164175; TAA
ILVGGGLGFL

SEQ ID NO: 78701 - protein, 11 aa, Homo sapiens
  Table A; Target 78701; HLA-A*02:01; SLC45A2; ENSG00000164175; TAA
ILVGGGLGFLV

SEQ ID NO: 78702 - protein, 11 aa, Homo sapiens
  Table A; Target 78702; HLA-A*02:04; SLC45A2; ENSG00000164175; TAA
ILVGGGLGFLV

SEQ ID NO: 78703 - protein, 8 aa, Homo sapiens
  Table A; Target 78703; HLA-C*14:02; SLC45A2; ENSG00000164175; TAA
INSVFSSL

SEQ ID NO: 78704 - protein, 9 aa, Homo sapiens
  Table A; Target 78704; HLA-A*29:02; SLC45A2; ENSG00000164175; TAA
INSVFSSLY

SEQ ID NO: 78705 - protein, 9 aa, Homo sapiens
  Table A; Target 78705; HLA-A*30:02; SLC45A2; ENSG00000164175; TAA
INSVFSSLY

SEQ ID NO: 78706 - protein, 9 aa, Homo sapiens
  Table A; Target 78706; HLA-A*01:01; SLC45A2; ENSG00000164175; TAA
ISEAPLTEV

SEQ ID NO: 78707 - protein, 9 aa, Homo sapiens
  Table A; Target 78707; HLA-A*02:01; SLC45A2; ENSG00000164175; TAA
ISEAPLTEV

SEQ ID NO: 78708 - protein, 9 aa, Homo sapiens
  Table A; Target 78708; HLA-A*02:07; SLC45A2; ENSG00000164175; TAA
ISEAPLTEV

SEQ ID NO: 78709 - protein, 9 aa, Homo sapiens
  Table A; Target 78709; HLA-B*13:02; SLC45A2; ENSG00000164175; TAA
ISEAPLTEV

SEQ ID NO: 78710 - protein, 9 aa, Homo sapiens
  Table A; Target 78710; HLA-B*40:02; SLC45A2; ENSG00000164175; TAA
ISEAPLTEV

SEQ ID NO: 78711 - protein, 9 aa, Homo sapiens
  Table A; Target 78711; HLA-B*46:01; SLC45A2; ENSG00000164175; TAA
ISEAPLTEV

SEQ ID NO: 78712 - protein, 9 aa, Homo sapiens
  Table A; Target 78712; HLA-B*49:01; SLC45A2; ENSG00000164175; TAA
ISEAPLTEV

SEQ ID NO: 78713 - protein, 9 aa, Homo sapiens
  Table A; Target 78713; HLA-B*58:01; SLC45A2; ENSG00000164175; TAA
ISEAPLTEV

SEQ ID NO: 78714 - protein, 9 aa, Homo sapiens
  Table A; Target 78714; HLA-C*01:02; SLC45A2; ENSG00000164175; TAA
ISEAPLTEV

SEQ ID NO: 78715 - protein, 9 aa, Homo sapiens
  Table A; Target 78715; HLA-C*02:02; SLC45A2; ENSG00000164175; TAA
ISEAPLTEV

SEQ ID NO: 78716 - protein, 9 aa, Homo sapiens
  Table A; Target 78716; HLA-C*03:04; SLC45A2; ENSG00000164175; TAA
ISEAPLTEV

SEQ ID NO: 78717 - protein, 9 aa, Homo sapiens
  Table A; Target 78717; HLA-C*05:01; SLC45A2; ENSG00000164175; TAA
ISEAPLTEV

SEQ ID NO: 78718 - protein, 9 aa, Homo sapiens
  Table A; Target 78718; HLA-C*06:02; SLC45A2; ENSG00000164175; TAA
ISEAPLTEV

SEQ ID NO: 78719 - protein, 9 aa, Homo sapiens
  Table A; Target 78719; HLA-C*12:03; SLC45A2; ENSG00000164175; TAA
ISEAPLTEV

SEQ ID NO: 78720 - protein, 9 aa, Homo sapiens
  Table A; Target 78720; HLA-C*16:02; SLC45A2; ENSG00000164175; TAA
ISEAPLTEV

SEQ ID NO: 78721 - protein, 11 aa, Homo sapiens
  Table A; Target 78721; HLA-A*01:01; SLC45A2; ENSG00000164175; TAA
ISEAPLTEVAK

SEQ ID NO: 78722 - protein, 11 aa, Homo sapiens
  Table A; Target 78722; HLA-A*03:02; SLC45A2; ENSG00000164175; TAA
ISEAPLTEVAK

SEQ ID NO: 78723 - protein, 11 aa, Homo sapiens
  Table A; Target 78723; HLA-A*11:01; SLC45A2; ENSG00000164175; TAA
ISEAPLTEVAK

SEQ ID NO: 78724 - protein, 11 aa, Homo sapiens
  Table A; Target 78724; HLA-B*27:02; SLC45A2; ENSG00000164175; TAA
ISEAPLTEVAK

SEQ ID NO: 78725 - protein, 11 aa, Homo sapiens
  Table A; Target 78725; HLA-C*07:06; SLC45A2; ENSG00000164175; TAA
ISEAPLTEVAK

SEQ ID NO: 78726 - protein, 9 aa, Homo sapiens
  Table A; Target 78726; HLA-B*54:01; SLC45A2; ENSG00000164175; TAA
ISHLIGWTA

SEQ ID NO: 78727 - protein, 11 aa, Homo sapiens
  Table A; Target 78727; HLA-B*57:01; SLC45A2; ENSG00000164175; TAA
ISVTMIGVVLF

SEQ ID NO: 78728 - protein, 8 aa, Homo sapiens
  Table A; Target 78728; HLA-C*03:03; SLC45A2; ENSG00000164175; TAA
ITASAVAL

SEQ ID NO: 78729 - protein, 8 aa, Homo sapiens
  Table A; Target 78729; HLA-C*03:04; SLC45A2; ENSG00000164175; TAA
ITASAVAL

SEQ ID NO: 78730 - protein, 8 aa, Homo sapiens
  Table A; Target 78730; HLA-C*14:02; SLC45A2; ENSG00000164175; TAA
ITASAVAL

SEQ ID NO: 78731 - protein, 9 aa, Homo sapiens
  Table A; Target 78731; HLA-A*02:03; SLC45A2; ENSG00000164175; TAA
ITASAVALI

SEQ ID NO: 78732 - protein, 9 aa, Homo sapiens
  Table A; Target 78732; HLA-A*23:01; SLC45A2; ENSG00000164175; TAA
ITASAVALI

SEQ ID NO: 78733 - protein, 9 aa, Homo sapiens
  Table A; Target 78733; HLA-A*24:02; SLC45A2; ENSG00000164175; TAA
ITASAVALI

SEQ ID NO: 78734 - protein, 9 aa, Homo sapiens
  Table A; Target 78734; HLA-A*68:02; SLC45A2; ENSG00000164175; TAA
ITASAVALI

SEQ ID NO: 78735 - protein, 9 aa, Homo sapiens
  Table A; Target 78735; HLA-B*13:02; SLC45A2; ENSG00000164175; TAA
ITASAVALI

SEQ ID NO: 78736 - protein, 9 aa, Homo sapiens
  Table A; Target 78736; HLA-C*12:03; SLC45A2; ENSG00000164175; TAA
ITASAVALI

SEQ ID NO: 78737 - protein, 8 aa, Homo sapiens
  Table A; Target 78737; HLA-B*15:03; SLC45A2; ENSG00000164175; TAA
IVYRGDPY

SEQ ID NO: 78738 - protein, 8 aa, Homo sapiens
  Table A; Target 78738; HLA-B*46:01; SLC45A2; ENSG00000164175; TAA
IVYRGDPY

SEQ ID NO: 78739 - protein, 8 aa, Homo sapiens
  Table A; Target 78739; HLA-C*03:03; SLC45A2; ENSG00000164175; TAA
IVYRGDPY

SEQ ID NO: 78740 - protein, 8 aa, Homo sapiens
  Table A; Target 78740; HLA-C*16:01; SLC45A2; ENSG00000164175; TAA
IVYRGDPY

SEQ ID NO: 78741 - protein, 10 aa, Homo sapiens
  Table A; Target 78741; HLA-A*02:01; SLC45A2; ENSG00000164175; TAA
IVYRGDPYSA

SEQ ID NO: 78742 - protein, 10 aa, Homo sapiens
  Table A; Target 78742; HLA-A*02:03; SLC45A2; ENSG00000164175; TAA
IVYRGDPYSA

SEQ ID NO: 78743 - protein, 10 aa, Homo sapiens
  Table A; Target 78743; HLA-A*03:01; SLC45A2; ENSG00000164175; TAA
IVYRGDPYSA

SEQ ID NO: 78744 - protein, 10 aa, Homo sapiens
  Table A; Target 78744; HLA-B*40:02; SLC45A2; ENSG00000164175; TAA
IVYRGDPYSA

SEQ ID NO: 78745 - protein, 10 aa, Homo sapiens
  Table A; Target 78745; HLA-B*54:01; SLC45A2; ENSG00000164175; TAA
IVYRGDPYSA

SEQ ID NO: 78746 - protein, 10 aa, Homo sapiens
  Table A; Target 78746; HLA-B*55:01; SLC45A2; ENSG00000164175; TAA
IVYRGDPYSA

SEQ ID NO: 78747 - protein, 10 aa, Homo sapiens
  Table A; Target 78747; HLA-B*56:01; SLC45A2; ENSG00000164175; TAA
IVYRGDPYSA

SEQ ID NO: 78748 - protein, 8 aa, Homo sapiens
  Table A; Target 78748; HLA-C*04:01; SLC45A2; ENSG00000164175; TAA
IYERGVEV

SEQ ID NO: 78749 - protein, 8 aa, Homo sapiens
  Table A; Target 78749; HLA-C*05:01; SLC45A2; ENSG00000164175; TAA
IYERGVEV

SEQ ID NO: 78750 - protein, 8 aa, Homo sapiens
  Table A; Target 78750; HLA-C*14:02; SLC45A2; ENSG00000164175; TAA
IYERGVEV

SEQ ID NO: 78751 - protein, 9 aa, Homo sapiens
  Table A; Target 78751; HLA-A*32:01; SLC45A2; ENSG00000164175; TAA
KGIPPQQTP

SEQ ID NO: 78752 - protein, 9 aa, Homo sapiens
  Table A; Target 78752; HLA-B*58:01; SLC45A2; ENSG00000164175; TAA
KGIPPQQTP

SEQ ID NO: 78753 - protein, 9 aa, Homo sapiens
  Table A; Target 78753; HLA-B*57:01; SLC45A2; ENSG00000164175; TAA
KGLHYHALF

SEQ ID NO: 78754 - protein, 9 aa, Homo sapiens
  Table A; Target 78754; HLA-B*07:02; SLC45A2; ENSG00000164175; TAA
KNGYVNPEL

SEQ ID NO: 78755 - protein, 9 aa, Homo sapiens
  Table A; Target 78755; HLA-B*40:02; SLC45A2; ENSG00000164175; TAA
KNGYVNPEL

SEQ ID NO: 78756 - protein, 9 aa, Homo sapiens
  Table A; Target 78756; HLA-B*58:01; SLC45A2; ENSG00000164175; TAA
KNGYVNPEL

SEQ ID NO: 78757 - protein, 9 aa, Homo sapiens
  Table A; Target 78757; HLA-C*06:02; SLC45A2; ENSG00000164175; TAA
KNGYVNPEL

SEQ ID NO: 78758 - protein, 9 aa, Homo sapiens
  Table A; Target 78758; HLA-C*07:01; SLC45A2; ENSG00000164175; TAA
KNGYVNPEL

SEQ ID NO: 78759 - protein, 9 aa, Homo sapiens
  Table A; Target 78759; HLA-C*07:02; SLC45A2; ENSG00000164175; TAA
KNGYVNPEL

SEQ ID NO: 78760 - protein, 9 aa, Homo sapiens
  Table A; Target 78760; HLA-C*12:03; SLC45A2; ENSG00000164175; TAA
KNGYVNPEL

SEQ ID NO: 78761 - protein, 9 aa, Homo sapiens
  Table A; Target 78761; HLA-A*02:04; SLC45A2; ENSG00000164175; TAA
KVLVSYIGL

SEQ ID NO: 78762 - protein, 9 aa, Homo sapiens
  Table A; Target 78762; HLA-A*02:07; SLC45A2; ENSG00000164175; TAA
KVLVSYIGL

SEQ ID NO: 78763 - protein, 9 aa, Homo sapiens
  Table A; Target 78763; HLA-A*03:01; SLC45A2; ENSG00000164175; TAA
KVLVSYIGL

SEQ ID NO: 78764 - protein, 9 aa, Homo sapiens
  Table A; Target 78764; HLA-A*31:01; SLC45A2; ENSG00000164175; TAA
KVLVSYIGL

SEQ ID NO: 78765 - protein, 10 aa, Homo sapiens
  Table A; Target 78765; HLA-A*03:01; SLC45A2; ENSG00000164175; TAA
KVLVSYIGLK

SEQ ID NO: 78766 - protein, 10 aa, Homo sapiens
  Table A; Target 78766; HLA-A*01:01; SLC45A2; ENSG00000164175; TAA
LADDGPFDSV

SEQ ID NO: 78767 - protein, 10 aa, Homo sapiens
  Table A; Target 78767; HLA-A*02:07; SLC45A2; ENSG00000164175; TAA
LADDGPFDSV

SEQ ID NO: 78768 - protein, 10 aa, Homo sapiens
  Table A; Target 78768; HLA-B*27:05; SLC45A2; ENSG00000164175; TAA
LADDGPFDSV

SEQ ID NO: 78769 - protein, 10 aa, Homo sapiens
  Table A; Target 78769; HLA-C*01:02; SLC45A2; ENSG00000164175; TAA
LADDGPFDSV

SEQ ID NO: 78770 - protein, 10 aa, Homo sapiens
  Table A; Target 78770; HLA-C*03:03; SLC45A2; ENSG00000164175; TAA
LADDGPFDSV

SEQ ID NO: 78771 - protein, 10 aa, Homo sapiens
  Table A; Target 78771; HLA-C*03:04; SLC45A2; ENSG00000164175; TAA
LADDGPFDSV

SEQ ID NO: 78772 - protein, 10 aa, Homo sapiens
  Table A; Target 78772; HLA-C*05:01; SLC45A2; ENSG00000164175; TAA
LADDGPFDSV

SEQ ID NO: 78773 - protein, 10 aa, Homo sapiens
  Table A; Target 78773; HLA-C*03:03; SLC45A2; ENSG00000164175; TAA
LCINSVFSSL

SEQ ID NO: 78774 - protein, 10 aa, Homo sapiens
  Table A; Target 78774; HLA-C*03:04; SLC45A2; ENSG00000164175; TAA
LCINSVFSSL

SEQ ID NO: 78775 - protein, 8 aa, Homo sapiens
  Table A; Target 78775; HLA-B*35:01; SLC45A2; ENSG00000164175; TAA
LFDFAADF

SEQ ID NO: 78776 - protein, 8 aa, Homo sapiens
  Table A; Target 78776; HLA-C*04:01; SLC45A2; ENSG00000164175; TAA
LFDFAADF

SEQ ID NO: 78777 - protein, 8 aa, Homo sapiens
  Table A; Target 78777; HLA-A*23:01; SLC45A2; ENSG00000164175; TAA
LFGLGTGF

SEQ ID NO: 78778 - protein, 8 aa, Homo sapiens
  Table A; Target 78778; HLA-C*04:01; SLC45A2; ENSG00000164175; TAA
LFGLGTGF

SEQ ID NO: 78779 - protein, 8 aa, Homo sapiens
  Table A; Target 78779; HLA-C*14:02; SLC45A2; ENSG00000164175; TAA
LFGLGTGF

SEQ ID NO: 78780 - protein, 9 aa, Homo sapiens
  Table A; Target 78780; HLA-C*04:01; SLC45A2; ENSG00000164175; TAA
LFGVMSSTL

SEQ ID NO: 78781 - protein, 9 aa, Homo sapiens
  Table A; Target 78781; HLA-C*14:02; SLC45A2; ENSG00000164175; TAA
LFGVMSSTL

SEQ ID NO: 78782 - protein, 10 aa, Homo sapiens
  Table A; Target 78782; HLA-A*29:02; SLC45A2; ENSG00000164175; TAA
LFGVMSSTLY

SEQ ID NO: 78783 - protein, 9 aa, Homo sapiens
  Table A; Target 78783; HLA-A*23:01; SLC45A2; ENSG00000164175; TAA
LFPNVYSTL

SEQ ID NO: 78784 - protein, 9 aa, Homo sapiens
  Table A; Target 78784; HLA-A*24:02; SLC45A2; ENSG00000164175; TAA
LFPNVYSTL

SEQ ID NO: 78785 - protein, 9 aa, Homo sapiens
  Table A; Target 78785; HLA-C*01:02; SLC45A2; ENSG00000164175; TAA
LFPNVYSTL

SEQ ID NO: 78786 - protein, 9 aa, Homo sapiens
  Table A; Target 78786; HLA-C*14:02; SLC45A2; ENSG00000164175; TAA
LFPNVYSTL

SEQ ID NO: 78787 - protein, 9 aa, Homo sapiens
  Table A; Target 78787; HLA-C*01:02; SLC45A2; ENSG00000164175; TAA
LFTGFGGAL

SEQ ID NO: 78788 - protein, 9 aa, Homo sapiens
  Table A; Target 78788; HLA-C*03:03; SLC45A2; ENSG00000164175; TAA
LFTGFGGAL

SEQ ID NO: 78789 - protein, 9 aa, Homo sapiens
  Table A; Target 78789; HLA-C*03:04; SLC45A2; ENSG00000164175; TAA
LFTGFGGAL

SEQ ID NO: 78790 - protein, 9 aa, Homo sapiens
  Table A; Target 78790; HLA-C*14:02; SLC45A2; ENSG00000164175; TAA
LFTGFGGAL

SEQ ID NO: 78791 - protein, 11 aa, Homo sapiens
  Table A; Target 78791; HLA-A*29:02; SLC45A2; ENSG00000164175; TAA
LFTGFGGALGY

SEQ ID NO: 78792 - protein, 8 aa, Homo sapiens
  Table A; Target 78792; HLA-B*54:01; SLC45A2; ENSG00000164175; TAA
LGFLVNTA

SEQ ID NO: 78793 - protein, 9 aa, Homo sapiens
  Table A; Target 78793; HLA-B*46:01; SLC45A2; ENSG00000164175; TAA
LGRLLGTEF

SEQ ID NO: 78794 - protein, 9 aa, Homo sapiens
  Table A; Target 78794; HLA-C*02:02; SLC45A2; ENSG00000164175; TAA
LGTGFIGLF

SEQ ID NO: 78795 - protein, 9 aa, Homo sapiens
  Table A; Target 78795; HLA-C*12:03; SLC45A2; ENSG00000164175; TAA
LGTGFIGLF

SEQ ID NO: 78796 - protein, 9 aa, Homo sapiens
  Table A; Target 78796; HLA-A*02:01; SLC45A2; ENSG00000164175; TAA
LIYERGVEV

SEQ ID NO: 78797 - protein, 9 aa, Homo sapiens
  Table A; Target 78797; HLA-A*02:03; SLC45A2; ENSG00000164175; TAA
LIYERGVEV

SEQ ID NO: 78798 - protein, 9 aa, Homo sapiens
  Table A; Target 78798; HLA-A*02:04; SLC45A2; ENSG00000164175; TAA
LIYERGVEV

SEQ ID NO: 78799 - protein, 9 aa, Homo sapiens
  Table A; Target 78799; HLA-A*02:07; SLC45A2; ENSG00000164175; TAA
LIYERGVEV

SEQ ID NO: 78800 - protein, 9 aa, Homo sapiens
  Table A; Target 78800; HLA-A*30:01; SLC45A2; ENSG00000164175; TAA
LIYERGVEV

SEQ ID NO: 78801 - protein, 9 aa, Homo sapiens
  Table A; Target 78801; HLA-A*68:02; SLC45A2; ENSG00000164175; TAA
LIYERGVEV

SEQ ID NO: 78802 - protein, 9 aa, Homo sapiens
  Table A; Target 78802; HLA-B*08:01; SLC45A2; ENSG00000164175; TAA
LIYERGVEV

SEQ ID NO: 78803 - protein, 9 aa, Homo sapiens
  Table A; Target 78803; HLA-B*13:02; SLC45A2; ENSG00000164175; TAA
LIYERGVEV

SEQ ID NO: 78804 - protein, 9 aa, Homo sapiens
  Table A; Target 78804; HLA-B*37:01; SLC45A2; ENSG00000164175; TAA
LIYERGVEV

SEQ ID NO: 78805 - protein, 9 aa, Homo sapiens
  Table A; Target 78805; HLA-B*46:01; SLC45A2; ENSG00000164175; TAA
LIYERGVEV

SEQ ID NO: 78806 - protein, 9 aa, Homo sapiens
  Table A; Target 78806; HLA-B*49:01; SLC45A2; ENSG00000164175; TAA
LIYERGVEV

SEQ ID NO: 78807 - protein, 9 aa, Homo sapiens
  Table A; Target 78807; HLA-B*51:01; SLC45A2; ENSG00000164175; TAA
LIYERGVEV

SEQ ID NO: 78808 - protein, 9 aa, Homo sapiens
  Table A; Target 78808; HLA-B*54:01; SLC45A2; ENSG00000164175; TAA
LIYERGVEV

SEQ ID NO: 78809 - protein, 9 aa, Homo sapiens
  Table A; Target 78809; HLA-B*55:01; SLC45A2; ENSG00000164175; TAA
LIYERGVEV

SEQ ID NO: 78810 - protein, 9 aa, Homo sapiens
  Table A; Target 78810; HLA-C*02:02; SLC45A2; ENSG00000164175; TAA
LIYERGVEV

SEQ ID NO: 78811 - protein, 9 aa, Homo sapiens
  Table A; Target 78811; HLA-C*03:03; SLC45A2; ENSG00000164175; TAA
LIYERGVEV

SEQ ID NO: 78812 - protein, 9 aa, Homo sapiens
  Table A; Target 78812; HLA-C*03:04; SLC45A2; ENSG00000164175; TAA
LIYERGVEV

SEQ ID NO: 78813 - protein, 9 aa, Homo sapiens
  Table A; Target 78813; HLA-C*05:01; SLC45A2; ENSG00000164175; TAA
LIYERGVEV

SEQ ID NO: 78814 - protein, 9 aa, Homo sapiens
  Table A; Target 78814; HLA-C*12:03; SLC45A2; ENSG00000164175; TAA
LIYERGVEV

SEQ ID NO: 78815 - protein, 9 aa, Homo sapiens
  Table A; Target 78815; HLA-C*16:01; SLC45A2; ENSG00000164175; TAA
LIYERGVEV

SEQ ID NO: 78816 - protein, 9 aa, Homo sapiens
  Table A; Target 78816; HLA-C*16:02; SLC45A2; ENSG00000164175; TAA
LIYERGVEV

SEQ ID NO: 78817 - protein, 9 aa, Homo sapiens
  Table A; Target 78817; HLA-C*16:04; SLC45A2; ENSG00000164175; TAA
LIYERGVEV

SEQ ID NO: 78818 - protein, 9 aa, Homo sapiens
  Table A; Target 78818; HLA-A*02:07; SLC45A2; ENSG00000164175; TAA
LLFGLGTGF

SEQ ID NO: 78819 - protein, 9 aa, Homo sapiens
  Table A; Target 78819; HLA-A*23:01; SLC45A2; ENSG00000164175; TAA
LLFGLGTGF

SEQ ID NO: 78820 - protein, 9 aa, Homo sapiens
  Table A; Target 78820; HLA-A*29:02; SLC45A2; ENSG00000164175; TAA
LLFGLGTGF

SEQ ID NO: 78821 - protein, 9 aa, Homo sapiens
  Table A; Target 78821; HLA-A*32:01; SLC45A2; ENSG00000164175; TAA
LLFGLGTGF

SEQ ID NO: 78822 - protein, 9 aa, Homo sapiens
  Table A; Target 78822; HLA-B*15:01; SLC45A2; ENSG00000164175; TAA
LLFGLGTGF

SEQ ID NO: 78823 - protein, 9 aa, Homo sapiens
  Table A; Target 78823; HLA-B*15:03; SLC45A2; ENSG00000164175; TAA
LLFGLGTGF

SEQ ID NO: 78824 - protein, 9 aa, Homo sapiens
  Table A; Target 78824; HLA-B*46:01; SLC45A2; ENSG00000164175; TAA
LLFGLGTGF

SEQ ID NO: 78825 - protein, 9 aa, Homo sapiens
  Table A; Target 78825; HLA-C*02:02; SLC45A2; ENSG00000164175; TAA
LLFGLGTGF

SEQ ID NO: 78826 - protein, 9 aa, Homo sapiens
  Table A; Target 78826; HLA-C*07:04; SLC45A2; ENSG00000164175; TAA
LLFGLGTGF

SEQ ID NO: 78827 - protein, 10 aa, Homo sapiens
  Table A; Target 78827; HLA-A*02:01; SLC45A2; ENSG00000164175; TAA
LLFGLGTGFI

SEQ ID NO: 78828 - protein, 10 aa, Homo sapiens
  Table A; Target 78828; HLA-A*02:03; SLC45A2; ENSG00000164175; TAA
LLFGLGTGFI

SEQ ID NO: 78829 - protein, 10 aa, Homo sapiens
  Table A; Target 78829; HLA-A*02:04; SLC45A2; ENSG00000164175; TAA
LLFGLGTGFI

SEQ ID NO: 78830 - protein, 8 aa, Homo sapiens
  Table A; Target 78830; HLA-A*02:01; SLC45A2; ENSG00000164175; TAA
LLGTEFQV

SEQ ID NO: 78831 - protein, 8 aa, Homo sapiens
  Table A; Target 78831; HLA-A*02:04; SLC45A2; ENSG00000164175; TAA
LLGTEFQV

SEQ ID NO: 78832 - protein, 9 aa, Homo sapiens
  Table A; Target 78832; HLA-A*02:01; SLC45A2; ENSG00000164175; TAA
LLQPVVGSA

SEQ ID NO: 78833 - protein, 9 aa, Homo sapiens
  Table A; Target 78833; HLA-A*02:03; SLC45A2; ENSG00000164175; TAA
LLQPVVGSA

SEQ ID NO: 78834 - protein, 9 aa, Homo sapiens
  Table A; Target 78834; HLA-A*02:04; SLC45A2; ENSG00000164175; TAA
LLQPVVGSA

SEQ ID NO: 78835 - protein, 9 aa, Homo sapiens
  Table A; Target 78835; HLA-A*02:07; SLC45A2; ENSG00000164175; TAA
LLQPVVGSA

SEQ ID NO: 78836 - protein, 9 aa, Homo sapiens
  Table A; Target 78836; HLA-A*32:01; SLC45A2; ENSG00000164175; TAA
LLQPVVGSA

SEQ ID NO: 78837 - protein, 9 aa, Homo sapiens
  Table A; Target 78837; HLA-B*39:01; SLC45A2; ENSG00000164175; TAA
LLQPVVGSA

SEQ ID NO: 78838 - protein, 9 aa, Homo sapiens
  Table A; Target 78838; HLA-B*54:01; SLC45A2; ENSG00000164175; TAA
LLQPVVGSA

SEQ ID NO: 78839 - protein, 9 aa, Homo sapiens
  Table A; Target 78839; HLA-B*55:01; SLC45A2; ENSG00000164175; TAA
LLQPVVGSA

SEQ ID NO: 78840 - protein, 9 aa, Homo sapiens
  Table A; Target 78840; HLA-B*56:01; SLC45A2; ENSG00000164175; TAA
LLQPVVGSA

SEQ ID NO: 78841 - protein, 9 aa, Homo sapiens
  Table A; Target 78841; HLA-C*06:02; SLC45A2; ENSG00000164175; TAA
LLQPVVGSA

SEQ ID NO: 78842 - protein, 9 aa, Homo sapiens
  Table A; Target 78842; HLA-C*14:02; SLC45A2; ENSG00000164175; TAA
LLQPVVGSA

SEQ ID NO: 78843 - protein, 11 aa, Homo sapiens
  Table A; Target 78843; HLA-A*01:01; SLC45A2; ENSG00000164175; TAA
LLSVGLPSSLY

SEQ ID NO: 78844 - protein, 8 aa, Homo sapiens
  Table A; Target 78844; HLA-B*51:01; SLC45A2; ENSG00000164175; TAA
LPSSLYSI

SEQ ID NO: 78845 - protein, 8 aa, Homo sapiens
  Table A; Target 78845; HLA-B*54:01; SLC45A2; ENSG00000164175; TAA
LPSSLYSI

SEQ ID NO: 78846 - protein, 8 aa, Homo sapiens
  Table A; Target 78846; HLA-B*56:01; SLC45A2; ENSG00000164175; TAA
LPSSLYSI

SEQ ID NO: 78847 - protein, 9 aa, Homo sapiens
  Table A; Target 78847; HLA-B*35:03; SLC45A2; ENSG00000164175; TAA
LPSSLYSIV

SEQ ID NO: 78848 - protein, 9 aa, Homo sapiens
  Table A; Target 78848; HLA-B*51:01; SLC45A2; ENSG00000164175; TAA
LPSSLYSIV

SEQ ID NO: 78849 - protein, 9 aa, Homo sapiens
  Table A; Target 78849; HLA-B*54:01; SLC45A2; ENSG00000164175; TAA
LPSSLYSIV

SEQ ID NO: 78850 - protein, 9 aa, Homo sapiens
  Table A; Target 78850; HLA-B*56:01; SLC45A2; ENSG00000164175; TAA
LPSSLYSIV

SEQ ID NO: 78851 - protein, 9 aa, Homo sapiens
  Table A; Target 78851; HLA-A*24:02; SLC45A2; ENSG00000164175; TAA
LSPILGFLL

SEQ ID NO: 78852 - protein, 9 aa, Homo sapiens
  Table A; Target 78852; HLA-A*01:01; SLC45A2; ENSG00000164175; TAA
LSSDGMYEY

SEQ ID NO: 78853 - protein, 9 aa, Homo sapiens
  Table A; Target 78853; HLA-A*26:01; SLC45A2; ENSG00000164175; TAA
LSSDGMYEY

SEQ ID NO: 78854 - protein, 9 aa, Homo sapiens
  Table A; Target 78854; HLA-A*29:02; SLC45A2; ENSG00000164175; TAA
LSSDGMYEY

SEQ ID NO: 78855 - protein, 9 aa, Homo sapiens
  Table A; Target 78855; HLA-A*30:02; SLC45A2; ENSG00000164175; TAA
LSSDGMYEY

SEQ ID NO: 78856 - protein, 9 aa, Homo sapiens
  Table A; Target 78856; HLA-A*32:01; SLC45A2; ENSG00000164175; TAA
LSSDGMYEY

SEQ ID NO: 78857 - protein, 9 aa, Homo sapiens
  Table A; Target 78857; HLA-B*35:01; SLC45A2; ENSG00000164175; TAA
LSSDGMYEY

SEQ ID NO: 78858 - protein, 9 aa, Homo sapiens
  Table A; Target 78858; HLA-B*46:01; SLC45A2; ENSG00000164175; TAA
LSSDGMYEY

SEQ ID NO: 78859 - protein, 9 aa, Homo sapiens
  Table A; Target 78859; HLA-B*58:01; SLC45A2; ENSG00000164175; TAA
LSSDGMYEY

SEQ ID NO: 78860 - protein, 9 aa, Homo sapiens
  Table A; Target 78860; HLA-C*02:02; SLC45A2; ENSG00000164175; TAA
LSSDGMYEY

SEQ ID NO: 78861 - protein, 9 aa, Homo sapiens
  Table A; Target 78861; HLA-C*16:01; SLC45A2; ENSG00000164175; TAA
LSSDGMYEY

SEQ ID NO: 78862 - protein, 9 aa, Homo sapiens
  Table A; Target 78862; HLA-C*16:02; SLC45A2; ENSG00000164175; TAA
LSSDGMYEY

SEQ ID NO: 78863 - protein, 9 aa, Homo sapiens
  Table A; Target 78863; HLA-C*16:04; SLC45A2; ENSG00000164175; TAA
LSSDGMYEY

SEQ ID NO: 78864 - protein, 9 aa, Homo sapiens
  Table A; Target 78864; HLA-B*40:01; SLC45A2; ENSG00000164175; TAA
LSVGLPSSL

SEQ ID NO: 78865 - protein, 9 aa, Homo sapiens
  Table A; Target 78865; HLA-B*58:01; SLC45A2; ENSG00000164175; TAA
LSVGLPSSL

SEQ ID NO: 78866 - protein, 9 aa, Homo sapiens
  Table A; Target 78866; HLA-C*02:02; SLC45A2; ENSG00000164175; TAA
LSVGLPSSL

SEQ ID NO: 78867 - protein, 9 aa, Homo sapiens
  Table A; Target 78867; HLA-C*03:03; SLC45A2; ENSG00000164175; TAA
LSVGLPSSL

SEQ ID NO: 78868 - protein, 9 aa, Homo sapiens
  Table A; Target 78868; HLA-C*03:04; SLC45A2; ENSG00000164175; TAA
LSVGLPSSL

SEQ ID NO: 78869 - protein, 9 aa, Homo sapiens
  Table A; Target 78869; HLA-C*12:03; SLC45A2; ENSG00000164175; TAA
LSVGLPSSL

SEQ ID NO: 78870 - protein, 9 aa, Homo sapiens
  Table A; Target 78870; HLA-C*16:01; SLC45A2; ENSG00000164175; TAA
LSVGLPSSL

SEQ ID NO: 78871 - protein, 10 aa, Homo sapiens
  Table A; Target 78871; HLA-A*01:01; SLC45A2; ENSG00000164175; TAA
LSVGLPSSLY

SEQ ID NO: 78872 - protein, 10 aa, Homo sapiens
  Table A; Target 78872; HLA-A*26:01; SLC45A2; ENSG00000164175; TAA
LSVGLPSSLY

SEQ ID NO: 78873 - protein, 10 aa, Homo sapiens
  Table A; Target 78873; HLA-A*29:02; SLC45A2; ENSG00000164175; TAA
LSVGLPSSLY

SEQ ID NO: 78874 - protein, 10 aa, Homo sapiens
  Table A; Target 78874; HLA-A*30:02; SLC45A2; ENSG00000164175; TAA
LSVGLPSSLY

SEQ ID NO: 78875 - protein, 10 aa, Homo sapiens
  Table A; Target 78875; HLA-C*07:01; SLC45A2; ENSG00000164175; TAA
LSVGLPSSLY

SEQ ID NO: 78876 - protein, 9 aa, Homo sapiens
  Table A; Target 78876; HLA-A*68:02; SLC45A2; ENSG00000164175; TAA
LTLGVMMLV

SEQ ID NO: 78877 - protein, 10 aa, Homo sapiens
  Table A; Target 78877; HLA-A*68:02; SLC45A2; ENSG00000164175; TAA
LVGGGLGFLV

SEQ ID NO: 78878 - protein, 9 aa, Homo sapiens
  Table A; Target 78878; HLA-A*02:04; SLC45A2; ENSG00000164175; TAA
LVLTLCFTV

SEQ ID NO: 78879 - protein, 8 aa, Homo sapiens
  Table A; Target 78879; HLA-A*01:01; SLC45A2; ENSG00000164175; TAA
LVNMPPHY

SEQ ID NO: 78880 - protein, 8 aa, Homo sapiens
  Table A; Target 78880; HLA-A*29:02; SLC45A2; ENSG00000164175; TAA
LVNMPPHY

SEQ ID NO: 78881 - protein, 8 aa, Homo sapiens
  Table A; Target 78881; HLA-A*30:02; SLC45A2; ENSG00000164175; TAA
LVNMPPHY

SEQ ID NO: 78882 - protein, 8 aa, Homo sapiens
  Table A; Target 78882; HLA-B*39:01; SLC45A2; ENSG00000164175; TAA
LVNMPPHY

SEQ ID NO: 78883 - protein, 9 aa, Homo sapiens
  Table A; Target 78883; HLA-A*03:02; SLC45A2; ENSG00000164175; TAA
LVNMPPHYR

SEQ ID NO: 78884 - protein, 9 aa, Homo sapiens
  Table A; Target 78884; HLA-A*11:01; SLC45A2; ENSG00000164175; TAA
LVNMPPHYR

SEQ ID NO: 78885 - protein, 9 aa, Homo sapiens
  Table A; Target 78885; HLA-A*31:01; SLC45A2; ENSG00000164175; TAA
LVNMPPHYR

SEQ ID NO: 78886 - protein, 9 aa, Homo sapiens
  Table A; Target 78886; HLA-A*33:01; SLC45A2; ENSG00000164175; TAA
LVNMPPHYR

SEQ ID NO: 78887 - protein, 9 aa, Homo sapiens
  Table A; Target 78887; HLA-A*33:03; SLC45A2; ENSG00000164175; TAA
LVNMPPHYR

SEQ ID NO: 78888 - protein, 9 aa, Homo sapiens
  Table A; Target 78888; HLA-A*68:01; SLC45A2; ENSG00000164175; TAA
LVNMPPHYR

SEQ ID NO: 78889 - protein, 10 aa, Homo sapiens
  Table A; Target 78889; HLA-A*29:02; SLC45A2; ENSG00000164175; TAA
LVNMPPHYRY

SEQ ID NO: 78890 - protein, 9 aa, Homo sapiens
  Table A; Target 78890; HLA-B*46:01; SLC45A2; ENSG00000164175; TAA
LVNTAGTVV

SEQ ID NO: 78891 - protein, 9 aa, Homo sapiens
  Table A; Target 78891; HLA-B*51:01; SLC45A2; ENSG00000164175; TAA
LVNTAGTVV

SEQ ID NO: 78892 - protein, 9 aa, Homo sapiens
  Table A; Target 78892; HLA-C*01:02; SLC45A2; ENSG00000164175; TAA
LVNTAGTVV

SEQ ID NO: 78893 - protein, 9 aa, Homo sapiens
  Table A; Target 78893; HLA-C*03:03; SLC45A2; ENSG00000164175; TAA
LVNTAGTVV

SEQ ID NO: 78894 - protein, 9 aa, Homo sapiens
  Table A; Target 78894; HLA-C*03:04; SLC45A2; ENSG00000164175; TAA
LVNTAGTVV

SEQ ID NO: 78895 - protein, 9 aa, Homo sapiens
  Table A; Target 78895; HLA-C*05:01; SLC45A2; ENSG00000164175; TAA
LVNTAGTVV

SEQ ID NO: 78896 - protein, 9 aa, Homo sapiens
  Table A; Target 78896; HLA-C*07:04; SLC45A2; ENSG00000164175; TAA
LVNTAGTVV

SEQ ID NO: 78897 - protein, 9 aa, Homo sapiens
  Table A; Target 78897; HLA-C*14:02; SLC45A2; ENSG00000164175; TAA
LVNTAGTVV

SEQ ID NO: 78898 - protein, 11 aa, Homo sapiens
  Table A; Target 78898; HLA-A*01:01; SLC45A2; ENSG00000164175; TAA
LVSYIGLKGLY

SEQ ID NO: 78899 - protein, 11 aa, Homo sapiens
  Table A; Target 78899; HLA-A*29:02; SLC45A2; ENSG00000164175; TAA
LVSYIGLKGLY

SEQ ID NO: 78900 - protein, 9 aa, Homo sapiens
  Table A; Target 78900; HLA-B*35:01; SLC45A2; ENSG00000164175; TAA
LVWAISVTM

SEQ ID NO: 78901 - protein, 8 aa, Homo sapiens
  Table A; Target 78901; HLA-A*23:01; SLC45A2; ENSG00000164175; TAA
LYFTGYLL

SEQ ID NO: 78902 - protein, 8 aa, Homo sapiens
  Table A; Target 78902; HLA-A*24:02; SLC45A2; ENSG00000164175; TAA
LYFTGYLL

SEQ ID NO: 78903 - protein, 9 aa, Homo sapiens
  Table A; Target 78903; HLA-A*23:01; SLC45A2; ENSG00000164175; TAA
LYFTGYLLF

SEQ ID NO: 78904 - protein, 9 aa, Homo sapiens
  Table A; Target 78904; HLA-A*24:02; SLC45A2; ENSG00000164175; TAA
LYFTGYLLF

SEQ ID NO: 78905 - protein, 9 aa, Homo sapiens
  Table A; Target 78905; HLA-A*29:02; SLC45A2; ENSG00000164175; TAA
LYFTGYLLF

SEQ ID NO: 78906 - protein, 9 aa, Homo sapiens
  Table A; Target 78906; HLA-B*57:01; SLC45A2; ENSG00000164175; TAA
LYFTGYLLF

SEQ ID NO: 78907 - protein, 8 aa, Homo sapiens
  Table A; Target 78907; HLA-A*23:01; SLC45A2; ENSG00000164175; TAA
LYLNGATV

SEQ ID NO: 78908 - protein, 8 aa, Homo sapiens
  Table A; Target 78908; HLA-C*14:02; SLC45A2; ENSG00000164175; TAA
LYLNGATV

SEQ ID NO: 78909 - protein, 9 aa, Homo sapiens
  Table A; Target 78909; HLA-A*23:01; SLC45A2; ENSG00000164175; TAA
LYLNGATVV

SEQ ID NO: 78910 - protein, 9 aa, Homo sapiens
  Table A; Target 78910; HLA-A*24:02; SLC45A2; ENSG00000164175; TAA
LYLNGATVV

SEQ ID NO: 78911 - protein, 9 aa, Homo sapiens
  Table A; Target 78911; HLA-B*46:01; SLC45A2; ENSG00000164175; TAA
LYLNGATVV

SEQ ID NO: 78912 - protein, 9 aa, Homo sapiens
  Table A; Target 78912; HLA-C*01:02; SLC45A2; ENSG00000164175; TAA
LYLNGATVV

SEQ ID NO: 78913 - protein, 9 aa, Homo sapiens
  Table A; Target 78913; HLA-C*04:01; SLC45A2; ENSG00000164175; TAA
LYLNGATVV

SEQ ID NO: 78914 - protein, 9 aa, Homo sapiens
  Table A; Target 78914; HLA-C*14:02; SLC45A2; ENSG00000164175; TAA
LYLNGATVV

SEQ ID NO: 78915 - protein, 10 aa, Homo sapiens
  Table A; Target 78915; HLA-A*23:01; SLC45A2; ENSG00000164175; TAA
LYLNGATVVA

SEQ ID NO: 78916 - protein, 10 aa, Homo sapiens
  Table A; Target 78916; HLA-C*14:02; SLC45A2; ENSG00000164175; TAA
LYLNGATVVA

SEQ ID NO: 78917 - protein, 11 aa, Homo sapiens
  Table A; Target 78917; HLA-C*14:02; SLC45A2; ENSG00000164175; TAA
LYLNGATVVAA

SEQ ID NO: 78918 - protein, 9 aa, Homo sapiens
  Table A; Target 78918; HLA-A*24:02; SLC45A2; ENSG00000164175; TAA
LYSYFQKVL

SEQ ID NO: 78919 - protein, 8 aa, Homo sapiens
  Table A; Target 78919; HLA-A*23:01; SLC45A2; ENSG00000164175; TAA
LYTVPFNL

SEQ ID NO: 78920 - protein, 8 aa, Homo sapiens
  Table A; Target 78920; HLA-A*24:02; SLC45A2; ENSG00000164175; TAA
LYTVPFNL

SEQ ID NO: 78921 - protein, 9 aa, Homo sapiens
  Table A; Target 78921; HLA-A*23:01; SLC45A2; ENSG00000164175; TAA
LYTVPFNLI

SEQ ID NO: 78922 - protein, 9 aa, Homo sapiens
  Table A; Target 78922; HLA-A*24:02; SLC45A2; ENSG00000164175; TAA
LYTVPFNLI

SEQ ID NO: 78923 - protein, 8 aa, Homo sapiens
  Table A; Target 78923; HLA-B*54:01; SLC45A2; ENSG00000164175; TAA
MALYLNGA

SEQ ID NO: 78924 - protein, 10 aa, Homo sapiens
  Table A; Target 78924; HLA-B*51:01; SLC45A2; ENSG00000164175; TAA
MALYLNGATV

SEQ ID NO: 78925 - protein, 10 aa, Homo sapiens
  Table A; Target 78925; HLA-B*54:01; SLC45A2; ENSG00000164175; TAA
MALYLNGATV

SEQ ID NO: 78926 - protein, 11 aa, Homo sapiens
  Table A; Target 78926; HLA-B*54:01; SLC45A2; ENSG00000164175; TAA
MALYLNGATVV

SEQ ID NO: 78927 - protein, 8 aa, Homo sapiens
  Table A; Target 78927; HLA-B*46:01; SLC45A2; ENSG00000164175; TAA
MAMFGREF

SEQ ID NO: 78928 - protein, 8 aa, Homo sapiens
  Table A; Target 78928; HLA-C*03:03; SLC45A2; ENSG00000164175; TAA
MAMFGREF

SEQ ID NO: 78929 - protein, 8 aa, Homo sapiens
  Table A; Target 78929; HLA-C*03:04; SLC45A2; ENSG00000164175; TAA
MAMFGREF

SEQ ID NO: 78930 - protein, 8 aa, Homo sapiens
  Table A; Target 78930; HLA-C*16:01; SLC45A2; ENSG00000164175; TAA
MAMFGREF

SEQ ID NO: 78931 - protein, 10 aa, Homo sapiens
  Table A; Target 78931; HLA-A*29:02; SLC45A2; ENSG00000164175; TAA
MAMFGREFCY

SEQ ID NO: 78932 - protein, 9 aa, Homo sapiens
  Table A; Target 78932; HLA-C*04:01; SLC45A2; ENSG00000164175; TAA
MDCATLTCM

SEQ ID NO: 78933 - protein, 8 aa, Homo sapiens
  Table A; Target 78933; HLA-A*29:02; SLC45A2; ENSG00000164175; TAA
MFGREFCY

SEQ ID NO: 78934 - protein, 10 aa, Homo sapiens
  Table A; Target 78934; HLA-C*07:06; SLC45A2; ENSG00000164175; TAA
MGSNSGQAGR

SEQ ID NO: 78935 - protein, 9 aa, Homo sapiens
  Table A; Target 78935; HLA-A*02:01; SLC45A2; ENSG00000164175; TAA
MLVGMALYL

SEQ ID NO: 78936 - protein, 9 aa, Homo sapiens
  Table A; Target 78936; HLA-A*02:03; SLC45A2; ENSG00000164175; TAA
MLVGMALYL

SEQ ID NO: 78937 - protein, 9 aa, Homo sapiens
  Table A; Target 78937; HLA-A*02:04; SLC45A2; ENSG00000164175; TAA
MLVGMALYL

SEQ ID NO: 78938 - protein, 9 aa, Homo sapiens
  Table A; Target 78938; HLA-A*02:07; SLC45A2; ENSG00000164175; TAA
MLVGMALYL

SEQ ID NO: 78939 - protein, 9 aa, Homo sapiens
  Table A; Target 78939; HLA-A*23:01; SLC45A2; ENSG00000164175; TAA
MLVGMALYL

SEQ ID NO: 78940 - protein, 9 aa, Homo sapiens
  Table A; Target 78940; HLA-A*29:02; SLC45A2; ENSG00000164175; TAA
MLVGMALYL

SEQ ID NO: 78941 - protein, 8 aa, Homo sapiens
  Table A; Target 78941; HLA-B*08:01; SLC45A2; ENSG00000164175; TAA
MMLVGMAL

SEQ ID NO: 78942 - protein, 8 aa, Homo sapiens
  Table A; Target 78942; HLA-B*46:01; SLC45A2; ENSG00000164175; TAA
MMLVGMAL

SEQ ID NO: 78943 - protein, 8 aa, Homo sapiens
  Table A; Target 78943; HLA-C*01:02; SLC45A2; ENSG00000164175; TAA
MMLVGMAL

SEQ ID NO: 78944 - protein, 8 aa, Homo sapiens
  Table A; Target 78944; HLA-C*03:03; SLC45A2; ENSG00000164175; TAA
MMLVGMAL

SEQ ID NO: 78945 - protein, 8 aa, Homo sapiens
  Table A; Target 78945; HLA-C*03:04; SLC45A2; ENSG00000164175; TAA
MMLVGMAL

SEQ ID NO: 78946 - protein, 8 aa, Homo sapiens
  Table A; Target 78946; HLA-C*14:02; SLC45A2; ENSG00000164175; TAA
MMLVGMAL

SEQ ID NO: 78947 - protein, 9 aa, Homo sapiens
  Table A; Target 78947; HLA-A*29:02; SLC45A2; ENSG00000164175; TAA
MMLVGMALY

SEQ ID NO: 78948 - protein, 9 aa, Homo sapiens
  Table A; Target 78948; HLA-B*15:03; SLC45A2; ENSG00000164175; TAA
MMLVGMALY

SEQ ID NO: 78949 - protein, 9 aa, Homo sapiens
  Table A; Target 78949; HLA-B*46:01; SLC45A2; ENSG00000164175; TAA
MMLVGMALY

SEQ ID NO: 78950 - protein, 9 aa, Homo sapiens
  Table A; Target 78950; HLA-C*07:01; SLC45A2; ENSG00000164175; TAA
MMLVGMALY

SEQ ID NO: 78951 - protein, 10 aa, Homo sapiens
  Table A; Target 78951; HLA-C*06:02; SLC45A2; ENSG00000164175; TAA
MTLKSLLRAL

SEQ ID NO: 78952 - protein, 8 aa, Homo sapiens
  Table A; Target 78952; HLA-C*07:04; SLC45A2; ENSG00000164175; TAA
MVQLAQIL

SEQ ID NO: 78953 - protein, 9 aa, Homo sapiens
  Table A; Target 78953; HLA-A*33:03; SLC45A2; ENSG00000164175; TAA
MYEYGSIEK

SEQ ID NO: 78954 - protein, 9 aa, Homo sapiens
  Table A; Target 78954; HLA-B*27:02; SLC45A2; ENSG00000164175; TAA
MYEYGSIEK

SEQ ID NO: 78955 - protein, 9 aa, Homo sapiens
  Table A; Target 78955; HLA-C*01:02; SLC45A2; ENSG00000164175; TAA
MYEYGSIEK

SEQ ID NO: 78956 - protein, 10 aa, Homo sapiens
  Table A; Target 78956; HLA-C*06:02; SLC45A2; ENSG00000164175; TAA
MYEYGSIEKV

SEQ ID NO: 78957 - protein, 10 aa, Homo sapiens
  Table A; Target 78957; HLA-C*07:01; SLC45A2; ENSG00000164175; TAA
MYEYGSIEKV

SEQ ID NO: 78958 - protein, 9 aa, Homo sapiens
  Table A; Target 78958; HLA-A*30:01; SLC45A2; ENSG00000164175; TAA
NGATVVAAL

SEQ ID NO: 78959 - protein, 9 aa, Homo sapiens
  Table A; Target 78959; HLA-A*68:02; SLC45A2; ENSG00000164175; TAA
NGATVVAAL

SEQ ID NO: 78960 - protein, 9 aa, Homo sapiens
  Table A; Target 78960; HLA-B*27:05; SLC45A2; ENSG00000164175; TAA
NGATVVAAL

SEQ ID NO: 78961 - protein, 9 aa, Homo sapiens
  Table A; Target 78961; HLA-B*35:01; SLC45A2; ENSG00000164175; TAA
NGATVVAAL

SEQ ID NO: 78962 - protein, 9 aa, Homo sapiens
  Table A; Target 78962; HLA-B*35:03; SLC45A2; ENSG00000164175; TAA
NGATVVAAL

SEQ ID NO: 78963 - protein, 9 aa, Homo sapiens
  Table A; Target 78963; HLA-B*39:01; SLC45A2; ENSG00000164175; TAA
NGATVVAAL

SEQ ID NO: 78964 - protein, 9 aa, Homo sapiens
  Table A; Target 78964; HLA-B*40:01; SLC45A2; ENSG00000164175; TAA
NGATVVAAL

SEQ ID NO: 78965 - protein, 9 aa, Homo sapiens
  Table A; Target 78965; HLA-B*46:01; SLC45A2; ENSG00000164175; TAA
NGATVVAAL

SEQ ID NO: 78966 - protein, 9 aa, Homo sapiens
  Table A; Target 78966; HLA-B*55:01; SLC45A2; ENSG00000164175; TAA
NGATVVAAL

SEQ ID NO: 78967 - protein, 9 aa, Homo sapiens
  Table A; Target 78967; HLA-C*01:02; SLC45A2; ENSG00000164175; TAA
NGATVVAAL

SEQ ID NO: 78968 - protein, 9 aa, Homo sapiens
  Table A; Target 78968; HLA-C*03:03; SLC45A2; ENSG00000164175; TAA
NGATVVAAL

SEQ ID NO: 78969 - protein, 9 aa, Homo sapiens
  Table A; Target 78969; HLA-C*03:04; SLC45A2; ENSG00000164175; TAA
NGATVVAAL

SEQ ID NO: 78970 - protein, 9 aa, Homo sapiens
  Table A; Target 78970; HLA-C*07:04; SLC45A2; ENSG00000164175; TAA
NGATVVAAL

SEQ ID NO: 78971 - protein, 9 aa, Homo sapiens
  Table A; Target 78971; HLA-C*07:06; SLC45A2; ENSG00000164175; TAA
NGATVVAAL

SEQ ID NO: 78972 - protein, 9 aa, Homo sapiens
  Table A; Target 78972; HLA-C*12:03; SLC45A2; ENSG00000164175; TAA
NGATVVAAL

SEQ ID NO: 78973 - protein, 9 aa, Homo sapiens
  Table A; Target 78973; HLA-C*14:02; SLC45A2; ENSG00000164175; TAA
NGATVVAAL

SEQ ID NO: 78974 - protein, 9 aa, Homo sapiens
  Table A; Target 78974; HLA-C*16:01; SLC45A2; ENSG00000164175; TAA
NGATVVAAL

SEQ ID NO: 78975 - protein, 9 aa, Homo sapiens
  Table A; Target 78975; HLA-C*16:02; SLC45A2; ENSG00000164175; TAA
NGATVVAAL

SEQ ID NO: 78976 - protein, 8 aa, Homo sapiens
  Table A; Target 78976; HLA-B*08:01; SLC45A2; ENSG00000164175; TAA
NGYVNPEL

SEQ ID NO: 78977 - protein, 8 aa, Homo sapiens
  Table A; Target 78977; HLA-B*15:03; SLC45A2; ENSG00000164175; TAA
NGYVNPEL

SEQ ID NO: 78978 - protein, 8 aa, Homo sapiens
  Table A; Target 78978; HLA-B*27:05; SLC45A2; ENSG00000164175; TAA
NGYVNPEL

SEQ ID NO: 78979 - protein, 8 aa, Homo sapiens
  Table A; Target 78979; HLA-B*35:03; SLC45A2; ENSG00000164175; TAA
NGYVNPEL

SEQ ID NO: 78980 - protein, 8 aa, Homo sapiens
  Table A; Target 78980; HLA-B*39:01; SLC45A2; ENSG00000164175; TAA
NGYVNPEL

SEQ ID NO: 78981 - protein, 8 aa, Homo sapiens
  Table A; Target 78981; HLA-B*40:02; SLC45A2; ENSG00000164175; TAA
NGYVNPEL

SEQ ID NO: 78982 - protein, 8 aa, Homo sapiens
  Table A; Target 78982; HLA-B*46:01; SLC45A2; ENSG00000164175; TAA
NGYVNPEL

SEQ ID NO: 78983 - protein, 8 aa, Homo sapiens
  Table A; Target 78983; HLA-B*51:01; SLC45A2; ENSG00000164175; TAA
NGYVNPEL

SEQ ID NO: 78984 - protein, 8 aa, Homo sapiens
  Table A; Target 78984; HLA-C*01:02; SLC45A2; ENSG00000164175; TAA
NGYVNPEL

SEQ ID NO: 78985 - protein, 8 aa, Homo sapiens
  Table A; Target 78985; HLA-C*03:03; SLC45A2; ENSG00000164175; TAA
NGYVNPEL

SEQ ID NO: 78986 - protein, 8 aa, Homo sapiens
  Table A; Target 78986; HLA-C*03:04; SLC45A2; ENSG00000164175; TAA
NGYVNPEL

SEQ ID NO: 78987 - protein, 8 aa, Homo sapiens
  Table A; Target 78987; HLA-C*04:01; SLC45A2; ENSG00000164175; TAA
NGYVNPEL

SEQ ID NO: 78988 - protein, 8 aa, Homo sapiens
  Table A; Target 78988; HLA-C*05:01; SLC45A2; ENSG00000164175; TAA
NGYVNPEL

SEQ ID NO: 78989 - protein, 8 aa, Homo sapiens
  Table A; Target 78989; HLA-C*06:02; SLC45A2; ENSG00000164175; TAA
NGYVNPEL

SEQ ID NO: 78990 - protein, 8 aa, Homo sapiens
  Table A; Target 78990; HLA-C*07:01; SLC45A2; ENSG00000164175; TAA
NGYVNPEL

SEQ ID NO: 78991 - protein, 8 aa, Homo sapiens
  Table A; Target 78991; HLA-C*07:04; SLC45A2; ENSG00000164175; TAA
NGYVNPEL

SEQ ID NO: 78992 - protein, 8 aa, Homo sapiens
  Table A; Target 78992; HLA-C*12:03; SLC45A2; ENSG00000164175; TAA
NGYVNPEL

SEQ ID NO: 78993 - protein, 8 aa, Homo sapiens
  Table A; Target 78993; HLA-C*14:02; SLC45A2; ENSG00000164175; TAA
NGYVNPEL

SEQ ID NO: 78994 - protein, 8 aa, Homo sapiens
  Table A; Target 78994; HLA-C*16:01; SLC45A2; ENSG00000164175; TAA
NGYVNPEL

SEQ ID NO: 78995 - protein, 8 aa, Homo sapiens
  Table A; Target 78995; HLA-C*16:02; SLC45A2; ENSG00000164175; TAA
NGYVNPEL

SEQ ID NO: 78996 - protein, 8 aa, Homo sapiens
  Table A; Target 78996; HLA-C*16:04; SLC45A2; ENSG00000164175; TAA
NGYVNPEL

SEQ ID NO: 78997 - protein, 9 aa, Homo sapiens
  Table A; Target 78997; HLA-B*54:01; SLC45A2; ENSG00000164175; TAA
NGYVNPELA

SEQ ID NO: 78998 - protein, 10 aa, Homo sapiens
  Table A; Target 78998; HLA-B*39:01; SLC45A2; ENSG00000164175; TAA
NGYVNPELAM

SEQ ID NO: 78999 - protein, 10 aa, Homo sapiens
  Table A; Target 78999; HLA-C*03:03; SLC45A2; ENSG00000164175; TAA
NGYVNPELAM

SEQ ID NO: 79000 - protein, 8 aa, Homo sapiens
  Table A; Target 79000; HLA-A*29:02; SLC45A2; ENSG00000164175; TAA
NMPPHYRY

SEQ ID NO: 79001 - protein, 9 aa, Homo sapiens
  Table A; Target 79001; HLA-A*02:07; SLC45A2; ENSG00000164175; TAA
NMPPHYRYL

SEQ ID NO: 79002 - protein, 10 aa, Homo sapiens
  Table A; Target 79002; HLA-A*01:01; SLC45A2; ENSG00000164175; TAA
NSGQAGRHIY

SEQ ID NO: 79003 - protein, 8 aa, Homo sapiens
  Table A; Target 79003; HLA-A*01:01; SLC45A2; ENSG00000164175; TAA
NSTEFLIY

SEQ ID NO: 79004 - protein, 8 aa, Homo sapiens
  Table A; Target 79004; HLA-B*35:01; SLC45A2; ENSG00000164175; TAA
NSTEFLIY

SEQ ID NO: 79005 - protein, 10 aa, Homo sapiens
  Table A; Target 79005; HLA-A*33:01; SLC45A2; ENSG00000164175; TAA
NSTEFLIYER

SEQ ID NO: 79006 - protein, 10 aa, Homo sapiens
  Table A; Target 79006; HLA-A*33:03; SLC45A2; ENSG00000164175; TAA
NSTEFLIYER

SEQ ID NO: 79007 - protein, 10 aa, Homo sapiens
  Table A; Target 79007; HLA-A*68:01; SLC45A2; ENSG00000164175; TAA
NSTEFLIYER

SEQ ID NO: 79008 - protein, 10 aa, Homo sapiens
  Table A; Target 79008; HLA-B*27:02; SLC45A2; ENSG00000164175; TAA
NSTEFLIYER

SEQ ID NO: 79009 - protein, 10 aa, Homo sapiens
  Table A; Target 79009; HLA-C*07:06; SLC45A2; ENSG00000164175; TAA
NSTEFLIYER

SEQ ID NO: 79010 - protein, 8 aa, Homo sapiens
  Table A; Target 79010; HLA-A*01:01; SLC45A2; ENSG00000164175; TAA
NSVFSSLY

SEQ ID NO: 79011 - protein, 8 aa, Homo sapiens
  Table A; Target 79011; HLA-B*15:01; SLC45A2; ENSG00000164175; TAA
NSVFSSLY

SEQ ID NO: 79012 - protein, 8 aa, Homo sapiens
  Table A; Target 79012; HLA-B*18:01; SLC45A2; ENSG00000164175; TAA
NSVFSSLY

SEQ ID NO: 79013 - protein, 8 aa, Homo sapiens
  Table A; Target 79013; HLA-C*07:01; SLC45A2; ENSG00000164175; TAA
NSVFSSLY

SEQ ID NO: 79014 - protein, 9 aa, Homo sapiens
  Table A; Target 79014; HLA-A*02:01; SLC45A2; ENSG00000164175; TAA
NTAGTVVVV

SEQ ID NO: 79015 - protein, 9 aa, Homo sapiens
  Table A; Target 79015; HLA-A*02:03; SLC45A2; ENSG00000164175; TAA
NTAGTVVVV

SEQ ID NO: 79016 - protein, 9 aa, Homo sapiens
  Table A; Target 79016; HLA-A*26:01; SLC45A2; ENSG00000164175; TAA
NTAGTVVVV

SEQ ID NO: 79017 - protein, 9 aa, Homo sapiens
  Table A; Target 79017; HLA-A*32:01; SLC45A2; ENSG00000164175; TAA
NTAGTVVVV

SEQ ID NO: 79018 - protein, 9 aa, Homo sapiens
  Table A; Target 79018; HLA-A*33:03; SLC45A2; ENSG00000164175; TAA
NTAGTVVVV

SEQ ID NO: 79019 - protein, 9 aa, Homo sapiens
  Table A; Target 79019; HLA-A*68:01; SLC45A2; ENSG00000164175; TAA
NTAGTVVVV

SEQ ID NO: 79020 - protein, 9 aa, Homo sapiens
  Table A; Target 79020; HLA-A*68:02; SLC45A2; ENSG00000164175; TAA
NTAGTVVVV

SEQ ID NO: 79021 - protein, 9 aa, Homo sapiens
  Table A; Target 79021; HLA-B*13:02; SLC45A2; ENSG00000164175; TAA
NTAGTVVVV

SEQ ID NO: 79022 - protein, 9 aa, Homo sapiens
  Table A; Target 79022; HLA-B*18:01; SLC45A2; ENSG00000164175; TAA
NTAGTVVVV

SEQ ID NO: 79023 - protein, 9 aa, Homo sapiens
  Table A; Target 79023; HLA-B*35:01; SLC45A2; ENSG00000164175; TAA
NTAGTVVVV

SEQ ID NO: 79024 - protein, 9 aa, Homo sapiens
  Table A; Target 79024; HLA-B*35:03; SLC45A2; ENSG00000164175; TAA
NTAGTVVVV

SEQ ID NO: 79025 - protein, 9 aa, Homo sapiens
  Table A; Target 79025; HLA-B*39:01; SLC45A2; ENSG00000164175; TAA
NTAGTVVVV

SEQ ID NO: 79026 - protein, 9 aa, Homo sapiens
  Table A; Target 79026; HLA-B*55:01; SLC45A2; ENSG00000164175; TAA
NTAGTVVVV

SEQ ID NO: 79027 - protein, 9 aa, Homo sapiens
  Table A; Target 79027; HLA-C*01:02; SLC45A2; ENSG00000164175; TAA
NTAGTVVVV

SEQ ID NO: 79028 - protein, 9 aa, Homo sapiens
  Table A; Target 79028; HLA-C*02:02; SLC45A2; ENSG00000164175; TAA
NTAGTVVVV

SEQ ID NO: 79029 - protein, 9 aa, Homo sapiens
  Table A; Target 79029; HLA-C*03:04; SLC45A2; ENSG00000164175; TAA
NTAGTVVVV

SEQ ID NO: 79030 - protein, 9 aa, Homo sapiens
  Table A; Target 79030; HLA-C*04:01; SLC45A2; ENSG00000164175; TAA
NTAGTVVVV

SEQ ID NO: 79031 - protein, 9 aa, Homo sapiens
  Table A; Target 79031; HLA-C*05:01; SLC45A2; ENSG00000164175; TAA
NTAGTVVVV

SEQ ID NO: 79032 - protein, 9 aa, Homo sapiens
  Table A; Target 79032; HLA-C*07:04; SLC45A2; ENSG00000164175; TAA
NTAGTVVVV

SEQ ID NO: 79033 - protein, 9 aa, Homo sapiens
  Table A; Target 79033; HLA-C*07:06; SLC45A2; ENSG00000164175; TAA
NTAGTVVVV

SEQ ID NO: 79034 - protein, 9 aa, Homo sapiens
  Table A; Target 79034; HLA-C*12:03; SLC45A2; ENSG00000164175; TAA
NTAGTVVVV

SEQ ID NO: 79035 - protein, 9 aa, Homo sapiens
  Table A; Target 79035; HLA-C*16:01; SLC45A2; ENSG00000164175; TAA
NTAGTVVVV

SEQ ID NO: 79036 - protein, 9 aa, Homo sapiens
  Table A; Target 79036; HLA-C*16:02; SLC45A2; ENSG00000164175; TAA
NTAGTVVVV

SEQ ID NO: 79037 - protein, 10 aa, Homo sapiens
  Table A; Target 79037; HLA-A*68:01; SLC45A2; ENSG00000164175; TAA
NTAGTVVVVV

SEQ ID NO: 79038 - protein, 10 aa, Homo sapiens
  Table A; Target 79038; HLA-A*68:02; SLC45A2; ENSG00000164175; TAA
NTAGTVVVVV

SEQ ID NO: 79039 - protein, 10 aa, Homo sapiens
  Table A; Target 79039; HLA-C*07:06; SLC45A2; ENSG00000164175; TAA
NTAGTVVVVV

SEQ ID NO: 79040 - protein, 11 aa, Homo sapiens
  Table A; Target 79040; HLA-A*68:01; SLC45A2; ENSG00000164175; TAA
NTAGTVVVVVI

SEQ ID NO: 79041 - protein, 11 aa, Homo sapiens
  Table A; Target 79041; HLA-A*68:02; SLC45A2; ENSG00000164175; TAA
NTAGTVVVVVI

SEQ ID NO: 79042 - protein, 8 aa, Homo sapiens
  Table A; Target 79042; HLA-B*51:01; SLC45A2; ENSG00000164175; TAA
NVYSTLVL

SEQ ID NO: 79043 - protein, 8 aa, Homo sapiens
  Table A; Target 79043; HLA-C*03:03; SLC45A2; ENSG00000164175; TAA
NVYSTLVL

SEQ ID NO: 79044 - protein, 8 aa, Homo sapiens
  Table A; Target 79044; HLA-C*03:04; SLC45A2; ENSG00000164175; TAA
NVYSTLVL

SEQ ID NO: 79045 - protein, 8 aa, Homo sapiens
  Table A; Target 79045; HLA-A*03:02; SLC45A2; ENSG00000164175; TAA
PDNSVRGK

SEQ ID NO: 79046 - protein, 9 aa, Homo sapiens
  Table A; Target 79046; HLA-B*27:02; SLC45A2; ENSG00000164175; TAA
PFDSVEPPK

SEQ ID NO: 79047 - protein, 8 aa, Homo sapiens
  Table A; Target 79047; HLA-B*15:01; SLC45A2; ENSG00000164175; TAA
PFNLITEY

SEQ ID NO: 79048 - protein, 8 aa, Homo sapiens
  Table A; Target 79048; HLA-C*14:02; SLC45A2; ENSG00000164175; TAA
PFNLITEY

SEQ ID NO: 79049 - protein, 9 aa, Homo sapiens
  Table A; Target 79049; HLA-C*16:02; SLC45A2; ENSG00000164175; TAA
PLTEVAKGI

SEQ ID NO: 79050 - protein, 11 aa, Homo sapiens
  Table A; Target 79050; HLA-A*29:02; SLC45A2; ENSG00000164175; TAA
PPLSSDGMYEY

SEQ ID NO: 79051 - protein, 11 aa, Homo sapiens
  Table A; Target 79051; HLA-B*35:01; SLC45A2; ENSG00000164175; TAA
PPLSSDGMYEY

SEQ ID NO: 79052 - protein, 10 aa, Homo sapiens
  Table A; Target 79052; HLA-A*24:02; SLC45A2; ENSG00000164175; TAA
PYSAHNSTEF

SEQ ID NO: 79053 - protein, 11 aa, Homo sapiens
  Table A; Target 79053; HLA-B*51:01; SLC45A2; ENSG00000164175; TAA
QAPGGDPDNSV

SEQ ID NO: 79054 - protein, 10 aa, Homo sapiens
  Table A; Target 79054; HLA-A*25:01; SLC45A2; ENSG00000164175; TAA
QILVGGGLGF

SEQ ID NO: 79055 - protein, 9 aa, Homo sapiens
  Table A; Target 79055; HLA-A*01:01; SLC45A2; ENSG00000164175; TAA
QIVYRGDPY

SEQ ID NO: 79056 - protein, 9 aa, Homo sapiens
  Table A; Target 79056; HLA-C*07:04; SLC45A2; ENSG00000164175; TAA
QIVYRGDPY

SEQ ID NO: 79057 - protein, 9 aa, Homo sapiens
  Table A; Target 79057; HLA-B*35:03; SLC45A2; ENSG00000164175; TAA
QQTPQDPPL

SEQ ID NO: 79058 - protein, 9 aa, Homo sapiens
  Table A; Target 79058; HLA-B*38:01; SLC45A2; ENSG00000164175; TAA
QQTPQDPPL

SEQ ID NO: 79059 - protein, 9 aa, Homo sapiens
  Table A; Target 79059; HLA-B*39:01; SLC45A2; ENSG00000164175; TAA
QQTPQDPPL

SEQ ID NO: 79060 - protein, 9 aa, Homo sapiens
  Table A; Target 79060; HLA-A*68:02; SLC45A2; ENSG00000164175; TAA
QVMFFFSAL

SEQ ID NO: 79061 - protein, 10 aa, Homo sapiens
  Table A; Target 79061; HLA-A*30:02; SLC45A2; ENSG00000164175; TAA
RALVNMPPHY

SEQ ID NO: 79062 - protein, 10 aa, Homo sapiens
  Table A; Target 79062; HLA-B*57:01; SLC45A2; ENSG00000164175; TAA
RALVNMPPHY

SEQ ID NO: 79063 - protein, 8 aa, Homo sapiens
  Table A; Target 79063; HLA-B*08:01; SLC45A2; ENSG00000164175; TAA
RAMTLKSL

SEQ ID NO: 79064 - protein, 9 aa, Homo sapiens
  Table A; Target 79064; HLA-A*31:01; SLC45A2; ENSG00000164175; TAA
RAMTLKSLL

SEQ ID NO: 79065 - protein, 9 aa, Homo sapiens
  Table A; Target 79065; HLA-B*08:01; SLC45A2; ENSG00000164175; TAA
RAMTLKSLL

SEQ ID NO: 79066 - protein, 9 aa, Homo sapiens
  Table A; Target 79066; HLA-B*57:01; SLC45A2; ENSG00000164175; TAA
RAMTLKSLL

SEQ ID NO: 79067 - protein, 9 aa, Homo sapiens
  Table A; Target 79067; HLA-B*58:01; SLC45A2; ENSG00000164175; TAA
RAMTLKSLL

SEQ ID NO: 79068 - protein, 10 aa, Homo sapiens
  Table A; Target 79068; HLA-A*31:01; SLC45A2; ENSG00000164175; TAA
RAMTLKSLLR

SEQ ID NO: 79069 - protein, 10 aa, Homo sapiens
  Table A; Target 79069; HLA-B*57:01; SLC45A2; ENSG00000164175; TAA
RAMTLKSLLR

SEQ ID NO: 79070 - protein, 9 aa, Homo sapiens
  Table A; Target 79070; HLA-A*30:01; SLC45A2; ENSG00000164175; TAA
REFCYAVEA

SEQ ID NO: 79071 - protein, 9 aa, Homo sapiens
  Table A; Target 79071; HLA-A*02:01; SLC45A2; ENSG00000164175; TAA
RLLGTEFQV

SEQ ID NO: 79072 - protein, 9 aa, Homo sapiens
  Table A; Target 79072; HLA-A*02:04; SLC45A2; ENSG00000164175; TAA
RLLGTEFQV

SEQ ID NO: 79073 - protein, 9 aa, Homo sapiens
  Table A; Target 79073; HLA-A*02:07; SLC45A2; ENSG00000164175; TAA
RLLGTEFQV

SEQ ID NO: 79074 - protein, 9 aa, Homo sapiens
  Table A; Target 79074; HLA-B*13:02; SLC45A2; ENSG00000164175; TAA
RLLGTEFQV

SEQ ID NO: 79075 - protein, 9 aa, Homo sapiens
  Table A; Target 79075; HLA-B*55:01; SLC45A2; ENSG00000164175; TAA
RLLGTEFQV

SEQ ID NO: 79076 - protein, 8 aa, Homo sapiens
  Table A; Target 79076; HLA-B*07:02; SLC45A2; ENSG00000164175; TAA
RPTSRLIM

SEQ ID NO: 79077 - protein, 8 aa, Homo sapiens
  Table A; Target 79077; HLA-B*08:01; SLC45A2; ENSG00000164175; TAA
RPTSRLIM

SEQ ID NO: 79078 - protein, 9 aa, Homo sapiens
  Table A; Target 79078; HLA-B*51:01; SLC45A2; ENSG00000164175; TAA
RPYILTLGV

SEQ ID NO: 79079 - protein, 9 aa, Homo sapiens
  Table A; Target 79079; HLA-B*54:01; SLC45A2; ENSG00000164175; TAA
RPYILTLGV

SEQ ID NO: 79080 - protein, 9 aa, Homo sapiens
  Table A; Target 79080; HLA-B*56:01; SLC45A2; ENSG00000164175; TAA
RPYILTLGV

SEQ ID NO: 79081 - protein, 10 aa, Homo sapiens
  Table A; Target 79081; HLA-B*07:02; SLC45A2; ENSG00000164175; TAA
RPYILTLGVM

SEQ ID NO: 79082 - protein, 9 aa, Homo sapiens
  Table A; Target 79082; HLA-A*24:02; SLC45A2; ENSG00000164175; TAA
RYLCISHLI

SEQ ID NO: 79083 - protein, 8 aa, Homo sapiens
  Table A; Target 79083; HLA-B*15:03; SLC45A2; ENSG00000164175; TAA
SAHNSTEF

SEQ ID NO: 79084 - protein, 8 aa, Homo sapiens
  Table A; Target 79084; HLA-B*46:01; SLC45A2; ENSG00000164175; TAA
SAHNSTEF

SEQ ID NO: 79085 - protein, 8 aa, Homo sapiens
  Table A; Target 79085; HLA-B*58:01; SLC45A2; ENSG00000164175; TAA
SAHNSTEF

SEQ ID NO: 79086 - protein, 8 aa, Homo sapiens
  Table A; Target 79086; HLA-C*03:03; SLC45A2; ENSG00000164175; TAA
SAHNSTEF

SEQ ID NO: 79087 - protein, 8 aa, Homo sapiens
  Table A; Target 79087; HLA-C*03:04; SLC45A2; ENSG00000164175; TAA
SAHNSTEF

SEQ ID NO: 79088 - protein, 8 aa, Homo sapiens
  Table A; Target 79088; HLA-C*05:01; SLC45A2; ENSG00000164175; TAA
SAHNSTEF

SEQ ID NO: 79089 - protein, 8 aa, Homo sapiens
  Table A; Target 79089; HLA-C*14:02; SLC45A2; ENSG00000164175; TAA
SAHNSTEF

SEQ ID NO: 79090 - protein, 8 aa, Homo sapiens
  Table A; Target 79090; HLA-C*16:01; SLC45A2; ENSG00000164175; TAA
SAHNSTEF

SEQ ID NO: 79091 - protein, 9 aa, Homo sapiens
  Table A; Target 79091; HLA-C*03:04; SLC45A2; ENSG00000164175; TAA
SAHNSTEFL

SEQ ID NO: 79092 - protein, 9 aa, Homo sapiens
  Table A; Target 79092; HLA-A*23:01; SLC45A2; ENSG00000164175; TAA
SALVLTLCF

SEQ ID NO: 79093 - protein, 9 aa, Homo sapiens
  Table A; Target 79093; HLA-A*29:02; SLC45A2; ENSG00000164175; TAA
SALVLTLCF

SEQ ID NO: 79094 - protein, 9 aa, Homo sapiens
  Table A; Target 79094; HLA-B*35:01; SLC45A2; ENSG00000164175; TAA
SALVLTLCF

SEQ ID NO: 79095 - protein, 9 aa, Homo sapiens
  Table A; Target 79095; HLA-B*57:01; SLC45A2; ENSG00000164175; TAA
SALVLTLCF

SEQ ID NO: 79096 - protein, 9 aa, Homo sapiens
  Table A; Target 79096; HLA-C*02:02; SLC45A2; ENSG00000164175; TAA
SALVLTLCF

SEQ ID NO: 79097 - protein, 9 aa, Homo sapiens
  Table A; Target 79097; HLA-C*16:04; SLC45A2; ENSG00000164175; TAA
SALVLTLCF

SEQ ID NO: 79098 - protein, 9 aa, Homo sapiens
  Table A; Target 79098; HLA-C*12:03; SLC45A2; ENSG00000164175; TAA
SAVALIGCC

SEQ ID NO: 79099 - protein, 8 aa, Homo sapiens
  Table A; Target 79099; HLA-A*30:01; SLC45A2; ENSG00000164175; TAA
SEAPLTEV

SEQ ID NO: 79100 - protein, 8 aa, Homo sapiens
  Table A; Target 79100; HLA-B*13:02; SLC45A2; ENSG00000164175; TAA
SEAPLTEV

SEQ ID NO: 79101 - protein, 8 aa, Homo sapiens
  Table A; Target 79101; HLA-B*18:01; SLC45A2; ENSG00000164175; TAA
SEAPLTEV

SEQ ID NO: 79102 - protein, 8 aa, Homo sapiens
  Table A; Target 79102; HLA-B*37:01; SLC45A2; ENSG00000164175; TAA
SEAPLTEV

SEQ ID NO: 79103 - protein, 8 aa, Homo sapiens
  Table A; Target 79103; HLA-B*39:01; SLC45A2; ENSG00000164175; TAA
SEAPLTEV

SEQ ID NO: 79104 - protein, 8 aa, Homo sapiens
  Table A; Target 79104; HLA-B*40:01; SLC45A2; ENSG00000164175; TAA
SEAPLTEV

SEQ ID NO: 79105 - protein, 8 aa, Homo sapiens
  Table A; Target 79105; HLA-B*40:02; SLC45A2; ENSG00000164175; TAA
SEAPLTEV

SEQ ID NO: 79106 - protein, 8 aa, Homo sapiens
  Table A; Target 79106; HLA-B*44:03; SLC45A2; ENSG00000164175; TAA
SEAPLTEV

SEQ ID NO: 79107 - protein, 8 aa, Homo sapiens
  Table A; Target 79107; HLA-B*49:01; SLC45A2; ENSG00000164175; TAA
SEAPLTEV

SEQ ID NO: 79108 - protein, 8 aa, Homo sapiens
  Table A; Target 79108; HLA-C*02:02; SLC45A2; ENSG00000164175; TAA
SEAPLTEV

SEQ ID NO: 79109 - protein, 8 aa, Homo sapiens
  Table A; Target 79109; HLA-C*16:02; SLC45A2; ENSG00000164175; TAA
SEAPLTEV

SEQ ID NO: 79110 - protein, 9 aa, Homo sapiens
  Table A; Target 79110; HLA-A*30:01; SLC45A2; ENSG00000164175; TAA
SEAPLTEVA

SEQ ID NO: 79111 - protein, 9 aa, Homo sapiens
  Table A; Target 79111; HLA-B*13:02; SLC45A2; ENSG00000164175; TAA
SEAPLTEVA

SEQ ID NO: 79112 - protein, 9 aa, Homo sapiens
  Table A; Target 79112; HLA-B*18:01; SLC45A2; ENSG00000164175; TAA
SEAPLTEVA

SEQ ID NO: 79113 - protein, 9 aa, Homo sapiens
  Table A; Target 79113; HLA-B*37:01; SLC45A2; ENSG00000164175; TAA
SEAPLTEVA

SEQ ID NO: 79114 - protein, 9 aa, Homo sapiens
  Table A; Target 79114; HLA-B*40:01; SLC45A2; ENSG00000164175; TAA
SEAPLTEVA

SEQ ID NO: 79115 - protein, 9 aa, Homo sapiens
  Table A; Target 79115; HLA-B*40:02; SLC45A2; ENSG00000164175; TAA
SEAPLTEVA

SEQ ID NO: 79116 - protein, 9 aa, Homo sapiens
  Table A; Target 79116; HLA-B*44:02; SLC45A2; ENSG00000164175; TAA
SEAPLTEVA

SEQ ID NO: 79117 - protein, 9 aa, Homo sapiens
  Table A; Target 79117; HLA-B*44:03; SLC45A2; ENSG00000164175; TAA
SEAPLTEVA

SEQ ID NO: 79118 - protein, 9 aa, Homo sapiens
  Table A; Target 79118; HLA-B*49:01; SLC45A2; ENSG00000164175; TAA
SEAPLTEVA

SEQ ID NO: 79119 - protein, 9 aa, Homo sapiens
  Table A; Target 79119; HLA-C*02:02; SLC45A2; ENSG00000164175; TAA
SEAPLTEVA

SEQ ID NO: 79120 - protein, 9 aa, Homo sapiens
  Table A; Target 79120; HLA-C*16:04; SLC45A2; ENSG00000164175; TAA
SEAPLTEVA

SEQ ID NO: 79121 - protein, 10 aa, Homo sapiens
  Table A; Target 79121; HLA-A*03:02; SLC45A2; ENSG00000164175; TAA
SEAPLTEVAK

SEQ ID NO: 79122 - protein, 10 aa, Homo sapiens
  Table A; Target 79122; HLA-A*11:01; SLC45A2; ENSG00000164175; TAA
SEAPLTEVAK

SEQ ID NO: 79123 - protein, 10 aa, Homo sapiens
  Table A; Target 79123; HLA-A*30:01; SLC45A2; ENSG00000164175; TAA
SEAPLTEVAK

SEQ ID NO: 79124 - protein, 10 aa, Homo sapiens
  Table A; Target 79124; HLA-B*18:01; SLC45A2; ENSG00000164175; TAA
SEAPLTEVAK

SEQ ID NO: 79125 - protein, 10 aa, Homo sapiens
  Table A; Target 79125; HLA-B*27:02; SLC45A2; ENSG00000164175; TAA
SEAPLTEVAK

SEQ ID NO: 79126 - protein, 10 aa, Homo sapiens
  Table A; Target 79126; HLA-B*27:05; SLC45A2; ENSG00000164175; TAA
SEAPLTEVAK

SEQ ID NO: 79127 - protein, 10 aa, Homo sapiens
  Table A; Target 79127; HLA-B*40:01; SLC45A2; ENSG00000164175; TAA
SEAPLTEVAK

SEQ ID NO: 79128 - protein, 10 aa, Homo sapiens
  Table A; Target 79128; HLA-B*40:02; SLC45A2; ENSG00000164175; TAA
SEAPLTEVAK

SEQ ID NO: 79129 - protein, 10 aa, Homo sapiens
  Table A; Target 79129; HLA-B*44:02; SLC45A2; ENSG00000164175; TAA
SEAPLTEVAK

SEQ ID NO: 79130 - protein, 10 aa, Homo sapiens
  Table A; Target 79130; HLA-B*44:03; SLC45A2; ENSG00000164175; TAA
SEAPLTEVAK

SEQ ID NO: 79131 - protein, 10 aa, Homo sapiens
  Table A; Target 79131; HLA-B*49:01; SLC45A2; ENSG00000164175; TAA
SEAPLTEVAK

SEQ ID NO: 79132 - protein, 10 aa, Homo sapiens
  Table A; Target 79132; HLA-C*04:01; SLC45A2; ENSG00000164175; TAA
SEAPLTEVAK

SEQ ID NO: 79133 - protein, 10 aa, Homo sapiens
  Table A; Target 79133; HLA-C*07:06; SLC45A2; ENSG00000164175; TAA
SEAPLTEVAK

SEQ ID NO: 79134 - protein, 9 aa, Homo sapiens
  Table A; Target 79134; HLA-A*30:02; SLC45A2; ENSG00000164175; TAA
SGQAGRHIY

SEQ ID NO: 79135 - protein, 9 aa, Homo sapiens
  Table A; Target 79135; HLA-A*32:01; SLC45A2; ENSG00000164175; TAA
SGQAGRHIY

SEQ ID NO: 79136 - protein, 9 aa, Homo sapiens
  Table A; Target 79136; HLA-B*15:01; SLC45A2; ENSG00000164175; TAA
SGQAGRHIY

SEQ ID NO: 79137 - protein, 9 aa, Homo sapiens
  Table A; Target 79137; HLA-C*14:02; SLC45A2; ENSG00000164175; TAA
SGQAGRHIY

SEQ ID NO: 79138 - protein, 9 aa, Homo sapiens
  Table A; Target 79138; HLA-C*16:01; SLC45A2; ENSG00000164175; TAA
SGQAGRHIY

SEQ ID NO: 79139 - protein, 9 aa, Homo sapiens
  Table A; Target 79139; HLA-C*16:02; SLC45A2; ENSG00000164175; TAA
SGQAGRHIY

SEQ ID NO: 79140 - protein, 10 aa, Homo sapiens
  Table A; Target 79140; HLA-A*03:02; SLC45A2; ENSG00000164175; TAA
SGQAGRHIYK

SEQ ID NO: 79141 - protein, 10 aa, Homo sapiens
  Table A; Target 79141; HLA-A*11:01; SLC45A2; ENSG00000164175; TAA
SGQAGRHIYK

SEQ ID NO: 79142 - protein, 9 aa, Homo sapiens
  Table A; Target 79142; HLA-B*38:01; SLC45A2; ENSG00000164175; TAA
SHQDKEKGL

SEQ ID NO: 79143 - protein, 9 aa, Homo sapiens
  Table A; Target 79143; HLA-A*01:01; SLC45A2; ENSG00000164175; TAA
SIEKVKNGY

SEQ ID NO: 79144 - protein, 9 aa, Homo sapiens
  Table A; Target 79144; HLA-A*30:02; SLC45A2; ENSG00000164175; TAA
SIEKVKNGY

SEQ ID NO: 79145 - protein, 9 aa, Homo sapiens
  Table A; Target 79145; HLA-A*32:01; SLC45A2; ENSG00000164175; TAA
SIEKVKNGY

SEQ ID NO: 79146 - protein, 9 aa, Homo sapiens
  Table A; Target 79146; HLA-B*15:01; SLC45A2; ENSG00000164175; TAA
SIEKVKNGY

SEQ ID NO: 79147 - protein, 10 aa, Homo sapiens
  Table A; Target 79147; HLA-A*02:01; SLC45A2; ENSG00000164175; TAA
SISEAPLTEV

SEQ ID NO: 79148 - protein, 10 aa, Homo sapiens
  Table A; Target 79148; HLA-A*02:03; SLC45A2; ENSG00000164175; TAA
SISEAPLTEV

SEQ ID NO: 79149 - protein, 10 aa, Homo sapiens
  Table A; Target 79149; HLA-A*02:04; SLC45A2; ENSG00000164175; TAA
SISEAPLTEV

SEQ ID NO: 79150 - protein, 10 aa, Homo sapiens
  Table A; Target 79150; HLA-A*02:07; SLC45A2; ENSG00000164175; TAA
SISEAPLTEV

SEQ ID NO: 79151 - protein, 10 aa, Homo sapiens
  Table A; Target 79151; HLA-A*25:01; SLC45A2; ENSG00000164175; TAA
SISEAPLTEV

SEQ ID NO: 79152 - protein, 10 aa, Homo sapiens
  Table A; Target 79152; HLA-A*26:01; SLC45A2; ENSG00000164175; TAA
SISEAPLTEV

SEQ ID NO: 79153 - protein, 10 aa, Homo sapiens
  Table A; Target 79153; HLA-A*68:02; SLC45A2; ENSG00000164175; TAA
SISEAPLTEV

SEQ ID NO: 79154 - protein, 10 aa, Homo sapiens
  Table A; Target 79154; HLA-B*13:02; SLC45A2; ENSG00000164175; TAA
SISEAPLTEV

SEQ ID NO: 79155 - protein, 10 aa, Homo sapiens
  Table A; Target 79155; HLA-B*39:01; SLC45A2; ENSG00000164175; TAA
SISEAPLTEV

SEQ ID NO: 79156 - protein, 10 aa, Homo sapiens
  Table A; Target 79156; HLA-B*46:01; SLC45A2; ENSG00000164175; TAA
SISEAPLTEV

SEQ ID NO: 79157 - protein, 10 aa, Homo sapiens
  Table A; Target 79157; HLA-B*55:01; SLC45A2; ENSG00000164175; TAA
SISEAPLTEV

SEQ ID NO: 79158 - protein, 10 aa, Homo sapiens
  Table A; Target 79158; HLA-B*56:01; SLC45A2; ENSG00000164175; TAA
SISEAPLTEV

SEQ ID NO: 79159 - protein, 10 aa, Homo sapiens
  Table A; Target 79159; HLA-C*05:01; SLC45A2; ENSG00000164175; TAA
SISEAPLTEV

SEQ ID NO: 79160 - protein, 11 aa, Homo sapiens
  Table A; Target 79160; HLA-A*02:01; SLC45A2; ENSG00000164175; TAA
SLADDGPFDSV

SEQ ID NO: 79161 - protein, 11 aa, Homo sapiens
  Table A; Target 79161; HLA-A*02:03; SLC45A2; ENSG00000164175; TAA
SLADDGPFDSV

SEQ ID NO: 79162 - protein, 11 aa, Homo sapiens
  Table A; Target 79162; HLA-A*02:07; SLC45A2; ENSG00000164175; TAA
SLADDGPFDSV

SEQ ID NO: 79163 - protein, 9 aa, Homo sapiens
  Table A; Target 79163; HLA-A*02:03; SLC45A2; ENSG00000164175; TAA
SLFGVMSST

SEQ ID NO: 79164 - protein, 9 aa, Homo sapiens
  Table A; Target 79164; HLA-B*13:02; SLC45A2; ENSG00000164175; TAA
SLFGVMSST

SEQ ID NO: 79165 - protein, 10 aa, Homo sapiens
  Table A; Target 79165; HLA-A*02:03; SLC45A2; ENSG00000164175; TAA
SLFGVMSSTL

SEQ ID NO: 79166 - protein, 10 aa, Homo sapiens
  Table A; Target 79166; HLA-B*40:01; SLC45A2; ENSG00000164175; TAA
SLFGVMSSTL

SEQ ID NO: 79167 - protein, 10 aa, Homo sapiens
  Table A; Target 79167; HLA-B*40:02; SLC45A2; ENSG00000164175; TAA
SLFGVMSSTL

SEQ ID NO: 79168 - protein, 11 aa, Homo sapiens
  Table A; Target 79168; HLA-A*26:01; SLC45A2; ENSG00000164175; TAA
SLFGVMSSTLY

SEQ ID NO: 79169 - protein, 11 aa, Homo sapiens
  Table A; Target 79169; HLA-A*29:02; SLC45A2; ENSG00000164175; TAA
SLFGVMSSTLY

SEQ ID NO: 79170 - protein, 11 aa, Homo sapiens
  Table A; Target 79170; HLA-A*30:02; SLC45A2; ENSG00000164175; TAA
SLFGVMSSTLY

SEQ ID NO: 79171 - protein, 11 aa, Homo sapiens
  Table A; Target 79171; HLA-B*15:01; SLC45A2; ENSG00000164175; TAA
SLFGVMSSTLY

SEQ ID NO: 79172 - protein, 9 aa, Homo sapiens
  Table A; Target 79172; HLA-A*02:04; SLC45A2; ENSG00000164175; TAA
SLLRALVNM

SEQ ID NO: 79173 - protein, 9 aa, Homo sapiens
  Table A; Target 79173; HLA-A*02:01; SLC45A2; ENSG00000164175; TAA
SLYSIVWFL

SEQ ID NO: 79174 - protein, 9 aa, Homo sapiens
  Table A; Target 79174; HLA-A*02:03; SLC45A2; ENSG00000164175; TAA
SLYSIVWFL

SEQ ID NO: 79175 - protein, 9 aa, Homo sapiens
  Table A; Target 79175; HLA-A*02:04; SLC45A2; ENSG00000164175; TAA
SLYSIVWFL

SEQ ID NO: 79176 - protein, 9 aa, Homo sapiens
  Table A; Target 79176; HLA-A*02:07; SLC45A2; ENSG00000164175; TAA
SLYSIVWFL

SEQ ID NO: 79177 - protein, 9 aa, Homo sapiens
  Table A; Target 79177; HLA-A*68:02; SLC45A2; ENSG00000164175; TAA
SLYSIVWFL

SEQ ID NO: 79178 - protein, 8 aa, Homo sapiens
  Table A; Target 79178; HLA-A*03:01; SLC45A2; ENSG00000164175; TAA
SLYSYFQK

SEQ ID NO: 79179 - protein, 8 aa, Homo sapiens
  Table A; Target 79179; HLA-A*03:02; SLC45A2; ENSG00000164175; TAA
SLYSYFQK

SEQ ID NO: 79180 - protein, 8 aa, Homo sapiens
  Table A; Target 79180; HLA-A*11:01; SLC45A2; ENSG00000164175; TAA
SLYSYFQK

SEQ ID NO: 79181 - protein, 9 aa, Homo sapiens
  Table A; Target 79181; HLA-A*02:01; SLC45A2; ENSG00000164175; TAA
SLYSYFQKV

SEQ ID NO: 79182 - protein, 9 aa, Homo sapiens
  Table A; Target 79182; HLA-A*02:03; SLC45A2; ENSG00000164175; TAA
SLYSYFQKV

SEQ ID NO: 79183 - protein, 9 aa, Homo sapiens
  Table A; Target 79183; HLA-A*02:04; SLC45A2; ENSG00000164175; TAA
SLYSYFQKV

SEQ ID NO: 79184 - protein, 9 aa, Homo sapiens
  Table A; Target 79184; HLA-A*02:07; SLC45A2; ENSG00000164175; TAA
SLYSYFQKV

SEQ ID NO: 79185 - protein, 9 aa, Homo sapiens
  Table A; Target 79185; HLA-A*03:01; SLC45A2; ENSG00000164175; TAA
SLYSYFQKV

SEQ ID NO: 79186 - protein, 9 aa, Homo sapiens
  Table A; Target 79186; HLA-A*30:01; SLC45A2; ENSG00000164175; TAA
SLYSYFQKV

SEQ ID NO: 79187 - protein, 9 aa, Homo sapiens
  Table A; Target 79187; HLA-A*68:02; SLC45A2; ENSG00000164175; TAA
SLYSYFQKV

SEQ ID NO: 79188 - protein, 9 aa, Homo sapiens
  Table A; Target 79188; HLA-B*13:02; SLC45A2; ENSG00000164175; TAA
SLYSYFQKV

SEQ ID NO: 79189 - protein, 9 aa, Homo sapiens
  Table A; Target 79189; HLA-C*02:02; SLC45A2; ENSG00000164175; TAA
SLYSYFQKV

SEQ ID NO: 79190 - protein, 9 aa, Homo sapiens
  Table A; Target 79190; HLA-B*15:01; SLC45A2; ENSG00000164175; TAA
SMAMFGREF

SEQ ID NO: 79191 - protein, 9 aa, Homo sapiens
  Table A; Target 79191; HLA-B*15:03; SLC45A2; ENSG00000164175; TAA
SMAMFGREF

SEQ ID NO: 79192 - protein, 9 aa, Homo sapiens
  Table A; Target 79192; HLA-C*16:01; SLC45A2; ENSG00000164175; TAA
SMAMFGREF

SEQ ID NO: 79193 - protein, 11 aa, Homo sapiens
  Table A; Target 79193; HLA-A*30:02; SLC45A2; ENSG00000164175; TAA
SNSGQAGRHIY

SEQ ID NO: 79194 - protein, 8 aa, Homo sapiens
  Table A; Target 79194; HLA-B*07:02; SLC45A2; ENSG00000164175; TAA
SPILGFLL

SEQ ID NO: 79195 - protein, 8 aa, Homo sapiens
  Table A; Target 79195; HLA-B*08:01; SLC45A2; ENSG00000164175; TAA
SPILGFLL

SEQ ID NO: 79196 - protein, 8 aa, Homo sapiens
  Table A; Target 79196; HLA-B*35:03; SLC45A2; ENSG00000164175; TAA
SPILGFLL

SEQ ID NO: 79197 - protein, 8 aa, Homo sapiens
  Table A; Target 79197; HLA-C*07:02; SLC45A2; ENSG00000164175; TAA
SPILGFLL

SEQ ID NO: 79198 - protein, 8 aa, Homo sapiens
  Table A; Target 79198; HLA-A*01:01; SLC45A2; ENSG00000164175; TAA
SSDGMYEY

SEQ ID NO: 79199 - protein, 8 aa, Homo sapiens
  Table A; Target 79199; HLA-A*30:02; SLC45A2; ENSG00000164175; TAA
SSDGMYEY

SEQ ID NO: 79200 - protein, 8 aa, Homo sapiens
  Table A; Target 79200; HLA-B*39:01; SLC45A2; ENSG00000164175; TAA
SSDGMYEY

SEQ ID NO: 79201 - protein, 8 aa, Homo sapiens
  Table A; Target 79201; HLA-C*05:01; SLC45A2; ENSG00000164175; TAA
SSDGMYEY

SEQ ID NO: 79202 - protein, 8 aa, Homo sapiens
  Table A; Target 79202; HLA-B*57:01; SLC45A2; ENSG00000164175; TAA
SSLYSIVW

SEQ ID NO: 79203 - protein, 9 aa, Homo sapiens
  Table A; Target 79203; HLA-A*03:01; SLC45A2; ENSG00000164175; TAA
SSLYSYFQK

SEQ ID NO: 79204 - protein, 9 aa, Homo sapiens
  Table A; Target 79204; HLA-A*03:02; SLC45A2; ENSG00000164175; TAA
SSLYSYFQK

SEQ ID NO: 79205 - protein, 9 aa, Homo sapiens
  Table A; Target 79205; HLA-A*11:01; SLC45A2; ENSG00000164175; TAA
SSLYSYFQK

SEQ ID NO: 79206 - protein, 9 aa, Homo sapiens
  Table A; Target 79206; HLA-A*11:01; SLC45A2; ENSG00000164175; TAA
STEFLIYER

SEQ ID NO: 79207 - protein, 9 aa, Homo sapiens
  Table A; Target 79207; HLA-A*31:01; SLC45A2; ENSG00000164175; TAA
STEFLIYER

SEQ ID NO: 79208 - protein, 9 aa, Homo sapiens
  Table A; Target 79208; HLA-A*33:01; SLC45A2; ENSG00000164175; TAA
STEFLIYER

SEQ ID NO: 79209 - protein, 9 aa, Homo sapiens
  Table A; Target 79209; HLA-A*33:03; SLC45A2; ENSG00000164175; TAA
STEFLIYER

SEQ ID NO: 79210 - protein, 9 aa, Homo sapiens
  Table A; Target 79210; HLA-A*68:01; SLC45A2; ENSG00000164175; TAA
STEFLIYER

SEQ ID NO: 79211 - protein, 9 aa, Homo sapiens
  Table A; Target 79211; HLA-A*68:02; SLC45A2; ENSG00000164175; TAA
STEFLIYER

SEQ ID NO: 79212 - protein, 9 aa, Homo sapiens
  Table A; Target 79212; HLA-B*27:02; SLC45A2; ENSG00000164175; TAA
STEFLIYER

SEQ ID NO: 79213 - protein, 9 aa, Homo sapiens
  Table A; Target 79213; HLA-B*57:01; SLC45A2; ENSG00000164175; TAA
STEFLIYER

SEQ ID NO: 79214 - protein, 9 aa, Homo sapiens
  Table A; Target 79214; HLA-C*07:06; SLC45A2; ENSG00000164175; TAA
STEFLIYER

SEQ ID NO: 79215 - protein, 9 aa, Homo sapiens
  Table A; Target 79215; HLA-B*57:01; SLC45A2; ENSG00000164175; TAA
STLVLCSLF

SEQ ID NO: 79216 - protein, 11 aa, Homo sapiens
  Table A; Target 79216; HLA-A*31:01; SLC45A2; ENSG00000164175; TAA
SVEPPKRPTSR

SEQ ID NO: 79217 - protein, 9 aa, Homo sapiens
  Table A; Target 79217; HLA-A*25:01; SLC45A2; ENSG00000164175; TAA
SVFSSLYSY

SEQ ID NO: 79218 - protein, 9 aa, Homo sapiens
  Table A; Target 79218; HLA-A*26:01; SLC45A2; ENSG00000164175; TAA
SVFSSLYSY

SEQ ID NO: 79219 - protein, 9 aa, Homo sapiens
  Table A; Target 79219; HLA-A*29:02; SLC45A2; ENSG00000164175; TAA
SVFSSLYSY

SEQ ID NO: 79220 - protein, 9 aa, Homo sapiens
  Table A; Target 79220; HLA-A*30:02; SLC45A2; ENSG00000164175; TAA
SVFSSLYSY

SEQ ID NO: 79221 - protein, 9 aa, Homo sapiens
  Table A; Target 79221; HLA-A*32:01; SLC45A2; ENSG00000164175; TAA
SVFSSLYSY

SEQ ID NO: 79222 - protein, 9 aa, Homo sapiens
  Table A; Target 79222; HLA-B*15:01; SLC45A2; ENSG00000164175; TAA
SVFSSLYSY

SEQ ID NO: 79223 - protein, 9 aa, Homo sapiens
  Table A; Target 79223; HLA-B*15:03; SLC45A2; ENSG00000164175; TAA
SVFSSLYSY

SEQ ID NO: 79224 - protein, 9 aa, Homo sapiens
  Table A; Target 79224; HLA-B*18:01; SLC45A2; ENSG00000164175; TAA
SVFSSLYSY

SEQ ID NO: 79225 - protein, 9 aa, Homo sapiens
  Table A; Target 79225; HLA-B*35:01; SLC45A2; ENSG00000164175; TAA
SVFSSLYSY

SEQ ID NO: 79226 - protein, 9 aa, Homo sapiens
  Table A; Target 79226; HLA-B*46:01; SLC45A2; ENSG00000164175; TAA
SVFSSLYSY

SEQ ID NO: 79227 - protein, 9 aa, Homo sapiens
  Table A; Target 79227; HLA-C*02:02; SLC45A2; ENSG00000164175; TAA
SVFSSLYSY

SEQ ID NO: 79228 - protein, 9 aa, Homo sapiens
  Table A; Target 79228; HLA-C*16:04; SLC45A2; ENSG00000164175; TAA
SVFSSLYSY

SEQ ID NO: 79229 - protein, 10 aa, Homo sapiens
  Table A; Target 79229; HLA-A*25:01; SLC45A2; ENSG00000164175; TAA
SVFSSLYSYF

SEQ ID NO: 79230 - protein, 10 aa, Homo sapiens
  Table A; Target 79230; HLA-A*26:01; SLC45A2; ENSG00000164175; TAA
SVFSSLYSYF

SEQ ID NO: 79231 - protein, 10 aa, Homo sapiens
  Table A; Target 79231; HLA-A*29:02; SLC45A2; ENSG00000164175; TAA
SVFSSLYSYF

SEQ ID NO: 79232 - protein, 8 aa, Homo sapiens
  Table A; Target 79232; HLA-C*01:02; SLC45A2; ENSG00000164175; TAA
SVGLPSSL

SEQ ID NO: 79233 - protein, 9 aa, Homo sapiens
  Table A; Target 79233; HLA-A*01:01; SLC45A2; ENSG00000164175; TAA
SVGLPSSLY

SEQ ID NO: 79234 - protein, 9 aa, Homo sapiens
  Table A; Target 79234; HLA-A*25:01; SLC45A2; ENSG00000164175; TAA
SVGLPSSLY

SEQ ID NO: 79235 - protein, 9 aa, Homo sapiens
  Table A; Target 79235; HLA-A*26:01; SLC45A2; ENSG00000164175; TAA
SVGLPSSLY

SEQ ID NO: 79236 - protein, 9 aa, Homo sapiens
  Table A; Target 79236; HLA-A*29:02; SLC45A2; ENSG00000164175; TAA
SVGLPSSLY

SEQ ID NO: 79237 - protein, 9 aa, Homo sapiens
  Table A; Target 79237; HLA-A*30:02; SLC45A2; ENSG00000164175; TAA
SVGLPSSLY

SEQ ID NO: 79238 - protein, 9 aa, Homo sapiens
  Table A; Target 79238; HLA-A*32:01; SLC45A2; ENSG00000164175; TAA
SVGLPSSLY

SEQ ID NO: 79239 - protein, 9 aa, Homo sapiens
  Table A; Target 79239; HLA-B*15:01; SLC45A2; ENSG00000164175; TAA
SVGLPSSLY

SEQ ID NO: 79240 - protein, 9 aa, Homo sapiens
  Table A; Target 79240; HLA-B*15:03; SLC45A2; ENSG00000164175; TAA
SVGLPSSLY

SEQ ID NO: 79241 - protein, 9 aa, Homo sapiens
  Table A; Target 79241; HLA-B*35:01; SLC45A2; ENSG00000164175; TAA
SVGLPSSLY

SEQ ID NO: 79242 - protein, 9 aa, Homo sapiens
  Table A; Target 79242; HLA-B*46:01; SLC45A2; ENSG00000164175; TAA
SVGLPSSLY

SEQ ID NO: 79243 - protein, 9 aa, Homo sapiens
  Table A; Target 79243; HLA-C*07:04; SLC45A2; ENSG00000164175; TAA
SVGLPSSLY

SEQ ID NO: 79244 - protein, 9 aa, Homo sapiens
  Table A; Target 79244; HLA-C*07:06; SLC45A2; ENSG00000164175; TAA
SVGLPSSLY

SEQ ID NO: 79245 - protein, 8 aa, Homo sapiens
  Table A; Target 79245; HLA-C*06:02; SLC45A2; ENSG00000164175; TAA
SVTMIGVV

SEQ ID NO: 79246 - protein, 8 aa, Homo sapiens
  Table A; Target 79246; HLA-C*12:03; SLC45A2; ENSG00000164175; TAA
SVTMIGVV

SEQ ID NO: 79247 - protein, 9 aa, Homo sapiens
  Table A; Target 79247; HLA-A*68:02; SLC45A2; ENSG00000164175; TAA
SVTMIGVVL

SEQ ID NO: 79248 - protein, 9 aa, Homo sapiens
  Table A; Target 79248; HLA-B*15:01; SLC45A2; ENSG00000164175; TAA
SVTMIGVVL

SEQ ID NO: 79249 - protein, 9 aa, Homo sapiens
  Table A; Target 79249; HLA-B*35:03; SLC45A2; ENSG00000164175; TAA
SVTMIGVVL

SEQ ID NO: 79250 - protein, 9 aa, Homo sapiens
  Table A; Target 79250; HLA-B*38:01; SLC45A2; ENSG00000164175; TAA
SVTMIGVVL

SEQ ID NO: 79251 - protein, 9 aa, Homo sapiens
  Table A; Target 79251; HLA-B*39:01; SLC45A2; ENSG00000164175; TAA
SVTMIGVVL

SEQ ID NO: 79252 - protein, 9 aa, Homo sapiens
  Table A; Target 79252; HLA-B*40:01; SLC45A2; ENSG00000164175; TAA
SVTMIGVVL

SEQ ID NO: 79253 - protein, 9 aa, Homo sapiens
  Table A; Target 79253; HLA-C*03:04; SLC45A2; ENSG00000164175; TAA
SVTMIGVVL

SEQ ID NO: 79254 - protein, 9 aa, Homo sapiens
  Table A; Target 79254; HLA-C*07:04; SLC45A2; ENSG00000164175; TAA
SVTMIGVVL

SEQ ID NO: 79255 - protein, 9 aa, Homo sapiens
  Table A; Target 79255; HLA-C*07:06; SLC45A2; ENSG00000164175; TAA
SVTMIGVVL

SEQ ID NO: 79256 - protein, 9 aa, Homo sapiens
  Table A; Target 79256; HLA-C*12:03; SLC45A2; ENSG00000164175; TAA
SVTMIGVVL

SEQ ID NO: 79257 - protein, 8 aa, Homo sapiens
  Table A; Target 79257; HLA-B*08:01; SLC45A2; ENSG00000164175; TAA
SYFQKVLV

SEQ ID NO: 79258 - protein, 10 aa, Homo sapiens
  Table A; Target 79258; HLA-A*23:01; SLC45A2; ENSG00000164175; TAA
SYFQKVLVSY

SEQ ID NO: 79259 - protein, 10 aa, Homo sapiens
  Table A; Target 79259; HLA-A*24:02; SLC45A2; ENSG00000164175; TAA
SYFQKVLVSY

SEQ ID NO: 79260 - protein, 10 aa, Homo sapiens
  Table A; Target 79260; HLA-A*29:02; SLC45A2; ENSG00000164175; TAA
SYFQKVLVSY

SEQ ID NO: 79261 - protein, 10 aa, Homo sapiens
  Table A; Target 79261; HLA-A*30:02; SLC45A2; ENSG00000164175; TAA
SYFQKVLVSY

SEQ ID NO: 79262 - protein, 9 aa, Homo sapiens
  Table A; Target 79262; HLA-A*29:02; SLC45A2; ENSG00000164175; TAA
SYIGLKGLY

SEQ ID NO: 79263 - protein, 9 aa, Homo sapiens
  Table A; Target 79263; HLA-A*30:02; SLC45A2; ENSG00000164175; TAA
SYIGLKGLY

SEQ ID NO: 79264 - protein, 9 aa, Homo sapiens
  Table A; Target 79264; HLA-C*14:02; SLC45A2; ENSG00000164175; TAA
SYIGLKGLY

SEQ ID NO: 79265 - protein, 10 aa, Homo sapiens
  Table A; Target 79265; HLA-A*23:01; SLC45A2; ENSG00000164175; TAA
SYIGLKGLYF

SEQ ID NO: 79266 - protein, 10 aa, Homo sapiens
  Table A; Target 79266; HLA-A*24:02; SLC45A2; ENSG00000164175; TAA
SYIGLKGLYF

SEQ ID NO: 79267 - protein, 10 aa, Homo sapiens
  Table A; Target 79267; HLA-A*29:02; SLC45A2; ENSG00000164175; TAA
SYIGLKGLYF

SEQ ID NO: 79268 - protein, 8 aa, Homo sapiens
  Table A; Target 79268; HLA-B*08:01; SLC45A2; ENSG00000164175; TAA
TAFLSNML

SEQ ID NO: 79269 - protein, 8 aa, Homo sapiens
  Table A; Target 79269; HLA-B*35:01; SLC45A2; ENSG00000164175; TAA
TAFLSNML

SEQ ID NO: 79270 - protein, 8 aa, Homo sapiens
  Table A; Target 79270; HLA-B*35:03; SLC45A2; ENSG00000164175; TAA
TAFLSNML

SEQ ID NO: 79271 - protein, 8 aa, Homo sapiens
  Table A; Target 79271; HLA-B*51:01; SLC45A2; ENSG00000164175; TAA
TAFLSNML

SEQ ID NO: 79272 - protein, 8 aa, Homo sapiens
  Table A; Target 79272; HLA-C*03:03; SLC45A2; ENSG00000164175; TAA
TAFLSNML

SEQ ID NO: 79273 - protein, 8 aa, Homo sapiens
  Table A; Target 79273; HLA-C*03:04; SLC45A2; ENSG00000164175; TAA
TAFLSNML

SEQ ID NO: 79274 - protein, 9 aa, Homo sapiens
  Table A; Target 79274; HLA-B*35:01; SLC45A2; ENSG00000164175; TAA
TAFLSNMLF

SEQ ID NO: 79275 - protein, 9 aa, Homo sapiens
  Table A; Target 79275; HLA-B*57:01; SLC45A2; ENSG00000164175; TAA
TAFLSNMLF

SEQ ID NO: 79276 - protein, 9 aa, Homo sapiens
  Table A; Target 79276; HLA-C*02:02; SLC45A2; ENSG00000164175; TAA
TAFLSNMLF

SEQ ID NO: 79277 - protein, 9 aa, Homo sapiens
  Table A; Target 79277; HLA-C*12:03; SLC45A2; ENSG00000164175; TAA
TAFLSNMLF

SEQ ID NO: 79278 - protein, 8 aa, Homo sapiens
  Table A; Target 79278; HLA-B*51:01; SLC45A2; ENSG00000164175; TAA
TAGTVVVV

SEQ ID NO: 79279 - protein, 8 aa, Homo sapiens
  Table A; Target 79279; HLA-C*05:01; SLC45A2; ENSG00000164175; TAA
TAGTVVVV

SEQ ID NO: 79280 - protein, 8 aa, Homo sapiens
  Table A; Target 79280; HLA-C*07:04; SLC45A2; ENSG00000164175; TAA
TAGTVVVV

SEQ ID NO: 79281 - protein, 8 aa, Homo sapiens
  Table A; Target 79281; HLA-C*07:06; SLC45A2; ENSG00000164175; TAA
TAGTVVVV

SEQ ID NO: 79282 - protein, 8 aa, Homo sapiens
  Table A; Target 79282; HLA-C*12:03; SLC45A2; ENSG00000164175; TAA
TAGTVVVV

SEQ ID NO: 79283 - protein, 8 aa, Homo sapiens
  Table A; Target 79283; HLA-C*16:02; SLC45A2; ENSG00000164175; TAA
TAGTVVVV

SEQ ID NO: 79284 - protein, 9 aa, Homo sapiens
  Table A; Target 79284; HLA-A*33:03; SLC45A2; ENSG00000164175; TAA
TAGTVVVVV

SEQ ID NO: 79285 - protein, 9 aa, Homo sapiens
  Table A; Target 79285; HLA-A*68:01; SLC45A2; ENSG00000164175; TAA
TAGTVVVVV

SEQ ID NO: 79286 - protein, 9 aa, Homo sapiens
  Table A; Target 79286; HLA-A*68:02; SLC45A2; ENSG00000164175; TAA
TAGTVVVVV

SEQ ID NO: 79287 - protein, 9 aa, Homo sapiens
  Table A; Target 79287; HLA-B*13:02; SLC45A2; ENSG00000164175; TAA
TAGTVVVVV

SEQ ID NO: 79288 - protein, 9 aa, Homo sapiens
  Table A; Target 79288; HLA-B*35:01; SLC45A2; ENSG00000164175; TAA
TAGTVVVVV

SEQ ID NO: 79289 - protein, 9 aa, Homo sapiens
  Table A; Target 79289; HLA-B*35:03; SLC45A2; ENSG00000164175; TAA
TAGTVVVVV

SEQ ID NO: 79290 - protein, 9 aa, Homo sapiens
  Table A; Target 79290; HLA-B*39:01; SLC45A2; ENSG00000164175; TAA
TAGTVVVVV

SEQ ID NO: 79291 - protein, 9 aa, Homo sapiens
  Table A; Target 79291; HLA-B*51:01; SLC45A2; ENSG00000164175; TAA
TAGTVVVVV

SEQ ID NO: 79292 - protein, 9 aa, Homo sapiens
  Table A; Target 79292; HLA-C*02:02; SLC45A2; ENSG00000164175; TAA
TAGTVVVVV

SEQ ID NO: 79293 - protein, 9 aa, Homo sapiens
  Table A; Target 79293; HLA-C*03:03; SLC45A2; ENSG00000164175; TAA
TAGTVVVVV

SEQ ID NO: 79294 - protein, 9 aa, Homo sapiens
  Table A; Target 79294; HLA-C*03:04; SLC45A2; ENSG00000164175; TAA
TAGTVVVVV

SEQ ID NO: 79295 - protein, 9 aa, Homo sapiens
  Table A; Target 79295; HLA-C*05:01; SLC45A2; ENSG00000164175; TAA
TAGTVVVVV

SEQ ID NO: 79296 - protein, 9 aa, Homo sapiens
  Table A; Target 79296; HLA-C*07:04; SLC45A2; ENSG00000164175; TAA
TAGTVVVVV

SEQ ID NO: 79297 - protein, 9 aa, Homo sapiens
  Table A; Target 79297; HLA-C*07:06; SLC45A2; ENSG00000164175; TAA
TAGTVVVVV

SEQ ID NO: 79298 - protein, 9 aa, Homo sapiens
  Table A; Target 79298; HLA-C*12:03; SLC45A2; ENSG00000164175; TAA
TAGTVVVVV

SEQ ID NO: 79299 - protein, 9 aa, Homo sapiens
  Table A; Target 79299; HLA-C*16:02; SLC45A2; ENSG00000164175; TAA
TAGTVVVVV

SEQ ID NO: 79300 - protein, 9 aa, Homo sapiens
  Table A; Target 79300; HLA-C*16:04; SLC45A2; ENSG00000164175; TAA
TAGTVVVVV

SEQ ID NO: 79301 - protein, 10 aa, Homo sapiens
  Table A; Target 79301; HLA-A*68:01; SLC45A2; ENSG00000164175; TAA
TAGTVVVVVI

SEQ ID NO: 79302 - protein, 8 aa, Homo sapiens
  Table A; Target 79302; HLA-B*51:01; SLC45A2; ENSG00000164175; TAA
TASAVALI

SEQ ID NO: 79303 - protein, 10 aa, Homo sapiens
  Table A; Target 79303; HLA-C*07:01; SLC45A2; ENSG00000164175; TAA
TCMVQLAQIL

SEQ ID NO: 79304 - protein, 8 aa, Homo sapiens
  Table A; Target 79304; HLA-B*37:01; SLC45A2; ENSG00000164175; TAA
TDFMGQIV

SEQ ID NO: 79305 - protein, 8 aa, Homo sapiens
  Table A; Target 79305; HLA-C*12:03; SLC45A2; ENSG00000164175; TAA
TDFMGQIV

SEQ ID NO: 79306 - protein, 9 aa, Homo sapiens
  Table A; Target 79306; HLA-A*29:02; SLC45A2; ENSG00000164175; TAA
TDFMGQIVY

SEQ ID NO: 79307 - protein, 9 aa, Homo sapiens
  Table A; Target 79307; HLA-A*30:01; SLC45A2; ENSG00000164175; TAA
TDFMGQIVY

SEQ ID NO: 79308 - protein, 9 aa, Homo sapiens
  Table A; Target 79308; HLA-B*15:01; SLC45A2; ENSG00000164175; TAA
TDFMGQIVY

SEQ ID NO: 79309 - protein, 9 aa, Homo sapiens
  Table A; Target 79309; HLA-B*15:03; SLC45A2; ENSG00000164175; TAA
TDFMGQIVY

SEQ ID NO: 79310 - protein, 9 aa, Homo sapiens
  Table A; Target 79310; HLA-B*18:01; SLC45A2; ENSG00000164175; TAA
TDFMGQIVY

SEQ ID NO: 79311 - protein, 9 aa, Homo sapiens
  Table A; Target 79311; HLA-B*27:02; SLC45A2; ENSG00000164175; TAA
TDFMGQIVY

SEQ ID NO: 79312 - protein, 9 aa, Homo sapiens
  Table A; Target 79312; HLA-B*35:01; SLC45A2; ENSG00000164175; TAA
TDFMGQIVY

SEQ ID NO: 79313 - protein, 9 aa, Homo sapiens
  Table A; Target 79313; HLA-B*37:01; SLC45A2; ENSG00000164175; TAA
TDFMGQIVY

SEQ ID NO: 79314 - protein, 9 aa, Homo sapiens
  Table A; Target 79314; HLA-B*39:01; SLC45A2; ENSG00000164175; TAA
TDFMGQIVY

SEQ ID NO: 79315 - protein, 9 aa, Homo sapiens
  Table A; Target 79315; HLA-B*44:02; SLC45A2; ENSG00000164175; TAA
TDFMGQIVY

SEQ ID NO: 79316 - protein, 9 aa, Homo sapiens
  Table A; Target 79316; HLA-B*44:03; SLC45A2; ENSG00000164175; TAA
TDFMGQIVY

SEQ ID NO: 79317 - protein, 9 aa, Homo sapiens
  Table A; Target 79317; HLA-C*02:02; SLC45A2; ENSG00000164175; TAA
TDFMGQIVY

SEQ ID NO: 79318 - protein, 9 aa, Homo sapiens
  Table A; Target 79318; HLA-C*04:01; SLC45A2; ENSG00000164175; TAA
TDFMGQIVY

SEQ ID NO: 79319 - protein, 9 aa, Homo sapiens
  Table A; Target 79319; HLA-C*06:02; SLC45A2; ENSG00000164175; TAA
TDFMGQIVY

SEQ ID NO: 79320 - protein, 9 aa, Homo sapiens
  Table A; Target 79320; HLA-C*07:01; SLC45A2; ENSG00000164175; TAA
TDFMGQIVY

SEQ ID NO: 79321 - protein, 9 aa, Homo sapiens
  Table A; Target 79321; HLA-C*07:04; SLC45A2; ENSG00000164175; TAA
TDFMGQIVY

SEQ ID NO: 79322 - protein, 9 aa, Homo sapiens
  Table A; Target 79322; HLA-C*12:03; SLC45A2; ENSG00000164175; TAA
TDFMGQIVY

SEQ ID NO: 79323 - protein, 9 aa, Homo sapiens
  Table A; Target 79323; HLA-C*16:01; SLC45A2; ENSG00000164175; TAA
TDFMGQIVY

SEQ ID NO: 79324 - protein, 9 aa, Homo sapiens
  Table A; Target 79324; HLA-C*16:04; SLC45A2; ENSG00000164175; TAA
TDFMGQIVY

SEQ ID NO: 79325 - protein, 10 aa, Homo sapiens
  Table A; Target 79325; HLA-A*31:01; SLC45A2; ENSG00000164175; TAA
TDFMGQIVYR

SEQ ID NO: 79326 - protein, 10 aa, Homo sapiens
  Table A; Target 79326; HLA-A*33:01; SLC45A2; ENSG00000164175; TAA
TDFMGQIVYR

SEQ ID NO: 79327 - protein, 10 aa, Homo sapiens
  Table A; Target 79327; HLA-A*33:03; SLC45A2; ENSG00000164175; TAA
TDFMGQIVYR

SEQ ID NO: 79328 - protein, 10 aa, Homo sapiens
  Table A; Target 79328; HLA-A*68:01; SLC45A2; ENSG00000164175; TAA
TDFMGQIVYR

SEQ ID NO: 79329 - protein, 10 aa, Homo sapiens
  Table A; Target 79329; HLA-A*68:02; SLC45A2; ENSG00000164175; TAA
TDFMGQIVYR

SEQ ID NO: 79330 - protein, 10 aa, Homo sapiens
  Table A; Target 79330; HLA-B*27:02; SLC45A2; ENSG00000164175; TAA
TDFMGQIVYR

SEQ ID NO: 79331 - protein, 10 aa, Homo sapiens
  Table A; Target 79331; HLA-C*04:01; SLC45A2; ENSG00000164175; TAA
TDFMGQIVYR

SEQ ID NO: 79332 - protein, 8 aa, Homo sapiens
  Table A; Target 79332; HLA-B*18:01; SLC45A2; ENSG00000164175; TAA
TEFLIYER

SEQ ID NO: 79333 - protein, 8 aa, Homo sapiens
  Table A; Target 79333; HLA-B*18:01; SLC45A2; ENSG00000164175; TAA
TEFQVMFF

SEQ ID NO: 79334 - protein, 8 aa, Homo sapiens
  Table A; Target 79334; HLA-B*37:01; SLC45A2; ENSG00000164175; TAA
TEFQVMFF

SEQ ID NO: 79335 - protein, 8 aa, Homo sapiens
  Table A; Target 79335; HLA-B*44:02; SLC45A2; ENSG00000164175; TAA
TEFQVMFF

SEQ ID NO: 79336 - protein, 8 aa, Homo sapiens
  Table A; Target 79336; HLA-B*44:03; SLC45A2; ENSG00000164175; TAA
TEFQVMFF

SEQ ID NO: 79337 - protein, 8 aa, Homo sapiens
  Table A; Target 79337; HLA-B*49:01; SLC45A2; ENSG00000164175; TAA
TEFQVMFF

SEQ ID NO: 79338 - protein, 9 aa, Homo sapiens
  Table A; Target 79338; HLA-B*44:02; SLC45A2; ENSG00000164175; TAA
TEFQVMFFF

SEQ ID NO: 79339 - protein, 9 aa, Homo sapiens
  Table A; Target 79339; HLA-B*44:03; SLC45A2; ENSG00000164175; TAA
TEFQVMFFF

SEQ ID NO: 79340 - protein, 9 aa, Homo sapiens
  Table A; Target 79340; HLA-B*40:02; SLC45A2; ENSG00000164175; TAA
TEVAKGIPP

SEQ ID NO: 79341 - protein, 9 aa, Homo sapiens
  Table A; Target 79341; HLA-A*01:01; SLC45A2; ENSG00000164175; TAA
TGFGGALGY

SEQ ID NO: 79342 - protein, 9 aa, Homo sapiens
  Table A; Target 79342; HLA-A*03:01; SLC45A2; ENSG00000164175; TAA
TGFGGALGY

SEQ ID NO: 79343 - protein, 9 aa, Homo sapiens
  Table A; Target 79343; HLA-A*03:02; SLC45A2; ENSG00000164175; TAA
TGFGGALGY

SEQ ID NO: 79344 - protein, 9 aa, Homo sapiens
  Table A; Target 79344; HLA-A*11:01; SLC45A2; ENSG00000164175; TAA
TGFGGALGY

SEQ ID NO: 79345 - protein, 9 aa, Homo sapiens
  Table A; Target 79345; HLA-A*25:01; SLC45A2; ENSG00000164175; TAA
TGFGGALGY

SEQ ID NO: 79346 - protein, 9 aa, Homo sapiens
  Table A; Target 79346; HLA-A*26:01; SLC45A2; ENSG00000164175; TAA
TGFGGALGY

SEQ ID NO: 79347 - protein, 9 aa, Homo sapiens
  Table A; Target 79347; HLA-A*29:02; SLC45A2; ENSG00000164175; TAA
TGFGGALGY

SEQ ID NO: 79348 - protein, 9 aa, Homo sapiens
  Table A; Target 79348; HLA-A*30:02; SLC45A2; ENSG00000164175; TAA
TGFGGALGY

SEQ ID NO: 79349 - protein, 9 aa, Homo sapiens
  Table A; Target 79349; HLA-A*32:01; SLC45A2; ENSG00000164175; TAA
TGFGGALGY

SEQ ID NO: 79350 - protein, 9 aa, Homo sapiens
  Table A; Target 79350; HLA-A*68:01; SLC45A2; ENSG00000164175; TAA
TGFGGALGY

SEQ ID NO: 79351 - protein, 9 aa, Homo sapiens
  Table A; Target 79351; HLA-B*13:02; SLC45A2; ENSG00000164175; TAA
TGFGGALGY

SEQ ID NO: 79352 - protein, 9 aa, Homo sapiens
  Table A; Target 79352; HLA-B*15:01; SLC45A2; ENSG00000164175; TAA
TGFGGALGY

SEQ ID NO: 79353 - protein, 9 aa, Homo sapiens
  Table A; Target 79353; HLA-B*15:03; SLC45A2; ENSG00000164175; TAA
TGFGGALGY

SEQ ID NO: 79354 - protein, 9 aa, Homo sapiens
  Table A; Target 79354; HLA-B*18:01; SLC45A2; ENSG00000164175; TAA
TGFGGALGY

SEQ ID NO: 79355 - protein, 9 aa, Homo sapiens
  Table A; Target 79355; HLA-B*27:02; SLC45A2; ENSG00000164175; TAA
TGFGGALGY

SEQ ID NO: 79356 - protein, 9 aa, Homo sapiens
  Table A; Target 79356; HLA-B*27:05; SLC45A2; ENSG00000164175; TAA
TGFGGALGY

SEQ ID NO: 79357 - protein, 9 aa, Homo sapiens
  Table A; Target 79357; HLA-B*35:01; SLC45A2; ENSG00000164175; TAA
TGFGGALGY

SEQ ID NO: 79358 - protein, 9 aa, Homo sapiens
  Table A; Target 79358; HLA-B*39:01; SLC45A2; ENSG00000164175; TAA
TGFGGALGY

SEQ ID NO: 79359 - protein, 9 aa, Homo sapiens
  Table A; Target 79359; HLA-B*44:02; SLC45A2; ENSG00000164175; TAA
TGFGGALGY

SEQ ID NO: 79360 - protein, 9 aa, Homo sapiens
  Table A; Target 79360; HLA-B*44:03; SLC45A2; ENSG00000164175; TAA
TGFGGALGY

SEQ ID NO: 79361 - protein, 9 aa, Homo sapiens
  Table A; Target 79361; HLA-B*46:01; SLC45A2; ENSG00000164175; TAA
TGFGGALGY

SEQ ID NO: 79362 - protein, 9 aa, Homo sapiens
  Table A; Target 79362; HLA-B*58:01; SLC45A2; ENSG00000164175; TAA
TGFGGALGY

SEQ ID NO: 79363 - protein, 9 aa, Homo sapiens
  Table A; Target 79363; HLA-C*01:02; SLC45A2; ENSG00000164175; TAA
TGFGGALGY

SEQ ID NO: 79364 - protein, 9 aa, Homo sapiens
  Table A; Target 79364; HLA-C*02:02; SLC45A2; ENSG00000164175; TAA
TGFGGALGY

SEQ ID NO: 79365 - protein, 9 aa, Homo sapiens
  Table A; Target 79365; HLA-C*03:03; SLC45A2; ENSG00000164175; TAA
TGFGGALGY

SEQ ID NO: 79366 - protein, 9 aa, Homo sapiens
  Table A; Target 79366; HLA-C*04:01; SLC45A2; ENSG00000164175; TAA
TGFGGALGY

SEQ ID NO: 79367 - protein, 9 aa, Homo sapiens
  Table A; Target 79367; HLA-C*06:02; SLC45A2; ENSG00000164175; TAA
TGFGGALGY

SEQ ID NO: 79368 - protein, 9 aa, Homo sapiens
  Table A; Target 79368; HLA-C*07:01; SLC45A2; ENSG00000164175; TAA
TGFGGALGY

SEQ ID NO: 79369 - protein, 9 aa, Homo sapiens
  Table A; Target 79369; HLA-C*07:04; SLC45A2; ENSG00000164175; TAA
TGFGGALGY

SEQ ID NO: 79370 - protein, 9 aa, Homo sapiens
  Table A; Target 79370; HLA-C*07:06; SLC45A2; ENSG00000164175; TAA
TGFGGALGY

SEQ ID NO: 79371 - protein, 9 aa, Homo sapiens
  Table A; Target 79371; HLA-C*12:03; SLC45A2; ENSG00000164175; TAA
TGFGGALGY

SEQ ID NO: 79372 - protein, 9 aa, Homo sapiens
  Table A; Target 79372; HLA-C*14:02; SLC45A2; ENSG00000164175; TAA
TGFGGALGY

SEQ ID NO: 79373 - protein, 9 aa, Homo sapiens
  Table A; Target 79373; HLA-C*16:01; SLC45A2; ENSG00000164175; TAA
TGFGGALGY

SEQ ID NO: 79374 - protein, 9 aa, Homo sapiens
  Table A; Target 79374; HLA-C*16:02; SLC45A2; ENSG00000164175; TAA
TGFGGALGY

SEQ ID NO: 79375 - protein, 9 aa, Homo sapiens
  Table A; Target 79375; HLA-C*16:04; SLC45A2; ENSG00000164175; TAA
TGFGGALGY

SEQ ID NO: 79376 - protein, 11 aa, Homo sapiens
  Table A; Target 79376; HLA-A*68:02; SLC45A2; ENSG00000164175; TAA
TGFGGALGYLL

SEQ ID NO: 79377 - protein, 10 aa, Homo sapiens
  Table A; Target 79377; HLA-C*06:02; SLC45A2; ENSG00000164175; TAA
TGFIGLFPNV

SEQ ID NO: 79378 - protein, 8 aa, Homo sapiens
  Table A; Target 79378; HLA-B*51:01; SLC45A2; ENSG00000164175; TAA
TGYLLFGL

SEQ ID NO: 79379 - protein, 8 aa, Homo sapiens
  Table A; Target 79379; HLA-A*02:01; SLC45A2; ENSG00000164175; TAA
TLGVMMLV

SEQ ID NO: 79380 - protein, 8 aa, Homo sapiens
  Table A; Target 79380; HLA-A*02:03; SLC45A2; ENSG00000164175; TAA
TLGVMMLV

SEQ ID NO: 79381 - protein, 8 aa, Homo sapiens
  Table A; Target 79381; HLA-B*13:02; SLC45A2; ENSG00000164175; TAA
TLGVMMLV

SEQ ID NO: 79382 - protein, 8 aa, Homo sapiens
  Table A; Target 79382; HLA-C*06:02; SLC45A2; ENSG00000164175; TAA
TLGVMMLV

SEQ ID NO: 79383 - protein, 9 aa, Homo sapiens
  Table A; Target 79383; HLA-A*02:03; SLC45A2; ENSG00000164175; TAA
TLKSLLRAL

SEQ ID NO: 79384 - protein, 9 aa, Homo sapiens
  Table A; Target 79384; HLA-A*02:04; SLC45A2; ENSG00000164175; TAA
TLKSLLRAL

SEQ ID NO: 79385 - protein, 9 aa, Homo sapiens
  Table A; Target 79385; HLA-B*08:01; SLC45A2; ENSG00000164175; TAA
TLKSLLRAL

SEQ ID NO: 79386 - protein, 9 aa, Homo sapiens
  Table A; Target 79386; HLA-A*02:01; SLC45A2; ENSG00000164175; TAA
TLYTVPFNL

SEQ ID NO: 79387 - protein, 9 aa, Homo sapiens
  Table A; Target 79387; HLA-A*02:03; SLC45A2; ENSG00000164175; TAA
TLYTVPFNL

SEQ ID NO: 79388 - protein, 9 aa, Homo sapiens
  Table A; Target 79388; HLA-A*02:04; SLC45A2; ENSG00000164175; TAA
TLYTVPFNL

SEQ ID NO: 79389 - protein, 9 aa, Homo sapiens
  Table A; Target 79389; HLA-A*02:07; SLC45A2; ENSG00000164175; TAA
TLYTVPFNL

SEQ ID NO: 79390 - protein, 9 aa, Homo sapiens
  Table A; Target 79390; HLA-A*03:01; SLC45A2; ENSG00000164175; TAA
TLYTVPFNL

SEQ ID NO: 79391 - protein, 9 aa, Homo sapiens
  Table A; Target 79391; HLA-A*23:01; SLC45A2; ENSG00000164175; TAA
TLYTVPFNL

SEQ ID NO: 79392 - protein, 9 aa, Homo sapiens
  Table A; Target 79392; HLA-A*68:02; SLC45A2; ENSG00000164175; TAA
TLYTVPFNL

SEQ ID NO: 79393 - protein, 9 aa, Homo sapiens
  Table A; Target 79393; HLA-B*13:02; SLC45A2; ENSG00000164175; TAA
TLYTVPFNL

SEQ ID NO: 79394 - protein, 9 aa, Homo sapiens
  Table A; Target 79394; HLA-B*55:01; SLC45A2; ENSG00000164175; TAA
TLYTVPFNL

SEQ ID NO: 79395 - protein, 10 aa, Homo sapiens
  Table A; Target 79395; HLA-A*02:03; SLC45A2; ENSG00000164175; TAA
TLYTVPFNLI

SEQ ID NO: 79396 - protein, 10 aa, Homo sapiens
  Table A; Target 79396; HLA-A*02:07; SLC45A2; ENSG00000164175; TAA
TLYTVPFNLI

SEQ ID NO: 79397 - protein, 10 aa, Homo sapiens
  Table A; Target 79397; HLA-A*68:02; SLC45A2; ENSG00000164175; TAA
TLYTVPFNLI

SEQ ID NO: 79398 - protein, 9 aa, Homo sapiens
  Table A; Target 79398; HLA-B*56:01; SLC45A2; ENSG00000164175; TAA
TPQDPPLSS

SEQ ID NO: 79399 - protein, 9 aa, Homo sapiens
  Table A; Target 79399; HLA-B*07:02; SLC45A2; ENSG00000164175; TAA
TPVLLSVGL

SEQ ID NO: 79400 - protein, 9 aa, Homo sapiens
  Table A; Target 79400; HLA-B*35:01; SLC45A2; ENSG00000164175; TAA
TPVLLSVGL

SEQ ID NO: 79401 - protein, 9 aa, Homo sapiens
  Table A; Target 79401; HLA-B*35:03; SLC45A2; ENSG00000164175; TAA
TPVLLSVGL

SEQ ID NO: 79402 - protein, 9 aa, Homo sapiens
  Table A; Target 79402; HLA-B*56:01; SLC45A2; ENSG00000164175; TAA
TPVLLSVGL

SEQ ID NO: 79403 - protein, 10 aa, Homo sapiens
  Table A; Target 79403; HLA-A*01:01; SLC45A2; ENSG00000164175; TAA
TVPFNLITEY

SEQ ID NO: 79404 - protein, 10 aa, Homo sapiens
  Table A; Target 79404; HLA-A*25:01; SLC45A2; ENSG00000164175; TAA
TVPFNLITEY

SEQ ID NO: 79405 - protein, 10 aa, Homo sapiens
  Table A; Target 79405; HLA-A*26:01; SLC45A2; ENSG00000164175; TAA
TVPFNLITEY

SEQ ID NO: 79406 - protein, 10 aa, Homo sapiens
  Table A; Target 79406; HLA-A*29:02; SLC45A2; ENSG00000164175; TAA
TVPFNLITEY

SEQ ID NO: 79407 - protein, 10 aa, Homo sapiens
  Table A; Target 79407; HLA-A*30:02; SLC45A2; ENSG00000164175; TAA
TVPFNLITEY

SEQ ID NO: 79408 - protein, 10 aa, Homo sapiens
  Table A; Target 79408; HLA-B*15:01; SLC45A2; ENSG00000164175; TAA
TVPFNLITEY

SEQ ID NO: 79409 - protein, 10 aa, Homo sapiens
  Table A; Target 79409; HLA-B*35:01; SLC45A2; ENSG00000164175; TAA
TVPFNLITEY

SEQ ID NO: 79410 - protein, 10 aa, Homo sapiens
  Table A; Target 79410; HLA-C*07:04; SLC45A2; ENSG00000164175; TAA
TVPFNLITEY

SEQ ID NO: 79411 - protein, 11 aa, Homo sapiens
  Table A; Target 79411; HLA-A*31:01; SLC45A2; ENSG00000164175; TAA
TVVAALIANPR

SEQ ID NO: 79412 - protein, 11 aa, Homo sapiens
  Table A; Target 79412; HLA-A*33:03; SLC45A2; ENSG00000164175; TAA
TVVAALIANPR

SEQ ID NO: 79413 - protein, 11 aa, Homo sapiens
  Table A; Target 79413; HLA-A*68:01; SLC45A2; ENSG00000164175; TAA
TVVAALIANPR

SEQ ID NO: 79414 - protein, 11 aa, Homo sapiens
  Table A; Target 79414; HLA-B*27:02; SLC45A2; ENSG00000164175; TAA
TVVAALIANPR

SEQ ID NO: 79415 - protein, 11 aa, Homo sapiens
  Table A; Target 79415; HLA-C*07:06; SLC45A2; ENSG00000164175; TAA
TVVAALIANPR

SEQ ID NO: 79416 - protein, 9 aa, Homo sapiens
  Table A; Target 79416; HLA-A*02:01; SLC45A2; ENSG00000164175; TAA
TVVVVVITA

SEQ ID NO: 79417 - protein, 9 aa, Homo sapiens
  Table A; Target 79417; HLA-A*02:03; SLC45A2; ENSG00000164175; TAA
TVVVVVITA

SEQ ID NO: 79418 - protein, 9 aa, Homo sapiens
  Table A; Target 79418; HLA-A*02:04; SLC45A2; ENSG00000164175; TAA
TVVVVVITA

SEQ ID NO: 79419 - protein, 9 aa, Homo sapiens
  Table A; Target 79419; HLA-A*02:07; SLC45A2; ENSG00000164175; TAA
TVVVVVITA

SEQ ID NO: 79420 - protein, 9 aa, Homo sapiens
  Table A; Target 79420; HLA-A*25:01; SLC45A2; ENSG00000164175; TAA
TVVVVVITA

SEQ ID NO: 79421 - protein, 9 aa, Homo sapiens
  Table A; Target 79421; HLA-A*30:01; SLC45A2; ENSG00000164175; TAA
TVVVVVITA

SEQ ID NO: 79422 - protein, 9 aa, Homo sapiens
  Table A; Target 79422; HLA-A*32:01; SLC45A2; ENSG00000164175; TAA
TVVVVVITA

SEQ ID NO: 79423 - protein, 9 aa, Homo sapiens
  Table A; Target 79423; HLA-A*68:01; SLC45A2; ENSG00000164175; TAA
TVVVVVITA

SEQ ID NO: 79424 - protein, 9 aa, Homo sapiens
  Table A; Target 79424; HLA-A*68:02; SLC45A2; ENSG00000164175; TAA
TVVVVVITA

SEQ ID NO: 79425 - protein, 9 aa, Homo sapiens
  Table A; Target 79425; HLA-B*13:02; SLC45A2; ENSG00000164175; TAA
TVVVVVITA

SEQ ID NO: 79426 - protein, 9 aa, Homo sapiens
  Table A; Target 79426; HLA-B*35:01; SLC45A2; ENSG00000164175; TAA
TVVVVVITA

SEQ ID NO: 79427 - protein, 9 aa, Homo sapiens
  Table A; Target 79427; HLA-B*54:01; SLC45A2; ENSG00000164175; TAA
TVVVVVITA

SEQ ID NO: 79428 - protein, 9 aa, Homo sapiens
  Table A; Target 79428; HLA-B*55:01; SLC45A2; ENSG00000164175; TAA
TVVVVVITA

SEQ ID NO: 79429 - protein, 9 aa, Homo sapiens
  Table A; Target 79429; HLA-B*56:01; SLC45A2; ENSG00000164175; TAA
TVVVVVITA

SEQ ID NO: 79430 - protein, 9 aa, Homo sapiens
  Table A; Target 79430; HLA-C*07:06; SLC45A2; ENSG00000164175; TAA
TVVVVVITA

SEQ ID NO: 79431 - protein, 9 aa, Homo sapiens
  Table A; Target 79431; HLA-C*12:03; SLC45A2; ENSG00000164175; TAA
TVVVVVITA

SEQ ID NO: 79432 - protein, 9 aa, Homo sapiens
  Table A; Target 79432; HLA-A*03:02; SLC45A2; ENSG00000164175; TAA
VAALIANPR

SEQ ID NO: 79433 - protein, 9 aa, Homo sapiens
  Table A; Target 79433; HLA-A*11:01; SLC45A2; ENSG00000164175; TAA
VAALIANPR

SEQ ID NO: 79434 - protein, 9 aa, Homo sapiens
  Table A; Target 79434; HLA-A*31:01; SLC45A2; ENSG00000164175; TAA
VAALIANPR

SEQ ID NO: 79435 - protein, 9 aa, Homo sapiens
  Table A; Target 79435; HLA-A*33:01; SLC45A2; ENSG00000164175; TAA
VAALIANPR

SEQ ID NO: 79436 - protein, 9 aa, Homo sapiens
  Table A; Target 79436; HLA-A*33:03; SLC45A2; ENSG00000164175; TAA
VAALIANPR

SEQ ID NO: 79437 - protein, 9 aa, Homo sapiens
  Table A; Target 79437; HLA-A*68:01; SLC45A2; ENSG00000164175; TAA
VAALIANPR

SEQ ID NO: 79438 - protein, 9 aa, Homo sapiens
  Table A; Target 79438; HLA-B*27:02; SLC45A2; ENSG00000164175; TAA
VAALIANPR

SEQ ID NO: 79439 - protein, 9 aa, Homo sapiens
  Table A; Target 79439; HLA-B*27:05; SLC45A2; ENSG00000164175; TAA
VAALIANPR

SEQ ID NO: 79440 - protein, 9 aa, Homo sapiens
  Table A; Target 79440; HLA-C*02:02; SLC45A2; ENSG00000164175; TAA
VAALIANPR

SEQ ID NO: 79441 - protein, 9 aa, Homo sapiens
  Table A; Target 79441; HLA-C*07:06; SLC45A2; ENSG00000164175; TAA
VAALIANPR

SEQ ID NO: 79442 - protein, 9 aa, Homo sapiens
  Table A; Target 79442; HLA-C*12:03; SLC45A2; ENSG00000164175; TAA
VAKGIPPQQ

SEQ ID NO: 79443 - protein, 8 aa, Homo sapiens
  Table A; Target 79443; HLA-B*51:01; SLC45A2; ENSG00000164175; TAA
VALFVRYV

SEQ ID NO: 79444 - protein, 9 aa, Homo sapiens
  Table A; Target 79444; HLA-A*02:01; SLC45A2; ENSG00000164175; TAA
VEAAYVTPV

SEQ ID NO: 79445 - protein, 9 aa, Homo sapiens
  Table A; Target 79445; HLA-A*02:03; SLC45A2; ENSG00000164175; TAA
VEAAYVTPV

SEQ ID NO: 79446 - protein, 9 aa, Homo sapiens
  Table A; Target 79446; HLA-A*30:01; SLC45A2; ENSG00000164175; TAA
VEAAYVTPV

SEQ ID NO: 79447 - protein, 9 aa, Homo sapiens
  Table A; Target 79447; HLA-B*18:01; SLC45A2; ENSG00000164175; TAA
VEAAYVTPV

SEQ ID NO: 79448 - protein, 9 aa, Homo sapiens
  Table A; Target 79448; HLA-B*37:01; SLC45A2; ENSG00000164175; TAA
VEAAYVTPV

SEQ ID NO: 79449 - protein, 9 aa, Homo sapiens
  Table A; Target 79449; HLA-B*40:01; SLC45A2; ENSG00000164175; TAA
VEAAYVTPV

SEQ ID NO: 79450 - protein, 9 aa, Homo sapiens
  Table A; Target 79450; HLA-B*40:02; SLC45A2; ENSG00000164175; TAA
VEAAYVTPV

SEQ ID NO: 79451 - protein, 9 aa, Homo sapiens
  Table A; Target 79451; HLA-B*49:01; SLC45A2; ENSG00000164175; TAA
VEAAYVTPV

SEQ ID NO: 79452 - protein, 9 aa, Homo sapiens
  Table A; Target 79452; HLA-C*02:02; SLC45A2; ENSG00000164175; TAA
VEAAYVTPV

SEQ ID NO: 79453 - protein, 9 aa, Homo sapiens
  Table A; Target 79453; HLA-C*06:02; SLC45A2; ENSG00000164175; TAA
VEAAYVTPV

SEQ ID NO: 79454 - protein, 9 aa, Homo sapiens
  Table A; Target 79454; HLA-C*12:03; SLC45A2; ENSG00000164175; TAA
VEAAYVTPV

SEQ ID NO: 79455 - protein, 9 aa, Homo sapiens
  Table A; Target 79455; HLA-C*16:02; SLC45A2; ENSG00000164175; TAA
VEAAYVTPV

SEQ ID NO: 79456 - protein, 9 aa, Homo sapiens
  Table A; Target 79456; HLA-C*16:04; SLC45A2; ENSG00000164175; TAA
VEAAYVTPV

SEQ ID NO: 79457 - protein, 10 aa, Homo sapiens
  Table A; Target 79457; HLA-A*30:01; SLC45A2; ENSG00000164175; TAA
VEAAYVTPVL

SEQ ID NO: 79458 - protein, 10 aa, Homo sapiens
  Table A; Target 79458; HLA-B*18:01; SLC45A2; ENSG00000164175; TAA
VEAAYVTPVL

SEQ ID NO: 79459 - protein, 10 aa, Homo sapiens
  Table A; Target 79459; HLA-B*40:01; SLC45A2; ENSG00000164175; TAA
VEAAYVTPVL

SEQ ID NO: 79460 - protein, 10 aa, Homo sapiens
  Table A; Target 79460; HLA-B*40:02; SLC45A2; ENSG00000164175; TAA
VEAAYVTPVL

SEQ ID NO: 79461 - protein, 10 aa, Homo sapiens
  Table A; Target 79461; HLA-B*44:02; SLC45A2; ENSG00000164175; TAA
VEAAYVTPVL

SEQ ID NO: 79462 - protein, 10 aa, Homo sapiens
  Table A; Target 79462; HLA-B*44:03; SLC45A2; ENSG00000164175; TAA
VEAAYVTPVL

SEQ ID NO: 79463 - protein, 10 aa, Homo sapiens
  Table A; Target 79463; HLA-B*49:01; SLC45A2; ENSG00000164175; TAA
VEAAYVTPVL

SEQ ID NO: 79464 - protein, 11 aa, Homo sapiens
  Table A; Target 79464; HLA-A*30:01; SLC45A2; ENSG00000164175; TAA
VEAAYVTPVLL

SEQ ID NO: 79465 - protein, 11 aa, Homo sapiens
  Table A; Target 79465; HLA-B*40:01; SLC45A2; ENSG00000164175; TAA
VEAAYVTPVLL

SEQ ID NO: 79466 - protein, 8 aa, Homo sapiens
  Table A; Target 79466; HLA-A*23:01; SLC45A2; ENSG00000164175; TAA
VFSSLYSY

SEQ ID NO: 79467 - protein, 8 aa, Homo sapiens
  Table A; Target 79467; HLA-A*29:02; SLC45A2; ENSG00000164175; TAA
VFSSLYSY

SEQ ID NO: 79468 - protein, 8 aa, Homo sapiens
  Table A; Target 79468; HLA-A*30:02; SLC45A2; ENSG00000164175; TAA
VFSSLYSY

SEQ ID NO: 79469 - protein, 8 aa, Homo sapiens
  Table A; Target 79469; HLA-C*14:02; SLC45A2; ENSG00000164175; TAA
VFSSLYSY

SEQ ID NO: 79470 - protein, 9 aa, Homo sapiens
  Table A; Target 79470; HLA-A*23:01; SLC45A2; ENSG00000164175; TAA
VFSSLYSYF

SEQ ID NO: 79471 - protein, 9 aa, Homo sapiens
  Table A; Target 79471; HLA-A*24:02; SLC45A2; ENSG00000164175; TAA
VFSSLYSYF

SEQ ID NO: 79472 - protein, 9 aa, Homo sapiens
  Table A; Target 79472; HLA-A*29:02; SLC45A2; ENSG00000164175; TAA
VFSSLYSYF

SEQ ID NO: 79473 - protein, 9 aa, Homo sapiens
  Table A; Target 79473; HLA-B*13:02; SLC45A2; ENSG00000164175; TAA
VGGGLGFLV

SEQ ID NO: 79474 - protein, 9 aa, Homo sapiens
  Table A; Target 79474; HLA-C*06:02; SLC45A2; ENSG00000164175; TAA
VGGGLGFLV

SEQ ID NO: 79475 - protein, 9 aa, Homo sapiens
  Table A; Target 79475; HLA-C*12:03; SLC45A2; ENSG00000164175; TAA
VGGGLGFLV

SEQ ID NO: 79476 - protein, 11 aa, Homo sapiens
  Table A; Target 79476; HLA-C*04:01; SLC45A2; ENSG00000164175; TAA
VGGGLGFLVNT

SEQ ID NO: 79477 - protein, 8 aa, Homo sapiens
  Table A; Target 79477; HLA-A*30:02; SLC45A2; ENSG00000164175; TAA
VGLPSSLY

SEQ ID NO: 79478 - protein, 8 aa, Homo sapiens
  Table A; Target 79478; HLA-B*15:01; SLC45A2; ENSG00000164175; TAA
VGLPSSLY

SEQ ID NO: 79479 - protein, 8 aa, Homo sapiens
  Table A; Target 79479; HLA-B*15:03; SLC45A2; ENSG00000164175; TAA
VGLPSSLY

SEQ ID NO: 79480 - protein, 8 aa, Homo sapiens
  Table A; Target 79480; HLA-B*18:01; SLC45A2; ENSG00000164175; TAA
VGLPSSLY

SEQ ID NO: 79481 - protein, 8 aa, Homo sapiens
  Table A; Target 79481; HLA-B*39:01; SLC45A2; ENSG00000164175; TAA
VGLPSSLY

SEQ ID NO: 79482 - protein, 8 aa, Homo sapiens
  Table A; Target 79482; HLA-B*46:01; SLC45A2; ENSG00000164175; TAA
VGLPSSLY

SEQ ID NO: 79483 - protein, 8 aa, Homo sapiens
  Table A; Target 79483; HLA-C*04:01; SLC45A2; ENSG00000164175; TAA
VGLPSSLY

SEQ ID NO: 79484 - protein, 8 aa, Homo sapiens
  Table A; Target 79484; HLA-C*07:01; SLC45A2; ENSG00000164175; TAA
VGLPSSLY

SEQ ID NO: 79485 - protein, 8 aa, Homo sapiens
  Table A; Target 79485; HLA-C*14:02; SLC45A2; ENSG00000164175; TAA
VGLPSSLY

SEQ ID NO: 79486 - protein, 10 aa, Homo sapiens
  Table A; Target 79486; HLA-A*23:01; SLC45A2; ENSG00000164175; TAA
VGLPSSLYSI

SEQ ID NO: 79487 - protein, 10 aa, Homo sapiens
  Table A; Target 79487; HLA-A*24:02; SLC45A2; ENSG00000164175; TAA
VGLPSSLYSI

SEQ ID NO: 79488 - protein, 9 aa, Homo sapiens
  Table A; Target 79488; HLA-B*35:03; SLC45A2; ENSG00000164175; TAA
VITASAVAL

SEQ ID NO: 79489 - protein, 9 aa, Homo sapiens
  Table A; Target 79489; HLA-B*40:01; SLC45A2; ENSG00000164175; TAA
VITASAVAL

SEQ ID NO: 79490 - protein, 9 aa, Homo sapiens
  Table A; Target 79490; HLA-C*01:02; SLC45A2; ENSG00000164175; TAA
VITASAVAL

SEQ ID NO: 79491 - protein, 9 aa, Homo sapiens
  Table A; Target 79491; HLA-C*03:03; SLC45A2; ENSG00000164175; TAA
VITASAVAL

SEQ ID NO: 79492 - protein, 9 aa, Homo sapiens
  Table A; Target 79492; HLA-C*03:04; SLC45A2; ENSG00000164175; TAA
VITASAVAL

SEQ ID NO: 79493 - protein, 9 aa, Homo sapiens
  Table A; Target 79493; HLA-C*07:04; SLC45A2; ENSG00000164175; TAA
VITASAVAL

SEQ ID NO: 79494 - protein, 9 aa, Homo sapiens
  Table A; Target 79494; HLA-C*14:02; SLC45A2; ENSG00000164175; TAA
VITASAVAL

SEQ ID NO: 79495 - protein, 9 aa, Homo sapiens
  Table A; Target 79495; HLA-C*16:01; SLC45A2; ENSG00000164175; TAA
VITASAVAL

SEQ ID NO: 79496 - protein, 9 aa, Homo sapiens
  Table A; Target 79496; HLA-A*29:02; SLC45A2; ENSG00000164175; TAA
VLFDFAADF

SEQ ID NO: 79497 - protein, 10 aa, Homo sapiens
  Table A; Target 79497; HLA-A*02:03; SLC45A2; ENSG00000164175; TAA
VLFDFAADFI

SEQ ID NO: 79498 - protein, 9 aa, Homo sapiens
  Table A; Target 79498; HLA-A*03:01; SLC45A2; ENSG00000164175; TAA
VLVSYIGLK

SEQ ID NO: 79499 - protein, 9 aa, Homo sapiens
  Table A; Target 79499; HLA-A*03:02; SLC45A2; ENSG00000164175; TAA
VLVSYIGLK

SEQ ID NO: 79500 - protein, 9 aa, Homo sapiens
  Table A; Target 79500; HLA-A*11:01; SLC45A2; ENSG00000164175; TAA
VLVSYIGLK

SEQ ID NO: 79501 - protein, 9 aa, Homo sapiens
  Table A; Target 79501; HLA-B*27:02; SLC45A2; ENSG00000164175; TAA
VLVSYIGLK

SEQ ID NO: 79502 - protein, 9 aa, Homo sapiens
  Table A; Target 79502; HLA-A*02:01; SLC45A2; ENSG00000164175; TAA
VMMLVGMAL

SEQ ID NO: 79503 - protein, 9 aa, Homo sapiens
  Table A; Target 79503; HLA-A*23:01; SLC45A2; ENSG00000164175; TAA
VMMLVGMAL

SEQ ID NO: 79504 - protein, 9 aa, Homo sapiens
  Table A; Target 79504; HLA-A*24:02; SLC45A2; ENSG00000164175; TAA
VMMLVGMAL

SEQ ID NO: 79505 - protein, 9 aa, Homo sapiens
  Table A; Target 79505; HLA-B*07:02; SLC45A2; ENSG00000164175; TAA
VMMLVGMAL

SEQ ID NO: 79506 - protein, 9 aa, Homo sapiens
  Table A; Target 79506; HLA-B*08:01; SLC45A2; ENSG00000164175; TAA
VMMLVGMAL

SEQ ID NO: 79507 - protein, 9 aa, Homo sapiens
  Table A; Target 79507; HLA-B*15:01; SLC45A2; ENSG00000164175; TAA
VMMLVGMAL

SEQ ID NO: 79508 - protein, 9 aa, Homo sapiens
  Table A; Target 79508; HLA-B*15:03; SLC45A2; ENSG00000164175; TAA
VMMLVGMAL

SEQ ID NO: 79509 - protein, 9 aa, Homo sapiens
  Table A; Target 79509; HLA-B*46:01; SLC45A2; ENSG00000164175; TAA
VMMLVGMAL

SEQ ID NO: 79510 - protein, 9 aa, Homo sapiens
  Table A; Target 79510; HLA-C*01:02; SLC45A2; ENSG00000164175; TAA
VMMLVGMAL

SEQ ID NO: 79511 - protein, 9 aa, Homo sapiens
  Table A; Target 79511; HLA-C*03:03; SLC45A2; ENSG00000164175; TAA
VMMLVGMAL

SEQ ID NO: 79512 - protein, 9 aa, Homo sapiens
  Table A; Target 79512; HLA-C*03:04; SLC45A2; ENSG00000164175; TAA
VMMLVGMAL

SEQ ID NO: 79513 - protein, 9 aa, Homo sapiens
  Table A; Target 79513; HLA-C*07:02; SLC45A2; ENSG00000164175; TAA
VMMLVGMAL

SEQ ID NO: 79514 - protein, 9 aa, Homo sapiens
  Table A; Target 79514; HLA-C*14:02; SLC45A2; ENSG00000164175; TAA
VMMLVGMAL

SEQ ID NO: 79515 - protein, 10 aa, Homo sapiens
  Table A; Target 79515; HLA-A*29:02; SLC45A2; ENSG00000164175; TAA
VMMLVGMALY

SEQ ID NO: 79516 - protein, 10 aa, Homo sapiens
  Table A; Target 79516; HLA-A*30:02; SLC45A2; ENSG00000164175; TAA
VMMLVGMALY

SEQ ID NO: 79517 - protein, 10 aa, Homo sapiens
  Table A; Target 79517; HLA-B*15:01; SLC45A2; ENSG00000164175; TAA
VMMLVGMALY

SEQ ID NO: 79518 - protein, 10 aa, Homo sapiens
  Table A; Target 79518; HLA-C*04:01; SLC45A2; ENSG00000164175; TAA
VMMLVGMALY

SEQ ID NO: 79519 - protein, 9 aa, Homo sapiens
  Table A; Target 79519; HLA-A*02:01; SLC45A2; ENSG00000164175; TAA
VMSSTLYTV

SEQ ID NO: 79520 - protein, 9 aa, Homo sapiens
  Table A; Target 79520; HLA-A*02:03; SLC45A2; ENSG00000164175; TAA
VMSSTLYTV

SEQ ID NO: 79521 - protein, 9 aa, Homo sapiens
  Table A; Target 79521; HLA-A*02:04; SLC45A2; ENSG00000164175; TAA
VMSSTLYTV

SEQ ID NO: 79522 - protein, 9 aa, Homo sapiens
  Table A; Target 79522; HLA-A*02:07; SLC45A2; ENSG00000164175; TAA
VMSSTLYTV

SEQ ID NO: 79523 - protein, 9 aa, Homo sapiens
  Table A; Target 79523; HLA-A*32:01; SLC45A2; ENSG00000164175; TAA
VMSSTLYTV

SEQ ID NO: 79524 - protein, 9 aa, Homo sapiens
  Table A; Target 79524; HLA-B*13:02; SLC45A2; ENSG00000164175; TAA
VMSSTLYTV

SEQ ID NO: 79525 - protein, 9 aa, Homo sapiens
  Table A; Target 79525; HLA-B*55:01; SLC45A2; ENSG00000164175; TAA
VMSSTLYTV

SEQ ID NO: 79526 - protein, 9 aa, Homo sapiens
  Table A; Target 79526; HLA-C*16:02; SLC45A2; ENSG00000164175; TAA
VMSSTLYTV

SEQ ID NO: 79527 - protein, 8 aa, Homo sapiens
  Table A; Target 79527; HLA-A*31:01; SLC45A2; ENSG00000164175; TAA
VNMPPHYR

SEQ ID NO: 79528 - protein, 8 aa, Homo sapiens
  Table A; Target 79528; HLA-A*33:01; SLC45A2; ENSG00000164175; TAA
VNMPPHYR

SEQ ID NO: 79529 - protein, 8 aa, Homo sapiens
  Table A; Target 79529; HLA-A*33:03; SLC45A2; ENSG00000164175; TAA
VNMPPHYR

SEQ ID NO: 79530 - protein, 9 aa, Homo sapiens
  Table A; Target 79530; HLA-A*29:02; SLC45A2; ENSG00000164175; TAA
VNMPPHYRY

SEQ ID NO: 79531 - protein, 9 aa, Homo sapiens
  Table A; Target 79531; HLA-A*30:02; SLC45A2; ENSG00000164175; TAA
VNMPPHYRY

SEQ ID NO: 79532 - protein, 9 aa, Homo sapiens
  Table A; Target 79532; HLA-A*33:01; SLC45A2; ENSG00000164175; TAA
VNMPPHYRY

SEQ ID NO: 79533 - protein, 11 aa, Homo sapiens
  Table A; Target 79533; HLA-B*27:02; SLC45A2; ENSG00000164175; TAA
VNPELAMQGAK

SEQ ID NO: 79534 - protein, 9 aa, Homo sapiens
  Table A; Target 79534; HLA-A*01:01; SLC45A2; ENSG00000164175; TAA
VPFNLITEY

SEQ ID NO: 79535 - protein, 9 aa, Homo sapiens
  Table A; Target 79535; HLA-A*23:01; SLC45A2; ENSG00000164175; TAA
VPFNLITEY

SEQ ID NO: 79536 - protein, 9 aa, Homo sapiens
  Table A; Target 79536; HLA-A*25:01; SLC45A2; ENSG00000164175; TAA
VPFNLITEY

SEQ ID NO: 79537 - protein, 9 aa, Homo sapiens
  Table A; Target 79537; HLA-A*26:01; SLC45A2; ENSG00000164175; TAA
VPFNLITEY

SEQ ID NO: 79538 - protein, 9 aa, Homo sapiens
  Table A; Target 79538; HLA-A*29:02; SLC45A2; ENSG00000164175; TAA
VPFNLITEY

SEQ ID NO: 79539 - protein, 9 aa, Homo sapiens
  Table A; Target 79539; HLA-A*30:02; SLC45A2; ENSG00000164175; TAA
VPFNLITEY

SEQ ID NO: 79540 - protein, 9 aa, Homo sapiens
  Table A; Target 79540; HLA-A*33:03; SLC45A2; ENSG00000164175; TAA
VPFNLITEY

SEQ ID NO: 79541 - protein, 9 aa, Homo sapiens
  Table A; Target 79541; HLA-A*68:01; SLC45A2; ENSG00000164175; TAA
VPFNLITEY

SEQ ID NO: 79542 - protein, 9 aa, Homo sapiens
  Table A; Target 79542; HLA-B*07:02; SLC45A2; ENSG00000164175; TAA
VPFNLITEY

SEQ ID NO: 79543 - protein, 9 aa, Homo sapiens
  Table A; Target 79543; HLA-B*15:01; SLC45A2; ENSG00000164175; TAA
VPFNLITEY

SEQ ID NO: 79544 - protein, 9 aa, Homo sapiens
  Table A; Target 79544; HLA-B*15:03; SLC45A2; ENSG00000164175; TAA
VPFNLITEY

SEQ ID NO: 79545 - protein, 9 aa, Homo sapiens
  Table A; Target 79545; HLA-B*18:01; SLC45A2; ENSG00000164175; TAA
VPFNLITEY

SEQ ID NO: 79546 - protein, 9 aa, Homo sapiens
  Table A; Target 79546; HLA-B*27:02; SLC45A2; ENSG00000164175; TAA
VPFNLITEY

SEQ ID NO: 79547 - protein, 9 aa, Homo sapiens
  Table A; Target 79547; HLA-B*35:01; SLC45A2; ENSG00000164175; TAA
VPFNLITEY

SEQ ID NO: 79548 - protein, 9 aa, Homo sapiens
  Table A; Target 79548; HLA-B*35:03; SLC45A2; ENSG00000164175; TAA
VPFNLITEY

SEQ ID NO: 79549 - protein, 9 aa, Homo sapiens
  Table A; Target 79549; HLA-B*39:01; SLC45A2; ENSG00000164175; TAA
VPFNLITEY

SEQ ID NO: 79550 - protein, 9 aa, Homo sapiens
  Table A; Target 79550; HLA-B*44:02; SLC45A2; ENSG00000164175; TAA
VPFNLITEY

SEQ ID NO: 79551 - protein, 9 aa, Homo sapiens
  Table A; Target 79551; HLA-B*44:03; SLC45A2; ENSG00000164175; TAA
VPFNLITEY

SEQ ID NO: 79552 - protein, 9 aa, Homo sapiens
  Table A; Target 79552; HLA-B*46:01; SLC45A2; ENSG00000164175; TAA
VPFNLITEY

SEQ ID NO: 79553 - protein, 9 aa, Homo sapiens
  Table A; Target 79553; HLA-B*51:01; SLC45A2; ENSG00000164175; TAA
VPFNLITEY

SEQ ID NO: 79554 - protein, 9 aa, Homo sapiens
  Table A; Target 79554; HLA-B*54:01; SLC45A2; ENSG00000164175; TAA
VPFNLITEY

SEQ ID NO: 79555 - protein, 9 aa, Homo sapiens
  Table A; Target 79555; HLA-B*55:01; SLC45A2; ENSG00000164175; TAA
VPFNLITEY

SEQ ID NO: 79556 - protein, 9 aa, Homo sapiens
  Table A; Target 79556; HLA-B*56:01; SLC45A2; ENSG00000164175; TAA
VPFNLITEY

SEQ ID NO: 79557 - protein, 9 aa, Homo sapiens
  Table A; Target 79557; HLA-C*02:02; SLC45A2; ENSG00000164175; TAA
VPFNLITEY

SEQ ID NO: 79558 - protein, 9 aa, Homo sapiens
  Table A; Target 79558; HLA-C*04:01; SLC45A2; ENSG00000164175; TAA
VPFNLITEY

SEQ ID NO: 79559 - protein, 9 aa, Homo sapiens
  Table A; Target 79559; HLA-C*07:02; SLC45A2; ENSG00000164175; TAA
VPFNLITEY

SEQ ID NO: 79560 - protein, 9 aa, Homo sapiens
  Table A; Target 79560; HLA-C*07:04; SLC45A2; ENSG00000164175; TAA
VPFNLITEY

SEQ ID NO: 79561 - protein, 9 aa, Homo sapiens
  Table A; Target 79561; HLA-C*07:06; SLC45A2; ENSG00000164175; TAA
VPFNLITEY

SEQ ID NO: 79562 - protein, 9 aa, Homo sapiens
  Table A; Target 79562; HLA-C*12:03; SLC45A2; ENSG00000164175; TAA
VPFNLITEY

SEQ ID NO: 79563 - protein, 9 aa, Homo sapiens
  Table A; Target 79563; HLA-C*16:04; SLC45A2; ENSG00000164175; TAA
VPFNLITEY

SEQ ID NO: 79564 - protein, 8 aa, Homo sapiens
  Table A; Target 79564; HLA-B*13:02; SLC45A2; ENSG00000164175; TAA
VQLAQILV

SEQ ID NO: 79565 - protein, 10 aa, Homo sapiens
  Table A; Target 79565; HLA-A*01:01; SLC45A2; ENSG00000164175; TAA
VSYIGLKGLY

SEQ ID NO: 79566 - protein, 10 aa, Homo sapiens
  Table A; Target 79566; HLA-A*29:02; SLC45A2; ENSG00000164175; TAA
VSYIGLKGLY

SEQ ID NO: 79567 - protein, 10 aa, Homo sapiens
  Table A; Target 79567; HLA-A*30:02; SLC45A2; ENSG00000164175; TAA
VSYIGLKGLY

SEQ ID NO: 79568 - protein, 11 aa, Homo sapiens
  Table A; Target 79568; HLA-B*57:01; SLC45A2; ENSG00000164175; TAA
VSYIGLKGLYF

SEQ ID NO: 79569 - protein, 8 aa, Homo sapiens
  Table A; Target 79569; HLA-B*08:01; SLC45A2; ENSG00000164175; TAA
VTMIGVVL

SEQ ID NO: 79570 - protein, 8 aa, Homo sapiens
  Table A; Target 79570; HLA-C*03:03; SLC45A2; ENSG00000164175; TAA
VTMIGVVL

SEQ ID NO: 79571 - protein, 8 aa, Homo sapiens
  Table A; Target 79571; HLA-C*03:04; SLC45A2; ENSG00000164175; TAA
VTMIGVVL

SEQ ID NO: 79572 - protein, 9 aa, Homo sapiens
  Table A; Target 79572; HLA-A*23:01; SLC45A2; ENSG00000164175; TAA
VTMIGVVLF

SEQ ID NO: 79573 - protein, 9 aa, Homo sapiens
  Table A; Target 79573; HLA-A*24:02; SLC45A2; ENSG00000164175; TAA
VTMIGVVLF

SEQ ID NO: 79574 - protein, 9 aa, Homo sapiens
  Table A; Target 79574; HLA-A*32:01; SLC45A2; ENSG00000164175; TAA
VTMIGVVLF

SEQ ID NO: 79575 - protein, 9 aa, Homo sapiens
  Table A; Target 79575; HLA-B*57:01; SLC45A2; ENSG00000164175; TAA
VTMIGVVLF

SEQ ID NO: 79576 - protein, 8 aa, Homo sapiens
  Table A; Target 79576; HLA-B*51:01; SLC45A2; ENSG00000164175; TAA
VTPVLLSV

SEQ ID NO: 79577 - protein, 10 aa, Homo sapiens
  Table A; Target 79577; HLA-A*03:01; SLC45A2; ENSG00000164175; TAA
VVAALIANPR

SEQ ID NO: 79578 - protein, 10 aa, Homo sapiens
  Table A; Target 79578; HLA-A*03:02; SLC45A2; ENSG00000164175; TAA
VVAALIANPR

SEQ ID NO: 79579 - protein, 10 aa, Homo sapiens
  Table A; Target 79579; HLA-A*11:01; SLC45A2; ENSG00000164175; TAA
VVAALIANPR

SEQ ID NO: 79580 - protein, 10 aa, Homo sapiens
  Table A; Target 79580; HLA-A*31:01; SLC45A2; ENSG00000164175; TAA
VVAALIANPR

SEQ ID NO: 79581 - protein, 10 aa, Homo sapiens
  Table A; Target 79581; HLA-A*33:03; SLC45A2; ENSG00000164175; TAA
VVAALIANPR

SEQ ID NO: 79582 - protein, 10 aa, Homo sapiens
  Table A; Target 79582; HLA-A*68:01; SLC45A2; ENSG00000164175; TAA
VVAALIANPR

SEQ ID NO: 79583 - protein, 10 aa, Homo sapiens
  Table A; Target 79583; HLA-B*27:02; SLC45A2; ENSG00000164175; TAA
VVAALIANPR

SEQ ID NO: 79584 - protein, 10 aa, Homo sapiens
  Table A; Target 79584; HLA-C*07:06; SLC45A2; ENSG00000164175; TAA
VVAALIANPR

SEQ ID NO: 79585 - protein, 8 aa, Homo sapiens
  Table A; Target 79585; HLA-B*40:02; SLC45A2; ENSG00000164175; TAA
VVITASAV

SEQ ID NO: 79586 - protein, 8 aa, Homo sapiens
  Table A; Target 79586; HLA-B*46:01; SLC45A2; ENSG00000164175; TAA
VVITASAV

SEQ ID NO: 79587 - protein, 8 aa, Homo sapiens
  Table A; Target 79587; HLA-B*51:01; SLC45A2; ENSG00000164175; TAA
VVITASAV

SEQ ID NO: 79588 - protein, 8 aa, Homo sapiens
  Table A; Target 79588; HLA-C*01:02; SLC45A2; ENSG00000164175; TAA
VVITASAV

SEQ ID NO: 79589 - protein, 8 aa, Homo sapiens
  Table A; Target 79589; HLA-C*03:03; SLC45A2; ENSG00000164175; TAA
VVITASAV

SEQ ID NO: 79590 - protein, 8 aa, Homo sapiens
  Table A; Target 79590; HLA-C*03:04; SLC45A2; ENSG00000164175; TAA
VVITASAV

SEQ ID NO: 79591 - protein, 8 aa, Homo sapiens
  Table A; Target 79591; HLA-C*04:01; SLC45A2; ENSG00000164175; TAA
VVITASAV

SEQ ID NO: 79592 - protein, 8 aa, Homo sapiens
  Table A; Target 79592; HLA-C*05:01; SLC45A2; ENSG00000164175; TAA
VVITASAV

SEQ ID NO: 79593 - protein, 8 aa, Homo sapiens
  Table A; Target 79593; HLA-C*06:02; SLC45A2; ENSG00000164175; TAA
VVITASAV

SEQ ID NO: 79594 - protein, 8 aa, Homo sapiens
  Table A; Target 79594; HLA-C*14:02; SLC45A2; ENSG00000164175; TAA
VVITASAV

SEQ ID NO: 79595 - protein, 9 aa, Homo sapiens
  Table A; Target 79595; HLA-B*46:01; SLC45A2; ENSG00000164175; TAA
VVITASAVA

SEQ ID NO: 79596 - protein, 10 aa, Homo sapiens
  Table A; Target 79596; HLA-A*23:01; SLC45A2; ENSG00000164175; TAA
VVITASAVAL

SEQ ID NO: 79597 - protein, 10 aa, Homo sapiens
  Table A; Target 79597; HLA-B*46:01; SLC45A2; ENSG00000164175; TAA
VVITASAVAL

SEQ ID NO: 79598 - protein, 10 aa, Homo sapiens
  Table A; Target 79598; HLA-C*01:02; SLC45A2; ENSG00000164175; TAA
VVITASAVAL

SEQ ID NO: 79599 - protein, 10 aa, Homo sapiens
  Table A; Target 79599; HLA-C*03:03; SLC45A2; ENSG00000164175; TAA
VVITASAVAL

SEQ ID NO: 79600 - protein, 10 aa, Homo sapiens
  Table A; Target 79600; HLA-C*03:04; SLC45A2; ENSG00000164175; TAA
VVITASAVAL

SEQ ID NO: 79601 - protein, 10 aa, Homo sapiens
  Table A; Target 79601; HLA-C*14:02; SLC45A2; ENSG00000164175; TAA
VVITASAVAL

SEQ ID NO: 79602 - protein, 11 aa, Homo sapiens
  Table A; Target 79602; HLA-A*23:01; SLC45A2; ENSG00000164175; TAA
VVITASAVALI

SEQ ID NO: 79603 - protein, 9 aa, Homo sapiens
  Table A; Target 79603; HLA-A*02:03; SLC45A2; ENSG00000164175; TAA
VVVITASAV

SEQ ID NO: 79604 - protein, 9 aa, Homo sapiens
  Table A; Target 79604; HLA-B*13:02; SLC45A2; ENSG00000164175; TAA
VVVITASAV

SEQ ID NO: 79605 - protein, 9 aa, Homo sapiens
  Table A; Target 79605; HLA-B*46:01; SLC45A2; ENSG00000164175; TAA
VVVITASAV

SEQ ID NO: 79606 - protein, 9 aa, Homo sapiens
  Table A; Target 79606; HLA-C*01:02; SLC45A2; ENSG00000164175; TAA
VVVITASAV

SEQ ID NO: 79607 - protein, 9 aa, Homo sapiens
  Table A; Target 79607; HLA-C*03:03; SLC45A2; ENSG00000164175; TAA
VVVITASAV

SEQ ID NO: 79608 - protein, 9 aa, Homo sapiens
  Table A; Target 79608; HLA-C*14:02; SLC45A2; ENSG00000164175; TAA
VVVITASAV

SEQ ID NO: 79609 - protein, 9 aa, Homo sapiens
  Table A; Target 79609; HLA-B*46:01; SLC45A2; ENSG00000164175; TAA
VVVVITASA

SEQ ID NO: 79610 - protein, 9 aa, Homo sapiens
  Table A; Target 79610; HLA-B*54:01; SLC45A2; ENSG00000164175; TAA
VVVVITASA

SEQ ID NO: 79611 - protein, 9 aa, Homo sapiens
  Table A; Target 79611; HLA-B*56:01; SLC45A2; ENSG00000164175; TAA
VVVVITASA

SEQ ID NO: 79612 - protein, 8 aa, Homo sapiens
  Table A; Target 79612; HLA-B*54:01; SLC45A2; ENSG00000164175; TAA
VVVVVITA

SEQ ID NO: 79613 - protein, 8 aa, Homo sapiens
  Table A; Target 79613; HLA-B*56:01; SLC45A2; ENSG00000164175; TAA
VVVVVITA

SEQ ID NO: 79614 - protein, 9 aa, Homo sapiens
  Table A; Target 79614; HLA-B*46:01; SLC45A2; ENSG00000164175; TAA
VVVVVITAS

SEQ ID NO: 79615 - protein, 10 aa, Homo sapiens
  Table A; Target 79615; HLA-B*56:01; SLC45A2; ENSG00000164175; TAA
VVVVVITASA

SEQ ID NO: 79616 - protein, 9 aa, Homo sapiens
  Table A; Target 79616; HLA-A*24:02; SLC45A2; ENSG00000164175; TAA
VWAISVTMI

SEQ ID NO: 79617 - protein, 10 aa, Homo sapiens
  Table A; Target 79617; HLA-A*24:02; SLC45A2; ENSG00000164175; TAA
VWFLSPILGF

SEQ ID NO: 79618 - protein, 9 aa, Homo sapiens
  Table A; Target 79618; HLA-A*23:01; SLC45A2; ENSG00000164175; TAA
VYRGDPYSA

SEQ ID NO: 79619 - protein, 9 aa, Homo sapiens
  Table A; Target 79619; HLA-A*24:02; SLC45A2; ENSG00000164175; TAA
VYRGDPYSA

SEQ ID NO: 79620 - protein, 9 aa, Homo sapiens
  Table A; Target 79620; HLA-C*14:02; SLC45A2; ENSG00000164175; TAA
VYRGDPYSA

SEQ ID NO: 79621 - protein, 10 aa, Homo sapiens
  Table A; Target 79621; HLA-A*24:02; SLC45A2; ENSG00000164175; TAA
VYSTLVLCSL

SEQ ID NO: 79622 - protein, 11 aa, Homo sapiens
  Table A; Target 79622; HLA-A*24:02; SLC45A2; ENSG00000164175; TAA
VYSTLVLCSLF

SEQ ID NO: 79623 - protein, 8 aa, Homo sapiens
  Table A; Target 79623; HLA-B*51:01; SLC45A2; ENSG00000164175; TAA
WAISVTMI

SEQ ID NO: 79624 - protein, 9 aa, Homo sapiens
  Table A; Target 79624; HLA-A*29:02; SLC45A2; ENSG00000164175; TAA
WFLSPILGF

SEQ ID NO: 79625 - protein, 8 aa, Homo sapiens
  Table A; Target 79625; HLA-A*68:02; SLC45A2; ENSG00000164175; TAA
YAVEAAYV

SEQ ID NO: 79626 - protein, 8 aa, Homo sapiens
  Table A; Target 79626; HLA-B*13:02; SLC45A2; ENSG00000164175; TAA
YAVEAAYV

SEQ ID NO: 79627 - protein, 8 aa, Homo sapiens
  Table A; Target 79627; HLA-B*40:02; SLC45A2; ENSG00000164175; TAA
YAVEAAYV

SEQ ID NO: 79628 - protein, 8 aa, Homo sapiens
  Table A; Target 79628; HLA-B*46:01; SLC45A2; ENSG00000164175; TAA
YAVEAAYV

SEQ ID NO: 79629 - protein, 8 aa, Homo sapiens
  Table A; Target 79629; HLA-B*49:01; SLC45A2; ENSG00000164175; TAA
YAVEAAYV

SEQ ID NO: 79630 - protein, 8 aa, Homo sapiens
  Table A; Target 79630; HLA-B*51:01; SLC45A2; ENSG00000164175; TAA
YAVEAAYV

SEQ ID NO: 79631 - protein, 8 aa, Homo sapiens
  Table A; Target 79631; HLA-B*54:01; SLC45A2; ENSG00000164175; TAA
YAVEAAYV

SEQ ID NO: 79632 - protein, 8 aa, Homo sapiens
  Table A; Target 79632; HLA-B*56:01; SLC45A2; ENSG00000164175; TAA
YAVEAAYV

SEQ ID NO: 79633 - protein, 8 aa, Homo sapiens
  Table A; Target 79633; HLA-C*02:02; SLC45A2; ENSG00000164175; TAA
YAVEAAYV

SEQ ID NO: 79634 - protein, 8 aa, Homo sapiens
  Table A; Target 79634; HLA-C*03:03; SLC45A2; ENSG00000164175; TAA
YAVEAAYV

SEQ ID NO: 79635 - protein, 8 aa, Homo sapiens
  Table A; Target 79635; HLA-C*03:04; SLC45A2; ENSG00000164175; TAA
YAVEAAYV

SEQ ID NO: 79636 - protein, 8 aa, Homo sapiens
  Table A; Target 79636; HLA-C*04:01; SLC45A2; ENSG00000164175; TAA
YAVEAAYV

SEQ ID NO: 79637 - protein, 8 aa, Homo sapiens
  Table A; Target 79637; HLA-C*05:01; SLC45A2; ENSG00000164175; TAA
YAVEAAYV

SEQ ID NO: 79638 - protein, 8 aa, Homo sapiens
  Table A; Target 79638; HLA-C*12:03; SLC45A2; ENSG00000164175; TAA
YAVEAAYV

SEQ ID NO: 79639 - protein, 8 aa, Homo sapiens
  Table A; Target 79639; HLA-C*16:02; SLC45A2; ENSG00000164175; TAA
YAVEAAYV

SEQ ID NO: 79640 - protein, 8 aa, Homo sapiens
  Table A; Target 79640; HLA-C*16:04; SLC45A2; ENSG00000164175; TAA
YAVEAAYV

SEQ ID NO: 79641 - protein, 9 aa, Homo sapiens
  Table A; Target 79641; HLA-B*35:03; SLC45A2; ENSG00000164175; TAA
YAVEAAYVT

SEQ ID NO: 79642 - protein, 9 aa, Homo sapiens
  Table A; Target 79642; HLA-C*03:03; SLC45A2; ENSG00000164175; TAA
YAVEAAYVT

SEQ ID NO: 79643 - protein, 9 aa, Homo sapiens
  Table A; Target 79643; HLA-C*03:04; SLC45A2; ENSG00000164175; TAA
YAVEAAYVT

SEQ ID NO: 79644 - protein, 9 aa, Homo sapiens
  Table A; Target 79644; HLA-A*30:01; SLC45A2; ENSG00000164175; TAA
YERGVEVGC

SEQ ID NO: 79645 - protein, 9 aa, Homo sapiens
  Table A; Target 79645; HLA-B*18:01; SLC45A2; ENSG00000164175; TAA
YERGVEVGC

SEQ ID NO: 79646 - protein, 9 aa, Homo sapiens
  Table A; Target 79646; HLA-B*40:02; SLC45A2; ENSG00000164175; TAA
YERGVEVGC

SEQ ID NO: 79647 - protein, 9 aa, Homo sapiens
  Table A; Target 79647; HLA-B*49:01; SLC45A2; ENSG00000164175; TAA
YERGVEVGC

SEQ ID NO: 79648 - protein, 10 aa, Homo sapiens
  Table A; Target 79648; HLA-B*44:02; SLC45A2; ENSG00000164175; TAA
YERGVEVGCW

SEQ ID NO: 79649 - protein, 8 aa, Homo sapiens
  Table A; Target 79649; HLA-B*18:01; SLC45A2; ENSG00000164175; TAA
YEYGSIEK

SEQ ID NO: 79650 - protein, 8 aa, Homo sapiens
  Table A; Target 79650; HLA-B*27:02; SLC45A2; ENSG00000164175; TAA
YEYGSIEK

SEQ ID NO: 79651 - protein, 8 aa, Homo sapiens
  Table A; Target 79651; HLA-B*37:01; SLC45A2; ENSG00000164175; TAA
YEYGSIEK

SEQ ID NO: 79652 - protein, 8 aa, Homo sapiens
  Table A; Target 79652; HLA-B*40:02; SLC45A2; ENSG00000164175; TAA
YEYGSIEK

SEQ ID NO: 79653 - protein, 8 aa, Homo sapiens
  Table A; Target 79653; HLA-B*49:01; SLC45A2; ENSG00000164175; TAA
YEYGSIEK

SEQ ID NO: 79654 - protein, 8 aa, Homo sapiens
  Table A; Target 79654; HLA-C*02:02; SLC45A2; ENSG00000164175; TAA
YEYGSIEK

SEQ ID NO: 79655 - protein, 8 aa, Homo sapiens
  Table A; Target 79655; HLA-C*07:01; SLC45A2; ENSG00000164175; TAA
YEYGSIEK

SEQ ID NO: 79656 - protein, 9 aa, Homo sapiens
  Table A; Target 79656; HLA-A*02:01; SLC45A2; ENSG00000164175; TAA
YEYGSIEKV

SEQ ID NO: 79657 - protein, 9 aa, Homo sapiens
  Table A; Target 79657; HLA-A*02:03; SLC45A2; ENSG00000164175; TAA
YEYGSIEKV

SEQ ID NO: 79658 - protein, 9 aa, Homo sapiens
  Table A; Target 79658; HLA-A*02:04; SLC45A2; ENSG00000164175; TAA
YEYGSIEKV

SEQ ID NO: 79659 - protein, 9 aa, Homo sapiens
  Table A; Target 79659; HLA-A*02:07; SLC45A2; ENSG00000164175; TAA
YEYGSIEKV

SEQ ID NO: 79660 - protein, 9 aa, Homo sapiens
  Table A; Target 79660; HLA-A*30:01; SLC45A2; ENSG00000164175; TAA
YEYGSIEKV

SEQ ID NO: 79661 - protein, 9 aa, Homo sapiens
  Table A; Target 79661; HLA-A*68:02; SLC45A2; ENSG00000164175; TAA
YEYGSIEKV

SEQ ID NO: 79662 - protein, 9 aa, Homo sapiens
  Table A; Target 79662; HLA-B*13:02; SLC45A2; ENSG00000164175; TAA
YEYGSIEKV

SEQ ID NO: 79663 - protein, 9 aa, Homo sapiens
  Table A; Target 79663; HLA-B*15:03; SLC45A2; ENSG00000164175; TAA
YEYGSIEKV

SEQ ID NO: 79664 - protein, 9 aa, Homo sapiens
  Table A; Target 79664; HLA-B*18:01; SLC45A2; ENSG00000164175; TAA
YEYGSIEKV

SEQ ID NO: 79665 - protein, 9 aa, Homo sapiens
  Table A; Target 79665; HLA-B*37:01; SLC45A2; ENSG00000164175; TAA
YEYGSIEKV

SEQ ID NO: 79666 - protein, 9 aa, Homo sapiens
  Table A; Target 79666; HLA-B*38:01; SLC45A2; ENSG00000164175; TAA
YEYGSIEKV

SEQ ID NO: 79667 - protein, 9 aa, Homo sapiens
  Table A; Target 79667; HLA-B*39:01; SLC45A2; ENSG00000164175; TAA
YEYGSIEKV

SEQ ID NO: 79668 - protein, 9 aa, Homo sapiens
  Table A; Target 79668; HLA-B*40:01; SLC45A2; ENSG00000164175; TAA
YEYGSIEKV

SEQ ID NO: 79669 - protein, 9 aa, Homo sapiens
  Table A; Target 79669; HLA-B*40:02; SLC45A2; ENSG00000164175; TAA
YEYGSIEKV

SEQ ID NO: 79670 - protein, 9 aa, Homo sapiens
  Table A; Target 79670; HLA-B*44:02; SLC45A2; ENSG00000164175; TAA
YEYGSIEKV

SEQ ID NO: 79671 - protein, 9 aa, Homo sapiens
  Table A; Target 79671; HLA-B*44:03; SLC45A2; ENSG00000164175; TAA
YEYGSIEKV

SEQ ID NO: 79672 - protein, 9 aa, Homo sapiens
  Table A; Target 79672; HLA-B*49:01; SLC45A2; ENSG00000164175; TAA
YEYGSIEKV

SEQ ID NO: 79673 - protein, 9 aa, Homo sapiens
  Table A; Target 79673; HLA-B*51:01; SLC45A2; ENSG00000164175; TAA
YEYGSIEKV

SEQ ID NO: 79674 - protein, 9 aa, Homo sapiens
  Table A; Target 79674; HLA-B*55:01; SLC45A2; ENSG00000164175; TAA
YEYGSIEKV

SEQ ID NO: 79675 - protein, 9 aa, Homo sapiens
  Table A; Target 79675; HLA-C*02:02; SLC45A2; ENSG00000164175; TAA
YEYGSIEKV

SEQ ID NO: 79676 - protein, 9 aa, Homo sapiens
  Table A; Target 79676; HLA-C*03:03; SLC45A2; ENSG00000164175; TAA
YEYGSIEKV

SEQ ID NO: 79677 - protein, 9 aa, Homo sapiens
  Table A; Target 79677; HLA-C*03:04; SLC45A2; ENSG00000164175; TAA
YEYGSIEKV

SEQ ID NO: 79678 - protein, 9 aa, Homo sapiens
  Table A; Target 79678; HLA-C*06:02; SLC45A2; ENSG00000164175; TAA
YEYGSIEKV

SEQ ID NO: 79679 - protein, 9 aa, Homo sapiens
  Table A; Target 79679; HLA-C*07:04; SLC45A2; ENSG00000164175; TAA
YEYGSIEKV

SEQ ID NO: 79680 - protein, 9 aa, Homo sapiens
  Table A; Target 79680; HLA-C*12:03; SLC45A2; ENSG00000164175; TAA
YEYGSIEKV

SEQ ID NO: 79681 - protein, 9 aa, Homo sapiens
  Table A; Target 79681; HLA-C*16:02; SLC45A2; ENSG00000164175; TAA
YEYGSIEKV

SEQ ID NO: 79682 - protein, 9 aa, Homo sapiens
  Table A; Target 79682; HLA-C*16:04; SLC45A2; ENSG00000164175; TAA
YEYGSIEKV

SEQ ID NO: 79683 - protein, 10 aa, Homo sapiens
  Table A; Target 79683; HLA-B*27:02; SLC45A2; ENSG00000164175; TAA
YEYGSIEKVK

SEQ ID NO: 79684 - protein, 10 aa, Homo sapiens
  Table A; Target 79684; HLA-B*40:02; SLC45A2; ENSG00000164175; TAA
YEYGSIEKVK

SEQ ID NO: 79685 - protein, 10 aa, Homo sapiens
  Table A; Target 79685; HLA-B*44:02; SLC45A2; ENSG00000164175; TAA
YEYGSIEKVK

SEQ ID NO: 79686 - protein, 10 aa, Homo sapiens
  Table A; Target 79686; HLA-B*44:03; SLC45A2; ENSG00000164175; TAA
YEYGSIEKVK

SEQ ID NO: 79687 - protein, 10 aa, Homo sapiens
  Table A; Target 79687; HLA-B*49:01; SLC45A2; ENSG00000164175; TAA
YEYGSIEKVK

SEQ ID NO: 79688 - protein, 10 aa, Homo sapiens
  Table A; Target 79688; HLA-C*02:02; SLC45A2; ENSG00000164175; TAA
YEYGSIEKVK

SEQ ID NO: 79689 - protein, 10 aa, Homo sapiens
  Table A; Target 79689; HLA-C*06:02; SLC45A2; ENSG00000164175; TAA
YEYGSIEKVK

SEQ ID NO: 79690 - protein, 10 aa, Homo sapiens
  Table A; Target 79690; HLA-C*16:04; SLC45A2; ENSG00000164175; TAA
YEYGSIEKVK

SEQ ID NO: 79691 - protein, 9 aa, Homo sapiens
  Table A; Target 79691; HLA-A*23:01; SLC45A2; ENSG00000164175; TAA
YFQKVLVSY

SEQ ID NO: 79692 - protein, 9 aa, Homo sapiens
  Table A; Target 79692; HLA-A*24:02; SLC45A2; ENSG00000164175; TAA
YFQKVLVSY

SEQ ID NO: 79693 - protein, 9 aa, Homo sapiens
  Table A; Target 79693; HLA-A*29:02; SLC45A2; ENSG00000164175; TAA
YFQKVLVSY

SEQ ID NO: 79694 - protein, 9 aa, Homo sapiens
  Table A; Target 79694; HLA-A*30:02; SLC45A2; ENSG00000164175; TAA
YFQKVLVSY

SEQ ID NO: 79695 - protein, 9 aa, Homo sapiens
  Table A; Target 79695; HLA-A*32:01; SLC45A2; ENSG00000164175; TAA
YFQKVLVSY

SEQ ID NO: 79696 - protein, 9 aa, Homo sapiens
  Table A; Target 79696; HLA-B*15:01; SLC45A2; ENSG00000164175; TAA
YFQKVLVSY

SEQ ID NO: 79697 - protein, 9 aa, Homo sapiens
  Table A; Target 79697; HLA-B*15:03; SLC45A2; ENSG00000164175; TAA
YFQKVLVSY

SEQ ID NO: 79698 - protein, 9 aa, Homo sapiens
  Table A; Target 79698; HLA-B*18:01; SLC45A2; ENSG00000164175; TAA
YFQKVLVSY

SEQ ID NO: 79699 - protein, 9 aa, Homo sapiens
  Table A; Target 79699; HLA-B*35:01; SLC45A2; ENSG00000164175; TAA
YFQKVLVSY

SEQ ID NO: 79700 - protein, 9 aa, Homo sapiens
  Table A; Target 79700; HLA-B*46:01; SLC45A2; ENSG00000164175; TAA
YFQKVLVSY

SEQ ID NO: 79701 - protein, 9 aa, Homo sapiens
  Table A; Target 79701; HLA-C*02:02; SLC45A2; ENSG00000164175; TAA
YFQKVLVSY

SEQ ID NO: 79702 - protein, 9 aa, Homo sapiens
  Table A; Target 79702; HLA-C*04:01; SLC45A2; ENSG00000164175; TAA
YFQKVLVSY

SEQ ID NO: 79703 - protein, 9 aa, Homo sapiens
  Table A; Target 79703; HLA-C*07:01; SLC45A2; ENSG00000164175; TAA
YFQKVLVSY

SEQ ID NO: 79704 - protein, 9 aa, Homo sapiens
  Table A; Target 79704; HLA-C*07:04; SLC45A2; ENSG00000164175; TAA
YFQKVLVSY

SEQ ID NO: 79705 - protein, 9 aa, Homo sapiens
  Table A; Target 79705; HLA-C*12:03; SLC45A2; ENSG00000164175; TAA
YFQKVLVSY

SEQ ID NO: 79706 - protein, 9 aa, Homo sapiens
  Table A; Target 79706; HLA-C*14:02; SLC45A2; ENSG00000164175; TAA
YFQKVLVSY

SEQ ID NO: 79707 - protein, 9 aa, Homo sapiens
  Table A; Target 79707; HLA-C*16:01; SLC45A2; ENSG00000164175; TAA
YFQKVLVSY

SEQ ID NO: 79708 - protein, 9 aa, Homo sapiens
  Table A; Target 79708; HLA-C*16:02; SLC45A2; ENSG00000164175; TAA
YFQKVLVSY

SEQ ID NO: 79709 - protein, 9 aa, Homo sapiens
  Table A; Target 79709; HLA-C*16:04; SLC45A2; ENSG00000164175; TAA
YFQKVLVSY

SEQ ID NO: 79710 - protein, 8 aa, Homo sapiens
  Table A; Target 79710; HLA-A*24:02; SLC45A2; ENSG00000164175; TAA
YFTGYLLF

SEQ ID NO: 79711 - protein, 11 aa, Homo sapiens
  Table A; Target 79711; HLA-A*30:02; SLC45A2; ENSG00000164175; TAA
YGSIEKVKNGY

SEQ ID NO: 79712 - protein, 8 aa, Homo sapiens
  Table A; Target 79712; HLA-B*38:01; SLC45A2; ENSG00000164175; TAA
YHALFTGF

SEQ ID NO: 79713 - protein, 8 aa, Homo sapiens
  Table A; Target 79713; HLA-A*01:01; SLC45A2; ENSG00000164175; TAA
YIGLKGLY

SEQ ID NO: 79714 - protein, 8 aa, Homo sapiens
  Table A; Target 79714; HLA-A*29:02; SLC45A2; ENSG00000164175; TAA
YIGLKGLY

SEQ ID NO: 79715 - protein, 8 aa, Homo sapiens
  Table A; Target 79715; HLA-C*07:01; SLC45A2; ENSG00000164175; TAA
YIGLKGLY

SEQ ID NO: 79716 - protein, 9 aa, Homo sapiens
  Table A; Target 79716; HLA-A*01:01; SLC45A2; ENSG00000164175; TAA
YIGLKGLYF

SEQ ID NO: 79717 - protein, 9 aa, Homo sapiens
  Table A; Target 79717; HLA-A*24:02; SLC45A2; ENSG00000164175; TAA
YIGLKGLYF

SEQ ID NO: 79718 - protein, 9 aa, Homo sapiens
  Table A; Target 79718; HLA-A*29:02; SLC45A2; ENSG00000164175; TAA
YIGLKGLYF

SEQ ID NO: 79719 - protein, 10 aa, Homo sapiens
  Table A; Target 79719; HLA-A*02:01; SLC45A2; ENSG00000164175; TAA
YILTLGVMML

SEQ ID NO: 79720 - protein, 10 aa, Homo sapiens
  Table A; Target 79720; HLA-A*02:04; SLC45A2; ENSG00000164175; TAA
YILTLGVMML

SEQ ID NO: 79721 - protein, 11 aa, Homo sapiens
  Table A; Target 79721; HLA-A*02:01; SLC45A2; ENSG00000164175; TAA
YILTLGVMMLV

SEQ ID NO: 79722 - protein, 10 aa, Homo sapiens
  Table A; Target 79722; HLA-A*23:01; SLC45A2; ENSG00000164175; TAA
YLLFGLGTGF

SEQ ID NO: 79723 - protein, 10 aa, Homo sapiens
  Table A; Target 79723; HLA-A*29:02; SLC45A2; ENSG00000164175; TAA
YLLFGLGTGF

SEQ ID NO: 79724 - protein, 9 aa, Homo sapiens
  Table A; Target 79724; HLA-A*02:01; SLC45A2; ENSG00000164175; TAA
YLLGAIDWA

SEQ ID NO: 79725 - protein, 9 aa, Homo sapiens
  Table A; Target 79725; HLA-A*02:04; SLC45A2; ENSG00000164175; TAA
YLLGAIDWA

SEQ ID NO: 79726 - protein, 11 aa, Homo sapiens
  Table A; Target 79726; HLA-A*02:01; SLC45A2; ENSG00000164175; TAA
YLLGAIDWAHL

SEQ ID NO: 79727 - protein, 11 aa, Homo sapiens
  Table A; Target 79727; HLA-A*02:04; SLC45A2; ENSG00000164175; TAA
YLLGAIDWAHL

SEQ ID NO: 79728 - protein, 8 aa, Homo sapiens
  Table A; Target 79728; HLA-A*02:01; SLC45A2; ENSG00000164175; TAA
YLNGATVV

SEQ ID NO: 79729 - protein, 8 aa, Homo sapiens
  Table A; Target 79729; HLA-A*02:03; SLC45A2; ENSG00000164175; TAA
YLNGATVV

SEQ ID NO: 79730 - protein, 8 aa, Homo sapiens
  Table A; Target 79730; HLA-B*08:01; SLC45A2; ENSG00000164175; TAA
YLNGATVV

SEQ ID NO: 79731 - protein, 8 aa, Homo sapiens
  Table A; Target 79731; HLA-B*13:02; SLC45A2; ENSG00000164175; TAA
YLNGATVV

SEQ ID NO: 79732 - protein, 8 aa, Homo sapiens
  Table A; Target 79732; HLA-B*39:01; SLC45A2; ENSG00000164175; TAA
YLNGATVV

SEQ ID NO: 79733 - protein, 8 aa, Homo sapiens
  Table A; Target 79733; HLA-B*46:01; SLC45A2; ENSG00000164175; TAA
YLNGATVV

SEQ ID NO: 79734 - protein, 8 aa, Homo sapiens
  Table A; Target 79734; HLA-B*49:01; SLC45A2; ENSG00000164175; TAA
YLNGATVV

SEQ ID NO: 79735 - protein, 8 aa, Homo sapiens
  Table A; Target 79735; HLA-B*55:01; SLC45A2; ENSG00000164175; TAA
YLNGATVV

SEQ ID NO: 79736 - protein, 8 aa, Homo sapiens
  Table A; Target 79736; HLA-C*02:02; SLC45A2; ENSG00000164175; TAA
YLNGATVV

SEQ ID NO: 79737 - protein, 8 aa, Homo sapiens
  Table A; Target 79737; HLA-C*05:01; SLC45A2; ENSG00000164175; TAA
YLNGATVV

SEQ ID NO: 79738 - protein, 8 aa, Homo sapiens
  Table A; Target 79738; HLA-C*12:03; SLC45A2; ENSG00000164175; TAA
YLNGATVV

SEQ ID NO: 79739 - protein, 8 aa, Homo sapiens
  Table A; Target 79739; HLA-C*14:02; SLC45A2; ENSG00000164175; TAA
YLNGATVV

SEQ ID NO: 79740 - protein, 8 aa, Homo sapiens
  Table A; Target 79740; HLA-C*16:02; SLC45A2; ENSG00000164175; TAA
YLNGATVV

SEQ ID NO: 79741 - protein, 9 aa, Homo sapiens
  Table A; Target 79741; HLA-A*02:01; SLC45A2; ENSG00000164175; TAA
YLNGATVVA

SEQ ID NO: 79742 - protein, 9 aa, Homo sapiens
  Table A; Target 79742; HLA-A*02:03; SLC45A2; ENSG00000164175; TAA
YLNGATVVA

SEQ ID NO: 79743 - protein, 9 aa, Homo sapiens
  Table A; Target 79743; HLA-A*02:04; SLC45A2; ENSG00000164175; TAA
YLNGATVVA

SEQ ID NO: 79744 - protein, 9 aa, Homo sapiens
  Table A; Target 79744; HLA-A*02:07; SLC45A2; ENSG00000164175; TAA
YLNGATVVA

SEQ ID NO: 79745 - protein, 9 aa, Homo sapiens
  Table A; Target 79745; HLA-A*32:01; SLC45A2; ENSG00000164175; TAA
YLNGATVVA

SEQ ID NO: 79746 - protein, 9 aa, Homo sapiens
  Table A; Target 79746; HLA-B*13:02; SLC45A2; ENSG00000164175; TAA
YLNGATVVA

SEQ ID NO: 79747 - protein, 9 aa, Homo sapiens
  Table A; Target 79747; HLA-B*15:01; SLC45A2; ENSG00000164175; TAA
YLNGATVVA

SEQ ID NO: 79748 - protein, 9 aa, Homo sapiens
  Table A; Target 79748; HLA-B*39:01; SLC45A2; ENSG00000164175; TAA
YLNGATVVA

SEQ ID NO: 79749 - protein, 9 aa, Homo sapiens
  Table A; Target 79749; HLA-B*46:01; SLC45A2; ENSG00000164175; TAA
YLNGATVVA

SEQ ID NO: 79750 - protein, 9 aa, Homo sapiens
  Table A; Target 79750; HLA-B*54:01; SLC45A2; ENSG00000164175; TAA
YLNGATVVA

SEQ ID NO: 79751 - protein, 9 aa, Homo sapiens
  Table A; Target 79751; HLA-B*55:01; SLC45A2; ENSG00000164175; TAA
YLNGATVVA

SEQ ID NO: 79752 - protein, 9 aa, Homo sapiens
  Table A; Target 79752; HLA-B*56:01; SLC45A2; ENSG00000164175; TAA
YLNGATVVA

SEQ ID NO: 79753 - protein, 9 aa, Homo sapiens
  Table A; Target 79753; HLA-C*02:02; SLC45A2; ENSG00000164175; TAA
YLNGATVVA

SEQ ID NO: 79754 - protein, 9 aa, Homo sapiens
  Table A; Target 79754; HLA-C*07:04; SLC45A2; ENSG00000164175; TAA
YLNGATVVA

SEQ ID NO: 79755 - protein, 9 aa, Homo sapiens
  Table A; Target 79755; HLA-C*12:03; SLC45A2; ENSG00000164175; TAA
YLNGATVVA

SEQ ID NO: 79756 - protein, 9 aa, Homo sapiens
  Table A; Target 79756; HLA-C*14:02; SLC45A2; ENSG00000164175; TAA
YLNGATVVA

SEQ ID NO: 79757 - protein, 10 aa, Homo sapiens
  Table A; Target 79757; HLA-A*02:01; SLC45A2; ENSG00000164175; TAA
YLNGATVVAA

SEQ ID NO: 79758 - protein, 10 aa, Homo sapiens
  Table A; Target 79758; HLA-A*02:03; SLC45A2; ENSG00000164175; TAA
YLNGATVVAA

SEQ ID NO: 79759 - protein, 10 aa, Homo sapiens
  Table A; Target 79759; HLA-A*02:04; SLC45A2; ENSG00000164175; TAA
YLNGATVVAA

SEQ ID NO: 79760 - protein, 10 aa, Homo sapiens
  Table A; Target 79760; HLA-A*02:07; SLC45A2; ENSG00000164175; TAA
YLNGATVVAA

SEQ ID NO: 79761 - protein, 10 aa, Homo sapiens
  Table A; Target 79761; HLA-B*46:01; SLC45A2; ENSG00000164175; TAA
YLNGATVVAA

SEQ ID NO: 79762 - protein, 10 aa, Homo sapiens
  Table A; Target 79762; HLA-B*54:01; SLC45A2; ENSG00000164175; TAA
YLNGATVVAA

SEQ ID NO: 79763 - protein, 10 aa, Homo sapiens
  Table A; Target 79763; HLA-B*55:01; SLC45A2; ENSG00000164175; TAA
YLNGATVVAA

SEQ ID NO: 79764 - protein, 10 aa, Homo sapiens
  Table A; Target 79764; HLA-B*56:01; SLC45A2; ENSG00000164175; TAA
YLNGATVVAA

SEQ ID NO: 79765 - protein, 10 aa, Homo sapiens
  Table A; Target 79765; HLA-C*01:02; SLC45A2; ENSG00000164175; TAA
YLNGATVVAA

SEQ ID NO: 79766 - protein, 10 aa, Homo sapiens
  Table A; Target 79766; HLA-C*02:02; SLC45A2; ENSG00000164175; TAA
YLNGATVVAA

SEQ ID NO: 79767 - protein, 10 aa, Homo sapiens
  Table A; Target 79767; HLA-C*07:04; SLC45A2; ENSG00000164175; TAA
YLNGATVVAA

SEQ ID NO: 79768 - protein, 10 aa, Homo sapiens
  Table A; Target 79768; HLA-C*14:02; SLC45A2; ENSG00000164175; TAA
YLNGATVVAA

SEQ ID NO: 79769 - protein, 11 aa, Homo sapiens
  Table A; Target 79769; HLA-A*02:01; SLC45A2; ENSG00000164175; TAA
YLNGATVVAAL

SEQ ID NO: 79770 - protein, 11 aa, Homo sapiens
  Table A; Target 79770; HLA-A*02:04; SLC45A2; ENSG00000164175; TAA
YLNGATVVAAL

SEQ ID NO: 79771 - protein, 11 aa, Homo sapiens
  Table A; Target 79771; HLA-A*23:01; SLC45A2; ENSG00000164175; TAA
YLNGATVVAAL

SEQ ID NO: 79772 - protein, 9 aa, Homo sapiens
  Table A; Target 79772; HLA-B*27:05; SLC45A2; ENSG00000164175; TAA
YRGDPYSAH

SEQ ID NO: 79773 - protein, 9 aa, Homo sapiens
  Table A; Target 79773; HLA-A*01:01; SLC45A2; ENSG00000164175; TAA
YSAHNSTEF

SEQ ID NO: 79774 - protein, 9 aa, Homo sapiens
  Table A; Target 79774; HLA-A*32:01; SLC45A2; ENSG00000164175; TAA
YSAHNSTEF

SEQ ID NO: 79775 - protein, 9 aa, Homo sapiens
  Table A; Target 79775; HLA-B*15:01; SLC45A2; ENSG00000164175; TAA
YSAHNSTEF

SEQ ID NO: 79776 - protein, 9 aa, Homo sapiens
  Table A; Target 79776; HLA-B*15:03; SLC45A2; ENSG00000164175; TAA
YSAHNSTEF

SEQ ID NO: 79777 - protein, 9 aa, Homo sapiens
  Table A; Target 79777; HLA-B*46:01; SLC45A2; ENSG00000164175; TAA
YSAHNSTEF

SEQ ID NO: 79778 - protein, 9 aa, Homo sapiens
  Table A; Target 79778; HLA-B*58:01; SLC45A2; ENSG00000164175; TAA
YSAHNSTEF

SEQ ID NO: 79779 - protein, 9 aa, Homo sapiens
  Table A; Target 79779; HLA-C*02:02; SLC45A2; ENSG00000164175; TAA
YSAHNSTEF

SEQ ID NO: 79780 - protein, 9 aa, Homo sapiens
  Table A; Target 79780; HLA-C*03:03; SLC45A2; ENSG00000164175; TAA
YSAHNSTEF

SEQ ID NO: 79781 - protein, 9 aa, Homo sapiens
  Table A; Target 79781; HLA-C*03:04; SLC45A2; ENSG00000164175; TAA
YSAHNSTEF

SEQ ID NO: 79782 - protein, 9 aa, Homo sapiens
  Table A; Target 79782; HLA-C*07:04; SLC45A2; ENSG00000164175; TAA
YSAHNSTEF

SEQ ID NO: 79783 - protein, 9 aa, Homo sapiens
  Table A; Target 79783; HLA-C*16:01; SLC45A2; ENSG00000164175; TAA
YSAHNSTEF

SEQ ID NO: 79784 - protein, 9 aa, Homo sapiens
  Table A; Target 79784; HLA-C*03:03; SLC45A2; ENSG00000164175; TAA
YSTLVLCSL

SEQ ID NO: 79785 - protein, 9 aa, Homo sapiens
  Table A; Target 79785; HLA-C*03:04; SLC45A2; ENSG00000164175; TAA
YSTLVLCSL

SEQ ID NO: 79786 - protein, 8 aa, Homo sapiens
  Table A; Target 79786; HLA-B*08:01; SLC45A2; ENSG00000164175; TAA
YSYFQKVL

SEQ ID NO: 79787 - protein, 8 aa, Homo sapiens
  Table A; Target 79787; HLA-C*03:03; SLC45A2; ENSG00000164175; TAA
YSYFQKVL

SEQ ID NO: 79788 - protein, 8 aa, Homo sapiens
  Table A; Target 79788; HLA-C*03:04; SLC45A2; ENSG00000164175; TAA
YSYFQKVL

SEQ ID NO: 79789 - protein, 8 aa, Homo sapiens
  Table A; Target 79789; HLA-C*12:03; SLC45A2; ENSG00000164175; TAA
YSYFQKVL

SEQ ID NO: 79790 - protein, 9 aa, Homo sapiens
  Table A; Target 79790; HLA-A*02:04; SLC45A2; ENSG00000164175; TAA
YSYFQKVLV

SEQ ID NO: 79791 - protein, 9 aa, Homo sapiens
  Table A; Target 79791; HLA-A*68:02; SLC45A2; ENSG00000164175; TAA
YSYFQKVLV

SEQ ID NO: 79792 - protein, 9 aa, Homo sapiens
  Table A; Target 79792; HLA-B*13:02; SLC45A2; ENSG00000164175; TAA
YSYFQKVLV

SEQ ID NO: 79793 - protein, 9 aa, Homo sapiens
  Table A; Target 79793; HLA-B*51:01; SLC45A2; ENSG00000164175; TAA
YSYFQKVLV

SEQ ID NO: 79794 - protein, 9 aa, Homo sapiens
  Table A; Target 79794; HLA-B*54:01; SLC45A2; ENSG00000164175; TAA
YSYFQKVLV

SEQ ID NO: 79795 - protein, 9 aa, Homo sapiens
  Table A; Target 79795; HLA-C*02:02; SLC45A2; ENSG00000164175; TAA
YSYFQKVLV

SEQ ID NO: 79796 - protein, 9 aa, Homo sapiens
  Table A; Target 79796; HLA-C*12:03; SLC45A2; ENSG00000164175; TAA
YSYFQKVLV

SEQ ID NO: 79797 - protein, 11 aa, Homo sapiens
  Table A; Target 79797; HLA-A*01:01; SLC45A2; ENSG00000164175; TAA
YSYFQKVLVSY

SEQ ID NO: 79798 - protein, 11 aa, Homo sapiens
  Table A; Target 79798; HLA-A*29:02; SLC45A2; ENSG00000164175; TAA
YSYFQKVLVSY

SEQ ID NO: 79799 - protein, 8 aa, Homo sapiens
  Table A; Target 79799; HLA-A*24:02; SLC45A2; ENSG00000164175; TAA
YTVPFNLI

SEQ ID NO: 79800 - protein, 11 aa, Homo sapiens
  Table A; Target 79800; HLA-A*01:01; SLC45A2; ENSG00000164175; TAA
YTVPFNLITEY

SEQ ID NO: 79801 - protein, 11 aa, Homo sapiens
  Table A; Target 79801; HLA-A*25:01; SLC45A2; ENSG00000164175; TAA
YTVPFNLITEY

SEQ ID NO: 79802 - protein, 11 aa, Homo sapiens
  Table A; Target 79802; HLA-A*26:01; SLC45A2; ENSG00000164175; TAA
YTVPFNLITEY

SEQ ID NO: 79803 - protein, 11 aa, Homo sapiens
  Table A; Target 79803; HLA-A*29:02; SLC45A2; ENSG00000164175; TAA
YTVPFNLITEY

SEQ ID NO: 79804 - protein, 11 aa, Homo sapiens
  Table A; Target 79804; HLA-A*30:02; SLC45A2; ENSG00000164175; TAA
YTVPFNLITEY

SEQ ID NO: 79805 - protein, 11 aa, Homo sapiens
  Table A; Target 79805; HLA-A*68:02; SLC45A2; ENSG00000164175; TAA
YTVPFNLITEY

SEQ ID NO: 79806 - protein, 11 aa, Homo sapiens
  Table A; Target 79806; HLA-B*15:01; SLC45A2; ENSG00000164175; TAA
YTVPFNLITEY

SEQ ID NO: 79807 - protein, 11 aa, Homo sapiens
  Table A; Target 79807; HLA-B*46:01; SLC45A2; ENSG00000164175; TAA
YTVPFNLITEY

SEQ ID NO: 79808 - protein, 11 aa, Homo sapiens
  Table A; Target 79808; HLA-B*57:01; SLC45A2; ENSG00000164175; TAA
YTVPFNLITEY

SEQ ID NO: 79809 - protein, 11 aa, Homo sapiens
  Table A; Target 79809; HLA-B*58:01; SLC45A2; ENSG00000164175; TAA
YTVPFNLITEY

SEQ ID NO: 79810 - protein, 11 aa, Homo sapiens
  Table A; Target 79810; HLA-C*02:02; SLC45A2; ENSG00000164175; TAA
YTVPFNLITEY

SEQ ID NO: 79811 - protein, 11 aa, Homo sapiens
  Table A; Target 79811; HLA-C*07:04; SLC45A2; ENSG00000164175; TAA
YTVPFNLITEY

SEQ ID NO: 79812 - protein, 11 aa, Homo sapiens
  Table A; Target 79812; HLA-C*12:03; SLC45A2; ENSG00000164175; TAA
YTVPFNLITEY

SEQ ID NO: 79813 - protein, 8 aa, Homo sapiens
  Table A; Target 79813; HLA-B*35:03; SLC45A2; ENSG00000164175; TAA
YVNPELAM

SEQ ID NO: 79814 - protein, 8 aa, Homo sapiens
  Table A; Target 79814; HLA-B*39:01; SLC45A2; ENSG00000164175; TAA
YVNPELAM

SEQ ID NO: 79815 - protein, 8 aa, Homo sapiens
  Table A; Target 79815; HLA-C*02:02; SLC45A2; ENSG00000164175; TAA
YVNPELAM

SEQ ID NO: 79816 - protein, 8 aa, Homo sapiens
  Table A; Target 79816; HLA-C*03:03; SLC45A2; ENSG00000164175; TAA
YVNPELAM

SEQ ID NO: 79817 - protein, 8 aa, Homo sapiens
  Table A; Target 79817; HLA-C*03:04; SLC45A2; ENSG00000164175; TAA
YVNPELAM

SEQ ID NO: 79818 - protein, 8 aa, Homo sapiens
  Table A; Target 79818; HLA-C*05:01; SLC45A2; ENSG00000164175; TAA
YVNPELAM

SEQ ID NO: 79819 - protein, 8 aa, Homo sapiens
  Table A; Target 79819; HLA-C*16:01; SLC45A2; ENSG00000164175; TAA
YVNPELAM

SEQ ID NO: 79820 - protein, 9 aa, Homo sapiens
  Table A; Target 79820; HLA-A*26:01; SLC45A2; ENSG00000164175; TAA
YVNPELAMQ

SEQ ID NO: 79821 - protein, 10 aa, Homo sapiens
  Table A; Target 79821; HLA-A*31:01; SLC45A2; ENSG00000164175; TAA
YVNPELAMQG

SEQ ID NO: 79822 - protein, 11 aa, Homo sapiens
  Table A; Target 79822; HLA-A*26:01; SLC45A2; ENSG00000164175; TAA
YVNPELAMQGA

SEQ ID NO: 79823 - protein, 11 aa, Homo sapiens
  Table A; Target 79823; HLA-B*54:01; SLC45A2; ENSG00000164175; TAA
YVNPELAMQGA

SEQ ID NO: 79824 - protein, 11 aa, Homo sapiens
  Table A; Target 79824; HLA-B*56:01; SLC45A2; ENSG00000164175; TAA
YVNPELAMQGA

SEQ ID NO: 79825 - protein, 9 aa, Homo sapiens
  Table A; Target 79825; HLA-A*01:01; SLC45A2; ENSG00000164175; TAA
YVTPVLLSV

SEQ ID NO: 79826 - protein, 9 aa, Homo sapiens
  Table A; Target 79826; HLA-A*02:01; SLC45A2; ENSG00000164175; TAA
YVTPVLLSV

SEQ ID NO: 79827 - protein, 9 aa, Homo sapiens
  Table A; Target 79827; HLA-A*02:03; SLC45A2; ENSG00000164175; TAA
YVTPVLLSV

SEQ ID NO: 79828 - protein, 9 aa, Homo sapiens
  Table A; Target 79828; HLA-A*02:04; SLC45A2; ENSG00000164175; TAA
YVTPVLLSV

SEQ ID NO: 79829 - protein, 9 aa, Homo sapiens
  Table A; Target 79829; HLA-A*02:07; SLC45A2; ENSG00000164175; TAA
YVTPVLLSV

SEQ ID NO: 79830 - protein, 9 aa, Homo sapiens
  Table A; Target 79830; HLA-A*25:01; SLC45A2; ENSG00000164175; TAA
YVTPVLLSV

SEQ ID NO: 79831 - protein, 9 aa, Homo sapiens
  Table A; Target 79831; HLA-A*26:01; SLC45A2; ENSG00000164175; TAA
YVTPVLLSV

SEQ ID NO: 79832 - protein, 9 aa, Homo sapiens
  Table A; Target 79832; HLA-A*29:02; SLC45A2; ENSG00000164175; TAA
YVTPVLLSV

SEQ ID NO: 79833 - protein, 9 aa, Homo sapiens
  Table A; Target 79833; HLA-A*30:01; SLC45A2; ENSG00000164175; TAA
YVTPVLLSV

SEQ ID NO: 79834 - protein, 9 aa, Homo sapiens
  Table A; Target 79834; HLA-A*32:01; SLC45A2; ENSG00000164175; TAA
YVTPVLLSV

SEQ ID NO: 79835 - protein, 9 aa, Homo sapiens
  Table A; Target 79835; HLA-A*68:02; SLC45A2; ENSG00000164175; TAA
YVTPVLLSV

SEQ ID NO: 79836 - protein, 9 aa, Homo sapiens
  Table A; Target 79836; HLA-B*08:01; SLC45A2; ENSG00000164175; TAA
YVTPVLLSV

SEQ ID NO: 79837 - protein, 9 aa, Homo sapiens
  Table A; Target 79837; HLA-B*13:02; SLC45A2; ENSG00000164175; TAA
YVTPVLLSV

SEQ ID NO: 79838 - protein, 9 aa, Homo sapiens
  Table A; Target 79838; HLA-B*35:03; SLC45A2; ENSG00000164175; TAA
YVTPVLLSV

SEQ ID NO: 79839 - protein, 9 aa, Homo sapiens
  Table A; Target 79839; HLA-B*40:02; SLC45A2; ENSG00000164175; TAA
YVTPVLLSV

SEQ ID NO: 79840 - protein, 9 aa, Homo sapiens
  Table A; Target 79840; HLA-B*46:01; SLC45A2; ENSG00000164175; TAA
YVTPVLLSV

SEQ ID NO: 79841 - protein, 9 aa, Homo sapiens
  Table A; Target 79841; HLA-B*49:01; SLC45A2; ENSG00000164175; TAA
YVTPVLLSV

SEQ ID NO: 79842 - protein, 9 aa, Homo sapiens
  Table A; Target 79842; HLA-B*51:01; SLC45A2; ENSG00000164175; TAA
YVTPVLLSV

SEQ ID NO: 79843 - protein, 9 aa, Homo sapiens
  Table A; Target 79843; HLA-B*54:01; SLC45A2; ENSG00000164175; TAA
YVTPVLLSV

SEQ ID NO: 79844 - protein, 9 aa, Homo sapiens
  Table A; Target 79844; HLA-B*55:01; SLC45A2; ENSG00000164175; TAA
YVTPVLLSV

SEQ ID NO: 79845 - protein, 9 aa, Homo sapiens
  Table A; Target 79845; HLA-B*56:01; SLC45A2; ENSG00000164175; TAA
YVTPVLLSV

SEQ ID NO: 79846 - protein, 9 aa, Homo sapiens
  Table A; Target 79846; HLA-B*58:01; SLC45A2; ENSG00000164175; TAA
YVTPVLLSV

SEQ ID NO: 79847 - protein, 9 aa, Homo sapiens
  Table A; Target 79847; HLA-C*02:02; SLC45A2; ENSG00000164175; TAA
YVTPVLLSV

SEQ ID NO: 79848 - protein, 9 aa, Homo sapiens
  Table A; Target 79848; HLA-C*03:03; SLC45A2; ENSG00000164175; TAA
YVTPVLLSV

SEQ ID NO: 79849 - protein, 9 aa, Homo sapiens
  Table A; Target 79849; HLA-C*03:04; SLC45A2; ENSG00000164175; TAA
YVTPVLLSV

SEQ ID NO: 79850 - protein, 9 aa, Homo sapiens
  Table A; Target 79850; HLA-C*06:02; SLC45A2; ENSG00000164175; TAA
YVTPVLLSV

SEQ ID NO: 79851 - protein, 9 aa, Homo sapiens
  Table A; Target 79851; HLA-C*12:03; SLC45A2; ENSG00000164175; TAA
YVTPVLLSV

SEQ ID NO: 79852 - protein, 9 aa, Homo sapiens
  Table A; Target 79852; HLA-C*16:02; SLC45A2; ENSG00000164175; TAA
YVTPVLLSV

SEQ ID NO: 79853 - protein, 9 aa, Homo sapiens
  Table A; Target 79853; HLA-C*16:04; SLC45A2; ENSG00000164175; TAA
YVTPVLLSV

SEQ ID NO: 79854 - protein, 11 aa, Homo sapiens
  Table A; Target 79854; HLA-A*68:02; SLC45A2; ENSG00000164175; TAA
YVTPVLLSVGL

SEQ ID NO: 79855 - protein, 8 aa, Homo sapiens
  Table A; Target 79855; HLA-B*37:01; SLC7A13; ENSG00000164893; CTA
ADRAFPSL

SEQ ID NO: 79856 - protein, 8 aa, Homo sapiens
  Table A; Target 79856; HLA-B*49:01; SLC7A13; ENSG00000164893; CTA
AEISISFP

SEQ ID NO: 79857 - protein, 9 aa, Homo sapiens
  Table A; Target 79857; HLA-B*40:02; SLC7A13; ENSG00000164893; CTA
AEISISFPC

SEQ ID NO: 79858 - protein, 9 aa, Homo sapiens
  Table A; Target 79858; HLA-B*49:01; SLC7A13; ENSG00000164893; CTA
AEISISFPC

SEQ ID NO: 79859 - protein, 9 aa, Homo sapiens
  Table A; Target 79859; HLA-A*30:01; SLC7A13; ENSG00000164893; CTA
AELPDISHL

SEQ ID NO: 79860 - protein, 9 aa, Homo sapiens
  Table A; Target 79860; HLA-B*27:02; SLC7A13; ENSG00000164893; CTA
AELPDISHL

SEQ ID NO: 79861 - protein, 9 aa, Homo sapiens
  Table A; Target 79861; HLA-B*37:01; SLC7A13; ENSG00000164893; CTA
AELPDISHL

SEQ ID NO: 79862 - protein, 9 aa, Homo sapiens
  Table A; Target 79862; HLA-B*40:01; SLC7A13; ENSG00000164893; CTA
AELPDISHL

SEQ ID NO: 79863 - protein, 9 aa, Homo sapiens
  Table A; Target 79863; HLA-B*40:02; SLC7A13; ENSG00000164893; CTA
AELPDISHL

SEQ ID NO: 79864 - protein, 9 aa, Homo sapiens
  Table A; Target 79864; HLA-B*44:02; SLC7A13; ENSG00000164893; CTA
AELPDISHL

SEQ ID NO: 79865 - protein, 9 aa, Homo sapiens
  Table A; Target 79865; HLA-B*44:03; SLC7A13; ENSG00000164893; CTA
AELPDISHL

SEQ ID NO: 79866 - protein, 9 aa, Homo sapiens
  Table A; Target 79866; HLA-B*49:01; SLC7A13; ENSG00000164893; CTA
AELPDISHL

SEQ ID NO: 79867 - protein, 9 aa, Homo sapiens
  Table A; Target 79867; HLA-C*02:02; SLC7A13; ENSG00000164893; CTA
AELPDISHL

SEQ ID NO: 79868 - protein, 9 aa, Homo sapiens
  Table A; Target 79868; HLA-C*16:04; SLC7A13; ENSG00000164893; CTA
AELPDISHL

SEQ ID NO: 79869 - protein, 10 aa, Homo sapiens
  Table A; Target 79869; HLA-A*30:01; SLC7A13; ENSG00000164893; CTA
AELPDISHLI

SEQ ID NO: 79870 - protein, 10 aa, Homo sapiens
  Table A; Target 79870; HLA-B*40:01; SLC7A13; ENSG00000164893; CTA
AELPDISHLI

SEQ ID NO: 79871 - protein, 10 aa, Homo sapiens
  Table A; Target 79871; HLA-B*44:02; SLC7A13; ENSG00000164893; CTA
AELPDISHLI

SEQ ID NO: 79872 - protein, 10 aa, Homo sapiens
  Table A; Target 79872; HLA-B*44:03; SLC7A13; ENSG00000164893; CTA
AELPDISHLI

SEQ ID NO: 79873 - protein, 10 aa, Homo sapiens
  Table A; Target 79873; HLA-B*49:01; SLC7A13; ENSG00000164893; CTA
AELPDISHLI

SEQ ID NO: 79874 - protein, 8 aa, Homo sapiens
  Table A; Target 79874; HLA-B*18:01; SLC7A13; ENSG00000164893; CTA
AEYSIQPF

SEQ ID NO: 79875 - protein, 8 aa, Homo sapiens
  Table A; Target 79875; HLA-B*37:01; SLC7A13; ENSG00000164893; CTA
AEYSIQPF

SEQ ID NO: 79876 - protein, 8 aa, Homo sapiens
  Table A; Target 79876; HLA-B*44:02; SLC7A13; ENSG00000164893; CTA
AEYSIQPF

SEQ ID NO: 79877 - protein, 9 aa, Homo sapiens
  Table A; Target 79877; HLA-A*30:01; SLC7A13; ENSG00000164893; CTA
AEYSIQPFF

SEQ ID NO: 79878 - protein, 9 aa, Homo sapiens
  Table A; Target 79878; HLA-B*18:01; SLC7A13; ENSG00000164893; CTA
AEYSIQPFF

SEQ ID NO: 79879 - protein, 9 aa, Homo sapiens
  Table A; Target 79879; HLA-B*27:02; SLC7A13; ENSG00000164893; CTA
AEYSIQPFF

SEQ ID NO: 79880 - protein, 9 aa, Homo sapiens
  Table A; Target 79880; HLA-B*37:01; SLC7A13; ENSG00000164893; CTA
AEYSIQPFF

SEQ ID NO: 79881 - protein, 9 aa, Homo sapiens
  Table A; Target 79881; HLA-B*40:01; SLC7A13; ENSG00000164893; CTA
AEYSIQPFF

SEQ ID NO: 79882 - protein, 9 aa, Homo sapiens
  Table A; Target 79882; HLA-B*44:02; SLC7A13; ENSG00000164893; CTA
AEYSIQPFF

SEQ ID NO: 79883 - protein, 9 aa, Homo sapiens
  Table A; Target 79883; HLA-B*44:03; SLC7A13; ENSG00000164893; CTA
AEYSIQPFF

SEQ ID NO: 79884 - protein, 9 aa, Homo sapiens
  Table A; Target 79884; HLA-B*49:01; SLC7A13; ENSG00000164893; CTA
AEYSIQPFF

SEQ ID NO: 79885 - protein, 9 aa, Homo sapiens
  Table A; Target 79885; HLA-C*02:02; SLC7A13; ENSG00000164893; CTA
AEYSIQPFF

SEQ ID NO: 79886 - protein, 9 aa, Homo sapiens
  Table A; Target 79886; HLA-C*16:04; SLC7A13; ENSG00000164893; CTA
AEYSIQPFF

SEQ ID NO: 79887 - protein, 9 aa, Homo sapiens
  Table A; Target 79887; HLA-C*04:01; SLC7A13; ENSG00000164893; CTA
AFDAELPDI

SEQ ID NO: 79888 - protein, 9 aa, Homo sapiens
  Table A; Target 79888; HLA-A*23:01; SLC7A13; ENSG00000164893; CTA
AFLNLWTSL

SEQ ID NO: 79889 - protein, 9 aa, Homo sapiens
  Table A; Target 79889; HLA-C*14:02; SLC7A13; ENSG00000164893; CTA
AFLNLWTSL

SEQ ID NO: 79890 - protein, 10 aa, Homo sapiens
  Table A; Target 79890; HLA-A*30:02; SLC7A13; ENSG00000164893; CTA
AGQALLLAEY

SEQ ID NO: 79891 - protein, 9 aa, Homo sapiens
  Table A; Target 79891; HLA-A*01:01; SLC7A13; ENSG00000164893; CTA
AIFQGYFAY

SEQ ID NO: 79892 - protein, 9 aa, Homo sapiens
  Table A; Target 79892; HLA-A*03:01; SLC7A13; ENSG00000164893; CTA
AIFQGYFAY

SEQ ID NO: 79893 - protein, 9 aa, Homo sapiens
  Table A; Target 79893; HLA-A*29:02; SLC7A13; ENSG00000164893; CTA
AIFQGYFAY

SEQ ID NO: 79894 - protein, 9 aa, Homo sapiens
  Table A; Target 79894; HLA-A*30:02; SLC7A13; ENSG00000164893; CTA
AIFQGYFAY

SEQ ID NO: 79895 - protein, 9 aa, Homo sapiens
  Table A; Target 79895; HLA-A*32:01; SLC7A13; ENSG00000164893; CTA
AIFQGYFAY

SEQ ID NO: 79896 - protein, 9 aa, Homo sapiens
  Table A; Target 79896; HLA-B*15:01; SLC7A13; ENSG00000164893; CTA
AIFQGYFAY

SEQ ID NO: 79897 - protein, 9 aa, Homo sapiens
  Table A; Target 79897; HLA-B*15:03; SLC7A13; ENSG00000164893; CTA
AIFQGYFAY

SEQ ID NO: 79898 - protein, 9 aa, Homo sapiens
  Table A; Target 79898; HLA-B*46:01; SLC7A13; ENSG00000164893; CTA
AIFQGYFAY

SEQ ID NO: 79899 - protein, 9 aa, Homo sapiens
  Table A; Target 79899; HLA-C*02:02; SLC7A13; ENSG00000164893; CTA
AIFQGYFAY

SEQ ID NO: 79900 - protein, 9 aa, Homo sapiens
  Table A; Target 79900; HLA-C*16:04; SLC7A13; ENSG00000164893; CTA
AIFQGYFAY

SEQ ID NO: 79901 - protein, 9 aa, Homo sapiens
  Table A; Target 79901; HLA-A*02:01; SLC7A13; ENSG00000164893; CTA
AILAMTSTL

SEQ ID NO: 79902 - protein, 9 aa, Homo sapiens
  Table A; Target 79902; HLA-A*02:03; SLC7A13; ENSG00000164893; CTA
AILAMTSTL

SEQ ID NO: 79903 - protein, 9 aa, Homo sapiens
  Table A; Target 79903; HLA-A*02:04; SLC7A13; ENSG00000164893; CTA
AILAMTSTL

SEQ ID NO: 79904 - protein, 9 aa, Homo sapiens
  Table A; Target 79904; HLA-A*02:07; SLC7A13; ENSG00000164893; CTA
AILAMTSTL

SEQ ID NO: 79905 - protein, 9 aa, Homo sapiens
  Table A; Target 79905; HLA-A*23:01; SLC7A13; ENSG00000164893; CTA
AILAMTSTL

SEQ ID NO: 79906 - protein, 9 aa, Homo sapiens
  Table A; Target 79906; HLA-A*24:02; SLC7A13; ENSG00000164893; CTA
AILAMTSTL

SEQ ID NO: 79907 - protein, 9 aa, Homo sapiens
  Table A; Target 79907; HLA-A*25:01; SLC7A13; ENSG00000164893; CTA
AILAMTSTL

SEQ ID NO: 79908 - protein, 9 aa, Homo sapiens
  Table A; Target 79908; HLA-A*30:01; SLC7A13; ENSG00000164893; CTA
AILAMTSTL

SEQ ID NO: 79909 - protein, 9 aa, Homo sapiens
  Table A; Target 79909; HLA-A*32:01; SLC7A13; ENSG00000164893; CTA
AILAMTSTL

SEQ ID NO: 79910 - protein, 9 aa, Homo sapiens
  Table A; Target 79910; HLA-B*07:02; SLC7A13; ENSG00000164893; CTA
AILAMTSTL

SEQ ID NO: 79911 - protein, 9 aa, Homo sapiens
  Table A; Target 79911; HLA-B*15:01; SLC7A13; ENSG00000164893; CTA
AILAMTSTL

SEQ ID NO: 79912 - protein, 9 aa, Homo sapiens
  Table A; Target 79912; HLA-B*15:03; SLC7A13; ENSG00000164893; CTA
AILAMTSTL

SEQ ID NO: 79913 - protein, 9 aa, Homo sapiens
  Table A; Target 79913; HLA-B*37:01; SLC7A13; ENSG00000164893; CTA
AILAMTSTL

SEQ ID NO: 79914 - protein, 9 aa, Homo sapiens
  Table A; Target 79914; HLA-B*40:01; SLC7A13; ENSG00000164893; CTA
AILAMTSTL

SEQ ID NO: 79915 - protein, 9 aa, Homo sapiens
  Table A; Target 79915; HLA-B*40:02; SLC7A13; ENSG00000164893; CTA
AILAMTSTL

SEQ ID NO: 79916 - protein, 9 aa, Homo sapiens
  Table A; Target 79916; HLA-B*46:01; SLC7A13; ENSG00000164893; CTA
AILAMTSTL

SEQ ID NO: 79917 - protein, 9 aa, Homo sapiens
  Table A; Target 79917; HLA-B*55:01; SLC7A13; ENSG00000164893; CTA
AILAMTSTL

SEQ ID NO: 79918 - protein, 9 aa, Homo sapiens
  Table A; Target 79918; HLA-B*58:01; SLC7A13; ENSG00000164893; CTA
AILAMTSTL

SEQ ID NO: 79919 - protein, 9 aa, Homo sapiens
  Table A; Target 79919; HLA-C*01:02; SLC7A13; ENSG00000164893; CTA
AILAMTSTL

SEQ ID NO: 79920 - protein, 9 aa, Homo sapiens
  Table A; Target 79920; HLA-C*02:02; SLC7A13; ENSG00000164893; CTA
AILAMTSTL

SEQ ID NO: 79921 - protein, 9 aa, Homo sapiens
  Table A; Target 79921; HLA-C*03:03; SLC7A13; ENSG00000164893; CTA
AILAMTSTL

SEQ ID NO: 79922 - protein, 9 aa, Homo sapiens
  Table A; Target 79922; HLA-C*03:04; SLC7A13; ENSG00000164893; CTA
AILAMTSTL

SEQ ID NO: 79923 - protein, 9 aa, Homo sapiens
  Table A; Target 79923; HLA-C*05:01; SLC7A13; ENSG00000164893; CTA
AILAMTSTL

SEQ ID NO: 79924 - protein, 9 aa, Homo sapiens
  Table A; Target 79924; HLA-C*07:02; SLC7A13; ENSG00000164893; CTA
AILAMTSTL

SEQ ID NO: 79925 - protein, 9 aa, Homo sapiens
  Table A; Target 79925; HLA-C*07:04; SLC7A13; ENSG00000164893; CTA
AILAMTSTL

SEQ ID NO: 79926 - protein, 9 aa, Homo sapiens
  Table A; Target 79926; HLA-C*14:02; SLC7A13; ENSG00000164893; CTA
AILAMTSTL

SEQ ID NO: 79927 - protein, 10 aa, Homo sapiens
  Table A; Target 79927; HLA-A*02:04; SLC7A13; ENSG00000164893; CTA
ALAMLWIVGI

SEQ ID NO: 79928 - protein, 9 aa, Homo sapiens
  Table A; Target 79928; HLA-A*02:01; SLC7A13; ENSG00000164893; CTA
ALLLAEYSI

SEQ ID NO: 79929 - protein, 9 aa, Homo sapiens
  Table A; Target 79929; HLA-A*03:01; SLC7A13; ENSG00000164893; CTA
ALPLVTVVY

SEQ ID NO: 79930 - protein, 9 aa, Homo sapiens
  Table A; Target 79930; HLA-A*23:01; SLC7A13; ENSG00000164893; CTA
ALPLVTVVY

SEQ ID NO: 79931 - protein, 9 aa, Homo sapiens
  Table A; Target 79931; HLA-A*26:01; SLC7A13; ENSG00000164893; CTA
ALPLVTVVY

SEQ ID NO: 79932 - protein, 9 aa, Homo sapiens
  Table A; Target 79932; HLA-A*29:02; SLC7A13; ENSG00000164893; CTA
ALPLVTVVY

SEQ ID NO: 79933 - protein, 9 aa, Homo sapiens
  Table A; Target 79933; HLA-A*30:02; SLC7A13; ENSG00000164893; CTA
ALPLVTVVY

SEQ ID NO: 79934 - protein, 9 aa, Homo sapiens
  Table A; Target 79934; HLA-A*32:01; SLC7A13; ENSG00000164893; CTA
ALPLVTVVY

SEQ ID NO: 79935 - protein, 9 aa, Homo sapiens
  Table A; Target 79935; HLA-B*15:01; SLC7A13; ENSG00000164893; CTA
ALPLVTVVY

SEQ ID NO: 79936 - protein, 9 aa, Homo sapiens
  Table A; Target 79936; HLA-B*15:03; SLC7A13; ENSG00000164893; CTA
ALPLVTVVY

SEQ ID NO: 79937 - protein, 9 aa, Homo sapiens
  Table A; Target 79937; HLA-B*46:01; SLC7A13; ENSG00000164893; CTA
ALPLVTVVY

SEQ ID NO: 79938 - protein, 9 aa, Homo sapiens
  Table A; Target 79938; HLA-C*02:02; SLC7A13; ENSG00000164893; CTA
ALPLVTVVY

SEQ ID NO: 79939 - protein, 9 aa, Homo sapiens
  Table A; Target 79939; HLA-C*07:04; SLC7A13; ENSG00000164893; CTA
ALPLVTVVY

SEQ ID NO: 79940 - protein, 9 aa, Homo sapiens
  Table A; Target 79940; HLA-C*14:02; SLC7A13; ENSG00000164893; CTA
ALPLVTVVY

SEQ ID NO: 79941 - protein, 9 aa, Homo sapiens
  Table A; Target 79941; HLA-C*16:04; SLC7A13; ENSG00000164893; CTA
ALPLVTVVY

SEQ ID NO: 79942 - protein, 10 aa, Homo sapiens
  Table A; Target 79942; HLA-A*02:07; SLC7A13; ENSG00000164893; CTA
ALPLVTVVYL

SEQ ID NO: 79943 - protein, 9 aa, Homo sapiens
  Table A; Target 79943; HLA-A*02:01; SLC7A13; ENSG00000164893; CTA
AMTSTLCSA

SEQ ID NO: 79944 - protein, 9 aa, Homo sapiens
  Table A; Target 79944; HLA-A*02:03; SLC7A13; ENSG00000164893; CTA
AMTSTLCSA

SEQ ID NO: 79945 - protein, 9 aa, Homo sapiens
  Table A; Target 79945; HLA-B*55:01; SLC7A13; ENSG00000164893; CTA
AMTSTLCSA

SEQ ID NO: 79946 - protein, 9 aa, Homo sapiens
  Table A; Target 79946; HLA-B*56:01; SLC7A13; ENSG00000164893; CTA
AMTSTLCSA

SEQ ID NO: 79947 - protein, 9 aa, Homo sapiens
  Table A; Target 79947; HLA-C*03:03; SLC7A13; ENSG00000164893; CTA
ASQEGQLPL

SEQ ID NO: 79948 - protein, 9 aa, Homo sapiens
  Table A; Target 79948; HLA-C*03:04; SLC7A13; ENSG00000164893; CTA
ASQEGQLPL

SEQ ID NO: 79949 - protein, 9 aa, Homo sapiens
  Table A; Target 79949; HLA-A*32:01; SLC7A13; ENSG00000164893; CTA
ASSVLKVSI

SEQ ID NO: 79950 - protein, 9 aa, Homo sapiens
  Table A; Target 79950; HLA-B*13:02; SLC7A13; ENSG00000164893; CTA
ASSVLKVSI

SEQ ID NO: 79951 - protein, 9 aa, Homo sapiens
  Table A; Target 79951; HLA-B*58:01; SLC7A13; ENSG00000164893; CTA
ASSVLKVSI

SEQ ID NO: 79952 - protein, 9 aa, Homo sapiens
  Table A; Target 79952; HLA-C*16:01; SLC7A13; ENSG00000164893; CTA
ASSVLKVSI

SEQ ID NO: 79953 - protein, 8 aa, Homo sapiens
  Table A; Target 79953; HLA-C*14:02; SLC7A13; ENSG00000164893; CTA
AYSGGACF

SEQ ID NO: 79954 - protein, 11 aa, Homo sapiens
  Table A; Target 79954; HLA-A*24:02; SLC7A13; ENSG00000164893; CTA
AYSGGACFTLI

SEQ ID NO: 79955 - protein, 8 aa, Homo sapiens
  Table A; Target 79955; HLA-B*46:01; SLC7A13; ENSG00000164893; CTA
CMNVGVSL

SEQ ID NO: 79956 - protein, 8 aa, Homo sapiens
  Table A; Target 79956; HLA-C*01:02; SLC7A13; ENSG00000164893; CTA
CMNVGVSL

SEQ ID NO: 79957 - protein, 8 aa, Homo sapiens
  Table A; Target 79957; HLA-C*14:02; SLC7A13; ENSG00000164893; CTA
CMNVGVSL

SEQ ID NO: 79958 - protein, 9 aa, Homo sapiens
  Table A; Target 79958; HLA-A*23:01; SLC7A13; ENSG00000164893; CTA
CSAEISISF

SEQ ID NO: 79959 - protein, 9 aa, Homo sapiens
  Table A; Target 79959; HLA-A*30:02; SLC7A13; ENSG00000164893; CTA
CSAEISISF

SEQ ID NO: 79960 - protein, 9 aa, Homo sapiens
  Table A; Target 79960; HLA-A*32:01; SLC7A13; ENSG00000164893; CTA
CSAEISISF

SEQ ID NO: 79961 - protein, 9 aa, Homo sapiens
  Table A; Target 79961; HLA-B*15:01; SLC7A13; ENSG00000164893; CTA
CSAEISISF

SEQ ID NO: 79962 - protein, 9 aa, Homo sapiens
  Table A; Target 79962; HLA-B*15:03; SLC7A13; ENSG00000164893; CTA
CSAEISISF

SEQ ID NO: 79963 - protein, 9 aa, Homo sapiens
  Table A; Target 79963; HLA-B*27:02; SLC7A13; ENSG00000164893; CTA
CSAEISISF

SEQ ID NO: 79964 - protein, 9 aa, Homo sapiens
  Table A; Target 79964; HLA-B*35:01; SLC7A13; ENSG00000164893; CTA
CSAEISISF

SEQ ID NO: 79965 - protein, 9 aa, Homo sapiens
  Table A; Target 79965; HLA-B*46:01; SLC7A13; ENSG00000164893; CTA
CSAEISISF

SEQ ID NO: 79966 - protein, 9 aa, Homo sapiens
  Table A; Target 79966; HLA-B*57:01; SLC7A13; ENSG00000164893; CTA
CSAEISISF

SEQ ID NO: 79967 - protein, 9 aa, Homo sapiens
  Table A; Target 79967; HLA-B*58:01; SLC7A13; ENSG00000164893; CTA
CSAEISISF

SEQ ID NO: 79968 - protein, 9 aa, Homo sapiens
  Table A; Target 79968; HLA-C*02:02; SLC7A13; ENSG00000164893; CTA
CSAEISISF

SEQ ID NO: 79969 - protein, 9 aa, Homo sapiens
  Table A; Target 79969; HLA-C*03:03; SLC7A13; ENSG00000164893; CTA
CSAEISISF

SEQ ID NO: 79970 - protein, 9 aa, Homo sapiens
  Table A; Target 79970; HLA-C*03:04; SLC7A13; ENSG00000164893; CTA
CSAEISISF

SEQ ID NO: 79971 - protein, 9 aa, Homo sapiens
  Table A; Target 79971; HLA-C*07:06; SLC7A13; ENSG00000164893; CTA
CSAEISISF

SEQ ID NO: 79972 - protein, 9 aa, Homo sapiens
  Table A; Target 79972; HLA-C*12:03; SLC7A13; ENSG00000164893; CTA
CSAEISISF

SEQ ID NO: 79973 - protein, 9 aa, Homo sapiens
  Table A; Target 79973; HLA-C*16:01; SLC7A13; ENSG00000164893; CTA
CSAEISISF

SEQ ID NO: 79974 - protein, 9 aa, Homo sapiens
  Table A; Target 79974; HLA-C*16:04; SLC7A13; ENSG00000164893; CTA
CSAEISISF

SEQ ID NO: 79975 - protein, 9 aa, Homo sapiens
  Table A; Target 79975; HLA-A*24:02; SLC7A13; ENSG00000164893; CTA
CYLQLLFNI

SEQ ID NO: 79976 - protein, 11 aa, Homo sapiens
  Table A; Target 79976; HLA-A*33:01; SLC7A13; ENSG00000164893; CTA
DAELPDISHLI

SEQ ID NO: 79977 - protein, 10 aa, Homo sapiens
  Table A; Target 79977; HLA-A*68:01; SLC7A13; ENSG00000164893; CTA
DAVAITWADR

SEQ ID NO: 79978 - protein, 9 aa, Homo sapiens
  Table A; Target 79978; HLA-A*25:01; SLC7A13; ENSG00000164893; CTA
DISHLIQAI

SEQ ID NO: 79979 - protein, 9 aa, Homo sapiens
  Table A; Target 79979; HLA-A*68:02; SLC7A13; ENSG00000164893; CTA
DISHLIQAI

SEQ ID NO: 79980 - protein, 8 aa, Homo sapiens
  Table A; Target 79980; HLA-B*08:01; SLC7A13; ENSG00000164893; CTA
DRGEKIQL

SEQ ID NO: 79981 - protein, 9 aa, Homo sapiens
  Table A; Target 79981; HLA-B*08:01; SLC7A13; ENSG00000164893; CTA
ELKKPRTTI

SEQ ID NO: 79982 - protein, 9 aa, Homo sapiens
  Table A; Target 79982; HLA-A*02:07; SLC7A13; ENSG00000164893; CTA
ELPDISHLI

SEQ ID NO: 79983 - protein, 9 aa, Homo sapiens
  Table A; Target 79983; HLA-A*23:01; SLC7A13; ENSG00000164893; CTA
ELPDISHLI

SEQ ID NO: 79984 - protein, 9 aa, Homo sapiens
  Table A; Target 79984; HLA-A*24:02; SLC7A13; ENSG00000164893; CTA
ELPDISHLI

SEQ ID NO: 79985 - protein, 9 aa, Homo sapiens
  Table A; Target 79985; HLA-A*26:01; SLC7A13; ENSG00000164893; CTA
ELPDISHLI

SEQ ID NO: 79986 - protein, 9 aa, Homo sapiens
  Table A; Target 79986; HLA-A*68:02; SLC7A13; ENSG00000164893; CTA
ELPDISHLI

SEQ ID NO: 79987 - protein, 9 aa, Homo sapiens
  Table A; Target 79987; HLA-B*13:02; SLC7A13; ENSG00000164893; CTA
ELPDISHLI

SEQ ID NO: 79988 - protein, 11 aa, Homo sapiens
  Table A; Target 79988; HLA-A*02:07; SLC7A13; ENSG00000164893; CTA
ELPDISHLIQA

SEQ ID NO: 79989 - protein, 8 aa, Homo sapiens
  Table A; Target 79989; HLA-B*35:01; SLC7A13; ENSG00000164893; CTA
EPNLSIPY

SEQ ID NO: 79990 - protein, 8 aa, Homo sapiens
  Table A; Target 79990; HLA-A*23:01; SLC7A13; ENSG00000164893; CTA
FAISTSLF

SEQ ID NO: 79991 - protein, 8 aa, Homo sapiens
  Table A; Target 79991; HLA-B*46:01; SLC7A13; ENSG00000164893; CTA
FAISTSLF

SEQ ID NO: 79992 - protein, 8 aa, Homo sapiens
  Table A; Target 79992; HLA-C*02:02; SLC7A13; ENSG00000164893; CTA
FAISTSLF

SEQ ID NO: 79993 - protein, 8 aa, Homo sapiens
  Table A; Target 79993; HLA-C*03:03; SLC7A13; ENSG00000164893; CTA
FAYSGGAC

SEQ ID NO: 79994 - protein, 8 aa, Homo sapiens
  Table A; Target 79994; HLA-C*03:04; SLC7A13; ENSG00000164893; CTA
FAYSGGAC

SEQ ID NO: 79995 - protein, 9 aa, Homo sapiens
  Table A; Target 79995; HLA-A*23:01; SLC7A13; ENSG00000164893; CTA
FAYSGGACF

SEQ ID NO: 79996 - protein, 9 aa, Homo sapiens
  Table A; Target 79996; HLA-A*25:01; SLC7A13; ENSG00000164893; CTA
FAYSGGACF

SEQ ID NO: 79997 - protein, 9 aa, Homo sapiens
  Table A; Target 79997; HLA-A*26:01; SLC7A13; ENSG00000164893; CTA
FAYSGGACF

SEQ ID NO: 79998 - protein, 9 aa, Homo sapiens
  Table A; Target 79998; HLA-B*15:01; SLC7A13; ENSG00000164893; CTA
FAYSGGACF

SEQ ID NO: 79999 - protein, 9 aa, Homo sapiens
  Table A; Target 79999; HLA-B*15:03; SLC7A13; ENSG00000164893; CTA
FAYSGGACF

SEQ ID NO: 80000 - protein, 9 aa, Homo sapiens
  Table A; Target 80000; HLA-B*35:01; SLC7A13; ENSG00000164893; CTA
FAYSGGACF

SEQ ID NO: 80001 - protein, 9 aa, Homo sapiens
  Table A; Target 80001; HLA-B*35:03; SLC7A13; ENSG00000164893; CTA
FAYSGGACF

SEQ ID NO: 80002 - protein, 9 aa, Homo sapiens
  Table A; Target 80002; HLA-B*38:01; SLC7A13; ENSG00000164893; CTA
FAYSGGACF

SEQ ID NO: 80003 - protein, 9 aa, Homo sapiens
  Table A; Target 80003; HLA-B*39:01; SLC7A13; ENSG00000164893; CTA
FAYSGGACF

SEQ ID NO: 80004 - protein, 9 aa, Homo sapiens
  Table A; Target 80004; HLA-B*46:01; SLC7A13; ENSG00000164893; CTA
FAYSGGACF

SEQ ID NO: 80005 - protein, 9 aa, Homo sapiens
  Table A; Target 80005; HLA-B*51:01; SLC7A13; ENSG00000164893; CTA
FAYSGGACF

SEQ ID NO: 80006 - protein, 9 aa, Homo sapiens
  Table A; Target 80006; HLA-B*54:01; SLC7A13; ENSG00000164893; CTA
FAYSGGACF

SEQ ID NO: 80007 - protein, 9 aa, Homo sapiens
  Table A; Target 80007; HLA-B*58:01; SLC7A13; ENSG00000164893; CTA
FAYSGGACF

SEQ ID NO: 80008 - protein, 9 aa, Homo sapiens
  Table A; Target 80008; HLA-C*01:02; SLC7A13; ENSG00000164893; CTA
FAYSGGACF

SEQ ID NO: 80009 - protein, 9 aa, Homo sapiens
  Table A; Target 80009; HLA-C*02:02; SLC7A13; ENSG00000164893; CTA
FAYSGGACF

SEQ ID NO: 80010 - protein, 9 aa, Homo sapiens
  Table A; Target 80010; HLA-C*03:03; SLC7A13; ENSG00000164893; CTA
FAYSGGACF

SEQ ID NO: 80011 - protein, 9 aa, Homo sapiens
  Table A; Target 80011; HLA-C*03:04; SLC7A13; ENSG00000164893; CTA
FAYSGGACF

SEQ ID NO: 80012 - protein, 9 aa, Homo sapiens
  Table A; Target 80012; HLA-C*05:01; SLC7A13; ENSG00000164893; CTA
FAYSGGACF

SEQ ID NO: 80013 - protein, 9 aa, Homo sapiens
  Table A; Target 80013; HLA-C*07:02; SLC7A13; ENSG00000164893; CTA
FAYSGGACF

SEQ ID NO: 80014 - protein, 9 aa, Homo sapiens
  Table A; Target 80014; HLA-C*07:04; SLC7A13; ENSG00000164893; CTA
FAYSGGACF

SEQ ID NO: 80015 - protein, 9 aa, Homo sapiens
  Table A; Target 80015; HLA-C*12:03; SLC7A13; ENSG00000164893; CTA
FAYSGGACF

SEQ ID NO: 80016 - protein, 9 aa, Homo sapiens
  Table A; Target 80016; HLA-C*14:02; SLC7A13; ENSG00000164893; CTA
FAYSGGACF

SEQ ID NO: 80017 - protein, 9 aa, Homo sapiens
  Table A; Target 80017; HLA-C*16:01; SLC7A13; ENSG00000164893; CTA
FAYSGGACF

SEQ ID NO: 80018 - protein, 9 aa, Homo sapiens
  Table A; Target 80018; HLA-C*16:04; SLC7A13; ENSG00000164893; CTA
FAYSGGACF

SEQ ID NO: 80019 - protein, 11 aa, Homo sapiens
  Table A; Target 80019; HLA-C*02:02; SLC7A13; ENSG00000164893; CTA
FAYSGGACFTL

SEQ ID NO: 80020 - protein, 11 aa, Homo sapiens
  Table A; Target 80020; HLA-C*03:03; SLC7A13; ENSG00000164893; CTA
FAYSGGACFTL

SEQ ID NO: 80021 - protein, 11 aa, Homo sapiens
  Table A; Target 80021; HLA-C*03:04; SLC7A13; ENSG00000164893; CTA
FAYSGGACFTL

SEQ ID NO: 80022 - protein, 11 aa, Homo sapiens
  Table A; Target 80022; HLA-C*16:04; SLC7A13; ENSG00000164893; CTA
FAYSGGACFTL

SEQ ID NO: 80023 - protein, 9 aa, Homo sapiens
  Table A; Target 80023; HLA-B*15:01; SLC7A13; ENSG00000164893; CTA
FISLTGVVF

SEQ ID NO: 80024 - protein, 9 aa, Homo sapiens
  Table A; Target 80024; HLA-B*46:01; SLC7A13; ENSG00000164893; CTA
FISLTGVVF

SEQ ID NO: 80025 - protein, 9 aa, Homo sapiens
  Table A; Target 80025; HLA-C*02:02; SLC7A13; ENSG00000164893; CTA
FISLTGVVF

SEQ ID NO: 80026 - protein, 9 aa, Homo sapiens
  Table A; Target 80026; HLA-C*07:04; SLC7A13; ENSG00000164893; CTA
FISLTGVVF

SEQ ID NO: 80027 - protein, 8 aa, Homo sapiens
  Table A; Target 80027; HLA-A*02:01; SLC7A13; ENSG00000164893; CTA
FLGSGVVA

SEQ ID NO: 80028 - protein, 9 aa, Homo sapiens
  Table A; Target 80028; HLA-A*02:01; SLC7A13; ENSG00000164893; CTA
FLGSGVVAG

SEQ ID NO: 80029 - protein, 11 aa, Homo sapiens
  Table A; Target 80029; HLA-C*07:02; SLC7A13; ENSG00000164893; CTA
FLGSGVVAGQA

SEQ ID NO: 80030 - protein, 9 aa, Homo sapiens
  Table A; Target 80030; HLA-A*02:01; SLC7A13; ENSG00000164893; CTA
FLLINIIGA

SEQ ID NO: 80031 - protein, 9 aa, Homo sapiens
  Table A; Target 80031; HLA-A*02:03; SLC7A13; ENSG00000164893; CTA
FLLINIIGA

SEQ ID NO: 80032 - protein, 9 aa, Homo sapiens
  Table A; Target 80032; HLA-A*02:04; SLC7A13; ENSG00000164893; CTA
FLLINIIGA

SEQ ID NO: 80033 - protein, 9 aa, Homo sapiens
  Table A; Target 80033; HLA-A*02:04; SLC7A13; ENSG00000164893; CTA
FLNLWTSLF

SEQ ID NO: 80034 - protein, 9 aa, Homo sapiens
  Table A; Target 80034; HLA-A*02:01; SLC7A13; ENSG00000164893; CTA
FLSFPLATI

SEQ ID NO: 80035 - protein, 9 aa, Homo sapiens
  Table A; Target 80035; HLA-A*02:03; SLC7A13; ENSG00000164893; CTA
FLSFPLATI

SEQ ID NO: 80036 - protein, 9 aa, Homo sapiens
  Table A; Target 80036; HLA-A*02:04; SLC7A13; ENSG00000164893; CTA
FLSFPLATI

SEQ ID NO: 80037 - protein, 9 aa, Homo sapiens
  Table A; Target 80037; HLA-A*02:07; SLC7A13; ENSG00000164893; CTA
FLSFPLATI

SEQ ID NO: 80038 - protein, 8 aa, Homo sapiens
  Table A; Target 80038; HLA-B*35:01; SLC7A13; ENSG00000164893; CTA
FPCSGAQY

SEQ ID NO: 80039 - protein, 9 aa, Homo sapiens
  Table A; Target 80039; HLA-A*01:01; SLC7A13; ENSG00000164893; CTA
FPCSGAQYY

SEQ ID NO: 80040 - protein, 9 aa, Homo sapiens
  Table A; Target 80040; HLA-A*29:02; SLC7A13; ENSG00000164893; CTA
FPCSGAQYY

SEQ ID NO: 80041 - protein, 9 aa, Homo sapiens
  Table A; Target 80041; HLA-B*35:01; SLC7A13; ENSG00000164893; CTA
FPCSGAQYY

SEQ ID NO: 80042 - protein, 8 aa, Homo sapiens
  Table A; Target 80042; HLA-B*35:01; SLC7A13; ENSG00000164893; CTA
FPLATIVI

SEQ ID NO: 80043 - protein, 8 aa, Homo sapiens
  Table A; Target 80043; HLA-B*35:03; SLC7A13; ENSG00000164893; CTA
FPLATIVI

SEQ ID NO: 80044 - protein, 8 aa, Homo sapiens
  Table A; Target 80044; HLA-B*51:01; SLC7A13; ENSG00000164893; CTA
FPLATIVI

SEQ ID NO: 80045 - protein, 8 aa, Homo sapiens
  Table A; Target 80045; HLA-B*54:01; SLC7A13; ENSG00000164893; CTA
FPLATIVI

SEQ ID NO: 80046 - protein, 8 aa, Homo sapiens
  Table A; Target 80046; HLA-B*56:01; SLC7A13; ENSG00000164893; CTA
FPLATIVI

SEQ ID NO: 80047 - protein, 10 aa, Homo sapiens
  Table A; Target 80047; HLA-B*54:01; SLC7A13; ENSG00000164893; CTA
FPLATIVIDV

SEQ ID NO: 80048 - protein, 10 aa, Homo sapiens
  Table A; Target 80048; HLA-B*56:01; SLC7A13; ENSG00000164893; CTA
FPLATIVIDV

SEQ ID NO: 80049 - protein, 11 aa, Homo sapiens
  Table A; Target 80049; HLA-B*35:01; SLC7A13; ENSG00000164893; CTA
FPLATIVIDVG

SEQ ID NO: 80050 - protein, 11 aa, Homo sapiens
  Table A; Target 80050; HLA-B*54:01; SLC7A13; ENSG00000164893; CTA
FPLATIVIDVG

SEQ ID NO: 80051 - protein, 9 aa, Homo sapiens
  Table A; Target 80051; HLA-B*35:03; SLC7A13; ENSG00000164893; CTA
FPSCSVPKL

SEQ ID NO: 80052 - protein, 8 aa, Homo sapiens
  Table A; Target 80052; HLA-B*35:03; SLC7A13; ENSG00000164893; CTA
FPSLAWIM

SEQ ID NO: 80053 - protein, 9 aa, Homo sapiens
  Table A; Target 80053; HLA-A*02:01; SLC7A13; ENSG00000164893; CTA
FQNAFDAEL

SEQ ID NO: 80054 - protein, 9 aa, Homo sapiens
  Table A; Target 80054; HLA-B*13:02; SLC7A13; ENSG00000164893; CTA
FQNAFDAEL

SEQ ID NO: 80055 - protein, 9 aa, Homo sapiens
  Table A; Target 80055; HLA-B*15:01; SLC7A13; ENSG00000164893; CTA
FQNAFDAEL

SEQ ID NO: 80056 - protein, 9 aa, Homo sapiens
  Table A; Target 80056; HLA-B*27:05; SLC7A13; ENSG00000164893; CTA
FQNAFDAEL

SEQ ID NO: 80057 - protein, 9 aa, Homo sapiens
  Table A; Target 80057; HLA-B*35:03; SLC7A13; ENSG00000164893; CTA
FQNAFDAEL

SEQ ID NO: 80058 - protein, 9 aa, Homo sapiens
  Table A; Target 80058; HLA-B*38:01; SLC7A13; ENSG00000164893; CTA
FQNAFDAEL

SEQ ID NO: 80059 - protein, 9 aa, Homo sapiens
  Table A; Target 80059; HLA-B*39:01; SLC7A13; ENSG00000164893; CTA
FQNAFDAEL

SEQ ID NO: 80060 - protein, 9 aa, Homo sapiens
  Table A; Target 80060; HLA-C*02:02; SLC7A13; ENSG00000164893; CTA
FQNAFDAEL

SEQ ID NO: 80061 - protein, 9 aa, Homo sapiens
  Table A; Target 80061; HLA-C*03:04; SLC7A13; ENSG00000164893; CTA
FQNAFDAEL

SEQ ID NO: 80062 - protein, 9 aa, Homo sapiens
  Table A; Target 80062; HLA-B*57:01; SLC7A13; ENSG00000164893; CTA
FSNLLISIF

SEQ ID NO: 80063 - protein, 10 aa, Homo sapiens
  Table A; Target 80063; HLA-B*27:02; SLC7A13; ENSG00000164893; CTA
FSNLLISIFK

SEQ ID NO: 80064 - protein, 9 aa, Homo sapiens
  Table A; Target 80064; HLA-A*02:01; SLC7A13; ENSG00000164893; CTA
FTALPLVTV

SEQ ID NO: 80065 - protein, 9 aa, Homo sapiens
  Table A; Target 80065; HLA-A*02:03; SLC7A13; ENSG00000164893; CTA
FTALPLVTV

SEQ ID NO: 80066 - protein, 9 aa, Homo sapiens
  Table A; Target 80066; HLA-A*68:02; SLC7A13; ENSG00000164893; CTA
FTALPLVTV

SEQ ID NO: 80067 - protein, 9 aa, Homo sapiens
  Table A; Target 80067; HLA-B*46:01; SLC7A13; ENSG00000164893; CTA
FTALPLVTV

SEQ ID NO: 80068 - protein, 9 aa, Homo sapiens
  Table A; Target 80068; HLA-B*49:01; SLC7A13; ENSG00000164893; CTA
FTALPLVTV

SEQ ID NO: 80069 - protein, 9 aa, Homo sapiens
  Table A; Target 80069; HLA-B*51:01; SLC7A13; ENSG00000164893; CTA
FTALPLVTV

SEQ ID NO: 80070 - protein, 9 aa, Homo sapiens
  Table A; Target 80070; HLA-B*54:01; SLC7A13; ENSG00000164893; CTA
FTALPLVTV

SEQ ID NO: 80071 - protein, 9 aa, Homo sapiens
  Table A; Target 80071; HLA-B*56:01; SLC7A13; ENSG00000164893; CTA
FTALPLVTV

SEQ ID NO: 80072 - protein, 9 aa, Homo sapiens
  Table A; Target 80072; HLA-C*02:02; SLC7A13; ENSG00000164893; CTA
FTALPLVTV

SEQ ID NO: 80073 - protein, 9 aa, Homo sapiens
  Table A; Target 80073; HLA-C*03:03; SLC7A13; ENSG00000164893; CTA
FTALPLVTV

SEQ ID NO: 80074 - protein, 9 aa, Homo sapiens
  Table A; Target 80074; HLA-C*03:04; SLC7A13; ENSG00000164893; CTA
FTALPLVTV

SEQ ID NO: 80075 - protein, 9 aa, Homo sapiens
  Table A; Target 80075; HLA-C*12:03; SLC7A13; ENSG00000164893; CTA
FTALPLVTV

SEQ ID NO: 80076 - protein, 10 aa, Homo sapiens
  Table A; Target 80076; HLA-A*68:02; SLC7A13; ENSG00000164893; CTA
FTALPLVTVV

SEQ ID NO: 80077 - protein, 11 aa, Homo sapiens
  Table A; Target 80077; HLA-A*01:01; SLC7A13; ENSG00000164893; CTA
FTALPLVTVVY

SEQ ID NO: 80078 - protein, 11 aa, Homo sapiens
  Table A; Target 80078; HLA-A*29:02; SLC7A13; ENSG00000164893; CTA
FTALPLVTVVY

SEQ ID NO: 80079 - protein, 8 aa, Homo sapiens
  Table A; Target 80079; HLA-B*35:03; SLC7A13; ENSG00000164893; CTA
FTLIAGEL

SEQ ID NO: 80080 - protein, 8 aa, Homo sapiens
  Table A; Target 80080; HLA-B*40:02; SLC7A13; ENSG00000164893; CTA
FTLIAGEL

SEQ ID NO: 80081 - protein, 8 aa, Homo sapiens
  Table A; Target 80081; HLA-B*46:01; SLC7A13; ENSG00000164893; CTA
FTLIAGEL

SEQ ID NO: 80082 - protein, 8 aa, Homo sapiens
  Table A; Target 80082; HLA-C*01:02; SLC7A13; ENSG00000164893; CTA
FTLIAGEL

SEQ ID NO: 80083 - protein, 8 aa, Homo sapiens
  Table A; Target 80083; HLA-C*03:03; SLC7A13; ENSG00000164893; CTA
FTLIAGEL

SEQ ID NO: 80084 - protein, 8 aa, Homo sapiens
  Table A; Target 80084; HLA-C*03:04; SLC7A13; ENSG00000164893; CTA
FTLIAGEL

SEQ ID NO: 80085 - protein, 8 aa, Homo sapiens
  Table A; Target 80085; HLA-C*04:01; SLC7A13; ENSG00000164893; CTA
FTLIAGEL

SEQ ID NO: 80086 - protein, 8 aa, Homo sapiens
  Table A; Target 80086; HLA-C*06:02; SLC7A13; ENSG00000164893; CTA
FTLIAGEL

SEQ ID NO: 80087 - protein, 8 aa, Homo sapiens
  Table A; Target 80087; HLA-C*07:02; SLC7A13; ENSG00000164893; CTA
FTLIAGEL

SEQ ID NO: 80088 - protein, 8 aa, Homo sapiens
  Table A; Target 80088; HLA-C*07:04; SLC7A13; ENSG00000164893; CTA
FTLIAGEL

SEQ ID NO: 80089 - protein, 8 aa, Homo sapiens
  Table A; Target 80089; HLA-C*14:02; SLC7A13; ENSG00000164893; CTA
FTLIAGEL

SEQ ID NO: 80090 - protein, 8 aa, Homo sapiens
  Table A; Target 80090; HLA-C*16:04; SLC7A13; ENSG00000164893; CTA
FTLIAGEL

SEQ ID NO: 80091 - protein, 9 aa, Homo sapiens
  Table A; Target 80091; HLA-A*01:01; SLC7A13; ENSG00000164893; CTA
FTLIAGELK

SEQ ID NO: 80092 - protein, 9 aa, Homo sapiens
  Table A; Target 80092; HLA-A*11:01; SLC7A13; ENSG00000164893; CTA
FTLIAGELK

SEQ ID NO: 80093 - protein, 8 aa, Homo sapiens
  Table A; Target 80093; HLA-B*08:01; SLC7A13; ENSG00000164893; CTA
FVSPKGVL

SEQ ID NO: 80094 - protein, 8 aa, Homo sapiens
  Table A; Target 80094; HLA-C*03:04; SLC7A13; ENSG00000164893; CTA
FVSPKGVL

SEQ ID NO: 80095 - protein, 8 aa, Homo sapiens
  Table A; Target 80095; HLA-C*16:01; SLC7A13; ENSG00000164893; CTA
FVSPKGVL

SEQ ID NO: 80096 - protein, 9 aa, Homo sapiens
  Table A; Target 80096; HLA-C*02:02; SLC7A13; ENSG00000164893; CTA
FVSPKGVLA

SEQ ID NO: 80097 - protein, 10 aa, Homo sapiens
  Table A; Target 80097; HLA-A*01:01; SLC7A13; ENSG00000164893; CTA
FVSPKGVLAY

SEQ ID NO: 80098 - protein, 10 aa, Homo sapiens
  Table A; Target 80098; HLA-A*03:01; SLC7A13; ENSG00000164893; CTA
FVSPKGVLAY

SEQ ID NO: 80099 - protein, 10 aa, Homo sapiens
  Table A; Target 80099; HLA-A*25:01; SLC7A13; ENSG00000164893; CTA
FVSPKGVLAY

SEQ ID NO: 80100 - protein, 10 aa, Homo sapiens
  Table A; Target 80100; HLA-A*26:01; SLC7A13; ENSG00000164893; CTA
FVSPKGVLAY

SEQ ID NO: 80101 - protein, 10 aa, Homo sapiens
  Table A; Target 80101; HLA-A*29:02; SLC7A13; ENSG00000164893; CTA
FVSPKGVLAY

SEQ ID NO: 80102 - protein, 10 aa, Homo sapiens
  Table A; Target 80102; HLA-A*30:02; SLC7A13; ENSG00000164893; CTA
FVSPKGVLAY

SEQ ID NO: 80103 - protein, 10 aa, Homo sapiens
  Table A; Target 80103; HLA-A*32:01; SLC7A13; ENSG00000164893; CTA
FVSPKGVLAY

SEQ ID NO: 80104 - protein, 10 aa, Homo sapiens
  Table A; Target 80104; HLA-B*15:01; SLC7A13; ENSG00000164893; CTA
FVSPKGVLAY

SEQ ID NO: 80105 - protein, 10 aa, Homo sapiens
  Table A; Target 80105; HLA-B*35:01; SLC7A13; ENSG00000164893; CTA
FVSPKGVLAY

SEQ ID NO: 80106 - protein, 10 aa, Homo sapiens
  Table A; Target 80106; HLA-B*46:01; SLC7A13; ENSG00000164893; CTA
FVSPKGVLAY

SEQ ID NO: 80107 - protein, 10 aa, Homo sapiens
  Table A; Target 80107; HLA-C*02:02; SLC7A13; ENSG00000164893; CTA
FVSPKGVLAY

SEQ ID NO: 80108 - protein, 10 aa, Homo sapiens
  Table A; Target 80108; HLA-C*07:04; SLC7A13; ENSG00000164893; CTA
FVSPKGVLAY

SEQ ID NO: 80109 - protein, 8 aa, Homo sapiens
  Table A; Target 80109; HLA-A*23:01; SLC7A13; ENSG00000164893; CTA
FYIPLIHF

SEQ ID NO: 80110 - protein, 8 aa, Homo sapiens
  Table A; Target 80110; HLA-A*24:02; SLC7A13; ENSG00000164893; CTA
FYIPLIHF

SEQ ID NO: 80111 - protein, 9 aa, Homo sapiens
  Table A; Target 80111; HLA-A*29:02; SLC7A13; ENSG00000164893; CTA
FYIPLIHFK

SEQ ID NO: 80112 - protein, 10 aa, Homo sapiens
  Table A; Target 80112; HLA-A*24:02; SLC7A13; ENSG00000164893; CTA
FYIPLIHFKI

SEQ ID NO: 80113 - protein, 9 aa, Homo sapiens
  Table A; Target 80113; HLA-A*03:01; SLC7A13; ENSG00000164893; CTA
GAGIFVSPK

SEQ ID NO: 80114 - protein, 9 aa, Homo sapiens
  Table A; Target 80114; HLA-A*03:02; SLC7A13; ENSG00000164893; CTA
GAGIFVSPK

SEQ ID NO: 80115 - protein, 9 aa, Homo sapiens
  Table A; Target 80115; HLA-A*11:01; SLC7A13; ENSG00000164893; CTA
GAGIFVSPK

SEQ ID NO: 80116 - protein, 9 aa, Homo sapiens
  Table A; Target 80116; HLA-B*27:02; SLC7A13; ENSG00000164893; CTA
GAGIFVSPK

SEQ ID NO: 80117 - protein, 9 aa, Homo sapiens
  Table A; Target 80117; HLA-C*07:06; SLC7A13; ENSG00000164893; CTA
GAGIFVSPK

SEQ ID NO: 80118 - protein, 9 aa, Homo sapiens
  Table A; Target 80118; HLA-A*31:01; SLC7A13; ENSG00000164893; CTA
GAQYYFLKR

SEQ ID NO: 80119 - protein, 9 aa, Homo sapiens
  Table A; Target 80119; HLA-A*02:01; SLC7A13; ENSG00000164893; CTA
GIFVSPKGV

SEQ ID NO: 80120 - protein, 9 aa, Homo sapiens
  Table A; Target 80120; HLA-A*02:03; SLC7A13; ENSG00000164893; CTA
GIFVSPKGV

SEQ ID NO: 80121 - protein, 9 aa, Homo sapiens
  Table A; Target 80121; HLA-B*13:02; SLC7A13; ENSG00000164893; CTA
GIFVSPKGV

SEQ ID NO: 80122 - protein, 9 aa, Homo sapiens
  Table A; Target 80122; HLA-A*02:01; SLC7A13; ENSG00000164893; CTA
GLLFYIPLI

SEQ ID NO: 80123 - protein, 9 aa, Homo sapiens
  Table A; Target 80123; HLA-A*02:03; SLC7A13; ENSG00000164893; CTA
GLLFYIPLI

SEQ ID NO: 80124 - protein, 9 aa, Homo sapiens
  Table A; Target 80124; HLA-A*02:04; SLC7A13; ENSG00000164893; CTA
GLLFYIPLI

SEQ ID NO: 80125 - protein, 9 aa, Homo sapiens
  Table A; Target 80125; HLA-A*02:07; SLC7A13; ENSG00000164893; CTA
GLLFYIPLI

SEQ ID NO: 80126 - protein, 8 aa, Homo sapiens
  Table A; Target 80126; HLA-B*13:02; SLC7A13; ENSG00000164893; CTA
GLVVIPLV

SEQ ID NO: 80127 - protein, 9 aa, Homo sapiens
  Table A; Target 80127; HLA-A*03:01; SLC7A13; ENSG00000164893; CTA
GLVVIPLVK

SEQ ID NO: 80128 - protein, 9 aa, Homo sapiens
  Table A; Target 80128; HLA-A*03:02; SLC7A13; ENSG00000164893; CTA
GLVVIPLVK

SEQ ID NO: 80129 - protein, 9 aa, Homo sapiens
  Table A; Target 80129; HLA-A*11:01; SLC7A13; ENSG00000164893; CTA
GLVVIPLVK

SEQ ID NO: 80130 - protein, 9 aa, Homo sapiens
  Table A; Target 80130; HLA-A*26:01; SLC7A13; ENSG00000164893; CTA
GQALLLAEY

SEQ ID NO: 80131 - protein, 9 aa, Homo sapiens
  Table A; Target 80131; HLA-A*29:02; SLC7A13; ENSG00000164893; CTA
GQALLLAEY

SEQ ID NO: 80132 - protein, 9 aa, Homo sapiens
  Table A; Target 80132; HLA-A*30:02; SLC7A13; ENSG00000164893; CTA
GQALLLAEY

SEQ ID NO: 80133 - protein, 9 aa, Homo sapiens
  Table A; Target 80133; HLA-A*32:01; SLC7A13; ENSG00000164893; CTA
GQALLLAEY

SEQ ID NO: 80134 - protein, 9 aa, Homo sapiens
  Table A; Target 80134; HLA-B*13:02; SLC7A13; ENSG00000164893; CTA
GQALLLAEY

SEQ ID NO: 80135 - protein, 9 aa, Homo sapiens
  Table A; Target 80135; HLA-B*15:01; SLC7A13; ENSG00000164893; CTA
GQALLLAEY

SEQ ID NO: 80136 - protein, 9 aa, Homo sapiens
  Table A; Target 80136; HLA-B*15:03; SLC7A13; ENSG00000164893; CTA
GQALLLAEY

SEQ ID NO: 80137 - protein, 9 aa, Homo sapiens
  Table A; Target 80137; HLA-B*18:01; SLC7A13; ENSG00000164893; CTA
GQALLLAEY

SEQ ID NO: 80138 - protein, 9 aa, Homo sapiens
  Table A; Target 80138; HLA-B*27:02; SLC7A13; ENSG00000164893; CTA
GQALLLAEY

SEQ ID NO: 80139 - protein, 9 aa, Homo sapiens
  Table A; Target 80139; HLA-B*27:05; SLC7A13; ENSG00000164893; CTA
GQALLLAEY

SEQ ID NO: 80140 - protein, 9 aa, Homo sapiens
  Table A; Target 80140; HLA-B*39:01; SLC7A13; ENSG00000164893; CTA
GQALLLAEY

SEQ ID NO: 80141 - protein, 9 aa, Homo sapiens
  Table A; Target 80141; HLA-B*44:02; SLC7A13; ENSG00000164893; CTA
GQALLLAEY

SEQ ID NO: 80142 - protein, 9 aa, Homo sapiens
  Table A; Target 80142; HLA-B*44:03; SLC7A13; ENSG00000164893; CTA
GQALLLAEY

SEQ ID NO: 80143 - protein, 9 aa, Homo sapiens
  Table A; Target 80143; HLA-B*46:01; SLC7A13; ENSG00000164893; CTA
GQALLLAEY

SEQ ID NO: 80144 - protein, 9 aa, Homo sapiens
  Table A; Target 80144; HLA-C*02:02; SLC7A13; ENSG00000164893; CTA
GQALLLAEY

SEQ ID NO: 80145 - protein, 9 aa, Homo sapiens
  Table A; Target 80145; HLA-C*07:04; SLC7A13; ENSG00000164893; CTA
GQALLLAEY

SEQ ID NO: 80146 - protein, 9 aa, Homo sapiens
  Table A; Target 80146; HLA-C*14:02; SLC7A13; ENSG00000164893; CTA
GQALLLAEY

SEQ ID NO: 80147 - protein, 9 aa, Homo sapiens
  Table A; Target 80147; HLA-C*16:04; SLC7A13; ENSG00000164893; CTA
GQALLLAEY

SEQ ID NO: 80148 - protein, 11 aa, Homo sapiens
  Table A; Target 80148; HLA-B*13:02; SLC7A13; ENSG00000164893; CTA
GQALLLAEYSI

SEQ ID NO: 80149 - protein, 9 aa, Homo sapiens
  Table A; Target 80149; HLA-B*13:02; SLC7A13; ENSG00000164893; CTA
GQLPLLFNT

SEQ ID NO: 80150 - protein, 10 aa, Homo sapiens
  Table A; Target 80150; HLA-A*02:04; SLC7A13; ENSG00000164893; CTA
GQLPLLFNTL

SEQ ID NO: 80151 - protein, 10 aa, Homo sapiens
  Table A; Target 80151; HLA-A*30:01; SLC7A13; ENSG00000164893; CTA
GQLPLLFNTL

SEQ ID NO: 80152 - protein, 10 aa, Homo sapiens
  Table A; Target 80152; HLA-B*13:02; SLC7A13; ENSG00000164893; CTA
GQLPLLFNTL

SEQ ID NO: 80153 - protein, 10 aa, Homo sapiens
  Table A; Target 80153; HLA-B*15:01; SLC7A13; ENSG00000164893; CTA
GQLPLLFNTL

SEQ ID NO: 80154 - protein, 10 aa, Homo sapiens
  Table A; Target 80154; HLA-B*40:02; SLC7A13; ENSG00000164893; CTA
GQLPLLFNTL

SEQ ID NO: 80155 - protein, 10 aa, Homo sapiens
  Table A; Target 80155; HLA-B*57:01; SLC7A13; ENSG00000164893; CTA
GSTVAFLNLW

SEQ ID NO: 80156 - protein, 9 aa, Homo sapiens
  Table A; Target 80156; HLA-A*68:02; SLC7A13; ENSG00000164893; CTA
GTSFLLINI

SEQ ID NO: 80157 - protein, 8 aa, Homo sapiens
  Table A; Target 80157; HLA-C*03:04; SLC7A13; ENSG00000164893; CTA
GVVAGQAL

SEQ ID NO: 80158 - protein, 9 aa, Homo sapiens
  Table A; Target 80158; HLA-B*15:01; SLC7A13; ENSG00000164893; CTA
GVVAGQALL

SEQ ID NO: 80159 - protein, 9 aa, Homo sapiens
  Table A; Target 80159; HLA-B*40:01; SLC7A13; ENSG00000164893; CTA
GVVAGQALL

SEQ ID NO: 80160 - protein, 9 aa, Homo sapiens
  Table A; Target 80160; HLA-A*03:01; SLC7A13; ENSG00000164893; CTA
GVVFLIRGK

SEQ ID NO: 80161 - protein, 9 aa, Homo sapiens
  Table A; Target 80161; HLA-A*11:01; SLC7A13; ENSG00000164893; CTA
GVVFLIRGK

SEQ ID NO: 80162 - protein, 11 aa, Homo sapiens
  Table A; Target 80162; HLA-A*24:02; SLC7A13; ENSG00000164893; CTA
GYFAYSGGACF

SEQ ID NO: 80163 - protein, 10 aa, Homo sapiens
  Table A; Target 80163; HLA-A*26:01; SLC7A13; ENSG00000164893; CTA
HLIQAIFQGY

SEQ ID NO: 80164 - protein, 10 aa, Homo sapiens
  Table A; Target 80164; HLA-A*29:02; SLC7A13; ENSG00000164893; CTA
HLIQAIFQGY

SEQ ID NO: 80165 - protein, 9 aa, Homo sapiens
  Table A; Target 80165; HLA-A*26:01; SLC7A13; ENSG00000164893; CTA
HSSPFTAVL

SEQ ID NO: 80166 - protein, 9 aa, Homo sapiens
  Table A; Target 80166; HLA-A*32:01; SLC7A13; ENSG00000164893; CTA
HSSPFTAVL

SEQ ID NO: 80167 - protein, 9 aa, Homo sapiens
  Table A; Target 80167; HLA-A*68:02; SLC7A13; ENSG00000164893; CTA
HSSPFTAVL

SEQ ID NO: 80168 - protein, 9 aa, Homo sapiens
  Table A; Target 80168; HLA-B*35:01; SLC7A13; ENSG00000164893; CTA
HSSPFTAVL

SEQ ID NO: 80169 - protein, 9 aa, Homo sapiens
  Table A; Target 80169; HLA-B*35:03; SLC7A13; ENSG00000164893; CTA
HSSPFTAVL

SEQ ID NO: 80170 - protein, 9 aa, Homo sapiens
  Table A; Target 80170; HLA-B*38:01; SLC7A13; ENSG00000164893; CTA
HSSPFTAVL

SEQ ID NO: 80171 - protein, 9 aa, Homo sapiens
  Table A; Target 80171; HLA-B*39:01; SLC7A13; ENSG00000164893; CTA
HSSPFTAVL

SEQ ID NO: 80172 - protein, 9 aa, Homo sapiens
  Table A; Target 80172; HLA-B*40:01; SLC7A13; ENSG00000164893; CTA
HSSPFTAVL

SEQ ID NO: 80173 - protein, 9 aa, Homo sapiens
  Table A; Target 80173; HLA-B*46:01; SLC7A13; ENSG00000164893; CTA
HSSPFTAVL

SEQ ID NO: 80174 - protein, 9 aa, Homo sapiens
  Table A; Target 80174; HLA-B*57:01; SLC7A13; ENSG00000164893; CTA
HSSPFTAVL

SEQ ID NO: 80175 - protein, 9 aa, Homo sapiens
  Table A; Target 80175; HLA-B*58:01; SLC7A13; ENSG00000164893; CTA
HSSPFTAVL

SEQ ID NO: 80176 - protein, 9 aa, Homo sapiens
  Table A; Target 80176; HLA-C*02:02; SLC7A13; ENSG00000164893; CTA
HSSPFTAVL

SEQ ID NO: 80177 - protein, 9 aa, Homo sapiens
  Table A; Target 80177; HLA-C*03:03; SLC7A13; ENSG00000164893; CTA
HSSPFTAVL

SEQ ID NO: 80178 - protein, 9 aa, Homo sapiens
  Table A; Target 80178; HLA-C*03:04; SLC7A13; ENSG00000164893; CTA
HSSPFTAVL

SEQ ID NO: 80179 - protein, 9 aa, Homo sapiens
  Table A; Target 80179; HLA-C*05:01; SLC7A13; ENSG00000164893; CTA
HSSPFTAVL

SEQ ID NO: 80180 - protein, 9 aa, Homo sapiens
  Table A; Target 80180; HLA-C*07:04; SLC7A13; ENSG00000164893; CTA
HSSPFTAVL

SEQ ID NO: 80181 - protein, 9 aa, Homo sapiens
  Table A; Target 80181; HLA-C*07:06; SLC7A13; ENSG00000164893; CTA
HSSPFTAVL

SEQ ID NO: 80182 - protein, 9 aa, Homo sapiens
  Table A; Target 80182; HLA-C*12:03; SLC7A13; ENSG00000164893; CTA
HSSPFTAVL

SEQ ID NO: 80183 - protein, 9 aa, Homo sapiens
  Table A; Target 80183; HLA-C*16:01; SLC7A13; ENSG00000164893; CTA
HSSPFTAVL

SEQ ID NO: 80184 - protein, 9 aa, Homo sapiens
  Table A; Target 80184; HLA-C*16:02; SLC7A13; ENSG00000164893; CTA
HSSPFTAVL

SEQ ID NO: 80185 - protein, 9 aa, Homo sapiens
  Table A; Target 80185; HLA-C*16:04; SLC7A13; ENSG00000164893; CTA
HSSPFTAVL

SEQ ID NO: 80186 - protein, 10 aa, Homo sapiens
  Table A; Target 80186; HLA-A*68:02; SLC7A13; ENSG00000164893; CTA
HSSPFTAVLL

SEQ ID NO: 80187 - protein, 9 aa, Homo sapiens
  Table A; Target 80187; HLA-A*31:01; SLC7A13; ENSG00000164893; CTA
IAGELKKPR

SEQ ID NO: 80188 - protein, 9 aa, Homo sapiens
  Table A; Target 80188; HLA-A*33:01; SLC7A13; ENSG00000164893; CTA
IAGELKKPR

SEQ ID NO: 80189 - protein, 9 aa, Homo sapiens
  Table A; Target 80189; HLA-A*33:03; SLC7A13; ENSG00000164893; CTA
IAGELKKPR

SEQ ID NO: 80190 - protein, 8 aa, Homo sapiens
  Table A; Target 80190; HLA-B*13:02; SLC7A13; ENSG00000164893; CTA
IASSVLKV

SEQ ID NO: 80191 - protein, 8 aa, Homo sapiens
  Table A; Target 80191; HLA-B*49:01; SLC7A13; ENSG00000164893; CTA
IASSVLKV

SEQ ID NO: 80192 - protein, 8 aa, Homo sapiens
  Table A; Target 80192; HLA-B*51:01; SLC7A13; ENSG00000164893; CTA
IASSVLKV

SEQ ID NO: 80193 - protein, 8 aa, Homo sapiens
  Table A; Target 80193; HLA-C*02:02; SLC7A13; ENSG00000164893; CTA
IASSVLKV

SEQ ID NO: 80194 - protein, 8 aa, Homo sapiens
  Table A; Target 80194; HLA-C*05:01; SLC7A13; ENSG00000164893; CTA
IASSVLKV

SEQ ID NO: 80195 - protein, 8 aa, Homo sapiens
  Table A; Target 80195; HLA-C*06:02; SLC7A13; ENSG00000164893; CTA
IASSVLKV

SEQ ID NO: 80196 - protein, 8 aa, Homo sapiens
  Table A; Target 80196; HLA-C*12:03; SLC7A13; ENSG00000164893; CTA
IASSVLKV

SEQ ID NO: 80197 - protein, 8 aa, Homo sapiens
  Table A; Target 80197; HLA-C*16:02; SLC7A13; ENSG00000164893; CTA
IASSVLKV

SEQ ID NO: 80198 - protein, 9 aa, Homo sapiens
  Table A; Target 80198; HLA-C*16:02; SLC7A13; ENSG00000164893; CTA
IASSVLKVS

SEQ ID NO: 80199 - protein, 10 aa, Homo sapiens
  Table A; Target 80199; HLA-C*16:02; SLC7A13; ENSG00000164893; CTA
IASSVLKVSI

SEQ ID NO: 80200 - protein, 8 aa, Homo sapiens
  Table A; Target 80200; HLA-A*29:02; SLC7A13; ENSG00000164893; CTA
IFQGYFAY

SEQ ID NO: 80201 - protein, 8 aa, Homo sapiens
  Table A; Target 80201; HLA-C*14:02; SLC7A13; ENSG00000164893; CTA
IFQGYFAY

SEQ ID NO: 80202 - protein, 9 aa, Homo sapiens
  Table A; Target 80202; HLA-A*23:01; SLC7A13; ENSG00000164893; CTA
IFVSPKGVL

SEQ ID NO: 80203 - protein, 9 aa, Homo sapiens
  Table A; Target 80203; HLA-C*14:02; SLC7A13; ENSG00000164893; CTA
IFVSPKGVL

SEQ ID NO: 80204 - protein, 11 aa, Homo sapiens
  Table A; Target 80204; HLA-A*23:01; SLC7A13; ENSG00000164893; CTA
IFVSPKGVLAY

SEQ ID NO: 80205 - protein, 11 aa, Homo sapiens
  Table A; Target 80205; HLA-A*24:02; SLC7A13; ENSG00000164893; CTA
IFVSPKGVLAY

SEQ ID NO: 80206 - protein, 11 aa, Homo sapiens
  Table A; Target 80206; HLA-A*29:02; SLC7A13; ENSG00000164893; CTA
IFVSPKGVLAY

SEQ ID NO: 80207 - protein, 11 aa, Homo sapiens
  Table A; Target 80207; HLA-A*30:02; SLC7A13; ENSG00000164893; CTA
IFVSPKGVLAY

SEQ ID NO: 80208 - protein, 9 aa, Homo sapiens
  Table A; Target 80208; HLA-B*27:05; SLC7A13; ENSG00000164893; CTA
IGAGIFVSP

SEQ ID NO: 80209 - protein, 10 aa, Homo sapiens
  Table A; Target 80209; HLA-B*27:02; SLC7A13; ENSG00000164893; CTA
IGAGIFVSPK

SEQ ID NO: 80210 - protein, 8 aa, Homo sapiens
  Table A; Target 80210; HLA-B*15:01; SLC7A13; ENSG00000164893; CTA
ILAMTSTL

SEQ ID NO: 80211 - protein, 8 aa, Homo sapiens
  Table A; Target 80211; HLA-B*46:01; SLC7A13; ENSG00000164893; CTA
ILAMTSTL

SEQ ID NO: 80212 - protein, 8 aa, Homo sapiens
  Table A; Target 80212; HLA-C*01:02; SLC7A13; ENSG00000164893; CTA
ILAMTSTL

SEQ ID NO: 80213 - protein, 8 aa, Homo sapiens
  Table A; Target 80213; HLA-C*03:03; SLC7A13; ENSG00000164893; CTA
ILAMTSTL

SEQ ID NO: 80214 - protein, 8 aa, Homo sapiens
  Table A; Target 80214; HLA-C*03:04; SLC7A13; ENSG00000164893; CTA
ILAMTSTL

SEQ ID NO: 80215 - protein, 8 aa, Homo sapiens
  Table A; Target 80215; HLA-C*07:04; SLC7A13; ENSG00000164893; CTA
ILAMTSTL

SEQ ID NO: 80216 - protein, 8 aa, Homo sapiens
  Table A; Target 80216; HLA-C*14:02; SLC7A13; ENSG00000164893; CTA
ILAMTSTL

SEQ ID NO: 80217 - protein, 8 aa, Homo sapiens
  Table A; Target 80217; HLA-C*16:02; SLC7A13; ENSG00000164893; CTA
ILAMTSTL

SEQ ID NO: 80218 - protein, 10 aa, Homo sapiens
  Table A; Target 80218; HLA-A*02:01; SLC7A13; ENSG00000164893; CTA
ILSFISLTGV

SEQ ID NO: 80219 - protein, 10 aa, Homo sapiens
  Table A; Target 80219; HLA-A*02:03; SLC7A13; ENSG00000164893; CTA
ILSFISLTGV

SEQ ID NO: 80220 - protein, 10 aa, Homo sapiens
  Table A; Target 80220; HLA-A*02:04; SLC7A13; ENSG00000164893; CTA
ILSFISLTGV

SEQ ID NO: 80221 - protein, 9 aa, Homo sapiens
  Table A; Target 80221; HLA-A*02:01; SLC7A13; ENSG00000164893; CTA
ILSSDAVAI

SEQ ID NO: 80222 - protein, 9 aa, Homo sapiens
  Table A; Target 80222; HLA-B*13:02; SLC7A13; ENSG00000164893; CTA
ILSSDAVAI

SEQ ID NO: 80223 - protein, 9 aa, Homo sapiens
  Table A; Target 80223; HLA-B*35:03; SLC7A13; ENSG00000164893; CTA
ILSSDAVAI

SEQ ID NO: 80224 - protein, 9 aa, Homo sapiens
  Table A; Target 80224; HLA-B*38:01; SLC7A13; ENSG00000164893; CTA
ILSSDAVAI

SEQ ID NO: 80225 - protein, 9 aa, Homo sapiens
  Table A; Target 80225; HLA-B*55:01; SLC7A13; ENSG00000164893; CTA
ILSSDAVAI

SEQ ID NO: 80226 - protein, 11 aa, Homo sapiens
  Table A; Target 80226; HLA-A*32:01; SLC7A13; ENSG00000164893; CTA
ILSSDAVAITW

SEQ ID NO: 80227 - protein, 11 aa, Homo sapiens
  Table A; Target 80227; HLA-B*44:02; SLC7A13; ENSG00000164893; CTA
ILSSDAVAITW

SEQ ID NO: 80228 - protein, 11 aa, Homo sapiens
  Table A; Target 80228; HLA-B*44:03; SLC7A13; ENSG00000164893; CTA
ILSSDAVAITW

SEQ ID NO: 80229 - protein, 11 aa, Homo sapiens
  Table A; Target 80229; HLA-B*57:01; SLC7A13; ENSG00000164893; CTA
ILSSDAVAITW

SEQ ID NO: 80230 - protein, 11 aa, Homo sapiens
  Table A; Target 80230; HLA-B*58:01; SLC7A13; ENSG00000164893; CTA
ILSSDAVAITW

SEQ ID NO: 80231 - protein, 9 aa, Homo sapiens
  Table A; Target 80231; HLA-A*02:01; SLC7A13; ENSG00000164893; CTA
ILTSLIDLI

SEQ ID NO: 80232 - protein, 9 aa, Homo sapiens
  Table A; Target 80232; HLA-A*02:04; SLC7A13; ENSG00000164893; CTA
ILTSLIDLI

SEQ ID NO: 80233 - protein, 9 aa, Homo sapiens
  Table A; Target 80233; HLA-B*13:02; SLC7A13; ENSG00000164893; CTA
ILTSLIDLI

SEQ ID NO: 80234 - protein, 10 aa, Homo sapiens
  Table A; Target 80234; HLA-A*02:03; SLC7A13; ENSG00000164893; CTA
ILTSRGVKEV

SEQ ID NO: 80235 - protein, 10 aa, Homo sapiens
  Table A; Target 80235; HLA-A*02:07; SLC7A13; ENSG00000164893; CTA
IMPFAISTSL

SEQ ID NO: 80236 - protein, 10 aa, Homo sapiens
  Table A; Target 80236; HLA-C*01:02; SLC7A13; ENSG00000164893; CTA
IMPFAISTSL

SEQ ID NO: 80237 - protein, 11 aa, Homo sapiens
  Table A; Target 80237; HLA-A*24:02; SLC7A13; ENSG00000164893; CTA
IMPFAISTSLF

SEQ ID NO: 80238 - protein, 9 aa, Homo sapiens
  Table A; Target 80238; HLA-B*07:02; SLC7A13; ENSG00000164893; CTA
IPKCIFTAL

SEQ ID NO: 80239 - protein, 9 aa, Homo sapiens
  Table A; Target 80239; HLA-B*08:01; SLC7A13; ENSG00000164893; CTA
IPKCIFTAL

SEQ ID NO: 80240 - protein, 9 aa, Homo sapiens
  Table A; Target 80240; HLA-C*07:02; SLC7A13; ENSG00000164893; CTA
IPKCIFTAL

SEQ ID NO: 80241 - protein, 8 aa, Homo sapiens
  Table A; Target 80241; HLA-B*51:01; SLC7A13; ENSG00000164893; CTA
IPLIHFKI

SEQ ID NO: 80242 - protein, 9 aa, Homo sapiens
  Table A; Target 80242; HLA-B*51:01; SLC7A13; ENSG00000164893; CTA
IPLVKSPNV

SEQ ID NO: 80243 - protein, 9 aa, Homo sapiens
  Table A; Target 80243; HLA-B*54:01; SLC7A13; ENSG00000164893; CTA
IPLVKSPNV

SEQ ID NO: 80244 - protein, 9 aa, Homo sapiens
  Table A; Target 80244; HLA-B*56:01; SLC7A13; ENSG00000164893; CTA
IPLVKSPNV

SEQ ID NO: 80245 - protein, 9 aa, Homo sapiens
  Table A; Target 80245; HLA-B*35:01; SLC7A13; ENSG00000164893; CTA
IPYKVFLSF

SEQ ID NO: 80246 - protein, 9 aa, Homo sapiens
  Table A; Target 80246; HLA-B*51:01; SLC7A13; ENSG00000164893; CTA
IPYKVFLSF

SEQ ID NO: 80247 - protein, 9 aa, Homo sapiens
  Table A; Target 80247; HLA-B*54:01; SLC7A13; ENSG00000164893; CTA
IPYKVFLSF

SEQ ID NO: 80248 - protein, 8 aa, Homo sapiens
  Table A; Target 80248; HLA-A*30:02; SLC7A13; ENSG00000164893; CTA
IQAIFQGY

SEQ ID NO: 80249 - protein, 8 aa, Homo sapiens
  Table A; Target 80249; HLA-B*15:01; SLC7A13; ENSG00000164893; CTA
IQAIFQGY

SEQ ID NO: 80250 - protein, 8 aa, Homo sapiens
  Table A; Target 80250; HLA-B*15:03; SLC7A13; ENSG00000164893; CTA
IQAIFQGY

SEQ ID NO: 80251 - protein, 8 aa, Homo sapiens
  Table A; Target 80251; HLA-B*18:01; SLC7A13; ENSG00000164893; CTA
IQAIFQGY

SEQ ID NO: 80252 - protein, 8 aa, Homo sapiens
  Table A; Target 80252; HLA-C*07:04; SLC7A13; ENSG00000164893; CTA
IQAIFQGY

SEQ ID NO: 80253 - protein, 8 aa, Homo sapiens
  Table A; Target 80253; HLA-C*16:04; SLC7A13; ENSG00000164893; CTA
IQAIFQGY

SEQ ID NO: 80254 - protein, 9 aa, Homo sapiens
  Table A; Target 80254; HLA-B*15:01; SLC7A13; ENSG00000164893; CTA
IQAIFQGYF

SEQ ID NO: 80255 - protein, 9 aa, Homo sapiens
  Table A; Target 80255; HLA-B*15:03; SLC7A13; ENSG00000164893; CTA
IQAIFQGYF

SEQ ID NO: 80256 - protein, 9 aa, Homo sapiens
  Table A; Target 80256; HLA-C*16:04; SLC7A13; ENSG00000164893; CTA
IQAIFQGYF

SEQ ID NO: 80257 - protein, 10 aa, Homo sapiens
  Table A; Target 80257; HLA-A*01:01; SLC7A13; ENSG00000164893; CTA
ISFPCSGAQY

SEQ ID NO: 80258 - protein, 10 aa, Homo sapiens
  Table A; Target 80258; HLA-A*30:02; SLC7A13; ENSG00000164893; CTA
ISFPCSGAQY

SEQ ID NO: 80259 - protein, 10 aa, Homo sapiens
  Table A; Target 80259; HLA-B*15:01; SLC7A13; ENSG00000164893; CTA
ISFPCSGAQY

SEQ ID NO: 80260 - protein, 10 aa, Homo sapiens
  Table A; Target 80260; HLA-B*15:03; SLC7A13; ENSG00000164893; CTA
ISFPCSGAQY

SEQ ID NO: 80261 - protein, 10 aa, Homo sapiens
  Table A; Target 80261; HLA-B*46:01; SLC7A13; ENSG00000164893; CTA
ISFPCSGAQY

SEQ ID NO: 80262 - protein, 10 aa, Homo sapiens
  Table A; Target 80262; HLA-B*58:01; SLC7A13; ENSG00000164893; CTA
ISFPCSGAQY

SEQ ID NO: 80263 - protein, 11 aa, Homo sapiens
  Table A; Target 80263; HLA-A*01:01; SLC7A13; ENSG00000164893; CTA
ISFPCSGAQYY

SEQ ID NO: 80264 - protein, 11 aa, Homo sapiens
  Table A; Target 80264; HLA-A*29:02; SLC7A13; ENSG00000164893; CTA
ISFPCSGAQYY

SEQ ID NO: 80265 - protein, 11 aa, Homo sapiens
  Table A; Target 80265; HLA-A*30:02; SLC7A13; ENSG00000164893; CTA
ISFPCSGAQYY

SEQ ID NO: 80266 - protein, 11 aa, Homo sapiens
  Table A; Target 80266; HLA-B*57:01; SLC7A13; ENSG00000164893; CTA
ISFPCSGAQYY

SEQ ID NO: 80267 - protein, 9 aa, Homo sapiens
  Table A; Target 80267; HLA-A*23:01; SLC7A13; ENSG00000164893; CTA
ISHLIQAIF

SEQ ID NO: 80268 - protein, 9 aa, Homo sapiens
  Table A; Target 80268; HLA-A*24:02; SLC7A13; ENSG00000164893; CTA
ISHLIQAIF

SEQ ID NO: 80269 - protein, 9 aa, Homo sapiens
  Table A; Target 80269; HLA-B*57:01; SLC7A13; ENSG00000164893; CTA
ISHLIQAIF

SEQ ID NO: 80270 - protein, 9 aa, Homo sapiens
  Table A; Target 80270; HLA-B*58:01; SLC7A13; ENSG00000164893; CTA
ISHLIQAIF

SEQ ID NO: 80271 - protein, 8 aa, Homo sapiens
  Table A; Target 80271; HLA-A*23:01; SLC7A13; ENSG00000164893; CTA
ISLTGVVF

SEQ ID NO: 80272 - protein, 8 aa, Homo sapiens
  Table A; Target 80272; HLA-B*15:03; SLC7A13; ENSG00000164893; CTA
ISLTGVVF

SEQ ID NO: 80273 - protein, 8 aa, Homo sapiens
  Table A; Target 80273; HLA-B*46:01; SLC7A13; ENSG00000164893; CTA
ISLTGVVF

SEQ ID NO: 80274 - protein, 8 aa, Homo sapiens
  Table A; Target 80274; HLA-B*57:01; SLC7A13; ENSG00000164893; CTA
ISLTGVVF

SEQ ID NO: 80275 - protein, 8 aa, Homo sapiens
  Table A; Target 80275; HLA-B*58:01; SLC7A13; ENSG00000164893; CTA
ISLTGVVF

SEQ ID NO: 80276 - protein, 8 aa, Homo sapiens
  Table A; Target 80276; HLA-C*03:04; SLC7A13; ENSG00000164893; CTA
ISLTGVVF

SEQ ID NO: 80277 - protein, 8 aa, Homo sapiens
  Table A; Target 80277; HLA-C*14:02; SLC7A13; ENSG00000164893; CTA
ISLTGVVF

SEQ ID NO: 80278 - protein, 8 aa, Homo sapiens
  Table A; Target 80278; HLA-C*16:01; SLC7A13; ENSG00000164893; CTA
ISLTGVVF

SEQ ID NO: 80279 - protein, 9 aa, Homo sapiens
  Table A; Target 80279; HLA-A*23:01; SLC7A13; ENSG00000164893; CTA
ISLTGVVFL

SEQ ID NO: 80280 - protein, 9 aa, Homo sapiens
  Table A; Target 80280; HLA-B*58:01; SLC7A13; ENSG00000164893; CTA
ISLTGVVFL

SEQ ID NO: 80281 - protein, 9 aa, Homo sapiens
  Table A; Target 80281; HLA-A*23:01; SLC7A13; ENSG00000164893; CTA
ISTSLFSNL

SEQ ID NO: 80282 - protein, 9 aa, Homo sapiens
  Table A; Target 80282; HLA-A*24:02; SLC7A13; ENSG00000164893; CTA
ISTSLFSNL

SEQ ID NO: 80283 - protein, 9 aa, Homo sapiens
  Table A; Target 80283; HLA-B*58:01; SLC7A13; ENSG00000164893; CTA
ISTSLFSNL

SEQ ID NO: 80284 - protein, 9 aa, Homo sapiens
  Table A; Target 80284; HLA-C*16:02; SLC7A13; ENSG00000164893; CTA
ISTSLFSNL

SEQ ID NO: 80285 - protein, 8 aa, Homo sapiens
  Table A; Target 80285; HLA-A*31:01; SLC7A13; ENSG00000164893; CTA
IVGILTSR

SEQ ID NO: 80286 - protein, 8 aa, Homo sapiens
  Table A; Target 80286; HLA-A*33:01; SLC7A13; ENSG00000164893; CTA
IVGILTSR

SEQ ID NO: 80287 - protein, 8 aa, Homo sapiens
  Table A; Target 80287; HLA-A*33:03; SLC7A13; ENSG00000164893; CTA
IVGILTSR

SEQ ID NO: 80288 - protein, 8 aa, Homo sapiens
  Table A; Target 80288; HLA-C*07:06; SLC7A13; ENSG00000164893; CTA
IVGILTSR

SEQ ID NO: 80289 - protein, 9 aa, Homo sapiens
  Table A; Target 80289; HLA-A*02:01; SLC7A13; ENSG00000164893; CTA
IVIDVGLVV

SEQ ID NO: 80290 - protein, 9 aa, Homo sapiens
  Table A; Target 80290; HLA-A*02:03; SLC7A13; ENSG00000164893; CTA
IVIDVGLVV

SEQ ID NO: 80291 - protein, 9 aa, Homo sapiens
  Table A; Target 80291; HLA-A*02:07; SLC7A13; ENSG00000164893; CTA
IVIDVGLVV

SEQ ID NO: 80292 - protein, 9 aa, Homo sapiens
  Table A; Target 80292; HLA-A*23:01; SLC7A13; ENSG00000164893; CTA
IVIDVGLVV

SEQ ID NO: 80293 - protein, 9 aa, Homo sapiens
  Table A; Target 80293; HLA-A*26:01; SLC7A13; ENSG00000164893; CTA
IVIDVGLVV

SEQ ID NO: 80294 - protein, 9 aa, Homo sapiens
  Table A; Target 80294; HLA-A*30:01; SLC7A13; ENSG00000164893; CTA
IVIDVGLVV

SEQ ID NO: 80295 - protein, 9 aa, Homo sapiens
  Table A; Target 80295; HLA-A*32:01; SLC7A13; ENSG00000164893; CTA
IVIDVGLVV

SEQ ID NO: 80296 - protein, 9 aa, Homo sapiens
  Table A; Target 80296; HLA-A*68:02; SLC7A13; ENSG00000164893; CTA
IVIDVGLVV

SEQ ID NO: 80297 - protein, 9 aa, Homo sapiens
  Table A; Target 80297; HLA-B*13:02; SLC7A13; ENSG00000164893; CTA
IVIDVGLVV

SEQ ID NO: 80298 - protein, 9 aa, Homo sapiens
  Table A; Target 80298; HLA-B*35:03; SLC7A13; ENSG00000164893; CTA
IVIDVGLVV

SEQ ID NO: 80299 - protein, 9 aa, Homo sapiens
  Table A; Target 80299; HLA-B*46:01; SLC7A13; ENSG00000164893; CTA
IVIDVGLVV

SEQ ID NO: 80300 - protein, 9 aa, Homo sapiens
  Table A; Target 80300; HLA-B*49:01; SLC7A13; ENSG00000164893; CTA
IVIDVGLVV

SEQ ID NO: 80301 - protein, 9 aa, Homo sapiens
  Table A; Target 80301; HLA-C*02:02; SLC7A13; ENSG00000164893; CTA
IVIDVGLVV

SEQ ID NO: 80302 - protein, 9 aa, Homo sapiens
  Table A; Target 80302; HLA-C*03:03; SLC7A13; ENSG00000164893; CTA
IVIDVGLVV

SEQ ID NO: 80303 - protein, 9 aa, Homo sapiens
  Table A; Target 80303; HLA-C*03:04; SLC7A13; ENSG00000164893; CTA
IVIDVGLVV

SEQ ID NO: 80304 - protein, 9 aa, Homo sapiens
  Table A; Target 80304; HLA-C*05:01; SLC7A13; ENSG00000164893; CTA
IVIDVGLVV

SEQ ID NO: 80305 - protein, 10 aa, Homo sapiens
  Table A; Target 80305; HLA-A*02:01; SLC7A13; ENSG00000164893; CTA
IVIDVGLVVI

SEQ ID NO: 80306 - protein, 10 aa, Homo sapiens
  Table A; Target 80306; HLA-A*23:01; SLC7A13; ENSG00000164893; CTA
IVIDVGLVVI

SEQ ID NO: 80307 - protein, 10 aa, Homo sapiens
  Table A; Target 80307; HLA-A*25:01; SLC7A13; ENSG00000164893; CTA
IVIDVGLVVI

SEQ ID NO: 80308 - protein, 10 aa, Homo sapiens
  Table A; Target 80308; HLA-A*68:02; SLC7A13; ENSG00000164893; CTA
IVIDVGLVVI

SEQ ID NO: 80309 - protein, 8 aa, Homo sapiens
  Table A; Target 80309; HLA-C*14:02; SLC7A13; ENSG00000164893; CTA
IYLASQEG

SEQ ID NO: 80310 - protein, 10 aa, Homo sapiens
  Table A; Target 80310; HLA-A*23:01; SLC7A13; ENSG00000164893; CTA
IYLASQEGQL

SEQ ID NO: 80311 - protein, 10 aa, Homo sapiens
  Table A; Target 80311; HLA-C*14:02; SLC7A13; ENSG00000164893; CTA
IYLASQEGQL

SEQ ID NO: 80312 - protein, 9 aa, Homo sapiens
  Table A; Target 80312; HLA-A*29:02; SLC7A13; ENSG00000164893; CTA
KSPNVHYVY

SEQ ID NO: 80313 - protein, 9 aa, Homo sapiens
  Table A; Target 80313; HLA-A*30:02; SLC7A13; ENSG00000164893; CTA
KSPNVHYVY

SEQ ID NO: 80314 - protein, 9 aa, Homo sapiens
  Table A; Target 80314; HLA-A*32:01; SLC7A13; ENSG00000164893; CTA
KSPNVHYVY

SEQ ID NO: 80315 - protein, 9 aa, Homo sapiens
  Table A; Target 80315; HLA-B*57:01; SLC7A13; ENSG00000164893; CTA
KSPNVHYVY

SEQ ID NO: 80316 - protein, 9 aa, Homo sapiens
  Table A; Target 80316; HLA-B*58:01; SLC7A13; ENSG00000164893; CTA
KSPNVHYVY

SEQ ID NO: 80317 - protein, 10 aa, Homo sapiens
  Table A; Target 80317; HLA-A*02:07; SLC7A13; ENSG00000164893; CTA
KSPNVHYVYV

SEQ ID NO: 80318 - protein, 8 aa, Homo sapiens
  Table A; Target 80318; HLA-B*08:01; SLC7A13; ENSG00000164893; CTA
LAIILTSL

SEQ ID NO: 80319 - protein, 8 aa, Homo sapiens
  Table A; Target 80319; HLA-B*46:01; SLC7A13; ENSG00000164893; CTA
LAIILTSL

SEQ ID NO: 80320 - protein, 8 aa, Homo sapiens
  Table A; Target 80320; HLA-B*51:01; SLC7A13; ENSG00000164893; CTA
LAIILTSL

SEQ ID NO: 80321 - protein, 8 aa, Homo sapiens
  Table A; Target 80321; HLA-C*03:03; SLC7A13; ENSG00000164893; CTA
LAIILTSL

SEQ ID NO: 80322 - protein, 8 aa, Homo sapiens
  Table A; Target 80322; HLA-C*03:04; SLC7A13; ENSG00000164893; CTA
LAIILTSL

SEQ ID NO: 80323 - protein, 9 aa, Homo sapiens
  Table A; Target 80323; HLA-B*51:01; SLC7A13; ENSG00000164893; CTA
LAIILTSLI

SEQ ID NO: 80324 - protein, 10 aa, Homo sapiens
  Table A; Target 80324; HLA-B*54:01; SLC7A13; ENSG00000164893; CTA
LAMTSTLCSA

SEQ ID NO: 80325 - protein, 8 aa, Homo sapiens
  Table A; Target 80325; HLA-B*51:01; SLC7A13; ENSG00000164893; CTA
LAYSCMNV

SEQ ID NO: 80326 - protein, 9 aa, Homo sapiens
  Table A; Target 80326; HLA-C*14:02; SLC7A13; ENSG00000164893; CTA
LFLGSGVVA

SEQ ID NO: 80327 - protein, 9 aa, Homo sapiens
  Table A; Target 80327; HLA-A*23:01; SLC7A13; ENSG00000164893; CTA
LFSNLLISI

SEQ ID NO: 80328 - protein, 9 aa, Homo sapiens
  Table A; Target 80328; HLA-A*29:02; SLC7A13; ENSG00000164893; CTA
LFYIPLIHF

SEQ ID NO: 80329 - protein, 9 aa, Homo sapiens
  Table A; Target 80329; HLA-B*07:02; SLC7A13; ENSG00000164893; CTA
LGSGVVAGQ

SEQ ID NO: 80330 - protein, 9 aa, Homo sapiens
  Table A; Target 80330; HLA-B*27:05; SLC7A13; ENSG00000164893; CTA
LGSGVVAGQ

SEQ ID NO: 80331 - protein, 9 aa, Homo sapiens
  Table A; Target 80331; HLA-C*06:02; SLC7A13; ENSG00000164893; CTA
LGSGVVAGQ

SEQ ID NO: 80332 - protein, 9 aa, Homo sapiens
  Table A; Target 80332; HLA-C*07:04; SLC7A13; ENSG00000164893; CTA
LGSGVVAGQ

SEQ ID NO: 80333 - protein, 11 aa, Homo sapiens
  Table A; Target 80333; HLA-C*03:04; SLC7A13; ENSG00000164893; CTA
LGSGVVAGQAL

SEQ ID NO: 80334 - protein, 9 aa, Homo sapiens
  Table A; Target 80334; HLA-A*02:07; SLC7A13; ENSG00000164893; CTA
LIDLINYIF

SEQ ID NO: 80335 - protein, 10 aa, Homo sapiens
  Table A; Target 80335; HLA-A*02:07; SLC7A13; ENSG00000164893; CTA
LIDLINYIFF

SEQ ID NO: 80336 - protein, 9 aa, Homo sapiens
  Table A; Target 80336; HLA-A*01:01; SLC7A13; ENSG00000164893; CTA
LIQAIFQGY

SEQ ID NO: 80337 - protein, 9 aa, Homo sapiens
  Table A; Target 80337; HLA-A*26:01; SLC7A13; ENSG00000164893; CTA
LIQAIFQGY

SEQ ID NO: 80338 - protein, 9 aa, Homo sapiens
  Table A; Target 80338; HLA-A*29:02; SLC7A13; ENSG00000164893; CTA
LIQAIFQGY

SEQ ID NO: 80339 - protein, 9 aa, Homo sapiens
  Table A; Target 80339; HLA-A*30:02; SLC7A13; ENSG00000164893; CTA
LIQAIFQGY

SEQ ID NO: 80340 - protein, 9 aa, Homo sapiens
  Table A; Target 80340; HLA-A*32:01; SLC7A13; ENSG00000164893; CTA
LIQAIFQGY

SEQ ID NO: 80341 - protein, 9 aa, Homo sapiens
  Table A; Target 80341; HLA-B*15:01; SLC7A13; ENSG00000164893; CTA
LIQAIFQGY

SEQ ID NO: 80342 - protein, 9 aa, Homo sapiens
  Table A; Target 80342; HLA-B*46:01; SLC7A13; ENSG00000164893; CTA
LIQAIFQGY

SEQ ID NO: 80343 - protein, 9 aa, Homo sapiens
  Table A; Target 80343; HLA-B*58:01; SLC7A13; ENSG00000164893; CTA
LIQAIFQGY

SEQ ID NO: 80344 - protein, 9 aa, Homo sapiens
  Table A; Target 80344; HLA-C*02:02; SLC7A13; ENSG00000164893; CTA
LIQAIFQGY

SEQ ID NO: 80345 - protein, 8 aa, Homo sapiens
  Table A; Target 80345; HLA-A*02:04; SLC7A13; ENSG00000164893; CTA
LLFYIPLI

SEQ ID NO: 80346 - protein, 10 aa, Homo sapiens
  Table A; Target 80346; HLA-A*02:04; SLC7A13; ENSG00000164893; CTA
LLFYIPLIHF

SEQ ID NO: 80347 - protein, 10 aa, Homo sapiens
  Table A; Target 80347; HLA-A*02:07; SLC7A13; ENSG00000164893; CTA
LLFYIPLIHF

SEQ ID NO: 80348 - protein, 10 aa, Homo sapiens
  Table A; Target 80348; HLA-A*02:03; SLC7A13; ENSG00000164893; CTA
LLINIIGAGI

SEQ ID NO: 80349 - protein, 10 aa, Homo sapiens
  Table A; Target 80349; HLA-A*02:04; SLC7A13; ENSG00000164893; CTA
LLINIIGAGI

SEQ ID NO: 80350 - protein, 8 aa, Homo sapiens
  Table A; Target 80350; HLA-A*02:04; SLC7A13; ENSG00000164893; CTA
LLVNISYL

SEQ ID NO: 80351 - protein, 11 aa, Homo sapiens
  Table A; Target 80351; HLA-A*02:04; SLC7A13; ENSG00000164893; CTA
LLVNISYLTVL

SEQ ID NO: 80352 - protein, 9 aa, Homo sapiens
  Table A; Target 80352; HLA-A*31:01; SLC7A13; ENSG00000164893; CTA
LMIGILRRR

SEQ ID NO: 80353 - protein, 8 aa, Homo sapiens
  Table A; Target 80353; HLA-B*51:01; SLC7A13; ENSG00000164893; CTA
LPDISHLI

SEQ ID NO: 80354 - protein, 10 aa, Homo sapiens
  Table A; Target 80354; HLA-B*54:01; SLC7A13; ENSG00000164893; CTA
LPDISHLIQA

SEQ ID NO: 80355 - protein, 10 aa, Homo sapiens
  Table A; Target 80355; HLA-B*56:01; SLC7A13; ENSG00000164893; CTA
LPDISHLIQA

SEQ ID NO: 80356 - protein, 8 aa, Homo sapiens
  Table A; Target 80356; HLA-B*08:01; SLC7A13; ENSG00000164893; CTA
LPKKCLAL

SEQ ID NO: 80357 - protein, 8 aa, Homo sapiens
  Table A; Target 80357; HLA-B*07:02; SLC7A13; ENSG00000164893; CTA
LPLLFNTL

SEQ ID NO: 80358 - protein, 8 aa, Homo sapiens
  Table A; Target 80358; HLA-B*08:01; SLC7A13; ENSG00000164893; CTA
LPLLFNTL

SEQ ID NO: 80359 - protein, 8 aa, Homo sapiens
  Table A; Target 80359; HLA-B*35:01; SLC7A13; ENSG00000164893; CTA
LPLLFNTL

SEQ ID NO: 80360 - protein, 8 aa, Homo sapiens
  Table A; Target 80360; HLA-B*35:03; SLC7A13; ENSG00000164893; CTA
LPLLFNTL

SEQ ID NO: 80361 - protein, 8 aa, Homo sapiens
  Table A; Target 80361; HLA-B*51:01; SLC7A13; ENSG00000164893; CTA
LPLLFNTL

SEQ ID NO: 80362 - protein, 8 aa, Homo sapiens
  Table A; Target 80362; HLA-B*54:01; SLC7A13; ENSG00000164893; CTA
LPLLFNTL

SEQ ID NO: 80363 - protein, 8 aa, Homo sapiens
  Table A; Target 80363; HLA-B*15:03; SLC7A13; ENSG00000164893; CTA
LPLVTVVY

SEQ ID NO: 80364 - protein, 8 aa, Homo sapiens
  Table A; Target 80364; HLA-B*18:01; SLC7A13; ENSG00000164893; CTA
LPLVTVVY

SEQ ID NO: 80365 - protein, 8 aa, Homo sapiens
  Table A; Target 80365; HLA-B*35:01; SLC7A13; ENSG00000164893; CTA
LPLVTVVY

SEQ ID NO: 80366 - protein, 8 aa, Homo sapiens
  Table A; Target 80366; HLA-B*51:01; SLC7A13; ENSG00000164893; CTA
LPLVTVVY

SEQ ID NO: 80367 - protein, 8 aa, Homo sapiens
  Table A; Target 80367; HLA-B*55:01; SLC7A13; ENSG00000164893; CTA
LPLVTVVY

SEQ ID NO: 80368 - protein, 8 aa, Homo sapiens
  Table A; Target 80368; HLA-C*03:03; SLC7A13; ENSG00000164893; CTA
LPLVTVVY

SEQ ID NO: 80369 - protein, 9 aa, Homo sapiens
  Table A; Target 80369; HLA-B*35:01; SLC7A13; ENSG00000164893; CTA
LPLVTVVYL

SEQ ID NO: 80370 - protein, 9 aa, Homo sapiens
  Table A; Target 80370; HLA-B*35:03; SLC7A13; ENSG00000164893; CTA
LPLVTVVYL

SEQ ID NO: 80371 - protein, 9 aa, Homo sapiens
  Table A; Target 80371; HLA-B*51:01; SLC7A13; ENSG00000164893; CTA
LPLVTVVYL

SEQ ID NO: 80372 - protein, 8 aa, Homo sapiens
  Table A; Target 80372; HLA-B*15:01; SLC7A13; ENSG00000164893; CTA
LQIASSVL

SEQ ID NO: 80373 - protein, 8 aa, Homo sapiens
  Table A; Target 80373; HLA-B*15:03; SLC7A13; ENSG00000164893; CTA
LQIASSVL

SEQ ID NO: 80374 - protein, 8 aa, Homo sapiens
  Table A; Target 80374; HLA-B*39:01; SLC7A13; ENSG00000164893; CTA
LQIASSVL

SEQ ID NO: 80375 - protein, 8 aa, Homo sapiens
  Table A; Target 80375; HLA-C*03:03; SLC7A13; ENSG00000164893; CTA
LQIASSVL

SEQ ID NO: 80376 - protein, 8 aa, Homo sapiens
  Table A; Target 80376; HLA-C*03:04; SLC7A13; ENSG00000164893; CTA
LQIASSVL

SEQ ID NO: 80377 - protein, 9 aa, Homo sapiens
  Table A; Target 80377; HLA-A*11:01; SLC7A13; ENSG00000164893; CTA
LQIASSVLK

SEQ ID NO: 80378 - protein, 10 aa, Homo sapiens
  Table A; Target 80378; HLA-A*02:03; SLC7A13; ENSG00000164893; CTA
LQIASSVLKV

SEQ ID NO: 80379 - protein, 10 aa, Homo sapiens
  Table A; Target 80379; HLA-B*13:02; SLC7A13; ENSG00000164893; CTA
LQIASSVLKV

SEQ ID NO: 80380 - protein, 9 aa, Homo sapiens
  Table A; Target 80380; HLA-A*02:03; SLC7A13; ENSG00000164893; CTA
LSFISLTGV

SEQ ID NO: 80381 - protein, 9 aa, Homo sapiens
  Table A; Target 80381; HLA-A*68:02; SLC7A13; ENSG00000164893; CTA
LSFISLTGV

SEQ ID NO: 80382 - protein, 11 aa, Homo sapiens
  Table A; Target 80382; HLA-B*57:01; SLC7A13; ENSG00000164893; CTA
LSFISLTGVVF

SEQ ID NO: 80383 - protein, 9 aa, Homo sapiens
  Table A; Target 80383; HLA-C*12:03; SLC7A13; ENSG00000164893; CTA
LSFPLATIV

SEQ ID NO: 80384 - protein, 10 aa, Homo sapiens
  Table A; Target 80384; HLA-A*23:01; SLC7A13; ENSG00000164893; CTA
LSSDAVAITW

SEQ ID NO: 80385 - protein, 10 aa, Homo sapiens
  Table A; Target 80385; HLA-A*25:01; SLC7A13; ENSG00000164893; CTA
LSSDAVAITW

SEQ ID NO: 80386 - protein, 10 aa, Homo sapiens
  Table A; Target 80386; HLA-B*27:02; SLC7A13; ENSG00000164893; CTA
LSSDAVAITW

SEQ ID NO: 80387 - protein, 10 aa, Homo sapiens
  Table A; Target 80387; HLA-B*44:02; SLC7A13; ENSG00000164893; CTA
LSSDAVAITW

SEQ ID NO: 80388 - protein, 10 aa, Homo sapiens
  Table A; Target 80388; HLA-B*44:03; SLC7A13; ENSG00000164893; CTA
LSSDAVAITW

SEQ ID NO: 80389 - protein, 10 aa, Homo sapiens
  Table A; Target 80389; HLA-B*57:01; SLC7A13; ENSG00000164893; CTA
LSSDAVAITW

SEQ ID NO: 80390 - protein, 10 aa, Homo sapiens
  Table A; Target 80390; HLA-B*58:01; SLC7A13; ENSG00000164893; CTA
LSSDAVAITW

SEQ ID NO: 80391 - protein, 10 aa, Homo sapiens
  Table A; Target 80391; HLA-C*07:06; SLC7A13; ENSG00000164893; CTA
LSSDAVAITW

SEQ ID NO: 80392 - protein, 10 aa, Homo sapiens
  Table A; Target 80392; HLA-C*16:04; SLC7A13; ENSG00000164893; CTA
LSSDAVAITW

SEQ ID NO: 80393 - protein, 10 aa, Homo sapiens
  Table A; Target 80393; HLA-A*01:01; SLC7A13; ENSG00000164893; CTA
LTSLIDLINY

SEQ ID NO: 80394 - protein, 11 aa, Homo sapiens
  Table A; Target 80394; HLA-B*57:01; SLC7A13; ENSG00000164893; CTA
LTSRGVKEVTW

SEQ ID NO: 80395 - protein, 9 aa, Homo sapiens
  Table A; Target 80395; HLA-A*30:02; SLC7A13; ENSG00000164893; CTA
LVKSPNVHY

SEQ ID NO: 80396 - protein, 9 aa, Homo sapiens
  Table A; Target 80396; HLA-A*32:01; SLC7A13; ENSG00000164893; CTA
LVKSPNVHY

SEQ ID NO: 80397 - protein, 9 aa, Homo sapiens
  Table A; Target 80397; HLA-B*15:01; SLC7A13; ENSG00000164893; CTA
LVKSPNVHY

SEQ ID NO: 80398 - protein, 9 aa, Homo sapiens
  Table A; Target 80398; HLA-B*46:01; SLC7A13; ENSG00000164893; CTA
LVKSPNVHY

SEQ ID NO: 80399 - protein, 9 aa, Homo sapiens
  Table A; Target 80399; HLA-C*02:02; SLC7A13; ENSG00000164893; CTA
LVKSPNVHY

SEQ ID NO: 80400 - protein, 9 aa, Homo sapiens
  Table A; Target 80400; HLA-C*07:04; SLC7A13; ENSG00000164893; CTA
LVKSPNVHY

SEQ ID NO: 80401 - protein, 9 aa, Homo sapiens
  Table A; Target 80401; HLA-C*12:03; SLC7A13; ENSG00000164893; CTA
LVKSPNVHY

SEQ ID NO: 80402 - protein, 11 aa, Homo sapiens
  Table A; Target 80402; HLA-A*29:02; SLC7A13; ENSG00000164893; CTA
LVKSPNVHYVY

SEQ ID NO: 80403 - protein, 9 aa, Homo sapiens
  Table A; Target 80403; HLA-A*01:01; SLC7A13; ENSG00000164893; CTA
LVLSGLLFY

SEQ ID NO: 80404 - protein, 9 aa, Homo sapiens
  Table A; Target 80404; HLA-A*29:02; SLC7A13; ENSG00000164893; CTA
LVLSGLLFY

SEQ ID NO: 80405 - protein, 10 aa, Homo sapiens
  Table A; Target 80405; HLA-A*02:04; SLC7A13; ENSG00000164893; CTA
LVLSGLLFYI

SEQ ID NO: 80406 - protein, 9 aa, Homo sapiens
  Table A; Target 80406; HLA-B*51:01; SLC7A13; ENSG00000164893; CTA
LVNISYLTV

SEQ ID NO: 80407 - protein, 8 aa, Homo sapiens
  Table A; Target 80407; HLA-B*54:01; SLC7A13; ENSG00000164893; CTA
MPFAISTS

SEQ ID NO: 80408 - protein, 9 aa, Homo sapiens
  Table A; Target 80408; HLA-A*23:01; SLC7A13; ENSG00000164893; CTA
MPFAISTSL

SEQ ID NO: 80409 - protein, 9 aa, Homo sapiens
  Table A; Target 80409; HLA-A*25:01; SLC7A13; ENSG00000164893; CTA
MPFAISTSL

SEQ ID NO: 80410 - protein, 9 aa, Homo sapiens
  Table A; Target 80410; HLA-A*30:01; SLC7A13; ENSG00000164893; CTA
MPFAISTSL

SEQ ID NO: 80411 - protein, 9 aa, Homo sapiens
  Table A; Target 80411; HLA-B*07:02; SLC7A13; ENSG00000164893; CTA
MPFAISTSL

SEQ ID NO: 80412 - protein, 9 aa, Homo sapiens
  Table A; Target 80412; HLA-B*08:01; SLC7A13; ENSG00000164893; CTA
MPFAISTSL

SEQ ID NO: 80413 - protein, 9 aa, Homo sapiens
  Table A; Target 80413; HLA-B*15:03; SLC7A13; ENSG00000164893; CTA
MPFAISTSL

SEQ ID NO: 80414 - protein, 9 aa, Homo sapiens
  Table A; Target 80414; HLA-B*18:01; SLC7A13; ENSG00000164893; CTA
MPFAISTSL

SEQ ID NO: 80415 - protein, 9 aa, Homo sapiens
  Table A; Target 80415; HLA-B*35:01; SLC7A13; ENSG00000164893; CTA
MPFAISTSL

SEQ ID NO: 80416 - protein, 9 aa, Homo sapiens
  Table A; Target 80416; HLA-B*35:03; SLC7A13; ENSG00000164893; CTA
MPFAISTSL

SEQ ID NO: 80417 - protein, 9 aa, Homo sapiens
  Table A; Target 80417; HLA-B*39:01; SLC7A13; ENSG00000164893; CTA
MPFAISTSL

SEQ ID NO: 80418 - protein, 9 aa, Homo sapiens
  Table A; Target 80418; HLA-B*46:01; SLC7A13; ENSG00000164893; CTA
MPFAISTSL

SEQ ID NO: 80419 - protein, 9 aa, Homo sapiens
  Table A; Target 80419; HLA-B*51:01; SLC7A13; ENSG00000164893; CTA
MPFAISTSL

SEQ ID NO: 80420 - protein, 9 aa, Homo sapiens
  Table A; Target 80420; HLA-B*54:01; SLC7A13; ENSG00000164893; CTA
MPFAISTSL

SEQ ID NO: 80421 - protein, 9 aa, Homo sapiens
  Table A; Target 80421; HLA-B*55:01; SLC7A13; ENSG00000164893; CTA
MPFAISTSL

SEQ ID NO: 80422 - protein, 9 aa, Homo sapiens
  Table A; Target 80422; HLA-B*56:01; SLC7A13; ENSG00000164893; CTA
MPFAISTSL

SEQ ID NO: 80423 - protein, 9 aa, Homo sapiens
  Table A; Target 80423; HLA-C*02:02; SLC7A13; ENSG00000164893; CTA
MPFAISTSL

SEQ ID NO: 80424 - protein, 9 aa, Homo sapiens
  Table A; Target 80424; HLA-C*03:03; SLC7A13; ENSG00000164893; CTA
MPFAISTSL

SEQ ID NO: 80425 - protein, 9 aa, Homo sapiens
  Table A; Target 80425; HLA-C*03:04; SLC7A13; ENSG00000164893; CTA
MPFAISTSL

SEQ ID NO: 80426 - protein, 9 aa, Homo sapiens
  Table A; Target 80426; HLA-C*07:02; SLC7A13; ENSG00000164893; CTA
MPFAISTSL

SEQ ID NO: 80427 - protein, 9 aa, Homo sapiens
  Table A; Target 80427; HLA-C*14:02; SLC7A13; ENSG00000164893; CTA
MPFAISTSL

SEQ ID NO: 80428 - protein, 10 aa, Homo sapiens
  Table A; Target 80428; HLA-B*35:01; SLC7A13; ENSG00000164893; CTA
MPFAISTSLF

SEQ ID NO: 80429 - protein, 10 aa, Homo sapiens
  Table A; Target 80429; HLA-B*35:03; SLC7A13; ENSG00000164893; CTA
MPFAISTSLF

SEQ ID NO: 80430 - protein, 10 aa, Homo sapiens
  Table A; Target 80430; HLA-B*51:01; SLC7A13; ENSG00000164893; CTA
MPFAISTSLF

SEQ ID NO: 80431 - protein, 10 aa, Homo sapiens
  Table A; Target 80431; HLA-B*54:01; SLC7A13; ENSG00000164893; CTA
MPFAISTSLF

SEQ ID NO: 80432 - protein, 11 aa, Homo sapiens
  Table A; Target 80432; HLA-B*54:01; SLC7A13; ENSG00000164893; CTA
MPFAISTSLFS

SEQ ID NO: 80433 - protein, 9 aa, Homo sapiens
  Table A; Target 80433; HLA-A*02:03; SLC7A13; ENSG00000164893; CTA
NIIGAGIFV

SEQ ID NO: 80434 - protein, 9 aa, Homo sapiens
  Table A; Target 80434; HLA-A*68:02; SLC7A13; ENSG00000164893; CTA
NIIGAGIFV

SEQ ID NO: 80435 - protein, 9 aa, Homo sapiens
  Table A; Target 80435; HLA-B*54:01; SLC7A13; ENSG00000164893; CTA
NSHSSPFTA

SEQ ID NO: 80436 - protein, 9 aa, Homo sapiens
  Table A; Target 80436; HLA-A*25:01; SLC7A13; ENSG00000164893; CTA
NVGVSLCVW

SEQ ID NO: 80437 - protein, 10 aa, Homo sapiens
  Table A; Target 80437; HLA-A*24:02; SLC7A13; ENSG00000164893; CTA
NYIFFTGSLW

SEQ ID NO: 80438 - protein, 10 aa, Homo sapiens
  Table A; Target 80438; HLA-A*29:02; SLC7A13; ENSG00000164893; CTA
NYIFFTGSLW

SEQ ID NO: 80439 - protein, 9 aa, Homo sapiens
  Table A; Target 80439; HLA-A*23:01; SLC7A13; ENSG00000164893; CTA
PFAISTSLF

SEQ ID NO: 80440 - protein, 9 aa, Homo sapiens
  Table A; Target 80440; HLA-A*24:02; SLC7A13; ENSG00000164893; CTA
PFAISTSLF

SEQ ID NO: 80441 - protein, 9 aa, Homo sapiens
  Table A; Target 80441; HLA-B*54:01; SLC7A13; ENSG00000164893; CTA
QAIFQGYFA

SEQ ID NO: 80442 - protein, 10 aa, Homo sapiens
  Table A; Target 80442; HLA-A*29:02; SLC7A13; ENSG00000164893; CTA
QAIFQGYFAY

SEQ ID NO: 80443 - protein, 10 aa, Homo sapiens
  Table A; Target 80443; HLA-A*30:02; SLC7A13; ENSG00000164893; CTA
QAIFQGYFAY

SEQ ID NO: 80444 - protein, 10 aa, Homo sapiens
  Table A; Target 80444; HLA-B*35:01; SLC7A13; ENSG00000164893; CTA
QAIFQGYFAY

SEQ ID NO: 80445 - protein, 8 aa, Homo sapiens
  Table A; Target 80445; HLA-A*30:02; SLC7A13; ENSG00000164893; CTA
QALLLAEY

SEQ ID NO: 80446 - protein, 8 aa, Homo sapiens
  Table A; Target 80446; HLA-B*15:01; SLC7A13; ENSG00000164893; CTA
QALLLAEY

SEQ ID NO: 80447 - protein, 8 aa, Homo sapiens
  Table A; Target 80447; HLA-B*15:03; SLC7A13; ENSG00000164893; CTA
QALLLAEY

SEQ ID NO: 80448 - protein, 8 aa, Homo sapiens
  Table A; Target 80448; HLA-B*18:01; SLC7A13; ENSG00000164893; CTA
QALLLAEY

SEQ ID NO: 80449 - protein, 8 aa, Homo sapiens
  Table A; Target 80449; HLA-B*35:01; SLC7A13; ENSG00000164893; CTA
QALLLAEY

SEQ ID NO: 80450 - protein, 8 aa, Homo sapiens
  Table A; Target 80450; HLA-B*46:01; SLC7A13; ENSG00000164893; CTA
QALLLAEY

SEQ ID NO: 80451 - protein, 8 aa, Homo sapiens
  Table A; Target 80451; HLA-C*07:01; SLC7A13; ENSG00000164893; CTA
QALLLAEY

SEQ ID NO: 80452 - protein, 8 aa, Homo sapiens
  Table A; Target 80452; HLA-C*14:02; SLC7A13; ENSG00000164893; CTA
QALLLAEY

SEQ ID NO: 80453 - protein, 8 aa, Homo sapiens
  Table A; Target 80453; HLA-A*30:01; SLC7A13; ENSG00000164893; CTA
QEGQLPLL

SEQ ID NO: 80454 - protein, 8 aa, Homo sapiens
  Table A; Target 80454; HLA-B*18:01; SLC7A13; ENSG00000164893; CTA
QEGQLPLL

SEQ ID NO: 80455 - protein, 8 aa, Homo sapiens
  Table A; Target 80455; HLA-B*40:01; SLC7A13; ENSG00000164893; CTA
QEGQLPLL

SEQ ID NO: 80456 - protein, 8 aa, Homo sapiens
  Table A; Target 80456; HLA-B*44:02; SLC7A13; ENSG00000164893; CTA
QEGQLPLL

SEQ ID NO: 80457 - protein, 8 aa, Homo sapiens
  Table A; Target 80457; HLA-B*44:03; SLC7A13; ENSG00000164893; CTA
QEGQLPLL

SEQ ID NO: 80458 - protein, 8 aa, Homo sapiens
  Table A; Target 80458; HLA-B*49:01; SLC7A13; ENSG00000164893; CTA
QEGQLPLL

SEQ ID NO: 80459 - protein, 9 aa, Homo sapiens
  Table A; Target 80459; HLA-A*24:02; SLC7A13; ENSG00000164893; CTA
QEGQLPLLF

SEQ ID NO: 80460 - protein, 9 aa, Homo sapiens
  Table A; Target 80460; HLA-A*30:01; SLC7A13; ENSG00000164893; CTA
QEGQLPLLF

SEQ ID NO: 80461 - protein, 9 aa, Homo sapiens
  Table A; Target 80461; HLA-B*18:01; SLC7A13; ENSG00000164893; CTA
QEGQLPLLF

SEQ ID NO: 80462 - protein, 9 aa, Homo sapiens
  Table A; Target 80462; HLA-B*27:02; SLC7A13; ENSG00000164893; CTA
QEGQLPLLF

SEQ ID NO: 80463 - protein, 9 aa, Homo sapiens
  Table A; Target 80463; HLA-B*37:01; SLC7A13; ENSG00000164893; CTA
QEGQLPLLF

SEQ ID NO: 80464 - protein, 9 aa, Homo sapiens
  Table A; Target 80464; HLA-B*38:01; SLC7A13; ENSG00000164893; CTA
QEGQLPLLF

SEQ ID NO: 80465 - protein, 9 aa, Homo sapiens
  Table A; Target 80465; HLA-B*40:01; SLC7A13; ENSG00000164893; CTA
QEGQLPLLF

SEQ ID NO: 80466 - protein, 9 aa, Homo sapiens
  Table A; Target 80466; HLA-B*44:02; SLC7A13; ENSG00000164893; CTA
QEGQLPLLF

SEQ ID NO: 80467 - protein, 9 aa, Homo sapiens
  Table A; Target 80467; HLA-B*44:03; SLC7A13; ENSG00000164893; CTA
QEGQLPLLF

SEQ ID NO: 80468 - protein, 9 aa, Homo sapiens
  Table A; Target 80468; HLA-B*49:01; SLC7A13; ENSG00000164893; CTA
QEGQLPLLF

SEQ ID NO: 80469 - protein, 9 aa, Homo sapiens
  Table A; Target 80469; HLA-C*16:04; SLC7A13; ENSG00000164893; CTA
QEGQLPLLF

SEQ ID NO: 80470 - protein, 9 aa, Homo sapiens
  Table A; Target 80470; HLA-A*29:02; SLC7A13; ENSG00000164893; CTA
QEPNLSIPY

SEQ ID NO: 80471 - protein, 9 aa, Homo sapiens
  Table A; Target 80471; HLA-B*18:01; SLC7A13; ENSG00000164893; CTA
QEPNLSIPY

SEQ ID NO: 80472 - protein, 9 aa, Homo sapiens
  Table A; Target 80472; HLA-B*44:02; SLC7A13; ENSG00000164893; CTA
QEPNLSIPY

SEQ ID NO: 80473 - protein, 9 aa, Homo sapiens
  Table A; Target 80473; HLA-B*44:03; SLC7A13; ENSG00000164893; CTA
QEPNLSIPY

SEQ ID NO: 80474 - protein, 9 aa, Homo sapiens
  Table A; Target 80474; HLA-C*07:01; SLC7A13; ENSG00000164893; CTA
QEPNLSIPY

SEQ ID NO: 80475 - protein, 8 aa, Homo sapiens
  Table A; Target 80475; HLA-A*03:02; SLC7A13; ENSG00000164893; CTA
QIASSVLK

SEQ ID NO: 80476 - protein, 8 aa, Homo sapiens
  Table A; Target 80476; HLA-A*11:01; SLC7A13; ENSG00000164893; CTA
QIASSVLK

SEQ ID NO: 80477 - protein, 9 aa, Homo sapiens
  Table A; Target 80477; HLA-A*02:01; SLC7A13; ENSG00000164893; CTA
QIASSVLKV

SEQ ID NO: 80478 - protein, 9 aa, Homo sapiens
  Table A; Target 80478; HLA-A*02:03; SLC7A13; ENSG00000164893; CTA
QIASSVLKV

SEQ ID NO: 80479 - protein, 9 aa, Homo sapiens
  Table A; Target 80479; HLA-A*02:04; SLC7A13; ENSG00000164893; CTA
QIASSVLKV

SEQ ID NO: 80480 - protein, 9 aa, Homo sapiens
  Table A; Target 80480; HLA-A*02:07; SLC7A13; ENSG00000164893; CTA
QIASSVLKV

SEQ ID NO: 80481 - protein, 9 aa, Homo sapiens
  Table A; Target 80481; HLA-A*03:01; SLC7A13; ENSG00000164893; CTA
QIASSVLKV

SEQ ID NO: 80482 - protein, 9 aa, Homo sapiens
  Table A; Target 80482; HLA-A*26:01; SLC7A13; ENSG00000164893; CTA
QIASSVLKV

SEQ ID NO: 80483 - protein, 9 aa, Homo sapiens
  Table A; Target 80483; HLA-A*68:02; SLC7A13; ENSG00000164893; CTA
QIASSVLKV

SEQ ID NO: 80484 - protein, 9 aa, Homo sapiens
  Table A; Target 80484; HLA-B*13:02; SLC7A13; ENSG00000164893; CTA
QIASSVLKV

SEQ ID NO: 80485 - protein, 9 aa, Homo sapiens
  Table A; Target 80485; HLA-B*51:01; SLC7A13; ENSG00000164893; CTA
QIASSVLKV

SEQ ID NO: 80486 - protein, 9 aa, Homo sapiens
  Table A; Target 80486; HLA-B*55:01; SLC7A13; ENSG00000164893; CTA
QIASSVLKV

SEQ ID NO: 80487 - protein, 9 aa, Homo sapiens
  Table A; Target 80487; HLA-C*02:02; SLC7A13; ENSG00000164893; CTA
QIASSVLKV

SEQ ID NO: 80488 - protein, 9 aa, Homo sapiens
  Table A; Target 80488; HLA-C*06:02; SLC7A13; ENSG00000164893; CTA
QIASSVLKV

SEQ ID NO: 80489 - protein, 9 aa, Homo sapiens
  Table A; Target 80489; HLA-C*12:03; SLC7A13; ENSG00000164893; CTA
QIASSVLKV

SEQ ID NO: 80490 - protein, 9 aa, Homo sapiens
  Table A; Target 80490; HLA-C*16:02; SLC7A13; ENSG00000164893; CTA
QIASSVLKV

SEQ ID NO: 80491 - protein, 9 aa, Homo sapiens
  Table A; Target 80491; HLA-A*02:07; SLC7A13; ENSG00000164893; CTA
QLPLLFNTL

SEQ ID NO: 80492 - protein, 9 aa, Homo sapiens
  Table A; Target 80492; HLA-A*24:02; SLC7A13; ENSG00000164893; CTA
QLPLLFNTL

SEQ ID NO: 80493 - protein, 9 aa, Homo sapiens
  Table A; Target 80493; HLA-C*01:02; SLC7A13; ENSG00000164893; CTA
QLPLLFNTL

SEQ ID NO: 80494 - protein, 9 aa, Homo sapiens
  Table A; Target 80494; HLA-B*07:02; SLC7A13; ENSG00000164893; CTA
QPFFPSCSV

SEQ ID NO: 80495 - protein, 9 aa, Homo sapiens
  Table A; Target 80495; HLA-B*51:01; SLC7A13; ENSG00000164893; CTA
QPFFPSCSV

SEQ ID NO: 80496 - protein, 9 aa, Homo sapiens
  Table A; Target 80496; HLA-B*54:01; SLC7A13; ENSG00000164893; CTA
QPFFPSCSV

SEQ ID NO: 80497 - protein, 9 aa, Homo sapiens
  Table A; Target 80497; HLA-B*56:01; SLC7A13; ENSG00000164893; CTA
QPFFPSCSV

SEQ ID NO: 80498 - protein, 8 aa, Homo sapiens
  Table A; Target 80498; HLA-B*57:01; SLC7A13; ENSG00000164893; CTA
RAFPSLAW

SEQ ID NO: 80499 - protein, 10 aa, Homo sapiens
  Table A; Target 80499; HLA-B*57:01; SLC7A13; ENSG00000164893; CTA
RAFPSLAWIM

SEQ ID NO: 80500 - protein, 9 aa, Homo sapiens
  Table A; Target 80500; HLA-A*30:01; SLC7A13; ENSG00000164893; CTA
REILSSDAV

SEQ ID NO: 80501 - protein, 9 aa, Homo sapiens
  Table A; Target 80501; HLA-B*40:01; SLC7A13; ENSG00000164893; CTA
REILSSDAV

SEQ ID NO: 80502 - protein, 9 aa, Homo sapiens
  Table A; Target 80502; HLA-B*40:02; SLC7A13; ENSG00000164893; CTA
REILSSDAV

SEQ ID NO: 80503 - protein, 9 aa, Homo sapiens
  Table A; Target 80503; HLA-B*49:01; SLC7A13; ENSG00000164893; CTA
REILSSDAV

SEQ ID NO: 80504 - protein, 11 aa, Homo sapiens
  Table A; Target 80504; HLA-A*30:01; SLC7A13; ENSG00000164893; CTA
REILSSDAVAI

SEQ ID NO: 80505 - protein, 11 aa, Homo sapiens
  Table A; Target 80505; HLA-B*40:01; SLC7A13; ENSG00000164893; CTA
REILSSDAVAI

SEQ ID NO: 80506 - protein, 11 aa, Homo sapiens
  Table A; Target 80506; HLA-B*49:01; SLC7A13; ENSG00000164893; CTA
REILSSDAVAI

SEQ ID NO: 80507 - protein, 9 aa, Homo sapiens
  Table A; Target 80507; HLA-A*23:01; SLC7A13; ENSG00000164893; CTA
RYFGSTVAF

SEQ ID NO: 80508 - protein, 9 aa, Homo sapiens
  Table A; Target 80508; HLA-A*24:02; SLC7A13; ENSG00000164893; CTA
RYFGSTVAF

SEQ ID NO: 80509 - protein, 9 aa, Homo sapiens
  Table A; Target 80509; HLA-A*30:02; SLC7A13; ENSG00000164893; CTA
RYFGSTVAF

SEQ ID NO: 80510 - protein, 9 aa, Homo sapiens
  Table A; Target 80510; HLA-A*31:01; SLC7A13; ENSG00000164893; CTA
RYFGSTVAF

SEQ ID NO: 80511 - protein, 9 aa, Homo sapiens
  Table A; Target 80511; HLA-A*32:01; SLC7A13; ENSG00000164893; CTA
RYFGSTVAF

SEQ ID NO: 80512 - protein, 9 aa, Homo sapiens
  Table A; Target 80512; HLA-B*15:03; SLC7A13; ENSG00000164893; CTA
RYFGSTVAF

SEQ ID NO: 80513 - protein, 9 aa, Homo sapiens
  Table A; Target 80513; HLA-B*46:01; SLC7A13; ENSG00000164893; CTA
RYFGSTVAF

SEQ ID NO: 80514 - protein, 9 aa, Homo sapiens
  Table A; Target 80514; HLA-B*57:01; SLC7A13; ENSG00000164893; CTA
RYFGSTVAF

SEQ ID NO: 80515 - protein, 9 aa, Homo sapiens
  Table A; Target 80515; HLA-C*14:02; SLC7A13; ENSG00000164893; CTA
RYFGSTVAF

SEQ ID NO: 80516 - protein, 10 aa, Homo sapiens
  Table A; Target 80516; HLA-A*24:02; SLC7A13; ENSG00000164893; CTA
RYFGSTVAFL

SEQ ID NO: 80517 - protein, 9 aa, Homo sapiens
  Table A; Target 80517; HLA-A*23:01; SLC7A13; ENSG00000164893; CTA
RYQEPNLSI

SEQ ID NO: 80518 - protein, 9 aa, Homo sapiens
  Table A; Target 80518; HLA-A*24:02; SLC7A13; ENSG00000164893; CTA
RYQEPNLSI

SEQ ID NO: 80519 - protein, 9 aa, Homo sapiens
  Table A; Target 80519; HLA-C*14:02; SLC7A13; ENSG00000164893; CTA
RYQEPNLSI

SEQ ID NO: 80520 - protein, 11 aa, Homo sapiens
  Table A; Target 80520; HLA-A*29:02; SLC7A13; ENSG00000164893; CTA
RYQEPNLSIPY

SEQ ID NO: 80521 - protein, 11 aa, Homo sapiens
  Table A; Target 80521; HLA-A*30:02; SLC7A13; ENSG00000164893; CTA
RYQEPNLSIPY

SEQ ID NO: 80522 - protein, 11 aa, Homo sapiens
  Table A; Target 80522; HLA-A*31:01; SLC7A13; ENSG00000164893; CTA
RYQEPNLSIPY

SEQ ID NO: 80523 - protein, 8 aa, Homo sapiens
  Table A; Target 80523; HLA-C*05:01; SLC7A13; ENSG00000164893; CTA
SAEISISF

SEQ ID NO: 80524 - protein, 9 aa, Homo sapiens
  Table A; Target 80524; HLA-A*23:01; SLC7A13; ENSG00000164893; CTA
SCMNVGVSL

SEQ ID NO: 80525 - protein, 9 aa, Homo sapiens
  Table A; Target 80525; HLA-A*30:01; SLC7A13; ENSG00000164893; CTA
SCMNVGVSL

SEQ ID NO: 80526 - protein, 9 aa, Homo sapiens
  Table A; Target 80526; HLA-B*07:02; SLC7A13; ENSG00000164893; CTA
SCMNVGVSL

SEQ ID NO: 80527 - protein, 9 aa, Homo sapiens
  Table A; Target 80527; HLA-B*15:01; SLC7A13; ENSG00000164893; CTA
SCMNVGVSL

SEQ ID NO: 80528 - protein, 9 aa, Homo sapiens
  Table A; Target 80528; HLA-B*15:03; SLC7A13; ENSG00000164893; CTA
SCMNVGVSL

SEQ ID NO: 80529 - protein, 9 aa, Homo sapiens
  Table A; Target 80529; HLA-B*35:01; SLC7A13; ENSG00000164893; CTA
SCMNVGVSL

SEQ ID NO: 80530 - protein, 9 aa, Homo sapiens
  Table A; Target 80530; HLA-B*35:03; SLC7A13; ENSG00000164893; CTA
SCMNVGVSL

SEQ ID NO: 80531 - protein, 9 aa, Homo sapiens
  Table A; Target 80531; HLA-B*39:01; SLC7A13; ENSG00000164893; CTA
SCMNVGVSL

SEQ ID NO: 80532 - protein, 9 aa, Homo sapiens
  Table A; Target 80532; HLA-B*40:01; SLC7A13; ENSG00000164893; CTA
SCMNVGVSL

SEQ ID NO: 80533 - protein, 9 aa, Homo sapiens
  Table A; Target 80533; HLA-B*46:01; SLC7A13; ENSG00000164893; CTA
SCMNVGVSL

SEQ ID NO: 80534 - protein, 9 aa, Homo sapiens
  Table A; Target 80534; HLA-C*01:02; SLC7A13; ENSG00000164893; CTA
SCMNVGVSL

SEQ ID NO: 80535 - protein, 9 aa, Homo sapiens
  Table A; Target 80535; HLA-C*03:03; SLC7A13; ENSG00000164893; CTA
SCMNVGVSL

SEQ ID NO: 80536 - protein, 9 aa, Homo sapiens
  Table A; Target 80536; HLA-C*03:04; SLC7A13; ENSG00000164893; CTA
SCMNVGVSL

SEQ ID NO: 80537 - protein, 9 aa, Homo sapiens
  Table A; Target 80537; HLA-C*07:02; SLC7A13; ENSG00000164893; CTA
SCMNVGVSL

SEQ ID NO: 80538 - protein, 9 aa, Homo sapiens
  Table A; Target 80538; HLA-C*07:06; SLC7A13; ENSG00000164893; CTA
SCMNVGVSL

SEQ ID NO: 80539 - protein, 9 aa, Homo sapiens
  Table A; Target 80539; HLA-C*14:02; SLC7A13; ENSG00000164893; CTA
SCMNVGVSL

SEQ ID NO: 80540 - protein, 9 aa, Homo sapiens
  Table A; Target 80540; HLA-C*16:01; SLC7A13; ENSG00000164893; CTA
SCMNVGVSL

SEQ ID NO: 80541 - protein, 9 aa, Homo sapiens
  Table A; Target 80541; HLA-C*16:04; SLC7A13; ENSG00000164893; CTA
SCMNVGVSL

SEQ ID NO: 80542 - protein, 8 aa, Homo sapiens
  Table A; Target 80542; HLA-B*18:01; SLC7A13; ENSG00000164893; CTA
SDAVAITW

SEQ ID NO: 80543 - protein, 8 aa, Homo sapiens
  Table A; Target 80543; HLA-B*27:02; SLC7A13; ENSG00000164893; CTA
SDAVAITW

SEQ ID NO: 80544 - protein, 8 aa, Homo sapiens
  Table A; Target 80544; HLA-B*37:01; SLC7A13; ENSG00000164893; CTA
SDAVAITW

SEQ ID NO: 80545 - protein, 8 aa, Homo sapiens
  Table A; Target 80545; HLA-B*44:02; SLC7A13; ENSG00000164893; CTA
SDAVAITW

SEQ ID NO: 80546 - protein, 8 aa, Homo sapiens
  Table A; Target 80546; HLA-B*44:03; SLC7A13; ENSG00000164893; CTA
SDAVAITW

SEQ ID NO: 80547 - protein, 8 aa, Homo sapiens
  Table A; Target 80547; HLA-B*57:01; SLC7A13; ENSG00000164893; CTA
SDAVAITW

SEQ ID NO: 80548 - protein, 8 aa, Homo sapiens
  Table A; Target 80548; HLA-C*16:04; SLC7A13; ENSG00000164893; CTA
SDAVAITW

SEQ ID NO: 80549 - protein, 8 aa, Homo sapiens
  Table A; Target 80549; HLA-C*14:02; SLC7A13; ENSG00000164893; CTA
SFISLTGV

SEQ ID NO: 80550 - protein, 10 aa, Homo sapiens
  Table A; Target 80550; HLA-A*23:01; SLC7A13; ENSG00000164893; CTA
SFISLTGVVF

SEQ ID NO: 80551 - protein, 10 aa, Homo sapiens
  Table A; Target 80551; HLA-A*24:02; SLC7A13; ENSG00000164893; CTA
SFISLTGVVF

SEQ ID NO: 80552 - protein, 10 aa, Homo sapiens
  Table A; Target 80552; HLA-A*29:02; SLC7A13; ENSG00000164893; CTA
SFISLTGVVF

SEQ ID NO: 80553 - protein, 10 aa, Homo sapiens
  Table A; Target 80553; HLA-C*14:02; SLC7A13; ENSG00000164893; CTA
SFISLTGVVF

SEQ ID NO: 80554 - protein, 9 aa, Homo sapiens
  Table A; Target 80554; HLA-A*29:02; SLC7A13; ENSG00000164893; CTA
SFPCSGAQY

SEQ ID NO: 80555 - protein, 9 aa, Homo sapiens
  Table A; Target 80555; HLA-C*14:02; SLC7A13; ENSG00000164893; CTA
SFPCSGAQY

SEQ ID NO: 80556 - protein, 10 aa, Homo sapiens
  Table A; Target 80556; HLA-A*29:02; SLC7A13; ENSG00000164893; CTA
SFPCSGAQYY

SEQ ID NO: 80557 - protein, 9 aa, Homo sapiens
  Table A; Target 80557; HLA-A*11:01; SLC7A13; ENSG00000164893; CTA
SGAQYYFLK

SEQ ID NO: 80558 - protein, 9 aa, Homo sapiens
  Table A; Target 80558; HLA-B*15:03; SLC7A13; ENSG00000164893; CTA
SGVVAGQAL

SEQ ID NO: 80559 - protein, 9 aa, Homo sapiens
  Table A; Target 80559; HLA-B*35:03; SLC7A13; ENSG00000164893; CTA
SGVVAGQAL

SEQ ID NO: 80560 - protein, 9 aa, Homo sapiens
  Table A; Target 80560; HLA-B*39:01; SLC7A13; ENSG00000164893; CTA
SGVVAGQAL

SEQ ID NO: 80561 - protein, 9 aa, Homo sapiens
  Table A; Target 80561; HLA-B*40:01; SLC7A13; ENSG00000164893; CTA
SGVVAGQAL

SEQ ID NO: 80562 - protein, 9 aa, Homo sapiens
  Table A; Target 80562; HLA-B*46:01; SLC7A13; ENSG00000164893; CTA
SGVVAGQAL

SEQ ID NO: 80563 - protein, 9 aa, Homo sapiens
  Table A; Target 80563; HLA-C*01:02; SLC7A13; ENSG00000164893; CTA
SGVVAGQAL

SEQ ID NO: 80564 - protein, 9 aa, Homo sapiens
  Table A; Target 80564; HLA-C*03:03; SLC7A13; ENSG00000164893; CTA
SGVVAGQAL

SEQ ID NO: 80565 - protein, 9 aa, Homo sapiens
  Table A; Target 80565; HLA-C*03:04; SLC7A13; ENSG00000164893; CTA
SGVVAGQAL

SEQ ID NO: 80566 - protein, 9 aa, Homo sapiens
  Table A; Target 80566; HLA-C*14:02; SLC7A13; ENSG00000164893; CTA
SGVVAGQAL

SEQ ID NO: 80567 - protein, 9 aa, Homo sapiens
  Table A; Target 80567; HLA-B*13:02; SLC7A13; ENSG00000164893; CTA
SHSSPFTAV

SEQ ID NO: 80568 - protein, 9 aa, Homo sapiens
  Table A; Target 80568; HLA-B*38:01; SLC7A13; ENSG00000164893; CTA
SHSSPFTAV

SEQ ID NO: 80569 - protein, 9 aa, Homo sapiens
  Table A; Target 80569; HLA-B*39:01; SLC7A13; ENSG00000164893; CTA
SHSSPFTAV

SEQ ID NO: 80570 - protein, 10 aa, Homo sapiens
  Table A; Target 80570; HLA-B*38:01; SLC7A13; ENSG00000164893; CTA
SHSSPFTAVL

SEQ ID NO: 80571 - protein, 10 aa, Homo sapiens
  Table A; Target 80571; HLA-B*39:01; SLC7A13; ENSG00000164893; CTA
SHSSPFTAVL

SEQ ID NO: 80572 - protein, 11 aa, Homo sapiens
  Table A; Target 80572; HLA-B*38:01; SLC7A13; ENSG00000164893; CTA
SHSSPFTAVLL

SEQ ID NO: 80573 - protein, 11 aa, Homo sapiens
  Table A; Target 80573; HLA-A*02:03; SLC7A13; ENSG00000164893; CTA
SIFKSSRPIYL

SEQ ID NO: 80574 - protein, 11 aa, Homo sapiens
  Table A; Target 80574; HLA-A*02:04; SLC7A13; ENSG00000164893; CTA
SIFKSSRPIYL

SEQ ID NO: 80575 - protein, 11 aa, Homo sapiens
  Table A; Target 80575; HLA-A*03:01; SLC7A13; ENSG00000164893; CTA
SIFKSSRPIYL

SEQ ID NO: 80576 - protein, 11 aa, Homo sapiens
  Table A; Target 80576; HLA-A*02:01; SLC7A13; ENSG00000164893; CTA
SILSFISLTGV

SEQ ID NO: 80577 - protein, 11 aa, Homo sapiens
  Table A; Target 80577; HLA-A*02:03; SLC7A13; ENSG00000164893; CTA
SILSFISLTGV

SEQ ID NO: 80578 - protein, 11 aa, Homo sapiens
  Table A; Target 80578; HLA-A*02:04; SLC7A13; ENSG00000164893; CTA
SILSFISLTGV

SEQ ID NO: 80579 - protein, 9 aa, Homo sapiens
  Table A; Target 80579; HLA-A*02:01; SLC7A13; ENSG00000164893; CTA
SLAIILTSL

SEQ ID NO: 80580 - protein, 9 aa, Homo sapiens
  Table A; Target 80580; HLA-A*02:03; SLC7A13; ENSG00000164893; CTA
SLAIILTSL

SEQ ID NO: 80581 - protein, 9 aa, Homo sapiens
  Table A; Target 80581; HLA-A*02:04; SLC7A13; ENSG00000164893; CTA
SLAIILTSL

SEQ ID NO: 80582 - protein, 9 aa, Homo sapiens
  Table A; Target 80582; HLA-A*02:07; SLC7A13; ENSG00000164893; CTA
SLAIILTSL

SEQ ID NO: 80583 - protein, 9 aa, Homo sapiens
  Table A; Target 80583; HLA-A*68:02; SLC7A13; ENSG00000164893; CTA
SLAIILTSL

SEQ ID NO: 80584 - protein, 9 aa, Homo sapiens
  Table A; Target 80584; HLA-B*08:01; SLC7A13; ENSG00000164893; CTA
SLAIILTSL

SEQ ID NO: 80585 - protein, 9 aa, Homo sapiens
  Table A; Target 80585; HLA-B*46:01; SLC7A13; ENSG00000164893; CTA
SLAIILTSL

SEQ ID NO: 80586 - protein, 9 aa, Homo sapiens
  Table A; Target 80586; HLA-B*55:01; SLC7A13; ENSG00000164893; CTA
SLAIILTSL

SEQ ID NO: 80587 - protein, 9 aa, Homo sapiens
  Table A; Target 80587; HLA-C*01:02; SLC7A13; ENSG00000164893; CTA
SLAIILTSL

SEQ ID NO: 80588 - protein, 9 aa, Homo sapiens
  Table A; Target 80588; HLA-A*02:03; SLC7A13; ENSG00000164893; CTA
SLFLGSGVV

SEQ ID NO: 80589 - protein, 9 aa, Homo sapiens
  Table A; Target 80589; HLA-B*13:02; SLC7A13; ENSG00000164893; CTA
SLFLGSGVV

SEQ ID NO: 80590 - protein, 10 aa, Homo sapiens
  Table A; Target 80590; HLA-A*02:03; SLC7A13; ENSG00000164893; CTA
SLFLGSGVVA

SEQ ID NO: 80591 - protein, 10 aa, Homo sapiens
  Table A; Target 80591; HLA-B*54:01; SLC7A13; ENSG00000164893; CTA
SLFLGSGVVA

SEQ ID NO: 80592 - protein, 10 aa, Homo sapiens
  Table A; Target 80592; HLA-B*56:01; SLC7A13; ENSG00000164893; CTA
SLFLGSGVVA

SEQ ID NO: 80593 - protein, 11 aa, Homo sapiens
  Table A; Target 80593; HLA-A*02:01; SLC7A13; ENSG00000164893; CTA
SLFLGSGVVAG

SEQ ID NO: 80594 - protein, 11 aa, Homo sapiens
  Table A; Target 80594; HLA-A*02:03; SLC7A13; ENSG00000164893; CTA
SLFLGSGVVAG

SEQ ID NO: 80595 - protein, 11 aa, Homo sapiens
  Table A; Target 80595; HLA-A*02:04; SLC7A13; ENSG00000164893; CTA
SLFLGSGVVAG

SEQ ID NO: 80596 - protein, 10 aa, Homo sapiens
  Table A; Target 80596; HLA-A*02:01; SLC7A13; ENSG00000164893; CTA
SLFSNLLISI

SEQ ID NO: 80597 - protein, 10 aa, Homo sapiens
  Table A; Target 80597; HLA-A*02:03; SLC7A13; ENSG00000164893; CTA
SLFSNLLISI

SEQ ID NO: 80598 - protein, 10 aa, Homo sapiens
  Table A; Target 80598; HLA-A*02:04; SLC7A13; ENSG00000164893; CTA
SLFSNLLISI

SEQ ID NO: 80599 - protein, 9 aa, Homo sapiens
  Table A; Target 80599; HLA-A*02:01; SLC7A13; ENSG00000164893; CTA
SLIDLINYI

SEQ ID NO: 80600 - protein, 9 aa, Homo sapiens
  Table A; Target 80600; HLA-A*02:03; SLC7A13; ENSG00000164893; CTA
SLIDLINYI

SEQ ID NO: 80601 - protein, 9 aa, Homo sapiens
  Table A; Target 80601; HLA-A*02:04; SLC7A13; ENSG00000164893; CTA
SLIDLINYI

SEQ ID NO: 80602 - protein, 9 aa, Homo sapiens
  Table A; Target 80602; HLA-A*02:07; SLC7A13; ENSG00000164893; CTA
SLIDLINYI

SEQ ID NO: 80603 - protein, 9 aa, Homo sapiens
  Table A; Target 80603; HLA-A*23:01; SLC7A13; ENSG00000164893; CTA
SLIDLINYI

SEQ ID NO: 80604 - protein, 9 aa, Homo sapiens
  Table A; Target 80604; HLA-A*68:02; SLC7A13; ENSG00000164893; CTA
SLIDLINYI

SEQ ID NO: 80605 - protein, 9 aa, Homo sapiens
  Table A; Target 80605; HLA-B*13:02; SLC7A13; ENSG00000164893; CTA
SLIDLINYI

SEQ ID NO: 80606 - protein, 8 aa, Homo sapiens
  Table A; Target 80606; HLA-A*02:01; SLC7A13; ENSG00000164893; CTA
SLTGVVFL

SEQ ID NO: 80607 - protein, 8 aa, Homo sapiens
  Table A; Target 80607; HLA-A*02:04; SLC7A13; ENSG00000164893; CTA
SLTGVVFL

SEQ ID NO: 80608 - protein, 9 aa, Homo sapiens
  Table A; Target 80608; HLA-A*02:01; SLC7A13; ENSG00000164893; CTA
SLTGVVFLI

SEQ ID NO: 80609 - protein, 9 aa, Homo sapiens
  Table A; Target 80609; HLA-A*02:03; SLC7A13; ENSG00000164893; CTA
SLTGVVFLI

SEQ ID NO: 80610 - protein, 9 aa, Homo sapiens
  Table A; Target 80610; HLA-A*02:04; SLC7A13; ENSG00000164893; CTA
SLTGVVFLI

SEQ ID NO: 80611 - protein, 9 aa, Homo sapiens
  Table A; Target 80611; HLA-A*02:07; SLC7A13; ENSG00000164893; CTA
SLTGVVFLI

SEQ ID NO: 80612 - protein, 9 aa, Homo sapiens
  Table A; Target 80612; HLA-A*23:01; SLC7A13; ENSG00000164893; CTA
SLTGVVFLI

SEQ ID NO: 80613 - protein, 9 aa, Homo sapiens
  Table A; Target 80613; HLA-A*24:02; SLC7A13; ENSG00000164893; CTA
SLTGVVFLI

SEQ ID NO: 80614 - protein, 9 aa, Homo sapiens
  Table A; Target 80614; HLA-A*30:01; SLC7A13; ENSG00000164893; CTA
SLTGVVFLI

SEQ ID NO: 80615 - protein, 9 aa, Homo sapiens
  Table A; Target 80615; HLA-A*68:02; SLC7A13; ENSG00000164893; CTA
SLTGVVFLI

SEQ ID NO: 80616 - protein, 9 aa, Homo sapiens
  Table A; Target 80616; HLA-B*13:02; SLC7A13; ENSG00000164893; CTA
SLTGVVFLI

SEQ ID NO: 80617 - protein, 9 aa, Homo sapiens
  Table A; Target 80617; HLA-B*55:01; SLC7A13; ENSG00000164893; CTA
SLTGVVFLI

SEQ ID NO: 80618 - protein, 9 aa, Homo sapiens
  Table A; Target 80618; HLA-A*02:01; SLC7A13; ENSG00000164893; CTA
SLWSILLMI

SEQ ID NO: 80619 - protein, 9 aa, Homo sapiens
  Table A; Target 80619; HLA-A*02:03; SLC7A13; ENSG00000164893; CTA
SLWSILLMI

SEQ ID NO: 80620 - protein, 9 aa, Homo sapiens
  Table A; Target 80620; HLA-A*02:04; SLC7A13; ENSG00000164893; CTA
SLWSILLMI

SEQ ID NO: 80621 - protein, 9 aa, Homo sapiens
  Table A; Target 80621; HLA-A*02:07; SLC7A13; ENSG00000164893; CTA
SLWSILLMI

SEQ ID NO: 80622 - protein, 8 aa, Homo sapiens
  Table A; Target 80622; HLA-B*35:01; SLC7A13; ENSG00000164893; CTA
SPFTAVLL

SEQ ID NO: 80623 - protein, 8 aa, Homo sapiens
  Table A; Target 80623; HLA-B*51:01; SLC7A13; ENSG00000164893; CTA
SPFTAVLL

SEQ ID NO: 80624 - protein, 8 aa, Homo sapiens
  Table A; Target 80624; HLA-B*56:01; SLC7A13; ENSG00000164893; CTA
SPFTAVLL

SEQ ID NO: 80625 - protein, 9 aa, Homo sapiens
  Table A; Target 80625; HLA-B*07:02; SLC7A13; ENSG00000164893; CTA
SPFTAVLLL

SEQ ID NO: 80626 - protein, 9 aa, Homo sapiens
  Table A; Target 80626; HLA-B*35:01; SLC7A13; ENSG00000164893; CTA
SPFTAVLLL

SEQ ID NO: 80627 - protein, 9 aa, Homo sapiens
  Table A; Target 80627; HLA-B*35:03; SLC7A13; ENSG00000164893; CTA
SPFTAVLLL

SEQ ID NO: 80628 - protein, 9 aa, Homo sapiens
  Table A; Target 80628; HLA-B*51:01; SLC7A13; ENSG00000164893; CTA
SPFTAVLLL

SEQ ID NO: 80629 - protein, 9 aa, Homo sapiens
  Table A; Target 80629; HLA-B*56:01; SLC7A13; ENSG00000164893; CTA
SPFTAVLLL

SEQ ID NO: 80630 - protein, 9 aa, Homo sapiens
  Table A; Target 80630; HLA-C*07:02; SLC7A13; ENSG00000164893; CTA
SPFTAVLLL

SEQ ID NO: 80631 - protein, 10 aa, Homo sapiens
  Table A; Target 80631; HLA-B*56:01; SLC7A13; ENSG00000164893; CTA
SPKGVLAYSC

SEQ ID NO: 80632 - protein, 8 aa, Homo sapiens
  Table A; Target 80632; HLA-A*32:01; SLC7A13; ENSG00000164893; CTA
SPNVHYVY

SEQ ID NO: 80633 - protein, 8 aa, Homo sapiens
  Table A; Target 80633; HLA-B*08:01; SLC7A13; ENSG00000164893; CTA
SPNVHYVY

SEQ ID NO: 80634 - protein, 8 aa, Homo sapiens
  Table A; Target 80634; HLA-B*35:01; SLC7A13; ENSG00000164893; CTA
SPNVHYVY

SEQ ID NO: 80635 - protein, 8 aa, Homo sapiens
  Table A; Target 80635; HLA-B*55:01; SLC7A13; ENSG00000164893; CTA
SPNVHYVY

SEQ ID NO: 80636 - protein, 8 aa, Homo sapiens
  Table A; Target 80636; HLA-C*03:03; SLC7A13; ENSG00000164893; CTA
SPNVHYVY

SEQ ID NO: 80637 - protein, 8 aa, Homo sapiens
  Table A; Target 80637; HLA-C*16:01; SLC7A13; ENSG00000164893; CTA
SPNVHYVY

SEQ ID NO: 80638 - protein, 8 aa, Homo sapiens
  Table A; Target 80638; HLA-C*16:04; SLC7A13; ENSG00000164893; CTA
SPNVHYVY

SEQ ID NO: 80639 - protein, 9 aa, Homo sapiens
  Table A; Target 80639; HLA-B*07:02; SLC7A13; ENSG00000164893; CTA
SPNVHYVYV

SEQ ID NO: 80640 - protein, 9 aa, Homo sapiens
  Table A; Target 80640; HLA-B*51:01; SLC7A13; ENSG00000164893; CTA
SPNVHYVYV

SEQ ID NO: 80641 - protein, 9 aa, Homo sapiens
  Table A; Target 80641; HLA-B*54:01; SLC7A13; ENSG00000164893; CTA
SPNVHYVYV

SEQ ID NO: 80642 - protein, 9 aa, Homo sapiens
  Table A; Target 80642; HLA-B*56:01; SLC7A13; ENSG00000164893; CTA
SPNVHYVYV

SEQ ID NO: 80643 - protein, 9 aa, Homo sapiens
  Table A; Target 80643; HLA-C*07:02; SLC7A13; ENSG00000164893; CTA
SPNVHYVYV

SEQ ID NO: 80644 - protein, 9 aa, Homo sapiens
  Table A; Target 80644; HLA-B*38:01; SLC7A13; ENSG00000164893; CTA
SQEGQLPLL

SEQ ID NO: 80645 - protein, 9 aa, Homo sapiens
  Table A; Target 80645; HLA-B*39:01; SLC7A13; ENSG00000164893; CTA
SQEGQLPLL

SEQ ID NO: 80646 - protein, 9 aa, Homo sapiens
  Table A; Target 80646; HLA-C*05:01; SLC7A13; ENSG00000164893; CTA
SQEGQLPLL

SEQ ID NO: 80647 - protein, 10 aa, Homo sapiens
  Table A; Target 80647; HLA-A*29:02; SLC7A13; ENSG00000164893; CTA
SQEGQLPLLF

SEQ ID NO: 80648 - protein, 10 aa, Homo sapiens
  Table A; Target 80648; HLA-B*27:02; SLC7A13; ENSG00000164893; CTA
SQEGQLPLLF

SEQ ID NO: 80649 - protein, 10 aa, Homo sapiens
  Table A; Target 80649; HLA-B*38:01; SLC7A13; ENSG00000164893; CTA
SQEGQLPLLF

SEQ ID NO: 80650 - protein, 9 aa, Homo sapiens
  Table A; Target 80650; HLA-A*01:01; SLC7A13; ENSG00000164893; CTA
SSDAVAITW

SEQ ID NO: 80651 - protein, 9 aa, Homo sapiens
  Table A; Target 80651; HLA-A*25:01; SLC7A13; ENSG00000164893; CTA
SSDAVAITW

SEQ ID NO: 80652 - protein, 9 aa, Homo sapiens
  Table A; Target 80652; HLA-A*32:01; SLC7A13; ENSG00000164893; CTA
SSDAVAITW

SEQ ID NO: 80653 - protein, 9 aa, Homo sapiens
  Table A; Target 80653; HLA-B*44:02; SLC7A13; ENSG00000164893; CTA
SSDAVAITW

SEQ ID NO: 80654 - protein, 9 aa, Homo sapiens
  Table A; Target 80654; HLA-B*44:03; SLC7A13; ENSG00000164893; CTA
SSDAVAITW

SEQ ID NO: 80655 - protein, 9 aa, Homo sapiens
  Table A; Target 80655; HLA-B*57:01; SLC7A13; ENSG00000164893; CTA
SSDAVAITW

SEQ ID NO: 80656 - protein, 9 aa, Homo sapiens
  Table A; Target 80656; HLA-B*58:01; SLC7A13; ENSG00000164893; CTA
SSDAVAITW

SEQ ID NO: 80657 - protein, 9 aa, Homo sapiens
  Table A; Target 80657; HLA-C*05:01; SLC7A13; ENSG00000164893; CTA
SSDAVAITW

SEQ ID NO: 80658 - protein, 9 aa, Homo sapiens
  Table A; Target 80658; HLA-C*07:06; SLC7A13; ENSG00000164893; CTA
SSDAVAITW

SEQ ID NO: 80659 - protein, 9 aa, Homo sapiens
  Table A; Target 80659; HLA-C*16:04; SLC7A13; ENSG00000164893; CTA
SSDAVAITW

SEQ ID NO: 80660 - protein, 8 aa, Homo sapiens
  Table A; Target 80660; HLA-C*01:02; SLC7A13; ENSG00000164893; CTA
SSPFTAVL

SEQ ID NO: 80661 - protein, 9 aa, Homo sapiens
  Table A; Target 80661; HLA-C*01:02; SLC7A13; ENSG00000164893; CTA
SSPFTAVLL

SEQ ID NO: 80662 - protein, 8 aa, Homo sapiens
  Table A; Target 80662; HLA-B*08:01; SLC7A13; ENSG00000164893; CTA
SSVLKVSI

SEQ ID NO: 80663 - protein, 9 aa, Homo sapiens
  Table A; Target 80663; HLA-A*25:01; SLC7A13; ENSG00000164893; CTA
STVAFLNLW

SEQ ID NO: 80664 - protein, 9 aa, Homo sapiens
  Table A; Target 80664; HLA-B*57:01; SLC7A13; ENSG00000164893; CTA
STVAFLNLW

SEQ ID NO: 80665 - protein, 8 aa, Homo sapiens
  Table A; Target 80665; HLA-B*37:01; SLC7A13; ENSG00000164893; CTA
SVLKVSIL

SEQ ID NO: 80666 - protein, 10 aa, Homo sapiens
  Table A; Target 80666; HLA-A*25:01; SLC7A13; ENSG00000164893; CTA
SVLKVSILSF

SEQ ID NO: 80667 - protein, 9 aa, Homo sapiens
  Table A; Target 80667; HLA-A*29:02; SLC7A13; ENSG00000164893; CTA
SYLTVLTPR

SEQ ID NO: 80668 - protein, 9 aa, Homo sapiens
  Table A; Target 80668; HLA-A*31:01; SLC7A13; ENSG00000164893; CTA
SYLTVLTPR

SEQ ID NO: 80669 - protein, 9 aa, Homo sapiens
  Table A; Target 80669; HLA-A*33:01; SLC7A13; ENSG00000164893; CTA
SYLTVLTPR

SEQ ID NO: 80670 - protein, 9 aa, Homo sapiens
  Table A; Target 80670; HLA-A*33:03; SLC7A13; ENSG00000164893; CTA
SYLTVLTPR

SEQ ID NO: 80671 - protein, 8 aa, Homo sapiens
  Table A; Target 80671; HLA-B*51:01; SLC7A13; ENSG00000164893; CTA
TALPLVTV

SEQ ID NO: 80672 - protein, 9 aa, Homo sapiens
  Table A; Target 80672; HLA-A*02:01; SLC7A13; ENSG00000164893; CTA
TALPLVTVV

SEQ ID NO: 80673 - protein, 9 aa, Homo sapiens
  Table A; Target 80673; HLA-A*02:03; SLC7A13; ENSG00000164893; CTA
TALPLVTVV

SEQ ID NO: 80674 - protein, 9 aa, Homo sapiens
  Table A; Target 80674; HLA-B*13:02; SLC7A13; ENSG00000164893; CTA
TALPLVTVV

SEQ ID NO: 80675 - protein, 9 aa, Homo sapiens
  Table A; Target 80675; HLA-B*35:01; SLC7A13; ENSG00000164893; CTA
TALPLVTVV

SEQ ID NO: 80676 - protein, 9 aa, Homo sapiens
  Table A; Target 80676; HLA-B*39:01; SLC7A13; ENSG00000164893; CTA
TALPLVTVV

SEQ ID NO: 80677 - protein, 9 aa, Homo sapiens
  Table A; Target 80677; HLA-B*49:01; SLC7A13; ENSG00000164893; CTA
TALPLVTVV

SEQ ID NO: 80678 - protein, 9 aa, Homo sapiens
  Table A; Target 80678; HLA-B*51:01; SLC7A13; ENSG00000164893; CTA
TALPLVTVV

SEQ ID NO: 80679 - protein, 9 aa, Homo sapiens
  Table A; Target 80679; HLA-B*54:01; SLC7A13; ENSG00000164893; CTA
TALPLVTVV

SEQ ID NO: 80680 - protein, 9 aa, Homo sapiens
  Table A; Target 80680; HLA-B*56:01; SLC7A13; ENSG00000164893; CTA
TALPLVTVV

SEQ ID NO: 80681 - protein, 9 aa, Homo sapiens
  Table A; Target 80681; HLA-C*02:02; SLC7A13; ENSG00000164893; CTA
TALPLVTVV

SEQ ID NO: 80682 - protein, 9 aa, Homo sapiens
  Table A; Target 80682; HLA-C*05:01; SLC7A13; ENSG00000164893; CTA
TALPLVTVV

SEQ ID NO: 80683 - protein, 9 aa, Homo sapiens
  Table A; Target 80683; HLA-C*12:03; SLC7A13; ENSG00000164893; CTA
TALPLVTVV

SEQ ID NO: 80684 - protein, 9 aa, Homo sapiens
  Table A; Target 80684; HLA-C*16:02; SLC7A13; ENSG00000164893; CTA
TALPLVTVV

SEQ ID NO: 80685 - protein, 9 aa, Homo sapiens
  Table A; Target 80685; HLA-C*16:04; SLC7A13; ENSG00000164893; CTA
TALPLVTVV

SEQ ID NO: 80686 - protein, 10 aa, Homo sapiens
  Table A; Target 80686; HLA-A*25:01; SLC7A13; ENSG00000164893; CTA
TALPLVTVVY

SEQ ID NO: 80687 - protein, 10 aa, Homo sapiens
  Table A; Target 80687; HLA-A*29:02; SLC7A13; ENSG00000164893; CTA
TALPLVTVVY

SEQ ID NO: 80688 - protein, 10 aa, Homo sapiens
  Table A; Target 80688; HLA-A*30:02; SLC7A13; ENSG00000164893; CTA
TALPLVTVVY

SEQ ID NO: 80689 - protein, 10 aa, Homo sapiens
  Table A; Target 80689; HLA-B*35:01; SLC7A13; ENSG00000164893; CTA
TALPLVTVVY

SEQ ID NO: 80690 - protein, 10 aa, Homo sapiens
  Table A; Target 80690; HLA-C*02:02; SLC7A13; ENSG00000164893; CTA
TALPLVTVVY

SEQ ID NO: 80691 - protein, 9 aa, Homo sapiens
  Table A; Target 80691; HLA-B*35:01; SLC7A13; ENSG00000164893; CTA
TAVLLLVTL

SEQ ID NO: 80692 - protein, 9 aa, Homo sapiens
  Table A; Target 80692; HLA-B*35:03; SLC7A13; ENSG00000164893; CTA
TAVLLLVTL

SEQ ID NO: 80693 - protein, 9 aa, Homo sapiens
  Table A; Target 80693; HLA-B*51:01; SLC7A13; ENSG00000164893; CTA
TAVLLLVTL

SEQ ID NO: 80694 - protein, 9 aa, Homo sapiens
  Table A; Target 80694; HLA-B*54:01; SLC7A13; ENSG00000164893; CTA
TAVLLLVTL

SEQ ID NO: 80695 - protein, 9 aa, Homo sapiens
  Table A; Target 80695; HLA-C*02:02; SLC7A13; ENSG00000164893; CTA
TAVLLLVTL

SEQ ID NO: 80696 - protein, 9 aa, Homo sapiens
  Table A; Target 80696; HLA-C*03:03; SLC7A13; ENSG00000164893; CTA
TAVLLLVTL

SEQ ID NO: 80697 - protein, 9 aa, Homo sapiens
  Table A; Target 80697; HLA-C*03:04; SLC7A13; ENSG00000164893; CTA
TAVLLLVTL

SEQ ID NO: 80698 - protein, 9 aa, Homo sapiens
  Table A; Target 80698; HLA-C*16:02; SLC7A13; ENSG00000164893; CTA
TAVLLLVTL

SEQ ID NO: 80699 - protein, 11 aa, Homo sapiens
  Table A; Target 80699; HLA-A*31:01; SLC7A13; ENSG00000164893; CTA
TLIAGELKKPR

SEQ ID NO: 80700 - protein, 9 aa, Homo sapiens
  Table A; Target 80700; HLA-A*03:01; SLC7A13; ENSG00000164893; CTA
TLNSHSSPF

SEQ ID NO: 80701 - protein, 9 aa, Homo sapiens
  Table A; Target 80701; HLA-A*30:02; SLC7A13; ENSG00000164893; CTA
TLNSHSSPF

SEQ ID NO: 80702 - protein, 9 aa, Homo sapiens
  Table A; Target 80702; HLA-A*32:01; SLC7A13; ENSG00000164893; CTA
TLNSHSSPF

SEQ ID NO: 80703 - protein, 9 aa, Homo sapiens
  Table A; Target 80703; HLA-B*08:01; SLC7A13; ENSG00000164893; CTA
TLNSHSSPF

SEQ ID NO: 80704 - protein, 9 aa, Homo sapiens
  Table A; Target 80704; HLA-B*15:01; SLC7A13; ENSG00000164893; CTA
TLNSHSSPF

SEQ ID NO: 80705 - protein, 9 aa, Homo sapiens
  Table A; Target 80705; HLA-B*37:01; SLC7A13; ENSG00000164893; CTA
TLNSHSSPF

SEQ ID NO: 80706 - protein, 9 aa, Homo sapiens
  Table A; Target 80706; HLA-B*46:01; SLC7A13; ENSG00000164893; CTA
TLNSHSSPF

SEQ ID NO: 80707 - protein, 9 aa, Homo sapiens
  Table A; Target 80707; HLA-C*01:02; SLC7A13; ENSG00000164893; CTA
TLNSHSSPF

SEQ ID NO: 80708 - protein, 9 aa, Homo sapiens
  Table A; Target 80708; HLA-C*07:04; SLC7A13; ENSG00000164893; CTA
TLNSHSSPF

SEQ ID NO: 80709 - protein, 9 aa, Homo sapiens
  Table A; Target 80709; HLA-C*14:02; SLC7A13; ENSG00000164893; CTA
TLNSHSSPF

SEQ ID NO: 80710 - protein, 11 aa, Homo sapiens
  Table A; Target 80710; HLA-B*07:02; SLC7A13; ENSG00000164893; CTA
TPREILSSDAV

SEQ ID NO: 80711 - protein, 11 aa, Homo sapiens
  Table A; Target 80711; HLA-B*54:01; SLC7A13; ENSG00000164893; CTA
TPREILSSDAV

SEQ ID NO: 80712 - protein, 11 aa, Homo sapiens
  Table A; Target 80712; HLA-B*55:01; SLC7A13; ENSG00000164893; CTA
TPREILSSDAV

SEQ ID NO: 80713 - protein, 11 aa, Homo sapiens
  Table A; Target 80713; HLA-B*56:01; SLC7A13; ENSG00000164893; CTA
TPREILSSDAV

SEQ ID NO: 80714 - protein, 11 aa, Homo sapiens
  Table A; Target 80714; HLA-C*07:02; SLC7A13; ENSG00000164893; CTA
TPREILSSDAV

SEQ ID NO: 80715 - protein, 9 aa, Homo sapiens
  Table A; Target 80715; HLA-B*51:01; SLC7A13; ENSG00000164893; CTA
TSFLLINII

SEQ ID NO: 80716 - protein, 11 aa, Homo sapiens
  Table A; Target 80716; HLA-B*54:01; SLC7A13; ENSG00000164893; CTA
TSLFLGSGVVA

SEQ ID NO: 80717 - protein, 9 aa, Homo sapiens
  Table A; Target 80717; HLA-A*30:02; SLC7A13; ENSG00000164893; CTA
TSLIDLINY

SEQ ID NO: 80718 - protein, 9 aa, Homo sapiens
  Table A; Target 80718; HLA-B*57:01; SLC7A13; ENSG00000164893; CTA
TSLIDLINY

SEQ ID NO: 80719 - protein, 9 aa, Homo sapiens
  Table A; Target 80719; HLA-B*58:01; SLC7A13; ENSG00000164893; CTA
TSLIDLINY

SEQ ID NO: 80720 - protein, 10 aa, Homo sapiens
  Table A; Target 80720; HLA-B*57:01; SLC7A13; ENSG00000164893; CTA
TSRGVKEVTW

SEQ ID NO: 80721 - protein, 10 aa, Homo sapiens
  Table A; Target 80721; HLA-B*58:01; SLC7A13; ENSG00000164893; CTA
TSRGVKEVTW

SEQ ID NO: 80722 - protein, 9 aa, Homo sapiens
  Table A; Target 80722; HLA-B*07:02; SLC7A13; ENSG00000164893; CTA
TVLTPREIL

SEQ ID NO: 80723 - protein, 9 aa, Homo sapiens
  Table A; Target 80723; HLA-A*68:02; SLC7A13; ENSG00000164893; CTA
TVVYLLVNI

SEQ ID NO: 80724 - protein, 10 aa, Homo sapiens
  Table A; Target 80724; HLA-A*24:02; SLC7A13; ENSG00000164893; CTA
TWADRAFPSL

SEQ ID NO: 80725 - protein, 8 aa, Homo sapiens
  Table A; Target 80725; HLA-A*23:01; SLC7A13; ENSG00000164893; CTA
VAGQALLL

SEQ ID NO: 80726 - protein, 8 aa, Homo sapiens
  Table A; Target 80726; HLA-B*51:01; SLC7A13; ENSG00000164893; CTA
VAGQALLL

SEQ ID NO: 80727 - protein, 11 aa, Homo sapiens
  Table A; Target 80727; HLA-A*30:02; SLC7A13; ENSG00000164893; CTA
VAGQALLLAEY

SEQ ID NO: 80728 - protein, 8 aa, Homo sapiens
  Table A; Target 80728; HLA-B*18:01; SLC7A13; ENSG00000164893; CTA
VERFQNAF

SEQ ID NO: 80729 - protein, 8 aa, Homo sapiens
  Table A; Target 80729; HLA-B*37:01; SLC7A13; ENSG00000164893; CTA
VERFQNAF

SEQ ID NO: 80730 - protein, 10 aa, Homo sapiens
  Table A; Target 80730; HLA-A*23:01; SLC7A13; ENSG00000164893; CTA
VFLSFPLATI

SEQ ID NO: 80731 - protein, 8 aa, Homo sapiens
  Table A; Target 80731; HLA-C*05:01; SLC7A13; ENSG00000164893; CTA
VIDVGLVV

SEQ ID NO: 80732 - protein, 9 aa, Homo sapiens
  Table A; Target 80732; HLA-A*02:07; SLC7A13; ENSG00000164893; CTA
VIDVGLVVI

SEQ ID NO: 80733 - protein, 9 aa, Homo sapiens
  Table A; Target 80733; HLA-B*38:01; SLC7A13; ENSG00000164893; CTA
VIDVGLVVI

SEQ ID NO: 80734 - protein, 9 aa, Homo sapiens
  Table A; Target 80734; HLA-C*04:01; SLC7A13; ENSG00000164893; CTA
VIDVGLVVI

SEQ ID NO: 80735 - protein, 9 aa, Homo sapiens
  Table A; Target 80735; HLA-C*05:01; SLC7A13; ENSG00000164893; CTA
VIDVGLVVI

SEQ ID NO: 80736 - protein, 10 aa, Homo sapiens
  Table A; Target 80736; HLA-A*02:07; SLC7A13; ENSG00000164893; CTA
VIPLVKSPNV

SEQ ID NO: 80737 - protein, 8 aa, Homo sapiens
  Table A; Target 80737; HLA-B*15:03; SLC7A13; ENSG00000164893; CTA
VKSPNVHY

SEQ ID NO: 80738 - protein, 10 aa, Homo sapiens
  Table A; Target 80738; HLA-A*29:02; SLC7A13; ENSG00000164893; CTA
VKSPNVHYVY

SEQ ID NO: 80739 - protein, 10 aa, Homo sapiens
  Table A; Target 80739; HLA-B*15:03; SLC7A13; ENSG00000164893; CTA
VKSPNVHYVY

SEQ ID NO: 80740 - protein, 9 aa, Homo sapiens
  Table A; Target 80740; HLA-A*02:03; SLC7A13; ENSG00000164893; CTA
VLKVSILSF

SEQ ID NO: 80741 - protein, 9 aa, Homo sapiens
  Table A; Target 80741; HLA-A*23:01; SLC7A13; ENSG00000164893; CTA
VLKVSILSF

SEQ ID NO: 80742 - protein, 9 aa, Homo sapiens
  Table A; Target 80742; HLA-A*24:02; SLC7A13; ENSG00000164893; CTA
VLKVSILSF

SEQ ID NO: 80743 - protein, 9 aa, Homo sapiens
  Table A; Target 80743; HLA-B*08:01; SLC7A13; ENSG00000164893; CTA
VLKVSILSF

SEQ ID NO: 80744 - protein, 9 aa, Homo sapiens
  Table A; Target 80744; HLA-B*46:01; SLC7A13; ENSG00000164893; CTA
VLKVSILSF

SEQ ID NO: 80745 - protein, 10 aa, Homo sapiens
  Table A; Target 80745; HLA-A*02:03; SLC7A13; ENSG00000164893; CTA
VLKVSILSFI

SEQ ID NO: 80746 - protein, 9 aa, Homo sapiens
  Table A; Target 80746; HLA-A*02:04; SLC7A13; ENSG00000164893; CTA
VLLLVLSGL

SEQ ID NO: 80747 - protein, 9 aa, Homo sapiens
  Table A; Target 80747; HLA-A*02:01; SLC7A13; ENSG00000164893; CTA
VLSGLLFYI

SEQ ID NO: 80748 - protein, 9 aa, Homo sapiens
  Table A; Target 80748; HLA-A*02:03; SLC7A13; ENSG00000164893; CTA
VLSGLLFYI

SEQ ID NO: 80749 - protein, 9 aa, Homo sapiens
  Table A; Target 80749; HLA-A*02:04; SLC7A13; ENSG00000164893; CTA
VLSGLLFYI

SEQ ID NO: 80750 - protein, 9 aa, Homo sapiens
  Table A; Target 80750; HLA-A*02:07; SLC7A13; ENSG00000164893; CTA
VLSGLLFYI

SEQ ID NO: 80751 - protein, 9 aa, Homo sapiens
  Table A; Target 80751; HLA-B*07:02; SLC7A13; ENSG00000164893; CTA
VPKLPKKCL

SEQ ID NO: 80752 - protein, 9 aa, Homo sapiens
  Table A; Target 80752; HLA-C*07:02; SLC7A13; ENSG00000164893; CTA
VPKLPKKCL

SEQ ID NO: 80753 - protein, 9 aa, Homo sapiens
  Table A; Target 80753; HLA-B*46:01; SLC7A13; ENSG00000164893; CTA
VSILSFISL

SEQ ID NO: 80754 - protein, 9 aa, Homo sapiens
  Table A; Target 80754; HLA-C*01:02; SLC7A13; ENSG00000164893; CTA
VSILSFISL

SEQ ID NO: 80755 - protein, 9 aa, Homo sapiens
  Table A; Target 80755; HLA-C*03:03; SLC7A13; ENSG00000164893; CTA
VSILSFISL

SEQ ID NO: 80756 - protein, 9 aa, Homo sapiens
  Table A; Target 80756; HLA-C*03:04; SLC7A13; ENSG00000164893; CTA
VSILSFISL

SEQ ID NO: 80757 - protein, 9 aa, Homo sapiens
  Table A; Target 80757; HLA-A*01:01; SLC7A13; ENSG00000164893; CTA
VSPKGVLAY

SEQ ID NO: 80758 - protein, 9 aa, Homo sapiens
  Table A; Target 80758; HLA-A*25:01; SLC7A13; ENSG00000164893; CTA
VSPKGVLAY

SEQ ID NO: 80759 - protein, 9 aa, Homo sapiens
  Table A; Target 80759; HLA-A*26:01; SLC7A13; ENSG00000164893; CTA
VSPKGVLAY

SEQ ID NO: 80760 - protein, 9 aa, Homo sapiens
  Table A; Target 80760; HLA-A*29:02; SLC7A13; ENSG00000164893; CTA
VSPKGVLAY

SEQ ID NO: 80761 - protein, 9 aa, Homo sapiens
  Table A; Target 80761; HLA-A*30:02; SLC7A13; ENSG00000164893; CTA
VSPKGVLAY

SEQ ID NO: 80762 - protein, 9 aa, Homo sapiens
  Table A; Target 80762; HLA-A*32:01; SLC7A13; ENSG00000164893; CTA
VSPKGVLAY

SEQ ID NO: 80763 - protein, 9 aa, Homo sapiens
  Table A; Target 80763; HLA-B*15:01; SLC7A13; ENSG00000164893; CTA
VSPKGVLAY

SEQ ID NO: 80764 - protein, 9 aa, Homo sapiens
  Table A; Target 80764; HLA-B*15:03; SLC7A13; ENSG00000164893; CTA
VSPKGVLAY

SEQ ID NO: 80765 - protein, 9 aa, Homo sapiens
  Table A; Target 80765; HLA-B*46:01; SLC7A13; ENSG00000164893; CTA
VSPKGVLAY

SEQ ID NO: 80766 - protein, 9 aa, Homo sapiens
  Table A; Target 80766; HLA-B*57:01; SLC7A13; ENSG00000164893; CTA
VSPKGVLAY

SEQ ID NO: 80767 - protein, 9 aa, Homo sapiens
  Table A; Target 80767; HLA-B*58:01; SLC7A13; ENSG00000164893; CTA
VSPKGVLAY

SEQ ID NO: 80768 - protein, 9 aa, Homo sapiens
  Table A; Target 80768; HLA-C*01:02; SLC7A13; ENSG00000164893; CTA
VSPKGVLAY

SEQ ID NO: 80769 - protein, 9 aa, Homo sapiens
  Table A; Target 80769; HLA-C*02:02; SLC7A13; ENSG00000164893; CTA
VSPKGVLAY

SEQ ID NO: 80770 - protein, 9 aa, Homo sapiens
  Table A; Target 80770; HLA-C*16:01; SLC7A13; ENSG00000164893; CTA
VSPKGVLAY

SEQ ID NO: 80771 - protein, 9 aa, Homo sapiens
  Table A; Target 80771; HLA-C*16:02; SLC7A13; ENSG00000164893; CTA
VSPKGVLAY

SEQ ID NO: 80772 - protein, 9 aa, Homo sapiens
  Table A; Target 80772; HLA-A*23:01; SLC7A13; ENSG00000164893; CTA
VTLGSLAII

SEQ ID NO: 80773 - protein, 9 aa, Homo sapiens
  Table A; Target 80773; HLA-A*03:01; SLC7A13; ENSG00000164893; CTA
VVAGQALLL

SEQ ID NO: 80774 - protein, 9 aa, Homo sapiens
  Table A; Target 80774; HLA-A*11:01; SLC7A13; ENSG00000164893; CTA
VVAGQALLL

SEQ ID NO: 80775 - protein, 9 aa, Homo sapiens
  Table A; Target 80775; HLA-A*23:01; SLC7A13; ENSG00000164893; CTA
VVAGQALLL

SEQ ID NO: 80776 - protein, 9 aa, Homo sapiens
  Table A; Target 80776; HLA-A*29:02; SLC7A13; ENSG00000164893; CTA
VVAGQALLL

SEQ ID NO: 80777 - protein, 9 aa, Homo sapiens
  Table A; Target 80777; HLA-B*13:02; SLC7A13; ENSG00000164893; CTA
VVAGQALLL

SEQ ID NO: 80778 - protein, 9 aa, Homo sapiens
  Table A; Target 80778; HLA-C*02:02; SLC7A13; ENSG00000164893; CTA
VVAGQALLL

SEQ ID NO: 80779 - protein, 9 aa, Homo sapiens
  Table A; Target 80779; HLA-C*07:04; SLC7A13; ENSG00000164893; CTA
VVAGQALLL

SEQ ID NO: 80780 - protein, 9 aa, Homo sapiens
  Table A; Target 80780; HLA-A*32:01; SLC7A13; ENSG00000164893; CTA
VVIPLVKSP

SEQ ID NO: 80781 - protein, 10 aa, Homo sapiens
  Table A; Target 80781; HLA-A*31:01; SLC7A13; ENSG00000164893; CTA
VVIPLVKSPN

SEQ ID NO: 80782 - protein, 10 aa, Homo sapiens
  Table A; Target 80782; HLA-A*30:02; SLC7A13; ENSG00000164893; CTA
VVYLLVNISY

SEQ ID NO: 80783 - protein, 9 aa, Homo sapiens
  Table A; Target 80783; HLA-A*23:01; SLC7A13; ENSG00000164893; CTA
VYLLVNISY

SEQ ID NO: 80784 - protein, 9 aa, Homo sapiens
  Table A; Target 80784; HLA-A*24:02; SLC7A13; ENSG00000164893; CTA
VYLLVNISY

SEQ ID NO: 80785 - protein, 9 aa, Homo sapiens
  Table A; Target 80785; HLA-A*29:02; SLC7A13; ENSG00000164893; CTA
VYLLVNISY

SEQ ID NO: 80786 - protein, 9 aa, Homo sapiens
  Table A; Target 80786; HLA-A*30:02; SLC7A13; ENSG00000164893; CTA
VYLLVNISY

SEQ ID NO: 80787 - protein, 9 aa, Homo sapiens
  Table A; Target 80787; HLA-C*14:02; SLC7A13; ENSG00000164893; CTA
VYLLVNISY

SEQ ID NO: 80788 - protein, 10 aa, Homo sapiens
  Table A; Target 80788; HLA-A*23:01; SLC7A13; ENSG00000164893; CTA
VYLLVNISYL

SEQ ID NO: 80789 - protein, 10 aa, Homo sapiens
  Table A; Target 80789; HLA-A*24:02; SLC7A13; ENSG00000164893; CTA
VYLLVNISYL

SEQ ID NO: 80790 - protein, 8 aa, Homo sapiens
  Table A; Target 80790; HLA-A*23:01; SLC7A13; ENSG00000164893; CTA
VYVLLLVL

SEQ ID NO: 80791 - protein, 9 aa, Homo sapiens
  Table A; Target 80791; HLA-C*03:04; SLC7A13; ENSG00000164893; CTA
WADRAFPSL

SEQ ID NO: 80792 - protein, 9 aa, Homo sapiens
  Table A; Target 80792; HLA-A*31:01; SLC7A13; ENSG00000164893; CTA
WIVGILTSR

SEQ ID NO: 80793 - protein, 8 aa, Homo sapiens
  Table A; Target 80793; HLA-A*23:01; SLC7A13; ENSG00000164893; CTA
YFGSTVAF

SEQ ID NO: 80794 - protein, 8 aa, Homo sapiens
  Table A; Target 80794; HLA-A*24:02; SLC7A13; ENSG00000164893; CTA
YFGSTVAF

SEQ ID NO: 80795 - protein, 8 aa, Homo sapiens
  Table A; Target 80795; HLA-C*07:04; SLC7A13; ENSG00000164893; CTA
YFGSTVAF

SEQ ID NO: 80796 - protein, 8 aa, Homo sapiens
  Table A; Target 80796; HLA-C*14:02; SLC7A13; ENSG00000164893; CTA
YFGSTVAF

SEQ ID NO: 80797 - protein, 9 aa, Homo sapiens
  Table A; Target 80797; HLA-A*23:01; SLC7A13; ENSG00000164893; CTA
YFGSTVAFL

SEQ ID NO: 80798 - protein, 9 aa, Homo sapiens
  Table A; Target 80798; HLA-A*24:02; SLC7A13; ENSG00000164893; CTA
YFGSTVAFL

SEQ ID NO: 80799 - protein, 9 aa, Homo sapiens
  Table A; Target 80799; HLA-A*29:02; SLC7A13; ENSG00000164893; CTA
YFGSTVAFL

SEQ ID NO: 80800 - protein, 9 aa, Homo sapiens
  Table A; Target 80800; HLA-A*29:02; SLC7A13; ENSG00000164893; CTA
YIFFTGSLW

SEQ ID NO: 80801 - protein, 9 aa, Homo sapiens
  Table A; Target 80801; HLA-B*57:01; SLC7A13; ENSG00000164893; CTA
YIFFTGSLW

SEQ ID NO: 80802 - protein, 9 aa, Homo sapiens
  Table A; Target 80802; HLA-A*02:07; SLC7A13; ENSG00000164893; CTA
YIPLIHFKI

SEQ ID NO: 80803 - protein, 9 aa, Homo sapiens
  Table A; Target 80803; HLA-A*24:02; SLC7A13; ENSG00000164893; CTA
YIPLIHFKI

SEQ ID NO: 80804 - protein, 9 aa, Homo sapiens
  Table A; Target 80804; HLA-A*02:01; SLC7A13; ENSG00000164893; CTA
YLASQEGQL

SEQ ID NO: 80805 - protein, 9 aa, Homo sapiens
  Table A; Target 80805; HLA-A*02:03; SLC7A13; ENSG00000164893; CTA
YLASQEGQL

SEQ ID NO: 80806 - protein, 9 aa, Homo sapiens
  Table A; Target 80806; HLA-B*39:01; SLC7A13; ENSG00000164893; CTA
YLASQEGQL

SEQ ID NO: 80807 - protein, 9 aa, Homo sapiens
  Table A; Target 80807; HLA-C*14:02; SLC7A13; ENSG00000164893; CTA
YLASQEGQL

SEQ ID NO: 80808 - protein, 9 aa, Homo sapiens
  Table A; Target 80808; HLA-A*02:01; SLC7A13; ENSG00000164893; CTA
YLLVNISYL

SEQ ID NO: 80809 - protein, 9 aa, Homo sapiens
  Table A; Target 80809; HLA-A*02:03; SLC7A13; ENSG00000164893; CTA
YLLVNISYL

SEQ ID NO: 80810 - protein, 9 aa, Homo sapiens
  Table A; Target 80810; HLA-A*02:04; SLC7A13; ENSG00000164893; CTA
YLLVNISYL

SEQ ID NO: 80811 - protein, 9 aa, Homo sapiens
  Table A; Target 80811; HLA-A*02:07; SLC7A13; ENSG00000164893; CTA
YLLVNISYL

SEQ ID NO: 80812 - protein, 8 aa, Homo sapiens
  Table A; Target 80812; HLA-A*02:04; SLC7A13; ENSG00000164893; CTA
YLQLLFNI

SEQ ID NO: 80813 - protein, 8 aa, Homo sapiens
  Table A; Target 80813; HLA-B*13:02; SLC7A13; ENSG00000164893; CTA
YQEPNLSI

SEQ ID NO: 80814 - protein, 10 aa, Homo sapiens
  Table A; Target 80814; HLA-A*01:01; SLC7A13; ENSG00000164893; CTA
YQEPNLSIPY

SEQ ID NO: 80815 - protein, 10 aa, Homo sapiens
  Table A; Target 80815; HLA-A*29:02; SLC7A13; ENSG00000164893; CTA
YQEPNLSIPY

SEQ ID NO: 80816 - protein, 10 aa, Homo sapiens
  Table A; Target 80816; HLA-A*30:02; SLC7A13; ENSG00000164893; CTA
YQEPNLSIPY

SEQ ID NO: 80817 - protein, 10 aa, Homo sapiens
  Table A; Target 80817; HLA-B*15:01; SLC7A13; ENSG00000164893; CTA
YQEPNLSIPY

SEQ ID NO: 80818 - protein, 10 aa, Homo sapiens
  Table A; Target 80818; HLA-B*15:03; SLC7A13; ENSG00000164893; CTA
YQEPNLSIPY

SEQ ID NO: 80819 - protein, 10 aa, Homo sapiens
  Table A; Target 80819; HLA-B*27:02; SLC7A13; ENSG00000164893; CTA
YQEPNLSIPY

SEQ ID NO: 80820 - protein, 10 aa, Homo sapiens
  Table A; Target 80820; HLA-B*39:01; SLC7A13; ENSG00000164893; CTA
YQEPNLSIPY

SEQ ID NO: 80821 - protein, 10 aa, Homo sapiens
  Table A; Target 80821; HLA-C*07:01; SLC7A13; ENSG00000164893; CTA
YQEPNLSIPY

SEQ ID NO: 80822 - protein, 10 aa, Homo sapiens
  Table A; Target 80822; HLA-C*07:04; SLC7A13; ENSG00000164893; CTA
YQEPNLSIPY

SEQ ID NO: 80823 - protein, 10 aa, Homo sapiens
  Table A; Target 80823; HLA-C*16:04; SLC7A13; ENSG00000164893; CTA
YQEPNLSIPY

SEQ ID NO: 80824 - protein, 10 aa, Homo sapiens
  Table A; Target 80824; HLA-C*03:03; SLC7A13; ENSG00000164893; CTA
YSCMNVGVSL

SEQ ID NO: 80825 - protein, 10 aa, Homo sapiens
  Table A; Target 80825; HLA-C*03:04; SLC7A13; ENSG00000164893; CTA
YSCMNVGVSL

SEQ ID NO: 80826 - protein, 10 aa, Homo sapiens
  Table A; Target 80826; HLA-B*54:01; SLC7A13; ENSG00000164893; CTA
YSIQPFFPSC

SEQ ID NO: 80827 - protein, 9 aa, Homo sapiens
  Table A; Target 80827; HLA-A*02:04; SLC7A13; ENSG00000164893; CTA
YVYVLLLVL

SEQ ID NO: 80828 - protein, 9 aa, Homo sapiens
  Table A; Target 80828; HLA-A*02:04; SMC1B; ENSG00000077935; CTA
AALALLFAV

SEQ ID NO: 80829 - protein, 10 aa, Homo sapiens
  Table A; Target 80829; HLA-A*03:01; SMC1B; ENSG00000077935; CTA
AALDNTNIGK

SEQ ID NO: 80830 - protein, 10 aa, Homo sapiens
  Table A; Target 80830; HLA-A*03:02; SMC1B; ENSG00000077935; CTA
AALDNTNIGK

SEQ ID NO: 80831 - protein, 10 aa, Homo sapiens
  Table A; Target 80831; HLA-A*11:01; SMC1B; ENSG00000077935; CTA
AALDNTNIGK

SEQ ID NO: 80832 - protein, 8 aa, Homo sapiens
  Table A; Target 80832; HLA-C*01:02; SMC1B; ENSG00000077935; CTA
AAPNLRAL

SEQ ID NO: 80833 - protein, 8 aa, Homo sapiens
  Table A; Target 80833; HLA-C*16:01; SMC1B; ENSG00000077935; CTA
AAPNLRAL

SEQ ID NO: 80834 - protein, 9 aa, Homo sapiens
  Table A; Target 80834; HLA-A*30:01; SMC1B; ENSG00000077935; CTA
AEEDAQFNF

SEQ ID NO: 80835 - protein, 9 aa, Homo sapiens
  Table A; Target 80835; HLA-B*18:01; SMC1B; ENSG00000077935; CTA
AEEDAQFNF

SEQ ID NO: 80836 - protein, 9 aa, Homo sapiens
  Table A; Target 80836; HLA-B*27:02; SMC1B; ENSG00000077935; CTA
AEEDAQFNF

SEQ ID NO: 80837 - protein, 9 aa, Homo sapiens
  Table A; Target 80837; HLA-B*37:01; SMC1B; ENSG00000077935; CTA
AEEDAQFNF

SEQ ID NO: 80838 - protein, 9 aa, Homo sapiens
  Table A; Target 80838; HLA-B*39:01; SMC1B; ENSG00000077935; CTA
AEEDAQFNF

SEQ ID NO: 80839 - protein, 9 aa, Homo sapiens
  Table A; Target 80839; HLA-B*40:01; SMC1B; ENSG00000077935; CTA
AEEDAQFNF

SEQ ID NO: 80840 - protein, 9 aa, Homo sapiens
  Table A; Target 80840; HLA-B*44:02; SMC1B; ENSG00000077935; CTA
AEEDAQFNF

SEQ ID NO: 80841 - protein, 9 aa, Homo sapiens
  Table A; Target 80841; HLA-B*44:03; SMC1B; ENSG00000077935; CTA
AEEDAQFNF

SEQ ID NO: 80842 - protein, 9 aa, Homo sapiens
  Table A; Target 80842; HLA-B*49:01; SMC1B; ENSG00000077935; CTA
AEEDAQFNF

SEQ ID NO: 80843 - protein, 9 aa, Homo sapiens
  Table A; Target 80843; HLA-C*16:04; SMC1B; ENSG00000077935; CTA
AEEDAQFNF

SEQ ID NO: 80844 - protein, 9 aa, Homo sapiens
  Table A; Target 80844; HLA-B*40:01; SMC1B; ENSG00000077935; CTA
AEENCLQTV

SEQ ID NO: 80845 - protein, 9 aa, Homo sapiens
  Table A; Target 80845; HLA-B*49:01; SMC1B; ENSG00000077935; CTA
AEENCLQTV

SEQ ID NO: 80846 - protein, 8 aa, Homo sapiens
  Table A; Target 80846; HLA-B*49:01; SMC1B; ENSG00000077935; CTA
AEKVQTQI

SEQ ID NO: 80847 - protein, 8 aa, Homo sapiens
  Table A; Target 80847; HLA-B*37:01; SMC1B; ENSG00000077935; CTA
AELEKIGI

SEQ ID NO: 80848 - protein, 8 aa, Homo sapiens
  Table A; Target 80848; HLA-B*44:02; SMC1B; ENSG00000077935; CTA
AELEKIGI

SEQ ID NO: 80849 - protein, 8 aa, Homo sapiens
  Table A; Target 80849; HLA-B*44:03; SMC1B; ENSG00000077935; CTA
AELEKIGI

SEQ ID NO: 80850 - protein, 8 aa, Homo sapiens
  Table A; Target 80850; HLA-B*49:01; SMC1B; ENSG00000077935; CTA
AELEKIGI

SEQ ID NO: 80851 - protein, 9 aa, Homo sapiens
  Table A; Target 80851; HLA-B*37:01; SMC1B; ENSG00000077935; CTA
AELEKIGII

SEQ ID NO: 80852 - protein, 9 aa, Homo sapiens
  Table A; Target 80852; HLA-B*40:01; SMC1B; ENSG00000077935; CTA
AELEKIGII

SEQ ID NO: 80853 - protein, 9 aa, Homo sapiens
  Table A; Target 80853; HLA-B*44:02; SMC1B; ENSG00000077935; CTA
AELEKIGII

SEQ ID NO: 80854 - protein, 9 aa, Homo sapiens
  Table A; Target 80854; HLA-B*44:03; SMC1B; ENSG00000077935; CTA
AELEKIGII

SEQ ID NO: 80855 - protein, 9 aa, Homo sapiens
  Table A; Target 80855; HLA-B*49:01; SMC1B; ENSG00000077935; CTA
AELEKIGII

SEQ ID NO: 80856 - protein, 10 aa, Homo sapiens
  Table A; Target 80856; HLA-B*49:01; SMC1B; ENSG00000077935; CTA
AELEKIGIIV

SEQ ID NO: 80857 - protein, 9 aa, Homo sapiens
  Table A; Target 80857; HLA-A*30:01; SMC1B; ENSG00000077935; CTA
AEPETFLAL

SEQ ID NO: 80858 - protein, 9 aa, Homo sapiens
  Table A; Target 80858; HLA-B*40:01; SMC1B; ENSG00000077935; CTA
AEPETFLAL

SEQ ID NO: 80859 - protein, 9 aa, Homo sapiens
  Table A; Target 80859; HLA-B*44:02; SMC1B; ENSG00000077935; CTA
AEPETFLAL

SEQ ID NO: 80860 - protein, 9 aa, Homo sapiens
  Table A; Target 80860; HLA-B*44:03; SMC1B; ENSG00000077935; CTA
AEPETFLAL

SEQ ID NO: 80861 - protein, 9 aa, Homo sapiens
  Table A; Target 80861; HLA-B*49:01; SMC1B; ENSG00000077935; CTA
AEPETFLAL

SEQ ID NO: 80862 - protein, 8 aa, Homo sapiens
  Table A; Target 80862; HLA-B*49:01; SMC1B; ENSG00000077935; CTA
AESTQATI

SEQ ID NO: 80863 - protein, 10 aa, Homo sapiens
  Table A; Target 80863; HLA-B*49:01; SMC1B; ENSG00000077935; CTA
AESTQATIDI

SEQ ID NO: 80864 - protein, 11 aa, Homo sapiens
  Table A; Target 80864; HLA-A*30:02; SMC1B; ENSG00000077935; CTA
AESTQATIDIY

SEQ ID NO: 80865 - protein, 11 aa, Homo sapiens
  Table A; Target 80865; HLA-B*27:02; SMC1B; ENSG00000077935; CTA
AESTQATIDIY

SEQ ID NO: 80866 - protein, 11 aa, Homo sapiens
  Table A; Target 80866; HLA-B*44:02; SMC1B; ENSG00000077935; CTA
AESTQATIDIY

SEQ ID NO: 80867 - protein, 11 aa, Homo sapiens
  Table A; Target 80867; HLA-B*44:03; SMC1B; ENSG00000077935; CTA
AESTQATIDIY

SEQ ID NO: 80868 - protein, 11 aa, Homo sapiens
  Table A; Target 80868; HLA-C*16:04; SMC1B; ENSG00000077935; CTA
AESTQATIDIY

SEQ ID NO: 80869 - protein, 11 aa, Homo sapiens
  Table A; Target 80869; HLA-B*44:02; SMC1B; ENSG00000077935; CTA
AEVLEHLKRLY

SEQ ID NO: 80870 - protein, 9 aa, Homo sapiens
  Table A; Target 80870; HLA-C*01:02; SMC1B; ENSG00000077935; CTA
AFEIDYSSL

SEQ ID NO: 80871 - protein, 9 aa, Homo sapiens
  Table A; Target 80871; HLA-C*14:02; SMC1B; ENSG00000077935; CTA
AFEIDYSSL

SEQ ID NO: 80872 - protein, 9 aa, Homo sapiens
  Table A; Target 80872; HLA-C*14:02; SMC1B; ENSG00000077935; CTA
AFYQEQSQL

SEQ ID NO: 80873 - protein, 9 aa, Homo sapiens
  Table A; Target 80873; HLA-A*11:01; SMC1B; ENSG00000077935; CTA
AGIDTHEGK

SEQ ID NO: 80874 - protein, 9 aa, Homo sapiens
  Table A; Target 80874; HLA-A*01:01; SMC1B; ENSG00000077935; CTA
ALDGTLFLK

SEQ ID NO: 80875 - protein, 9 aa, Homo sapiens
  Table A; Target 80875; HLA-A*03:01; SMC1B; ENSG00000077935; CTA
ALDGTLFLK

SEQ ID NO: 80876 - protein, 9 aa, Homo sapiens
  Table A; Target 80876; HLA-A*03:02; SMC1B; ENSG00000077935; CTA
ALDGTLFLK

SEQ ID NO: 80877 - protein, 9 aa, Homo sapiens
  Table A; Target 80877; HLA-A*11:01; SMC1B; ENSG00000077935; CTA
ALDGTLFLK

SEQ ID NO: 80878 - protein, 9 aa, Homo sapiens
  Table A; Target 80878; HLA-A*01:01; SMC1B; ENSG00000077935; CTA
ALDNTNIGK

SEQ ID NO: 80879 - protein, 9 aa, Homo sapiens
  Table A; Target 80879; HLA-A*03:01; SMC1B; ENSG00000077935; CTA
ALDNTNIGK

SEQ ID NO: 80880 - protein, 9 aa, Homo sapiens
  Table A; Target 80880; HLA-A*03:02; SMC1B; ENSG00000077935; CTA
ALDNTNIGK

SEQ ID NO: 80881 - protein, 9 aa, Homo sapiens
  Table A; Target 80881; HLA-A*11:01; SMC1B; ENSG00000077935; CTA
ALDNTNIGK

SEQ ID NO: 80882 - protein, 10 aa, Homo sapiens
  Table A; Target 80882; HLA-A*02:07; SMC1B; ENSG00000077935; CTA
ALDNTNIGKV

SEQ ID NO: 80883 - protein, 10 aa, Homo sapiens
  Table A; Target 80883; HLA-B*55:01; SMC1B; ENSG00000077935; CTA
ALDNTNIGKV

SEQ ID NO: 80884 - protein, 9 aa, Homo sapiens
  Table A; Target 80884; HLA-A*03:01; SMC1B; ENSG00000077935; CTA
ALIGIYPEY

SEQ ID NO: 80885 - protein, 9 aa, Homo sapiens
  Table A; Target 80885; HLA-A*23:01; SMC1B; ENSG00000077935; CTA
ALIGIYPEY

SEQ ID NO: 80886 - protein, 9 aa, Homo sapiens
  Table A; Target 80886; HLA-A*25:01; SMC1B; ENSG00000077935; CTA
ALIGIYPEY

SEQ ID NO: 80887 - protein, 9 aa, Homo sapiens
  Table A; Target 80887; HLA-A*26:01; SMC1B; ENSG00000077935; CTA
ALIGIYPEY

SEQ ID NO: 80888 - protein, 9 aa, Homo sapiens
  Table A; Target 80888; HLA-A*29:02; SMC1B; ENSG00000077935; CTA
ALIGIYPEY

SEQ ID NO: 80889 - protein, 9 aa, Homo sapiens
  Table A; Target 80889; HLA-A*30:02; SMC1B; ENSG00000077935; CTA
ALIGIYPEY

SEQ ID NO: 80890 - protein, 9 aa, Homo sapiens
  Table A; Target 80890; HLA-A*32:01; SMC1B; ENSG00000077935; CTA
ALIGIYPEY

SEQ ID NO: 80891 - protein, 9 aa, Homo sapiens
  Table A; Target 80891; HLA-B*15:01; SMC1B; ENSG00000077935; CTA
ALIGIYPEY

SEQ ID NO: 80892 - protein, 9 aa, Homo sapiens
  Table A; Target 80892; HLA-B*15:03; SMC1B; ENSG00000077935; CTA
ALIGIYPEY

SEQ ID NO: 80893 - protein, 9 aa, Homo sapiens
  Table A; Target 80893; HLA-B*35:01; SMC1B; ENSG00000077935; CTA
ALIGIYPEY

SEQ ID NO: 80894 - protein, 9 aa, Homo sapiens
  Table A; Target 80894; HLA-B*44:03; SMC1B; ENSG00000077935; CTA
ALIGIYPEY

SEQ ID NO: 80895 - protein, 9 aa, Homo sapiens
  Table A; Target 80895; HLA-B*46:01; SMC1B; ENSG00000077935; CTA
ALIGIYPEY

SEQ ID NO: 80896 - protein, 9 aa, Homo sapiens
  Table A; Target 80896; HLA-B*58:01; SMC1B; ENSG00000077935; CTA
ALIGIYPEY

SEQ ID NO: 80897 - protein, 9 aa, Homo sapiens
  Table A; Target 80897; HLA-C*02:02; SMC1B; ENSG00000077935; CTA
ALIGIYPEY

SEQ ID NO: 80898 - protein, 9 aa, Homo sapiens
  Table A; Target 80898; HLA-C*16:04; SMC1B; ENSG00000077935; CTA
ALIGIYPEY

SEQ ID NO: 80899 - protein, 9 aa, Homo sapiens
  Table A; Target 80899; HLA-A*02:04; SMC1B; ENSG00000077935; CTA
ALLFAVHSF

SEQ ID NO: 80900 - protein, 9 aa, Homo sapiens
  Table A; Target 80900; HLA-A*24:02; SMC1B; ENSG00000077935; CTA
ALLFAVHSF

SEQ ID NO: 80901 - protein, 9 aa, Homo sapiens
  Table A; Target 80901; HLA-A*32:01; SMC1B; ENSG00000077935; CTA
ALLFAVHSF

SEQ ID NO: 80902 - protein, 9 aa, Homo sapiens
  Table A; Target 80902; HLA-B*44:02; SMC1B; ENSG00000077935; CTA
ALLFAVHSF

SEQ ID NO: 80903 - protein, 9 aa, Homo sapiens
  Table A; Target 80903; HLA-A*03:01; SMC1B; ENSG00000077935; CTA
ALSFVMGEK

SEQ ID NO: 80904 - protein, 9 aa, Homo sapiens
  Table A; Target 80904; HLA-A*03:02; SMC1B; ENSG00000077935; CTA
ALSFVMGEK

SEQ ID NO: 80905 - protein, 9 aa, Homo sapiens
  Table A; Target 80905; HLA-A*03:01; SMC1B; ENSG00000077935; CTA
ALSGPERQK

SEQ ID NO: 80906 - protein, 9 aa, Homo sapiens
  Table A; Target 80906; HLA-A*03:02; SMC1B; ENSG00000077935; CTA
ALSGPERQK

SEQ ID NO: 80907 - protein, 9 aa, Homo sapiens
  Table A; Target 80907; HLA-B*56:01; SMC1B; ENSG00000077935; CTA
APFFVLDEV

SEQ ID NO: 80908 - protein, 9 aa, Homo sapiens
  Table A; Target 80908; HLA-B*07:02; SMC1B; ENSG00000077935; CTA
APNLRALEN

SEQ ID NO: 80909 - protein, 9 aa, Homo sapiens
  Table A; Target 80909; HLA-B*08:01; SMC1B; ENSG00000077935; CTA
APNLRALEN

SEQ ID NO: 80910 - protein, 9 aa, Homo sapiens
  Table A; Target 80910; HLA-C*07:02; SMC1B; ENSG00000077935; CTA
APNLRALEN

SEQ ID NO: 80911 - protein, 10 aa, Homo sapiens
  Table A; Target 80911; HLA-B*07:02; SMC1B; ENSG00000077935; CTA
APNLRALENL

SEQ ID NO: 80912 - protein, 10 aa, Homo sapiens
  Table A; Target 80912; HLA-C*07:02; SMC1B; ENSG00000077935; CTA
APNLRALENL

SEQ ID NO: 80913 - protein, 9 aa, Homo sapiens
  Table A; Target 80913; HLA-A*03:01; SMC1B; ENSG00000077935; CTA
ASQEDILLK

SEQ ID NO: 80914 - protein, 9 aa, Homo sapiens
  Table A; Target 80914; HLA-A*03:02; SMC1B; ENSG00000077935; CTA
ASQEDILLK

SEQ ID NO: 80915 - protein, 9 aa, Homo sapiens
  Table A; Target 80915; HLA-C*07:06; SMC1B; ENSG00000077935; CTA
ASQEDILLK

SEQ ID NO: 80916 - protein, 8 aa, Homo sapiens
  Table A; Target 80916; HLA-A*11:01; SMC1B; ENSG00000077935; CTA
ATIDIYEK

SEQ ID NO: 80917 - protein, 9 aa, Homo sapiens
  Table A; Target 80917; HLA-A*03:01; SMC1B; ENSG00000077935; CTA
ATMTQQLEK

SEQ ID NO: 80918 - protein, 9 aa, Homo sapiens
  Table A; Target 80918; HLA-A*03:02; SMC1B; ENSG00000077935; CTA
ATMTQQLEK

SEQ ID NO: 80919 - protein, 9 aa, Homo sapiens
  Table A; Target 80919; HLA-C*07:06; SMC1B; ENSG00000077935; CTA
ATMTQQLEK

SEQ ID NO: 80920 - protein, 9 aa, Homo sapiens
  Table A; Target 80920; HLA-A*02:07; SMC1B; ENSG00000077935; CTA
AVDREVGKL

SEQ ID NO: 80921 - protein, 9 aa, Homo sapiens
  Table A; Target 80921; HLA-C*05:01; SMC1B; ENSG00000077935; CTA
AVDREVGKL

SEQ ID NO: 80922 - protein, 11 aa, Homo sapiens
  Table A; Target 80922; HLA-A*11:01; SMC1B; ENSG00000077935; CTA
AVDREVGKLQK

SEQ ID NO: 80923 - protein, 8 aa, Homo sapiens
  Table A; Target 80923; HLA-A*31:01; SMC1B; ENSG00000077935; CTA
AVTKVFGR

SEQ ID NO: 80924 - protein, 9 aa, Homo sapiens
  Table A; Target 80924; HLA-B*49:01; SMC1B; ENSG00000077935; CTA
CEEIGVENI

SEQ ID NO: 80925 - protein, 10 aa, Homo sapiens
  Table A; Target 80925; HLA-A*03:01; SMC1B; ENSG00000077935; CTA
CIIGPNGSGK

SEQ ID NO: 80926 - protein, 10 aa, Homo sapiens
  Table A; Target 80926; HLA-A*03:02; SMC1B; ENSG00000077935; CTA
CIIGPNGSGK

SEQ ID NO: 80927 - protein, 10 aa, Homo sapiens
  Table A; Target 80927; HLA-A*11:01; SMC1B; ENSG00000077935; CTA
CIIGPNGSGK

SEQ ID NO: 80928 - protein, 11 aa, Homo sapiens
  Table A; Target 80928; HLA-A*03:02; SMC1B; ENSG00000077935; CTA
CLQTVNELMAK

SEQ ID NO: 80929 - protein, 9 aa, Homo sapiens
  Table A; Target 80929; HLA-A*02:03; SMC1B; ENSG00000077935; CTA
CMFSRVLTL

SEQ ID NO: 80930 - protein, 9 aa, Homo sapiens
  Table A; Target 80930; HLA-A*02:04; SMC1B; ENSG00000077935; CTA
CMFSRVLTL

SEQ ID NO: 80931 - protein, 9 aa, Homo sapiens
  Table A; Target 80931; HLA-B*08:01; SMC1B; ENSG00000077935; CTA
CMFSRVLTL

SEQ ID NO: 80932 - protein, 9 aa, Homo sapiens
  Table A; Target 80932; HLA-C*16:04; SMC1B; ENSG00000077935; CTA
CRNNSAQAF

SEQ ID NO: 80933 - protein, 9 aa, Homo sapiens
  Table A; Target 80933; HLA-B*27:05; SMC1B; ENSG00000077935; CTA
CRQEFEQVK

SEQ ID NO: 80934 - protein, 9 aa, Homo sapiens
  Table A; Target 80934; HLA-A*29:02; SMC1B; ENSG00000077935; CTA
CVAALALLF

SEQ ID NO: 80935 - protein, 9 aa, Homo sapiens
  Table A; Target 80935; HLA-B*51:01; SMC1B; ENSG00000077935; CTA
DAALDNTNI

SEQ ID NO: 80936 - protein, 11 aa, Homo sapiens
  Table A; Target 80936; HLA-A*68:01; SMC1B; ENSG00000077935; CTA
DAALDNTNIGK

SEQ ID NO: 80937 - protein, 11 aa, Homo sapiens
  Table A; Target 80937; HLA-C*07:06; SMC1B; ENSG00000077935; CTA
DAALDNTNIGK

SEQ ID NO: 80938 - protein, 8 aa, Homo sapiens
  Table A; Target 80938; HLA-B*51:01; SMC1B; ENSG00000077935; CTA
DAFEASRK

SEQ ID NO: 80939 - protein, 10 aa, Homo sapiens
  Table A; Target 80939; HLA-B*54:01; SMC1B; ENSG00000077935; CTA
DAFEASRKEA

SEQ ID NO: 80940 - protein, 11 aa, Homo sapiens
  Table A; Target 80940; HLA-A*33:01; SMC1B; ENSG00000077935; CTA
DAFEASRKEAR

SEQ ID NO: 80941 - protein, 10 aa, Homo sapiens
  Table A; Target 80941; HLA-A*25:01; SMC1B; ENSG00000077935; CTA
DALIGIYPEY

SEQ ID NO: 80942 - protein, 10 aa, Homo sapiens
  Table A; Target 80942; HLA-A*26:01; SMC1B; ENSG00000077935; CTA
DALIGIYPEY

SEQ ID NO: 80943 - protein, 10 aa, Homo sapiens
  Table A; Target 80943; HLA-A*33:01; SMC1B; ENSG00000077935; CTA
DALIGIYPEY

SEQ ID NO: 80944 - protein, 10 aa, Homo sapiens
  Table A; Target 80944; HLA-C*07:06; SMC1B; ENSG00000077935; CTA
DALIGIYPEY

SEQ ID NO: 80945 - protein, 8 aa, Homo sapiens
  Table A; Target 80945; HLA-A*33:01; SMC1B; ENSG00000077935; CTA
DAQFNFNK

SEQ ID NO: 80946 - protein, 8 aa, Homo sapiens
  Table A; Target 80946; HLA-B*27:02; SMC1B; ENSG00000077935; CTA
DAQFNFNK

SEQ ID NO: 80947 - protein, 9 aa, Homo sapiens
  Table A; Target 80947; HLA-A*33:01; SMC1B; ENSG00000077935; CTA
DAQFNFNKK

SEQ ID NO: 80948 - protein, 9 aa, Homo sapiens
  Table A; Target 80948; HLA-A*68:01; SMC1B; ENSG00000077935; CTA
DAQFNFNKK

SEQ ID NO: 80949 - protein, 10 aa, Homo sapiens
  Table A; Target 80949; HLA-A*33:01; SMC1B; ENSG00000077935; CTA
DCIRFLKEER

SEQ ID NO: 80950 - protein, 8 aa, Homo sapiens
  Table A; Target 80950; HLA-B*18:01; SMC1B; ENSG00000077935; CTA
DDIIEVEM

SEQ ID NO: 80951 - protein, 8 aa, Homo sapiens
  Table A; Target 80951; HLA-B*18:01; SMC1B; ENSG00000077935; CTA
DEKELKNL

SEQ ID NO: 80952 - protein, 9 aa, Homo sapiens
  Table A; Target 80952; HLA-B*08:01; SMC1B; ENSG00000077935; CTA
DIKALETEL

SEQ ID NO: 80953 - protein, 8 aa, Homo sapiens
  Table A; Target 80953; HLA-A*33:01; SMC1B; ENSG00000077935; CTA
DIKPINER

SEQ ID NO: 80954 - protein, 8 aa, Homo sapiens
  Table A; Target 80954; HLA-A*33:03; SMC1B; ENSG00000077935; CTA
DIKPINER

SEQ ID NO: 80955 - protein, 9 aa, Homo sapiens
  Table A; Target 80955; HLA-B*08:01; SMC1B; ENSG00000077935; CTA
DIKPINERL

SEQ ID NO: 80956 - protein, 10 aa, Homo sapiens
  Table A; Target 80956; HLA-A*33:01; SMC1B; ENSG00000077935; CTA
DIKPINERLR

SEQ ID NO: 80957 - protein, 8 aa, Homo sapiens
  Table A; Target 80957; HLA-B*08:01; SMC1B; ENSG00000077935; CTA
DILLKTAA

SEQ ID NO: 80958 - protein, 9 aa, Homo sapiens
  Table A; Target 80958; HLA-B*08:01; SMC1B; ENSG00000077935; CTA
DILLKTAAP

SEQ ID NO: 80959 - protein, 9 aa, Homo sapiens
  Table A; Target 80959; HLA-A*25:01; SMC1B; ENSG00000077935; CTA
DIYEKEEAF

SEQ ID NO: 80960 - protein, 9 aa, Homo sapiens
  Table A; Target 80960; HLA-A*26:01; SMC1B; ENSG00000077935; CTA
DIYEKEEAF

SEQ ID NO: 80961 - protein, 9 aa, Homo sapiens
  Table A; Target 80961; HLA-B*08:01; SMC1B; ENSG00000077935; CTA
DIYEKEEAF

SEQ ID NO: 80962 - protein, 9 aa, Homo sapiens
  Table A; Target 80962; HLA-B*18:01; SMC1B; ENSG00000077935; CTA
DIYEKEEAF

SEQ ID NO: 80963 - protein, 9 aa, Homo sapiens
  Table A; Target 80963; HLA-B*35:01; SMC1B; ENSG00000077935; CTA
DIYEKEEAF

SEQ ID NO: 80964 - protein, 9 aa, Homo sapiens
  Table A; Target 80964; HLA-A*33:01; SMC1B; ENSG00000077935; CTA
DLCHPIHKK

SEQ ID NO: 80965 - protein, 8 aa, Homo sapiens
  Table A; Target 80965; HLA-B*08:01; SMC1B; ENSG00000077935; CTA
DLKQIQTL

SEQ ID NO: 80966 - protein, 9 aa, Homo sapiens
  Table A; Target 80966; HLA-B*08:01; SMC1B; ENSG00000077935; CTA
DLSVKRESL

SEQ ID NO: 80967 - protein, 9 aa, Homo sapiens
  Table A; Target 80967; HLA-B*18:01; SMC1B; ENSG00000077935; CTA
DNLVSRSVY

SEQ ID NO: 80968 - protein, 11 aa, Homo sapiens
  Table A; Target 80968; HLA-A*25:01; SMC1B; ENSG00000077935; CTA
DNTNIGKVSSY

SEQ ID NO: 80969 - protein, 11 aa, Homo sapiens
  Table A; Target 80969; HLA-A*26:01; SMC1B; ENSG00000077935; CTA
DNTNIGKVSSY

SEQ ID NO: 80970 - protein, 9 aa, Homo sapiens
  Table A; Target 80970; HLA-A*33:01; SMC1B; ENSG00000077935; CTA
DQEIEAHLR

SEQ ID NO: 80971 - protein, 8 aa, Homo sapiens
  Table A; Target 80971; HLA-B*51:01; SMC1B; ENSG00000077935; CTA
DQFQMIVI

SEQ ID NO: 80972 - protein, 10 aa, Homo sapiens
  Table A; Target 80972; HLA-A*68:01; SMC1B; ENSG00000077935; CTA
DTEGQESSKR

SEQ ID NO: 80973 - protein, 10 aa, Homo sapiens
  Table A; Target 80973; HLA-A*25:01; SMC1B; ENSG00000077935; CTA
DVIKTQFPQL

SEQ ID NO: 80974 - protein, 10 aa, Homo sapiens
  Table A; Target 80974; HLA-A*26:01; SMC1B; ENSG00000077935; CTA
DVIKTQFPQL

SEQ ID NO: 80975 - protein, 10 aa, Homo sapiens
  Table A; Target 80975; HLA-A*68:01; SMC1B; ENSG00000077935; CTA
DVIKTQFPQL

SEQ ID NO: 80976 - protein, 11 aa, Homo sapiens
  Table A; Target 80976; HLA-A*33:01; SMC1B; ENSG00000077935; CTA
DYLDIKPINER

SEQ ID NO: 80977 - protein, 11 aa, Homo sapiens
  Table A; Target 80977; HLA-A*33:03; SMC1B; ENSG00000077935; CTA
DYLDIKPINER

SEQ ID NO: 80978 - protein, 9 aa, Homo sapiens
  Table A; Target 80978; HLA-B*51:01; SMC1B; ENSG00000077935; CTA
EAESTQATI

SEQ ID NO: 80979 - protein, 9 aa, Homo sapiens
  Table A; Target 80979; HLA-C*05:01; SMC1B; ENSG00000077935; CTA
EAESTQATI

SEQ ID NO: 80980 - protein, 10 aa, Homo sapiens
  Table A; Target 80980; HLA-A*25:01; SMC1B; ENSG00000077935; CTA
EAFEIDYSSL

SEQ ID NO: 80981 - protein, 10 aa, Homo sapiens
  Table A; Target 80981; HLA-A*26:01; SMC1B; ENSG00000077935; CTA
EAFEIDYSSL

SEQ ID NO: 80982 - protein, 10 aa, Homo sapiens
  Table A; Target 80982; HLA-A*68:01; SMC1B; ENSG00000077935; CTA
EAFEIDYSSL

SEQ ID NO: 80983 - protein, 10 aa, Homo sapiens
  Table A; Target 80983; HLA-A*68:02; SMC1B; ENSG00000077935; CTA
EAFEIDYSSL

SEQ ID NO: 80984 - protein, 10 aa, Homo sapiens
  Table A; Target 80984; HLA-B*35:01; SMC1B; ENSG00000077935; CTA
EAFEIDYSSL

SEQ ID NO: 80985 - protein, 10 aa, Homo sapiens
  Table A; Target 80985; HLA-B*35:03; SMC1B; ENSG00000077935; CTA
EAFEIDYSSL

SEQ ID NO: 80986 - protein, 10 aa, Homo sapiens
  Table A; Target 80986; HLA-C*07:06; SMC1B; ENSG00000077935; CTA
EAFEIDYSSL

SEQ ID NO: 80987 - protein, 8 aa, Homo sapiens
  Table A; Target 80987; HLA-B*08:01; SMC1B; ENSG00000077935; CTA
EAHLRLLL

SEQ ID NO: 80988 - protein, 9 aa, Homo sapiens
  Table A; Target 80988; HLA-B*27:02; SMC1B; ENSG00000077935; CTA
EDAQFNFNK

SEQ ID NO: 80989 - protein, 10 aa, Homo sapiens
  Table A; Target 80989; HLA-A*68:01; SMC1B; ENSG00000077935; CTA
EDAQFNFNKK

SEQ ID NO: 80990 - protein, 9 aa, Homo sapiens
  Table A; Target 80990; HLA-A*25:01; SMC1B; ENSG00000077935; CTA
EEAERYQSL

SEQ ID NO: 80991 - protein, 9 aa, Homo sapiens
  Table A; Target 80991; HLA-A*30:01; SMC1B; ENSG00000077935; CTA
EEAERYQSL

SEQ ID NO: 80992 - protein, 9 aa, Homo sapiens
  Table A; Target 80992; HLA-B*08:01; SMC1B; ENSG00000077935; CTA
EEAERYQSL

SEQ ID NO: 80993 - protein, 9 aa, Homo sapiens
  Table A; Target 80993; HLA-B*18:01; SMC1B; ENSG00000077935; CTA
EEAERYQSL

SEQ ID NO: 80994 - protein, 9 aa, Homo sapiens
  Table A; Target 80994; HLA-B*37:01; SMC1B; ENSG00000077935; CTA
EEAERYQSL

SEQ ID NO: 80995 - protein, 9 aa, Homo sapiens
  Table A; Target 80995; HLA-B*40:01; SMC1B; ENSG00000077935; CTA
EEAERYQSL

SEQ ID NO: 80996 - protein, 9 aa, Homo sapiens
  Table A; Target 80996; HLA-B*44:02; SMC1B; ENSG00000077935; CTA
EEAERYQSL

SEQ ID NO: 80997 - protein, 9 aa, Homo sapiens
  Table A; Target 80997; HLA-B*44:03; SMC1B; ENSG00000077935; CTA
EEAERYQSL

SEQ ID NO: 80998 - protein, 9 aa, Homo sapiens
  Table A; Target 80998; HLA-C*16:04; SMC1B; ENSG00000077935; CTA
EEAERYQSL

SEQ ID NO: 80999 - protein, 8 aa, Homo sapiens
  Table A; Target 80999; HLA-B*18:01; SMC1B; ENSG00000077935; CTA
EEAFEIDY

SEQ ID NO: 81000 - protein, 8 aa, Homo sapiens
  Table A; Target 81000; HLA-B*18:01; SMC1B; ENSG00000077935; CTA
EEARHIAL

SEQ ID NO: 81001 - protein, 8 aa, Homo sapiens
  Table A; Target 81001; HLA-B*37:01; SMC1B; ENSG00000077935; CTA
EEARHIAL

SEQ ID NO: 81002 - protein, 8 aa, Homo sapiens
  Table A; Target 81002; HLA-B*18:01; SMC1B; ENSG00000077935; CTA
EEDAQFNF

SEQ ID NO: 81003 - protein, 8 aa, Homo sapiens
  Table A; Target 81003; HLA-B*37:01; SMC1B; ENSG00000077935; CTA
EEDAQFNF

SEQ ID NO: 81004 - protein, 8 aa, Homo sapiens
  Table A; Target 81004; HLA-B*44:02; SMC1B; ENSG00000077935; CTA
EEDAQFNF

SEQ ID NO: 81005 - protein, 8 aa, Homo sapiens
  Table A; Target 81005; HLA-B*44:03; SMC1B; ENSG00000077935; CTA
EEDAQFNF

SEQ ID NO: 81006 - protein, 10 aa, Homo sapiens
  Table A; Target 81006; HLA-B*40:01; SMC1B; ENSG00000077935; CTA
EEFYSRADAL

SEQ ID NO: 81007 - protein, 8 aa, Homo sapiens
  Table A; Target 81007; HLA-B*18:01; SMC1B; ENSG00000077935; CTA
EEIGVENI

SEQ ID NO: 81008 - protein, 8 aa, Homo sapiens
  Table A; Target 81008; HLA-B*49:01; SMC1B; ENSG00000077935; CTA
EEIGVENI

SEQ ID NO: 81009 - protein, 11 aa, Homo sapiens
  Table A; Target 81009; HLA-A*25:01; SMC1B; ENSG00000077935; CTA
EEIGVENIREF

SEQ ID NO: 81010 - protein, 11 aa, Homo sapiens
  Table A; Target 81010; HLA-A*26:01; SMC1B; ENSG00000077935; CTA
EEIGVENIREF

SEQ ID NO: 81011 - protein, 11 aa, Homo sapiens
  Table A; Target 81011; HLA-A*30:01; SMC1B; ENSG00000077935; CTA
EEIGVENIREF

SEQ ID NO: 81012 - protein, 11 aa, Homo sapiens
  Table A; Target 81012; HLA-B*18:01; SMC1B; ENSG00000077935; CTA
EEIGVENIREF

SEQ ID NO: 81013 - protein, 11 aa, Homo sapiens
  Table A; Target 81013; HLA-B*27:02; SMC1B; ENSG00000077935; CTA
EEIGVENIREF

SEQ ID NO: 81014 - protein, 11 aa, Homo sapiens
  Table A; Target 81014; HLA-C*16:04; SMC1B; ENSG00000077935; CTA
EEIGVENIREF

SEQ ID NO: 81015 - protein, 9 aa, Homo sapiens
  Table A; Target 81015; HLA-A*30:01; SMC1B; ENSG00000077935; CTA
EEISTSGEL

SEQ ID NO: 81016 - protein, 9 aa, Homo sapiens
  Table A; Target 81016; HLA-B*40:01; SMC1B; ENSG00000077935; CTA
EEISTSGEL

SEQ ID NO: 81017 - protein, 9 aa, Homo sapiens
  Table A; Target 81017; HLA-B*44:02; SMC1B; ENSG00000077935; CTA
EEISTSGEL

SEQ ID NO: 81018 - protein, 9 aa, Homo sapiens
  Table A; Target 81018; HLA-B*44:03; SMC1B; ENSG00000077935; CTA
EEISTSGEL

SEQ ID NO: 81019 - protein, 10 aa, Homo sapiens
  Table A; Target 81019; HLA-B*40:01; SMC1B; ENSG00000077935; CTA
EEISTSGELI

SEQ ID NO: 81020 - protein, 10 aa, Homo sapiens
  Table A; Target 81020; HLA-B*44:02; SMC1B; ENSG00000077935; CTA
EEISTSGELI

SEQ ID NO: 81021 - protein, 10 aa, Homo sapiens
  Table A; Target 81021; HLA-B*44:03; SMC1B; ENSG00000077935; CTA
EEISTSGELI

SEQ ID NO: 81022 - protein, 10 aa, Homo sapiens
  Table A; Target 81022; HLA-B*49:01; SMC1B; ENSG00000077935; CTA
EEISTSGELI

SEQ ID NO: 81023 - protein, 8 aa, Homo sapiens
  Table A; Target 81023; HLA-B*49:01; SMC1B; ENSG00000077935; CTA
EELKMNKI

SEQ ID NO: 81024 - protein, 10 aa, Homo sapiens
  Table A; Target 81024; HLA-B*40:01; SMC1B; ENSG00000077935; CTA
EELKMNKIQL

SEQ ID NO: 81025 - protein, 10 aa, Homo sapiens
  Table A; Target 81025; HLA-B*44:03; SMC1B; ENSG00000077935; CTA
EELKMNKIQL

SEQ ID NO: 81026 - protein, 10 aa, Homo sapiens
  Table A; Target 81026; HLA-B*18:01; SMC1B; ENSG00000077935; CTA
EELNLIRSEL

SEQ ID NO: 81027 - protein, 10 aa, Homo sapiens
  Table A; Target 81027; HLA-B*40:01; SMC1B; ENSG00000077935; CTA
EELNLIRSEL

SEQ ID NO: 81028 - protein, 10 aa, Homo sapiens
  Table A; Target 81028; HLA-B*44:02; SMC1B; ENSG00000077935; CTA
EELNLIRSEL

SEQ ID NO: 81029 - protein, 10 aa, Homo sapiens
  Table A; Target 81029; HLA-B*44:03; SMC1B; ENSG00000077935; CTA
EELNLIRSEL

SEQ ID NO: 81030 - protein, 10 aa, Homo sapiens
  Table A; Target 81030; HLA-B*18:01; SMC1B; ENSG00000077935; CTA
EEPYLEGISY

SEQ ID NO: 81031 - protein, 10 aa, Homo sapiens
  Table A; Target 81031; HLA-B*44:02; SMC1B; ENSG00000077935; CTA
EEPYLEGISY

SEQ ID NO: 81032 - protein, 10 aa, Homo sapiens
  Table A; Target 81032; HLA-B*44:03; SMC1B; ENSG00000077935; CTA
EEPYLEGISY

SEQ ID NO: 81033 - protein, 9 aa, Homo sapiens
  Table A; Target 81033; HLA-B*18:01; SMC1B; ENSG00000077935; CTA
EERAEPETF

SEQ ID NO: 81034 - protein, 9 aa, Homo sapiens
  Table A; Target 81034; HLA-B*44:02; SMC1B; ENSG00000077935; CTA
EERAEPETF

SEQ ID NO: 81035 - protein, 9 aa, Homo sapiens
  Table A; Target 81035; HLA-B*44:03; SMC1B; ENSG00000077935; CTA
EERAEPETF

SEQ ID NO: 81036 - protein, 9 aa, Homo sapiens
  Table A; Target 81036; HLA-B*44:02; SMC1B; ENSG00000077935; CTA
EESGEEKTF

SEQ ID NO: 81037 - protein, 9 aa, Homo sapiens
  Table A; Target 81037; HLA-B*44:03; SMC1B; ENSG00000077935; CTA
EESGEEKTF

SEQ ID NO: 81038 - protein, 9 aa, Homo sapiens
  Table A; Target 81038; HLA-C*16:04; SMC1B; ENSG00000077935; CTA
EESGEEKTF

SEQ ID NO: 81039 - protein, 8 aa, Homo sapiens
  Table A; Target 81039; HLA-B*18:01; SMC1B; ENSG00000077935; CTA
EETLVDEI

SEQ ID NO: 81040 - protein, 8 aa, Homo sapiens
  Table A; Target 81040; HLA-B*49:01; SMC1B; ENSG00000077935; CTA
EETLVDEI

SEQ ID NO: 81041 - protein, 8 aa, Homo sapiens
  Table A; Target 81041; HLA-B*08:01; SMC1B; ENSG00000077935; CTA
EEYTKTCM

SEQ ID NO: 81042 - protein, 8 aa, Homo sapiens
  Table A; Target 81042; HLA-B*18:01; SMC1B; ENSG00000077935; CTA
EEYTKTCM

SEQ ID NO: 81043 - protein, 9 aa, Homo sapiens
  Table A; Target 81043; HLA-A*33:01; SMC1B; ENSG00000077935; CTA
EFENKHVKR

SEQ ID NO: 81044 - protein, 9 aa, Homo sapiens
  Table A; Target 81044; HLA-A*33:03; SMC1B; ENSG00000077935; CTA
EFENKHVKR

SEQ ID NO: 81045 - protein, 10 aa, Homo sapiens
  Table A; Target 81045; HLA-A*33:03; SMC1B; ENSG00000077935; CTA
EFNEELNLIR

SEQ ID NO: 81046 - protein, 11 aa, Homo sapiens
  Table A; Target 81046; HLA-A*33:01; SMC1B; ENSG00000077935; CTA
EFRFNDNLVSR

SEQ ID NO: 81047 - protein, 9 aa, Homo sapiens
  Table A; Target 81047; HLA-B*08:01; SMC1B; ENSG00000077935; CTA
EFYSRADAL

SEQ ID NO: 81048 - protein, 9 aa, Homo sapiens
  Table A; Target 81048; HLA-B*38:01; SMC1B; ENSG00000077935; CTA
EHGMLTRQL

SEQ ID NO: 81049 - protein, 9 aa, Homo sapiens
  Table A; Target 81049; HLA-B*38:01; SMC1B; ENSG00000077935; CTA
EHVNRDLSV

SEQ ID NO: 81050 - protein, 9 aa, Homo sapiens
  Table A; Target 81050; HLA-B*39:01; SMC1B; ENSG00000077935; CTA
EHVNRDLSV

SEQ ID NO: 81051 - protein, 10 aa, Homo sapiens
  Table A; Target 81051; HLA-B*38:01; SMC1B; ENSG00000077935; CTA
EHVSISIDQI

SEQ ID NO: 81052 - protein, 9 aa, Homo sapiens
  Table A; Target 81052; HLA-A*01:01; SMC1B; ENSG00000077935; CTA
EIDQKRYFY

SEQ ID NO: 81053 - protein, 10 aa, Homo sapiens
  Table A; Target 81053; HLA-A*25:01; SMC1B; ENSG00000077935; CTA
EIGVENIREF

SEQ ID NO: 81054 - protein, 9 aa, Homo sapiens
  Table A; Target 81054; HLA-A*25:01; SMC1B; ENSG00000077935; CTA
EIILLSGSL

SEQ ID NO: 81055 - protein, 9 aa, Homo sapiens
  Table A; Target 81055; HLA-A*68:02; SMC1B; ENSG00000077935; CTA
EKIGIIVKA

SEQ ID NO: 81056 - protein, 9 aa, Homo sapiens
  Table A; Target 81056; HLA-A*25:01; SMC1B; ENSG00000077935; CTA
ELADLDAAW

SEQ ID NO: 81057 - protein, 10 aa, Homo sapiens
  Table A; Target 81057; HLA-A*01:01; SMC1B; ENSG00000077935; CTA
ELEASQLDRY

SEQ ID NO: 81058 - protein, 9 aa, Homo sapiens
  Table A; Target 81058; HLA-A*33:01; SMC1B; ENSG00000077935; CTA
ELIGEYEEK

SEQ ID NO: 81059 - protein, 9 aa, Homo sapiens
  Table A; Target 81059; HLA-A*33:03; SMC1B; ENSG00000077935; CTA
ELIGEYEEK

SEQ ID NO: 81060 - protein, 9 aa, Homo sapiens
  Table A; Target 81060; HLA-A*68:01; SMC1B; ENSG00000077935; CTA
ELIGEYEEK

SEQ ID NO: 81061 - protein, 9 aa, Homo sapiens
  Table A; Target 81061; HLA-B*08:01; SMC1B; ENSG00000077935; CTA
ELKMNKIQL

SEQ ID NO: 81062 - protein, 8 aa, Homo sapiens
  Table A; Target 81062; HLA-B*08:01; SMC1B; ENSG00000077935; CTA
ELKSVETL

SEQ ID NO: 81063 - protein, 9 aa, Homo sapiens
  Table A; Target 81063; HLA-A*25:01; SMC1B; ENSG00000077935; CTA
ELMAKQQQL

SEQ ID NO: 81064 - protein, 9 aa, Homo sapiens
  Table A; Target 81064; HLA-A*26:01; SMC1B; ENSG00000077935; CTA
ELMAKQQQL

SEQ ID NO: 81065 - protein, 9 aa, Homo sapiens
  Table A; Target 81065; HLA-B*08:01; SMC1B; ENSG00000077935; CTA
ELMAKQQQL

SEQ ID NO: 81066 - protein, 9 aa, Homo sapiens
  Table A; Target 81066; HLA-B*08:01; SMC1B; ENSG00000077935; CTA
ELNLIRSEL

SEQ ID NO: 81067 - protein, 9 aa, Homo sapiens
  Table A; Target 81067; HLA-A*25:01; SMC1B; ENSG00000077935; CTA
EPYLEGISY

SEQ ID NO: 81068 - protein, 9 aa, Homo sapiens
  Table A; Target 81068; HLA-A*26:01; SMC1B; ENSG00000077935; CTA
EPYLEGISY

SEQ ID NO: 81069 - protein, 9 aa, Homo sapiens
  Table A; Target 81069; HLA-B*15:03; SMC1B; ENSG00000077935; CTA
EPYLEGISY

SEQ ID NO: 81070 - protein, 9 aa, Homo sapiens
  Table A; Target 81070; HLA-B*18:01; SMC1B; ENSG00000077935; CTA
EPYLEGISY

SEQ ID NO: 81071 - protein, 9 aa, Homo sapiens
  Table A; Target 81071; HLA-B*35:03; SMC1B; ENSG00000077935; CTA
EPYLEGISY

SEQ ID NO: 81072 - protein, 9 aa, Homo sapiens
  Table A; Target 81072; HLA-B*55:01; SMC1B; ENSG00000077935; CTA
EPYLEGISY

SEQ ID NO: 81073 - protein, 9 aa, Homo sapiens
  Table A; Target 81073; HLA-C*03:03; SMC1B; ENSG00000077935; CTA
EPYLEGISY

SEQ ID NO: 81074 - protein, 9 aa, Homo sapiens
  Table A; Target 81074; HLA-B*39:01; SMC1B; ENSG00000077935; CTA
EQSQLQSEL

SEQ ID NO: 81075 - protein, 10 aa, Homo sapiens
  Table A; Target 81075; HLA-B*38:01; SMC1B; ENSG00000077935; CTA
EQSQLQSELL

SEQ ID NO: 81076 - protein, 9 aa, Homo sapiens
  Table A; Target 81076; HLA-B*38:01; SMC1B; ENSG00000077935; CTA
ERAEPETFL

SEQ ID NO: 81077 - protein, 9 aa, Homo sapiens
  Table A; Target 81077; HLA-B*39:01; SMC1B; ENSG00000077935; CTA
ERAEPETFL

SEQ ID NO: 81078 - protein, 9 aa, Homo sapiens
  Table A; Target 81078; HLA-A*33:01; SMC1B; ENSG00000077935; CTA
ESISVKKPK

SEQ ID NO: 81079 - protein, 9 aa, Homo sapiens
  Table A; Target 81079; HLA-A*33:03; SMC1B; ENSG00000077935; CTA
ESISVKKPK

SEQ ID NO: 81080 - protein, 10 aa, Homo sapiens
  Table A; Target 81080; HLA-A*33:01; SMC1B; ENSG00000077935; CTA
ESTDAFEASR

SEQ ID NO: 81081 - protein, 10 aa, Homo sapiens
  Table A; Target 81081; HLA-A*33:03; SMC1B; ENSG00000077935; CTA
ESTDAFEASR

SEQ ID NO: 81082 - protein, 10 aa, Homo sapiens
  Table A; Target 81082; HLA-A*68:01; SMC1B; ENSG00000077935; CTA
ESTDAFEASR

SEQ ID NO: 81083 - protein, 10 aa, Homo sapiens
  Table A; Target 81083; HLA-C*07:06; SMC1B; ENSG00000077935; CTA
ESTDAFEASR

SEQ ID NO: 81084 - protein, 9 aa, Homo sapiens
  Table A; Target 81084; HLA-A*25:01; SMC1B; ENSG00000077935; CTA
ETMEEARHI

SEQ ID NO: 81085 - protein, 9 aa, Homo sapiens
  Table A; Target 81085; HLA-A*26:01; SMC1B; ENSG00000077935; CTA
ETMEEARHI

SEQ ID NO: 81086 - protein, 11 aa, Homo sapiens
  Table A; Target 81086; HLA-A*25:01; SMC1B; ENSG00000077935; CTA
ETMEEARHIAL

SEQ ID NO: 81087 - protein, 11 aa, Homo sapiens
  Table A; Target 81087; HLA-A*33:03; SMC1B; ENSG00000077935; CTA
ETMEEARHIAL

SEQ ID NO: 81088 - protein, 11 aa, Homo sapiens
  Table A; Target 81088; HLA-A*68:01; SMC1B; ENSG00000077935; CTA
ETMEEARHIAL

SEQ ID NO: 81089 - protein, 11 aa, Homo sapiens
  Table A; Target 81089; HLA-A*68:02; SMC1B; ENSG00000077935; CTA
ETMEEARHIAL

SEQ ID NO: 81090 - protein, 9 aa, Homo sapiens
  Table A; Target 81090; HLA-A*25:01; SMC1B; ENSG00000077935; CTA
EVQGNLKQI

SEQ ID NO: 81091 - protein, 9 aa, Homo sapiens
  Table A; Target 81091; HLA-A*23:01; SMC1B; ENSG00000077935; CTA
EVVSIQTSL

SEQ ID NO: 81092 - protein, 9 aa, Homo sapiens
  Table A; Target 81092; HLA-A*25:01; SMC1B; ENSG00000077935; CTA
EVVSIQTSL

SEQ ID NO: 81093 - protein, 9 aa, Homo sapiens
  Table A; Target 81093; HLA-A*26:01; SMC1B; ENSG00000077935; CTA
EVVSIQTSL

SEQ ID NO: 81094 - protein, 9 aa, Homo sapiens
  Table A; Target 81094; HLA-A*33:03; SMC1B; ENSG00000077935; CTA
EVVSIQTSL

SEQ ID NO: 81095 - protein, 9 aa, Homo sapiens
  Table A; Target 81095; HLA-A*68:01; SMC1B; ENSG00000077935; CTA
EVVSIQTSL

SEQ ID NO: 81096 - protein, 9 aa, Homo sapiens
  Table A; Target 81096; HLA-B*35:01; SMC1B; ENSG00000077935; CTA
EVVSIQTSL

SEQ ID NO: 81097 - protein, 9 aa, Homo sapiens
  Table A; Target 81097; HLA-B*35:03; SMC1B; ENSG00000077935; CTA
EVVSIQTSL

SEQ ID NO: 81098 - protein, 9 aa, Homo sapiens
  Table A; Target 81098; HLA-C*07:06; SMC1B; ENSG00000077935; CTA
EVVSIQTSL

SEQ ID NO: 81099 - protein, 10 aa, Homo sapiens
  Table A; Target 81099; HLA-A*26:01; SMC1B; ENSG00000077935; CTA
EVVSIQTSLE

SEQ ID NO: 81100 - protein, 10 aa, Homo sapiens
  Table A; Target 81100; HLA-B*40:01; SMC1B; ENSG00000077935; CTA
FEEISTSGEL

SEQ ID NO: 81101 - protein, 11 aa, Homo sapiens
  Table A; Target 81101; HLA-B*38:01; SMC1B; ENSG00000077935; CTA
FEEISTSGELI

SEQ ID NO: 81102 - protein, 11 aa, Homo sapiens
  Table A; Target 81102; HLA-B*40:01; SMC1B; ENSG00000077935; CTA
FEEISTSGELI

SEQ ID NO: 81103 - protein, 11 aa, Homo sapiens
  Table A; Target 81103; HLA-B*49:01; SMC1B; ENSG00000077935; CTA
FEEISTSGELI

SEQ ID NO: 81104 - protein, 8 aa, Homo sapiens
  Table A; Target 81104; HLA-A*30:01; SMC1B; ENSG00000077935; CTA
FEHVSISI

SEQ ID NO: 81105 - protein, 8 aa, Homo sapiens
  Table A; Target 81105; HLA-B*18:01; SMC1B; ENSG00000077935; CTA
FEHVSISI

SEQ ID NO: 81106 - protein, 8 aa, Homo sapiens
  Table A; Target 81106; HLA-B*40:01; SMC1B; ENSG00000077935; CTA
FEHVSISI

SEQ ID NO: 81107 - protein, 8 aa, Homo sapiens
  Table A; Target 81107; HLA-B*49:01; SMC1B; ENSG00000077935; CTA
FEHVSISI

SEQ ID NO: 81108 - protein, 8 aa, Homo sapiens
  Table A; Target 81108; HLA-B*18:01; SMC1B; ENSG00000077935; CTA
FEIDYSSL

SEQ ID NO: 81109 - protein, 8 aa, Homo sapiens
  Table A; Target 81109; HLA-B*49:01; SMC1B; ENSG00000077935; CTA
FEIDYSSL

SEQ ID NO: 81110 - protein, 9 aa, Homo sapiens
  Table A; Target 81110; HLA-B*49:01; SMC1B; ENSG00000077935; CTA
FEIDYSSLK

SEQ ID NO: 81111 - protein, 9 aa, Homo sapiens
  Table A; Target 81111; HLA-A*30:01; SMC1B; ENSG00000077935; CTA
FEKQIEEEI

SEQ ID NO: 81112 - protein, 9 aa, Homo sapiens
  Table A; Target 81112; HLA-B*40:01; SMC1B; ENSG00000077935; CTA
FEKQIEEEI

SEQ ID NO: 81113 - protein, 9 aa, Homo sapiens
  Table A; Target 81113; HLA-B*49:01; SMC1B; ENSG00000077935; CTA
FEKQIEEEI

SEQ ID NO: 81114 - protein, 10 aa, Homo sapiens
  Table A; Target 81114; HLA-B*40:01; SMC1B; ENSG00000077935; CTA
FEKQIEEEIL

SEQ ID NO: 81115 - protein, 10 aa, Homo sapiens
  Table A; Target 81115; HLA-A*02:03; SMC1B; ENSG00000077935; CTA
FLKSGVISGG

SEQ ID NO: 81116 - protein, 11 aa, Homo sapiens
  Table A; Target 81116; HLA-A*01:01; SMC1B; ENSG00000077935; CTA
FLSPENPEEPY

SEQ ID NO: 81117 - protein, 8 aa, Homo sapiens
  Table A; Target 81117; HLA-A*33:03; SMC1B; ENSG00000077935; CTA
FNDNLVSR

SEQ ID NO: 81118 - protein, 11 aa, Homo sapiens
  Table A; Target 81118; HLA-A*01:01; SMC1B; ENSG00000077935; CTA
FNDNLVSRSVY

SEQ ID NO: 81119 - protein, 8 aa, Homo sapiens
  Table A; Target 81119; HLA-B*08:01; SMC1B; ENSG00000077935; CTA
FPQLKKVI

SEQ ID NO: 81120 - protein, 8 aa, Homo sapiens
  Table A; Target 81120; HLA-B*39:01; SMC1B; ENSG00000077935; CTA
FQESTDAF

SEQ ID NO: 81121 - protein, 8 aa, Homo sapiens
  Table A; Target 81121; HLA-C*05:01; SMC1B; ENSG00000077935; CTA
FQESTDAF

SEQ ID NO: 81122 - protein, 8 aa, Homo sapiens
  Table A; Target 81122; HLA-B*13:02; SMC1B; ENSG00000077935; CTA
FQGTVESI

SEQ ID NO: 81123 - protein, 8 aa, Homo sapiens
  Table A; Target 81123; HLA-B*13:02; SMC1B; ENSG00000077935; CTA
FQMIVISL

SEQ ID NO: 81124 - protein, 8 aa, Homo sapiens
  Table A; Target 81124; HLA-B*15:01; SMC1B; ENSG00000077935; CTA
FQMIVISL

SEQ ID NO: 81125 - protein, 10 aa, Homo sapiens
  Table A; Target 81125; HLA-B*35:03; SMC1B; ENSG00000077935; CTA
FVLDEVDAAL

SEQ ID NO: 81126 - protein, 10 aa, Homo sapiens
  Table A; Target 81126; HLA-A*02:01; SMC1B; ENSG00000077935; CTA
FVMGEKIANL

SEQ ID NO: 81127 - protein, 10 aa, Homo sapiens
  Table A; Target 81127; HLA-A*02:03; SMC1B; ENSG00000077935; CTA
FVMGEKIANL

SEQ ID NO: 81128 - protein, 10 aa, Homo sapiens
  Table A; Target 81128; HLA-A*02:04; SMC1B; ENSG00000077935; CTA
FVMGEKIANL

SEQ ID NO: 81129 - protein, 10 aa, Homo sapiens
  Table A; Target 81129; HLA-A*02:07; SMC1B; ENSG00000077935; CTA
FVMGEKIANL

SEQ ID NO: 81130 - protein, 10 aa, Homo sapiens
  Table A; Target 81130; HLA-A*25:01; SMC1B; ENSG00000077935; CTA
FVMGEKIANL

SEQ ID NO: 81131 - protein, 10 aa, Homo sapiens
  Table A; Target 81131; HLA-A*26:01; SMC1B; ENSG00000077935; CTA
FVMGEKIANL

SEQ ID NO: 81132 - protein, 10 aa, Homo sapiens
  Table A; Target 81132; HLA-A*33:03; SMC1B; ENSG00000077935; CTA
FVMGEKIANL

SEQ ID NO: 81133 - protein, 10 aa, Homo sapiens
  Table A; Target 81133; HLA-A*68:02; SMC1B; ENSG00000077935; CTA
FVMGEKIANL

SEQ ID NO: 81134 - protein, 10 aa, Homo sapiens
  Table A; Target 81134; HLA-C*02:02; SMC1B; ENSG00000077935; CTA
FVMGEKIANL

SEQ ID NO: 81135 - protein, 10 aa, Homo sapiens
  Table A; Target 81135; HLA-C*07:04; SMC1B; ENSG00000077935; CTA
FVMGEKIANL

SEQ ID NO: 81136 - protein, 8 aa, Homo sapiens
  Table A; Target 81136; HLA-C*14:02; SMC1B; ENSG00000077935; CTA
FYQEQSQL

SEQ ID NO: 81137 - protein, 8 aa, Homo sapiens
  Table A; Target 81137; HLA-C*14:02; SMC1B; ENSG00000077935; CTA
FYSRADAL

SEQ ID NO: 81138 - protein, 9 aa, Homo sapiens
  Table A; Target 81138; HLA-B*40:01; SMC1B; ENSG00000077935; CTA
GEEKTFARI

SEQ ID NO: 81139 - protein, 9 aa, Homo sapiens
  Table A; Target 81139; HLA-B*44:03; SMC1B; ENSG00000077935; CTA
GEEKTFARI

SEQ ID NO: 81140 - protein, 9 aa, Homo sapiens
  Table A; Target 81140; HLA-B*49:01; SMC1B; ENSG00000077935; CTA
GEEKTFARI

SEQ ID NO: 81141 - protein, 10 aa, Homo sapiens
  Table A; Target 81141; HLA-B*49:01; SMC1B; ENSG00000077935; CTA
GEEKTFARII

SEQ ID NO: 81142 - protein, 9 aa, Homo sapiens
  Table A; Target 81142; HLA-B*49:01; SMC1B; ENSG00000077935; CTA
GEKIANLRV

SEQ ID NO: 81143 - protein, 10 aa, Homo sapiens
  Table A; Target 81143; HLA-B*27:02; SMC1B; ENSG00000077935; CTA
GELIGEYEEK

SEQ ID NO: 81144 - protein, 9 aa, Homo sapiens
  Table A; Target 81144; HLA-B*44:03; SMC1B; ENSG00000077935; CTA
GEVQGNLKQ

SEQ ID NO: 81145 - protein, 10 aa, Homo sapiens
  Table A; Target 81145; HLA-A*30:01; SMC1B; ENSG00000077935; CTA
GEVQGNLKQI

SEQ ID NO: 81146 - protein, 10 aa, Homo sapiens
  Table A; Target 81146; HLA-B*40:01; SMC1B; ENSG00000077935; CTA
GEVQGNLKQI

SEQ ID NO: 81147 - protein, 10 aa, Homo sapiens
  Table A; Target 81147; HLA-B*44:02; SMC1B; ENSG00000077935; CTA
GEVQGNLKQI

SEQ ID NO: 81148 - protein, 10 aa, Homo sapiens
  Table A; Target 81148; HLA-B*44:03; SMC1B; ENSG00000077935; CTA
GEVQGNLKQI

SEQ ID NO: 81149 - protein, 10 aa, Homo sapiens
  Table A; Target 81149; HLA-B*49:01; SMC1B; ENSG00000077935; CTA
GEVQGNLKQI

SEQ ID NO: 81150 - protein, 9 aa, Homo sapiens
  Table A; Target 81150; HLA-B*15:03; SMC1B; ENSG00000077935; CTA
GKSNVMDAL

SEQ ID NO: 81151 - protein, 10 aa, Homo sapiens
  Table A; Target 81151; HLA-B*07:02; SMC1B; ENSG00000077935; CTA
GPERQKTVAL

SEQ ID NO: 81152 - protein, 10 aa, Homo sapiens
  Table A; Target 81152; HLA-C*07:02; SMC1B; ENSG00000077935; CTA
GPERQKTVAL

SEQ ID NO: 81153 - protein, 11 aa, Homo sapiens
  Table A; Target 81153; HLA-B*07:02; SMC1B; ENSG00000077935; CTA
GPNGSGKSNVM

SEQ ID NO: 81154 - protein, 9 aa, Homo sapiens
  Table A; Target 81154; HLA-B*27:05; SMC1B; ENSG00000077935; CTA
GRFITAIVV

SEQ ID NO: 81155 - protein, 9 aa, Homo sapiens
  Table A; Target 81155; HLA-B*27:05; SMC1B; ENSG00000077935; CTA
GRQVIGPFR

SEQ ID NO: 81156 - protein, 9 aa, Homo sapiens
  Table A; Target 81156; HLA-A*03:02; SMC1B; ENSG00000077935; CTA
GSEDIDHLK

SEQ ID NO: 81157 - protein, 9 aa, Homo sapiens
  Table A; Target 81157; HLA-A*11:01; SMC1B; ENSG00000077935; CTA
GSEDIDHLK

SEQ ID NO: 81158 - protein, 10 aa, Homo sapiens
  Table A; Target 81158; HLA-A*01:01; SMC1B; ENSG00000077935; CTA
GSEDIDHLKK

SEQ ID NO: 81159 - protein, 9 aa, Homo sapiens
  Table A; Target 81159; HLA-A*02:01; SMC1B; ENSG00000077935; CTA
GSLDDIIEV

SEQ ID NO: 81160 - protein, 8 aa, Homo sapiens
  Table A; Target 81160; HLA-A*32:01; SMC1B; ENSG00000077935; CTA
GTQTRLKY

SEQ ID NO: 81161 - protein, 8 aa, Homo sapiens
  Table A; Target 81161; HLA-C*16:01; SMC1B; ENSG00000077935; CTA
GTQTRLKY

SEQ ID NO: 81162 - protein, 9 aa, Homo sapiens
  Table A; Target 81162; HLA-A*03:01; SMC1B; ENSG00000077935; CTA
GTVESISVK

SEQ ID NO: 81163 - protein, 9 aa, Homo sapiens
  Table A; Target 81163; HLA-A*03:02; SMC1B; ENSG00000077935; CTA
GTVESISVK

SEQ ID NO: 81164 - protein, 9 aa, Homo sapiens
  Table A; Target 81164; HLA-A*68:01; SMC1B; ENSG00000077935; CTA
GTVESISVK

SEQ ID NO: 81165 - protein, 9 aa, Homo sapiens
  Table A; Target 81165; HLA-C*07:06; SMC1B; ENSG00000077935; CTA
GTVESISVK

SEQ ID NO: 81166 - protein, 10 aa, Homo sapiens
  Table A; Target 81166; HLA-A*03:01; SMC1B; ENSG00000077935; CTA
GTVESISVKK

SEQ ID NO: 81167 - protein, 10 aa, Homo sapiens
  Table A; Target 81167; HLA-A*03:02; SMC1B; ENSG00000077935; CTA
GTVESISVKK

SEQ ID NO: 81168 - protein, 10 aa, Homo sapiens
  Table A; Target 81168; HLA-A*68:01; SMC1B; ENSG00000077935; CTA
GTVESISVKK

SEQ ID NO: 81169 - protein, 10 aa, Homo sapiens
  Table A; Target 81169; HLA-B*27:02; SMC1B; ENSG00000077935; CTA
GTVESISVKK

SEQ ID NO: 81170 - protein, 10 aa, Homo sapiens
  Table A; Target 81170; HLA-C*07:06; SMC1B; ENSG00000077935; CTA
GTVESISVKK

SEQ ID NO: 81171 - protein, 10 aa, Homo sapiens
  Table A; Target 81171; HLA-B*40:01; SMC1B; ENSG00000077935; CTA
GVISGGSSDL

SEQ ID NO: 81172 - protein, 10 aa, Homo sapiens
  Table A; Target 81172; HLA-C*01:02; SMC1B; ENSG00000077935; CTA
GVISGGSSDL

SEQ ID NO: 81173 - protein, 11 aa, Homo sapiens
  Table A; Target 81173; HLA-A*03:01; SMC1B; ENSG00000077935; CTA
GVISGGSSDLK

SEQ ID NO: 81174 - protein, 11 aa, Homo sapiens
  Table A; Target 81174; HLA-A*03:02; SMC1B; ENSG00000077935; CTA
GVISGGSSDLK

SEQ ID NO: 81175 - protein, 11 aa, Homo sapiens
  Table A; Target 81175; HLA-A*11:01; SMC1B; ENSG00000077935; CTA
GVISGGSSDLK

SEQ ID NO: 81176 - protein, 11 aa, Homo sapiens
  Table A; Target 81176; HLA-B*27:02; SMC1B; ENSG00000077935; CTA
GVISGGSSDLK

SEQ ID NO: 81177 - protein, 8 aa, Homo sapiens
  Table A; Target 81177; HLA-B*18:01; SMC1B; ENSG00000077935; CTA
HENIVKAR

SEQ ID NO: 81178 - protein, 8 aa, Homo sapiens
  Table A; Target 81178; HLA-B*37:01; SMC1B; ENSG00000077935; CTA
HENIVKAR

SEQ ID NO: 81179 - protein, 8 aa, Homo sapiens
  Table A; Target 81179; HLA-B*08:01; SMC1B; ENSG00000077935; CTA
HGMLTRQL

SEQ ID NO: 81180 - protein, 9 aa, Homo sapiens
  Table A; Target 81180; HLA-A*68:01; SMC1B; ENSG00000077935; CTA
HIALSGPER

SEQ ID NO: 81181 - protein, 9 aa, Homo sapiens
  Table A; Target 81181; HLA-C*07:06; SMC1B; ENSG00000077935; CTA
HIALSGPER

SEQ ID NO: 81182 - protein, 10 aa, Homo sapiens
  Table A; Target 81182; HLA-A*02:04; SMC1B; ENSG00000077935; CTA
HLLNTKLEHV

SEQ ID NO: 81183 - protein, 9 aa, Homo sapiens
  Table A; Target 81183; HLA-A*02:03; SMC1B; ENSG00000077935; CTA
HLRLLLQQV

SEQ ID NO: 81184 - protein, 9 aa, Homo sapiens
  Table A; Target 81184; HLA-B*08:01; SMC1B; ENSG00000077935; CTA
HPIHKKYQL

SEQ ID NO: 81185 - protein, 9 aa, Homo sapiens
  Table A; Target 81185; HLA-B*57:01; SMC1B; ENSG00000077935; CTA
HSFRPAPFF

SEQ ID NO: 81186 - protein, 9 aa, Homo sapiens
  Table A; Target 81186; HLA-A*03:01; SMC1B; ENSG00000077935; CTA
HVNRDLSVK

SEQ ID NO: 81187 - protein, 9 aa, Homo sapiens
  Table A; Target 81187; HLA-A*03:02; SMC1B; ENSG00000077935; CTA
HVNRDLSVK

SEQ ID NO: 81188 - protein, 9 aa, Homo sapiens
  Table A; Target 81188; HLA-B*38:01; SMC1B; ENSG00000077935; CTA
HVSISIDQI

SEQ ID NO: 81189 - protein, 10 aa, Homo sapiens
  Table A; Target 81189; HLA-B*35:01; SMC1B; ENSG00000077935; CTA
HVSISIDQIY

SEQ ID NO: 81190 - protein, 11 aa, Homo sapiens
  Table A; Target 81190; HLA-A*03:02; SMC1B; ENSG00000077935; CTA
HVSISIDQIYK

SEQ ID NO: 81191 - protein, 11 aa, Homo sapiens
  Table A; Target 81191; HLA-A*11:01; SMC1B; ENSG00000077935; CTA
HVSISIDQIYK

SEQ ID NO: 81192 - protein, 8 aa, Homo sapiens
  Table A; Target 81192; HLA-C*16:01; SMC1B; ENSG00000077935; CTA
IAAERRQA

SEQ ID NO: 81193 - protein, 9 aa, Homo sapiens
  Table A; Target 81193; HLA-B*51:01; SMC1B; ENSG00000077935; CTA
IANLRVKNI

SEQ ID NO: 81194 - protein, 8 aa, Homo sapiens
  Table A; Target 81194; HLA-B*37:01; SMC1B; ENSG00000077935; CTA
IDQIYKKL

SEQ ID NO: 81195 - protein, 8 aa, Homo sapiens
  Table A; Target 81195; HLA-B*18:01; SMC1B; ENSG00000077935; CTA
IDVIKTQF

SEQ ID NO: 81196 - protein, 8 aa, Homo sapiens
  Table A; Target 81196; HLA-B*37:01; SMC1B; ENSG00000077935; CTA
IDVIKTQF

SEQ ID NO: 81197 - protein, 10 aa, Homo sapiens
  Table A; Target 81197; HLA-A*30:01; SMC1B; ENSG00000077935; CTA
IEIILLSGSL

SEQ ID NO: 81198 - protein, 10 aa, Homo sapiens
  Table A; Target 81198; HLA-B*40:01; SMC1B; ENSG00000077935; CTA
IEIILLSGSL

SEQ ID NO: 81199 - protein, 8 aa, Homo sapiens
  Table A; Target 81199; HLA-A*30:01; SMC1B; ENSG00000077935; CTA
IELEASQL

SEQ ID NO: 81200 - protein, 8 aa, Homo sapiens
  Table A; Target 81200; HLA-B*18:01; SMC1B; ENSG00000077935; CTA
IELEASQL

SEQ ID NO: 81201 - protein, 8 aa, Homo sapiens
  Table A; Target 81201; HLA-B*37:01; SMC1B; ENSG00000077935; CTA
IELEASQL

SEQ ID NO: 81202 - protein, 8 aa, Homo sapiens
  Table A; Target 81202; HLA-B*40:01; SMC1B; ENSG00000077935; CTA
IELEASQL

SEQ ID NO: 81203 - protein, 8 aa, Homo sapiens
  Table A; Target 81203; HLA-B*49:01; SMC1B; ENSG00000077935; CTA
IELEASQL

SEQ ID NO: 81204 - protein, 8 aa, Homo sapiens
  Table A; Target 81204; HLA-C*14:02; SMC1B; ENSG00000077935; CTA
IELEASQL

SEQ ID NO: 81205 - protein, 11 aa, Homo sapiens
  Table A; Target 81205; HLA-A*30:02; SMC1B; ENSG00000077935; CTA
IELEASQLDRY

SEQ ID NO: 81206 - protein, 11 aa, Homo sapiens
  Table A; Target 81206; HLA-B*18:01; SMC1B; ENSG00000077935; CTA
IELEASQLDRY

SEQ ID NO: 81207 - protein, 11 aa, Homo sapiens
  Table A; Target 81207; HLA-B*44:02; SMC1B; ENSG00000077935; CTA
IELEASQLDRY

SEQ ID NO: 81208 - protein, 11 aa, Homo sapiens
  Table A; Target 81208; HLA-B*44:03; SMC1B; ENSG00000077935; CTA
IELEASQLDRY

SEQ ID NO: 81209 - protein, 9 aa, Homo sapiens
  Table A; Target 81209; HLA-A*30:01; SMC1B; ENSG00000077935; CTA
IEVEMGTEA

SEQ ID NO: 81210 - protein, 9 aa, Homo sapiens
  Table A; Target 81210; HLA-B*18:01; SMC1B; ENSG00000077935; CTA
IEVEMGTEA

SEQ ID NO: 81211 - protein, 9 aa, Homo sapiens
  Table A; Target 81211; HLA-B*40:01; SMC1B; ENSG00000077935; CTA
IEVEMGTEA

SEQ ID NO: 81212 - protein, 9 aa, Homo sapiens
  Table A; Target 81212; HLA-B*40:02; SMC1B; ENSG00000077935; CTA
IEVEMGTEA

SEQ ID NO: 81213 - protein, 9 aa, Homo sapiens
  Table A; Target 81213; HLA-B*49:01; SMC1B; ENSG00000077935; CTA
IEVEMGTEA

SEQ ID NO: 81214 - protein, 9 aa, Homo sapiens
  Table A; Target 81214; HLA-A*32:01; SMC1B; ENSG00000077935; CTA
IGKPISSSA

SEQ ID NO: 81215 - protein, 9 aa, Homo sapiens
  Table A; Target 81215; HLA-B*46:01; SMC1B; ENSG00000077935; CTA
IGKPISSSA

SEQ ID NO: 81216 - protein, 9 aa, Homo sapiens
  Table A; Target 81216; HLA-B*46:01; SMC1B; ENSG00000077935; CTA
IGVENIREF

SEQ ID NO: 81217 - protein, 9 aa, Homo sapiens
  Table A; Target 81217; HLA-B*58:01; SMC1B; ENSG00000077935; CTA
IGVENIREF

SEQ ID NO: 81218 - protein, 9 aa, Homo sapiens
  Table A; Target 81218; HLA-C*16:01; SMC1B; ENSG00000077935; CTA
IGVENIREF

SEQ ID NO: 81219 - protein, 9 aa, Homo sapiens
  Table A; Target 81219; HLA-A*03:01; SMC1B; ENSG00000077935; CTA
IIGPNGSGK

SEQ ID NO: 81220 - protein, 9 aa, Homo sapiens
  Table A; Target 81220; HLA-A*03:02; SMC1B; ENSG00000077935; CTA
IIGPNGSGK

SEQ ID NO: 81221 - protein, 9 aa, Homo sapiens
  Table A; Target 81221; HLA-B*46:01; SMC1B; ENSG00000077935; CTA
IIRGGCSEF

SEQ ID NO: 81222 - protein, 11 aa, Homo sapiens
  Table A; Target 81222; HLA-A*03:01; SMC1B; ENSG00000077935; CTA
IIYVEESGEEK

SEQ ID NO: 81223 - protein, 11 aa, Homo sapiens
  Table A; Target 81223; HLA-B*27:02; SMC1B; ENSG00000077935; CTA
IIYVEESGEEK

SEQ ID NO: 81224 - protein, 9 aa, Homo sapiens
  Table A; Target 81224; HLA-B*15:03; SMC1B; ENSG00000077935; CTA
IKEQTQDQF

SEQ ID NO: 81225 - protein, 10 aa, Homo sapiens
  Table A; Target 81225; HLA-B*38:01; SMC1B; ENSG00000077935; CTA
IQELIHGAHI

SEQ ID NO: 81226 - protein, 9 aa, Homo sapiens
  Table A; Target 81226; HLA-A*03:01; SMC1B; ENSG00000077935; CTA
IQGTQTRLK

SEQ ID NO: 81227 - protein, 9 aa, Homo sapiens
  Table A; Target 81227; HLA-A*03:02; SMC1B; ENSG00000077935; CTA
IQGTQTRLK

SEQ ID NO: 81228 - protein, 10 aa, Homo sapiens
  Table A; Target 81228; HLA-A*30:02; SMC1B; ENSG00000077935; CTA
IQGTQTRLKY

SEQ ID NO: 81229 - protein, 10 aa, Homo sapiens
  Table A; Target 81229; HLA-A*32:01; SMC1B; ENSG00000077935; CTA
IQGTQTRLKY

SEQ ID NO: 81230 - protein, 9 aa, Homo sapiens
  Table A; Target 81230; HLA-A*29:02; SMC1B; ENSG00000077935; CTA
IQLQLFQLY

SEQ ID NO: 81231 - protein, 9 aa, Homo sapiens
  Table A; Target 81231; HLA-A*30:02; SMC1B; ENSG00000077935; CTA
IQLQLFQLY

SEQ ID NO: 81232 - protein, 9 aa, Homo sapiens
  Table A; Target 81232; HLA-B*15:03; SMC1B; ENSG00000077935; CTA
IQLQLFQLY

SEQ ID NO: 81233 - protein, 11 aa, Homo sapiens
  Table A; Target 81233; HLA-B*27:05; SMC1B; ENSG00000077935; CTA
IRVTQNSSAEK

SEQ ID NO: 81234 - protein, 10 aa, Homo sapiens
  Table A; Target 81234; HLA-A*01:01; SMC1B; ENSG00000077935; CTA
ISGGSSDLKY

SEQ ID NO: 81235 - protein, 9 aa, Homo sapiens
  Table A; Target 81235; HLA-A*03:02; SMC1B; ENSG00000077935; CTA
ISIDQIYKK

SEQ ID NO: 81236 - protein, 9 aa, Homo sapiens
  Table A; Target 81236; HLA-A*11:01; SMC1B; ENSG00000077935; CTA
ISIDQIYKK

SEQ ID NO: 81237 - protein, 10 aa, Homo sapiens
  Table A; Target 81237; HLA-B*57:01; SMC1B; ENSG00000077935; CTA
ISIDQIYKKL

SEQ ID NO: 81238 - protein, 10 aa, Homo sapiens
  Table A; Target 81238; HLA-B*57:01; SMC1B; ENSG00000077935; CTA
ISLKEEFYSR

SEQ ID NO: 81239 - protein, 11 aa, Homo sapiens
  Table A; Target 81239; HLA-A*30:02; SMC1B; ENSG00000077935; CTA
ISSSASVKIIY

SEQ ID NO: 81240 - protein, 11 aa, Homo sapiens
  Table A; Target 81240; HLA-A*01:01; SMC1B; ENSG00000077935; CTA
ISTSGELIGEY

SEQ ID NO: 81241 - protein, 11 aa, Homo sapiens
  Table A; Target 81241; HLA-A*30:02; SMC1B; ENSG00000077935; CTA
ISTSGELIGEY

SEQ ID NO: 81242 - protein, 11 aa, Homo sapiens
  Table A; Target 81242; HLA-B*58:01; SMC1B; ENSG00000077935; CTA
ISTSGELIGEY

SEQ ID NO: 81243 - protein, 10 aa, Homo sapiens
  Table A; Target 81243; HLA-A*03:01; SMC1B; ENSG00000077935; CTA
ITAIVVASEK

SEQ ID NO: 81244 - protein, 10 aa, Homo sapiens
  Table A; Target 81244; HLA-A*03:02; SMC1B; ENSG00000077935; CTA
ITAIVVASEK

SEQ ID NO: 81245 - protein, 10 aa, Homo sapiens
  Table A; Target 81245; HLA-B*27:02; SMC1B; ENSG00000077935; CTA
ITAIVVASEK

SEQ ID NO: 81246 - protein, 11 aa, Homo sapiens
  Table A; Target 81246; HLA-A*68:02; SMC1B; ENSG00000077935; CTA
ITAIVVASEKV

SEQ ID NO: 81247 - protein, 9 aa, Homo sapiens
  Table A; Target 81247; HLA-A*23:01; SMC1B; ENSG00000077935; CTA
IVISLKEEF

SEQ ID NO: 81248 - protein, 9 aa, Homo sapiens
  Table A; Target 81248; HLA-A*26:01; SMC1B; ENSG00000077935; CTA
IVISLKEEF

SEQ ID NO: 81249 - protein, 9 aa, Homo sapiens
  Table A; Target 81249; HLA-A*29:02; SMC1B; ENSG00000077935; CTA
IVISLKEEF

SEQ ID NO: 81250 - protein, 9 aa, Homo sapiens
  Table A; Target 81250; HLA-A*30:02; SMC1B; ENSG00000077935; CTA
IVISLKEEF

SEQ ID NO: 81251 - protein, 9 aa, Homo sapiens
  Table A; Target 81251; HLA-A*32:01; SMC1B; ENSG00000077935; CTA
IVISLKEEF

SEQ ID NO: 81252 - protein, 9 aa, Homo sapiens
  Table A; Target 81252; HLA-B*15:01; SMC1B; ENSG00000077935; CTA
IVISLKEEF

SEQ ID NO: 81253 - protein, 9 aa, Homo sapiens
  Table A; Target 81253; HLA-B*35:01; SMC1B; ENSG00000077935; CTA
IVISLKEEF

SEQ ID NO: 81254 - protein, 9 aa, Homo sapiens
  Table A; Target 81254; HLA-B*46:01; SMC1B; ENSG00000077935; CTA
IVISLKEEF

SEQ ID NO: 81255 - protein, 9 aa, Homo sapiens
  Table A; Target 81255; HLA-B*57:01; SMC1B; ENSG00000077935; CTA
IVISLKEEF

SEQ ID NO: 81256 - protein, 9 aa, Homo sapiens
  Table A; Target 81256; HLA-B*58:01; SMC1B; ENSG00000077935; CTA
IVISLKEEF

SEQ ID NO: 81257 - protein, 9 aa, Homo sapiens
  Table A; Target 81257; HLA-C*02:02; SMC1B; ENSG00000077935; CTA
IVISLKEEF

SEQ ID NO: 81258 - protein, 10 aa, Homo sapiens
  Table A; Target 81258; HLA-A*29:02; SMC1B; ENSG00000077935; CTA
IVISLKEEFY

SEQ ID NO: 81259 - protein, 10 aa, Homo sapiens
  Table A; Target 81259; HLA-A*30:02; SMC1B; ENSG00000077935; CTA
IVISLKEEFY

SEQ ID NO: 81260 - protein, 10 aa, Homo sapiens
  Table A; Target 81260; HLA-A*03:02; SMC1B; ENSG00000077935; CTA
IVVASEKVAK

SEQ ID NO: 81261 - protein, 10 aa, Homo sapiens
  Table A; Target 81261; HLA-A*11:01; SMC1B; ENSG00000077935; CTA
IVVASEKVAK

SEQ ID NO: 81262 - protein, 10 aa, Homo sapiens
  Table A; Target 81262; HLA-B*27:02; SMC1B; ENSG00000077935; CTA
IYVEESGEEK

SEQ ID NO: 81263 - protein, 8 aa, Homo sapiens
  Table A; Target 81263; HLA-C*05:01; SMC1B; ENSG00000077935; CTA
KAEEDAQF

SEQ ID NO: 81264 - protein, 10 aa, Homo sapiens
  Table A; Target 81264; HLA-B*58:01; SMC1B; ENSG00000077935; CTA
KAEEDAQFNF

SEQ ID NO: 81265 - protein, 10 aa, Homo sapiens
  Table A; Target 81265; HLA-C*05:01; SMC1B; ENSG00000077935; CTA
KAEEDAQFNF

SEQ ID NO: 81266 - protein, 9 aa, Homo sapiens
  Table A; Target 81266; HLA-B*58:01; SMC1B; ENSG00000077935; CTA
KALQSDQEI

SEQ ID NO: 81267 - protein, 10 aa, Homo sapiens
  Table A; Target 81267; HLA-B*37:01; SMC1B; ENSG00000077935; CTA
KEEAERYQSL

SEQ ID NO: 81268 - protein, 10 aa, Homo sapiens
  Table A; Target 81268; HLA-B*40:01; SMC1B; ENSG00000077935; CTA
KEEAERYQSL

SEQ ID NO: 81269 - protein, 10 aa, Homo sapiens
  Table A; Target 81269; HLA-B*40:01; SMC1B; ENSG00000077935; CTA
KEERAEPETF

SEQ ID NO: 81270 - protein, 11 aa, Homo sapiens
  Table A; Target 81270; HLA-B*40:01; SMC1B; ENSG00000077935; CTA
KEERAEPETFL

SEQ ID NO: 81271 - protein, 10 aa, Homo sapiens
  Table A; Target 81271; HLA-B*49:01; SMC1B; ENSG00000077935; CTA
KEFQEKIDKV

SEQ ID NO: 81272 - protein, 10 aa, Homo sapiens
  Table A; Target 81272; HLA-A*30:01; SMC1B; ENSG00000077935; CTA
KEKKQQEETL

SEQ ID NO: 81273 - protein, 10 aa, Homo sapiens
  Table A; Target 81273; HLA-B*40:01; SMC1B; ENSG00000077935; CTA
KEKKQQEETL

SEQ ID NO: 81274 - protein, 10 aa, Homo sapiens
  Table A; Target 81274; HLA-B*40:02; SMC1B; ENSG00000077935; CTA
KEKKQQEETL

SEQ ID NO: 81275 - protein, 9 aa, Homo sapiens
  Table A; Target 81275; HLA-A*30:01; SMC1B; ENSG00000077935; CTA
KELKSVETL

SEQ ID NO: 81276 - protein, 9 aa, Homo sapiens
  Table A; Target 81276; HLA-B*37:01; SMC1B; ENSG00000077935; CTA
KELKSVETL

SEQ ID NO: 81277 - protein, 9 aa, Homo sapiens
  Table A; Target 81277; HLA-B*40:01; SMC1B; ENSG00000077935; CTA
KELKSVETL

SEQ ID NO: 81278 - protein, 9 aa, Homo sapiens
  Table A; Target 81278; HLA-B*40:02; SMC1B; ENSG00000077935; CTA
KELKSVETL

SEQ ID NO: 81279 - protein, 9 aa, Homo sapiens
  Table A; Target 81279; HLA-B*49:01; SMC1B; ENSG00000077935; CTA
KELKSVETL

SEQ ID NO: 81280 - protein, 10 aa, Homo sapiens
  Table A; Target 81280; HLA-B*40:01; SMC1B; ENSG00000077935; CTA
KELKSVETLL

SEQ ID NO: 81281 - protein, 8 aa, Homo sapiens
  Table A; Target 81281; HLA-B*37:01; SMC1B; ENSG00000077935; CTA
KENTSHHL

SEQ ID NO: 81282 - protein, 10 aa, Homo sapiens
  Table A; Target 81282; HLA-B*40:01; SMC1B; ENSG00000077935; CTA
KEQTQDQFQM

SEQ ID NO: 81283 - protein, 11 aa, Homo sapiens
  Table A; Target 81283; HLA-A*30:01; SMC1B; ENSG00000077935; CTA
KETDLKQIQTL

SEQ ID NO: 81284 - protein, 11 aa, Homo sapiens
  Table A; Target 81284; HLA-B*40:01; SMC1B; ENSG00000077935; CTA
KETDLKQIQTL

SEQ ID NO: 81285 - protein, 11 aa, Homo sapiens
  Table A; Target 81285; HLA-B*44:02; SMC1B; ENSG00000077935; CTA
KETDLKQIQTL

SEQ ID NO: 81286 - protein, 11 aa, Homo sapiens
  Table A; Target 81286; HLA-B*44:03; SMC1B; ENSG00000077935; CTA
KETDLKQIQTL

SEQ ID NO: 81287 - protein, 10 aa, Homo sapiens
  Table A; Target 81287; HLA-A*30:01; SMC1B; ENSG00000077935; CTA
KEVVSIQTSL

SEQ ID NO: 81288 - protein, 10 aa, Homo sapiens
  Table A; Target 81288; HLA-B*40:02; SMC1B; ENSG00000077935; CTA
KEVVSIQTSL

SEQ ID NO: 81289 - protein, 10 aa, Homo sapiens
  Table A; Target 81289; HLA-B*49:01; SMC1B; ENSG00000077935; CTA
KEVVSIQTSL

SEQ ID NO: 81290 - protein, 9 aa, Homo sapiens
  Table A; Target 81290; HLA-A*23:01; SMC1B; ENSG00000077935; CTA
KFQESTDAF

SEQ ID NO: 81291 - protein, 9 aa, Homo sapiens
  Table A; Target 81291; HLA-A*24:02; SMC1B; ENSG00000077935; CTA
KFQESTDAF

SEQ ID NO: 81292 - protein, 9 aa, Homo sapiens
  Table A; Target 81292; HLA-A*32:01; SMC1B; ENSG00000077935; CTA
KFQESTDAF

SEQ ID NO: 81293 - protein, 9 aa, Homo sapiens
  Table A; Target 81293; HLA-C*01:02; SMC1B; ENSG00000077935; CTA
KFQESTDAF

SEQ ID NO: 81294 - protein, 9 aa, Homo sapiens
  Table A; Target 81294; HLA-C*14:02; SMC1B; ENSG00000077935; CTA
KFQESTDAF

SEQ ID NO: 81295 - protein, 10 aa, Homo sapiens
  Table A; Target 81295; HLA-A*03:02; SMC1B; ENSG00000077935; CTA
KGSEDIDHLK

SEQ ID NO: 81296 - protein, 10 aa, Homo sapiens
  Table A; Target 81296; HLA-A*11:01; SMC1B; ENSG00000077935; CTA
KGSEDIDHLK

SEQ ID NO: 81297 - protein, 9 aa, Homo sapiens
  Table A; Target 81297; HLA-A*32:01; SMC1B; ENSG00000077935; CTA
KINTLKETI

SEQ ID NO: 81298 - protein, 9 aa, Homo sapiens
  Table A; Target 81298; HLA-B*58:01; SMC1B; ENSG00000077935; CTA
KINTLKETI

SEQ ID NO: 81299 - protein, 11 aa, Homo sapiens
  Table A; Target 81299; HLA-A*03:01; SMC1B; ENSG00000077935; CTA
KINTLKETIQK

SEQ ID NO: 81300 - protein, 11 aa, Homo sapiens
  Table A; Target 81300; HLA-A*03:02; SMC1B; ENSG00000077935; CTA
KINTLKETIQK

SEQ ID NO: 81301 - protein, 10 aa, Homo sapiens
  Table A; Target 81301; HLA-A*03:01; SMC1B; ENSG00000077935; CTA
KIQELKGLMK

SEQ ID NO: 81302 - protein, 10 aa, Homo sapiens
  Table A; Target 81302; HLA-A*03:02; SMC1B; ENSG00000077935; CTA
KIQELKGLMK

SEQ ID NO: 81303 - protein, 9 aa, Homo sapiens
  Table A; Target 81303; HLA-A*02:04; SMC1B; ENSG00000077935; CTA
KIQLQLFQL

SEQ ID NO: 81304 - protein, 9 aa, Homo sapiens
  Table A; Target 81304; HLA-A*03:01; SMC1B; ENSG00000077935; CTA
KLNKINTLK

SEQ ID NO: 81305 - protein, 9 aa, Homo sapiens
  Table A; Target 81305; HLA-A*03:02; SMC1B; ENSG00000077935; CTA
KLNKINTLK

SEQ ID NO: 81306 - protein, 9 aa, Homo sapiens
  Table A; Target 81306; HLA-A*02:01; SMC1B; ENSG00000077935; CTA
KLQKEVVSI

SEQ ID NO: 81307 - protein, 9 aa, Homo sapiens
  Table A; Target 81307; HLA-A*02:03; SMC1B; ENSG00000077935; CTA
KLQKEVVSI

SEQ ID NO: 81308 - protein, 9 aa, Homo sapiens
  Table A; Target 81308; HLA-A*02:04; SMC1B; ENSG00000077935; CTA
KLQKEVVSI

SEQ ID NO: 81309 - protein, 9 aa, Homo sapiens
  Table A; Target 81309; HLA-A*03:01; SMC1B; ENSG00000077935; CTA
KMNKIQLQL

SEQ ID NO: 81310 - protein, 10 aa, Homo sapiens
  Table A; Target 81310; HLA-C*07:02; SMC1B; ENSG00000077935; CTA
KPINERLREL

SEQ ID NO: 81311 - protein, 9 aa, Homo sapiens
  Table A; Target 81311; HLA-B*07:02; SMC1B; ENSG00000077935; CTA
KPISSSASV

SEQ ID NO: 81312 - protein, 9 aa, Homo sapiens
  Table A; Target 81312; HLA-B*55:01; SMC1B; ENSG00000077935; CTA
KPISSSASV

SEQ ID NO: 81313 - protein, 9 aa, Homo sapiens
  Table A; Target 81313; HLA-B*56:01; SMC1B; ENSG00000077935; CTA
KPISSSASV

SEQ ID NO: 81314 - protein, 9 aa, Homo sapiens
  Table A; Target 81314; HLA-C*07:02; SMC1B; ENSG00000077935; CTA
KPISSSASV

SEQ ID NO: 81315 - protein, 10 aa, Homo sapiens
  Table A; Target 81315; HLA-A*11:01; SMC1B; ENSG00000077935; CTA
KQIEEEILHK

SEQ ID NO: 81316 - protein, 11 aa, Homo sapiens
  Table A; Target 81316; HLA-A*11:01; SMC1B; ENSG00000077935; CTA
KQIEEEILHKK

SEQ ID NO: 81317 - protein, 9 aa, Homo sapiens
  Table A; Target 81317; HLA-C*16:04; SMC1B; ENSG00000077935; CTA
KRIEKLEEY

SEQ ID NO: 81318 - protein, 10 aa, Homo sapiens
  Table A; Target 81318; HLA-A*03:01; SMC1B; ENSG00000077935; CTA
KSVETLLNQK

SEQ ID NO: 81319 - protein, 10 aa, Homo sapiens
  Table A; Target 81319; HLA-A*03:02; SMC1B; ENSG00000077935; CTA
KSVETLLNQK

SEQ ID NO: 81320 - protein, 10 aa, Homo sapiens
  Table A; Target 81320; HLA-A*11:01; SMC1B; ENSG00000077935; CTA
KSVETLLNQK

SEQ ID NO: 81321 - protein, 10 aa, Homo sapiens
  Table A; Target 81321; HLA-B*58:01; SMC1B; ENSG00000077935; CTA
KSVETLLNQK

SEQ ID NO: 81322 - protein, 9 aa, Homo sapiens
  Table A; Target 81322; HLA-A*01:01; SMC1B; ENSG00000077935; CTA
KTDEERLAF

SEQ ID NO: 81323 - protein, 9 aa, Homo sapiens
  Table A; Target 81323; HLA-A*32:01; SMC1B; ENSG00000077935; CTA
KTDEERLAF

SEQ ID NO: 81324 - protein, 9 aa, Homo sapiens
  Table A; Target 81324; HLA-B*57:01; SMC1B; ENSG00000077935; CTA
KTDEERLAF

SEQ ID NO: 81325 - protein, 9 aa, Homo sapiens
  Table A; Target 81325; HLA-B*58:01; SMC1B; ENSG00000077935; CTA
KTDEERLAF

SEQ ID NO: 81326 - protein, 9 aa, Homo sapiens
  Table A; Target 81326; HLA-C*05:01; SMC1B; ENSG00000077935; CTA
KTDEERLAF

SEQ ID NO: 81327 - protein, 9 aa, Homo sapiens
  Table A; Target 81327; HLA-C*16:01; SMC1B; ENSG00000077935; CTA
KTDEERLAF

SEQ ID NO: 81328 - protein, 9 aa, Homo sapiens
  Table A; Target 81328; HLA-A*03:01; SMC1B; ENSG00000077935; CTA
KTQFPQLKK

SEQ ID NO: 81329 - protein, 9 aa, Homo sapiens
  Table A; Target 81329; HLA-A*03:02; SMC1B; ENSG00000077935; CTA
KTQFPQLKK

SEQ ID NO: 81330 - protein, 9 aa, Homo sapiens
  Table A; Target 81330; HLA-A*11:01; SMC1B; ENSG00000077935; CTA
KTQFPQLKK

SEQ ID NO: 81331 - protein, 9 aa, Homo sapiens
  Table A; Target 81331; HLA-B*58:01; SMC1B; ENSG00000077935; CTA
KTVALDGTL

SEQ ID NO: 81332 - protein, 10 aa, Homo sapiens
  Table A; Target 81332; HLA-B*57:01; SMC1B; ENSG00000077935; CTA
KTVALDGTLF

SEQ ID NO: 81333 - protein, 10 aa, Homo sapiens
  Table A; Target 81333; HLA-B*58:01; SMC1B; ENSG00000077935; CTA
KTVALDGTLF

SEQ ID NO: 81334 - protein, 9 aa, Homo sapiens
  Table A; Target 81334; HLA-A*32:01; SMC1B; ENSG00000077935; CTA
KVATMTQQL

SEQ ID NO: 81335 - protein, 9 aa, Homo sapiens
  Table A; Target 81335; HLA-B*58:01; SMC1B; ENSG00000077935; CTA
KVATMTQQL

SEQ ID NO: 81336 - protein, 11 aa, Homo sapiens
  Table A; Target 81336; HLA-A*03:01; SMC1B; ENSG00000077935; CTA
KVATMTQQLEK

SEQ ID NO: 81337 - protein, 9 aa, Homo sapiens
  Table A; Target 81337; HLA-A*03:02; SMC1B; ENSG00000077935; CTA
KVEDDIFQH

SEQ ID NO: 81338 - protein, 10 aa, Homo sapiens
  Table A; Target 81338; HLA-A*02:07; SMC1B; ENSG00000077935; CTA
KVEDDIFQHF

SEQ ID NO: 81339 - protein, 10 aa, Homo sapiens
  Table A; Target 81339; HLA-B*57:01; SMC1B; ENSG00000077935; CTA
KVEDDIFQHF

SEQ ID NO: 81340 - protein, 10 aa, Homo sapiens
  Table A; Target 81340; HLA-B*58:01; SMC1B; ENSG00000077935; CTA
KVEDDIFQHF

SEQ ID NO: 81341 - protein, 10 aa, Homo sapiens
  Table A; Target 81341; HLA-A*02:03; SMC1B; ENSG00000077935; CTA
KVFGRFITAI

SEQ ID NO: 81342 - protein, 10 aa, Homo sapiens
  Table A; Target 81342; HLA-A*02:04; SMC1B; ENSG00000077935; CTA
KVQDIEIILL

SEQ ID NO: 81343 - protein, 10 aa, Homo sapiens
  Table A; Target 81343; HLA-A*02:07; SMC1B; ENSG00000077935; CTA
KVQDIEIILL

SEQ ID NO: 81344 - protein, 10 aa, Homo sapiens
  Table A; Target 81344; HLA-A*03:02; SMC1B; ENSG00000077935; CTA
KVQDIEIILL

SEQ ID NO: 81345 - protein, 10 aa, Homo sapiens
  Table A; Target 81345; HLA-A*31:01; SMC1B; ENSG00000077935; CTA
KVQTQIEEER

SEQ ID NO: 81346 - protein, 11 aa, Homo sapiens
  Table A; Target 81346; HLA-A*03:02; SMC1B; ENSG00000077935; CTA
KVQTQIEEERK

SEQ ID NO: 81347 - protein, 9 aa, Homo sapiens
  Table A; Target 81347; HLA-A*24:02; SMC1B; ENSG00000077935; CTA
KYQLAVTKV

SEQ ID NO: 81348 - protein, 9 aa, Homo sapiens
  Table A; Target 81348; HLA-C*14:02; SMC1B; ENSG00000077935; CTA
KYQLAVTKV

SEQ ID NO: 81349 - protein, 10 aa, Homo sapiens
  Table A; Target 81349; HLA-A*24:02; SMC1B; ENSG00000077935; CTA
KYQLAVTKVF

SEQ ID NO: 81350 - protein, 9 aa, Homo sapiens
  Table A; Target 81350; HLA-C*14:02; SMC1B; ENSG00000077935; CTA
KYSQNELEM

SEQ ID NO: 81351 - protein, 8 aa, Homo sapiens
  Table A; Target 81351; HLA-B*27:02; SMC1B; ENSG00000077935; CTA
LDNTNIGK

SEQ ID NO: 81352 - protein, 9 aa, Homo sapiens
  Table A; Target 81352; HLA-B*18:01; SMC1B; ENSG00000077935; CTA
LEASQLDRY

SEQ ID NO: 81353 - protein, 9 aa, Homo sapiens
  Table A; Target 81353; HLA-B*44:02; SMC1B; ENSG00000077935; CTA
LEASQLDRY

SEQ ID NO: 81354 - protein, 9 aa, Homo sapiens
  Table A; Target 81354; HLA-B*44:03; SMC1B; ENSG00000077935; CTA
LEASQLDRY

SEQ ID NO: 81355 - protein, 9 aa, Homo sapiens
  Table A; Target 81355; HLA-B*49:01; SMC1B; ENSG00000077935; CTA
LEELKMNKI

SEQ ID NO: 81356 - protein, 9 aa, Homo sapiens
  Table A; Target 81356; HLA-B*40:01; SMC1B; ENSG00000077935; CTA
LEEYTKTCM

SEQ ID NO: 81357 - protein, 9 aa, Homo sapiens
  Table A; Target 81357; HLA-B*49:01; SMC1B; ENSG00000077935; CTA
LEGISYNCV

SEQ ID NO: 81358 - protein, 9 aa, Homo sapiens
  Table A; Target 81358; HLA-B*18:01; SMC1B; ENSG00000077935; CTA
LEKEEAERY

SEQ ID NO: 81359 - protein, 9 aa, Homo sapiens
  Table A; Target 81359; HLA-B*44:02; SMC1B; ENSG00000077935; CTA
LEKEEAERY

SEQ ID NO: 81360 - protein, 9 aa, Homo sapiens
  Table A; Target 81360; HLA-B*44:03; SMC1B; ENSG00000077935; CTA
LEKEEAERY

SEQ ID NO: 81361 - protein, 9 aa, Homo sapiens
  Table A; Target 81361; HLA-B*18:01; SMC1B; ENSG00000077935; CTA
LELLLVENF

SEQ ID NO: 81362 - protein, 9 aa, Homo sapiens
  Table A; Target 81362; HLA-B*37:01; SMC1B; ENSG00000077935; CTA
LELLLVENF

SEQ ID NO: 81363 - protein, 9 aa, Homo sapiens
  Table A; Target 81363; HLA-B*44:02; SMC1B; ENSG00000077935; CTA
LELLLVENF

SEQ ID NO: 81364 - protein, 9 aa, Homo sapiens
  Table A; Target 81364; HLA-B*44:03; SMC1B; ENSG00000077935; CTA
LELLLVENF

SEQ ID NO: 81365 - protein, 8 aa, Homo sapiens
  Table A; Target 81365; HLA-B*18:01; SMC1B; ENSG00000077935; CTA
LETELADL

SEQ ID NO: 81366 - protein, 10 aa, Homo sapiens
  Table A; Target 81366; HLA-A*03:02; SMC1B; ENSG00000077935; CTA
LIQGTQTRLK

SEQ ID NO: 81367 - protein, 11 aa, Homo sapiens
  Table A; Target 81367; HLA-A*29:02; SMC1B; ENSG00000077935; CTA
LIQGTQTRLKY

SEQ ID NO: 81368 - protein, 8 aa, Homo sapiens
  Table A; Target 81368; HLA-B*37:01; SMC1B; ENSG00000077935; CTA
LLFAVHSF

SEQ ID NO: 81369 - protein, 9 aa, Homo sapiens
  Table A; Target 81369; HLA-A*02:03; SMC1B; ENSG00000077935; CTA
LLKTAAPNL

SEQ ID NO: 81370 - protein, 9 aa, Homo sapiens
  Table A; Target 81370; HLA-A*32:01; SMC1B; ENSG00000077935; CTA
LLNQKRPQY

SEQ ID NO: 81371 - protein, 9 aa, Homo sapiens
  Table A; Target 81371; HLA-A*02:01; SMC1B; ENSG00000077935; CTA
LLNTKLEHV

SEQ ID NO: 81372 - protein, 9 aa, Homo sapiens
  Table A; Target 81372; HLA-A*02:03; SMC1B; ENSG00000077935; CTA
LLNTKLEHV

SEQ ID NO: 81373 - protein, 9 aa, Homo sapiens
  Table A; Target 81373; HLA-A*02:04; SMC1B; ENSG00000077935; CTA
LLNTKLEHV

SEQ ID NO: 81374 - protein, 9 aa, Homo sapiens
  Table A; Target 81374; HLA-A*25:01; SMC1B; ENSG00000077935; CTA
LLVENFKSW

SEQ ID NO: 81375 - protein, 8 aa, Homo sapiens
  Table A; Target 81375; HLA-B*08:01; SMC1B; ENSG00000077935; CTA
LNLIRSEL

SEQ ID NO: 81376 - protein, 10 aa, Homo sapiens
  Table A; Target 81376; HLA-B*15:01; SMC1B; ENSG00000077935; CTA
LQKAEEDAQF

SEQ ID NO: 81377 - protein, 8 aa, Homo sapiens
  Table A; Target 81377; HLA-B*15:01; SMC1B; ENSG00000077935; CTA
LQKEVVSI

SEQ ID NO: 81378 - protein, 11 aa, Homo sapiens
  Table A; Target 81378; HLA-B*27:05; SMC1B; ENSG00000077935; CTA
LQSDQEIEAHL

SEQ ID NO: 81379 - protein, 10 aa, Homo sapiens
  Table A; Target 81379; HLA-A*01:01; SMC1B; ENSG00000077935; CTA
LTRLNVQLEY

SEQ ID NO: 81380 - protein, 10 aa, Homo sapiens
  Table A; Target 81380; HLA-A*02:03; SMC1B; ENSG00000077935; CTA
LVFQGTVESI

SEQ ID NO: 81381 - protein, 10 aa, Homo sapiens
  Table A; Target 81381; HLA-A*25:01; SMC1B; ENSG00000077935; CTA
LVFQGTVESI

SEQ ID NO: 81382 - protein, 10 aa, Homo sapiens
  Table A; Target 81382; HLA-A*68:02; SMC1B; ENSG00000077935; CTA
LVFQGTVESI

SEQ ID NO: 81383 - protein, 10 aa, Homo sapiens
  Table A; Target 81383; HLA-B*51:01; SMC1B; ENSG00000077935; CTA
LVFQGTVESI

SEQ ID NO: 81384 - protein, 10 aa, Homo sapiens
  Table A; Target 81384; HLA-C*02:02; SMC1B; ENSG00000077935; CTA
LVFQGTVESI

SEQ ID NO: 81385 - protein, 9 aa, Homo sapiens
  Table A; Target 81385; HLA-A*33:03; SMC1B; ENSG00000077935; CTA
LYPDSVFGR

SEQ ID NO: 81386 - protein, 10 aa, Homo sapiens
  Table A; Target 81386; HLA-A*23:01; SMC1B; ENSG00000077935; CTA
LYPDSVFGRL

SEQ ID NO: 81387 - protein, 10 aa, Homo sapiens
  Table A; Target 81387; HLA-A*24:02; SMC1B; ENSG00000077935; CTA
LYPDSVFGRL

SEQ ID NO: 81388 - protein, 11 aa, Homo sapiens
  Table A; Target 81388; HLA-A*24:02; SMC1B; ENSG00000077935; CTA
LYPDSVFGRLF

SEQ ID NO: 81389 - protein, 11 aa, Homo sapiens
  Table A; Target 81389; HLA-A*29:02; SMC1B; ENSG00000077935; CTA
LYPDSVFGRLF

SEQ ID NO: 81390 - protein, 8 aa, Homo sapiens
  Table A; Target 81390; HLA-A*30:01; SMC1B; ENSG00000077935; CTA
MDALSFVM

SEQ ID NO: 81391 - protein, 8 aa, Homo sapiens
  Table A; Target 81391; HLA-B*18:01; SMC1B; ENSG00000077935; CTA
MDALSFVM

SEQ ID NO: 81392 - protein, 8 aa, Homo sapiens
  Table A; Target 81392; HLA-B*37:01; SMC1B; ENSG00000077935; CTA
MDALSFVM

SEQ ID NO: 81393 - protein, 9 aa, Homo sapiens
  Table A; Target 81393; HLA-A*30:01; SMC1B; ENSG00000077935; CTA
MEEARHIAL

SEQ ID NO: 81394 - protein, 9 aa, Homo sapiens
  Table A; Target 81394; HLA-B*08:01; SMC1B; ENSG00000077935; CTA
MEEARHIAL

SEQ ID NO: 81395 - protein, 9 aa, Homo sapiens
  Table A; Target 81395; HLA-B*18:01; SMC1B; ENSG00000077935; CTA
MEEARHIAL

SEQ ID NO: 81396 - protein, 9 aa, Homo sapiens
  Table A; Target 81396; HLA-B*37:01; SMC1B; ENSG00000077935; CTA
MEEARHIAL

SEQ ID NO: 81397 - protein, 9 aa, Homo sapiens
  Table A; Target 81397; HLA-B*40:01; SMC1B; ENSG00000077935; CTA
MEEARHIAL

SEQ ID NO: 81398 - protein, 9 aa, Homo sapiens
  Table A; Target 81398; HLA-B*40:02; SMC1B; ENSG00000077935; CTA
MEEARHIAL

SEQ ID NO: 81399 - protein, 9 aa, Homo sapiens
  Table A; Target 81399; HLA-A*33:03; SMC1B; ENSG00000077935; CTA
MLSEGIKER

SEQ ID NO: 81400 - protein, 9 aa, Homo sapiens
  Table A; Target 81400; HLA-A*02:01; SMC1B; ENSG00000077935; CTA
MLTRLNVQL

SEQ ID NO: 81401 - protein, 9 aa, Homo sapiens
  Table A; Target 81401; HLA-A*02:04; SMC1B; ENSG00000077935; CTA
MLTRLNVQL

SEQ ID NO: 81402 - protein, 9 aa, Homo sapiens
  Table A; Target 81402; HLA-B*56:01; SMC1B; ENSG00000077935; CTA
MPMDNLSGG

SEQ ID NO: 81403 - protein, 11 aa, Homo sapiens
  Table A; Target 81403; HLA-B*35:01; SMC1B; ENSG00000077935; CTA
MPMDNLSGGEK

SEQ ID NO: 81404 - protein, 10 aa, Homo sapiens
  Table A; Target 81404; HLA-B*57:01; SMC1B; ENSG00000077935; CTA
MTQQLEKLQW

SEQ ID NO: 81405 - protein, 9 aa, Homo sapiens
  Table A; Target 81405; HLA-A*25:01; SMC1B; ENSG00000077935; CTA
MVIDVIKTQ

SEQ ID NO: 81406 - protein, 10 aa, Homo sapiens
  Table A; Target 81406; HLA-A*23:01; SMC1B; ENSG00000077935; CTA
MVIDVIKTQF

SEQ ID NO: 81407 - protein, 10 aa, Homo sapiens
  Table A; Target 81407; HLA-A*25:01; SMC1B; ENSG00000077935; CTA
MVIDVIKTQF

SEQ ID NO: 81408 - protein, 10 aa, Homo sapiens
  Table A; Target 81408; HLA-A*26:01; SMC1B; ENSG00000077935; CTA
MVIDVIKTQF

SEQ ID NO: 81409 - protein, 10 aa, Homo sapiens
  Table A; Target 81409; HLA-A*32:01; SMC1B; ENSG00000077935; CTA
MVIDVIKTQF

SEQ ID NO: 81410 - protein, 10 aa, Homo sapiens
  Table A; Target 81410; HLA-A*68:01; SMC1B; ENSG00000077935; CTA
MVIDVIKTQF

SEQ ID NO: 81411 - protein, 10 aa, Homo sapiens
  Table A; Target 81411; HLA-B*15:01; SMC1B; ENSG00000077935; CTA
MVIDVIKTQF

SEQ ID NO: 81412 - protein, 10 aa, Homo sapiens
  Table A; Target 81412; HLA-B*35:01; SMC1B; ENSG00000077935; CTA
MVIDVIKTQF

SEQ ID NO: 81413 - protein, 9 aa, Homo sapiens
  Table A; Target 81413; HLA-B*37:01; SMC1B; ENSG00000077935; CTA
NDNLVSRSV

SEQ ID NO: 81414 - protein, 10 aa, Homo sapiens
  Table A; Target 81414; HLA-B*18:01; SMC1B; ENSG00000077935; CTA
NDNLVSRSVY

SEQ ID NO: 81415 - protein, 8 aa, Homo sapiens
  Table A; Target 81415; HLA-B*18:01; SMC1B; ENSG00000077935; CTA
NELEMIKK

SEQ ID NO: 81416 - protein, 10 aa, Homo sapiens
  Table A; Target 81416; HLA-A*30:01; SMC1B; ENSG00000077935; CTA
NELMAKQQQL

SEQ ID NO: 81417 - protein, 10 aa, Homo sapiens
  Table A; Target 81417; HLA-B*40:01; SMC1B; ENSG00000077935; CTA
NELMAKQQQL

SEQ ID NO: 81418 - protein, 9 aa, Homo sapiens
  Table A; Target 81418; HLA-A*02:04; SMC1B; ENSG00000077935; CTA
NIQELIHGA

SEQ ID NO: 81419 - protein, 9 aa, Homo sapiens
  Table A; Target 81419; HLA-A*31:01; SMC1B; ENSG00000077935; CTA
NTKLEHVNR

SEQ ID NO: 81420 - protein, 9 aa, Homo sapiens
  Table A; Target 81420; HLA-A*33:01; SMC1B; ENSG00000077935; CTA
NTKLEHVNR

SEQ ID NO: 81421 - protein, 9 aa, Homo sapiens
  Table A; Target 81421; HLA-A*33:03; SMC1B; ENSG00000077935; CTA
NTKLEHVNR

SEQ ID NO: 81422 - protein, 9 aa, Homo sapiens
  Table A; Target 81422; HLA-A*68:01; SMC1B; ENSG00000077935; CTA
NTKLEHVNR

SEQ ID NO: 81423 - protein, 9 aa, Homo sapiens
  Table A; Target 81423; HLA-C*07:06; SMC1B; ENSG00000077935; CTA
NTKLEHVNR

SEQ ID NO: 81424 - protein, 9 aa, Homo sapiens
  Table A; Target 81424; HLA-A*03:02; SMC1B; ENSG00000077935; CTA
NTLKETIQK

SEQ ID NO: 81425 - protein, 9 aa, Homo sapiens
  Table A; Target 81425; HLA-A*11:01; SMC1B; ENSG00000077935; CTA
NTLKETIQK

SEQ ID NO: 81426 - protein, 9 aa, Homo sapiens
  Table A; Target 81426; HLA-A*33:01; SMC1B; ENSG00000077935; CTA
NTLKETIQK

SEQ ID NO: 81427 - protein, 10 aa, Homo sapiens
  Table A; Target 81427; HLA-A*25:01; SMC1B; ENSG00000077935; CTA
NTNIGKVSSY

SEQ ID NO: 81428 - protein, 10 aa, Homo sapiens
  Table A; Target 81428; HLA-A*26:01; SMC1B; ENSG00000077935; CTA
NTNIGKVSSY

SEQ ID NO: 81429 - protein, 10 aa, Homo sapiens
  Table A; Target 81429; HLA-A*30:02; SMC1B; ENSG00000077935; CTA
NTNIGKVSSY

SEQ ID NO: 81430 - protein, 9 aa, Homo sapiens
  Table A; Target 81430; HLA-A*02:01; SMC1B; ENSG00000077935; CTA
NVMDALSFV

SEQ ID NO: 81431 - protein, 9 aa, Homo sapiens
  Table A; Target 81431; HLA-A*02:03; SMC1B; ENSG00000077935; CTA
NVMDALSFV

SEQ ID NO: 81432 - protein, 9 aa, Homo sapiens
  Table A; Target 81432; HLA-A*02:07; SMC1B; ENSG00000077935; CTA
NVMDALSFV

SEQ ID NO: 81433 - protein, 9 aa, Homo sapiens
  Table A; Target 81433; HLA-A*26:01; SMC1B; ENSG00000077935; CTA
NVMDALSFV

SEQ ID NO: 81434 - protein, 9 aa, Homo sapiens
  Table A; Target 81434; HLA-A*68:02; SMC1B; ENSG00000077935; CTA
NVMDALSFV

SEQ ID NO: 81435 - protein, 10 aa, Homo sapiens
  Table A; Target 81435; HLA-B*27:02; SMC1B; ENSG00000077935; CTA
PDTEGQESSK

SEQ ID NO: 81436 - protein, 8 aa, Homo sapiens
  Table A; Target 81436; HLA-C*14:02; SMC1B; ENSG00000077935; CTA
PYLEGISY

SEQ ID NO: 81437 - protein, 9 aa, Homo sapiens
  Table A; Target 81437; HLA-B*27:02; SMC1B; ENSG00000077935; CTA
QATIDIYEK

SEQ ID NO: 81438 - protein, 9 aa, Homo sapiens
  Table A; Target 81438; HLA-C*07:06; SMC1B; ENSG00000077935; CTA
QATIDIYEK

SEQ ID NO: 81439 - protein, 8 aa, Homo sapiens
  Table A; Target 81439; HLA-B*44:02; SMC1B; ENSG00000077935; CTA
QEDDIKAL

SEQ ID NO: 81440 - protein, 9 aa, Homo sapiens
  Table A; Target 81440; HLA-B*49:01; SMC1B; ENSG00000077935; CTA
QEDILLKTA

SEQ ID NO: 81441 - protein, 10 aa, Homo sapiens
  Table A; Target 81441; HLA-B*49:01; SMC1B; ENSG00000077935; CTA
QEDILLKTAA

SEQ ID NO: 81442 - protein, 9 aa, Homo sapiens
  Table A; Target 81442; HLA-B*40:01; SMC1B; ENSG00000077935; CTA
QEETLVDEI

SEQ ID NO: 81443 - protein, 9 aa, Homo sapiens
  Table A; Target 81443; HLA-B*49:01; SMC1B; ENSG00000077935; CTA
QEETLVDEI

SEQ ID NO: 81444 - protein, 11 aa, Homo sapiens
  Table A; Target 81444; HLA-B*27:02; SMC1B; ENSG00000077935; CTA
QEETLVDEIEK

SEQ ID NO: 81445 - protein, 9 aa, Homo sapiens
  Table A; Target 81445; HLA-B*44:02; SMC1B; ENSG00000077935; CTA
QEFEQVKKR

SEQ ID NO: 81446 - protein, 9 aa, Homo sapiens
  Table A; Target 81446; HLA-B*44:03; SMC1B; ENSG00000077935; CTA
QEFEQVKKR

SEQ ID NO: 81447 - protein, 8 aa, Homo sapiens
  Table A; Target 81447; HLA-B*44:02; SMC1B; ENSG00000077935; CTA
QEIDQKRY

SEQ ID NO: 81448 - protein, 8 aa, Homo sapiens
  Table A; Target 81448; HLA-B*44:03; SMC1B; ENSG00000077935; CTA
QEIDQKRY

SEQ ID NO: 81449 - protein, 9 aa, Homo sapiens
  Table A; Target 81449; HLA-B*44:02; SMC1B; ENSG00000077935; CTA
QEIDQKRYF

SEQ ID NO: 81450 - protein, 9 aa, Homo sapiens
  Table A; Target 81450; HLA-B*44:03; SMC1B; ENSG00000077935; CTA
QEIDQKRYF

SEQ ID NO: 81451 - protein, 10 aa, Homo sapiens
  Table A; Target 81451; HLA-B*44:02; SMC1B; ENSG00000077935; CTA
QEIDQKRYFY

SEQ ID NO: 81452 - protein, 10 aa, Homo sapiens
  Table A; Target 81452; HLA-B*44:03; SMC1B; ENSG00000077935; CTA
QEIDQKRYFY

SEQ ID NO: 81453 - protein, 9 aa, Homo sapiens
  Table A; Target 81453; HLA-A*30:01; SMC1B; ENSG00000077935; CTA
QEIEAHLRL

SEQ ID NO: 81454 - protein, 9 aa, Homo sapiens
  Table A; Target 81454; HLA-B*37:01; SMC1B; ENSG00000077935; CTA
QEIEAHLRL

SEQ ID NO: 81455 - protein, 9 aa, Homo sapiens
  Table A; Target 81455; HLA-B*40:01; SMC1B; ENSG00000077935; CTA
QEIEAHLRL

SEQ ID NO: 81456 - protein, 9 aa, Homo sapiens
  Table A; Target 81456; HLA-B*44:02; SMC1B; ENSG00000077935; CTA
QEIEAHLRL

SEQ ID NO: 81457 - protein, 9 aa, Homo sapiens
  Table A; Target 81457; HLA-B*44:03; SMC1B; ENSG00000077935; CTA
QEIEAHLRL

SEQ ID NO: 81458 - protein, 9 aa, Homo sapiens
  Table A; Target 81458; HLA-B*49:01; SMC1B; ENSG00000077935; CTA
QEIEAHLRL

SEQ ID NO: 81459 - protein, 10 aa, Homo sapiens
  Table A; Target 81459; HLA-B*44:02; SMC1B; ENSG00000077935; CTA
QEIEAHLRLL

SEQ ID NO: 81460 - protein, 10 aa, Homo sapiens
  Table A; Target 81460; HLA-B*44:03; SMC1B; ENSG00000077935; CTA
QEIEAHLRLL

SEQ ID NO: 81461 - protein, 11 aa, Homo sapiens
  Table A; Target 81461; HLA-B*44:02; SMC1B; ENSG00000077935; CTA
QEIEAHLRLLL

SEQ ID NO: 81462 - protein, 9 aa, Homo sapiens
  Table A; Target 81462; HLA-B*37:01; SMC1B; ENSG00000077935; CTA
QELIHGAHI

SEQ ID NO: 81463 - protein, 9 aa, Homo sapiens
  Table A; Target 81463; HLA-B*44:03; SMC1B; ENSG00000077935; CTA
QELIHGAHI

SEQ ID NO: 81464 - protein, 9 aa, Homo sapiens
  Table A; Target 81464; HLA-B*49:01; SMC1B; ENSG00000077935; CTA
QELIHGAHI

SEQ ID NO: 81465 - protein, 10 aa, Homo sapiens
  Table A; Target 81465; HLA-B*44:02; SMC1B; ENSG00000077935; CTA
QELKGLMKTL

SEQ ID NO: 81466 - protein, 10 aa, Homo sapiens
  Table A; Target 81466; HLA-B*44:03; SMC1B; ENSG00000077935; CTA
QELKGLMKTL

SEQ ID NO: 81467 - protein, 10 aa, Homo sapiens
  Table A; Target 81467; HLA-A*30:01; SMC1B; ENSG00000077935; CTA
QEQSQLQSEL

SEQ ID NO: 81468 - protein, 10 aa, Homo sapiens
  Table A; Target 81468; HLA-B*40:01; SMC1B; ENSG00000077935; CTA
QEQSQLQSEL

SEQ ID NO: 81469 - protein, 11 aa, Homo sapiens
  Table A; Target 81469; HLA-A*30:01; SMC1B; ENSG00000077935; CTA
QEQSQLQSELL

SEQ ID NO: 81470 - protein, 11 aa, Homo sapiens
  Table A; Target 81470; HLA-B*40:01; SMC1B; ENSG00000077935; CTA
QEQSQLQSELL

SEQ ID NO: 81471 - protein, 9 aa, Homo sapiens
  Table A; Target 81471; HLA-A*23:01; SMC1B; ENSG00000077935; CTA
QFQMIVISL

SEQ ID NO: 81472 - protein, 9 aa, Homo sapiens
  Table A; Target 81472; HLA-C*16:01; SMC1B; ENSG00000077935; CTA
QGTQTRLKY

SEQ ID NO: 81473 - protein, 9 aa, Homo sapiens
  Table A; Target 81473; HLA-A*01:01; SMC1B; ENSG00000077935; CTA
QIEEEILHK

SEQ ID NO: 81474 - protein, 9 aa, Homo sapiens
  Table A; Target 81474; HLA-A*03:02; SMC1B; ENSG00000077935; CTA
QIEEEILHK

SEQ ID NO: 81475 - protein, 9 aa, Homo sapiens
  Table A; Target 81475; HLA-A*11:01; SMC1B; ENSG00000077935; CTA
QIEEEILHK

SEQ ID NO: 81476 - protein, 10 aa, Homo sapiens
  Table A; Target 81476; HLA-A*03:02; SMC1B; ENSG00000077935; CTA
QIEEEILHKK

SEQ ID NO: 81477 - protein, 9 aa, Homo sapiens
  Table A; Target 81477; HLA-A*02:03; SMC1B; ENSG00000077935; CTA
QLKKVIQFV

SEQ ID NO: 81478 - protein, 10 aa, Homo sapiens
  Table A; Target 81478; HLA-A*03:02; SMC1B; ENSG00000077935; CTA
QLQQTEKELK

SEQ ID NO: 81479 - protein, 9 aa, Homo sapiens
  Table A; Target 81479; HLA-A*02:04; SMC1B; ENSG00000077935; CTA
QLQSELLNI

SEQ ID NO: 81480 - protein, 9 aa, Homo sapiens
  Table A; Target 81480; HLA-B*13:02; SMC1B; ENSG00000077935; CTA
QQVASQEDI

SEQ ID NO: 81481 - protein, 11 aa, Homo sapiens
  Table A; Target 81481; HLA-B*38:01; SMC1B; ENSG00000077935; CTA
QQVASQEDILL

SEQ ID NO: 81482 - protein, 10 aa, Homo sapiens
  Table A; Target 81482; HLA-A*01:01; SMC1B; ENSG00000077935; CTA
QSDQEIEAHL

SEQ ID NO: 81483 - protein, 11 aa, Homo sapiens
  Table A; Target 81483; HLA-A*01:01; SMC1B; ENSG00000077935; CTA
QSDQEIEAHLR

SEQ ID NO: 81484 - protein, 10 aa, Homo sapiens
  Table A; Target 81484; HLA-A*33:03; SMC1B; ENSG00000077935; CTA
QTLIQGTQTR

SEQ ID NO: 81485 - protein, 9 aa, Homo sapiens
  Table A; Target 81485; HLA-A*03:01; SMC1B; ENSG00000077935; CTA
QTVNELMAK

SEQ ID NO: 81486 - protein, 9 aa, Homo sapiens
  Table A; Target 81486; HLA-A*03:02; SMC1B; ENSG00000077935; CTA
QTVNELMAK

SEQ ID NO: 81487 - protein, 9 aa, Homo sapiens
  Table A; Target 81487; HLA-A*11:01; SMC1B; ENSG00000077935; CTA
QTVNELMAK

SEQ ID NO: 81488 - protein, 9 aa, Homo sapiens
  Table A; Target 81488; HLA-A*68:01; SMC1B; ENSG00000077935; CTA
QTVNELMAK

SEQ ID NO: 81489 - protein, 9 aa, Homo sapiens
  Table A; Target 81489; HLA-C*07:06; SMC1B; ENSG00000077935; CTA
QTVNELMAK

SEQ ID NO: 81490 - protein, 11 aa, Homo sapiens
  Table A; Target 81490; HLA-A*03:01; SMC1B; ENSG00000077935; CTA
QVASQEDILLK

SEQ ID NO: 81491 - protein, 11 aa, Homo sapiens
  Table A; Target 81491; HLA-A*03:02; SMC1B; ENSG00000077935; CTA
QVASQEDILLK

SEQ ID NO: 81492 - protein, 11 aa, Homo sapiens
  Table A; Target 81492; HLA-A*68:01; SMC1B; ENSG00000077935; CTA
QVASQEDILLK

SEQ ID NO: 81493 - protein, 11 aa, Homo sapiens
  Table A; Target 81493; HLA-B*27:02; SMC1B; ENSG00000077935; CTA
QVASQEDILLK

SEQ ID NO: 81494 - protein, 11 aa, Homo sapiens
  Table A; Target 81494; HLA-C*07:06; SMC1B; ENSG00000077935; CTA
QVASQEDILLK

SEQ ID NO: 81495 - protein, 9 aa, Homo sapiens
  Table A; Target 81495; HLA-B*08:01; SMC1B; ENSG00000077935; CTA
QVRKKVATM

SEQ ID NO: 81496 - protein, 9 aa, Homo sapiens
  Table A; Target 81496; HLA-A*01:01; SMC1B; ENSG00000077935; CTA
RADALIGIY

SEQ ID NO: 81497 - protein, 9 aa, Homo sapiens
  Table A; Target 81497; HLA-B*51:01; SMC1B; ENSG00000077935; CTA
RALENLKTV

SEQ ID NO: 81498 - protein, 9 aa, Homo sapiens
  Table A; Target 81498; HLA-B*58:01; SMC1B; ENSG00000077935; CTA
RALENLKTV

SEQ ID NO: 81499 - protein, 9 aa, Homo sapiens
  Table A; Target 81499; HLA-C*16:02; SMC1B; ENSG00000077935; CTA
RALENLKTV

SEQ ID NO: 81500 - protein, 10 aa, Homo sapiens
  Table A; Target 81500; HLA-A*30:01; SMC1B; ENSG00000077935; CTA
RDIELEASQL

SEQ ID NO: 81501 - protein, 10 aa, Homo sapiens
  Table A; Target 81501; HLA-B*40:01; SMC1B; ENSG00000077935; CTA
RDIELEASQL

SEQ ID NO: 81502 - protein, 9 aa, Homo sapiens
  Table A; Target 81502; HLA-A*31:01; SMC1B; ENSG00000077935; CTA
RFNDNLVSR

SEQ ID NO: 81503 - protein, 9 aa, Homo sapiens
  Table A; Target 81503; HLA-A*33:01; SMC1B; ENSG00000077935; CTA
RFNDNLVSR

SEQ ID NO: 81504 - protein, 9 aa, Homo sapiens
  Table A; Target 81504; HLA-A*33:03; SMC1B; ENSG00000077935; CTA
RFNDNLVSR

SEQ ID NO: 81505 - protein, 9 aa, Homo sapiens
  Table A; Target 81505; HLA-B*38:01; SMC1B; ENSG00000077935; CTA
RHGEVQGNL

SEQ ID NO: 81506 - protein, 8 aa, Homo sapiens
  Table A; Target 81506; HLA-A*03:01; SMC1B; ENSG00000077935; CTA
RLNVQLEY

SEQ ID NO: 81507 - protein, 8 aa, Homo sapiens
  Table A; Target 81507; HLA-A*30:02; SMC1B; ENSG00000077935; CTA
RLNVQLEY

SEQ ID NO: 81508 - protein, 10 aa, Homo sapiens
  Table A; Target 81508; HLA-A*03:01; SMC1B; ENSG00000077935; CTA
RLYPDSVFGR

SEQ ID NO: 81509 - protein, 10 aa, Homo sapiens
  Table A; Target 81509; HLA-A*31:01; SMC1B; ENSG00000077935; CTA
RLYPDSVFGR

SEQ ID NO: 81510 - protein, 11 aa, Homo sapiens
  Table A; Target 81510; HLA-A*02:03; SMC1B; ENSG00000077935; CTA
RLYPDSVFGRL

SEQ ID NO: 81511 - protein, 11 aa, Homo sapiens
  Table A; Target 81511; HLA-A*02:04; SMC1B; ENSG00000077935; CTA
RLYPDSVFGRL

SEQ ID NO: 81512 - protein, 11 aa, Homo sapiens
  Table A; Target 81512; HLA-A*02:07; SMC1B; ENSG00000077935; CTA
RLYPDSVFGRL

SEQ ID NO: 81513 - protein, 11 aa, Homo sapiens
  Table A; Target 81513; HLA-A*03:01; SMC1B; ENSG00000077935; CTA
RLYPDSVFGRL

SEQ ID NO: 81514 - protein, 11 aa, Homo sapiens
  Table A; Target 81514; HLA-A*31:01; SMC1B; ENSG00000077935; CTA
RLYPDSVFGRL

SEQ ID NO: 81515 - protein, 9 aa, Homo sapiens
  Table A; Target 81515; HLA-A*02:01; SMC1B; ENSG00000077935; CTA
RMSEFNEEL

SEQ ID NO: 81516 - protein, 9 aa, Homo sapiens
  Table A; Target 81516; HLA-A*03:02; SMC1B; ENSG00000077935; CTA
RQEFEQVKK

SEQ ID NO: 81517 - protein, 10 aa, Homo sapiens
  Table A; Target 81517; HLA-A*30:02; SMC1B; ENSG00000077935; CTA
RQQEIDQKRY

SEQ ID NO: 81518 - protein, 10 aa, Homo sapiens
  Table A; Target 81518; HLA-B*15:01; SMC1B; ENSG00000077935; CTA
RQQEIDQKRY

SEQ ID NO: 81519 - protein, 9 aa, Homo sapiens
  Table A; Target 81519; HLA-A*03:02; SMC1B; ENSG00000077935; CTA
RSQKIQELK

SEQ ID NO: 81520 - protein, 10 aa, Homo sapiens
  Table A; Target 81520; HLA-A*29:02; SMC1B; ENSG00000077935; CTA
RVLTLDLSQY

SEQ ID NO: 81521 - protein, 10 aa, Homo sapiens
  Table A; Target 81521; HLA-A*30:02; SMC1B; ENSG00000077935; CTA
RVLTLDLSQY

SEQ ID NO: 81522 - protein, 10 aa, Homo sapiens
  Table A; Target 81522; HLA-B*57:01; SMC1B; ENSG00000077935; CTA
RVLTLDLSQY

SEQ ID NO: 81523 - protein, 10 aa, Homo sapiens
  Table A; Target 81523; HLA-A*03:02; SMC1B; ENSG00000077935; CTA
RVTQNSSAEK

SEQ ID NO: 81524 - protein, 9 aa, Homo sapiens
  Table A; Target 81524; HLA-A*24:02; SMC1B; ENSG00000077935; CTA
RYDLFTQCF

SEQ ID NO: 81525 - protein, 9 aa, Homo sapiens
  Table A; Target 81525; HLA-A*23:01; SMC1B; ENSG00000077935; CTA
RYQSLLEEL

SEQ ID NO: 81526 - protein, 9 aa, Homo sapiens
  Table A; Target 81526; HLA-A*24:02; SMC1B; ENSG00000077935; CTA
RYQSLLEEL

SEQ ID NO: 81527 - protein, 9 aa, Homo sapiens
  Table A; Target 81527; HLA-B*51:01; SMC1B; ENSG00000077935; CTA
SAEKVQTQI

SEQ ID NO: 81528 - protein, 9 aa, Homo sapiens
  Table A; Target 81528; HLA-B*58:01; SMC1B; ENSG00000077935; CTA
SAEKVQTQI

SEQ ID NO: 81529 - protein, 9 aa, Homo sapiens
  Table A; Target 81529; HLA-C*05:01; SMC1B; ENSG00000077935; CTA
SAEKVQTQI

SEQ ID NO: 81530 - protein, 8 aa, Homo sapiens
  Table A; Target 81530; HLA-C*16:01; SMC1B; ENSG00000077935; CTA
SASVKIIY

SEQ ID NO: 81531 - protein, 9 aa, Homo sapiens
  Table A; Target 81531; HLA-A*02:04; SMC1B; ENSG00000077935; CTA
SASVKIIYV

SEQ ID NO: 81532 - protein, 9 aa, Homo sapiens
  Table A; Target 81532; HLA-A*68:02; SMC1B; ENSG00000077935; CTA
SASVKIIYV

SEQ ID NO: 81533 - protein, 9 aa, Homo sapiens
  Table A; Target 81533; HLA-C*02:02; SMC1B; ENSG00000077935; CTA
SASVKIIYV

SEQ ID NO: 81534 - protein, 9 aa, Homo sapiens
  Table A; Target 81534; HLA-C*12:03; SMC1B; ENSG00000077935; CTA
SASVKIIYV

SEQ ID NO: 81535 - protein, 9 aa, Homo sapiens
  Table A; Target 81535; HLA-A*30:01; SMC1B; ENSG00000077935; CTA
SEFNEELNL

SEQ ID NO: 81536 - protein, 9 aa, Homo sapiens
  Table A; Target 81536; HLA-B*40:01; SMC1B; ENSG00000077935; CTA
SEFNEELNL

SEQ ID NO: 81537 - protein, 9 aa, Homo sapiens
  Table A; Target 81537; HLA-B*44:02; SMC1B; ENSG00000077935; CTA
SEFNEELNL

SEQ ID NO: 81538 - protein, 9 aa, Homo sapiens
  Table A; Target 81538; HLA-B*44:03; SMC1B; ENSG00000077935; CTA
SEFNEELNL

SEQ ID NO: 81539 - protein, 9 aa, Homo sapiens
  Table A; Target 81539; HLA-B*49:01; SMC1B; ENSG00000077935; CTA
SEFNEELNL

SEQ ID NO: 81540 - protein, 10 aa, Homo sapiens
  Table A; Target 81540; HLA-A*30:01; SMC1B; ENSG00000077935; CTA
SEFNEELNLI

SEQ ID NO: 81541 - protein, 10 aa, Homo sapiens
  Table A; Target 81541; HLA-B*40:01; SMC1B; ENSG00000077935; CTA
SEFNEELNLI

SEQ ID NO: 81542 - protein, 10 aa, Homo sapiens
  Table A; Target 81542; HLA-B*44:03; SMC1B; ENSG00000077935; CTA
SEFNEELNLI

SEQ ID NO: 81543 - protein, 10 aa, Homo sapiens
  Table A; Target 81543; HLA-B*49:01; SMC1B; ENSG00000077935; CTA
SEFNEELNLI

SEQ ID NO: 81544 - protein, 9 aa, Homo sapiens
  Table A; Target 81544; HLA-A*30:01; SMC1B; ENSG00000077935; CTA
SEFRFNDNL

SEQ ID NO: 81545 - protein, 9 aa, Homo sapiens
  Table A; Target 81545; HLA-B*40:01; SMC1B; ENSG00000077935; CTA
SEFRFNDNL

SEQ ID NO: 81546 - protein, 9 aa, Homo sapiens
  Table A; Target 81546; HLA-B*44:03; SMC1B; ENSG00000077935; CTA
SEFRFNDNL

SEQ ID NO: 81547 - protein, 9 aa, Homo sapiens
  Table A; Target 81547; HLA-B*49:01; SMC1B; ENSG00000077935; CTA
SEFRFNDNL

SEQ ID NO: 81548 - protein, 10 aa, Homo sapiens
  Table A; Target 81548; HLA-B*49:01; SMC1B; ENSG00000077935; CTA
SEFRFNDNLV

SEQ ID NO: 81549 - protein, 8 aa, Homo sapiens
  Table A; Target 81549; HLA-A*11:01; SMC1B; ENSG00000077935; CTA
SIDQIYKK

SEQ ID NO: 81550 - protein, 9 aa, Homo sapiens
  Table A; Target 81550; HLA-A*02:07; SMC1B; ENSG00000077935; CTA
SIDQIYKKL

SEQ ID NO: 81551 - protein, 9 aa, Homo sapiens
  Table A; Target 81551; HLA-A*03:02; SMC1B; ENSG00000077935; CTA
SIQTSLEQK

SEQ ID NO: 81552 - protein, 9 aa, Homo sapiens
  Table A; Target 81552; HLA-A*11:01; SMC1B; ENSG00000077935; CTA
SIQTSLEQK

SEQ ID NO: 81553 - protein, 9 aa, Homo sapiens
  Table A; Target 81553; HLA-A*03:01; SMC1B; ENSG00000077935; CTA
SISIDQIYK

SEQ ID NO: 81554 - protein, 9 aa, Homo sapiens
  Table A; Target 81554; HLA-A*03:02; SMC1B; ENSG00000077935; CTA
SISIDQIYK

SEQ ID NO: 81555 - protein, 9 aa, Homo sapiens
  Table A; Target 81555; HLA-A*11:01; SMC1B; ENSG00000077935; CTA
SISIDQIYK

SEQ ID NO: 81556 - protein, 8 aa, Homo sapiens
  Table A; Target 81556; HLA-A*02:01; SMC1B; ENSG00000077935; CTA
SLDDIIEV

SEQ ID NO: 81557 - protein, 8 aa, Homo sapiens
  Table A; Target 81557; HLA-A*02:07; SMC1B; ENSG00000077935; CTA
SLDDIIEV

SEQ ID NO: 81558 - protein, 8 aa, Homo sapiens
  Table A; Target 81558; HLA-C*05:01; SMC1B; ENSG00000077935; CTA
SLDDIIEV

SEQ ID NO: 81559 - protein, 10 aa, Homo sapiens
  Table A; Target 81559; HLA-A*02:01; SMC1B; ENSG00000077935; CTA
SLDDIIEVEM

SEQ ID NO: 81560 - protein, 10 aa, Homo sapiens
  Table A; Target 81560; HLA-A*02:07; SMC1B; ENSG00000077935; CTA
SLDDIIEVEM

SEQ ID NO: 81561 - protein, 10 aa, Homo sapiens
  Table A; Target 81561; HLA-B*38:01; SMC1B; ENSG00000077935; CTA
SLDDIIEVEM

SEQ ID NO: 81562 - protein, 10 aa, Homo sapiens
  Table A; Target 81562; HLA-B*55:01; SMC1B; ENSG00000077935; CTA
SLDDIIEVEM

SEQ ID NO: 81563 - protein, 10 aa, Homo sapiens
  Table A; Target 81563; HLA-C*04:01; SMC1B; ENSG00000077935; CTA
SLDDIIEVEM

SEQ ID NO: 81564 - protein, 10 aa, Homo sapiens
  Table A; Target 81564; HLA-C*05:01; SMC1B; ENSG00000077935; CTA
SLDDIIEVEM

SEQ ID NO: 81565 - protein, 9 aa, Homo sapiens
  Table A; Target 81565; HLA-A*02:03; SMC1B; ENSG00000077935; CTA
SLKEDLKAL

SEQ ID NO: 81566 - protein, 9 aa, Homo sapiens
  Table A; Target 81566; HLA-A*02:04; SMC1B; ENSG00000077935; CTA
SLKEDLKAL

SEQ ID NO: 81567 - protein, 9 aa, Homo sapiens
  Table A; Target 81567; HLA-B*08:01; SMC1B; ENSG00000077935; CTA
SLKEDLKAL

SEQ ID NO: 81568 - protein, 9 aa, Homo sapiens
  Table A; Target 81568; HLA-B*46:01; SMC1B; ENSG00000077935; CTA
SLKEDLKAL

SEQ ID NO: 81569 - protein, 9 aa, Homo sapiens
  Table A; Target 81569; HLA-A*31:01; SMC1B; ENSG00000077935; CTA
SLKEEFYSR

SEQ ID NO: 81570 - protein, 9 aa, Homo sapiens
  Table A; Target 81570; HLA-A*33:01; SMC1B; ENSG00000077935; CTA
SLKEEFYSR

SEQ ID NO: 81571 - protein, 9 aa, Homo sapiens
  Table A; Target 81571; HLA-A*33:03; SMC1B; ENSG00000077935; CTA
SLKEEFYSR

SEQ ID NO: 81572 - protein, 10 aa, Homo sapiens
  Table A; Target 81572; HLA-B*35:03; SMC1B; ENSG00000077935; CTA
SPENPEEPYL

SEQ ID NO: 81573 - protein, 10 aa, Homo sapiens
  Table A; Target 81573; HLA-B*13:02; SMC1B; ENSG00000077935; CTA
SQLQSELLNI

SEQ ID NO: 81574 - protein, 10 aa, Homo sapiens
  Table A; Target 81574; HLA-A*11:01; SMC1B; ENSG00000077935; CTA
SQNELEMIKK

SEQ ID NO: 81575 - protein, 11 aa, Homo sapiens
  Table A; Target 81575; HLA-B*27:05; SMC1B; ENSG00000077935; CTA
SQYPDTEGQES

SEQ ID NO: 81576 - protein, 9 aa, Homo sapiens
  Table A; Target 81576; HLA-B*27:05; SMC1B; ENSG00000077935; CTA
SRADALIGI

SEQ ID NO: 81577 - protein, 10 aa, Homo sapiens
  Table A; Target 81577; HLA-B*27:02; SMC1B; ENSG00000077935; CTA
SRADALIGIY

SEQ ID NO: 81578 - protein, 9 aa, Homo sapiens
  Table A; Target 81578; HLA-A*01:01; SMC1B; ENSG00000077935; CTA
SSASVKIIY

SEQ ID NO: 81579 - protein, 9 aa, Homo sapiens
  Table A; Target 81579; HLA-A*30:02; SMC1B; ENSG00000077935; CTA
SSASVKIIY

SEQ ID NO: 81580 - protein, 9 aa, Homo sapiens
  Table A; Target 81580; HLA-A*32:01; SMC1B; ENSG00000077935; CTA
SSASVKIIY

SEQ ID NO: 81581 - protein, 9 aa, Homo sapiens
  Table A; Target 81581; HLA-B*58:01; SMC1B; ENSG00000077935; CTA
SSASVKIIY

SEQ ID NO: 81582 - protein, 9 aa, Homo sapiens
  Table A; Target 81582; HLA-C*02:02; SMC1B; ENSG00000077935; CTA
SSASVKIIY

SEQ ID NO: 81583 - protein, 9 aa, Homo sapiens
  Table A; Target 81583; HLA-C*12:03; SMC1B; ENSG00000077935; CTA
SSASVKIIY

SEQ ID NO: 81584 - protein, 9 aa, Homo sapiens
  Table A; Target 81584; HLA-C*16:01; SMC1B; ENSG00000077935; CTA
SSASVKIIY

SEQ ID NO: 81585 - protein, 10 aa, Homo sapiens
  Table A; Target 81585; HLA-A*30:02; SMC1B; ENSG00000077935; CTA
SSSASVKIIY

SEQ ID NO: 81586 - protein, 9 aa, Homo sapiens
  Table A; Target 81586; HLA-C*07:06; SMC1B; ENSG00000077935; CTA
STDAFEASR

SEQ ID NO: 81587 - protein, 10 aa, Homo sapiens
  Table A; Target 81587; HLA-A*03:02; SMC1B; ENSG00000077935; CTA
STDAFEASRK

SEQ ID NO: 81588 - protein, 9 aa, Homo sapiens
  Table A; Target 81588; HLA-A*01:01; SMC1B; ENSG00000077935; CTA
STQATIDIY

SEQ ID NO: 81589 - protein, 9 aa, Homo sapiens
  Table A; Target 81589; HLA-A*30:02; SMC1B; ENSG00000077935; CTA
STQATIDIY

SEQ ID NO: 81590 - protein, 11 aa, Homo sapiens
  Table A; Target 81590; HLA-A*03:02; SMC1B; ENSG00000077935; CTA
STQATIDIYEK

SEQ ID NO: 81591 - protein, 11 aa, Homo sapiens
  Table A; Target 81591; HLA-A*11:01; SMC1B; ENSG00000077935; CTA
STQATIDIYEK

SEQ ID NO: 81592 - protein, 10 aa, Homo sapiens
  Table A; Target 81592; HLA-A*01:01; SMC1B; ENSG00000077935; CTA
STSGELIGEY

SEQ ID NO: 81593 - protein, 10 aa, Homo sapiens
  Table A; Target 81593; HLA-A*25:01; SMC1B; ENSG00000077935; CTA
STSGELIGEY

SEQ ID NO: 81594 - protein, 10 aa, Homo sapiens
  Table A; Target 81594; HLA-A*26:01; SMC1B; ENSG00000077935; CTA
STSGELIGEY

SEQ ID NO: 81595 - protein, 10 aa, Homo sapiens
  Table A; Target 81595; HLA-A*29:02; SMC1B; ENSG00000077935; CTA
STSGELIGEY

SEQ ID NO: 81596 - protein, 10 aa, Homo sapiens
  Table A; Target 81596; HLA-A*30:02; SMC1B; ENSG00000077935; CTA
STSGELIGEY

SEQ ID NO: 81597 - protein, 9 aa, Homo sapiens
  Table A; Target 81597; HLA-A*03:01; SMC1B; ENSG00000077935; CTA
SVETLLNQK

SEQ ID NO: 81598 - protein, 9 aa, Homo sapiens
  Table A; Target 81598; HLA-A*03:02; SMC1B; ENSG00000077935; CTA
SVETLLNQK

SEQ ID NO: 81599 - protein, 9 aa, Homo sapiens
  Table A; Target 81599; HLA-A*11:01; SMC1B; ENSG00000077935; CTA
SVETLLNQK

SEQ ID NO: 81600 - protein, 9 aa, Homo sapiens
  Table A; Target 81600; HLA-C*07:06; SMC1B; ENSG00000077935; CTA
SVETLLNQK

SEQ ID NO: 81601 - protein, 10 aa, Homo sapiens
  Table A; Target 81601; HLA-A*68:01; SMC1B; ENSG00000077935; CTA
SVETLLNQKR

SEQ ID NO: 81602 - protein, 10 aa, Homo sapiens
  Table A; Target 81602; HLA-C*07:06; SMC1B; ENSG00000077935; CTA
SVETLLNQKR

SEQ ID NO: 81603 - protein, 9 aa, Homo sapiens
  Table A; Target 81603; HLA-A*02:04; SMC1B; ENSG00000077935; CTA
SVFGRLFDL

SEQ ID NO: 81604 - protein, 9 aa, Homo sapiens
  Table A; Target 81604; HLA-A*03:01; SMC1B; ENSG00000077935; CTA
SVYIAELEK

SEQ ID NO: 81605 - protein, 9 aa, Homo sapiens
  Table A; Target 81605; HLA-A*11:01; SMC1B; ENSG00000077935; CTA
SVYIAELEK

SEQ ID NO: 81606 - protein, 11 aa, Homo sapiens
  Table A; Target 81606; HLA-A*23:01; SMC1B; ENSG00000077935; CTA
SYIKEQTQDQF

SEQ ID NO: 81607 - protein, 11 aa, Homo sapiens
  Table A; Target 81607; HLA-A*24:02; SMC1B; ENSG00000077935; CTA
SYIKEQTQDQF

SEQ ID NO: 81608 - protein, 9 aa, Homo sapiens
  Table A; Target 81608; HLA-A*32:01; SMC1B; ENSG00000077935; CTA
TAAPNLRAL

SEQ ID NO: 81609 - protein, 9 aa, Homo sapiens
  Table A; Target 81609; HLA-B*07:02; SMC1B; ENSG00000077935; CTA
TAAPNLRAL

SEQ ID NO: 81610 - protein, 9 aa, Homo sapiens
  Table A; Target 81610; HLA-B*08:01; SMC1B; ENSG00000077935; CTA
TAAPNLRAL

SEQ ID NO: 81611 - protein, 9 aa, Homo sapiens
  Table A; Target 81611; HLA-B*35:03; SMC1B; ENSG00000077935; CTA
TAAPNLRAL

SEQ ID NO: 81612 - protein, 9 aa, Homo sapiens
  Table A; Target 81612; HLA-B*46:01; SMC1B; ENSG00000077935; CTA
TAAPNLRAL

SEQ ID NO: 81613 - protein, 9 aa, Homo sapiens
  Table A; Target 81613; HLA-B*58:01; SMC1B; ENSG00000077935; CTA
TAAPNLRAL

SEQ ID NO: 81614 - protein, 9 aa, Homo sapiens
  Table A; Target 81614; HLA-C*01:02; SMC1B; ENSG00000077935; CTA
TAAPNLRAL

SEQ ID NO: 81615 - protein, 9 aa, Homo sapiens
  Table A; Target 81615; HLA-C*02:02; SMC1B; ENSG00000077935; CTA
TAAPNLRAL

SEQ ID NO: 81616 - protein, 9 aa, Homo sapiens
  Table A; Target 81616; HLA-C*03:03; SMC1B; ENSG00000077935; CTA
TAAPNLRAL

SEQ ID NO: 81617 - protein, 9 aa, Homo sapiens
  Table A; Target 81617; HLA-C*03:04; SMC1B; ENSG00000077935; CTA
TAAPNLRAL

SEQ ID NO: 81618 - protein, 9 aa, Homo sapiens
  Table A; Target 81618; HLA-C*07:02; SMC1B; ENSG00000077935; CTA
TAAPNLRAL

SEQ ID NO: 81619 - protein, 9 aa, Homo sapiens
  Table A; Target 81619; HLA-C*07:06; SMC1B; ENSG00000077935; CTA
TAAPNLRAL

SEQ ID NO: 81620 - protein, 9 aa, Homo sapiens
  Table A; Target 81620; HLA-C*12:03; SMC1B; ENSG00000077935; CTA
TAAPNLRAL

SEQ ID NO: 81621 - protein, 9 aa, Homo sapiens
  Table A; Target 81621; HLA-C*16:01; SMC1B; ENSG00000077935; CTA
TAAPNLRAL

SEQ ID NO: 81622 - protein, 9 aa, Homo sapiens
  Table A; Target 81622; HLA-C*16:02; SMC1B; ENSG00000077935; CTA
TAAPNLRAL

SEQ ID NO: 81623 - protein, 9 aa, Homo sapiens
  Table A; Target 81623; HLA-A*68:01; SMC1B; ENSG00000077935; CTA
TAIVVASEK

SEQ ID NO: 81624 - protein, 9 aa, Homo sapiens
  Table A; Target 81624; HLA-C*07:06; SMC1B; ENSG00000077935; CTA
TAIVVASEK

SEQ ID NO: 81625 - protein, 8 aa, Homo sapiens
  Table A; Target 81625; HLA-B*37:01; SMC1B; ENSG00000077935; CTA
TDEERLAF

SEQ ID NO: 81626 - protein, 9 aa, Homo sapiens
  Table A; Target 81626; HLA-A*30:01; SMC1B; ENSG00000077935; CTA
TDLKQIQTL

SEQ ID NO: 81627 - protein, 9 aa, Homo sapiens
  Table A; Target 81627; HLA-B*37:01; SMC1B; ENSG00000077935; CTA
TDLKQIQTL

SEQ ID NO: 81628 - protein, 10 aa, Homo sapiens
  Table A; Target 81628; HLA-A*30:01; SMC1B; ENSG00000077935; CTA
TEAESTQATI

SEQ ID NO: 81629 - protein, 10 aa, Homo sapiens
  Table A; Target 81629; HLA-B*40:01; SMC1B; ENSG00000077935; CTA
TEAESTQATI

SEQ ID NO: 81630 - protein, 10 aa, Homo sapiens
  Table A; Target 81630; HLA-B*49:01; SMC1B; ENSG00000077935; CTA
TEAESTQATI

SEQ ID NO: 81631 - protein, 11 aa, Homo sapiens
  Table A; Target 81631; HLA-A*30:01; SMC1B; ENSG00000077935; CTA
TEKELKSVETL

SEQ ID NO: 81632 - protein, 11 aa, Homo sapiens
  Table A; Target 81632; HLA-B*40:01; SMC1B; ENSG00000077935; CTA
TEKELKSVETL

SEQ ID NO: 81633 - protein, 10 aa, Homo sapiens
  Table A; Target 81633; HLA-B*44:02; SMC1B; ENSG00000077935; CTA
TELADLDAAW

SEQ ID NO: 81634 - protein, 10 aa, Homo sapiens
  Table A; Target 81634; HLA-B*44:03; SMC1B; ENSG00000077935; CTA
TELADLDAAW

SEQ ID NO: 81635 - protein, 10 aa, Homo sapiens
  Table A; Target 81635; HLA-C*16:04; SMC1B; ENSG00000077935; CTA
TELADLDAAW

SEQ ID NO: 81636 - protein, 9 aa, Homo sapiens
  Table A; Target 81636; HLA-C*07:06; SMC1B; ENSG00000077935; CTA
TLIQGTQTR

SEQ ID NO: 81637 - protein, 11 aa, Homo sapiens
  Table A; Target 81637; HLA-A*03:02; SMC1B; ENSG00000077935; CTA
TLIQGTQTRLK

SEQ ID NO: 81638 - protein, 10 aa, Homo sapiens
  Table A; Target 81638; HLA-B*08:01; SMC1B; ENSG00000077935; CTA
TMEEARHIAL

SEQ ID NO: 81639 - protein, 9 aa, Homo sapiens
  Table A; Target 81639; HLA-A*02:04; SMC1B; ENSG00000077935; CTA
TMTQQLEKL

SEQ ID NO: 81640 - protein, 9 aa, Homo sapiens
  Table A; Target 81640; HLA-A*25:01; SMC1B; ENSG00000077935; CTA
TNIGKVSSY

SEQ ID NO: 81641 - protein, 9 aa, Homo sapiens
  Table A; Target 81641; HLA-A*26:01; SMC1B; ENSG00000077935; CTA
TNIGKVSSY

SEQ ID NO: 81642 - protein, 9 aa, Homo sapiens
  Table A; Target 81642; HLA-A*29:02; SMC1B; ENSG00000077935; CTA
TNIGKVSSY

SEQ ID NO: 81643 - protein, 9 aa, Homo sapiens
  Table A; Target 81643; HLA-A*30:02; SMC1B; ENSG00000077935; CTA
TNIGKVSSY

SEQ ID NO: 81644 - protein, 9 aa, Homo sapiens
  Table A; Target 81644; HLA-A*32:01; SMC1B; ENSG00000077935; CTA
TNIGKVSSY

SEQ ID NO: 81645 - protein, 9 aa, Homo sapiens
  Table A; Target 81645; HLA-B*15:01; SMC1B; ENSG00000077935; CTA
TNIGKVSSY

SEQ ID NO: 81646 - protein, 9 aa, Homo sapiens
  Table A; Target 81646; HLA-B*15:03; SMC1B; ENSG00000077935; CTA
TNIGKVSSY

SEQ ID NO: 81647 - protein, 9 aa, Homo sapiens
  Table A; Target 81647; HLA-B*18:01; SMC1B; ENSG00000077935; CTA
TNIGKVSSY

SEQ ID NO: 81648 - protein, 9 aa, Homo sapiens
  Table A; Target 81648; HLA-B*35:01; SMC1B; ENSG00000077935; CTA
TNIGKVSSY

SEQ ID NO: 81649 - protein, 9 aa, Homo sapiens
  Table A; Target 81649; HLA-B*44:02; SMC1B; ENSG00000077935; CTA
TNIGKVSSY

SEQ ID NO: 81650 - protein, 9 aa, Homo sapiens
  Table A; Target 81650; HLA-B*46:01; SMC1B; ENSG00000077935; CTA
TNIGKVSSY

SEQ ID NO: 81651 - protein, 9 aa, Homo sapiens
  Table A; Target 81651; HLA-C*02:02; SMC1B; ENSG00000077935; CTA
TNIGKVSSY

SEQ ID NO: 81652 - protein, 9 aa, Homo sapiens
  Table A; Target 81652; HLA-C*07:04; SMC1B; ENSG00000077935; CTA
TNIGKVSSY

SEQ ID NO: 81653 - protein, 9 aa, Homo sapiens
  Table A; Target 81653; HLA-C*14:02; SMC1B; ENSG00000077935; CTA
TNIGKVSSY

SEQ ID NO: 81654 - protein, 9 aa, Homo sapiens
  Table A; Target 81654; HLA-C*16:01; SMC1B; ENSG00000077935; CTA
TNIGKVSSY

SEQ ID NO: 81655 - protein, 9 aa, Homo sapiens
  Table A; Target 81655; HLA-C*16:02; SMC1B; ENSG00000077935; CTA
TNIGKVSSY

SEQ ID NO: 81656 - protein, 8 aa, Homo sapiens
  Table A; Target 81656; HLA-B*15:01; SMC1B; ENSG00000077935; CTA
TQATIDIY

SEQ ID NO: 81657 - protein, 8 aa, Homo sapiens
  Table A; Target 81657; HLA-B*15:03; SMC1B; ENSG00000077935; CTA
TQATIDIY

SEQ ID NO: 81658 - protein, 10 aa, Homo sapiens
  Table A; Target 81658; HLA-B*27:02; SMC1B; ENSG00000077935; CTA
TQATIDIYEK

SEQ ID NO: 81659 - protein, 9 aa, Homo sapiens
  Table A; Target 81659; HLA-B*13:02; SMC1B; ENSG00000077935; CTA
TQCFEHVSI

SEQ ID NO: 81660 - protein, 9 aa, Homo sapiens
  Table A; Target 81660; HLA-B*38:01; SMC1B; ENSG00000077935; CTA
TQCFEHVSI

SEQ ID NO: 81661 - protein, 8 aa, Homo sapiens
  Table A; Target 81661; HLA-B*13:02; SMC1B; ENSG00000077935; CTA
TQDQFQMI

SEQ ID NO: 81662 - protein, 8 aa, Homo sapiens
  Table A; Target 81662; HLA-B*38:01; SMC1B; ENSG00000077935; CTA
TQDQFQMI

SEQ ID NO: 81663 - protein, 10 aa, Homo sapiens
  Table A; Target 81663; HLA-B*38:01; SMC1B; ENSG00000077935; CTA
TQDQFQMIVI

SEQ ID NO: 81664 - protein, 9 aa, Homo sapiens
  Table A; Target 81664; HLA-A*02:03; SMC1B; ENSG00000077935; CTA
TQFPQLKKV

SEQ ID NO: 81665 - protein, 9 aa, Homo sapiens
  Table A; Target 81665; HLA-B*13:02; SMC1B; ENSG00000077935; CTA
TQFPQLKKV

SEQ ID NO: 81666 - protein, 9 aa, Homo sapiens
  Table A; Target 81666; HLA-C*02:02; SMC1B; ENSG00000077935; CTA
TQFPQLKKV

SEQ ID NO: 81667 - protein, 9 aa, Homo sapiens
  Table A; Target 81667; HLA-B*13:02; SMC1B; ENSG00000077935; CTA
TQNSSAEKV

SEQ ID NO: 81668 - protein, 9 aa, Homo sapiens
  Table A; Target 81668; HLA-B*44:02; SMC1B; ENSG00000077935; CTA
TQQLEKLQW

SEQ ID NO: 81669 - protein, 9 aa, Homo sapiens
  Table A; Target 81669; HLA-A*29:02; SMC1B; ENSG00000077935; CTA
TRLNVQLEY

SEQ ID NO: 81670 - protein, 9 aa, Homo sapiens
  Table A; Target 81670; HLA-B*27:02; SMC1B; ENSG00000077935; CTA
TRLNVQLEY

SEQ ID NO: 81671 - protein, 9 aa, Homo sapiens
  Table A; Target 81671; HLA-B*27:05; SMC1B; ENSG00000077935; CTA
TRLNVQLEY

SEQ ID NO: 81672 - protein, 9 aa, Homo sapiens
  Table A; Target 81672; HLA-C*02:02; SMC1B; ENSG00000077935; CTA
TRLNVQLEY

SEQ ID NO: 81673 - protein, 9 aa, Homo sapiens
  Table A; Target 81673; HLA-C*16:04; SMC1B; ENSG00000077935; CTA
TRLNVQLEY

SEQ ID NO: 81674 - protein, 9 aa, Homo sapiens
  Table A; Target 81674; HLA-B*27:05; SMC1B; ENSG00000077935; CTA
TRQLQQTEK

SEQ ID NO: 81675 - protein, 9 aa, Homo sapiens
  Table A; Target 81675; HLA-A*01:01; SMC1B; ENSG00000077935; CTA
TSGELIGEY

SEQ ID NO: 81676 - protein, 9 aa, Homo sapiens
  Table A; Target 81676; HLA-A*26:01; SMC1B; ENSG00000077935; CTA
TSGELIGEY

SEQ ID NO: 81677 - protein, 9 aa, Homo sapiens
  Table A; Target 81677; HLA-A*30:02; SMC1B; ENSG00000077935; CTA
TSGELIGEY

SEQ ID NO: 81678 - protein, 9 aa, Homo sapiens
  Table A; Target 81678; HLA-B*18:01; SMC1B; ENSG00000077935; CTA
TSGELIGEY

SEQ ID NO: 81679 - protein, 9 aa, Homo sapiens
  Table A; Target 81679; HLA-B*35:01; SMC1B; ENSG00000077935; CTA
TSGELIGEY

SEQ ID NO: 81680 - protein, 11 aa, Homo sapiens
  Table A; Target 81680; HLA-A*03:02; SMC1B; ENSG00000077935; CTA
TVALDGTLFLK

SEQ ID NO: 81681 - protein, 11 aa, Homo sapiens
  Table A; Target 81681; HLA-A*11:01; SMC1B; ENSG00000077935; CTA
TVALDGTLFLK

SEQ ID NO: 81682 - protein, 8 aa, Homo sapiens
  Table A; Target 81682; HLA-A*03:02; SMC1B; ENSG00000077935; CTA
TVESISVK

SEQ ID NO: 81683 - protein, 9 aa, Homo sapiens
  Table A; Target 81683; HLA-A*03:01; SMC1B; ENSG00000077935; CTA
TVESISVKK

SEQ ID NO: 81684 - protein, 9 aa, Homo sapiens
  Table A; Target 81684; HLA-A*03:02; SMC1B; ENSG00000077935; CTA
TVESISVKK

SEQ ID NO: 81685 - protein, 9 aa, Homo sapiens
  Table A; Target 81685; HLA-A*11:01; SMC1B; ENSG00000077935; CTA
TVESISVKK

SEQ ID NO: 81686 - protein, 9 aa, Homo sapiens
  Table A; Target 81686; HLA-A*68:01; SMC1B; ENSG00000077935; CTA
TVESISVKK

SEQ ID NO: 81687 - protein, 9 aa, Homo sapiens
  Table A; Target 81687; HLA-C*07:06; SMC1B; ENSG00000077935; CTA
TVESISVKK

SEQ ID NO: 81688 - protein, 11 aa, Homo sapiens
  Table A; Target 81688; HLA-A*03:02; SMC1B; ENSG00000077935; CTA
TVESISVKKPK

SEQ ID NO: 81689 - protein, 8 aa, Homo sapiens
  Table A; Target 81689; HLA-A*03:02; SMC1B; ENSG00000077935; CTA
TVNELMAK

SEQ ID NO: 81690 - protein, 8 aa, Homo sapiens
  Table A; Target 81690; HLA-A*11:01; SMC1B; ENSG00000077935; CTA
TVNELMAK

SEQ ID NO: 81691 - protein, 8 aa, Homo sapiens
  Table A; Target 81691; HLA-A*23:01; SMC1B; ENSG00000077935; CTA
VALDGTLF

SEQ ID NO: 81692 - protein, 9 aa, Homo sapiens
  Table A; Target 81692; HLA-A*23:01; SMC1B; ENSG00000077935; CTA
VALDGTLFL

SEQ ID NO: 81693 - protein, 9 aa, Homo sapiens
  Table A; Target 81693; HLA-C*03:03; SMC1B; ENSG00000077935; CTA
VALDGTLFL

SEQ ID NO: 81694 - protein, 9 aa, Homo sapiens
  Table A; Target 81694; HLA-C*03:04; SMC1B; ENSG00000077935; CTA
VALDGTLFL

SEQ ID NO: 81695 - protein, 10 aa, Homo sapiens
  Table A; Target 81695; HLA-A*03:01; SMC1B; ENSG00000077935; CTA
VALDGTLFLK

SEQ ID NO: 81696 - protein, 10 aa, Homo sapiens
  Table A; Target 81696; HLA-A*03:02; SMC1B; ENSG00000077935; CTA
VALDGTLFLK

SEQ ID NO: 81697 - protein, 10 aa, Homo sapiens
  Table A; Target 81697; HLA-A*11:01; SMC1B; ENSG00000077935; CTA
VALDGTLFLK

SEQ ID NO: 81698 - protein, 10 aa, Homo sapiens
  Table A; Target 81698; HLA-B*27:02; SMC1B; ENSG00000077935; CTA
VALDGTLFLK

SEQ ID NO: 81699 - protein, 9 aa, Homo sapiens
  Table A; Target 81699; HLA-B*35:03; SMC1B; ENSG00000077935; CTA
VASQEDILL

SEQ ID NO: 81700 - protein, 9 aa, Homo sapiens
  Table A; Target 81700; HLA-B*38:01; SMC1B; ENSG00000077935; CTA
VASQEDILL

SEQ ID NO: 81701 - protein, 10 aa, Homo sapiens
  Table A; Target 81701; HLA-A*03:02; SMC1B; ENSG00000077935; CTA
VASQEDILLK

SEQ ID NO: 81702 - protein, 10 aa, Homo sapiens
  Table A; Target 81702; HLA-A*11:01; SMC1B; ENSG00000077935; CTA
VASQEDILLK

SEQ ID NO: 81703 - protein, 10 aa, Homo sapiens
  Table A; Target 81703; HLA-B*27:02; SMC1B; ENSG00000077935; CTA
VASQEDILLK

SEQ ID NO: 81704 - protein, 8 aa, Homo sapiens
  Table A; Target 81704; HLA-C*03:04; SMC1B; ENSG00000077935; CTA
VATMTQQL

SEQ ID NO: 81705 - protein, 8 aa, Homo sapiens
  Table A; Target 81705; HLA-C*16:01; SMC1B; ENSG00000077935; CTA
VATMTQQL

SEQ ID NO: 81706 - protein, 8 aa, Homo sapiens
  Table A; Target 81706; HLA-B*37:01; SMC1B; ENSG00000077935; CTA
VDREVGKL

SEQ ID NO: 81707 - protein, 9 aa, Homo sapiens
  Table A; Target 81707; HLA-A*02:07; SMC1B; ENSG00000077935; CTA
VEDDIFQHF

SEQ ID NO: 81708 - protein, 9 aa, Homo sapiens
  Table A; Target 81708; HLA-A*23:01; SMC1B; ENSG00000077935; CTA
VEDDIFQHF

SEQ ID NO: 81709 - protein, 9 aa, Homo sapiens
  Table A; Target 81709; HLA-A*24:02; SMC1B; ENSG00000077935; CTA
VEDDIFQHF

SEQ ID NO: 81710 - protein, 9 aa, Homo sapiens
  Table A; Target 81710; HLA-A*30:01; SMC1B; ENSG00000077935; CTA
VEDDIFQHF

SEQ ID NO: 81711 - protein, 9 aa, Homo sapiens
  Table A; Target 81711; HLA-B*18:01; SMC1B; ENSG00000077935; CTA
VEDDIFQHF

SEQ ID NO: 81712 - protein, 9 aa, Homo sapiens
  Table A; Target 81712; HLA-B*37:01; SMC1B; ENSG00000077935; CTA
VEDDIFQHF

SEQ ID NO: 81713 - protein, 9 aa, Homo sapiens
  Table A; Target 81713; HLA-B*38:01; SMC1B; ENSG00000077935; CTA
VEDDIFQHF

SEQ ID NO: 81714 - protein, 9 aa, Homo sapiens
  Table A; Target 81714; HLA-B*40:01; SMC1B; ENSG00000077935; CTA
VEDDIFQHF

SEQ ID NO: 81715 - protein, 9 aa, Homo sapiens
  Table A; Target 81715; HLA-B*44:02; SMC1B; ENSG00000077935; CTA
VEDDIFQHF

SEQ ID NO: 81716 - protein, 9 aa, Homo sapiens
  Table A; Target 81716; HLA-B*44:03; SMC1B; ENSG00000077935; CTA
VEDDIFQHF

SEQ ID NO: 81717 - protein, 9 aa, Homo sapiens
  Table A; Target 81717; HLA-B*49:01; SMC1B; ENSG00000077935; CTA
VEDDIFQHF

SEQ ID NO: 81718 - protein, 9 aa, Homo sapiens
  Table A; Target 81718; HLA-C*02:02; SMC1B; ENSG00000077935; CTA
VEDDIFQHF

SEQ ID NO: 81719 - protein, 9 aa, Homo sapiens
  Table A; Target 81719; HLA-C*16:04; SMC1B; ENSG00000077935; CTA
VEDDIFQHF

SEQ ID NO: 81720 - protein, 10 aa, Homo sapiens
  Table A; Target 81720; HLA-B*40:01; SMC1B; ENSG00000077935; CTA
VEESGEEKTF

SEQ ID NO: 81721 - protein, 10 aa, Homo sapiens
  Table A; Target 81721; HLA-B*44:02; SMC1B; ENSG00000077935; CTA
VEESGEEKTF

SEQ ID NO: 81722 - protein, 10 aa, Homo sapiens
  Table A; Target 81722; HLA-B*44:03; SMC1B; ENSG00000077935; CTA
VEESGEEKTF

SEQ ID NO: 81723 - protein, 10 aa, Homo sapiens
  Table A; Target 81723; HLA-C*16:04; SMC1B; ENSG00000077935; CTA
VEESGEEKTF

SEQ ID NO: 81724 - protein, 9 aa, Homo sapiens
  Table A; Target 81724; HLA-A*23:01; SMC1B; ENSG00000077935; CTA
VFQGTVESI

SEQ ID NO: 81725 - protein, 9 aa, Homo sapiens
  Table A; Target 81725; HLA-A*24:02; SMC1B; ENSG00000077935; CTA
VFQGTVESI

SEQ ID NO: 81726 - protein, 9 aa, Homo sapiens
  Table A; Target 81726; HLA-C*01:02; SMC1B; ENSG00000077935; CTA
VFQGTVESI

SEQ ID NO: 81727 - protein, 9 aa, Homo sapiens
  Table A; Target 81727; HLA-C*04:01; SMC1B; ENSG00000077935; CTA
VFQGTVESI

SEQ ID NO: 81728 - protein, 9 aa, Homo sapiens
  Table A; Target 81728; HLA-C*14:02; SMC1B; ENSG00000077935; CTA
VFQGTVESI

SEQ ID NO: 81729 - protein, 9 aa, Homo sapiens
  Table A; Target 81729; HLA-A*01:01; SMC1B; ENSG00000077935; CTA
VIDVIKTQF

SEQ ID NO: 81730 - protein, 9 aa, Homo sapiens
  Table A; Target 81730; HLA-A*02:07; SMC1B; ENSG00000077935; CTA
VIDVIKTQF

SEQ ID NO: 81731 - protein, 9 aa, Homo sapiens
  Table A; Target 81731; HLA-A*23:01; SMC1B; ENSG00000077935; CTA
VIDVIKTQF

SEQ ID NO: 81732 - protein, 9 aa, Homo sapiens
  Table A; Target 81732; HLA-A*32:01; SMC1B; ENSG00000077935; CTA
VIDVIKTQF

SEQ ID NO: 81733 - protein, 9 aa, Homo sapiens
  Table A; Target 81733; HLA-C*04:01; SMC1B; ENSG00000077935; CTA
VIDVIKTQF

SEQ ID NO: 81734 - protein, 9 aa, Homo sapiens
  Table A; Target 81734; HLA-C*05:01; SMC1B; ENSG00000077935; CTA
VIDVIKTQF

SEQ ID NO: 81735 - protein, 9 aa, Homo sapiens
  Table A; Target 81735; HLA-A*23:01; SMC1B; ENSG00000077935; CTA
VIKTQFPQL

SEQ ID NO: 81736 - protein, 9 aa, Homo sapiens
  Table A; Target 81736; HLA-A*24:02; SMC1B; ENSG00000077935; CTA
VIKTQFPQL

SEQ ID NO: 81737 - protein, 9 aa, Homo sapiens
  Table A; Target 81737; HLA-C*01:02; SMC1B; ENSG00000077935; CTA
VISGGSSDL

SEQ ID NO: 81738 - protein, 10 aa, Homo sapiens
  Table A; Target 81738; HLA-A*03:02; SMC1B; ENSG00000077935; CTA
VISGGSSDLK

SEQ ID NO: 81739 - protein, 10 aa, Homo sapiens
  Table A; Target 81739; HLA-A*11:01; SMC1B; ENSG00000077935; CTA
VISGGSSDLK

SEQ ID NO: 81740 - protein, 11 aa, Homo sapiens
  Table A; Target 81740; HLA-A*01:01; SMC1B; ENSG00000077935; CTA
VISGGSSDLKY

SEQ ID NO: 81741 - protein, 11 aa, Homo sapiens
  Table A; Target 81741; HLA-A*29:02; SMC1B; ENSG00000077935; CTA
VISGGSSDLKY

SEQ ID NO: 81742 - protein, 11 aa, Homo sapiens
  Table A; Target 81742; HLA-A*30:02; SMC1B; ENSG00000077935; CTA
VISGGSSDLKY

SEQ ID NO: 81743 - protein, 11 aa, Homo sapiens
  Table A; Target 81743; HLA-A*32:01; SMC1B; ENSG00000077935; CTA
VISGGSSDLKY

SEQ ID NO: 81744 - protein, 11 aa, Homo sapiens
  Table A; Target 81744; HLA-B*15:01; SMC1B; ENSG00000077935; CTA
VISGGSSDLKY

SEQ ID NO: 81745 - protein, 11 aa, Homo sapiens
  Table A; Target 81745; HLA-B*58:01; SMC1B; ENSG00000077935; CTA
VISGGSSDLKY

SEQ ID NO: 81746 - protein, 8 aa, Homo sapiens
  Table A; Target 81746; HLA-B*37:01; SMC1B; ENSG00000077935; CTA
VISLKEEF

SEQ ID NO: 81747 - protein, 9 aa, Homo sapiens
  Table A; Target 81747; HLA-A*01:01; SMC1B; ENSG00000077935; CTA
VISLKEEFY

SEQ ID NO: 81748 - protein, 9 aa, Homo sapiens
  Table A; Target 81748; HLA-B*15:03; SMC1B; ENSG00000077935; CTA
VKAQNCLVF

SEQ ID NO: 81749 - protein, 9 aa, Homo sapiens
  Table A; Target 81749; HLA-A*02:01; SMC1B; ENSG00000077935; CTA
VLDEVDAAL

SEQ ID NO: 81750 - protein, 9 aa, Homo sapiens
  Table A; Target 81750; HLA-A*02:07; SMC1B; ENSG00000077935; CTA
VLDEVDAAL

SEQ ID NO: 81751 - protein, 9 aa, Homo sapiens
  Table A; Target 81751; HLA-B*35:03; SMC1B; ENSG00000077935; CTA
VLDEVDAAL

SEQ ID NO: 81752 - protein, 9 aa, Homo sapiens
  Table A; Target 81752; HLA-B*55:01; SMC1B; ENSG00000077935; CTA
VLDEVDAAL

SEQ ID NO: 81753 - protein, 9 aa, Homo sapiens
  Table A; Target 81753; HLA-C*05:01; SMC1B; ENSG00000077935; CTA
VLDEVDAAL

SEQ ID NO: 81754 - protein, 9 aa, Homo sapiens
  Table A; Target 81754; HLA-A*01:01; SMC1B; ENSG00000077935; CTA
VLTLDLSQY

SEQ ID NO: 81755 - protein, 9 aa, Homo sapiens
  Table A; Target 81755; HLA-B*15:01; SMC1B; ENSG00000077935; CTA
VLTLDLSQY

SEQ ID NO: 81756 - protein, 9 aa, Homo sapiens
  Table A; Target 81756; HLA-A*02:07; SMC1B; ENSG00000077935; CTA
VMDALSFVM

SEQ ID NO: 81757 - protein, 9 aa, Homo sapiens
  Table A; Target 81757; HLA-A*02:01; SMC1B; ENSG00000077935; CTA
VMGEKIANL

SEQ ID NO: 81758 - protein, 9 aa, Homo sapiens
  Table A; Target 81758; HLA-A*02:03; SMC1B; ENSG00000077935; CTA
VMGEKIANL

SEQ ID NO: 81759 - protein, 9 aa, Homo sapiens
  Table A; Target 81759; HLA-A*02:04; SMC1B; ENSG00000077935; CTA
VMGEKIANL

SEQ ID NO: 81760 - protein, 9 aa, Homo sapiens
  Table A; Target 81760; HLA-A*02:07; SMC1B; ENSG00000077935; CTA
VMGEKIANL

SEQ ID NO: 81761 - protein, 9 aa, Homo sapiens
  Table A; Target 81761; HLA-B*08:01; SMC1B; ENSG00000077935; CTA
VMGEKIANL

SEQ ID NO: 81762 - protein, 9 aa, Homo sapiens
  Table A; Target 81762; HLA-B*55:01; SMC1B; ENSG00000077935; CTA
VMGEKIANL

SEQ ID NO: 81763 - protein, 9 aa, Homo sapiens
  Table A; Target 81763; HLA-A*33:01; SMC1B; ENSG00000077935; CTA
VNRDLSVKR

SEQ ID NO: 81764 - protein, 9 aa, Homo sapiens
  Table A; Target 81764; HLA-A*33:03; SMC1B; ENSG00000077935; CTA
VNRDLSVKR

SEQ ID NO: 81765 - protein, 9 aa, Homo sapiens
  Table A; Target 81765; HLA-A*02:07; SMC1B; ENSG00000077935; CTA
VQDIEIILL

SEQ ID NO: 81766 - protein, 9 aa, Homo sapiens
  Table A; Target 81766; HLA-B*27:05; SMC1B; ENSG00000077935; CTA
VQDIEIILL

SEQ ID NO: 81767 - protein, 9 aa, Homo sapiens
  Table A; Target 81767; HLA-B*38:01; SMC1B; ENSG00000077935; CTA
VQDIEIILL

SEQ ID NO: 81768 - protein, 9 aa, Homo sapiens
  Table A; Target 81768; HLA-C*05:01; SMC1B; ENSG00000077935; CTA
VQDIEIILL

SEQ ID NO: 81769 - protein, 10 aa, Homo sapiens
  Table A; Target 81769; HLA-A*03:02; SMC1B; ENSG00000077935; CTA
VSIQTSLEQK

SEQ ID NO: 81770 - protein, 10 aa, Homo sapiens
  Table A; Target 81770; HLA-A*11:01; SMC1B; ENSG00000077935; CTA
VSIQTSLEQK

SEQ ID NO: 81771 - protein, 10 aa, Homo sapiens
  Table A; Target 81771; HLA-B*27:02; SMC1B; ENSG00000077935; CTA
VSIQTSLEQK

SEQ ID NO: 81772 - protein, 9 aa, Homo sapiens
  Table A; Target 81772; HLA-A*01:01; SMC1B; ENSG00000077935; CTA
VSISIDQIY

SEQ ID NO: 81773 - protein, 9 aa, Homo sapiens
  Table A; Target 81773; HLA-A*29:02; SMC1B; ENSG00000077935; CTA
VSISIDQIY

SEQ ID NO: 81774 - protein, 9 aa, Homo sapiens
  Table A; Target 81774; HLA-A*30:02; SMC1B; ENSG00000077935; CTA
VSISIDQIY

SEQ ID NO: 81775 - protein, 9 aa, Homo sapiens
  Table A; Target 81775; HLA-B*15:01; SMC1B; ENSG00000077935; CTA
VSISIDQIY

SEQ ID NO: 81776 - protein, 9 aa, Homo sapiens
  Table A; Target 81776; HLA-B*46:01; SMC1B; ENSG00000077935; CTA
VSISIDQIY

SEQ ID NO: 81777 - protein, 9 aa, Homo sapiens
  Table A; Target 81777; HLA-B*57:01; SMC1B; ENSG00000077935; CTA
VSISIDQIY

SEQ ID NO: 81778 - protein, 9 aa, Homo sapiens
  Table A; Target 81778; HLA-B*58:01; SMC1B; ENSG00000077935; CTA
VSISIDQIY

SEQ ID NO: 81779 - protein, 9 aa, Homo sapiens
  Table A; Target 81779; HLA-C*02:02; SMC1B; ENSG00000077935; CTA
VSISIDQIY

SEQ ID NO: 81780 - protein, 10 aa, Homo sapiens
  Table A; Target 81780; HLA-A*03:02; SMC1B; ENSG00000077935; CTA
VSISIDQIYK

SEQ ID NO: 81781 - protein, 10 aa, Homo sapiens
  Table A; Target 81781; HLA-A*11:01; SMC1B; ENSG00000077935; CTA
VSISIDQIYK

SEQ ID NO: 81782 - protein, 10 aa, Homo sapiens
  Table A; Target 81782; HLA-B*27:02; SMC1B; ENSG00000077935; CTA
VSISIDQIYK

SEQ ID NO: 81783 - protein, 11 aa, Homo sapiens
  Table A; Target 81783; HLA-A*11:01; SMC1B; ENSG00000077935; CTA
VSISIDQIYKK

SEQ ID NO: 81784 - protein, 9 aa, Homo sapiens
  Table A; Target 81784; HLA-A*03:02; SMC1B; ENSG00000077935; CTA
VTQNSSAEK

SEQ ID NO: 81785 - protein, 9 aa, Homo sapiens
  Table A; Target 81785; HLA-A*11:01; SMC1B; ENSG00000077935; CTA
VTQNSSAEK

SEQ ID NO: 81786 - protein, 9 aa, Homo sapiens
  Table A; Target 81786; HLA-A*03:01; SMC1B; ENSG00000077935; CTA
VVASEKVAK

SEQ ID NO: 81787 - protein, 9 aa, Homo sapiens
  Table A; Target 81787; HLA-A*03:02; SMC1B; ENSG00000077935; CTA
VVASEKVAK

SEQ ID NO: 81788 - protein, 9 aa, Homo sapiens
  Table A; Target 81788; HLA-A*11:01; SMC1B; ENSG00000077935; CTA
VVASEKVAK

SEQ ID NO: 81789 - protein, 11 aa, Homo sapiens
  Table A; Target 81789; HLA-A*03:01; SMC1B; ENSG00000077935; CTA
VVSIQTSLEQK

SEQ ID NO: 81790 - protein, 11 aa, Homo sapiens
  Table A; Target 81790; HLA-A*03:02; SMC1B; ENSG00000077935; CTA
VVSIQTSLEQK

SEQ ID NO: 81791 - protein, 11 aa, Homo sapiens
  Table A; Target 81791; HLA-A*11:01; SMC1B; ENSG00000077935; CTA
VVSIQTSLEQK

SEQ ID NO: 81792 - protein, 11 aa, Homo sapiens
  Table A; Target 81792; HLA-B*27:02; SMC1B; ENSG00000077935; CTA
VVSIQTSLEQK

SEQ ID NO: 81793 - protein, 9 aa, Homo sapiens
  Table A; Target 81793; HLA-C*14:02; SMC1B; ENSG00000077935; CTA
VYIAELEKI

SEQ ID NO: 81794 - protein, 8 aa, Homo sapiens
  Table A; Target 81794; HLA-B*37:01; SMC1B; ENSG00000077935; CTA
YDLFTQCF

SEQ ID NO: 81795 - protein, 9 aa, Homo sapiens
  Table A; Target 81795; HLA-B*49:01; SMC1B; ENSG00000077935; CTA
YEKEEAFEI

SEQ ID NO: 81796 - protein, 10 aa, Homo sapiens
  Table A; Target 81796; HLA-B*15:01; SMC1B; ENSG00000077935; CTA
YIKEQTQDQF

SEQ ID NO: 81797 - protein, 10 aa, Homo sapiens
  Table A; Target 81797; HLA-B*46:01; SMC1B; ENSG00000077935; CTA
YIKEQTQDQF

SEQ ID NO: 81798 - protein, 9 aa, Homo sapiens
  Table A; Target 81798; HLA-A*01:01; SMC1B; ENSG00000077935; CTA
YLDIKPINE

SEQ ID NO: 81799 - protein, 11 aa, Homo sapiens
  Table A; Target 81799; HLA-A*02:07; SMC1B; ENSG00000077935; CTA
YLDIKPINERL

SEQ ID NO: 81800 - protein, 9 aa, Homo sapiens
  Table A; Target 81800; HLA-A*02:07; SMC1B; ENSG00000077935; CTA
YPDSVFGRL

SEQ ID NO: 81801 - protein, 9 aa, Homo sapiens
  Table A; Target 81801; HLA-B*07:02; SMC1B; ENSG00000077935; CTA
YPDSVFGRL

SEQ ID NO: 81802 - protein, 9 aa, Homo sapiens
  Table A; Target 81802; HLA-B*35:01; SMC1B; ENSG00000077935; CTA
YPDSVFGRL

SEQ ID NO: 81803 - protein, 9 aa, Homo sapiens
  Table A; Target 81803; HLA-B*35:03; SMC1B; ENSG00000077935; CTA
YPDSVFGRL

SEQ ID NO: 81804 - protein, 9 aa, Homo sapiens
  Table A; Target 81804; HLA-C*05:01; SMC1B; ENSG00000077935; CTA
YPDSVFGRL

SEQ ID NO: 81805 - protein, 10 aa, Homo sapiens
  Table A; Target 81805; HLA-B*35:01; SMC1B; ENSG00000077935; CTA
YPDSVFGRLF

SEQ ID NO: 81806 - protein, 11 aa, Homo sapiens
  Table A; Target 81806; HLA-A*01:01; SMC1B; ENSG00000077935; CTA
YPDTEGQESSK

SEQ ID NO: 81807 - protein, 11 aa, Homo sapiens
  Table A; Target 81807; HLA-B*27:02; SMC1B; ENSG00000077935; CTA
YPDTEGQESSK

SEQ ID NO: 81808 - protein, 11 aa, Homo sapiens
  Table A; Target 81808; HLA-C*05:01; SMC1B; ENSG00000077935; CTA
YPDTEGQESSK

SEQ ID NO: 81809 - protein, 9 aa, Homo sapiens
  Table A; Target 81809; HLA-B*35:01; SMC1B; ENSG00000077935; CTA
YPEYDDCMF

SEQ ID NO: 81810 - protein, 9 aa, Homo sapiens
  Table A; Target 81810; HLA-B*35:03; SMC1B; ENSG00000077935; CTA
YPEYDDCMF

SEQ ID NO: 81811 - protein, 9 aa, Homo sapiens
  Table A; Target 81811; HLA-B*55:01; SMC1B; ENSG00000077935; CTA
YPEYDDCMF

SEQ ID NO: 81812 - protein, 11 aa, Homo sapiens
  Table A; Target 81812; HLA-B*27:05; SMC1B; ENSG00000077935; CTA
YQEQSQLQSEL

SEQ ID NO: 81813 - protein, 11 aa, Homo sapiens
  Table A; Target 81813; HLA-B*38:01; SMC1B; ENSG00000077935; CTA
YQEQSQLQSEL

SEQ ID NO: 81814 - protein, 11 aa, Homo sapiens
  Table A; Target 81814; HLA-B*39:01; SMC1B; ENSG00000077935; CTA
YQEQSQLQSEL

SEQ ID NO: 81815 - protein, 8 aa, Homo sapiens
  Table A; Target 81815; HLA-A*02:01; SMC1B; ENSG00000077935; CTA
YQLAVTKV

SEQ ID NO: 81816 - protein, 8 aa, Homo sapiens
  Table A; Target 81816; HLA-B*13:02; SMC1B; ENSG00000077935; CTA
YQLAVTKV

SEQ ID NO: 81817 - protein, 8 aa, Homo sapiens
  Table A; Target 81817; HLA-B*49:01; SMC1B; ENSG00000077935; CTA
YQLAVTKV

SEQ ID NO: 81818 - protein, 9 aa, Homo sapiens
  Table A; Target 81818; HLA-A*23:01; SMC1B; ENSG00000077935; CTA
YQLAVTKVF

SEQ ID NO: 81819 - protein, 9 aa, Homo sapiens
  Table A; Target 81819; HLA-B*15:03; SMC1B; ENSG00000077935; CTA
YQLAVTKVF

SEQ ID NO: 81820 - protein, 9 aa, Homo sapiens
  Table A; Target 81820; HLA-B*44:03; SMC1B; ENSG00000077935; CTA
YQLAVTKVF

SEQ ID NO: 81821 - protein, 8 aa, Homo sapiens
  Table A; Target 81821; HLA-B*39:01; SMC1B; ENSG00000077935; CTA
YQSLLEEL

SEQ ID NO: 81822 - protein, 8 aa, Homo sapiens
  Table A; Target 81822; HLA-C*03:04; SMC1B; ENSG00000077935; CTA
YSQNELEM

SEQ ID NO: 81823 - protein, 10 aa, Homo sapiens
  Table A; Target 81823; HLA-B*27:02; SMC1B; ENSG00000077935; CTA
YSQNELEMIK

SEQ ID NO: 81824 - protein, 11 aa, Homo sapiens
  Table A; Target 81824; HLA-A*11:01; SMC1B; ENSG00000077935; CTA
YSQNELEMIKK

SEQ ID NO: 81825 - protein, 9 aa, Homo sapiens
  Table A; Target 81825; HLA-A*01:01; SMC1B; ENSG00000077935; CTA
YSSLKEDLK

SEQ ID NO: 81826 - protein, 9 aa, Homo sapiens
  Table A; Target 81826; HLA-A*01:01; SMC1B; ENSG00000077935; CTA
YVEESGEEK

SEQ ID NO: 81827 - protein, 9 aa, Homo sapiens
  Table A; Target 81827; HLA-C*05:01; SMC1B; ENSG00000077935; CTA
YVEESGEEK

SEQ ID NO: 81828 - protein, 11 aa, Homo sapiens
  Table A; Target 81828; HLA-B*38:01; SMC1B; ENSG00000077935; CTA
YVEESGEEKTF

SEQ ID NO: 81829 - protein, 11 aa, Homo sapiens
  Table A; Target 81829; HLA-C*05:01; SMC1B; ENSG00000077935; CTA
YVEESGEEKTF

SEQ ID NO: 81830 - protein, 10 aa, Homo sapiens
  Table A; Target 81830; HLA-A*03:02; SMR3A; ENSG00000109208; CTA
ACFTPGESQR

SEQ ID NO: 81831 - protein, 10 aa, Homo sapiens
  Table A; Target 81831; HLA-A*11:01; SMR3A; ENSG00000109208; CTA
ACFTPGESQR

SEQ ID NO: 81832 - protein, 10 aa, Homo sapiens
  Table A; Target 81832; HLA-A*31:01; SMR3A; ENSG00000109208; CTA
ACFTPGESQR

SEQ ID NO: 81833 - protein, 10 aa, Homo sapiens
  Table A; Target 81833; HLA-A*33:01; SMR3A; ENSG00000109208; CTA
ACFTPGESQR

SEQ ID NO: 81834 - protein, 10 aa, Homo sapiens
  Table A; Target 81834; HLA-A*33:03; SMR3A; ENSG00000109208; CTA
ACFTPGESQR

SEQ ID NO: 81835 - protein, 10 aa, Homo sapiens
  Table A; Target 81835; HLA-A*68:01; SMR3A; ENSG00000109208; CTA
ACFTPGESQR

SEQ ID NO: 81836 - protein, 10 aa, Homo sapiens
  Table A; Target 81836; HLA-B*27:05; SMR3A; ENSG00000109208; CTA
ACFTPGESQR

SEQ ID NO: 81837 - protein, 10 aa, Homo sapiens
  Table A; Target 81837; HLA-C*02:02; SMR3A; ENSG00000109208; CTA
ACFTPGESQR

SEQ ID NO: 81838 - protein, 10 aa, Homo sapiens
  Table A; Target 81838; HLA-C*04:01; SMR3A; ENSG00000109208; CTA
ACFTPGESQR

SEQ ID NO: 81839 - protein, 10 aa, Homo sapiens
  Table A; Target 81839; HLA-C*07:06; SMR3A; ENSG00000109208; CTA
ACFTPGESQR

SEQ ID NO: 81840 - protein, 10 aa, Homo sapiens
  Table A; Target 81840; HLA-C*16:02; SMR3A; ENSG00000109208; CTA
ACFTPGESQR

SEQ ID NO: 81841 - protein, 9 aa, Homo sapiens
  Table A; Target 81841; HLA-B*51:01; SMR3A; ENSG00000109208; CTA
DPALPTPAP

SEQ ID NO: 81842 - protein, 9 aa, Homo sapiens
  Table A; Target 81842; HLA-B*54:01; SMR3A; ENSG00000109208; CTA
DPALPTPAP

SEQ ID NO: 81843 - protein, 9 aa, Homo sapiens
  Table A; Target 81843; HLA-B*55:01; SMR3A; ENSG00000109208; CTA
DPALPTPAP

SEQ ID NO: 81844 - protein, 9 aa, Homo sapiens
  Table A; Target 81844; HLA-B*56:01; SMR3A; ENSG00000109208; CTA
DPALPTPAP

SEQ ID NO: 81845 - protein, 9 aa, Homo sapiens
  Table A; Target 81845; HLA-B*54:01; SMR3A; ENSG00000109208; CTA
FPFGTGFVP

SEQ ID NO: 81846 - protein, 10 aa, Homo sapiens
  Table A; Target 81846; HLA-B*54:01; SMR3A; ENSG00000109208; CTA
FPFGTGFVPP

SEQ ID NO: 81847 - protein, 9 aa, Homo sapiens
  Table A; Target 81847; HLA-A*26:01; SMR3A; ENSG00000109208; CTA
FPPPLSPPY

SEQ ID NO: 81848 - protein, 9 aa, Homo sapiens
  Table A; Target 81848; HLA-A*29:02; SMR3A; ENSG00000109208; CTA
FPPPLSPPY

SEQ ID NO: 81849 - protein, 9 aa, Homo sapiens
  Table A; Target 81849; HLA-B*35:01; SMR3A; ENSG00000109208; CTA
FPPPLSPPY

SEQ ID NO: 81850 - protein, 9 aa, Homo sapiens
  Table A; Target 81850; HLA-B*35:03; SMR3A; ENSG00000109208; CTA
FPPPLSPPY

SEQ ID NO: 81851 - protein, 9 aa, Homo sapiens
  Table A; Target 81851; HLA-B*54:01; SMR3A; ENSG00000109208; CTA
FPPPLSPPY

SEQ ID NO: 81852 - protein, 9 aa, Homo sapiens
  Table A; Target 81852; HLA-B*55:01; SMR3A; ENSG00000109208; CTA
FPPPLSPPY

SEQ ID NO: 81853 - protein, 10 aa, Homo sapiens
  Table A; Target 81853; HLA-B*54:01; SMR3A; ENSG00000109208; CTA
FPVNSPTDPA

SEQ ID NO: 81854 - protein, 10 aa, Homo sapiens
  Table A; Target 81854; HLA-B*56:01; SMR3A; ENSG00000109208; CTA
FPVNSPTDPA

SEQ ID NO: 81855 - protein, 11 aa, Homo sapiens
  Table A; Target 81855; HLA-B*35:01; SMR3A; ENSG00000109208; CTA
FPVNSPTDPAL

SEQ ID NO: 81856 - protein, 11 aa, Homo sapiens
  Table A; Target 81856; HLA-B*35:03; SMR3A; ENSG00000109208; CTA
FPVNSPTDPAL

SEQ ID NO: 81857 - protein, 11 aa, Homo sapiens
  Table A; Target 81857; HLA-B*54:01; SMR3A; ENSG00000109208; CTA
FPVNSPTDPAL

SEQ ID NO: 81858 - protein, 11 aa, Homo sapiens
  Table A; Target 81858; HLA-B*55:01; SMR3A; ENSG00000109208; CTA
FPVNSPTDPAL

SEQ ID NO: 81859 - protein, 11 aa, Homo sapiens
  Table A; Target 81859; HLA-B*56:01; SMR3A; ENSG00000109208; CTA
FPVNSPTDPAL

SEQ ID NO: 81860 - protein, 10 aa, Homo sapiens
  Table A; Target 81860; HLA-C*06:02; SMR3A; ENSG00000109208; CTA
FTPGESQRGP

SEQ ID NO: 81861 - protein, 9 aa, Homo sapiens
  Table A; Target 81861; HLA-A*02:07; SMR3A; ENSG00000109208; CTA
FVPPPHPPP

SEQ ID NO: 81862 - protein, 9 aa, Homo sapiens
  Table A; Target 81862; HLA-A*68:02; SMR3A; ENSG00000109208; CTA
FVPPPHPPP

SEQ ID NO: 81863 - protein, 9 aa, Homo sapiens
  Table A; Target 81863; HLA-B*54:01; SMR3A; ENSG00000109208; CTA
FVPPPHPPP

SEQ ID NO: 81864 - protein, 9 aa, Homo sapiens
  Table A; Target 81864; HLA-B*56:01; SMR3A; ENSG00000109208; CTA
FVPPPHPPP

SEQ ID NO: 81865 - protein, 9 aa, Homo sapiens
  Table A; Target 81865; HLA-C*04:01; SMR3A; ENSG00000109208; CTA
FVPPPHPPP

SEQ ID NO: 81866 - protein, 9 aa, Homo sapiens
  Table A; Target 81866; HLA-C*06:02; SMR3A; ENSG00000109208; CTA
FVPPPHPPP

SEQ ID NO: 81867 - protein, 9 aa, Homo sapiens
  Table A; Target 81867; HLA-C*07:02; SMR3A; ENSG00000109208; CTA
FVPPPHPPP

SEQ ID NO: 81868 - protein, 9 aa, Homo sapiens
  Table A; Target 81868; HLA-C*12:03; SMR3A; ENSG00000109208; CTA
FVPPPHPPP

SEQ ID NO: 81869 - protein, 10 aa, Homo sapiens
  Table A; Target 81869; HLA-A*01:01; SMR3A; ENSG00000109208; CTA
FVPPPHPPPY

SEQ ID NO: 81870 - protein, 10 aa, Homo sapiens
  Table A; Target 81870; HLA-A*02:01; SMR3A; ENSG00000109208; CTA
FVPPPHPPPY

SEQ ID NO: 81871 - protein, 10 aa, Homo sapiens
  Table A; Target 81871; HLA-A*02:07; SMR3A; ENSG00000109208; CTA
FVPPPHPPPY

SEQ ID NO: 81872 - protein, 10 aa, Homo sapiens
  Table A; Target 81872; HLA-A*25:01; SMR3A; ENSG00000109208; CTA
FVPPPHPPPY

SEQ ID NO: 81873 - protein, 10 aa, Homo sapiens
  Table A; Target 81873; HLA-A*26:01; SMR3A; ENSG00000109208; CTA
FVPPPHPPPY

SEQ ID NO: 81874 - protein, 10 aa, Homo sapiens
  Table A; Target 81874; HLA-A*29:02; SMR3A; ENSG00000109208; CTA
FVPPPHPPPY

SEQ ID NO: 81875 - protein, 10 aa, Homo sapiens
  Table A; Target 81875; HLA-A*30:02; SMR3A; ENSG00000109208; CTA
FVPPPHPPPY

SEQ ID NO: 81876 - protein, 10 aa, Homo sapiens
  Table A; Target 81876; HLA-C*02:02; SMR3A; ENSG00000109208; CTA
FVPPPHPPPY

SEQ ID NO: 81877 - protein, 10 aa, Homo sapiens
  Table A; Target 81877; HLA-C*07:02; SMR3A; ENSG00000109208; CTA
FVPPPHPPPY

SEQ ID NO: 81878 - protein, 11 aa, Homo sapiens
  Table A; Target 81878; HLA-A*02:07; SMR3A; ENSG00000109208; CTA
FVPPPHPPPYG

SEQ ID NO: 81879 - protein, 11 aa, Homo sapiens
  Table A; Target 81879; HLA-A*29:02; SMR3A; ENSG00000109208; CTA
GFVPPPHPPPY

SEQ ID NO: 81880 - protein, 9 aa, Homo sapiens
  Table A; Target 81880; HLA-B*56:01; SMR3A; ENSG00000109208; CTA
GPLAPPPPP

SEQ ID NO: 81881 - protein, 11 aa, Homo sapiens
  Table A; Target 81881; HLA-B*07:02; SMR3A; ENSG00000109208; CTA
GPRGPYPPGPL

SEQ ID NO: 81882 - protein, 11 aa, Homo sapiens
  Table A; Target 81882; HLA-C*07:02; SMR3A; ENSG00000109208; CTA
GPRGPYPPGPL

SEQ ID NO: 81883 - protein, 8 aa, Homo sapiens
  Table A; Target 81883; HLA-C*07:02; SMR3A; ENSG00000109208; CTA
GPYPPGPL

SEQ ID NO: 81884 - protein, 9 aa, Homo sapiens
  Table A; Target 81884; HLA-B*07:02; SMR3A; ENSG00000109208; CTA
GPYPPGPLA

SEQ ID NO: 81885 - protein, 9 aa, Homo sapiens
  Table A; Target 81885; HLA-B*54:01; SMR3A; ENSG00000109208; CTA
GPYPPGPLA

SEQ ID NO: 81886 - protein, 9 aa, Homo sapiens
  Table A; Target 81886; HLA-B*55:01; SMR3A; ENSG00000109208; CTA
GPYPPGPLA

SEQ ID NO: 81887 - protein, 9 aa, Homo sapiens
  Table A; Target 81887; HLA-B*56:01; SMR3A; ENSG00000109208; CTA
GPYPPGPLA

SEQ ID NO: 81888 - protein, 9 aa, Homo sapiens
  Table A; Target 81888; HLA-C*07:02; SMR3A; ENSG00000109208; CTA
GPYPPGPLA

SEQ ID NO: 81889 - protein, 10 aa, Homo sapiens
  Table A; Target 81889; HLA-B*56:01; SMR3A; ENSG00000109208; CTA
GPYPPGPLAP

SEQ ID NO: 81890 - protein, 11 aa, Homo sapiens
  Table A; Target 81890; HLA-B*56:01; SMR3A; ENSG00000109208; CTA
GPYPPGPLAPP

SEQ ID NO: 81891 - protein, 9 aa, Homo sapiens
  Table A; Target 81891; HLA-B*27:05; SMR3A; ENSG00000109208; CTA
GRFPPPLSP

SEQ ID NO: 81892 - protein, 9 aa, Homo sapiens
  Table A; Target 81892; HLA-B*27:05; SMR3A; ENSG00000109208; CTA
GRIPPSPPP

SEQ ID NO: 81893 - protein, 9 aa, Homo sapiens
  Table A; Target 81893; HLA-A*31:01; SMR3A; ENSG00000109208; CTA
HSLPPPYGP

SEQ ID NO: 81894 - protein, 11 aa, Homo sapiens
  Table A; Target 81894; HLA-A*01:01; SMR3A; ENSG00000109208; CTA
HSLPPPYGPGY

SEQ ID NO: 81895 - protein, 11 aa, Homo sapiens
  Table A; Target 81895; HLA-A*29:02; SMR3A; ENSG00000109208; CTA
HSLPPPYGPGY

SEQ ID NO: 81896 - protein, 11 aa, Homo sapiens
  Table A; Target 81896; HLA-A*30:02; SMR3A; ENSG00000109208; CTA
HSLPPPYGPGY

SEQ ID NO: 81897 - protein, 11 aa, Homo sapiens
  Table A; Target 81897; HLA-B*57:01; SMR3A; ENSG00000109208; CTA
HSLPPPYGPGY

SEQ ID NO: 81898 - protein, 9 aa, Homo sapiens
  Table A; Target 81898; HLA-A*01:01; SMR3A; ENSG00000109208; CTA
IPPSPPPPY

SEQ ID NO: 81899 - protein, 9 aa, Homo sapiens
  Table A; Target 81899; HLA-A*29:02; SMR3A; ENSG00000109208; CTA
IPPSPPPPY

SEQ ID NO: 81900 - protein, 9 aa, Homo sapiens
  Table A; Target 81900; HLA-A*30:02; SMR3A; ENSG00000109208; CTA
IPPSPPPPY

SEQ ID NO: 81901 - protein, 9 aa, Homo sapiens
  Table A; Target 81901; HLA-B*07:02; SMR3A; ENSG00000109208; CTA
IPPSPPPPY

SEQ ID NO: 81902 - protein, 9 aa, Homo sapiens
  Table A; Target 81902; HLA-B*35:01; SMR3A; ENSG00000109208; CTA
IPPSPPPPY

SEQ ID NO: 81903 - protein, 9 aa, Homo sapiens
  Table A; Target 81903; HLA-B*35:03; SMR3A; ENSG00000109208; CTA
IPPSPPPPY

SEQ ID NO: 81904 - protein, 9 aa, Homo sapiens
  Table A; Target 81904; HLA-B*51:01; SMR3A; ENSG00000109208; CTA
IPPSPPPPY

SEQ ID NO: 81905 - protein, 9 aa, Homo sapiens
  Table A; Target 81905; HLA-B*54:01; SMR3A; ENSG00000109208; CTA
IPPSPPPPY

SEQ ID NO: 81906 - protein, 9 aa, Homo sapiens
  Table A; Target 81906; HLA-B*55:01; SMR3A; ENSG00000109208; CTA
IPPSPPPPY

SEQ ID NO: 81907 - protein, 9 aa, Homo sapiens
  Table A; Target 81907; HLA-B*56:01; SMR3A; ENSG00000109208; CTA
IPPSPPPPY

SEQ ID NO: 81908 - protein, 9 aa, Homo sapiens
  Table A; Target 81908; HLA-C*04:01; SMR3A; ENSG00000109208; CTA
IPPSPPPPY

SEQ ID NO: 81909 - protein, 9 aa, Homo sapiens
  Table A; Target 81909; HLA-C*07:02; SMR3A; ENSG00000109208; CTA
IPPSPPPPY

SEQ ID NO: 81910 - protein, 10 aa, Homo sapiens
  Table A; Target 81910; HLA-A*30:02; SMR3A; ENSG00000109208; CTA
IQSHSLPPPY

SEQ ID NO: 81911 - protein, 9 aa, Homo sapiens
  Table A; Target 81911; HLA-A*02:04; SMR3A; ENSG00000109208; CTA
KSLTWILGL

SEQ ID NO: 81912 - protein, 10 aa, Homo sapiens
  Table A; Target 81912; HLA-B*57:01; SMR3A; ENSG00000109208; CTA
KSLTWILGLW

SEQ ID NO: 81913 - protein, 9 aa, Homo sapiens
  Table A; Target 81913; HLA-A*23:01; SMR3A; ENSG00000109208; CTA
LAPPPPPCF

SEQ ID NO: 81914 - protein, 9 aa, Homo sapiens
  Table A; Target 81914; HLA-A*24:02; SMR3A; ENSG00000109208; CTA
LAPPPPPCF

SEQ ID NO: 81915 - protein, 9 aa, Homo sapiens
  Table A; Target 81915; HLA-B*51:01; SMR3A; ENSG00000109208; CTA
LAPPPPPCF

SEQ ID NO: 81916 - protein, 9 aa, Homo sapiens
  Table A; Target 81916; HLA-B*58:01; SMR3A; ENSG00000109208; CTA
LAPPPPPCF

SEQ ID NO: 81917 - protein, 9 aa, Homo sapiens
  Table A; Target 81917; HLA-C*05:01; SMR3A; ENSG00000109208; CTA
LAPPPPPCF

SEQ ID NO: 81918 - protein, 9 aa, Homo sapiens
  Table A; Target 81918; HLA-A*01:01; SMR3A; ENSG00000109208; CTA
LPPPYGPGY

SEQ ID NO: 81919 - protein, 9 aa, Homo sapiens
  Table A; Target 81919; HLA-A*26:01; SMR3A; ENSG00000109208; CTA
LPPPYGPGY

SEQ ID NO: 81920 - protein, 9 aa, Homo sapiens
  Table A; Target 81920; HLA-A*29:02; SMR3A; ENSG00000109208; CTA
LPPPYGPGY

SEQ ID NO: 81921 - protein, 9 aa, Homo sapiens
  Table A; Target 81921; HLA-A*30:02; SMR3A; ENSG00000109208; CTA
LPPPYGPGY

SEQ ID NO: 81922 - protein, 9 aa, Homo sapiens
  Table A; Target 81922; HLA-B*35:01; SMR3A; ENSG00000109208; CTA
LPPPYGPGY

SEQ ID NO: 81923 - protein, 9 aa, Homo sapiens
  Table A; Target 81923; HLA-B*35:03; SMR3A; ENSG00000109208; CTA
LPPPYGPGY

SEQ ID NO: 81924 - protein, 9 aa, Homo sapiens
  Table A; Target 81924; HLA-B*39:01; SMR3A; ENSG00000109208; CTA
LPPPYGPGY

SEQ ID NO: 81925 - protein, 9 aa, Homo sapiens
  Table A; Target 81925; HLA-B*51:01; SMR3A; ENSG00000109208; CTA
LPPPYGPGY

SEQ ID NO: 81926 - protein, 9 aa, Homo sapiens
  Table A; Target 81926; HLA-B*55:01; SMR3A; ENSG00000109208; CTA
LPPPYGPGY

SEQ ID NO: 81927 - protein, 9 aa, Homo sapiens
  Table A; Target 81927; HLA-C*03:03; SMR3A; ENSG00000109208; CTA
LPPPYGPGY

SEQ ID NO: 81928 - protein, 9 aa, Homo sapiens
  Table A; Target 81928; HLA-C*04:01; SMR3A; ENSG00000109208; CTA
LPPPYGPGY

SEQ ID NO: 81929 - protein, 8 aa, Homo sapiens
  Table A; Target 81929; HLA-B*57:01; SMR3A; ENSG00000109208; CTA
LTWILGLW

SEQ ID NO: 81930 - protein, 8 aa, Homo sapiens
  Table A; Target 81930; HLA-C*01:02; SMR3A; ENSG00000109208; CTA
NSPTDPAL

SEQ ID NO: 81931 - protein, 11 aa, Homo sapiens
  Table A; Target 81931; HLA-A*31:01; SMR3A; ENSG00000109208; CTA
PGYPQPPSQPR

SEQ ID NO: 81932 - protein, 11 aa, Homo sapiens
  Table A; Target 81932; HLA-A*33:01; SMR3A; ENSG00000109208; CTA
PGYPQPPSQPR

SEQ ID NO: 81933 - protein, 10 aa, Homo sapiens
  Table A; Target 81933; HLA-A*24:02; SMR3A; ENSG00000109208; CTA
PLAPPPPPCF

SEQ ID NO: 81934 - protein, 10 aa, Homo sapiens
  Table A; Target 81934; HLA-A*30:02; SMR3A; ENSG00000109208; CTA
PQPPSQPRPY

SEQ ID NO: 81935 - protein, 10 aa, Homo sapiens
  Table A; Target 81935; HLA-C*07:02; SMR3A; ENSG00000109208; CTA
PQPPSQPRPY

SEQ ID NO: 81936 - protein, 11 aa, Homo sapiens
  Table A; Target 81936; HLA-C*06:02; SMR3A; ENSG00000109208; CTA
PTDPALPTPAP

SEQ ID NO: 81937 - protein, 10 aa, Homo sapiens
  Table A; Target 81937; HLA-C*07:02; SMR3A; ENSG00000109208; CTA
PYGPGYPQPP

SEQ ID NO: 81938 - protein, 9 aa, Homo sapiens
  Table A; Target 81938; HLA-A*24:02; SMR3A; ENSG00000109208; CTA
PYPPGPPFF

SEQ ID NO: 81939 - protein, 10 aa, Homo sapiens
  Table A; Target 81939; HLA-B*07:02; SMR3A; ENSG00000109208; CTA
QPRPYPPGPP

SEQ ID NO: 81940 - protein, 10 aa, Homo sapiens
  Table A; Target 81940; HLA-C*07:02; SMR3A; ENSG00000109208; CTA
QPRPYPPGPP

SEQ ID NO: 81941 - protein, 9 aa, Homo sapiens
  Table A; Target 81941; HLA-A*01:01; SMR3A; ENSG00000109208; CTA
QSHSLPPPY

SEQ ID NO: 81942 - protein, 9 aa, Homo sapiens
  Table A; Target 81942; HLA-A*30:02; SMR3A; ENSG00000109208; CTA
QSHSLPPPY

SEQ ID NO: 81943 - protein, 10 aa, Homo sapiens
  Table A; Target 81943; HLA-A*24:02; SMR3A; ENSG00000109208; CTA
RFPPPLSPPY

SEQ ID NO: 81944 - protein, 10 aa, Homo sapiens
  Table A; Target 81944; HLA-A*29:02; SMR3A; ENSG00000109208; CTA
RFPPPLSPPY

SEQ ID NO: 81945 - protein, 10 aa, Homo sapiens
  Table A; Target 81945; HLA-A*30:02; SMR3A; ENSG00000109208; CTA
RFPPPLSPPY

SEQ ID NO: 81946 - protein, 9 aa, Homo sapiens
  Table A; Target 81946; HLA-C*07:02; SMR3A; ENSG00000109208; CTA
RGPYPPGPL

SEQ ID NO: 81947 - protein, 10 aa, Homo sapiens
  Table A; Target 81947; HLA-A*03:01; SMR3A; ENSG00000109208; CTA
RIPPSPPPPY

SEQ ID NO: 81948 - protein, 10 aa, Homo sapiens
  Table A; Target 81948; HLA-A*03:02; SMR3A; ENSG00000109208; CTA
RIPPSPPPPY

SEQ ID NO: 81949 - protein, 10 aa, Homo sapiens
  Table A; Target 81949; HLA-A*24:02; SMR3A; ENSG00000109208; CTA
RIPPSPPPPY

SEQ ID NO: 81950 - protein, 10 aa, Homo sapiens
  Table A; Target 81950; HLA-A*29:02; SMR3A; ENSG00000109208; CTA
RIPPSPPPPY

SEQ ID NO: 81951 - protein, 10 aa, Homo sapiens
  Table A; Target 81951; HLA-A*30:02; SMR3A; ENSG00000109208; CTA
RIPPSPPPPY

SEQ ID NO: 81952 - protein, 11 aa, Homo sapiens
  Table A; Target 81952; HLA-A*30:02; SMR3A; ENSG00000109208; CTA
RIQSHSLPPPY

SEQ ID NO: 81953 - protein, 9 aa, Homo sapiens
  Table A; Target 81953; HLA-B*07:02; SMR3A; ENSG00000109208; CTA
RPYPPGPPF

SEQ ID NO: 81954 - protein, 9 aa, Homo sapiens
  Table A; Target 81954; HLA-B*35:01; SMR3A; ENSG00000109208; CTA
RPYPPGPPF

SEQ ID NO: 81955 - protein, 9 aa, Homo sapiens
  Table A; Target 81955; HLA-B*51:01; SMR3A; ENSG00000109208; CTA
RPYPPGPPF

SEQ ID NO: 81956 - protein, 9 aa, Homo sapiens
  Table A; Target 81956; HLA-B*54:01; SMR3A; ENSG00000109208; CTA
RPYPPGPPF

SEQ ID NO: 81957 - protein, 9 aa, Homo sapiens
  Table A; Target 81957; HLA-B*56:01; SMR3A; ENSG00000109208; CTA
RPYPPGPPF

SEQ ID NO: 81958 - protein, 9 aa, Homo sapiens
  Table A; Target 81958; HLA-C*07:02; SMR3A; ENSG00000109208; CTA
RPYPPGPPF

SEQ ID NO: 81959 - protein, 10 aa, Homo sapiens
  Table A; Target 81959; HLA-B*51:01; SMR3A; ENSG00000109208; CTA
RPYPPGPPFF

SEQ ID NO: 81960 - protein, 10 aa, Homo sapiens
  Table A; Target 81960; HLA-B*57:01; SMR3A; ENSG00000109208; CTA
RPYPPGPPFF

SEQ ID NO: 81961 - protein, 10 aa, Homo sapiens
  Table A; Target 81961; HLA-A*01:01; SMR3A; ENSG00000109208; CTA
SLPPPYGPGY

SEQ ID NO: 81962 - protein, 10 aa, Homo sapiens
  Table A; Target 81962; HLA-A*02:07; SMR3A; ENSG00000109208; CTA
SLPPPYGPGY

SEQ ID NO: 81963 - protein, 10 aa, Homo sapiens
  Table A; Target 81963; HLA-A*25:01; SMR3A; ENSG00000109208; CTA
SLPPPYGPGY

SEQ ID NO: 81964 - protein, 10 aa, Homo sapiens
  Table A; Target 81964; HLA-A*26:01; SMR3A; ENSG00000109208; CTA
SLPPPYGPGY

SEQ ID NO: 81965 - protein, 10 aa, Homo sapiens
  Table A; Target 81965; HLA-A*29:02; SMR3A; ENSG00000109208; CTA
SLPPPYGPGY

SEQ ID NO: 81966 - protein, 10 aa, Homo sapiens
  Table A; Target 81966; HLA-A*30:02; SMR3A; ENSG00000109208; CTA
SLPPPYGPGY

SEQ ID NO: 81967 - protein, 10 aa, Homo sapiens
  Table A; Target 81967; HLA-B*15:01; SMR3A; ENSG00000109208; CTA
SLPPPYGPGY

SEQ ID NO: 81968 - protein, 9 aa, Homo sapiens
  Table A; Target 81968; HLA-B*56:01; SMR3A; ENSG00000109208; CTA
SPTDPALPT

SEQ ID NO: 81969 - protein, 10 aa, Homo sapiens
  Table A; Target 81969; HLA-B*54:01; SMR3A; ENSG00000109208; CTA
SPTDPALPTP

SEQ ID NO: 81970 - protein, 10 aa, Homo sapiens
  Table A; Target 81970; HLA-B*56:01; SMR3A; ENSG00000109208; CTA
SPTDPALPTP

SEQ ID NO: 81971 - protein, 11 aa, Homo sapiens
  Table A; Target 81971; HLA-B*56:01; SMR3A; ENSG00000109208; CTA
SPTDPALPTPA

SEQ ID NO: 81972 - protein, 9 aa, Homo sapiens
  Table A; Target 81972; HLA-A*30:02; SMR3A; ENSG00000109208; CTA
SQRGPRGPY

SEQ ID NO: 81973 - protein, 9 aa, Homo sapiens
  Table A; Target 81973; HLA-B*27:05; SMR3A; ENSG00000109208; CTA
VNSPTDPAL

SEQ ID NO: 81974 - protein, 9 aa, Homo sapiens
  Table A; Target 81974; HLA-B*35:03; SMR3A; ENSG00000109208; CTA
VNSPTDPAL

SEQ ID NO: 81975 - protein, 9 aa, Homo sapiens
  Table A; Target 81975; HLA-B*38:01; SMR3A; ENSG00000109208; CTA
VNSPTDPAL

SEQ ID NO: 81976 - protein, 9 aa, Homo sapiens
  Table A; Target 81976; HLA-B*39:01; SMR3A; ENSG00000109208; CTA
VNSPTDPAL

SEQ ID NO: 81977 - protein, 9 aa, Homo sapiens
  Table A; Target 81977; HLA-C*03:03; SMR3A; ENSG00000109208; CTA
VNSPTDPAL

SEQ ID NO: 81978 - protein, 9 aa, Homo sapiens
  Table A; Target 81978; HLA-C*03:04; SMR3A; ENSG00000109208; CTA
VNSPTDPAL

SEQ ID NO: 81979 - protein, 8 aa, Homo sapiens
  Table A; Target 81979; HLA-C*04:01; SMR3A; ENSG00000109208; CTA
VPPPHPPP

SEQ ID NO: 81980 - protein, 9 aa, Homo sapiens
  Table A; Target 81980; HLA-A*01:01; SMR3A; ENSG00000109208; CTA
VPPPHPPPY

SEQ ID NO: 81981 - protein, 9 aa, Homo sapiens
  Table A; Target 81981; HLA-A*03:02; SMR3A; ENSG00000109208; CTA
VPPPHPPPY

SEQ ID NO: 81982 - protein, 9 aa, Homo sapiens
  Table A; Target 81982; HLA-A*11:01; SMR3A; ENSG00000109208; CTA
VPPPHPPPY

SEQ ID NO: 81983 - protein, 9 aa, Homo sapiens
  Table A; Target 81983; HLA-A*23:01; SMR3A; ENSG00000109208; CTA
VPPPHPPPY

SEQ ID NO: 81984 - protein, 9 aa, Homo sapiens
  Table A; Target 81984; HLA-A*24:02; SMR3A; ENSG00000109208; CTA
VPPPHPPPY

SEQ ID NO: 81985 - protein, 9 aa, Homo sapiens
  Table A; Target 81985; HLA-A*26:01; SMR3A; ENSG00000109208; CTA
VPPPHPPPY

SEQ ID NO: 81986 - protein, 9 aa, Homo sapiens
  Table A; Target 81986; HLA-A*29:02; SMR3A; ENSG00000109208; CTA
VPPPHPPPY

SEQ ID NO: 81987 - protein, 9 aa, Homo sapiens
  Table A; Target 81987; HLA-A*30:02; SMR3A; ENSG00000109208; CTA
VPPPHPPPY

SEQ ID NO: 81988 - protein, 9 aa, Homo sapiens
  Table A; Target 81988; HLA-B*07:02; SMR3A; ENSG00000109208; CTA
VPPPHPPPY

SEQ ID NO: 81989 - protein, 9 aa, Homo sapiens
  Table A; Target 81989; HLA-B*15:03; SMR3A; ENSG00000109208; CTA
VPPPHPPPY

SEQ ID NO: 81990 - protein, 9 aa, Homo sapiens
  Table A; Target 81990; HLA-B*35:01; SMR3A; ENSG00000109208; CTA
VPPPHPPPY

SEQ ID NO: 81991 - protein, 9 aa, Homo sapiens
  Table A; Target 81991; HLA-B*46:01; SMR3A; ENSG00000109208; CTA
VPPPHPPPY

SEQ ID NO: 81992 - protein, 9 aa, Homo sapiens
  Table A; Target 81992; HLA-B*51:01; SMR3A; ENSG00000109208; CTA
VPPPHPPPY

SEQ ID NO: 81993 - protein, 9 aa, Homo sapiens
  Table A; Target 81993; HLA-B*54:01; SMR3A; ENSG00000109208; CTA
VPPPHPPPY

SEQ ID NO: 81994 - protein, 9 aa, Homo sapiens
  Table A; Target 81994; HLA-B*55:01; SMR3A; ENSG00000109208; CTA
VPPPHPPPY

SEQ ID NO: 81995 - protein, 9 aa, Homo sapiens
  Table A; Target 81995; HLA-B*56:01; SMR3A; ENSG00000109208; CTA
VPPPHPPPY

SEQ ID NO: 81996 - protein, 9 aa, Homo sapiens
  Table A; Target 81996; HLA-B*57:01; SMR3A; ENSG00000109208; CTA
VPPPHPPPY

SEQ ID NO: 81997 - protein, 9 aa, Homo sapiens
  Table A; Target 81997; HLA-C*04:01; SMR3A; ENSG00000109208; CTA
VPPPHPPPY

SEQ ID NO: 81998 - protein, 9 aa, Homo sapiens
  Table A; Target 81998; HLA-C*07:01; SMR3A; ENSG00000109208; CTA
VPPPHPPPY

SEQ ID NO: 81999 - protein, 9 aa, Homo sapiens
  Table A; Target 81999; HLA-C*07:02; SMR3A; ENSG00000109208; CTA
VPPPHPPPY

SEQ ID NO: 82000 - protein, 9 aa, Homo sapiens
  Table A; Target 82000; HLA-C*16:01; SMR3A; ENSG00000109208; CTA
VPPPHPPPY

SEQ ID NO: 82001 - protein, 9 aa, Homo sapiens
  Table A; Target 82001; HLA-C*16:02; SMR3A; ENSG00000109208; CTA
VPPPHPPPY

SEQ ID NO: 82002 - protein, 9 aa, Homo sapiens
  Table A; Target 82002; HLA-B*08:01; SMR3A; ENSG00000109208; CTA
YGPGRIQSH

SEQ ID NO: 82003 - protein, 9 aa, Homo sapiens
  Table A; Target 82003; HLA-C*01:02; SMR3A; ENSG00000109208; CTA
YGPGRIQSH

SEQ ID NO: 82004 - protein, 9 aa, Homo sapiens
  Table A; Target 82004; HLA-C*07:02; SMR3A; ENSG00000109208; CTA
YGPGYPQPP

SEQ ID NO: 82005 - protein, 9 aa, Homo sapiens
  Table A; Target 82005; HLA-B*54:01; SMR3A; ENSG00000109208; CTA
YPPGPPFFP

SEQ ID NO: 82006 - protein, 10 aa, Homo sapiens
  Table A; Target 82006; HLA-B*54:01; SMR3A; ENSG00000109208; CTA
YPPGPPFFPV

SEQ ID NO: 82007 - protein, 9 aa, Homo sapiens
  Table A; Target 82007; HLA-A*31:01; SMR3A; ENSG00000109208; CTA
YPQPPSQPR

SEQ ID NO: 82008 - protein, 9 aa, Homo sapiens
  Table A; Target 82008; HLA-A*33:01; SMR3A; ENSG00000109208; CTA
YPQPPSQPR

SEQ ID NO: 82009 - protein, 9 aa, Homo sapiens
  Table A; Target 82009; HLA-A*33:03; SMR3A; ENSG00000109208; CTA
YPQPPSQPR

SEQ ID NO: 82010 - protein, 9 aa, Homo sapiens
  Table A; Target 82010; HLA-A*68:01; SMR3A; ENSG00000109208; CTA
YPQPPSQPR

SEQ ID NO: 82011 - protein, 9 aa, Homo sapiens
  Table A; Target 82011; HLA-B*35:01; SMR3A; ENSG00000109208; CTA
YPQPPSQPR

SEQ ID NO: 82012 - protein, 9 aa, Homo sapiens
  Table A; Target 82012; HLA-B*56:01; SMR3A; ENSG00000109208; CTA
YPQPPSQPR

SEQ ID NO: 82013 - protein, 9 aa, Homo sapiens
  Table A; Target 82013; HLA-C*07:06; SMR3A; ENSG00000109208; CTA
YPQPPSQPR

SEQ ID NO: 82014 - protein, 11 aa, Homo sapiens
  Table A; Target 82014; HLA-A*29:02; SMR3A; ENSG00000109208; CTA
YPQPPSQPRPY

SEQ ID NO: 82015 - protein, 11 aa, Homo sapiens
  Table A; Target 82015; HLA-A*30:02; SMR3A; ENSG00000109208; CTA
YPQPPSQPRPY

SEQ ID NO: 82016 - protein, 11 aa, Homo sapiens
  Table A; Target 82016; HLA-B*07:02; SMR3A; ENSG00000109208; CTA
YPQPPSQPRPY

SEQ ID NO: 82017 - protein, 11 aa, Homo sapiens
  Table A; Target 82017; HLA-B*35:01; SMR3A; ENSG00000109208; CTA
YPQPPSQPRPY

SEQ ID NO: 82018 - protein, 11 aa, Homo sapiens
  Table A; Target 82018; HLA-C*04:01; SMR3A; ENSG00000109208; CTA
YPQPPSQPRPY

SEQ ID NO: 82019 - protein, 11 aa, Homo sapiens
  Table A; Target 82019; HLA-C*16:01; SMR3A; ENSG00000109208; CTA
YPQPPSQPRPY

SEQ ID NO: 82020 - protein, 10 aa, Homo sapiens
  Table A; Target 82020; HLA-B*49:01; SSX1; ENSG00000126752; CTA
AEDENDSKGV

SEQ ID NO: 82021 - protein, 8 aa, Homo sapiens
  Table A; Target 82021; HLA-A*29:02; SSX1; ENSG00000126752; CTA
AFDDIATY

SEQ ID NO: 82022 - protein, 8 aa, Homo sapiens
  Table A; Target 82022; HLA-A*30:02; SSX1; ENSG00000126752; CTA
AFDDIATY

SEQ ID NO: 82023 - protein, 8 aa, Homo sapiens
  Table A; Target 82023; HLA-A*32:01; SSX1; ENSG00000126752; CTA
AFDDIATY

SEQ ID NO: 82024 - protein, 8 aa, Homo sapiens
  Table A; Target 82024; HLA-B*18:01; SSX1; ENSG00000126752; CTA
AFDDIATY

SEQ ID NO: 82025 - protein, 8 aa, Homo sapiens
  Table A; Target 82025; HLA-B*35:01; SSX1; ENSG00000126752; CTA
AFDDIATY

SEQ ID NO: 82026 - protein, 8 aa, Homo sapiens
  Table A; Target 82026; HLA-B*55:01; SSX1; ENSG00000126752; CTA
AFDDIATY

SEQ ID NO: 82027 - protein, 8 aa, Homo sapiens
  Table A; Target 82027; HLA-C*04:01; SSX1; ENSG00000126752; CTA
AFDDIATY

SEQ ID NO: 82028 - protein, 8 aa, Homo sapiens
  Table A; Target 82028; HLA-C*14:02; SSX1; ENSG00000126752; CTA
AFDDIATY

SEQ ID NO: 82029 - protein, 9 aa, Homo sapiens
  Table A; Target 82029; HLA-A*02:01; SSX1; ENSG00000126752; CTA
AFDDIATYF

SEQ ID NO: 82030 - protein, 9 aa, Homo sapiens
  Table A; Target 82030; HLA-A*02:07; SSX1; ENSG00000126752; CTA
AFDDIATYF

SEQ ID NO: 82031 - protein, 9 aa, Homo sapiens
  Table A; Target 82031; HLA-A*23:01; SSX1; ENSG00000126752; CTA
AFDDIATYF

SEQ ID NO: 82032 - protein, 9 aa, Homo sapiens
  Table A; Target 82032; HLA-A*24:02; SSX1; ENSG00000126752; CTA
AFDDIATYF

SEQ ID NO: 82033 - protein, 9 aa, Homo sapiens
  Table A; Target 82033; HLA-A*29:02; SSX1; ENSG00000126752; CTA
AFDDIATYF

SEQ ID NO: 82034 - protein, 9 aa, Homo sapiens
  Table A; Target 82034; HLA-A*32:01; SSX1; ENSG00000126752; CTA
AFDDIATYF

SEQ ID NO: 82035 - protein, 9 aa, Homo sapiens
  Table A; Target 82035; HLA-A*33:03; SSX1; ENSG00000126752; CTA
AFDDIATYF

SEQ ID NO: 82036 - protein, 9 aa, Homo sapiens
  Table A; Target 82036; HLA-B*15:03; SSX1; ENSG00000126752; CTA
AFDDIATYF

SEQ ID NO: 82037 - protein, 9 aa, Homo sapiens
  Table A; Target 82037; HLA-B*18:01; SSX1; ENSG00000126752; CTA
AFDDIATYF

SEQ ID NO: 82038 - protein, 9 aa, Homo sapiens
  Table A; Target 82038; HLA-B*35:01; SSX1; ENSG00000126752; CTA
AFDDIATYF

SEQ ID NO: 82039 - protein, 9 aa, Homo sapiens
  Table A; Target 82039; HLA-B*35:03; SSX1; ENSG00000126752; CTA
AFDDIATYF

SEQ ID NO: 82040 - protein, 9 aa, Homo sapiens
  Table A; Target 82040; HLA-B*38:01; SSX1; ENSG00000126752; CTA
AFDDIATYF

SEQ ID NO: 82041 - protein, 9 aa, Homo sapiens
  Table A; Target 82041; HLA-B*44:02; SSX1; ENSG00000126752; CTA
AFDDIATYF

SEQ ID NO: 82042 - protein, 9 aa, Homo sapiens
  Table A; Target 82042; HLA-B*44:03; SSX1; ENSG00000126752; CTA
AFDDIATYF

SEQ ID NO: 82043 - protein, 9 aa, Homo sapiens
  Table A; Target 82043; HLA-B*46:01; SSX1; ENSG00000126752; CTA
AFDDIATYF

SEQ ID NO: 82044 - protein, 9 aa, Homo sapiens
  Table A; Target 82044; HLA-B*55:01; SSX1; ENSG00000126752; CTA
AFDDIATYF

SEQ ID NO: 82045 - protein, 9 aa, Homo sapiens
  Table A; Target 82045; HLA-C*01:02; SSX1; ENSG00000126752; CTA
AFDDIATYF

SEQ ID NO: 82046 - protein, 9 aa, Homo sapiens
  Table A; Target 82046; HLA-C*02:02; SSX1; ENSG00000126752; CTA
AFDDIATYF

SEQ ID NO: 82047 - protein, 9 aa, Homo sapiens
  Table A; Target 82047; HLA-C*05:01; SSX1; ENSG00000126752; CTA
AFDDIATYF

SEQ ID NO: 82048 - protein, 9 aa, Homo sapiens
  Table A; Target 82048; HLA-C*07:04; SSX1; ENSG00000126752; CTA
AFDDIATYF

SEQ ID NO: 82049 - protein, 9 aa, Homo sapiens
  Table A; Target 82049; HLA-C*12:03; SSX1; ENSG00000126752; CTA
AFDDIATYF

SEQ ID NO: 82050 - protein, 9 aa, Homo sapiens
  Table A; Target 82050; HLA-C*14:02; SSX1; ENSG00000126752; CTA
AFDDIATYF

SEQ ID NO: 82051 - protein, 9 aa, Homo sapiens
  Table A; Target 82051; HLA-C*16:04; SSX1; ENSG00000126752; CTA
AFDDIATYF

SEQ ID NO: 82052 - protein, 9 aa, Homo sapiens
  Table A; Target 82052; HLA-A*02:01; SSX1; ENSG00000126752; CTA
AMTKLGFKV

SEQ ID NO: 82053 - protein, 9 aa, Homo sapiens
  Table A; Target 82053; HLA-A*02:04; SSX1; ENSG00000126752; CTA
AMTKLGFKV

SEQ ID NO: 82054 - protein, 9 aa, Homo sapiens
  Table A; Target 82054; HLA-B*13:02; SSX1; ENSG00000126752; CTA
AMTKLGFKV

SEQ ID NO: 82055 - protein, 9 aa, Homo sapiens
  Table A; Target 82055; HLA-B*55:01; SSX1; ENSG00000126752; CTA
AMTKLGFKV

SEQ ID NO: 82056 - protein, 9 aa, Homo sapiens
  Table A; Target 82056; HLA-A*03:02; SSX1; ENSG00000126752; CTA
ANISEKINK

SEQ ID NO: 82057 - protein, 9 aa, Homo sapiens
  Table A; Target 82057; HLA-A*11:01; SSX1; ENSG00000126752; CTA
ANISEKINK

SEQ ID NO: 82058 - protein, 10 aa, Homo sapiens
  Table A; Target 82058; HLA-A*33:03; SSX1; ENSG00000126752; CTA
ANISEKINKR

SEQ ID NO: 82059 - protein, 9 aa, Homo sapiens
  Table A; Target 82059; HLA-A*01:01; SSX1; ENSG00000126752; CTA
ATDFQGNDF

SEQ ID NO: 82060 - protein, 9 aa, Homo sapiens
  Table A; Target 82060; HLA-B*39:01; SSX1; ENSG00000126752; CTA
ATDFQGNDF

SEQ ID NO: 82061 - protein, 9 aa, Homo sapiens
  Table A; Target 82061; HLA-C*04:01; SSX1; ENSG00000126752; CTA
ATDFQGNDF

SEQ ID NO: 82062 - protein, 9 aa, Homo sapiens
  Table A; Target 82062; HLA-C*05:01; SSX1; ENSG00000126752; CTA
ATDFQGNDF

SEQ ID NO: 82063 - protein, 9 aa, Homo sapiens
  Table A; Target 82063; HLA-A*32:01; SSX1; ENSG00000126752; CTA
ATYFSKKEW

SEQ ID NO: 82064 - protein, 9 aa, Homo sapiens
  Table A; Target 82064; HLA-B*57:01; SSX1; ENSG00000126752; CTA
ATYFSKKEW

SEQ ID NO: 82065 - protein, 8 aa, Homo sapiens
  Table A; Target 82065; HLA-A*33:01; SSX1; ENSG00000126752; CTA
DAKASEKR

SEQ ID NO: 82066 - protein, 8 aa, Homo sapiens
  Table A; Target 82066; HLA-A*33:03; SSX1; ENSG00000126752; CTA
DAKASEKR

SEQ ID NO: 82067 - protein, 9 aa, Homo sapiens
  Table A; Target 82067; HLA-A*33:01; SSX1; ENSG00000126752; CTA
DDAKASEKR

SEQ ID NO: 82068 - protein, 9 aa, Homo sapiens
  Table A; Target 82068; HLA-A*33:01; SSX1; ENSG00000126752; CTA
DDIATYFSK

SEQ ID NO: 82069 - protein, 9 aa, Homo sapiens
  Table A; Target 82069; HLA-A*33:01; SSX1; ENSG00000126752; CTA
DDTFAKRPR

SEQ ID NO: 82070 - protein, 8 aa, Homo sapiens
  Table A; Target 82070; HLA-A*33:01; SSX1; ENSG00000126752; CTA
DFDNDHNR

SEQ ID NO: 82071 - protein, 8 aa, Homo sapiens
  Table A; Target 82071; HLA-A*33:03; SSX1; ENSG00000126752; CTA
DFDNDHNR

SEQ ID NO: 82072 - protein, 9 aa, Homo sapiens
  Table A; Target 82072; HLA-A*26:01; SSX1; ENSG00000126752; CTA
DIATYFSKK

SEQ ID NO: 82073 - protein, 9 aa, Homo sapiens
  Table A; Target 82073; HLA-A*33:01; SSX1; ENSG00000126752; CTA
DIATYFSKK

SEQ ID NO: 82074 - protein, 9 aa, Homo sapiens
  Table A; Target 82074; HLA-A*68:01; SSX1; ENSG00000126752; CTA
DIATYFSKK

SEQ ID NO: 82075 - protein, 11 aa, Homo sapiens
  Table A; Target 82075; HLA-A*33:01; SSX1; ENSG00000126752; CTA
DSKGVSEASGP

SEQ ID NO: 82076 - protein, 10 aa, Homo sapiens
  Table A; Target 82076; HLA-A*68:01; SSX1; ENSG00000126752; CTA
EASGPQNDGK

SEQ ID NO: 82077 - protein, 10 aa, Homo sapiens
  Table A; Target 82077; HLA-B*27:02; SSX1; ENSG00000126752; CTA
EASGPQNDGK

SEQ ID NO: 82078 - protein, 8 aa, Homo sapiens
  Table A; Target 82078; HLA-B*18:01; SSX1; ENSG00000126752; CTA
FDDIATYF

SEQ ID NO: 82079 - protein, 8 aa, Homo sapiens
  Table A; Target 82079; HLA-B*37:01; SSX1; ENSG00000126752; CTA
FDDIATYF

SEQ ID NO: 82080 - protein, 8 aa, Homo sapiens
  Table A; Target 82080; HLA-B*38:01; SSX1; ENSG00000126752; CTA
FDDIATYF

SEQ ID NO: 82081 - protein, 8 aa, Homo sapiens
  Table A; Target 82081; HLA-C*04:01; SSX1; ENSG00000126752; CTA
FDDIATYF

SEQ ID NO: 82082 - protein, 8 aa, Homo sapiens
  Table A; Target 82082; HLA-C*05:01; SSX1; ENSG00000126752; CTA
FDDIATYF

SEQ ID NO: 82083 - protein, 8 aa, Homo sapiens
  Table A; Target 82083; HLA-C*07:01; SSX1; ENSG00000126752; CTA
FDDIATYF

SEQ ID NO: 82084 - protein, 10 aa, Homo sapiens
  Table A; Target 82084; HLA-B*27:02; SSX1; ENSG00000126752; CTA
FDDIATYFSK

SEQ ID NO: 82085 - protein, 10 aa, Homo sapiens
  Table A; Target 82085; HLA-A*33:01; SSX1; ENSG00000126752; CTA
GDDTFAKRPR

SEQ ID NO: 82086 - protein, 9 aa, Homo sapiens
  Table A; Target 82086; HLA-B*13:02; SSX1; ENSG00000126752; CTA
GKANISEKI

SEQ ID NO: 82087 - protein, 9 aa, Homo sapiens
  Table A; Target 82087; HLA-B*38:01; SSX1; ENSG00000126752; CTA
GKANISEKI

SEQ ID NO: 82088 - protein, 9 aa, Homo sapiens
  Table A; Target 82088; HLA-B*07:02; SSX1; ENSG00000126752; CTA
GPQNDGKQL

SEQ ID NO: 82089 - protein, 9 aa, Homo sapiens
  Table A; Target 82089; HLA-C*07:02; SSX1; ENSG00000126752; CTA
GPQNDGKQL

SEQ ID NO: 82090 - protein, 8 aa, Homo sapiens
  Table A; Target 82090; HLA-B*08:01; SSX1; ENSG00000126752; CTA
HPPGKANI

SEQ ID NO: 82091 - protein, 8 aa, Homo sapiens
  Table A; Target 82091; HLA-B*51:01; SSX1; ENSG00000126752; CTA
HPPGKANI

SEQ ID NO: 82092 - protein, 9 aa, Homo sapiens
  Table A; Target 82092; HLA-B*07:02; SSX1; ENSG00000126752; CTA
HPQMTFGRL

SEQ ID NO: 82093 - protein, 10 aa, Homo sapiens
  Table A; Target 82093; HLA-B*57:01; SSX1; ENSG00000126752; CTA
IATYFSKKEW

SEQ ID NO: 82094 - protein, 8 aa, Homo sapiens
  Table A; Target 82094; HLA-A*03:01; SSX1; ENSG00000126752; CTA
IIPKIMPK

SEQ ID NO: 82095 - protein, 9 aa, Homo sapiens
  Table A; Target 82095; HLA-A*03:01; SSX1; ENSG00000126752; CTA
IIPKIMPKK

SEQ ID NO: 82096 - protein, 8 aa, Homo sapiens
  Table A; Target 82096; HLA-A*30:01; SSX1; ENSG00000126752; CTA
IQVEHPQM

SEQ ID NO: 82097 - protein, 8 aa, Homo sapiens
  Table A; Target 82097; HLA-A*32:01; SSX1; ENSG00000126752; CTA
IQVEHPQM

SEQ ID NO: 82098 - protein, 8 aa, Homo sapiens
  Table A; Target 82098; HLA-B*08:01; SSX1; ENSG00000126752; CTA
IQVEHPQM

SEQ ID NO: 82099 - protein, 8 aa, Homo sapiens
  Table A; Target 82099; HLA-B*13:02; SSX1; ENSG00000126752; CTA
IQVEHPQM

SEQ ID NO: 82100 - protein, 8 aa, Homo sapiens
  Table A; Target 82100; HLA-B*15:01; SSX1; ENSG00000126752; CTA
IQVEHPQM

SEQ ID NO: 82101 - protein, 8 aa, Homo sapiens
  Table A; Target 82101; HLA-B*15:03; SSX1; ENSG00000126752; CTA
IQVEHPQM

SEQ ID NO: 82102 - protein, 8 aa, Homo sapiens
  Table A; Target 82102; HLA-B*18:01; SSX1; ENSG00000126752; CTA
IQVEHPQM

SEQ ID NO: 82103 - protein, 8 aa, Homo sapiens
  Table A; Target 82103; HLA-B*37:01; SSX1; ENSG00000126752; CTA
IQVEHPQM

SEQ ID NO: 82104 - protein, 8 aa, Homo sapiens
  Table A; Target 82104; HLA-B*39:01; SSX1; ENSG00000126752; CTA
IQVEHPQM

SEQ ID NO: 82105 - protein, 8 aa, Homo sapiens
  Table A; Target 82105; HLA-B*40:02; SSX1; ENSG00000126752; CTA
IQVEHPQM

SEQ ID NO: 82106 - protein, 8 aa, Homo sapiens
  Table A; Target 82106; HLA-B*46:01; SSX1; ENSG00000126752; CTA
IQVEHPQM

SEQ ID NO: 82107 - protein, 8 aa, Homo sapiens
  Table A; Target 82107; HLA-B*58:01; SSX1; ENSG00000126752; CTA
IQVEHPQM

SEQ ID NO: 82108 - protein, 8 aa, Homo sapiens
  Table A; Target 82108; HLA-C*03:03; SSX1; ENSG00000126752; CTA
IQVEHPQM

SEQ ID NO: 82109 - protein, 8 aa, Homo sapiens
  Table A; Target 82109; HLA-C*03:04; SSX1; ENSG00000126752; CTA
IQVEHPQM

SEQ ID NO: 82110 - protein, 8 aa, Homo sapiens
  Table A; Target 82110; HLA-C*05:01; SSX1; ENSG00000126752; CTA
IQVEHPQM

SEQ ID NO: 82111 - protein, 8 aa, Homo sapiens
  Table A; Target 82111; HLA-C*07:04; SSX1; ENSG00000126752; CTA
IQVEHPQM

SEQ ID NO: 82112 - protein, 8 aa, Homo sapiens
  Table A; Target 82112; HLA-C*12:03; SSX1; ENSG00000126752; CTA
IQVEHPQM

SEQ ID NO: 82113 - protein, 8 aa, Homo sapiens
  Table A; Target 82113; HLA-C*16:01; SSX1; ENSG00000126752; CTA
IQVEHPQM

SEQ ID NO: 82114 - protein, 8 aa, Homo sapiens
  Table A; Target 82114; HLA-C*16:02; SSX1; ENSG00000126752; CTA
IQVEHPQM

SEQ ID NO: 82115 - protein, 8 aa, Homo sapiens
  Table A; Target 82115; HLA-C*16:04; SSX1; ENSG00000126752; CTA
IQVEHPQM

SEQ ID NO: 82116 - protein, 9 aa, Homo sapiens
  Table A; Target 82116; HLA-B*13:02; SSX1; ENSG00000126752; CTA
IQVEHPQMT

SEQ ID NO: 82117 - protein, 10 aa, Homo sapiens
  Table A; Target 82117; HLA-A*23:01; SSX1; ENSG00000126752; CTA
IQVEHPQMTF

SEQ ID NO: 82118 - protein, 10 aa, Homo sapiens
  Table A; Target 82118; HLA-A*24:02; SSX1; ENSG00000126752; CTA
IQVEHPQMTF

SEQ ID NO: 82119 - protein, 10 aa, Homo sapiens
  Table A; Target 82119; HLA-A*25:01; SSX1; ENSG00000126752; CTA
IQVEHPQMTF

SEQ ID NO: 82120 - protein, 10 aa, Homo sapiens
  Table A; Target 82120; HLA-A*26:01; SSX1; ENSG00000126752; CTA
IQVEHPQMTF

SEQ ID NO: 82121 - protein, 10 aa, Homo sapiens
  Table A; Target 82121; HLA-A*30:01; SSX1; ENSG00000126752; CTA
IQVEHPQMTF

SEQ ID NO: 82122 - protein, 10 aa, Homo sapiens
  Table A; Target 82122; HLA-A*32:01; SSX1; ENSG00000126752; CTA
IQVEHPQMTF

SEQ ID NO: 82123 - protein, 10 aa, Homo sapiens
  Table A; Target 82123; HLA-B*13:02; SSX1; ENSG00000126752; CTA
IQVEHPQMTF

SEQ ID NO: 82124 - protein, 10 aa, Homo sapiens
  Table A; Target 82124; HLA-B*15:03; SSX1; ENSG00000126752; CTA
IQVEHPQMTF

SEQ ID NO: 82125 - protein, 10 aa, Homo sapiens
  Table A; Target 82125; HLA-B*38:01; SSX1; ENSG00000126752; CTA
IQVEHPQMTF

SEQ ID NO: 82126 - protein, 10 aa, Homo sapiens
  Table A; Target 82126; HLA-B*46:01; SSX1; ENSG00000126752; CTA
IQVEHPQMTF

SEQ ID NO: 82127 - protein, 10 aa, Homo sapiens
  Table A; Target 82127; HLA-B*57:01; SSX1; ENSG00000126752; CTA
IQVEHPQMTF

SEQ ID NO: 82128 - protein, 10 aa, Homo sapiens
  Table A; Target 82128; HLA-B*58:01; SSX1; ENSG00000126752; CTA
IQVEHPQMTF

SEQ ID NO: 82129 - protein, 10 aa, Homo sapiens
  Table A; Target 82129; HLA-C*02:02; SSX1; ENSG00000126752; CTA
IQVEHPQMTF

SEQ ID NO: 82130 - protein, 10 aa, Homo sapiens
  Table A; Target 82130; HLA-C*07:04; SSX1; ENSG00000126752; CTA
IQVEHPQMTF

SEQ ID NO: 82131 - protein, 10 aa, Homo sapiens
  Table A; Target 82131; HLA-C*16:04; SSX1; ENSG00000126752; CTA
IQVEHPQMTF

SEQ ID NO: 82132 - protein, 9 aa, Homo sapiens
  Table A; Target 82132; HLA-A*01:01; SSX1; ENSG00000126752; CTA
KAFDDIATY

SEQ ID NO: 82133 - protein, 9 aa, Homo sapiens
  Table A; Target 82133; HLA-A*02:01; SSX1; ENSG00000126752; CTA
KAFDDIATY

SEQ ID NO: 82134 - protein, 9 aa, Homo sapiens
  Table A; Target 82134; HLA-A*02:03; SSX1; ENSG00000126752; CTA
KAFDDIATY

SEQ ID NO: 82135 - protein, 9 aa, Homo sapiens
  Table A; Target 82135; HLA-A*03:01; SSX1; ENSG00000126752; CTA
KAFDDIATY

SEQ ID NO: 82136 - protein, 9 aa, Homo sapiens
  Table A; Target 82136; HLA-A*03:02; SSX1; ENSG00000126752; CTA
KAFDDIATY

SEQ ID NO: 82137 - protein, 9 aa, Homo sapiens
  Table A; Target 82137; HLA-A*11:01; SSX1; ENSG00000126752; CTA
KAFDDIATY

SEQ ID NO: 82138 - protein, 9 aa, Homo sapiens
  Table A; Target 82138; HLA-A*23:01; SSX1; ENSG00000126752; CTA
KAFDDIATY

SEQ ID NO: 82139 - protein, 9 aa, Homo sapiens
  Table A; Target 82139; HLA-A*25:01; SSX1; ENSG00000126752; CTA
KAFDDIATY

SEQ ID NO: 82140 - protein, 9 aa, Homo sapiens
  Table A; Target 82140; HLA-A*26:01; SSX1; ENSG00000126752; CTA
KAFDDIATY

SEQ ID NO: 82141 - protein, 9 aa, Homo sapiens
  Table A; Target 82141; HLA-A*29:02; SSX1; ENSG00000126752; CTA
KAFDDIATY

SEQ ID NO: 82142 - protein, 9 aa, Homo sapiens
  Table A; Target 82142; HLA-A*30:02; SSX1; ENSG00000126752; CTA
KAFDDIATY

SEQ ID NO: 82143 - protein, 9 aa, Homo sapiens
  Table A; Target 82143; HLA-A*31:01; SSX1; ENSG00000126752; CTA
KAFDDIATY

SEQ ID NO: 82144 - protein, 9 aa, Homo sapiens
  Table A; Target 82144; HLA-A*32:01; SSX1; ENSG00000126752; CTA
KAFDDIATY

SEQ ID NO: 82145 - protein, 9 aa, Homo sapiens
  Table A; Target 82145; HLA-A*33:01; SSX1; ENSG00000126752; CTA
KAFDDIATY

SEQ ID NO: 82146 - protein, 9 aa, Homo sapiens
  Table A; Target 82146; HLA-A*33:03; SSX1; ENSG00000126752; CTA
KAFDDIATY

SEQ ID NO: 82147 - protein, 9 aa, Homo sapiens
  Table A; Target 82147; HLA-A*68:01; SSX1; ENSG00000126752; CTA
KAFDDIATY

SEQ ID NO: 82148 - protein, 9 aa, Homo sapiens
  Table A; Target 82148; HLA-B*15:03; SSX1; ENSG00000126752; CTA
KAFDDIATY

SEQ ID NO: 82149 - protein, 9 aa, Homo sapiens
  Table A; Target 82149; HLA-B*18:01; SSX1; ENSG00000126752; CTA
KAFDDIATY

SEQ ID NO: 82150 - protein, 9 aa, Homo sapiens
  Table A; Target 82150; HLA-B*27:02; SSX1; ENSG00000126752; CTA
KAFDDIATY

SEQ ID NO: 82151 - protein, 9 aa, Homo sapiens
  Table A; Target 82151; HLA-B*27:05; SSX1; ENSG00000126752; CTA
KAFDDIATY

SEQ ID NO: 82152 - protein, 9 aa, Homo sapiens
  Table A; Target 82152; HLA-B*35:03; SSX1; ENSG00000126752; CTA
KAFDDIATY

SEQ ID NO: 82153 - protein, 9 aa, Homo sapiens
  Table A; Target 82153; HLA-B*38:01; SSX1; ENSG00000126752; CTA
KAFDDIATY

SEQ ID NO: 82154 - protein, 9 aa, Homo sapiens
  Table A; Target 82154; HLA-B*39:01; SSX1; ENSG00000126752; CTA
KAFDDIATY

SEQ ID NO: 82155 - protein, 9 aa, Homo sapiens
  Table A; Target 82155; HLA-B*44:02; SSX1; ENSG00000126752; CTA
KAFDDIATY

SEQ ID NO: 82156 - protein, 9 aa, Homo sapiens
  Table A; Target 82156; HLA-B*44:03; SSX1; ENSG00000126752; CTA
KAFDDIATY

SEQ ID NO: 82157 - protein, 9 aa, Homo sapiens
  Table A; Target 82157; HLA-B*46:01; SSX1; ENSG00000126752; CTA
KAFDDIATY

SEQ ID NO: 82158 - protein, 9 aa, Homo sapiens
  Table A; Target 82158; HLA-B*54:01; SSX1; ENSG00000126752; CTA
KAFDDIATY

SEQ ID NO: 82159 - protein, 9 aa, Homo sapiens
  Table A; Target 82159; HLA-B*55:01; SSX1; ENSG00000126752; CTA
KAFDDIATY

SEQ ID NO: 82160 - protein, 9 aa, Homo sapiens
  Table A; Target 82160; HLA-B*56:01; SSX1; ENSG00000126752; CTA
KAFDDIATY

SEQ ID NO: 82161 - protein, 9 aa, Homo sapiens
  Table A; Target 82161; HLA-B*57:01; SSX1; ENSG00000126752; CTA
KAFDDIATY

SEQ ID NO: 82162 - protein, 9 aa, Homo sapiens
  Table A; Target 82162; HLA-B*58:01; SSX1; ENSG00000126752; CTA
KAFDDIATY

SEQ ID NO: 82163 - protein, 9 aa, Homo sapiens
  Table A; Target 82163; HLA-C*01:02; SSX1; ENSG00000126752; CTA
KAFDDIATY

SEQ ID NO: 82164 - protein, 9 aa, Homo sapiens
  Table A; Target 82164; HLA-C*02:02; SSX1; ENSG00000126752; CTA
KAFDDIATY

SEQ ID NO: 82165 - protein, 9 aa, Homo sapiens
  Table A; Target 82165; HLA-C*03:03; SSX1; ENSG00000126752; CTA
KAFDDIATY

SEQ ID NO: 82166 - protein, 9 aa, Homo sapiens
  Table A; Target 82166; HLA-C*03:04; SSX1; ENSG00000126752; CTA
KAFDDIATY

SEQ ID NO: 82167 - protein, 9 aa, Homo sapiens
  Table A; Target 82167; HLA-C*05:01; SSX1; ENSG00000126752; CTA
KAFDDIATY

SEQ ID NO: 82168 - protein, 9 aa, Homo sapiens
  Table A; Target 82168; HLA-C*07:04; SSX1; ENSG00000126752; CTA
KAFDDIATY

SEQ ID NO: 82169 - protein, 9 aa, Homo sapiens
  Table A; Target 82169; HLA-C*07:06; SSX1; ENSG00000126752; CTA
KAFDDIATY

SEQ ID NO: 82170 - protein, 9 aa, Homo sapiens
  Table A; Target 82170; HLA-C*12:03; SSX1; ENSG00000126752; CTA
KAFDDIATY

SEQ ID NO: 82171 - protein, 9 aa, Homo sapiens
  Table A; Target 82171; HLA-C*14:02; SSX1; ENSG00000126752; CTA
KAFDDIATY

SEQ ID NO: 82172 - protein, 9 aa, Homo sapiens
  Table A; Target 82172; HLA-C*16:01; SSX1; ENSG00000126752; CTA
KAFDDIATY

SEQ ID NO: 82173 - protein, 9 aa, Homo sapiens
  Table A; Target 82173; HLA-C*16:02; SSX1; ENSG00000126752; CTA
KAFDDIATY

SEQ ID NO: 82174 - protein, 9 aa, Homo sapiens
  Table A; Target 82174; HLA-C*16:04; SSX1; ENSG00000126752; CTA
KAFDDIATY

SEQ ID NO: 82175 - protein, 10 aa, Homo sapiens
  Table A; Target 82175; HLA-A*01:01; SSX1; ENSG00000126752; CTA
KAFDDIATYF

SEQ ID NO: 82176 - protein, 10 aa, Homo sapiens
  Table A; Target 82176; HLA-A*02:01; SSX1; ENSG00000126752; CTA
KAFDDIATYF

SEQ ID NO: 82177 - protein, 10 aa, Homo sapiens
  Table A; Target 82177; HLA-A*02:03; SSX1; ENSG00000126752; CTA
KAFDDIATYF

SEQ ID NO: 82178 - protein, 10 aa, Homo sapiens
  Table A; Target 82178; HLA-A*02:04; SSX1; ENSG00000126752; CTA
KAFDDIATYF

SEQ ID NO: 82179 - protein, 10 aa, Homo sapiens
  Table A; Target 82179; HLA-A*02:07; SSX1; ENSG00000126752; CTA
KAFDDIATYF

SEQ ID NO: 82180 - protein, 10 aa, Homo sapiens
  Table A; Target 82180; HLA-A*03:01; SSX1; ENSG00000126752; CTA
KAFDDIATYF

SEQ ID NO: 82181 - protein, 10 aa, Homo sapiens
  Table A; Target 82181; HLA-A*03:02; SSX1; ENSG00000126752; CTA
KAFDDIATYF

SEQ ID NO: 82182 - protein, 10 aa, Homo sapiens
  Table A; Target 82182; HLA-A*23:01; SSX1; ENSG00000126752; CTA
KAFDDIATYF

SEQ ID NO: 82183 - protein, 10 aa, Homo sapiens
  Table A; Target 82183; HLA-A*24:02; SSX1; ENSG00000126752; CTA
KAFDDIATYF

SEQ ID NO: 82184 - protein, 10 aa, Homo sapiens
  Table A; Target 82184; HLA-A*25:01; SSX1; ENSG00000126752; CTA
KAFDDIATYF

SEQ ID NO: 82185 - protein, 10 aa, Homo sapiens
  Table A; Target 82185; HLA-A*26:01; SSX1; ENSG00000126752; CTA
KAFDDIATYF

SEQ ID NO: 82186 - protein, 10 aa, Homo sapiens
  Table A; Target 82186; HLA-A*29:02; SSX1; ENSG00000126752; CTA
KAFDDIATYF

SEQ ID NO: 82187 - protein, 10 aa, Homo sapiens
  Table A; Target 82187; HLA-A*30:02; SSX1; ENSG00000126752; CTA
KAFDDIATYF

SEQ ID NO: 82188 - protein, 10 aa, Homo sapiens
  Table A; Target 82188; HLA-A*31:01; SSX1; ENSG00000126752; CTA
KAFDDIATYF

SEQ ID NO: 82189 - protein, 10 aa, Homo sapiens
  Table A; Target 82189; HLA-A*32:01; SSX1; ENSG00000126752; CTA
KAFDDIATYF

SEQ ID NO: 82190 - protein, 10 aa, Homo sapiens
  Table A; Target 82190; HLA-A*68:02; SSX1; ENSG00000126752; CTA
KAFDDIATYF

SEQ ID NO: 82191 - protein, 10 aa, Homo sapiens
  Table A; Target 82191; HLA-B*13:02; SSX1; ENSG00000126752; CTA
KAFDDIATYF

SEQ ID NO: 82192 - protein, 10 aa, Homo sapiens
  Table A; Target 82192; HLA-B*15:01; SSX1; ENSG00000126752; CTA
KAFDDIATYF

SEQ ID NO: 82193 - protein, 10 aa, Homo sapiens
  Table A; Target 82193; HLA-B*15:03; SSX1; ENSG00000126752; CTA
KAFDDIATYF

SEQ ID NO: 82194 - protein, 10 aa, Homo sapiens
  Table A; Target 82194; HLA-B*27:02; SSX1; ENSG00000126752; CTA
KAFDDIATYF

SEQ ID NO: 82195 - protein, 10 aa, Homo sapiens
  Table A; Target 82195; HLA-B*35:01; SSX1; ENSG00000126752; CTA
KAFDDIATYF

SEQ ID NO: 82196 - protein, 10 aa, Homo sapiens
  Table A; Target 82196; HLA-B*44:02; SSX1; ENSG00000126752; CTA
KAFDDIATYF

SEQ ID NO: 82197 - protein, 10 aa, Homo sapiens
  Table A; Target 82197; HLA-B*44:03; SSX1; ENSG00000126752; CTA
KAFDDIATYF

SEQ ID NO: 82198 - protein, 10 aa, Homo sapiens
  Table A; Target 82198; HLA-B*46:01; SSX1; ENSG00000126752; CTA
KAFDDIATYF

SEQ ID NO: 82199 - protein, 10 aa, Homo sapiens
  Table A; Target 82199; HLA-B*58:01; SSX1; ENSG00000126752; CTA
KAFDDIATYF

SEQ ID NO: 82200 - protein, 10 aa, Homo sapiens
  Table A; Target 82200; HLA-C*02:02; SSX1; ENSG00000126752; CTA
KAFDDIATYF

SEQ ID NO: 82201 - protein, 10 aa, Homo sapiens
  Table A; Target 82201; HLA-C*05:01; SSX1; ENSG00000126752; CTA
KAFDDIATYF

SEQ ID NO: 82202 - protein, 10 aa, Homo sapiens
  Table A; Target 82202; HLA-C*12:03; SSX1; ENSG00000126752; CTA
KAFDDIATYF

SEQ ID NO: 82203 - protein, 10 aa, Homo sapiens
  Table A; Target 82203; HLA-C*16:04; SSX1; ENSG00000126752; CTA
KAFDDIATYF

SEQ ID NO: 82204 - protein, 8 aa, Homo sapiens
  Table A; Target 82204; HLA-B*08:01; SSX1; ENSG00000126752; CTA
KAMTKLGF

SEQ ID NO: 82205 - protein, 8 aa, Homo sapiens
  Table A; Target 82205; HLA-C*16:01; SSX1; ENSG00000126752; CTA
KAMTKLGF

SEQ ID NO: 82206 - protein, 9 aa, Homo sapiens
  Table A; Target 82206; HLA-A*03:01; SSX1; ENSG00000126752; CTA
KAMTKLGFK

SEQ ID NO: 82207 - protein, 10 aa, Homo sapiens
  Table A; Target 82207; HLA-A*03:01; SSX1; ENSG00000126752; CTA
KANISEKINK

SEQ ID NO: 82208 - protein, 10 aa, Homo sapiens
  Table A; Target 82208; HLA-A*03:02; SSX1; ENSG00000126752; CTA
KANISEKINK

SEQ ID NO: 82209 - protein, 10 aa, Homo sapiens
  Table A; Target 82209; HLA-A*11:01; SSX1; ENSG00000126752; CTA
KANISEKINK

SEQ ID NO: 82210 - protein, 10 aa, Homo sapiens
  Table A; Target 82210; HLA-A*31:01; SSX1; ENSG00000126752; CTA
KANISEKINK

SEQ ID NO: 82211 - protein, 11 aa, Homo sapiens
  Table A; Target 82211; HLA-A*31:01; SSX1; ENSG00000126752; CTA
KANISEKINKR

SEQ ID NO: 82212 - protein, 8 aa, Homo sapiens
  Table A; Target 82212; HLA-C*16:01; SSX1; ENSG00000126752; CTA
KASEKRSK

SEQ ID NO: 82213 - protein, 9 aa, Homo sapiens
  Table A; Target 82213; HLA-A*03:01; SSX1; ENSG00000126752; CTA
KINKRSGPK

SEQ ID NO: 82214 - protein, 9 aa, Homo sapiens
  Table A; Target 82214; HLA-A*31:01; SSX1; ENSG00000126752; CTA
KISYVYMKR

SEQ ID NO: 82215 - protein, 8 aa, Homo sapiens
  Table A; Target 82215; HLA-B*08:01; SSX1; ENSG00000126752; CTA
KLGFKVTL

SEQ ID NO: 82216 - protein, 11 aa, Homo sapiens
  Table A; Target 82216; HLA-B*15:01; SSX1; ENSG00000126752; CTA
KQATDFQGNDF

SEQ ID NO: 82217 - protein, 9 aa, Homo sapiens
  Table A; Target 82217; HLA-A*02:01; SSX1; ENSG00000126752; CTA
KQLVIYEEI

SEQ ID NO: 82218 - protein, 9 aa, Homo sapiens
  Table A; Target 82218; HLA-A*02:04; SSX1; ENSG00000126752; CTA
KQLVIYEEI

SEQ ID NO: 82219 - protein, 9 aa, Homo sapiens
  Table A; Target 82219; HLA-A*02:07; SSX1; ENSG00000126752; CTA
KQLVIYEEI

SEQ ID NO: 82220 - protein, 9 aa, Homo sapiens
  Table A; Target 82220; HLA-A*24:02; SSX1; ENSG00000126752; CTA
KQLVIYEEI

SEQ ID NO: 82221 - protein, 9 aa, Homo sapiens
  Table A; Target 82221; HLA-A*30:01; SSX1; ENSG00000126752; CTA
KQLVIYEEI

SEQ ID NO: 82222 - protein, 9 aa, Homo sapiens
  Table A; Target 82222; HLA-B*13:02; SSX1; ENSG00000126752; CTA
KQLVIYEEI

SEQ ID NO: 82223 - protein, 9 aa, Homo sapiens
  Table A; Target 82223; HLA-C*16:04; SSX1; ENSG00000126752; CTA
KQLVIYEEI

SEQ ID NO: 82224 - protein, 8 aa, Homo sapiens
  Table A; Target 82224; HLA-B*15:03; SSX1; ENSG00000126752; CTA
KYSEKISY

SEQ ID NO: 82225 - protein, 8 aa, Homo sapiens
  Table A; Target 82225; HLA-C*14:02; SSX1; ENSG00000126752; CTA
KYSEKISY

SEQ ID NO: 82226 - protein, 8 aa, Homo sapiens
  Table A; Target 82226; HLA-C*16:01; SSX1; ENSG00000126752; CTA
KYSEKISY

SEQ ID NO: 82227 - protein, 9 aa, Homo sapiens
  Table A; Target 82227; HLA-A*24:02; SSX1; ENSG00000126752; CTA
KYSEKISYV

SEQ ID NO: 82228 - protein, 9 aa, Homo sapiens
  Table A; Target 82228; HLA-C*02:02; SSX1; ENSG00000126752; CTA
KYSEKISYV

SEQ ID NO: 82229 - protein, 9 aa, Homo sapiens
  Table A; Target 82229; HLA-C*16:02; SSX1; ENSG00000126752; CTA
KYSEKISYV

SEQ ID NO: 82230 - protein, 10 aa, Homo sapiens
  Table A; Target 82230; HLA-A*23:01; SSX1; ENSG00000126752; CTA
KYSEKISYVY

SEQ ID NO: 82231 - protein, 10 aa, Homo sapiens
  Table A; Target 82231; HLA-A*24:02; SSX1; ENSG00000126752; CTA
KYSEKISYVY

SEQ ID NO: 82232 - protein, 10 aa, Homo sapiens
  Table A; Target 82232; HLA-A*29:02; SSX1; ENSG00000126752; CTA
KYSEKISYVY

SEQ ID NO: 82233 - protein, 10 aa, Homo sapiens
  Table A; Target 82233; HLA-A*30:02; SSX1; ENSG00000126752; CTA
KYSEKISYVY

SEQ ID NO: 82234 - protein, 11 aa, Homo sapiens
  Table A; Target 82234; HLA-A*24:02; SSX1; ENSG00000126752; CTA
KYSEKISYVYM

SEQ ID NO: 82235 - protein, 9 aa, Homo sapiens
  Table A; Target 82235; HLA-B*15:03; SSX1; ENSG00000126752; CTA
MKYSEKISY

SEQ ID NO: 82236 - protein, 8 aa, Homo sapiens
  Table A; Target 82236; HLA-B*08:01; SSX1; ENSG00000126752; CTA
MTKLGFKV

SEQ ID NO: 82237 - protein, 8 aa, Homo sapiens
  Table A; Target 82237; HLA-B*40:02; SSX1; ENSG00000126752; CTA
MTKLGFKV

SEQ ID NO: 82238 - protein, 9 aa, Homo sapiens
  Table A; Target 82238; HLA-A*33:01; SSX1; ENSG00000126752; CTA
NDFDNDHNR

SEQ ID NO: 82239 - protein, 9 aa, Homo sapiens
  Table A; Target 82239; HLA-A*33:03; SSX1; ENSG00000126752; CTA
NDFDNDHNR

SEQ ID NO: 82240 - protein, 9 aa, Homo sapiens
  Table A; Target 82240; HLA-A*68:01; SSX1; ENSG00000126752; CTA
NDFDNDHNR

SEQ ID NO: 82241 - protein, 9 aa, Homo sapiens
  Table A; Target 82241; HLA-A*68:02; SSX1; ENSG00000126752; CTA
NDFDNDHNR

SEQ ID NO: 82242 - protein, 9 aa, Homo sapiens
  Table A; Target 82242; HLA-B*27:02; SSX1; ENSG00000126752; CTA
NDFDNDHNR

SEQ ID NO: 82243 - protein, 9 aa, Homo sapiens
  Table A; Target 82243; HLA-C*07:06; SSX1; ENSG00000126752; CTA
NDFDNDHNR

SEQ ID NO: 82244 - protein, 9 aa, Homo sapiens
  Table A; Target 82244; HLA-A*33:01; SSX1; ENSG00000126752; CTA
NGDDTFAKR

SEQ ID NO: 82245 - protein, 9 aa, Homo sapiens
  Table A; Target 82245; HLA-A*33:03; SSX1; ENSG00000126752; CTA
NGDDTFAKR

SEQ ID NO: 82246 - protein, 9 aa, Homo sapiens
  Table A; Target 82246; HLA-A*68:01; SSX1; ENSG00000126752; CTA
NGDDTFAKR

SEQ ID NO: 82247 - protein, 9 aa, Homo sapiens
  Table A; Target 82247; HLA-C*05:01; SSX1; ENSG00000126752; CTA
NGDDTFAKR

SEQ ID NO: 82248 - protein, 9 aa, Homo sapiens
  Table A; Target 82248; HLA-C*07:06; SSX1; ENSG00000126752; CTA
NGDDTFAKR

SEQ ID NO: 82249 - protein, 11 aa, Homo sapiens
  Table A; Target 82249; HLA-A*33:01; SSX1; ENSG00000126752; CTA
NGDDTFAKRPR

SEQ ID NO: 82250 - protein, 9 aa, Homo sapiens
  Table A; Target 82250; HLA-A*33:01; SSX1; ENSG00000126752; CTA
NISEKINKR

SEQ ID NO: 82251 - protein, 9 aa, Homo sapiens
  Table A; Target 82251; HLA-A*33:03; SSX1; ENSG00000126752; CTA
NISEKINKR

SEQ ID NO: 82252 - protein, 9 aa, Homo sapiens
  Table A; Target 82252; HLA-A*68:01; SSX1; ENSG00000126752; CTA
NISEKINKR

SEQ ID NO: 82253 - protein, 9 aa, Homo sapiens
  Table A; Target 82253; HLA-C*07:06; SSX1; ENSG00000126752; CTA
NISEKINKR

SEQ ID NO: 82254 - protein, 8 aa, Homo sapiens
  Table A; Target 82254; HLA-B*08:01; SSX1; ENSG00000126752; CTA
NYKAMTKL

SEQ ID NO: 82255 - protein, 8 aa, Homo sapiens
  Table A; Target 82255; HLA-C*07:02; SSX1; ENSG00000126752; CTA
NYKAMTKL

SEQ ID NO: 82256 - protein, 10 aa, Homo sapiens
  Table A; Target 82256; HLA-B*15:03; SSX1; ENSG00000126752; CTA
QATDFQGNDF

SEQ ID NO: 82257 - protein, 10 aa, Homo sapiens
  Table A; Target 82257; HLA-B*27:02; SSX1; ENSG00000126752; CTA
QATDFQGNDF

SEQ ID NO: 82258 - protein, 10 aa, Homo sapiens
  Table A; Target 82258; HLA-B*35:01; SSX1; ENSG00000126752; CTA
QATDFQGNDF

SEQ ID NO: 82259 - protein, 10 aa, Homo sapiens
  Table A; Target 82259; HLA-B*38:01; SSX1; ENSG00000126752; CTA
QATDFQGNDF

SEQ ID NO: 82260 - protein, 10 aa, Homo sapiens
  Table A; Target 82260; HLA-B*39:01; SSX1; ENSG00000126752; CTA
QATDFQGNDF

SEQ ID NO: 82261 - protein, 10 aa, Homo sapiens
  Table A; Target 82261; HLA-C*02:02; SSX1; ENSG00000126752; CTA
QATDFQGNDF

SEQ ID NO: 82262 - protein, 10 aa, Homo sapiens
  Table A; Target 82262; HLA-C*04:01; SSX1; ENSG00000126752; CTA
QATDFQGNDF

SEQ ID NO: 82263 - protein, 10 aa, Homo sapiens
  Table A; Target 82263; HLA-C*16:02; SSX1; ENSG00000126752; CTA
QATDFQGNDF

SEQ ID NO: 82264 - protein, 10 aa, Homo sapiens
  Table A; Target 82264; HLA-C*16:04; SSX1; ENSG00000126752; CTA
QATDFQGNDF

SEQ ID NO: 82265 - protein, 11 aa, Homo sapiens
  Table A; Target 82265; HLA-A*31:01; SSX1; ENSG00000126752; CTA
QGNDFDNDHNR

SEQ ID NO: 82266 - protein, 11 aa, Homo sapiens
  Table A; Target 82266; HLA-A*33:01; SSX1; ENSG00000126752; CTA
QGNDFDNDHNR

SEQ ID NO: 82267 - protein, 11 aa, Homo sapiens
  Table A; Target 82267; HLA-A*33:03; SSX1; ENSG00000126752; CTA
QGNDFDNDHNR

SEQ ID NO: 82268 - protein, 11 aa, Homo sapiens
  Table A; Target 82268; HLA-A*68:01; SSX1; ENSG00000126752; CTA
QGNDFDNDHNR

SEQ ID NO: 82269 - protein, 11 aa, Homo sapiens
  Table A; Target 82269; HLA-C*07:06; SSX1; ENSG00000126752; CTA
QGNDFDNDHNR

SEQ ID NO: 82270 - protein, 9 aa, Homo sapiens
  Table A; Target 82270; HLA-A*25:01; SSX1; ENSG00000126752; CTA
QVEHPQMTF

SEQ ID NO: 82271 - protein, 9 aa, Homo sapiens
  Table A; Target 82271; HLA-A*32:01; SSX1; ENSG00000126752; CTA
QVEHPQMTF

SEQ ID NO: 82272 - protein, 9 aa, Homo sapiens
  Table A; Target 82272; HLA-B*15:01; SSX1; ENSG00000126752; CTA
QVEHPQMTF

SEQ ID NO: 82273 - protein, 9 aa, Homo sapiens
  Table A; Target 82273; HLA-B*57:01; SSX1; ENSG00000126752; CTA
QVEHPQMTF

SEQ ID NO: 82274 - protein, 9 aa, Homo sapiens
  Table A; Target 82274; HLA-B*58:01; SSX1; ENSG00000126752; CTA
QVEHPQMTF

SEQ ID NO: 82275 - protein, 9 aa, Homo sapiens
  Table A; Target 82275; HLA-C*05:01; SSX1; ENSG00000126752; CTA
QVEHPQMTF

SEQ ID NO: 82276 - protein, 9 aa, Homo sapiens
  Table A; Target 82276; HLA-C*07:04; SSX1; ENSG00000126752; CTA
QVEHPQMTF

SEQ ID NO: 82277 - protein, 9 aa, Homo sapiens
  Table A; Target 82277; HLA-A*03:01; SSX1; ENSG00000126752; CTA
RIIPKIMPK

SEQ ID NO: 82278 - protein, 9 aa, Homo sapiens
  Table A; Target 82278; HLA-A*03:02; SSX1; ENSG00000126752; CTA
RIIPKIMPK

SEQ ID NO: 82279 - protein, 9 aa, Homo sapiens
  Table A; Target 82279; HLA-A*11:01; SSX1; ENSG00000126752; CTA
RIIPKIMPK

SEQ ID NO: 82280 - protein, 9 aa, Homo sapiens
  Table A; Target 82280; HLA-A*31:01; SSX1; ENSG00000126752; CTA
RIIPKIMPK

SEQ ID NO: 82281 - protein, 10 aa, Homo sapiens
  Table A; Target 82281; HLA-A*03:01; SSX1; ENSG00000126752; CTA
RIIPKIMPKK

SEQ ID NO: 82282 - protein, 9 aa, Homo sapiens
  Table A; Target 82282; HLA-A*32:01; SSX1; ENSG00000126752; CTA
RIQVEHPQM

SEQ ID NO: 82283 - protein, 9 aa, Homo sapiens
  Table A; Target 82283; HLA-B*37:01; SSX1; ENSG00000126752; CTA
RIQVEHPQM

SEQ ID NO: 82284 - protein, 9 aa, Homo sapiens
  Table A; Target 82284; HLA-C*16:01; SSX1; ENSG00000126752; CTA
RIQVEHPQM

SEQ ID NO: 82285 - protein, 11 aa, Homo sapiens
  Table A; Target 82285; HLA-B*57:01; SSX1; ENSG00000126752; CTA
RIQVEHPQMTF

SEQ ID NO: 82286 - protein, 11 aa, Homo sapiens
  Table A; Target 82286; HLA-B*58:01; SSX1; ENSG00000126752; CTA
RIQVEHPQMTF

SEQ ID NO: 82287 - protein, 9 aa, Homo sapiens
  Table A; Target 82287; HLA-A*02:04; SSX1; ENSG00000126752; CTA
RLHRIIPKI

SEQ ID NO: 82288 - protein, 9 aa, Homo sapiens
  Table A; Target 82288; HLA-A*03:01; SSX1; ENSG00000126752; CTA
RNYKAMTKL

SEQ ID NO: 82289 - protein, 11 aa, Homo sapiens
  Table A; Target 82289; HLA-B*07:02; SSX1; ENSG00000126752; CTA
RPRDDAKASEK

SEQ ID NO: 82290 - protein, 11 aa, Homo sapiens
  Table A; Target 82290; HLA-C*07:02; SSX1; ENSG00000126752; CTA
RPRDDAKASEK

SEQ ID NO: 82291 - protein, 11 aa, Homo sapiens
  Table A; Target 82291; HLA-A*30:02; SSX1; ENSG00000126752; CTA
RSKAFDDIATY

SEQ ID NO: 82292 - protein, 11 aa, Homo sapiens
  Table A; Target 82292; HLA-A*31:01; SSX1; ENSG00000126752; CTA
RSKAFDDIATY

SEQ ID NO: 82293 - protein, 11 aa, Homo sapiens
  Table A; Target 82293; HLA-B*15:01; SSX1; ENSG00000126752; CTA
RSKAFDDIATY

SEQ ID NO: 82294 - protein, 11 aa, Homo sapiens
  Table A; Target 82294; HLA-B*46:01; SSX1; ENSG00000126752; CTA
RSKAFDDIATY

SEQ ID NO: 82295 - protein, 11 aa, Homo sapiens
  Table A; Target 82295; HLA-B*57:01; SSX1; ENSG00000126752; CTA
RSKAFDDIATY

SEQ ID NO: 82296 - protein, 11 aa, Homo sapiens
  Table A; Target 82296; HLA-B*58:01; SSX1; ENSG00000126752; CTA
RSKAFDDIATY

SEQ ID NO: 82297 - protein, 8 aa, Homo sapiens
  Table A; Target 82297; HLA-A*30:01; SSX1; ENSG00000126752; CTA
SEKISYVY

SEQ ID NO: 82298 - protein, 8 aa, Homo sapiens
  Table A; Target 82298; HLA-B*08:01; SSX1; ENSG00000126752; CTA
SEKISYVY

SEQ ID NO: 82299 - protein, 8 aa, Homo sapiens
  Table A; Target 82299; HLA-B*15:01; SSX1; ENSG00000126752; CTA
SEKISYVY

SEQ ID NO: 82300 - protein, 8 aa, Homo sapiens
  Table A; Target 82300; HLA-B*15:03; SSX1; ENSG00000126752; CTA
SEKISYVY

SEQ ID NO: 82301 - protein, 8 aa, Homo sapiens
  Table A; Target 82301; HLA-B*37:01; SSX1; ENSG00000126752; CTA
SEKISYVY

SEQ ID NO: 82302 - protein, 8 aa, Homo sapiens
  Table A; Target 82302; HLA-B*40:02; SSX1; ENSG00000126752; CTA
SEKISYVY

SEQ ID NO: 82303 - protein, 8 aa, Homo sapiens
  Table A; Target 82303; HLA-B*44:02; SSX1; ENSG00000126752; CTA
SEKISYVY

SEQ ID NO: 82304 - protein, 8 aa, Homo sapiens
  Table A; Target 82304; HLA-B*44:03; SSX1; ENSG00000126752; CTA
SEKISYVY

SEQ ID NO: 82305 - protein, 8 aa, Homo sapiens
  Table A; Target 82305; HLA-C*07:01; SSX1; ENSG00000126752; CTA
SEKISYVY

SEQ ID NO: 82306 - protein, 8 aa, Homo sapiens
  Table A; Target 82306; HLA-C*07:04; SSX1; ENSG00000126752; CTA
SEKISYVY

SEQ ID NO: 82307 - protein, 8 aa, Homo sapiens
  Table A; Target 82307; HLA-C*16:04; SSX1; ENSG00000126752; CTA
SEKISYVY

SEQ ID NO: 82308 - protein, 9 aa, Homo sapiens
  Table A; Target 82308; HLA-A*30:01; SSX1; ENSG00000126752; CTA
SEKISYVYM

SEQ ID NO: 82309 - protein, 9 aa, Homo sapiens
  Table A; Target 82309; HLA-B*18:01; SSX1; ENSG00000126752; CTA
SEKISYVYM

SEQ ID NO: 82310 - protein, 9 aa, Homo sapiens
  Table A; Target 82310; HLA-B*37:01; SSX1; ENSG00000126752; CTA
SEKISYVYM

SEQ ID NO: 82311 - protein, 9 aa, Homo sapiens
  Table A; Target 82311; HLA-B*40:01; SSX1; ENSG00000126752; CTA
SEKISYVYM

SEQ ID NO: 82312 - protein, 9 aa, Homo sapiens
  Table A; Target 82312; HLA-B*40:02; SSX1; ENSG00000126752; CTA
SEKISYVYM

SEQ ID NO: 82313 - protein, 9 aa, Homo sapiens
  Table A; Target 82313; HLA-B*44:02; SSX1; ENSG00000126752; CTA
SEKISYVYM

SEQ ID NO: 82314 - protein, 9 aa, Homo sapiens
  Table A; Target 82314; HLA-B*44:03; SSX1; ENSG00000126752; CTA
SEKISYVYM

SEQ ID NO: 82315 - protein, 9 aa, Homo sapiens
  Table A; Target 82315; HLA-B*49:01; SSX1; ENSG00000126752; CTA
SEKISYVYM

SEQ ID NO: 82316 - protein, 9 aa, Homo sapiens
  Table A; Target 82316; HLA-C*04:01; SSX1; ENSG00000126752; CTA
SEKISYVYM

SEQ ID NO: 82317 - protein, 10 aa, Homo sapiens
  Table A; Target 82317; HLA-B*15:03; SSX1; ENSG00000126752; CTA
SKAFDDIATY

SEQ ID NO: 82318 - protein, 9 aa, Homo sapiens
  Table A; Target 82318; HLA-A*29:02; SSX1; ENSG00000126752; CTA
SYVYMKRNY

SEQ ID NO: 82319 - protein, 8 aa, Homo sapiens
  Table A; Target 82319; HLA-B*18:01; SSX1; ENSG00000126752; CTA
TDFQGNDF

SEQ ID NO: 82320 - protein, 8 aa, Homo sapiens
  Table A; Target 82320; HLA-B*37:01; SSX1; ENSG00000126752; CTA
TDFQGNDF

SEQ ID NO: 82321 - protein, 10 aa, Homo sapiens
  Table A; Target 82321; HLA-C*07:01; SSX1; ENSG00000126752; CTA
TDFQGNDFDN

SEQ ID NO: 82322 - protein, 9 aa, Homo sapiens
  Table A; Target 82322; HLA-A*03:01; SSX1; ENSG00000126752; CTA
TLPPFMCNK

SEQ ID NO: 82323 - protein, 9 aa, Homo sapiens
  Table A; Target 82323; HLA-A*03:02; SSX1; ENSG00000126752; CTA
TLPPFMCNK

SEQ ID NO: 82324 - protein, 8 aa, Homo sapiens
  Table A; Target 82324; HLA-A*23:01; SSX1; ENSG00000126752; CTA
VEHPQMTF

SEQ ID NO: 82325 - protein, 8 aa, Homo sapiens
  Table A; Target 82325; HLA-A*30:01; SSX1; ENSG00000126752; CTA
VEHPQMTF

SEQ ID NO: 82326 - protein, 8 aa, Homo sapiens
  Table A; Target 82326; HLA-A*32:01; SSX1; ENSG00000126752; CTA
VEHPQMTF

SEQ ID NO: 82327 - protein, 8 aa, Homo sapiens
  Table A; Target 82327; HLA-B*15:03; SSX1; ENSG00000126752; CTA
VEHPQMTF

SEQ ID NO: 82328 - protein, 8 aa, Homo sapiens
  Table A; Target 82328; HLA-B*18:01; SSX1; ENSG00000126752; CTA
VEHPQMTF

SEQ ID NO: 82329 - protein, 8 aa, Homo sapiens
  Table A; Target 82329; HLA-B*37:01; SSX1; ENSG00000126752; CTA
VEHPQMTF

SEQ ID NO: 82330 - protein, 8 aa, Homo sapiens
  Table A; Target 82330; HLA-B*40:02; SSX1; ENSG00000126752; CTA
VEHPQMTF

SEQ ID NO: 82331 - protein, 8 aa, Homo sapiens
  Table A; Target 82331; HLA-B*44:02; SSX1; ENSG00000126752; CTA
VEHPQMTF

SEQ ID NO: 82332 - protein, 8 aa, Homo sapiens
  Table A; Target 82332; HLA-B*44:03; SSX1; ENSG00000126752; CTA
VEHPQMTF

SEQ ID NO: 82333 - protein, 8 aa, Homo sapiens
  Table A; Target 82333; HLA-B*49:01; SSX1; ENSG00000126752; CTA
VEHPQMTF

SEQ ID NO: 82334 - protein, 8 aa, Homo sapiens
  Table A; Target 82334; HLA-B*58:01; SSX1; ENSG00000126752; CTA
VEHPQMTF

SEQ ID NO: 82335 - protein, 8 aa, Homo sapiens
  Table A; Target 82335; HLA-C*04:01; SSX1; ENSG00000126752; CTA
VEHPQMTF

SEQ ID NO: 82336 - protein, 8 aa, Homo sapiens
  Table A; Target 82336; HLA-C*07:04; SSX1; ENSG00000126752; CTA
VEHPQMTF

SEQ ID NO: 82337 - protein, 8 aa, Homo sapiens
  Table A; Target 82337; HLA-C*12:03; SSX1; ENSG00000126752; CTA
VEHPQMTF

SEQ ID NO: 82338 - protein, 8 aa, Homo sapiens
  Table A; Target 82338; HLA-C*16:04; SSX1; ENSG00000126752; CTA
VEHPQMTF

SEQ ID NO: 82339 - protein, 9 aa, Homo sapiens
  Table A; Target 82339; HLA-B*49:01; SSX1; ENSG00000126752; CTA
VEHPQMTFG

SEQ ID NO: 82340 - protein, 10 aa, Homo sapiens
  Table A; Target 82340; HLA-A*03:01; SSX1; ENSG00000126752; CTA
VTLPPFMCNK

SEQ ID NO: 82341 - protein, 10 aa, Homo sapiens
  Table A; Target 82341; HLA-A*03:02; SSX1; ENSG00000126752; CTA
VTLPPFMCNK

SEQ ID NO: 82342 - protein, 10 aa, Homo sapiens
  Table A; Target 82342; HLA-A*11:01; SSX1; ENSG00000126752; CTA
VTLPPFMCNK

SEQ ID NO: 82343 - protein, 10 aa, Homo sapiens
  Table A; Target 82343; HLA-A*31:01; SSX1; ENSG00000126752; CTA
VTLPPFMCNK

SEQ ID NO: 82344 - protein, 9 aa, Homo sapiens
  Table A; Target 82344; HLA-A*24:02; SSX1; ENSG00000126752; CTA
VYMKRNYKA

SEQ ID NO: 82345 - protein, 9 aa, Homo sapiens
  Table A; Target 82345; HLA-B*15:03; SSX1; ENSG00000126752; CTA
YKAMTKLGF

SEQ ID NO: 82346 - protein, 8 aa, Homo sapiens
  Table A; Target 82346; HLA-A*01:01; SSX1; ENSG00000126752; CTA
YSEKISYV

SEQ ID NO: 82347 - protein, 8 aa, Homo sapiens
  Table A; Target 82347; HLA-C*05:01; SSX1; ENSG00000126752; CTA
YSEKISYV

SEQ ID NO: 82348 - protein, 9 aa, Homo sapiens
  Table A; Target 82348; HLA-A*29:02; SSX1; ENSG00000126752; CTA
YSEKISYVY

SEQ ID NO: 82349 - protein, 9 aa, Homo sapiens
  Table A; Target 82349; HLA-A*30:02; SSX1; ENSG00000126752; CTA
YSEKISYVY

SEQ ID NO: 82350 - protein, 9 aa, Homo sapiens
  Table A; Target 82350; HLA-B*18:01; SSX1; ENSG00000126752; CTA
YSEKISYVY

SEQ ID NO: 82351 - protein, 9 aa, Homo sapiens
  Table A; Target 82351; HLA-B*35:01; SSX1; ENSG00000126752; CTA
YSEKISYVY

SEQ ID NO: 82352 - protein, 9 aa, Homo sapiens
  Table A; Target 82352; HLA-B*57:01; SSX1; ENSG00000126752; CTA
YSEKISYVY

SEQ ID NO: 82353 - protein, 9 aa, Homo sapiens
  Table A; Target 82353; HLA-B*58:01; SSX1; ENSG00000126752; CTA
YSEKISYVY

SEQ ID NO: 82354 - protein, 9 aa, Homo sapiens
  Table A; Target 82354; HLA-C*02:02; SSX1; ENSG00000126752; CTA
YSEKISYVY

SEQ ID NO: 82355 - protein, 9 aa, Homo sapiens
  Table A; Target 82355; HLA-C*03:03; SSX1; ENSG00000126752; CTA
YSEKISYVY

SEQ ID NO: 82356 - protein, 9 aa, Homo sapiens
  Table A; Target 82356; HLA-C*07:01; SSX1; ENSG00000126752; CTA
YSEKISYVY

SEQ ID NO: 82357 - protein, 9 aa, Homo sapiens
  Table A; Target 82357; HLA-C*16:04; SSX1; ENSG00000126752; CTA
YSEKISYVY

SEQ ID NO: 82358 - protein, 10 aa, Homo sapiens
  Table A; Target 82358; HLA-A*01:01; SSX1; ENSG00000126752; CTA
YSEKISYVYM

SEQ ID NO: 82359 - protein, 8 aa, Homo sapiens
  Table A; Target 82359; HLA-B*08:01; SSX1; ENSG00000126752; CTA
YVYMKRNY

SEQ ID NO: 82360 - protein, 9 aa, Homo sapiens
  Table A; Target 82360; HLA-A*03:01; STRA8; ENSG00000146857; CTA
AALFNNLRK

SEQ ID NO: 82361 - protein, 9 aa, Homo sapiens
  Table A; Target 82361; HLA-A*11:01; STRA8; ENSG00000146857; CTA
AALFNNLRK

SEQ ID NO: 82362 - protein, 8 aa, Homo sapiens
  Table A; Target 82362; HLA-B*54:01; STRA8; ENSG00000146857; CTA
AALPIVSA

SEQ ID NO: 82363 - protein, 8 aa, Homo sapiens
  Table A; Target 82363; HLA-B*56:01; STRA8; ENSG00000146857; CTA
AALPIVSA

SEQ ID NO: 82364 - protein, 9 aa, Homo sapiens
  Table A; Target 82364; HLA-A*02:01; STRA8; ENSG00000146857; CTA
AALPIVSAA

SEQ ID NO: 82365 - protein, 9 aa, Homo sapiens
  Table A; Target 82365; HLA-A*32:01; STRA8; ENSG00000146857; CTA
AALPIVSAA

SEQ ID NO: 82366 - protein, 9 aa, Homo sapiens
  Table A; Target 82366; HLA-B*39:01; STRA8; ENSG00000146857; CTA
AALPIVSAA

SEQ ID NO: 82367 - protein, 9 aa, Homo sapiens
  Table A; Target 82367; HLA-B*46:01; STRA8; ENSG00000146857; CTA
AALPIVSAA

SEQ ID NO: 82368 - protein, 9 aa, Homo sapiens
  Table A; Target 82368; HLA-B*54:01; STRA8; ENSG00000146857; CTA
AALPIVSAA

SEQ ID NO: 82369 - protein, 9 aa, Homo sapiens
  Table A; Target 82369; HLA-B*55:01; STRA8; ENSG00000146857; CTA
AALPIVSAA

SEQ ID NO: 82370 - protein, 9 aa, Homo sapiens
  Table A; Target 82370; HLA-B*56:01; STRA8; ENSG00000146857; CTA
AALPIVSAA

SEQ ID NO: 82371 - protein, 9 aa, Homo sapiens
  Table A; Target 82371; HLA-B*58:01; STRA8; ENSG00000146857; CTA
AALPIVSAA

SEQ ID NO: 82372 - protein, 9 aa, Homo sapiens
  Table A; Target 82372; HLA-C*01:02; STRA8; ENSG00000146857; CTA
AALPIVSAA

SEQ ID NO: 82373 - protein, 9 aa, Homo sapiens
  Table A; Target 82373; HLA-C*02:02; STRA8; ENSG00000146857; CTA
AALPIVSAA

SEQ ID NO: 82374 - protein, 9 aa, Homo sapiens
  Table A; Target 82374; HLA-C*03:03; STRA8; ENSG00000146857; CTA
AALPIVSAA

SEQ ID NO: 82375 - protein, 9 aa, Homo sapiens
  Table A; Target 82375; HLA-C*03:04; STRA8; ENSG00000146857; CTA
AALPIVSAA

SEQ ID NO: 82376 - protein, 9 aa, Homo sapiens
  Table A; Target 82376; HLA-C*12:03; STRA8; ENSG00000146857; CTA
AALPIVSAA

SEQ ID NO: 82377 - protein, 9 aa, Homo sapiens
  Table A; Target 82377; HLA-C*14:02; STRA8; ENSG00000146857; CTA
AALPIVSAA

SEQ ID NO: 82378 - protein, 9 aa, Homo sapiens
  Table A; Target 82378; HLA-C*16:02; STRA8; ENSG00000146857; CTA
AALPIVSAA

SEQ ID NO: 82379 - protein, 9 aa, Homo sapiens
  Table A; Target 82379; HLA-C*16:04; STRA8; ENSG00000146857; CTA
AALPIVSAA

SEQ ID NO: 82380 - protein, 10 aa, Homo sapiens
  Table A; Target 82380; HLA-A*23:01; STRA8; ENSG00000146857; CTA
AALPIVSAAI

SEQ ID NO: 82381 - protein, 10 aa, Homo sapiens
  Table A; Target 82381; HLA-A*25:01; STRA8; ENSG00000146857; CTA
AALPIVSAAI

SEQ ID NO: 82382 - protein, 10 aa, Homo sapiens
  Table A; Target 82382; HLA-B*49:01; STRA8; ENSG00000146857; CTA
AEGSVKDSGV

SEQ ID NO: 82383 - protein, 8 aa, Homo sapiens
  Table A; Target 82383; HLA-A*32:01; STRA8; ENSG00000146857; CTA
AFDVASFL

SEQ ID NO: 82384 - protein, 8 aa, Homo sapiens
  Table A; Target 82384; HLA-B*35:01; STRA8; ENSG00000146857; CTA
AFDVASFL

SEQ ID NO: 82385 - protein, 8 aa, Homo sapiens
  Table A; Target 82385; HLA-B*35:03; STRA8; ENSG00000146857; CTA
AFDVASFL

SEQ ID NO: 82386 - protein, 8 aa, Homo sapiens
  Table A; Target 82386; HLA-C*05:01; STRA8; ENSG00000146857; CTA
AFDVASFL

SEQ ID NO: 82387 - protein, 8 aa, Homo sapiens
  Table A; Target 82387; HLA-C*07:04; STRA8; ENSG00000146857; CTA
AFDVASFL

SEQ ID NO: 82388 - protein, 8 aa, Homo sapiens
  Table A; Target 82388; HLA-C*14:02; STRA8; ENSG00000146857; CTA
AFDVASFL

SEQ ID NO: 82389 - protein, 9 aa, Homo sapiens
  Table A; Target 82389; HLA-A*02:04; STRA8; ENSG00000146857; CTA
AISHLWQNL

SEQ ID NO: 82390 - protein, 9 aa, Homo sapiens
  Table A; Target 82390; HLA-A*68:02; STRA8; ENSG00000146857; CTA
AISHLWQNL

SEQ ID NO: 82391 - protein, 8 aa, Homo sapiens
  Table A; Target 82391; HLA-B*15:03; STRA8; ENSG00000146857; CTA
AKSHIPEL

SEQ ID NO: 82392 - protein, 8 aa, Homo sapiens
  Table A; Target 82392; HLA-A*03:01; STRA8; ENSG00000146857; CTA
ALFNNLRK

SEQ ID NO: 82393 - protein, 9 aa, Homo sapiens
  Table A; Target 82393; HLA-A*02:03; STRA8; ENSG00000146857; CTA
ALFNNLRKT

SEQ ID NO: 82394 - protein, 9 aa, Homo sapiens
  Table A; Target 82394; HLA-A*02:04; STRA8; ENSG00000146857; CTA
ALFNNLRKT

SEQ ID NO: 82395 - protein, 10 aa, Homo sapiens
  Table A; Target 82395; HLA-A*02:01; STRA8; ENSG00000146857; CTA
ALFNNLRKTV

SEQ ID NO: 82396 - protein, 10 aa, Homo sapiens
  Table A; Target 82396; HLA-A*02:03; STRA8; ENSG00000146857; CTA
ALFNNLRKTV

SEQ ID NO: 82397 - protein, 11 aa, Homo sapiens
  Table A; Target 82397; HLA-A*29:02; STRA8; ENSG00000146857; CTA
ALFNNLRKTVY

SEQ ID NO: 82398 - protein, 11 aa, Homo sapiens
  Table A; Target 82398; HLA-A*30:02; STRA8; ENSG00000146857; CTA
ALFNNLRKTVY

SEQ ID NO: 82399 - protein, 11 aa, Homo sapiens
  Table A; Target 82399; HLA-A*32:01; STRA8; ENSG00000146857; CTA
ALFNNLRKTVY

SEQ ID NO: 82400 - protein, 11 aa, Homo sapiens
  Table A; Target 82400; HLA-B*15:01; STRA8; ENSG00000146857; CTA
ALFNNLRKTVY

SEQ ID NO: 82401 - protein, 11 aa, Homo sapiens
  Table A; Target 82401; HLA-B*46:01; STRA8; ENSG00000146857; CTA
ALFNNLRKTVY

SEQ ID NO: 82402 - protein, 11 aa, Homo sapiens
  Table A; Target 82402; HLA-C*02:02; STRA8; ENSG00000146857; CTA
ALFNNLRKTVY

SEQ ID NO: 82403 - protein, 9 aa, Homo sapiens
  Table A; Target 82403; HLA-A*02:01; STRA8; ENSG00000146857; CTA
ALPIVSAAI

SEQ ID NO: 82404 - protein, 9 aa, Homo sapiens
  Table A; Target 82404; HLA-A*02:03; STRA8; ENSG00000146857; CTA
ALPIVSAAI

SEQ ID NO: 82405 - protein, 9 aa, Homo sapiens
  Table A; Target 82405; HLA-A*02:04; STRA8; ENSG00000146857; CTA
ALPIVSAAI

SEQ ID NO: 82406 - protein, 9 aa, Homo sapiens
  Table A; Target 82406; HLA-A*02:07; STRA8; ENSG00000146857; CTA
ALPIVSAAI

SEQ ID NO: 82407 - protein, 9 aa, Homo sapiens
  Table A; Target 82407; HLA-A*23:01; STRA8; ENSG00000146857; CTA
ALPIVSAAI

SEQ ID NO: 82408 - protein, 9 aa, Homo sapiens
  Table A; Target 82408; HLA-A*24:02; STRA8; ENSG00000146857; CTA
ALPIVSAAI

SEQ ID NO: 82409 - protein, 9 aa, Homo sapiens
  Table A; Target 82409; HLA-A*30:01; STRA8; ENSG00000146857; CTA
ALPIVSAAI

SEQ ID NO: 82410 - protein, 9 aa, Homo sapiens
  Table A; Target 82410; HLA-A*32:01; STRA8; ENSG00000146857; CTA
ALPIVSAAI

SEQ ID NO: 82411 - protein, 9 aa, Homo sapiens
  Table A; Target 82411; HLA-B*13:02; STRA8; ENSG00000146857; CTA
ALPIVSAAI

SEQ ID NO: 82412 - protein, 9 aa, Homo sapiens
  Table A; Target 82412; HLA-B*15:01; STRA8; ENSG00000146857; CTA
ALPIVSAAI

SEQ ID NO: 82413 - protein, 9 aa, Homo sapiens
  Table A; Target 82413; HLA-B*15:03; STRA8; ENSG00000146857; CTA
ALPIVSAAI

SEQ ID NO: 82414 - protein, 9 aa, Homo sapiens
  Table A; Target 82414; HLA-B*46:01; STRA8; ENSG00000146857; CTA
ALPIVSAAI

SEQ ID NO: 82415 - protein, 9 aa, Homo sapiens
  Table A; Target 82415; HLA-B*55:01; STRA8; ENSG00000146857; CTA
ALPIVSAAI

SEQ ID NO: 82416 - protein, 9 aa, Homo sapiens
  Table A; Target 82416; HLA-C*01:02; STRA8; ENSG00000146857; CTA
ALPIVSAAI

SEQ ID NO: 82417 - protein, 9 aa, Homo sapiens
  Table A; Target 82417; HLA-C*06:02; STRA8; ENSG00000146857; CTA
ALPIVSAAI

SEQ ID NO: 82418 - protein, 9 aa, Homo sapiens
  Table A; Target 82418; HLA-C*07:02; STRA8; ENSG00000146857; CTA
ALPIVSAAI

SEQ ID NO: 82419 - protein, 11 aa, Homo sapiens
  Table A; Target 82419; HLA-A*03:02; STRA8; ENSG00000146857; CTA
ALPIVSAAISH

SEQ ID NO: 82420 - protein, 9 aa, Homo sapiens
  Table A; Target 82420; HLA-C*16:01; STRA8; ENSG00000146857; CTA
ANTQVKQEA

SEQ ID NO: 82421 - protein, 9 aa, Homo sapiens
  Table A; Target 82421; HLA-A*31:01; STRA8; ENSG00000146857; CTA
AQLQELEHR

SEQ ID NO: 82422 - protein, 9 aa, Homo sapiens
  Table A; Target 82422; HLA-C*16:02; STRA8; ENSG00000146857; CTA
ASFLDKSEV

SEQ ID NO: 82423 - protein, 9 aa, Homo sapiens
  Table A; Target 82423; HLA-A*30:02; STRA8; ENSG00000146857; CTA
ASFPVDEEM

SEQ ID NO: 82424 - protein, 9 aa, Homo sapiens
  Table A; Target 82424; HLA-A*32:01; STRA8; ENSG00000146857; CTA
ASFPVDEEM

SEQ ID NO: 82425 - protein, 9 aa, Homo sapiens
  Table A; Target 82425; HLA-B*15:01; STRA8; ENSG00000146857; CTA
ASFPVDEEM

SEQ ID NO: 82426 - protein, 9 aa, Homo sapiens
  Table A; Target 82426; HLA-B*15:03; STRA8; ENSG00000146857; CTA
ASFPVDEEM

SEQ ID NO: 82427 - protein, 9 aa, Homo sapiens
  Table A; Target 82427; HLA-B*27:05; STRA8; ENSG00000146857; CTA
ASFPVDEEM

SEQ ID NO: 82428 - protein, 9 aa, Homo sapiens
  Table A; Target 82428; HLA-B*35:01; STRA8; ENSG00000146857; CTA
ASFPVDEEM

SEQ ID NO: 82429 - protein, 9 aa, Homo sapiens
  Table A; Target 82429; HLA-B*35:03; STRA8; ENSG00000146857; CTA
ASFPVDEEM

SEQ ID NO: 82430 - protein, 9 aa, Homo sapiens
  Table A; Target 82430; HLA-B*38:01; STRA8; ENSG00000146857; CTA
ASFPVDEEM

SEQ ID NO: 82431 - protein, 9 aa, Homo sapiens
  Table A; Target 82431; HLA-B*40:01; STRA8; ENSG00000146857; CTA
ASFPVDEEM

SEQ ID NO: 82432 - protein, 9 aa, Homo sapiens
  Table A; Target 82432; HLA-B*46:01; STRA8; ENSG00000146857; CTA
ASFPVDEEM

SEQ ID NO: 82433 - protein, 9 aa, Homo sapiens
  Table A; Target 82433; HLA-B*55:01; STRA8; ENSG00000146857; CTA
ASFPVDEEM

SEQ ID NO: 82434 - protein, 9 aa, Homo sapiens
  Table A; Target 82434; HLA-B*57:01; STRA8; ENSG00000146857; CTA
ASFPVDEEM

SEQ ID NO: 82435 - protein, 9 aa, Homo sapiens
  Table A; Target 82435; HLA-B*58:01; STRA8; ENSG00000146857; CTA
ASFPVDEEM

SEQ ID NO: 82436 - protein, 9 aa, Homo sapiens
  Table A; Target 82436; HLA-C*02:02; STRA8; ENSG00000146857; CTA
ASFPVDEEM

SEQ ID NO: 82437 - protein, 9 aa, Homo sapiens
  Table A; Target 82437; HLA-C*03:03; STRA8; ENSG00000146857; CTA
ASFPVDEEM

SEQ ID NO: 82438 - protein, 9 aa, Homo sapiens
  Table A; Target 82438; HLA-C*03:04; STRA8; ENSG00000146857; CTA
ASFPVDEEM

SEQ ID NO: 82439 - protein, 9 aa, Homo sapiens
  Table A; Target 82439; HLA-C*05:01; STRA8; ENSG00000146857; CTA
ASFPVDEEM

SEQ ID NO: 82440 - protein, 9 aa, Homo sapiens
  Table A; Target 82440; HLA-C*07:06; STRA8; ENSG00000146857; CTA
ASFPVDEEM

SEQ ID NO: 82441 - protein, 9 aa, Homo sapiens
  Table A; Target 82441; HLA-C*12:03; STRA8; ENSG00000146857; CTA
ASFPVDEEM

SEQ ID NO: 82442 - protein, 9 aa, Homo sapiens
  Table A; Target 82442; HLA-C*16:01; STRA8; ENSG00000146857; CTA
ASFPVDEEM

SEQ ID NO: 82443 - protein, 9 aa, Homo sapiens
  Table A; Target 82443; HLA-C*16:02; STRA8; ENSG00000146857; CTA
ASFPVDEEM

SEQ ID NO: 82444 - protein, 9 aa, Homo sapiens
  Table A; Target 82444; HLA-C*16:04; STRA8; ENSG00000146857; CTA
ASFPVDEEM

SEQ ID NO: 82445 - protein, 9 aa, Homo sapiens
  Table A; Target 82445; HLA-A*03:01; STRA8; ENSG00000146857; CTA
ASKWQVLNK

SEQ ID NO: 82446 - protein, 9 aa, Homo sapiens
  Table A; Target 82446; HLA-A*03:02; STRA8; ENSG00000146857; CTA
ASKWQVLNK

SEQ ID NO: 82447 - protein, 9 aa, Homo sapiens
  Table A; Target 82447; HLA-A*11:01; STRA8; ENSG00000146857; CTA
ASKWQVLNK

SEQ ID NO: 82448 - protein, 9 aa, Homo sapiens
  Table A; Target 82448; HLA-A*31:01; STRA8; ENSG00000146857; CTA
ASKWQVLNK

SEQ ID NO: 82449 - protein, 10 aa, Homo sapiens
  Table A; Target 82449; HLA-A*03:01; STRA8; ENSG00000146857; CTA
ASLRQAWAQK

SEQ ID NO: 82450 - protein, 10 aa, Homo sapiens
  Table A; Target 82450; HLA-A*11:01; STRA8; ENSG00000146857; CTA
ASLRQAWAQK

SEQ ID NO: 82451 - protein, 10 aa, Homo sapiens
  Table A; Target 82451; HLA-B*58:01; STRA8; ENSG00000146857; CTA
ASMYSGNDSF

SEQ ID NO: 82452 - protein, 10 aa, Homo sapiens
  Table A; Target 82452; HLA-C*16:04; STRA8; ENSG00000146857; CTA
ASMYSGNDSF

SEQ ID NO: 82453 - protein, 9 aa, Homo sapiens
  Table A; Target 82453; HLA-A*11:01; STRA8; ENSG00000146857; CTA
ASSLEEVKK

SEQ ID NO: 82454 - protein, 11 aa, Homo sapiens
  Table A; Target 82454; HLA-A*01:01; STRA8; ENSG00000146857; CTA
ASSLEEVKKEY

SEQ ID NO: 82455 - protein, 11 aa, Homo sapiens
  Table A; Target 82455; HLA-A*30:02; STRA8; ENSG00000146857; CTA
ASSLEEVKKEY

SEQ ID NO: 82456 - protein, 11 aa, Homo sapiens
  Table A; Target 82456; HLA-A*32:01; STRA8; ENSG00000146857; CTA
ASSLEEVKKEY

SEQ ID NO: 82457 - protein, 11 aa, Homo sapiens
  Table A; Target 82457; HLA-B*57:01; STRA8; ENSG00000146857; CTA
ASSLEEVKKEY

SEQ ID NO: 82458 - protein, 11 aa, Homo sapiens
  Table A; Target 82458; HLA-B*58:01; STRA8; ENSG00000146857; CTA
ASSLEEVKKEY

SEQ ID NO: 82459 - protein, 11 aa, Homo sapiens
  Table A; Target 82459; HLA-C*12:03; STRA8; ENSG00000146857; CTA
ASSLEEVKKEY

SEQ ID NO: 82460 - protein, 11 aa, Homo sapiens
  Table A; Target 82460; HLA-C*16:02; STRA8; ENSG00000146857; CTA
ASSLEEVKKEY

SEQ ID NO: 82461 - protein, 11 aa, Homo sapiens
  Table A; Target 82461; HLA-C*16:04; STRA8; ENSG00000146857; CTA
ASSLEEVKKEY

SEQ ID NO: 82462 - protein, 9 aa, Homo sapiens
  Table A; Target 82462; HLA-A*31:01; STRA8; ENSG00000146857; CTA
ATLAALFNN

SEQ ID NO: 82463 - protein, 10 aa, Homo sapiens
  Table A; Target 82463; HLA-A*03:01; STRA8; ENSG00000146857; CTA
ATLAALFNNL

SEQ ID NO: 82464 - protein, 10 aa, Homo sapiens
  Table A; Target 82464; HLA-A*03:02; STRA8; ENSG00000146857; CTA
ATLAALFNNL

SEQ ID NO: 82465 - protein, 10 aa, Homo sapiens
  Table A; Target 82465; HLA-A*11:01; STRA8; ENSG00000146857; CTA
ATLAALFNNL

SEQ ID NO: 82466 - protein, 10 aa, Homo sapiens
  Table A; Target 82466; HLA-A*31:01; STRA8; ENSG00000146857; CTA
ATLAALFNNL

SEQ ID NO: 82467 - protein, 10 aa, Homo sapiens
  Table A; Target 82467; HLA-C*06:02; STRA8; ENSG00000146857; CTA
ATLAALFNNL

SEQ ID NO: 82468 - protein, 11 aa, Homo sapiens
  Table A; Target 82468; HLA-A*11:01; STRA8; ENSG00000146857; CTA
ATLAALFNNLR

SEQ ID NO: 82469 - protein, 11 aa, Homo sapiens
  Table A; Target 82469; HLA-A*31:01; STRA8; ENSG00000146857; CTA
ATLAALFNNLR

SEQ ID NO: 82470 - protein, 10 aa, Homo sapiens
  Table A; Target 82470; HLA-A*11:01; STRA8; ENSG00000146857; CTA
ATPEENSNPH

SEQ ID NO: 82471 - protein, 9 aa, Homo sapiens
  Table A; Target 82471; HLA-A*02:07; STRA8; ENSG00000146857; CTA
ATPQLPAQL

SEQ ID NO: 82472 - protein, 9 aa, Homo sapiens
  Table A; Target 82472; HLA-A*24:02; STRA8; ENSG00000146857; CTA
ATPQLPAQL

SEQ ID NO: 82473 - protein, 9 aa, Homo sapiens
  Table A; Target 82473; HLA-A*26:01; STRA8; ENSG00000146857; CTA
ATPQLPAQL

SEQ ID NO: 82474 - protein, 9 aa, Homo sapiens
  Table A; Target 82474; HLA-A*31:01; STRA8; ENSG00000146857; CTA
ATPQLPAQL

SEQ ID NO: 82475 - protein, 9 aa, Homo sapiens
  Table A; Target 82475; HLA-A*32:01; STRA8; ENSG00000146857; CTA
ATPQLPAQL

SEQ ID NO: 82476 - protein, 9 aa, Homo sapiens
  Table A; Target 82476; HLA-A*68:02; STRA8; ENSG00000146857; CTA
ATPQLPAQL

SEQ ID NO: 82477 - protein, 9 aa, Homo sapiens
  Table A; Target 82477; HLA-B*39:01; STRA8; ENSG00000146857; CTA
ATPQLPAQL

SEQ ID NO: 82478 - protein, 9 aa, Homo sapiens
  Table A; Target 82478; HLA-C*01:02; STRA8; ENSG00000146857; CTA
ATPQLPAQL

SEQ ID NO: 82479 - protein, 8 aa, Homo sapiens
  Table A; Target 82479; HLA-A*25:01; STRA8; ENSG00000146857; CTA
DAFDVASF

SEQ ID NO: 82480 - protein, 8 aa, Homo sapiens
  Table A; Target 82480; HLA-A*26:01; STRA8; ENSG00000146857; CTA
DAFDVASF

SEQ ID NO: 82481 - protein, 8 aa, Homo sapiens
  Table A; Target 82481; HLA-A*33:01; STRA8; ENSG00000146857; CTA
DAFDVASF

SEQ ID NO: 82482 - protein, 8 aa, Homo sapiens
  Table A; Target 82482; HLA-A*33:03; STRA8; ENSG00000146857; CTA
DAFDVASF

SEQ ID NO: 82483 - protein, 8 aa, Homo sapiens
  Table A; Target 82483; HLA-A*68:01; STRA8; ENSG00000146857; CTA
DAFDVASF

SEQ ID NO: 82484 - protein, 8 aa, Homo sapiens
  Table A; Target 82484; HLA-B*18:01; STRA8; ENSG00000146857; CTA
DAFDVASF

SEQ ID NO: 82485 - protein, 8 aa, Homo sapiens
  Table A; Target 82485; HLA-B*35:01; STRA8; ENSG00000146857; CTA
DAFDVASF

SEQ ID NO: 82486 - protein, 8 aa, Homo sapiens
  Table A; Target 82486; HLA-B*35:03; STRA8; ENSG00000146857; CTA
DAFDVASF

SEQ ID NO: 82487 - protein, 8 aa, Homo sapiens
  Table A; Target 82487; HLA-B*46:01; STRA8; ENSG00000146857; CTA
DAFDVASF

SEQ ID NO: 82488 - protein, 8 aa, Homo sapiens
  Table A; Target 82488; HLA-B*51:01; STRA8; ENSG00000146857; CTA
DAFDVASF

SEQ ID NO: 82489 - protein, 8 aa, Homo sapiens
  Table A; Target 82489; HLA-C*07:06; STRA8; ENSG00000146857; CTA
DAFDVASF

SEQ ID NO: 82490 - protein, 8 aa, Homo sapiens
  Table A; Target 82490; HLA-C*12:03; STRA8; ENSG00000146857; CTA
DAFDVASF

SEQ ID NO: 82491 - protein, 8 aa, Homo sapiens
  Table A; Target 82491; HLA-C*16:04; STRA8; ENSG00000146857; CTA
DAFDVASF

SEQ ID NO: 82492 - protein, 9 aa, Homo sapiens
  Table A; Target 82492; HLA-A*23:01; STRA8; ENSG00000146857; CTA
DAFDVASFL

SEQ ID NO: 82493 - protein, 9 aa, Homo sapiens
  Table A; Target 82493; HLA-A*25:01; STRA8; ENSG00000146857; CTA
DAFDVASFL

SEQ ID NO: 82494 - protein, 9 aa, Homo sapiens
  Table A; Target 82494; HLA-A*26:01; STRA8; ENSG00000146857; CTA
DAFDVASFL

SEQ ID NO: 82495 - protein, 9 aa, Homo sapiens
  Table A; Target 82495; HLA-A*33:01; STRA8; ENSG00000146857; CTA
DAFDVASFL

SEQ ID NO: 82496 - protein, 9 aa, Homo sapiens
  Table A; Target 82496; HLA-A*33:03; STRA8; ENSG00000146857; CTA
DAFDVASFL

SEQ ID NO: 82497 - protein, 9 aa, Homo sapiens
  Table A; Target 82497; HLA-A*68:01; STRA8; ENSG00000146857; CTA
DAFDVASFL

SEQ ID NO: 82498 - protein, 9 aa, Homo sapiens
  Table A; Target 82498; HLA-B*18:01; STRA8; ENSG00000146857; CTA
DAFDVASFL

SEQ ID NO: 82499 - protein, 9 aa, Homo sapiens
  Table A; Target 82499; HLA-B*27:05; STRA8; ENSG00000146857; CTA
DAFDVASFL

SEQ ID NO: 82500 - protein, 9 aa, Homo sapiens
  Table A; Target 82500; HLA-B*35:01; STRA8; ENSG00000146857; CTA
DAFDVASFL

SEQ ID NO: 82501 - protein, 9 aa, Homo sapiens
  Table A; Target 82501; HLA-B*35:03; STRA8; ENSG00000146857; CTA
DAFDVASFL

SEQ ID NO: 82502 - protein, 9 aa, Homo sapiens
  Table A; Target 82502; HLA-B*38:01; STRA8; ENSG00000146857; CTA
DAFDVASFL

SEQ ID NO: 82503 - protein, 9 aa, Homo sapiens
  Table A; Target 82503; HLA-B*39:01; STRA8; ENSG00000146857; CTA
DAFDVASFL

SEQ ID NO: 82504 - protein, 9 aa, Homo sapiens
  Table A; Target 82504; HLA-B*54:01; STRA8; ENSG00000146857; CTA
DAFDVASFL

SEQ ID NO: 82505 - protein, 9 aa, Homo sapiens
  Table A; Target 82505; HLA-C*01:02; STRA8; ENSG00000146857; CTA
DAFDVASFL

SEQ ID NO: 82506 - protein, 9 aa, Homo sapiens
  Table A; Target 82506; HLA-C*02:02; STRA8; ENSG00000146857; CTA
DAFDVASFL

SEQ ID NO: 82507 - protein, 9 aa, Homo sapiens
  Table A; Target 82507; HLA-C*03:03; STRA8; ENSG00000146857; CTA
DAFDVASFL

SEQ ID NO: 82508 - protein, 9 aa, Homo sapiens
  Table A; Target 82508; HLA-C*03:04; STRA8; ENSG00000146857; CTA
DAFDVASFL

SEQ ID NO: 82509 - protein, 9 aa, Homo sapiens
  Table A; Target 82509; HLA-C*05:01; STRA8; ENSG00000146857; CTA
DAFDVASFL

SEQ ID NO: 82510 - protein, 9 aa, Homo sapiens
  Table A; Target 82510; HLA-C*07:06; STRA8; ENSG00000146857; CTA
DAFDVASFL

SEQ ID NO: 82511 - protein, 9 aa, Homo sapiens
  Table A; Target 82511; HLA-C*12:03; STRA8; ENSG00000146857; CTA
DAFDVASFL

SEQ ID NO: 82512 - protein, 9 aa, Homo sapiens
  Table A; Target 82512; HLA-C*16:04; STRA8; ENSG00000146857; CTA
DAFDVASFL

SEQ ID NO: 82513 - protein, 11 aa, Homo sapiens
  Table A; Target 82513; HLA-A*11:01; STRA8; ENSG00000146857; CTA
DAFDVASFLDK

SEQ ID NO: 82514 - protein, 11 aa, Homo sapiens
  Table A; Target 82514; HLA-A*33:01; STRA8; ENSG00000146857; CTA
DAFDVASFLDK

SEQ ID NO: 82515 - protein, 11 aa, Homo sapiens
  Table A; Target 82515; HLA-A*68:01; STRA8; ENSG00000146857; CTA
DAFDVASFLDK

SEQ ID NO: 82516 - protein, 11 aa, Homo sapiens
  Table A; Target 82516; HLA-A*68:02; STRA8; ENSG00000146857; CTA
DAFDVASFLDK

SEQ ID NO: 82517 - protein, 11 aa, Homo sapiens
  Table A; Target 82517; HLA-B*27:02; STRA8; ENSG00000146857; CTA
DAFDVASFLDK

SEQ ID NO: 82518 - protein, 9 aa, Homo sapiens
  Table A; Target 82518; HLA-B*18:01; STRA8; ENSG00000146857; CTA
DEEMIMLQC

SEQ ID NO: 82519 - protein, 9 aa, Homo sapiens
  Table A; Target 82519; HLA-A*68:02; STRA8; ENSG00000146857; CTA
DLIASKWQV

SEQ ID NO: 82520 - protein, 9 aa, Homo sapiens
  Table A; Target 82520; HLA-B*08:01; STRA8; ENSG00000146857; CTA
DLIASKWQV

SEQ ID NO: 82521 - protein, 10 aa, Homo sapiens
  Table A; Target 82521; HLA-B*08:01; STRA8; ENSG00000146857; CTA
DLIASKWQVL

SEQ ID NO: 82522 - protein, 11 aa, Homo sapiens
  Table A; Target 82522; HLA-A*33:01; STRA8; ENSG00000146857; CTA
DLLTGSGIITP

SEQ ID NO: 82523 - protein, 8 aa, Homo sapiens
  Table A; Target 82523; HLA-B*08:01; STRA8; ENSG00000146857; CTA
DNLLKLKA

SEQ ID NO: 82524 - protein, 10 aa, Homo sapiens
  Table A; Target 82524; HLA-A*33:01; STRA8; ENSG00000146857; CTA
DNLLKLKASF

SEQ ID NO: 82525 - protein, 11 aa, Homo sapiens
  Table A; Target 82525; HLA-B*38:01; STRA8; ENSG00000146857; CTA
DRATPQLPAQL

SEQ ID NO: 82526 - protein, 11 aa, Homo sapiens
  Table A; Target 82526; HLA-B*39:01; STRA8; ENSG00000146857; CTA
DRATPQLPAQL

SEQ ID NO: 82527 - protein, 11 aa, Homo sapiens
  Table A; Target 82527; HLA-A*01:01; STRA8; ENSG00000146857; CTA
DSFPQNGSSPW

SEQ ID NO: 82528 - protein, 11 aa, Homo sapiens
  Table A; Target 82528; HLA-A*25:01; STRA8; ENSG00000146857; CTA
DSFPQNGSSPW

SEQ ID NO: 82529 - protein, 11 aa, Homo sapiens
  Table A; Target 82529; HLA-A*26:01; STRA8; ENSG00000146857; CTA
DSFPQNGSSPW

SEQ ID NO: 82530 - protein, 11 aa, Homo sapiens
  Table A; Target 82530; HLA-A*33:01; STRA8; ENSG00000146857; CTA
DSFPQNGSSPW

SEQ ID NO: 82531 - protein, 11 aa, Homo sapiens
  Table A; Target 82531; HLA-A*33:03; STRA8; ENSG00000146857; CTA
DSFPQNGSSPW

SEQ ID NO: 82532 - protein, 11 aa, Homo sapiens
  Table A; Target 82532; HLA-A*68:01; STRA8; ENSG00000146857; CTA
DSFPQNGSSPW

SEQ ID NO: 82533 - protein, 11 aa, Homo sapiens
  Table A; Target 82533; HLA-B*18:01; STRA8; ENSG00000146857; CTA
DSFPQNGSSPW

SEQ ID NO: 82534 - protein, 11 aa, Homo sapiens
  Table A; Target 82534; HLA-B*57:01; STRA8; ENSG00000146857; CTA
DSFPQNGSSPW

SEQ ID NO: 82535 - protein, 11 aa, Homo sapiens
  Table A; Target 82535; HLA-B*58:01; STRA8; ENSG00000146857; CTA
DSFPQNGSSPW

SEQ ID NO: 82536 - protein, 11 aa, Homo sapiens
  Table A; Target 82536; HLA-C*04:01; STRA8; ENSG00000146857; CTA
DSFPQNGSSPW

SEQ ID NO: 82537 - protein, 11 aa, Homo sapiens
  Table A; Target 82537; HLA-C*07:01; STRA8; ENSG00000146857; CTA
DSFPQNGSSPW

SEQ ID NO: 82538 - protein, 8 aa, Homo sapiens
  Table A; Target 82538; HLA-A*33:01; STRA8; ENSG00000146857; CTA
DVASFLDK

SEQ ID NO: 82539 - protein, 8 aa, Homo sapiens
  Table A; Target 82539; HLA-A*68:01; STRA8; ENSG00000146857; CTA
DVASFLDK

SEQ ID NO: 82540 - protein, 8 aa, Homo sapiens
  Table A; Target 82540; HLA-B*27:02; STRA8; ENSG00000146857; CTA
DVASFLDK

SEQ ID NO: 82541 - protein, 9 aa, Homo sapiens
  Table A; Target 82541; HLA-A*33:01; STRA8; ENSG00000146857; CTA
DVASFLDKS

SEQ ID NO: 82542 - protein, 11 aa, Homo sapiens
  Table A; Target 82542; HLA-A*26:01; STRA8; ENSG00000146857; CTA
DVASFLDKSEV

SEQ ID NO: 82543 - protein, 11 aa, Homo sapiens
  Table A; Target 82543; HLA-A*68:02; STRA8; ENSG00000146857; CTA
DVASFLDKSEV

SEQ ID NO: 82544 - protein, 8 aa, Homo sapiens
  Table A; Target 82544; HLA-A*01:01; STRA8; ENSG00000146857; CTA
DVDKILFF

SEQ ID NO: 82545 - protein, 9 aa, Homo sapiens
  Table A; Target 82545; HLA-A*25:01; STRA8; ENSG00000146857; CTA
EAALPIVSA

SEQ ID NO: 82546 - protein, 9 aa, Homo sapiens
  Table A; Target 82546; HLA-A*26:01; STRA8; ENSG00000146857; CTA
EAALPIVSA

SEQ ID NO: 82547 - protein, 9 aa, Homo sapiens
  Table A; Target 82547; HLA-A*33:01; STRA8; ENSG00000146857; CTA
EAALPIVSA

SEQ ID NO: 82548 - protein, 9 aa, Homo sapiens
  Table A; Target 82548; HLA-A*33:03; STRA8; ENSG00000146857; CTA
EAALPIVSA

SEQ ID NO: 82549 - protein, 9 aa, Homo sapiens
  Table A; Target 82549; HLA-A*68:01; STRA8; ENSG00000146857; CTA
EAALPIVSA

SEQ ID NO: 82550 - protein, 9 aa, Homo sapiens
  Table A; Target 82550; HLA-A*68:02; STRA8; ENSG00000146857; CTA
EAALPIVSA

SEQ ID NO: 82551 - protein, 9 aa, Homo sapiens
  Table A; Target 82551; HLA-B*27:05; STRA8; ENSG00000146857; CTA
EAALPIVSA

SEQ ID NO: 82552 - protein, 9 aa, Homo sapiens
  Table A; Target 82552; HLA-B*35:01; STRA8; ENSG00000146857; CTA
EAALPIVSA

SEQ ID NO: 82553 - protein, 9 aa, Homo sapiens
  Table A; Target 82553; HLA-B*35:03; STRA8; ENSG00000146857; CTA
EAALPIVSA

SEQ ID NO: 82554 - protein, 9 aa, Homo sapiens
  Table A; Target 82554; HLA-B*39:01; STRA8; ENSG00000146857; CTA
EAALPIVSA

SEQ ID NO: 82555 - protein, 9 aa, Homo sapiens
  Table A; Target 82555; HLA-B*51:01; STRA8; ENSG00000146857; CTA
EAALPIVSA

SEQ ID NO: 82556 - protein, 9 aa, Homo sapiens
  Table A; Target 82556; HLA-B*54:01; STRA8; ENSG00000146857; CTA
EAALPIVSA

SEQ ID NO: 82557 - protein, 9 aa, Homo sapiens
  Table A; Target 82557; HLA-B*55:01; STRA8; ENSG00000146857; CTA
EAALPIVSA

SEQ ID NO: 82558 - protein, 9 aa, Homo sapiens
  Table A; Target 82558; HLA-B*56:01; STRA8; ENSG00000146857; CTA
EAALPIVSA

SEQ ID NO: 82559 - protein, 9 aa, Homo sapiens
  Table A; Target 82559; HLA-C*02:02; STRA8; ENSG00000146857; CTA
EAALPIVSA

SEQ ID NO: 82560 - protein, 9 aa, Homo sapiens
  Table A; Target 82560; HLA-C*03:03; STRA8; ENSG00000146857; CTA
EAALPIVSA

SEQ ID NO: 82561 - protein, 9 aa, Homo sapiens
  Table A; Target 82561; HLA-C*03:04; STRA8; ENSG00000146857; CTA
EAALPIVSA

SEQ ID NO: 82562 - protein, 9 aa, Homo sapiens
  Table A; Target 82562; HLA-C*07:06; STRA8; ENSG00000146857; CTA
EAALPIVSA

SEQ ID NO: 82563 - protein, 9 aa, Homo sapiens
  Table A; Target 82563; HLA-C*12:03; STRA8; ENSG00000146857; CTA
EAALPIVSA

SEQ ID NO: 82564 - protein, 10 aa, Homo sapiens
  Table A; Target 82564; HLA-B*54:01; STRA8; ENSG00000146857; CTA
EAALPIVSAA

SEQ ID NO: 82565 - protein, 11 aa, Homo sapiens
  Table A; Target 82565; HLA-A*25:01; STRA8; ENSG00000146857; CTA
EAALPIVSAAI

SEQ ID NO: 82566 - protein, 10 aa, Homo sapiens
  Table A; Target 82566; HLA-A*68:01; STRA8; ENSG00000146857; CTA
EASFPVDEEM

SEQ ID NO: 82567 - protein, 10 aa, Homo sapiens
  Table A; Target 82567; HLA-B*35:01; STRA8; ENSG00000146857; CTA
EASFPVDEEM

SEQ ID NO: 82568 - protein, 10 aa, Homo sapiens
  Table A; Target 82568; HLA-B*35:03; STRA8; ENSG00000146857; CTA
EASFPVDEEM

SEQ ID NO: 82569 - protein, 10 aa, Homo sapiens
  Table A; Target 82569; HLA-C*07:06; STRA8; ENSG00000146857; CTA
EASFPVDEEM

SEQ ID NO: 82570 - protein, 11 aa, Homo sapiens
  Table A; Target 82570; HLA-A*68:02; STRA8; ENSG00000146857; CTA
EASFPVDEEMI

SEQ ID NO: 82571 - protein, 9 aa, Homo sapiens
  Table A; Target 82571; HLA-A*25:01; STRA8; ENSG00000146857; CTA
EDAFDVASF

SEQ ID NO: 82572 - protein, 9 aa, Homo sapiens
  Table A; Target 82572; HLA-A*26:01; STRA8; ENSG00000146857; CTA
EDAFDVASF

SEQ ID NO: 82573 - protein, 9 aa, Homo sapiens
  Table A; Target 82573; HLA-B*18:01; STRA8; ENSG00000146857; CTA
EDAFDVASF

SEQ ID NO: 82574 - protein, 9 aa, Homo sapiens
  Table A; Target 82574; HLA-B*44:02; STRA8; ENSG00000146857; CTA
EDAFDVASF

SEQ ID NO: 82575 - protein, 9 aa, Homo sapiens
  Table A; Target 82575; HLA-B*44:03; STRA8; ENSG00000146857; CTA
EDAFDVASF

SEQ ID NO: 82576 - protein, 10 aa, Homo sapiens
  Table A; Target 82576; HLA-A*68:02; STRA8; ENSG00000146857; CTA
EDAFDVASFL

SEQ ID NO: 82577 - protein, 8 aa, Homo sapiens
  Table A; Target 82577; HLA-C*07:01; STRA8; ENSG00000146857; CTA
EDGHASSL

SEQ ID NO: 82578 - protein, 8 aa, Homo sapiens
  Table A; Target 82578; HLA-B*18:01; STRA8; ENSG00000146857; CTA
EEILFEDA

SEQ ID NO: 82579 - protein, 9 aa, Homo sapiens
  Table A; Target 82579; HLA-B*27:02; STRA8; ENSG00000146857; CTA
EEILFEDAF

SEQ ID NO: 82580 - protein, 9 aa, Homo sapiens
  Table A; Target 82580; HLA-B*40:01; STRA8; ENSG00000146857; CTA
EEILFEDAF

SEQ ID NO: 82581 - protein, 9 aa, Homo sapiens
  Table A; Target 82581; HLA-B*44:02; STRA8; ENSG00000146857; CTA
EEILFEDAF

SEQ ID NO: 82582 - protein, 9 aa, Homo sapiens
  Table A; Target 82582; HLA-B*44:03; STRA8; ENSG00000146857; CTA
EEILFEDAF

SEQ ID NO: 82583 - protein, 9 aa, Homo sapiens
  Table A; Target 82583; HLA-C*16:04; STRA8; ENSG00000146857; CTA
EEILFEDAF

SEQ ID NO: 82584 - protein, 8 aa, Homo sapiens
  Table A; Target 82584; HLA-B*18:01; STRA8; ENSG00000146857; CTA
EEMIMLQC

SEQ ID NO: 82585 - protein, 8 aa, Homo sapiens
  Table A; Target 82585; HLA-B*49:01; STRA8; ENSG00000146857; CTA
EEMIMLQC

SEQ ID NO: 82586 - protein, 9 aa, Homo sapiens
  Table A; Target 82586; HLA-A*33:01; STRA8; ENSG00000146857; CTA
EENSNPHDR

SEQ ID NO: 82587 - protein, 9 aa, Homo sapiens
  Table A; Target 82587; HLA-A*33:03; STRA8; ENSG00000146857; CTA
EENSNPHDR

SEQ ID NO: 82588 - protein, 10 aa, Homo sapiens
  Table A; Target 82588; HLA-A*30:01; STRA8; ENSG00000146857; CTA
EEVKKEYASM

SEQ ID NO: 82589 - protein, 10 aa, Homo sapiens
  Table A; Target 82589; HLA-B*40:01; STRA8; ENSG00000146857; CTA
EEVKKEYASM

SEQ ID NO: 82590 - protein, 10 aa, Homo sapiens
  Table A; Target 82590; HLA-B*40:02; STRA8; ENSG00000146857; CTA
EEVKKEYASM

SEQ ID NO: 82591 - protein, 10 aa, Homo sapiens
  Table A; Target 82591; HLA-B*44:02; STRA8; ENSG00000146857; CTA
EEVKKEYASM

SEQ ID NO: 82592 - protein, 10 aa, Homo sapiens
  Table A; Target 82592; HLA-B*44:03; STRA8; ENSG00000146857; CTA
EEVKKEYASM

SEQ ID NO: 82593 - protein, 11 aa, Homo sapiens
  Table A; Target 82593; HLA-B*44:02; STRA8; ENSG00000146857; CTA
EEVKKEYASMY

SEQ ID NO: 82594 - protein, 11 aa, Homo sapiens
  Table A; Target 82594; HLA-B*44:03; STRA8; ENSG00000146857; CTA
EEVKKEYASMY

SEQ ID NO: 82595 - protein, 11 aa, Homo sapiens
  Table A; Target 82595; HLA-C*07:01; STRA8; ENSG00000146857; CTA
EEVKKEYASMY

SEQ ID NO: 82596 - protein, 9 aa, Homo sapiens
  Table A; Target 82596; HLA-A*33:03; STRA8; ENSG00000146857; CTA
ELEHRVARR

SEQ ID NO: 82597 - protein, 10 aa, Homo sapiens
  Table A; Target 82597; HLA-A*26:01; STRA8; ENSG00000146857; CTA
ENPEEKFQLY

SEQ ID NO: 82598 - protein, 10 aa, Homo sapiens
  Table A; Target 82598; HLA-A*68:01; STRA8; ENSG00000146857; CTA
EPACAEGSVK

SEQ ID NO: 82599 - protein, 8 aa, Homo sapiens
  Table A; Target 82599; HLA-B*38:01; STRA8; ENSG00000146857; CTA
EQTLDNLL

SEQ ID NO: 82600 - protein, 8 aa, Homo sapiens
  Table A; Target 82600; HLA-B*39:01; STRA8; ENSG00000146857; CTA
EQTLDNLL

SEQ ID NO: 82601 - protein, 9 aa, Homo sapiens
  Table A; Target 82601; HLA-A*25:01; STRA8; ENSG00000146857; CTA
EVKKEYASM

SEQ ID NO: 82602 - protein, 9 aa, Homo sapiens
  Table A; Target 82602; HLA-A*33:01; STRA8; ENSG00000146857; CTA
EVKKEYASM

SEQ ID NO: 82603 - protein, 9 aa, Homo sapiens
  Table A; Target 82603; HLA-A*33:03; STRA8; ENSG00000146857; CTA
EVKKEYASM

SEQ ID NO: 82604 - protein, 9 aa, Homo sapiens
  Table A; Target 82604; HLA-B*08:01; STRA8; ENSG00000146857; CTA
EVKKEYASM

SEQ ID NO: 82605 - protein, 10 aa, Homo sapiens
  Table A; Target 82605; HLA-A*25:01; STRA8; ENSG00000146857; CTA
EVKKEYASMY

SEQ ID NO: 82606 - protein, 10 aa, Homo sapiens
  Table A; Target 82606; HLA-A*26:01; STRA8; ENSG00000146857; CTA
EVKKEYASMY

SEQ ID NO: 82607 - protein, 10 aa, Homo sapiens
  Table A; Target 82607; HLA-A*30:02; STRA8; ENSG00000146857; CTA
EVKKEYASMY

SEQ ID NO: 82608 - protein, 9 aa, Homo sapiens
  Table A; Target 82608; HLA-A*26:01; STRA8; ENSG00000146857; CTA
EVPSTSSSS

SEQ ID NO: 82609 - protein, 10 aa, Homo sapiens
  Table A; Target 82609; HLA-A*26:01; STRA8; ENSG00000146857; CTA
EVPSTSSSSS

SEQ ID NO: 82610 - protein, 11 aa, Homo sapiens
  Table A; Target 82610; HLA-A*25:01; STRA8; ENSG00000146857; CTA
EVPSTSSSSSV

SEQ ID NO: 82611 - protein, 11 aa, Homo sapiens
  Table A; Target 82611; HLA-A*26:01; STRA8; ENSG00000146857; CTA
EVPSTSSSSSV

SEQ ID NO: 82612 - protein, 11 aa, Homo sapiens
  Table A; Target 82612; HLA-C*01:02; STRA8; ENSG00000146857; CTA
EVPSTSSSSSV

SEQ ID NO: 82613 - protein, 8 aa, Homo sapiens
  Table A; Target 82613; HLA-C*07:01; STRA8; ENSG00000146857; CTA
EYASMYSG

SEQ ID NO: 82614 - protein, 9 aa, Homo sapiens
  Table A; Target 82614; HLA-B*27:02; STRA8; ENSG00000146857; CTA
FDVASFLDK

SEQ ID NO: 82615 - protein, 9 aa, Homo sapiens
  Table A; Target 82615; HLA-C*07:01; STRA8; ENSG00000146857; CTA
FDVASFLDK

SEQ ID NO: 82616 - protein, 8 aa, Homo sapiens
  Table A; Target 82616; HLA-B*18:01; STRA8; ENSG00000146857; CTA
FEDAFDVA

SEQ ID NO: 82617 - protein, 8 aa, Homo sapiens
  Table A; Target 82617; HLA-B*49:01; STRA8; ENSG00000146857; CTA
FEDAFDVA

SEQ ID NO: 82618 - protein, 10 aa, Homo sapiens
  Table A; Target 82618; HLA-B*18:01; STRA8; ENSG00000146857; CTA
FEDAFDVASF

SEQ ID NO: 82619 - protein, 10 aa, Homo sapiens
  Table A; Target 82619; HLA-B*37:01; STRA8; ENSG00000146857; CTA
FEDAFDVASF

SEQ ID NO: 82620 - protein, 10 aa, Homo sapiens
  Table A; Target 82620; HLA-B*38:01; STRA8; ENSG00000146857; CTA
FEDAFDVASF

SEQ ID NO: 82621 - protein, 10 aa, Homo sapiens
  Table A; Target 82621; HLA-B*40:01; STRA8; ENSG00000146857; CTA
FEDAFDVASF

SEQ ID NO: 82622 - protein, 10 aa, Homo sapiens
  Table A; Target 82622; HLA-B*49:01; STRA8; ENSG00000146857; CTA
FEDAFDVASF

SEQ ID NO: 82623 - protein, 9 aa, Homo sapiens
  Table A; Target 82623; HLA-B*57:01; STRA8; ENSG00000146857; CTA
FFNQEIRLW

SEQ ID NO: 82624 - protein, 10 aa, Homo sapiens
  Table A; Target 82624; HLA-A*02:01; STRA8; ENSG00000146857; CTA
FLDKSEVPST

SEQ ID NO: 82625 - protein, 10 aa, Homo sapiens
  Table A; Target 82625; HLA-A*02:07; STRA8; ENSG00000146857; CTA
FLDKSEVPST

SEQ ID NO: 82626 - protein, 11 aa, Homo sapiens
  Table A; Target 82626; HLA-C*03:03; STRA8; ENSG00000146857; CTA
FNLEDGHASSL

SEQ ID NO: 82627 - protein, 11 aa, Homo sapiens
  Table A; Target 82627; HLA-C*03:04; STRA8; ENSG00000146857; CTA
FNLEDGHASSL

SEQ ID NO: 82628 - protein, 11 aa, Homo sapiens
  Table A; Target 82628; HLA-C*14:02; STRA8; ENSG00000146857; CTA
FNLEDGHASSL

SEQ ID NO: 82629 - protein, 9 aa, Homo sapiens
  Table A; Target 82629; HLA-B*08:01; STRA8; ENSG00000146857; CTA
FNNLRKTVY

SEQ ID NO: 82630 - protein, 9 aa, Homo sapiens
  Table A; Target 82630; HLA-B*46:01; STRA8; ENSG00000146857; CTA
FNNLRKTVY

SEQ ID NO: 82631 - protein, 9 aa, Homo sapiens
  Table A; Target 82631; HLA-C*16:01; STRA8; ENSG00000146857; CTA
FNNLRKTVY

SEQ ID NO: 82632 - protein, 10 aa, Homo sapiens
  Table A; Target 82632; HLA-A*02:04; STRA8; ENSG00000146857; CTA
FNQEIRLWQL

SEQ ID NO: 82633 - protein, 9 aa, Homo sapiens
  Table A; Target 82633; HLA-A*25:01; STRA8; ENSG00000146857; CTA
FPQNGSSPW

SEQ ID NO: 82634 - protein, 9 aa, Homo sapiens
  Table A; Target 82634; HLA-A*33:03; STRA8; ENSG00000146857; CTA
FPQNGSSPW

SEQ ID NO: 82635 - protein, 9 aa, Homo sapiens
  Table A; Target 82635; HLA-B*35:01; STRA8; ENSG00000146857; CTA
FPQNGSSPW

SEQ ID NO: 82636 - protein, 9 aa, Homo sapiens
  Table A; Target 82636; HLA-B*35:03; STRA8; ENSG00000146857; CTA
FPQNGSSPW

SEQ ID NO: 82637 - protein, 9 aa, Homo sapiens
  Table A; Target 82637; HLA-C*03:04; STRA8; ENSG00000146857; CTA
FPQNGSSPW

SEQ ID NO: 82638 - protein, 10 aa, Homo sapiens
  Table A; Target 82638; HLA-A*30:02; STRA8; ENSG00000146857; CTA
FPQNGSSPWY

SEQ ID NO: 82639 - protein, 11 aa, Homo sapiens
  Table A; Target 82639; HLA-B*35:03; STRA8; ENSG00000146857; CTA
FPQNGSSPWYL

SEQ ID NO: 82640 - protein, 8 aa, Homo sapiens
  Table A; Target 82640; HLA-B*35:03; STRA8; ENSG00000146857; CTA
FPVDEEMI

SEQ ID NO: 82641 - protein, 8 aa, Homo sapiens
  Table A; Target 82641; HLA-B*51:01; STRA8; ENSG00000146857; CTA
FPVDEEMI

SEQ ID NO: 82642 - protein, 9 aa, Homo sapiens
  Table A; Target 82642; HLA-B*35:01; STRA8; ENSG00000146857; CTA
FPVDEEMIM

SEQ ID NO: 82643 - protein, 9 aa, Homo sapiens
  Table A; Target 82643; HLA-B*54:01; STRA8; ENSG00000146857; CTA
FPVDEEMIM

SEQ ID NO: 82644 - protein, 9 aa, Homo sapiens
  Table A; Target 82644; HLA-C*03:03; STRA8; ENSG00000146857; CTA
FPVDEEMIM

SEQ ID NO: 82645 - protein, 10 aa, Homo sapiens
  Table A; Target 82645; HLA-B*35:01; STRA8; ENSG00000146857; CTA
FPVDEEMIML

SEQ ID NO: 82646 - protein, 10 aa, Homo sapiens
  Table A; Target 82646; HLA-B*54:01; STRA8; ENSG00000146857; CTA
FPVDEEMIML

SEQ ID NO: 82647 - protein, 10 aa, Homo sapiens
  Table A; Target 82647; HLA-B*55:01; STRA8; ENSG00000146857; CTA
FPVDEEMIML

SEQ ID NO: 82648 - protein, 10 aa, Homo sapiens
  Table A; Target 82648; HLA-B*56:01; STRA8; ENSG00000146857; CTA
FPVDEEMIML

SEQ ID NO: 82649 - protein, 9 aa, Homo sapiens
  Table A; Target 82649; HLA-A*23:01; STRA8; ENSG00000146857; CTA
FYKQTMDLL

SEQ ID NO: 82650 - protein, 9 aa, Homo sapiens
  Table A; Target 82650; HLA-A*24:02; STRA8; ENSG00000146857; CTA
FYKQTMDLL

SEQ ID NO: 82651 - protein, 9 aa, Homo sapiens
  Table A; Target 82651; HLA-B*38:01; STRA8; ENSG00000146857; CTA
GHASSLEEV

SEQ ID NO: 82652 - protein, 9 aa, Homo sapiens
  Table A; Target 82652; HLA-B*39:01; STRA8; ENSG00000146857; CTA
GHASSLEEV

SEQ ID NO: 82653 - protein, 10 aa, Homo sapiens
  Table A; Target 82653; HLA-B*27:02; STRA8; ENSG00000146857; CTA
GHASSLEEVK

SEQ ID NO: 82654 - protein, 10 aa, Homo sapiens
  Table A; Target 82654; HLA-B*27:05; STRA8; ENSG00000146857; CTA
GHASSLEEVK

SEQ ID NO: 82655 - protein, 11 aa, Homo sapiens
  Table A; Target 82655; HLA-B*27:05; STRA8; ENSG00000146857; CTA
GHASSLEEVKK

SEQ ID NO: 82656 - protein, 9 aa, Homo sapiens
  Table A; Target 82656; HLA-B*15:01; STRA8; ENSG00000146857; CTA
GIITPQEAA

SEQ ID NO: 82657 - protein, 10 aa, Homo sapiens
  Table A; Target 82657; HLA-B*40:01; STRA8; ENSG00000146857; CTA
GIITPQEAAL

SEQ ID NO: 82658 - protein, 10 aa, Homo sapiens
  Table A; Target 82658; HLA-B*46:01; STRA8; ENSG00000146857; CTA
GIITPQEAAL

SEQ ID NO: 82659 - protein, 10 aa, Homo sapiens
  Table A; Target 82659; HLA-C*01:02; STRA8; ENSG00000146857; CTA
GIITPQEAAL

SEQ ID NO: 82660 - protein, 10 aa, Homo sapiens
  Table A; Target 82660; HLA-B*15:03; STRA8; ENSG00000146857; CTA
GKIDVDKILF

SEQ ID NO: 82661 - protein, 9 aa, Homo sapiens
  Table A; Target 82661; HLA-A*02:01; STRA8; ENSG00000146857; CTA
GLSCANTQV

SEQ ID NO: 82662 - protein, 9 aa, Homo sapiens
  Table A; Target 82662; HLA-A*02:03; STRA8; ENSG00000146857; CTA
GLSCANTQV

SEQ ID NO: 82663 - protein, 9 aa, Homo sapiens
  Table A; Target 82663; HLA-B*13:02; STRA8; ENSG00000146857; CTA
GLSCANTQV

SEQ ID NO: 82664 - protein, 9 aa, Homo sapiens
  Table A; Target 82664; HLA-B*55:01; STRA8; ENSG00000146857; CTA
GLSCANTQV

SEQ ID NO: 82665 - protein, 10 aa, Homo sapiens
  Table A; Target 82665; HLA-A*03:01; STRA8; ENSG00000146857; CTA
GLSCANTQVK

SEQ ID NO: 82666 - protein, 10 aa, Homo sapiens
  Table A; Target 82666; HLA-A*03:02; STRA8; ENSG00000146857; CTA
GLSCANTQVK

SEQ ID NO: 82667 - protein, 8 aa, Homo sapiens
  Table A; Target 82667; HLA-B*55:01; STRA8; ENSG00000146857; CTA
GPATLAEA

SEQ ID NO: 82668 - protein, 8 aa, Homo sapiens
  Table A; Target 82668; HLA-B*56:01; STRA8; ENSG00000146857; CTA
GPATLAEA

SEQ ID NO: 82669 - protein, 9 aa, Homo sapiens
  Table A; Target 82669; HLA-B*56:01; STRA8; ENSG00000146857; CTA
GPATLAEAC

SEQ ID NO: 82670 - protein, 9 aa, Homo sapiens
  Table A; Target 82670; HLA-B*57:01; STRA8; ENSG00000146857; CTA
GSSPWYLNF

SEQ ID NO: 82671 - protein, 10 aa, Homo sapiens
  Table A; Target 82671; HLA-A*29:02; STRA8; ENSG00000146857; CTA
GSSPWYLNFY

SEQ ID NO: 82672 - protein, 10 aa, Homo sapiens
  Table A; Target 82672; HLA-A*30:02; STRA8; ENSG00000146857; CTA
GSSPWYLNFY

SEQ ID NO: 82673 - protein, 9 aa, Homo sapiens
  Table A; Target 82673; HLA-B*55:01; STRA8; ENSG00000146857; CTA
GVDSQGASC

SEQ ID NO: 82674 - protein, 9 aa, Homo sapiens
  Table A; Target 82674; HLA-C*05:01; STRA8; ENSG00000146857; CTA
GVDSQGASC

SEQ ID NO: 82675 - protein, 11 aa, Homo sapiens
  Table A; Target 82675; HLA-B*27:05; STRA8; ENSG00000146857; CTA
GVDSQGASCSL

SEQ ID NO: 82676 - protein, 11 aa, Homo sapiens
  Table A; Target 82676; HLA-B*35:03; STRA8; ENSG00000146857; CTA
GVDSQGASCSL

SEQ ID NO: 82677 - protein, 11 aa, Homo sapiens
  Table A; Target 82677; HLA-B*55:01; STRA8; ENSG00000146857; CTA
GVDSQGASCSL

SEQ ID NO: 82678 - protein, 11 aa, Homo sapiens
  Table A; Target 82678; HLA-C*05:01; STRA8; ENSG00000146857; CTA
GVDSQGASCSL

SEQ ID NO: 82679 - protein, 8 aa, Homo sapiens
  Table A; Target 82679; HLA-B*51:01; STRA8; ENSG00000146857; CTA
HASSLEEV

SEQ ID NO: 82680 - protein, 8 aa, Homo sapiens
  Table A; Target 82680; HLA-B*54:01; STRA8; ENSG00000146857; CTA
HASSLEEV

SEQ ID NO: 82681 - protein, 8 aa, Homo sapiens
  Table A; Target 82681; HLA-C*16:02; STRA8; ENSG00000146857; CTA
HASSLEEV

SEQ ID NO: 82682 - protein, 9 aa, Homo sapiens
  Table A; Target 82682; HLA-A*03:02; STRA8; ENSG00000146857; CTA
HASSLEEVK

SEQ ID NO: 82683 - protein, 9 aa, Homo sapiens
  Table A; Target 82683; HLA-A*11:01; STRA8; ENSG00000146857; CTA
HASSLEEVK

SEQ ID NO: 82684 - protein, 9 aa, Homo sapiens
  Table A; Target 82684; HLA-A*68:01; STRA8; ENSG00000146857; CTA
HASSLEEVK

SEQ ID NO: 82685 - protein, 9 aa, Homo sapiens
  Table A; Target 82685; HLA-B*27:02; STRA8; ENSG00000146857; CTA
HASSLEEVK

SEQ ID NO: 82686 - protein, 9 aa, Homo sapiens
  Table A; Target 82686; HLA-B*27:05; STRA8; ENSG00000146857; CTA
HASSLEEVK

SEQ ID NO: 82687 - protein, 9 aa, Homo sapiens
  Table A; Target 82687; HLA-B*35:01; STRA8; ENSG00000146857; CTA
HASSLEEVK

SEQ ID NO: 82688 - protein, 9 aa, Homo sapiens
  Table A; Target 82688; HLA-B*35:03; STRA8; ENSG00000146857; CTA
HASSLEEVK

SEQ ID NO: 82689 - protein, 9 aa, Homo sapiens
  Table A; Target 82689; HLA-C*07:06; STRA8; ENSG00000146857; CTA
HASSLEEVK

SEQ ID NO: 82690 - protein, 10 aa, Homo sapiens
  Table A; Target 82690; HLA-A*03:02; STRA8; ENSG00000146857; CTA
HASSLEEVKK

SEQ ID NO: 82691 - protein, 10 aa, Homo sapiens
  Table A; Target 82691; HLA-A*11:01; STRA8; ENSG00000146857; CTA
HASSLEEVKK

SEQ ID NO: 82692 - protein, 10 aa, Homo sapiens
  Table A; Target 82692; HLA-A*68:01; STRA8; ENSG00000146857; CTA
HASSLEEVKK

SEQ ID NO: 82693 - protein, 10 aa, Homo sapiens
  Table A; Target 82693; HLA-B*27:02; STRA8; ENSG00000146857; CTA
HASSLEEVKK

SEQ ID NO: 82694 - protein, 10 aa, Homo sapiens
  Table A; Target 82694; HLA-C*07:06; STRA8; ENSG00000146857; CTA
HASSLEEVKK

SEQ ID NO: 82695 - protein, 8 aa, Homo sapiens
  Table A; Target 82695; HLA-B*37:01; STRA8; ENSG00000146857; CTA
HDRATPQL

SEQ ID NO: 82696 - protein, 9 aa, Homo sapiens
  Table A; Target 82696; HLA-A*02:07; STRA8; ENSG00000146857; CTA
HIPELEQTL

SEQ ID NO: 82697 - protein, 9 aa, Homo sapiens
  Table A; Target 82697; HLA-A*24:02; STRA8; ENSG00000146857; CTA
HIPELEQTL

SEQ ID NO: 82698 - protein, 9 aa, Homo sapiens
  Table A; Target 82698; HLA-A*68:02; STRA8; ENSG00000146857; CTA
HIPELEQTL

SEQ ID NO: 82699 - protein, 9 aa, Homo sapiens
  Table A; Target 82699; HLA-B*08:01; STRA8; ENSG00000146857; CTA
HIPELEQTL

SEQ ID NO: 82700 - protein, 9 aa, Homo sapiens
  Table A; Target 82700; HLA-B*13:02; STRA8; ENSG00000146857; CTA
HIPELEQTL

SEQ ID NO: 82701 - protein, 9 aa, Homo sapiens
  Table A; Target 82701; HLA-B*27:05; STRA8; ENSG00000146857; CTA
HIPELEQTL

SEQ ID NO: 82702 - protein, 9 aa, Homo sapiens
  Table A; Target 82702; HLA-B*35:03; STRA8; ENSG00000146857; CTA
HIPELEQTL

SEQ ID NO: 82703 - protein, 9 aa, Homo sapiens
  Table A; Target 82703; HLA-B*38:01; STRA8; ENSG00000146857; CTA
HIPELEQTL

SEQ ID NO: 82704 - protein, 9 aa, Homo sapiens
  Table A; Target 82704; HLA-B*39:01; STRA8; ENSG00000146857; CTA
HIPELEQTL

SEQ ID NO: 82705 - protein, 9 aa, Homo sapiens
  Table A; Target 82705; HLA-B*40:01; STRA8; ENSG00000146857; CTA
HIPELEQTL

SEQ ID NO: 82706 - protein, 9 aa, Homo sapiens
  Table A; Target 82706; HLA-B*51:01; STRA8; ENSG00000146857; CTA
HIPELEQTL

SEQ ID NO: 82707 - protein, 9 aa, Homo sapiens
  Table A; Target 82707; HLA-B*58:01; STRA8; ENSG00000146857; CTA
HIPELEQTL

SEQ ID NO: 82708 - protein, 9 aa, Homo sapiens
  Table A; Target 82708; HLA-C*01:02; STRA8; ENSG00000146857; CTA
HIPELEQTL

SEQ ID NO: 82709 - protein, 9 aa, Homo sapiens
  Table A; Target 82709; HLA-C*07:04; STRA8; ENSG00000146857; CTA
HIPELEQTL

SEQ ID NO: 82710 - protein, 9 aa, Homo sapiens
  Table A; Target 82710; HLA-C*16:04; STRA8; ENSG00000146857; CTA
HRATLAALF

SEQ ID NO: 82711 - protein, 8 aa, Homo sapiens
  Table A; Target 82711; HLA-B*37:01; STRA8; ENSG00000146857; CTA
IDVDKILF

SEQ ID NO: 82712 - protein, 8 aa, Homo sapiens
  Table A; Target 82712; HLA-C*04:01; STRA8; ENSG00000146857; CTA
IDVDKILF

SEQ ID NO: 82713 - protein, 8 aa, Homo sapiens
  Table A; Target 82713; HLA-C*07:01; STRA8; ENSG00000146857; CTA
IDVDKILF

SEQ ID NO: 82714 - protein, 9 aa, Homo sapiens
  Table A; Target 82714; HLA-A*23:01; STRA8; ENSG00000146857; CTA
IDVDKILFF

SEQ ID NO: 82715 - protein, 9 aa, Homo sapiens
  Table A; Target 82715; HLA-A*24:02; STRA8; ENSG00000146857; CTA
IDVDKILFF

SEQ ID NO: 82716 - protein, 9 aa, Homo sapiens
  Table A; Target 82716; HLA-B*44:02; STRA8; ENSG00000146857; CTA
IDVDKILFF

SEQ ID NO: 82717 - protein, 9 aa, Homo sapiens
  Table A; Target 82717; HLA-B*44:03; STRA8; ENSG00000146857; CTA
IDVDKILFF

SEQ ID NO: 82718 - protein, 9 aa, Homo sapiens
  Table A; Target 82718; HLA-B*57:01; STRA8; ENSG00000146857; CTA
IDVDKILFF

SEQ ID NO: 82719 - protein, 9 aa, Homo sapiens
  Table A; Target 82719; HLA-C*12:03; STRA8; ENSG00000146857; CTA
IDVDKILFF

SEQ ID NO: 82720 - protein, 9 aa, Homo sapiens
  Table A; Target 82720; HLA-A*30:01; STRA8; ENSG00000146857; CTA
IITPQEAAL

SEQ ID NO: 82721 - protein, 9 aa, Homo sapiens
  Table A; Target 82721; HLA-A*32:01; STRA8; ENSG00000146857; CTA
IITPQEAAL

SEQ ID NO: 82722 - protein, 9 aa, Homo sapiens
  Table A; Target 82722; HLA-B*07:02; STRA8; ENSG00000146857; CTA
IITPQEAAL

SEQ ID NO: 82723 - protein, 9 aa, Homo sapiens
  Table A; Target 82723; HLA-B*15:01; STRA8; ENSG00000146857; CTA
IITPQEAAL

SEQ ID NO: 82724 - protein, 9 aa, Homo sapiens
  Table A; Target 82724; HLA-B*15:03; STRA8; ENSG00000146857; CTA
IITPQEAAL

SEQ ID NO: 82725 - protein, 9 aa, Homo sapiens
  Table A; Target 82725; HLA-B*35:03; STRA8; ENSG00000146857; CTA
IITPQEAAL

SEQ ID NO: 82726 - protein, 9 aa, Homo sapiens
  Table A; Target 82726; HLA-B*38:01; STRA8; ENSG00000146857; CTA
IITPQEAAL

SEQ ID NO: 82727 - protein, 9 aa, Homo sapiens
  Table A; Target 82727; HLA-B*39:01; STRA8; ENSG00000146857; CTA
IITPQEAAL

SEQ ID NO: 82728 - protein, 9 aa, Homo sapiens
  Table A; Target 82728; HLA-B*40:01; STRA8; ENSG00000146857; CTA
IITPQEAAL

SEQ ID NO: 82729 - protein, 9 aa, Homo sapiens
  Table A; Target 82729; HLA-B*46:01; STRA8; ENSG00000146857; CTA
IITPQEAAL

SEQ ID NO: 82730 - protein, 9 aa, Homo sapiens
  Table A; Target 82730; HLA-B*58:01; STRA8; ENSG00000146857; CTA
IITPQEAAL

SEQ ID NO: 82731 - protein, 9 aa, Homo sapiens
  Table A; Target 82731; HLA-C*01:02; STRA8; ENSG00000146857; CTA
IITPQEAAL

SEQ ID NO: 82732 - protein, 9 aa, Homo sapiens
  Table A; Target 82732; HLA-C*03:03; STRA8; ENSG00000146857; CTA
IITPQEAAL

SEQ ID NO: 82733 - protein, 9 aa, Homo sapiens
  Table A; Target 82733; HLA-C*03:04; STRA8; ENSG00000146857; CTA
IITPQEAAL

SEQ ID NO: 82734 - protein, 9 aa, Homo sapiens
  Table A; Target 82734; HLA-C*07:04; STRA8; ENSG00000146857; CTA
IITPQEAAL

SEQ ID NO: 82735 - protein, 9 aa, Homo sapiens
  Table A; Target 82735; HLA-C*14:02; STRA8; ENSG00000146857; CTA
IITPQEAAL

SEQ ID NO: 82736 - protein, 9 aa, Homo sapiens
  Table A; Target 82736; HLA-C*16:01; STRA8; ENSG00000146857; CTA
IITPQEAAL

SEQ ID NO: 82737 - protein, 9 aa, Homo sapiens
  Table A; Target 82737; HLA-C*16:02; STRA8; ENSG00000146857; CTA
IITPQEAAL

SEQ ID NO: 82738 - protein, 9 aa, Homo sapiens
  Table A; Target 82738; HLA-A*02:01; STRA8; ENSG00000146857; CTA
ILFEDAFDV

SEQ ID NO: 82739 - protein, 9 aa, Homo sapiens
  Table A; Target 82739; HLA-A*02:04; STRA8; ENSG00000146857; CTA
ILFEDAFDV

SEQ ID NO: 82740 - protein, 9 aa, Homo sapiens
  Table A; Target 82740; HLA-A*02:07; STRA8; ENSG00000146857; CTA
ILFEDAFDV

SEQ ID NO: 82741 - protein, 9 aa, Homo sapiens
  Table A; Target 82741; HLA-B*13:02; STRA8; ENSG00000146857; CTA
ILFEDAFDV

SEQ ID NO: 82742 - protein, 10 aa, Homo sapiens
  Table A; Target 82742; HLA-A*02:01; STRA8; ENSG00000146857; CTA
ILFEDAFDVA

SEQ ID NO: 82743 - protein, 8 aa, Homo sapiens
  Table A; Target 82743; HLA-B*13:02; STRA8; ENSG00000146857; CTA
ILFFNQEI

SEQ ID NO: 82744 - protein, 10 aa, Homo sapiens
  Table A; Target 82744; HLA-A*02:01; STRA8; ENSG00000146857; CTA
ILFFNQEIRL

SEQ ID NO: 82745 - protein, 10 aa, Homo sapiens
  Table A; Target 82745; HLA-A*02:04; STRA8; ENSG00000146857; CTA
ILFFNQEIRL

SEQ ID NO: 82746 - protein, 11 aa, Homo sapiens
  Table A; Target 82746; HLA-B*57:01; STRA8; ENSG00000146857; CTA
ILFFNQEIRLW

SEQ ID NO: 82747 - protein, 9 aa, Homo sapiens
  Table A; Target 82747; HLA-A*23:01; STRA8; ENSG00000146857; CTA
IMLQCTETF

SEQ ID NO: 82748 - protein, 9 aa, Homo sapiens
  Table A; Target 82748; HLA-A*24:02; STRA8; ENSG00000146857; CTA
IMLQCTETF

SEQ ID NO: 82749 - protein, 9 aa, Homo sapiens
  Table A; Target 82749; HLA-B*15:01; STRA8; ENSG00000146857; CTA
IMLQCTETF

SEQ ID NO: 82750 - protein, 9 aa, Homo sapiens
  Table A; Target 82750; HLA-B*46:01; STRA8; ENSG00000146857; CTA
IMLQCTETF

SEQ ID NO: 82751 - protein, 9 aa, Homo sapiens
  Table A; Target 82751; HLA-B*58:01; STRA8; ENSG00000146857; CTA
IMLQCTETF

SEQ ID NO: 82752 - protein, 9 aa, Homo sapiens
  Table A; Target 82752; HLA-C*04:01; STRA8; ENSG00000146857; CTA
IMLQCTETF

SEQ ID NO: 82753 - protein, 9 aa, Homo sapiens
  Table A; Target 82753; HLA-C*14:02; STRA8; ENSG00000146857; CTA
IMLQCTETF

SEQ ID NO: 82754 - protein, 8 aa, Homo sapiens
  Table A; Target 82754; HLA-B*35:03; STRA8; ENSG00000146857; CTA
IPELEQTL

SEQ ID NO: 82755 - protein, 8 aa, Homo sapiens
  Table A; Target 82755; HLA-C*03:03; STRA8; ENSG00000146857; CTA
IPELEQTL

SEQ ID NO: 82756 - protein, 8 aa, Homo sapiens
  Table A; Target 82756; HLA-C*05:01; STRA8; ENSG00000146857; CTA
IPELEQTL

SEQ ID NO: 82757 - protein, 8 aa, Homo sapiens
  Table A; Target 82757; HLA-C*01:02; STRA8; ENSG00000146857; CTA
ITPQEAAL

SEQ ID NO: 82758 - protein, 11 aa, Homo sapiens
  Table A; Target 82758; HLA-A*02:07; STRA8; ENSG00000146857; CTA
ITPQEAALPIV

SEQ ID NO: 82759 - protein, 9 aa, Homo sapiens
  Table A; Target 82759; HLA-A*02:03; STRA8; ENSG00000146857; CTA
IVSAAISHL

SEQ ID NO: 82760 - protein, 9 aa, Homo sapiens
  Table A; Target 82760; HLA-A*02:04; STRA8; ENSG00000146857; CTA
IVSAAISHL

SEQ ID NO: 82761 - protein, 9 aa, Homo sapiens
  Table A; Target 82761; HLA-A*03:01; STRA8; ENSG00000146857; CTA
IVSAAISHL

SEQ ID NO: 82762 - protein, 9 aa, Homo sapiens
  Table A; Target 82762; HLA-A*23:01; STRA8; ENSG00000146857; CTA
IVSAAISHL

SEQ ID NO: 82763 - protein, 9 aa, Homo sapiens
  Table A; Target 82763; HLA-A*25:01; STRA8; ENSG00000146857; CTA
IVSAAISHL

SEQ ID NO: 82764 - protein, 9 aa, Homo sapiens
  Table A; Target 82764; HLA-A*26:01; STRA8; ENSG00000146857; CTA
IVSAAISHL

SEQ ID NO: 82765 - protein, 9 aa, Homo sapiens
  Table A; Target 82765; HLA-A*32:01; STRA8; ENSG00000146857; CTA
IVSAAISHL

SEQ ID NO: 82766 - protein, 9 aa, Homo sapiens
  Table A; Target 82766; HLA-A*68:01; STRA8; ENSG00000146857; CTA
IVSAAISHL

SEQ ID NO: 82767 - protein, 9 aa, Homo sapiens
  Table A; Target 82767; HLA-A*68:02; STRA8; ENSG00000146857; CTA
IVSAAISHL

SEQ ID NO: 82768 - protein, 9 aa, Homo sapiens
  Table A; Target 82768; HLA-B*13:02; STRA8; ENSG00000146857; CTA
IVSAAISHL

SEQ ID NO: 82769 - protein, 9 aa, Homo sapiens
  Table A; Target 82769; HLA-B*27:05; STRA8; ENSG00000146857; CTA
IVSAAISHL

SEQ ID NO: 82770 - protein, 9 aa, Homo sapiens
  Table A; Target 82770; HLA-B*37:01; STRA8; ENSG00000146857; CTA
IVSAAISHL

SEQ ID NO: 82771 - protein, 9 aa, Homo sapiens
  Table A; Target 82771; HLA-B*38:01; STRA8; ENSG00000146857; CTA
IVSAAISHL

SEQ ID NO: 82772 - protein, 9 aa, Homo sapiens
  Table A; Target 82772; HLA-B*58:01; STRA8; ENSG00000146857; CTA
IVSAAISHL

SEQ ID NO: 82773 - protein, 9 aa, Homo sapiens
  Table A; Target 82773; HLA-C*01:02; STRA8; ENSG00000146857; CTA
IVSAAISHL

SEQ ID NO: 82774 - protein, 9 aa, Homo sapiens
  Table A; Target 82774; HLA-C*02:02; STRA8; ENSG00000146857; CTA
IVSAAISHL

SEQ ID NO: 82775 - protein, 9 aa, Homo sapiens
  Table A; Target 82775; HLA-C*03:03; STRA8; ENSG00000146857; CTA
IVSAAISHL

SEQ ID NO: 82776 - protein, 9 aa, Homo sapiens
  Table A; Target 82776; HLA-C*03:04; STRA8; ENSG00000146857; CTA
IVSAAISHL

SEQ ID NO: 82777 - protein, 9 aa, Homo sapiens
  Table A; Target 82777; HLA-C*05:01; STRA8; ENSG00000146857; CTA
IVSAAISHL

SEQ ID NO: 82778 - protein, 9 aa, Homo sapiens
  Table A; Target 82778; HLA-C*07:04; STRA8; ENSG00000146857; CTA
IVSAAISHL

SEQ ID NO: 82779 - protein, 9 aa, Homo sapiens
  Table A; Target 82779; HLA-C*07:06; STRA8; ENSG00000146857; CTA
IVSAAISHL

SEQ ID NO: 82780 - protein, 9 aa, Homo sapiens
  Table A; Target 82780; HLA-C*12:03; STRA8; ENSG00000146857; CTA
IVSAAISHL

SEQ ID NO: 82781 - protein, 9 aa, Homo sapiens
  Table A; Target 82781; HLA-C*16:02; STRA8; ENSG00000146857; CTA
IVSAAISHL

SEQ ID NO: 82782 - protein, 10 aa, Homo sapiens
  Table A; Target 82782; HLA-A*24:02; STRA8; ENSG00000146857; CTA
IVSAAISHLW

SEQ ID NO: 82783 - protein, 10 aa, Homo sapiens
  Table A; Target 82783; HLA-A*25:01; STRA8; ENSG00000146857; CTA
IVSAAISHLW

SEQ ID NO: 82784 - protein, 10 aa, Homo sapiens
  Table A; Target 82784; HLA-B*44:02; STRA8; ENSG00000146857; CTA
IVSAAISHLW

SEQ ID NO: 82785 - protein, 10 aa, Homo sapiens
  Table A; Target 82785; HLA-B*44:03; STRA8; ENSG00000146857; CTA
IVSAAISHLW

SEQ ID NO: 82786 - protein, 10 aa, Homo sapiens
  Table A; Target 82786; HLA-B*57:01; STRA8; ENSG00000146857; CTA
IVSAAISHLW

SEQ ID NO: 82787 - protein, 10 aa, Homo sapiens
  Table A; Target 82787; HLA-B*58:01; STRA8; ENSG00000146857; CTA
IVSAAISHLW

SEQ ID NO: 82788 - protein, 9 aa, Homo sapiens
  Table A; Target 82788; HLA-B*40:02; STRA8; ENSG00000146857; CTA
KAKSHIPEL

SEQ ID NO: 82789 - protein, 9 aa, Homo sapiens
  Table A; Target 82789; HLA-B*46:01; STRA8; ENSG00000146857; CTA
KAKSHIPEL

SEQ ID NO: 82790 - protein, 9 aa, Homo sapiens
  Table A; Target 82790; HLA-B*57:01; STRA8; ENSG00000146857; CTA
KAKSHIPEL

SEQ ID NO: 82791 - protein, 9 aa, Homo sapiens
  Table A; Target 82791; HLA-B*58:01; STRA8; ENSG00000146857; CTA
KAKSHIPEL

SEQ ID NO: 82792 - protein, 9 aa, Homo sapiens
  Table A; Target 82792; HLA-C*12:03; STRA8; ENSG00000146857; CTA
KAKSHIPEL

SEQ ID NO: 82793 - protein, 9 aa, Homo sapiens
  Table A; Target 82793; HLA-C*16:01; STRA8; ENSG00000146857; CTA
KAKSHIPEL

SEQ ID NO: 82794 - protein, 9 aa, Homo sapiens
  Table A; Target 82794; HLA-C*16:02; STRA8; ENSG00000146857; CTA
KAKSHIPEL

SEQ ID NO: 82795 - protein, 8 aa, Homo sapiens
  Table A; Target 82795; HLA-A*32:01; STRA8; ENSG00000146857; CTA
KASLRQAW

SEQ ID NO: 82796 - protein, 8 aa, Homo sapiens
  Table A; Target 82796; HLA-C*16:01; STRA8; ENSG00000146857; CTA
KASLRQAW

SEQ ID NO: 82797 - protein, 9 aa, Homo sapiens
  Table A; Target 82797; HLA-B*40:02; STRA8; ENSG00000146857; CTA
KEYASMYSG

SEQ ID NO: 82798 - protein, 9 aa, Homo sapiens
  Table A; Target 82798; HLA-B*49:01; STRA8; ENSG00000146857; CTA
KEYASMYSG

SEQ ID NO: 82799 - protein, 9 aa, Homo sapiens
  Table A; Target 82799; HLA-C*06:02; STRA8; ENSG00000146857; CTA
KEYASMYSG

SEQ ID NO: 82800 - protein, 9 aa, Homo sapiens
  Table A; Target 82800; HLA-A*02:07; STRA8; ENSG00000146857; CTA
KIDVDKILF

SEQ ID NO: 82801 - protein, 10 aa, Homo sapiens
  Table A; Target 82801; HLA-A*02:07; STRA8; ENSG00000146857; CTA
KIDVDKILFF

SEQ ID NO: 82802 - protein, 9 aa, Homo sapiens
  Table A; Target 82802; HLA-A*02:01; STRA8; ENSG00000146857; CTA
KILFFNQEI

SEQ ID NO: 82803 - protein, 9 aa, Homo sapiens
  Table A; Target 82803; HLA-A*02:04; STRA8; ENSG00000146857; CTA
KILFFNQEI

SEQ ID NO: 82804 - protein, 9 aa, Homo sapiens
  Table A; Target 82804; HLA-A*02:07; STRA8; ENSG00000146857; CTA
KILFFNQEI

SEQ ID NO: 82805 - protein, 9 aa, Homo sapiens
  Table A; Target 82805; HLA-C*05:01; STRA8; ENSG00000146857; CTA
KSEVPSTSS

SEQ ID NO: 82806 - protein, 11 aa, Homo sapiens
  Table A; Target 82806; HLA-C*06:02; STRA8; ENSG00000146857; CTA
KSHIPELEQTL

SEQ ID NO: 82807 - protein, 9 aa, Homo sapiens
  Table A; Target 82807; HLA-B*58:01; STRA8; ENSG00000146857; CTA
KTVYSQSDL

SEQ ID NO: 82808 - protein, 9 aa, Homo sapiens
  Table A; Target 82808; HLA-C*03:04; STRA8; ENSG00000146857; CTA
KTVYSQSDL

SEQ ID NO: 82809 - protein, 10 aa, Homo sapiens
  Table A; Target 82809; HLA-B*07:02; STRA8; ENSG00000146857; CTA
KTVYSQSDLI

SEQ ID NO: 82810 - protein, 10 aa, Homo sapiens
  Table A; Target 82810; HLA-C*07:02; STRA8; ENSG00000146857; CTA
KTVYSQSDLI

SEQ ID NO: 82811 - protein, 8 aa, Homo sapiens
  Table A; Target 82811; HLA-B*08:01; STRA8; ENSG00000146857; CTA
LAALFNNL

SEQ ID NO: 82812 - protein, 8 aa, Homo sapiens
  Table A; Target 82812; HLA-B*46:01; STRA8; ENSG00000146857; CTA
LAALFNNL

SEQ ID NO: 82813 - protein, 8 aa, Homo sapiens
  Table A; Target 82813; HLA-B*51:01; STRA8; ENSG00000146857; CTA
LAALFNNL

SEQ ID NO: 82814 - protein, 8 aa, Homo sapiens
  Table A; Target 82814; HLA-C*01:02; STRA8; ENSG00000146857; CTA
LAALFNNL

SEQ ID NO: 82815 - protein, 8 aa, Homo sapiens
  Table A; Target 82815; HLA-C*03:03; STRA8; ENSG00000146857; CTA
LAALFNNL

SEQ ID NO: 82816 - protein, 8 aa, Homo sapiens
  Table A; Target 82816; HLA-C*03:04; STRA8; ENSG00000146857; CTA
LAALFNNL

SEQ ID NO: 82817 - protein, 8 aa, Homo sapiens
  Table A; Target 82817; HLA-C*07:04; STRA8; ENSG00000146857; CTA
LAALFNNL

SEQ ID NO: 82818 - protein, 8 aa, Homo sapiens
  Table A; Target 82818; HLA-C*16:01; STRA8; ENSG00000146857; CTA
LAALFNNL

SEQ ID NO: 82819 - protein, 8 aa, Homo sapiens
  Table A; Target 82819; HLA-C*16:02; STRA8; ENSG00000146857; CTA
LAALFNNL

SEQ ID NO: 82820 - protein, 9 aa, Homo sapiens
  Table A; Target 82820; HLA-A*68:01; STRA8; ENSG00000146857; CTA
LAALFNNLR

SEQ ID NO: 82821 - protein, 9 aa, Homo sapiens
  Table A; Target 82821; HLA-A*02:07; STRA8; ENSG00000146857; CTA
LEDGHASSL

SEQ ID NO: 82822 - protein, 9 aa, Homo sapiens
  Table A; Target 82822; HLA-A*30:01; STRA8; ENSG00000146857; CTA
LEDGHASSL

SEQ ID NO: 82823 - protein, 9 aa, Homo sapiens
  Table A; Target 82823; HLA-B*07:02; STRA8; ENSG00000146857; CTA
LEDGHASSL

SEQ ID NO: 82824 - protein, 9 aa, Homo sapiens
  Table A; Target 82824; HLA-B*18:01; STRA8; ENSG00000146857; CTA
LEDGHASSL

SEQ ID NO: 82825 - protein, 9 aa, Homo sapiens
  Table A; Target 82825; HLA-B*35:03; STRA8; ENSG00000146857; CTA
LEDGHASSL

SEQ ID NO: 82826 - protein, 9 aa, Homo sapiens
  Table A; Target 82826; HLA-B*37:01; STRA8; ENSG00000146857; CTA
LEDGHASSL

SEQ ID NO: 82827 - protein, 9 aa, Homo sapiens
  Table A; Target 82827; HLA-B*38:01; STRA8; ENSG00000146857; CTA
LEDGHASSL

SEQ ID NO: 82828 - protein, 9 aa, Homo sapiens
  Table A; Target 82828; HLA-B*39:01; STRA8; ENSG00000146857; CTA
LEDGHASSL

SEQ ID NO: 82829 - protein, 9 aa, Homo sapiens
  Table A; Target 82829; HLA-B*40:02; STRA8; ENSG00000146857; CTA
LEDGHASSL

SEQ ID NO: 82830 - protein, 9 aa, Homo sapiens
  Table A; Target 82830; HLA-B*44:02; STRA8; ENSG00000146857; CTA
LEDGHASSL

SEQ ID NO: 82831 - protein, 9 aa, Homo sapiens
  Table A; Target 82831; HLA-B*44:03; STRA8; ENSG00000146857; CTA
LEDGHASSL

SEQ ID NO: 82832 - protein, 9 aa, Homo sapiens
  Table A; Target 82832; HLA-B*49:01; STRA8; ENSG00000146857; CTA
LEDGHASSL

SEQ ID NO: 82833 - protein, 9 aa, Homo sapiens
  Table A; Target 82833; HLA-C*03:03; STRA8; ENSG00000146857; CTA
LEDGHASSL

SEQ ID NO: 82834 - protein, 9 aa, Homo sapiens
  Table A; Target 82834; HLA-C*03:04; STRA8; ENSG00000146857; CTA
LEDGHASSL

SEQ ID NO: 82835 - protein, 9 aa, Homo sapiens
  Table A; Target 82835; HLA-C*04:01; STRA8; ENSG00000146857; CTA
LEDGHASSL

SEQ ID NO: 82836 - protein, 9 aa, Homo sapiens
  Table A; Target 82836; HLA-C*05:01; STRA8; ENSG00000146857; CTA
LEDGHASSL

SEQ ID NO: 82837 - protein, 9 aa, Homo sapiens
  Table A; Target 82837; HLA-C*07:02; STRA8; ENSG00000146857; CTA
LEDGHASSL

SEQ ID NO: 82838 - protein, 9 aa, Homo sapiens
  Table A; Target 82838; HLA-C*07:04; STRA8; ENSG00000146857; CTA
LEDGHASSL

SEQ ID NO: 82839 - protein, 9 aa, Homo sapiens
  Table A; Target 82839; HLA-C*12:03; STRA8; ENSG00000146857; CTA
LEDGHASSL

SEQ ID NO: 82840 - protein, 9 aa, Homo sapiens
  Table A; Target 82840; HLA-C*16:02; STRA8; ENSG00000146857; CTA
LEDGHASSL

SEQ ID NO: 82841 - protein, 8 aa, Homo sapiens
  Table A; Target 82841; HLA-B*18:01; STRA8; ENSG00000146857; CTA
LEEVKKEY

SEQ ID NO: 82842 - protein, 8 aa, Homo sapiens
  Table A; Target 82842; HLA-B*44:02; STRA8; ENSG00000146857; CTA
LEEVKKEY

SEQ ID NO: 82843 - protein, 8 aa, Homo sapiens
  Table A; Target 82843; HLA-B*44:03; STRA8; ENSG00000146857; CTA
LEEVKKEY

SEQ ID NO: 82844 - protein, 8 aa, Homo sapiens
  Table A; Target 82844; HLA-C*12:03; STRA8; ENSG00000146857; CTA
LEEVKKEY

SEQ ID NO: 82845 - protein, 8 aa, Homo sapiens
  Table A; Target 82845; HLA-C*16:02; STRA8; ENSG00000146857; CTA
LEEVKKEY

SEQ ID NO: 82846 - protein, 9 aa, Homo sapiens
  Table A; Target 82846; HLA-A*30:01; STRA8; ENSG00000146857; CTA
LEQTLDNLL

SEQ ID NO: 82847 - protein, 9 aa, Homo sapiens
  Table A; Target 82847; HLA-B*40:01; STRA8; ENSG00000146857; CTA
LEQTLDNLL

SEQ ID NO: 82848 - protein, 9 aa, Homo sapiens
  Table A; Target 82848; HLA-B*49:01; STRA8; ENSG00000146857; CTA
LEQTLDNLL

SEQ ID NO: 82849 - protein, 10 aa, Homo sapiens
  Table A; Target 82849; HLA-B*27:02; STRA8; ENSG00000146857; CTA
LEQTLDNLLK

SEQ ID NO: 82850 - protein, 11 aa, Homo sapiens
  Table A; Target 82850; HLA-B*40:01; STRA8; ENSG00000146857; CTA
LEQTLDNLLKL

SEQ ID NO: 82851 - protein, 10 aa, Homo sapiens
  Table A; Target 82851; HLA-B*57:01; STRA8; ENSG00000146857; CTA
LFFNQEIRLW

SEQ ID NO: 82852 - protein, 10 aa, Homo sapiens
  Table A; Target 82852; HLA-A*29:02; STRA8; ENSG00000146857; CTA
LFNNLRKTVY

SEQ ID NO: 82853 - protein, 8 aa, Homo sapiens
  Table A; Target 82853; HLA-B*08:01; STRA8; ENSG00000146857; CTA
LLKLKASF

SEQ ID NO: 82854 - protein, 8 aa, Homo sapiens
  Table A; Target 82854; HLA-B*08:01; STRA8; ENSG00000146857; CTA
LNFYKQTM

SEQ ID NO: 82855 - protein, 8 aa, Homo sapiens
  Table A; Target 82855; HLA-B*07:02; STRA8; ENSG00000146857; CTA
LPAQLQEL

SEQ ID NO: 82856 - protein, 8 aa, Homo sapiens
  Table A; Target 82856; HLA-B*08:01; STRA8; ENSG00000146857; CTA
LPAQLQEL

SEQ ID NO: 82857 - protein, 8 aa, Homo sapiens
  Table A; Target 82857; HLA-B*35:01; STRA8; ENSG00000146857; CTA
LPAQLQEL

SEQ ID NO: 82858 - protein, 8 aa, Homo sapiens
  Table A; Target 82858; HLA-B*35:03; STRA8; ENSG00000146857; CTA
LPAQLQEL

SEQ ID NO: 82859 - protein, 8 aa, Homo sapiens
  Table A; Target 82859; HLA-B*51:01; STRA8; ENSG00000146857; CTA
LPAQLQEL

SEQ ID NO: 82860 - protein, 8 aa, Homo sapiens
  Table A; Target 82860; HLA-B*56:01; STRA8; ENSG00000146857; CTA
LPAQLQEL

SEQ ID NO: 82861 - protein, 10 aa, Homo sapiens
  Table A; Target 82861; HLA-B*35:01; STRA8; ENSG00000146857; CTA
LPAQLQELEH

SEQ ID NO: 82862 - protein, 8 aa, Homo sapiens
  Table A; Target 82862; HLA-B*07:02; STRA8; ENSG00000146857; CTA
LPIVSAAI

SEQ ID NO: 82863 - protein, 8 aa, Homo sapiens
  Table A; Target 82863; HLA-B*08:01; STRA8; ENSG00000146857; CTA
LPIVSAAI

SEQ ID NO: 82864 - protein, 8 aa, Homo sapiens
  Table A; Target 82864; HLA-B*35:01; STRA8; ENSG00000146857; CTA
LPIVSAAI

SEQ ID NO: 82865 - protein, 8 aa, Homo sapiens
  Table A; Target 82865; HLA-B*35:03; STRA8; ENSG00000146857; CTA
LPIVSAAI

SEQ ID NO: 82866 - protein, 8 aa, Homo sapiens
  Table A; Target 82866; HLA-B*51:01; STRA8; ENSG00000146857; CTA
LPIVSAAI

SEQ ID NO: 82867 - protein, 8 aa, Homo sapiens
  Table A; Target 82867; HLA-B*54:01; STRA8; ENSG00000146857; CTA
LPIVSAAI

SEQ ID NO: 82868 - protein, 8 aa, Homo sapiens
  Table A; Target 82868; HLA-B*56:01; STRA8; ENSG00000146857; CTA
LPIVSAAI

SEQ ID NO: 82869 - protein, 8 aa, Homo sapiens
  Table A; Target 82869; HLA-C*07:02; STRA8; ENSG00000146857; CTA
LPIVSAAI

SEQ ID NO: 82870 - protein, 10 aa, Homo sapiens
  Table A; Target 82870; HLA-B*35:01; STRA8; ENSG00000146857; CTA
LPIVSAAISH

SEQ ID NO: 82871 - protein, 11 aa, Homo sapiens
  Table A; Target 82871; HLA-B*07:02; STRA8; ENSG00000146857; CTA
LPIVSAAISHL

SEQ ID NO: 82872 - protein, 11 aa, Homo sapiens
  Table A; Target 82872; HLA-B*35:01; STRA8; ENSG00000146857; CTA
LPIVSAAISHL

SEQ ID NO: 82873 - protein, 11 aa, Homo sapiens
  Table A; Target 82873; HLA-B*35:03; STRA8; ENSG00000146857; CTA
LPIVSAAISHL

SEQ ID NO: 82874 - protein, 11 aa, Homo sapiens
  Table A; Target 82874; HLA-C*07:02; STRA8; ENSG00000146857; CTA
LPIVSAAISHL

SEQ ID NO: 82875 - protein, 9 aa, Homo sapiens
  Table A; Target 82875; HLA-B*08:01; STRA8; ENSG00000146857; CTA
LSEERKASL

SEQ ID NO: 82876 - protein, 9 aa, Homo sapiens
  Table A; Target 82876; HLA-C*01:02; STRA8; ENSG00000146857; CTA
LSEERKASL

SEQ ID NO: 82877 - protein, 9 aa, Homo sapiens
  Table A; Target 82877; HLA-C*03:03; STRA8; ENSG00000146857; CTA
LSEERKASL

SEQ ID NO: 82878 - protein, 9 aa, Homo sapiens
  Table A; Target 82878; HLA-C*03:04; STRA8; ENSG00000146857; CTA
LSEERKASL

SEQ ID NO: 82879 - protein, 9 aa, Homo sapiens
  Table A; Target 82879; HLA-C*14:02; STRA8; ENSG00000146857; CTA
LSEERKASL

SEQ ID NO: 82880 - protein, 9 aa, Homo sapiens
  Table A; Target 82880; HLA-C*16:01; STRA8; ENSG00000146857; CTA
LSEERKASL

SEQ ID NO: 82881 - protein, 9 aa, Homo sapiens
  Table A; Target 82881; HLA-C*16:02; STRA8; ENSG00000146857; CTA
LSEERKASL

SEQ ID NO: 82882 - protein, 8 aa, Homo sapiens
  Table A; Target 82882; HLA-B*39:01; STRA8; ENSG00000146857; CTA
LVSTPEEI

SEQ ID NO: 82883 - protein, 9 aa, Homo sapiens
  Table A; Target 82883; HLA-B*35:03; STRA8; ENSG00000146857; CTA
LVSTPEEIL

SEQ ID NO: 82884 - protein, 9 aa, Homo sapiens
  Table A; Target 82884; HLA-B*38:01; STRA8; ENSG00000146857; CTA
LVSTPEEIL

SEQ ID NO: 82885 - protein, 9 aa, Homo sapiens
  Table A; Target 82885; HLA-B*39:01; STRA8; ENSG00000146857; CTA
LVSTPEEIL

SEQ ID NO: 82886 - protein, 9 aa, Homo sapiens
  Table A; Target 82886; HLA-C*05:01; STRA8; ENSG00000146857; CTA
LVSTPEEIL

SEQ ID NO: 82887 - protein, 10 aa, Homo sapiens
  Table A; Target 82887; HLA-A*01:01; STRA8; ENSG00000146857; CTA
LVSTPEEILF

SEQ ID NO: 82888 - protein, 10 aa, Homo sapiens
  Table A; Target 82888; HLA-B*27:02; STRA8; ENSG00000146857; CTA
LVSTPEEILF

SEQ ID NO: 82889 - protein, 10 aa, Homo sapiens
  Table A; Target 82889; HLA-B*57:01; STRA8; ENSG00000146857; CTA
LVSTPEEILF

SEQ ID NO: 82890 - protein, 8 aa, Homo sapiens
  Table A; Target 82890; HLA-A*23:01; STRA8; ENSG00000146857; CTA
LYMQIINF

SEQ ID NO: 82891 - protein, 8 aa, Homo sapiens
  Table A; Target 82891; HLA-A*24:02; STRA8; ENSG00000146857; CTA
LYMQIINF

SEQ ID NO: 82892 - protein, 9 aa, Homo sapiens
  Table A; Target 82892; HLA-A*23:01; STRA8; ENSG00000146857; CTA
LYMQIINFF

SEQ ID NO: 82893 - protein, 9 aa, Homo sapiens
  Table A; Target 82893; HLA-A*29:02; STRA8; ENSG00000146857; CTA
LYMQIINFF

SEQ ID NO: 82894 - protein, 11 aa, Homo sapiens
  Table A; Target 82894; HLA-C*04:01; STRA8; ENSG00000146857; CTA
MATPEENSNPH

SEQ ID NO: 82895 - protein, 8 aa, Homo sapiens
  Table A; Target 82895; HLA-B*39:01; STRA8; ENSG00000146857; CTA
MYSGNDSF

SEQ ID NO: 82896 - protein, 8 aa, Homo sapiens
  Table A; Target 82896; HLA-C*04:01; STRA8; ENSG00000146857; CTA
MYSGNDSF

SEQ ID NO: 82897 - protein, 8 aa, Homo sapiens
  Table A; Target 82897; HLA-C*14:02; STRA8; ENSG00000146857; CTA
MYSGNDSF

SEQ ID NO: 82898 - protein, 9 aa, Homo sapiens
  Table A; Target 82898; HLA-C*04:01; STRA8; ENSG00000146857; CTA
MYSGNDSFP

SEQ ID NO: 82899 - protein, 11 aa, Homo sapiens
  Table A; Target 82899; HLA-C*07:01; STRA8; ENSG00000146857; CTA
MYSGNDSFPQN

SEQ ID NO: 82900 - protein, 9 aa, Homo sapiens
  Table A; Target 82900; HLA-C*14:02; STRA8; ENSG00000146857; CTA
NFYKQTMDL

SEQ ID NO: 82901 - protein, 10 aa, Homo sapiens
  Table A; Target 82901; HLA-A*02:03; STRA8; ENSG00000146857; CTA
NLEDGHASSL

SEQ ID NO: 82902 - protein, 10 aa, Homo sapiens
  Table A; Target 82902; HLA-B*07:02; STRA8; ENSG00000146857; CTA
NLEDGHASSL

SEQ ID NO: 82903 - protein, 10 aa, Homo sapiens
  Table A; Target 82903; HLA-B*39:01; STRA8; ENSG00000146857; CTA
NLEDGHASSL

SEQ ID NO: 82904 - protein, 10 aa, Homo sapiens
  Table A; Target 82904; HLA-C*01:02; STRA8; ENSG00000146857; CTA
NLEDGHASSL

SEQ ID NO: 82905 - protein, 10 aa, Homo sapiens
  Table A; Target 82905; HLA-C*05:01; STRA8; ENSG00000146857; CTA
NLEDGHASSL

SEQ ID NO: 82906 - protein, 10 aa, Homo sapiens
  Table A; Target 82906; HLA-C*07:02; STRA8; ENSG00000146857; CTA
NLEDGHASSL

SEQ ID NO: 82907 - protein, 10 aa, Homo sapiens
  Table A; Target 82907; HLA-C*14:02; STRA8; ENSG00000146857; CTA
NLEDGHASSL

SEQ ID NO: 82908 - protein, 10 aa, Homo sapiens
  Table A; Target 82908; HLA-B*07:02; STRA8; ENSG00000146857; CTA
NLSEERKASL

SEQ ID NO: 82909 - protein, 10 aa, Homo sapiens
  Table A; Target 82909; HLA-B*08:01; STRA8; ENSG00000146857; CTA
NLSEERKASL

SEQ ID NO: 82910 - protein, 8 aa, Homo sapiens
  Table A; Target 82910; HLA-B*08:01; STRA8; ENSG00000146857; CTA
NNLRKTVY

SEQ ID NO: 82911 - protein, 8 aa, Homo sapiens
  Table A; Target 82911; HLA-B*08:01; STRA8; ENSG00000146857; CTA
NPEEKFQL

SEQ ID NO: 82912 - protein, 9 aa, Homo sapiens
  Table A; Target 82912; HLA-A*01:01; STRA8; ENSG00000146857; CTA
NPEEKFQLY

SEQ ID NO: 82913 - protein, 9 aa, Homo sapiens
  Table A; Target 82913; HLA-A*29:02; STRA8; ENSG00000146857; CTA
NPEEKFQLY

SEQ ID NO: 82914 - protein, 9 aa, Homo sapiens
  Table A; Target 82914; HLA-B*35:01; STRA8; ENSG00000146857; CTA
NPEEKFQLY

SEQ ID NO: 82915 - protein, 9 aa, Homo sapiens
  Table A; Target 82915; HLA-B*55:01; STRA8; ENSG00000146857; CTA
NPEEKFQLY

SEQ ID NO: 82916 - protein, 9 aa, Homo sapiens
  Table A; Target 82916; HLA-C*03:03; STRA8; ENSG00000146857; CTA
NPEEKFQLY

SEQ ID NO: 82917 - protein, 9 aa, Homo sapiens
  Table A; Target 82917; HLA-B*35:01; STRA8; ENSG00000146857; CTA
NPENPEEKF

SEQ ID NO: 82918 - protein, 9 aa, Homo sapiens
  Table A; Target 82918; HLA-B*35:03; STRA8; ENSG00000146857; CTA
NPENPEEKF

SEQ ID NO: 82919 - protein, 9 aa, Homo sapiens
  Table A; Target 82919; HLA-B*38:01; STRA8; ENSG00000146857; CTA
NPENPEEKF

SEQ ID NO: 82920 - protein, 9 aa, Homo sapiens
  Table A; Target 82920; HLA-C*03:03; STRA8; ENSG00000146857; CTA
NPENPEEKF

SEQ ID NO: 82921 - protein, 9 aa, Homo sapiens
  Table A; Target 82921; HLA-C*05:01; STRA8; ENSG00000146857; CTA
NPENPEEKF

SEQ ID NO: 82922 - protein, 10 aa, Homo sapiens
  Table A; Target 82922; HLA-B*07:02; STRA8; ENSG00000146857; CTA
NPHDRATPQL

SEQ ID NO: 82923 - protein, 10 aa, Homo sapiens
  Table A; Target 82923; HLA-B*35:03; STRA8; ENSG00000146857; CTA
NPHDRATPQL

SEQ ID NO: 82924 - protein, 10 aa, Homo sapiens
  Table A; Target 82924; HLA-C*07:02; STRA8; ENSG00000146857; CTA
NPHDRATPQL

SEQ ID NO: 82925 - protein, 9 aa, Homo sapiens
  Table A; Target 82925; HLA-A*02:04; STRA8; ENSG00000146857; CTA
NQEIRLWQL

SEQ ID NO: 82926 - protein, 8 aa, Homo sapiens
  Table A; Target 82926; HLA-B*18:01; STRA8; ENSG00000146857; CTA
PEEKFQLY

SEQ ID NO: 82927 - protein, 8 aa, Homo sapiens
  Table A; Target 82927; HLA-B*37:01; STRA8; ENSG00000146857; CTA
PENPEEKF

SEQ ID NO: 82928 - protein, 11 aa, Homo sapiens
  Table A; Target 82928; HLA-A*01:01; STRA8; ENSG00000146857; CTA
PENPEEKFQLY

SEQ ID NO: 82929 - protein, 11 aa, Homo sapiens
  Table A; Target 82929; HLA-A*29:02; STRA8; ENSG00000146857; CTA
PENPEEKFQLY

SEQ ID NO: 82930 - protein, 11 aa, Homo sapiens
  Table A; Target 82930; HLA-A*30:02; STRA8; ENSG00000146857; CTA
PENPEEKFQLY

SEQ ID NO: 82931 - protein, 11 aa, Homo sapiens
  Table A; Target 82931; HLA-B*44:02; STRA8; ENSG00000146857; CTA
PENPEEKFQLY

SEQ ID NO: 82932 - protein, 9 aa, Homo sapiens
  Table A; Target 82932; HLA-B*38:01; STRA8; ENSG00000146857; CTA
PHDRATPQL

SEQ ID NO: 82933 - protein, 9 aa, Homo sapiens
  Table A; Target 82933; HLA-A*30:02; STRA8; ENSG00000146857; CTA
PQNGSSPWY

SEQ ID NO: 82934 - protein, 10 aa, Homo sapiens
  Table A; Target 82934; HLA-C*07:02; STRA8; ENSG00000146857; CTA
PSTSSSSSVL

SEQ ID NO: 82935 - protein, 8 aa, Homo sapiens
  Table A; Target 82935; HLA-C*05:01; STRA8; ENSG00000146857; CTA
PVDEEMIM

SEQ ID NO: 82936 - protein, 9 aa, Homo sapiens
  Table A; Target 82936; HLA-A*02:07; STRA8; ENSG00000146857; CTA
PVDEEMIML

SEQ ID NO: 82937 - protein, 8 aa, Homo sapiens
  Table A; Target 82937; HLA-B*07:02; STRA8; ENSG00000146857; CTA
QARHRATL

SEQ ID NO: 82938 - protein, 8 aa, Homo sapiens
  Table A; Target 82938; HLA-B*08:01; STRA8; ENSG00000146857; CTA
QARHRATL

SEQ ID NO: 82939 - protein, 8 aa, Homo sapiens
  Table A; Target 82939; HLA-C*07:02; STRA8; ENSG00000146857; CTA
QARHRATL

SEQ ID NO: 82940 - protein, 8 aa, Homo sapiens
  Table A; Target 82940; HLA-B*18:01; STRA8; ENSG00000146857; CTA
QEAALPIV

SEQ ID NO: 82941 - protein, 8 aa, Homo sapiens
  Table A; Target 82941; HLA-B*49:01; STRA8; ENSG00000146857; CTA
QEAALPIV

SEQ ID NO: 82942 - protein, 10 aa, Homo sapiens
  Table A; Target 82942; HLA-A*30:01; STRA8; ENSG00000146857; CTA
QEAALPIVSA

SEQ ID NO: 82943 - protein, 10 aa, Homo sapiens
  Table A; Target 82943; HLA-B*18:01; STRA8; ENSG00000146857; CTA
QEAALPIVSA

SEQ ID NO: 82944 - protein, 10 aa, Homo sapiens
  Table A; Target 82944; HLA-B*40:02; STRA8; ENSG00000146857; CTA
QEAALPIVSA

SEQ ID NO: 82945 - protein, 10 aa, Homo sapiens
  Table A; Target 82945; HLA-B*44:02; STRA8; ENSG00000146857; CTA
QEAALPIVSA

SEQ ID NO: 82946 - protein, 10 aa, Homo sapiens
  Table A; Target 82946; HLA-B*49:01; STRA8; ENSG00000146857; CTA
QEAALPIVSA

SEQ ID NO: 82947 - protein, 10 aa, Homo sapiens
  Table A; Target 82947; HLA-B*54:01; STRA8; ENSG00000146857; CTA
QEAALPIVSA

SEQ ID NO: 82948 - protein, 10 aa, Homo sapiens
  Table A; Target 82948; HLA-B*56:01; STRA8; ENSG00000146857; CTA
QEAALPIVSA

SEQ ID NO: 82949 - protein, 11 aa, Homo sapiens
  Table A; Target 82949; HLA-A*30:01; STRA8; ENSG00000146857; CTA
QEASFPVDEEM

SEQ ID NO: 82950 - protein, 11 aa, Homo sapiens
  Table A; Target 82950; HLA-B*40:01; STRA8; ENSG00000146857; CTA
QEASFPVDEEM

SEQ ID NO: 82951 - protein, 9 aa, Homo sapiens
  Table A; Target 82951; HLA-B*44:02; STRA8; ENSG00000146857; CTA
QEIRLWQLI

SEQ ID NO: 82952 - protein, 9 aa, Homo sapiens
  Table A; Target 82952; HLA-B*44:03; STRA8; ENSG00000146857; CTA
QEIRLWQLI

SEQ ID NO: 82953 - protein, 9 aa, Homo sapiens
  Table A; Target 82953; HLA-B*49:01; STRA8; ENSG00000146857; CTA
QEIRLWQLI

SEQ ID NO: 82954 - protein, 9 aa, Homo sapiens
  Table A; Target 82954; HLA-B*37:01; STRA8; ENSG00000146857; CTA
QELEHRVAR

SEQ ID NO: 82955 - protein, 9 aa, Homo sapiens
  Table A; Target 82955; HLA-B*44:02; STRA8; ENSG00000146857; CTA
QELEHRVAR

SEQ ID NO: 82956 - protein, 9 aa, Homo sapiens
  Table A; Target 82956; HLA-B*44:03; STRA8; ENSG00000146857; CTA
QELEHRVAR

SEQ ID NO: 82957 - protein, 9 aa, Homo sapiens
  Table A; Target 82957; HLA-A*02:07; STRA8; ENSG00000146857; CTA
QIINFFKGL

SEQ ID NO: 82958 - protein, 9 aa, Homo sapiens
  Table A; Target 82958; HLA-A*31:01; STRA8; ENSG00000146857; CTA
QIINFFKGL

SEQ ID NO: 82959 - protein, 9 aa, Homo sapiens
  Table A; Target 82959; HLA-A*68:02; STRA8; ENSG00000146857; CTA
QIINFFKGL

SEQ ID NO: 82960 - protein, 9 aa, Homo sapiens
  Table A; Target 82960; HLA-B*15:03; STRA8; ENSG00000146857; CTA
QKHRGPATL

SEQ ID NO: 82961 - protein, 9 aa, Homo sapiens
  Table A; Target 82961; HLA-A*02:03; STRA8; ENSG00000146857; CTA
QLPAQLQEL

SEQ ID NO: 82962 - protein, 9 aa, Homo sapiens
  Table A; Target 82962; HLA-A*02:07; STRA8; ENSG00000146857; CTA
QLPAQLQEL

SEQ ID NO: 82963 - protein, 9 aa, Homo sapiens
  Table A; Target 82963; HLA-C*01:02; STRA8; ENSG00000146857; CTA
QLPAQLQEL

SEQ ID NO: 82964 - protein, 9 aa, Homo sapiens
  Table A; Target 82964; HLA-A*02:01; STRA8; ENSG00000146857; CTA
QLQELEHRV

SEQ ID NO: 82965 - protein, 9 aa, Homo sapiens
  Table A; Target 82965; HLA-A*02:03; STRA8; ENSG00000146857; CTA
QLQELEHRV

SEQ ID NO: 82966 - protein, 9 aa, Homo sapiens
  Table A; Target 82966; HLA-A*02:04; STRA8; ENSG00000146857; CTA
QLQELEHRV

SEQ ID NO: 82967 - protein, 9 aa, Homo sapiens
  Table A; Target 82967; HLA-A*02:07; STRA8; ENSG00000146857; CTA
QLQELEHRV

SEQ ID NO: 82968 - protein, 9 aa, Homo sapiens
  Table A; Target 82968; HLA-B*13:02; STRA8; ENSG00000146857; CTA
QLQELEHRV

SEQ ID NO: 82969 - protein, 9 aa, Homo sapiens
  Table A; Target 82969; HLA-B*55:01; STRA8; ENSG00000146857; CTA
QLQELEHRV

SEQ ID NO: 82970 - protein, 9 aa, Homo sapiens
  Table A; Target 82970; HLA-C*16:02; STRA8; ENSG00000146857; CTA
QLQELEHRV

SEQ ID NO: 82971 - protein, 11 aa, Homo sapiens
  Table A; Target 82971; HLA-A*31:01; STRA8; ENSG00000146857; CTA
QLQELEHRVAR

SEQ ID NO: 82972 - protein, 9 aa, Homo sapiens
  Table A; Target 82972; HLA-A*02:04; STRA8; ENSG00000146857; CTA
QLYMQIINF

SEQ ID NO: 82973 - protein, 9 aa, Homo sapiens
  Table A; Target 82973; HLA-B*44:02; STRA8; ENSG00000146857; CTA
QLYMQIINF

SEQ ID NO: 82974 - protein, 9 aa, Homo sapiens
  Table A; Target 82974; HLA-B*44:03; STRA8; ENSG00000146857; CTA
QLYMQIINF

SEQ ID NO: 82975 - protein, 9 aa, Homo sapiens
  Table A; Target 82975; HLA-A*01:01; STRA8; ENSG00000146857; CTA
QSDLIASKW

SEQ ID NO: 82976 - protein, 9 aa, Homo sapiens
  Table A; Target 82976; HLA-A*25:01; STRA8; ENSG00000146857; CTA
QSDLIASKW

SEQ ID NO: 82977 - protein, 9 aa, Homo sapiens
  Table A; Target 82977; HLA-A*32:01; STRA8; ENSG00000146857; CTA
QSDLIASKW

SEQ ID NO: 82978 - protein, 9 aa, Homo sapiens
  Table A; Target 82978; HLA-A*68:01; STRA8; ENSG00000146857; CTA
QSDLIASKW

SEQ ID NO: 82979 - protein, 9 aa, Homo sapiens
  Table A; Target 82979; HLA-B*07:02; STRA8; ENSG00000146857; CTA
QSDLIASKW

SEQ ID NO: 82980 - protein, 9 aa, Homo sapiens
  Table A; Target 82980; HLA-B*38:01; STRA8; ENSG00000146857; CTA
QSDLIASKW

SEQ ID NO: 82981 - protein, 9 aa, Homo sapiens
  Table A; Target 82981; HLA-B*44:02; STRA8; ENSG00000146857; CTA
QSDLIASKW

SEQ ID NO: 82982 - protein, 9 aa, Homo sapiens
  Table A; Target 82982; HLA-B*44:03; STRA8; ENSG00000146857; CTA
QSDLIASKW

SEQ ID NO: 82983 - protein, 9 aa, Homo sapiens
  Table A; Target 82983; HLA-C*04:01; STRA8; ENSG00000146857; CTA
QSDLIASKW

SEQ ID NO: 82984 - protein, 9 aa, Homo sapiens
  Table A; Target 82984; HLA-C*05:01; STRA8; ENSG00000146857; CTA
QSDLIASKW

SEQ ID NO: 82985 - protein, 9 aa, Homo sapiens
  Table A; Target 82985; HLA-C*07:06; STRA8; ENSG00000146857; CTA
QSDLIASKW

SEQ ID NO: 82986 - protein, 9 aa, Homo sapiens
  Table A; Target 82986; HLA-C*16:04; STRA8; ENSG00000146857; CTA
QSDLIASKW

SEQ ID NO: 82987 - protein, 8 aa, Homo sapiens
  Table A; Target 82987; HLA-A*11:01; STRA8; ENSG00000146857; CTA
QTLDNLLK

SEQ ID NO: 82988 - protein, 9 aa, Homo sapiens
  Table A; Target 82988; HLA-A*01:01; STRA8; ENSG00000146857; CTA
QTLDNLLKL

SEQ ID NO: 82989 - protein, 9 aa, Homo sapiens
  Table A; Target 82989; HLA-A*02:01; STRA8; ENSG00000146857; CTA
QTLDNLLKL

SEQ ID NO: 82990 - protein, 9 aa, Homo sapiens
  Table A; Target 82990; HLA-A*02:04; STRA8; ENSG00000146857; CTA
QTLDNLLKL

SEQ ID NO: 82991 - protein, 9 aa, Homo sapiens
  Table A; Target 82991; HLA-A*02:07; STRA8; ENSG00000146857; CTA
QTLDNLLKL

SEQ ID NO: 82992 - protein, 9 aa, Homo sapiens
  Table A; Target 82992; HLA-A*03:01; STRA8; ENSG00000146857; CTA
QTLDNLLKL

SEQ ID NO: 82993 - protein, 9 aa, Homo sapiens
  Table A; Target 82993; HLA-A*11:01; STRA8; ENSG00000146857; CTA
QTLDNLLKL

SEQ ID NO: 82994 - protein, 9 aa, Homo sapiens
  Table A; Target 82994; HLA-A*23:01; STRA8; ENSG00000146857; CTA
QTLDNLLKL

SEQ ID NO: 82995 - protein, 9 aa, Homo sapiens
  Table A; Target 82995; HLA-A*24:02; STRA8; ENSG00000146857; CTA
QTLDNLLKL

SEQ ID NO: 82996 - protein, 9 aa, Homo sapiens
  Table A; Target 82996; HLA-A*25:01; STRA8; ENSG00000146857; CTA
QTLDNLLKL

SEQ ID NO: 82997 - protein, 9 aa, Homo sapiens
  Table A; Target 82997; HLA-A*29:02; STRA8; ENSG00000146857; CTA
QTLDNLLKL

SEQ ID NO: 82998 - protein, 9 aa, Homo sapiens
  Table A; Target 82998; HLA-A*31:01; STRA8; ENSG00000146857; CTA
QTLDNLLKL

SEQ ID NO: 82999 - protein, 9 aa, Homo sapiens
  Table A; Target 82999; HLA-A*33:03; STRA8; ENSG00000146857; CTA
QTLDNLLKL

SEQ ID NO: 83000 - protein, 9 aa, Homo sapiens
  Table A; Target 83000; HLA-A*68:02; STRA8; ENSG00000146857; CTA
QTLDNLLKL

SEQ ID NO: 83001 - protein, 9 aa, Homo sapiens
  Table A; Target 83001; HLA-B*13:02; STRA8; ENSG00000146857; CTA
QTLDNLLKL

SEQ ID NO: 83002 - protein, 9 aa, Homo sapiens
  Table A; Target 83002; HLA-B*40:02; STRA8; ENSG00000146857; CTA
QTLDNLLKL

SEQ ID NO: 83003 - protein, 9 aa, Homo sapiens
  Table A; Target 83003; HLA-B*57:01; STRA8; ENSG00000146857; CTA
QTLDNLLKL

SEQ ID NO: 83004 - protein, 9 aa, Homo sapiens
  Table A; Target 83004; HLA-B*58:01; STRA8; ENSG00000146857; CTA
QTLDNLLKL

SEQ ID NO: 83005 - protein, 9 aa, Homo sapiens
  Table A; Target 83005; HLA-C*03:04; STRA8; ENSG00000146857; CTA
QTLDNLLKL

SEQ ID NO: 83006 - protein, 9 aa, Homo sapiens
  Table A; Target 83006; HLA-C*06:02; STRA8; ENSG00000146857; CTA
QTLDNLLKL

SEQ ID NO: 83007 - protein, 10 aa, Homo sapiens
  Table A; Target 83007; HLA-A*03:01; STRA8; ENSG00000146857; CTA
QTLDNLLKLK

SEQ ID NO: 83008 - protein, 10 aa, Homo sapiens
  Table A; Target 83008; HLA-A*03:02; STRA8; ENSG00000146857; CTA
QTLDNLLKLK

SEQ ID NO: 83009 - protein, 10 aa, Homo sapiens
  Table A; Target 83009; HLA-A*11:01; STRA8; ENSG00000146857; CTA
QTLDNLLKLK

SEQ ID NO: 83010 - protein, 10 aa, Homo sapiens
  Table A; Target 83010; HLA-B*27:02; STRA8; ENSG00000146857; CTA
QTLDNLLKLK

SEQ ID NO: 83011 - protein, 10 aa, Homo sapiens
  Table A; Target 83011; HLA-B*57:01; STRA8; ENSG00000146857; CTA
QTLDNLLKLK

SEQ ID NO: 83012 - protein, 9 aa, Homo sapiens
  Table A; Target 83012; HLA-A*11:01; STRA8; ENSG00000146857; CTA
QTMDLLTGS

SEQ ID NO: 83013 - protein, 8 aa, Homo sapiens
  Table A; Target 83013; HLA-B*37:01; STRA8; ENSG00000146857; CTA
RATLAALF

SEQ ID NO: 83014 - protein, 8 aa, Homo sapiens
  Table A; Target 83014; HLA-B*57:01; STRA8; ENSG00000146857; CTA
RATLAALF

SEQ ID NO: 83015 - protein, 8 aa, Homo sapiens
  Table A; Target 83015; HLA-B*58:01; STRA8; ENSG00000146857; CTA
RATLAALF

SEQ ID NO: 83016 - protein, 10 aa, Homo sapiens
  Table A; Target 83016; HLA-B*58:01; STRA8; ENSG00000146857; CTA
RATPQLPAQL

SEQ ID NO: 83017 - protein, 10 aa, Homo sapiens
  Table A; Target 83017; HLA-C*16:02; STRA8; ENSG00000146857; CTA
RATPQLPAQL

SEQ ID NO: 83018 - protein, 9 aa, Homo sapiens
  Table A; Target 83018; HLA-B*46:01; STRA8; ENSG00000146857; CTA
RGPATLAEA

SEQ ID NO: 83019 - protein, 9 aa, Homo sapiens
  Table A; Target 83019; HLA-C*01:02; STRA8; ENSG00000146857; CTA
RGPATLAEA

SEQ ID NO: 83020 - protein, 8 aa, Homo sapiens
  Table A; Target 83020; HLA-A*32:01; STRA8; ENSG00000146857; CTA
SAAISHLW

SEQ ID NO: 83021 - protein, 8 aa, Homo sapiens
  Table A; Target 83021; HLA-B*44:02; STRA8; ENSG00000146857; CTA
SAAISHLW

SEQ ID NO: 83022 - protein, 8 aa, Homo sapiens
  Table A; Target 83022; HLA-B*57:01; STRA8; ENSG00000146857; CTA
SAAISHLW

SEQ ID NO: 83023 - protein, 8 aa, Homo sapiens
  Table A; Target 83023; HLA-B*58:01; STRA8; ENSG00000146857; CTA
SAAISHLW

SEQ ID NO: 83024 - protein, 8 aa, Homo sapiens
  Table A; Target 83024; HLA-C*16:01; STRA8; ENSG00000146857; CTA
SAAISHLW

SEQ ID NO: 83025 - protein, 8 aa, Homo sapiens
  Table A; Target 83025; HLA-B*18:01; STRA8; ENSG00000146857; CTA
SDLIASKW

SEQ ID NO: 83026 - protein, 8 aa, Homo sapiens
  Table A; Target 83026; HLA-B*27:02; STRA8; ENSG00000146857; CTA
SDLIASKW

SEQ ID NO: 83027 - protein, 8 aa, Homo sapiens
  Table A; Target 83027; HLA-B*37:01; STRA8; ENSG00000146857; CTA
SDLIASKW

SEQ ID NO: 83028 - protein, 8 aa, Homo sapiens
  Table A; Target 83028; HLA-B*40:02; STRA8; ENSG00000146857; CTA
SDLIASKW

SEQ ID NO: 83029 - protein, 8 aa, Homo sapiens
  Table A; Target 83029; HLA-B*44:02; STRA8; ENSG00000146857; CTA
SDLIASKW

SEQ ID NO: 83030 - protein, 8 aa, Homo sapiens
  Table A; Target 83030; HLA-B*44:03; STRA8; ENSG00000146857; CTA
SDLIASKW

SEQ ID NO: 83031 - protein, 8 aa, Homo sapiens
  Table A; Target 83031; HLA-B*57:01; STRA8; ENSG00000146857; CTA
SDLIASKW

SEQ ID NO: 83032 - protein, 8 aa, Homo sapiens
  Table A; Target 83032; HLA-C*07:04; STRA8; ENSG00000146857; CTA
SDLIASKW

SEQ ID NO: 83033 - protein, 8 aa, Homo sapiens
  Table A; Target 83033; HLA-C*16:04; STRA8; ENSG00000146857; CTA
SDLIASKW

SEQ ID NO: 83034 - protein, 8 aa, Homo sapiens
  Table A; Target 83034; HLA-B*08:01; STRA8; ENSG00000146857; CTA
SEERKASL

SEQ ID NO: 83035 - protein, 8 aa, Homo sapiens
  Table A; Target 83035; HLA-B*37:01; STRA8; ENSG00000146857; CTA
SEERKASL

SEQ ID NO: 83036 - protein, 8 aa, Homo sapiens
  Table A; Target 83036; HLA-B*40:01; STRA8; ENSG00000146857; CTA
SEERKASL

SEQ ID NO: 83037 - protein, 8 aa, Homo sapiens
  Table A; Target 83037; HLA-B*40:02; STRA8; ENSG00000146857; CTA
SEERKASL

SEQ ID NO: 83038 - protein, 9 aa, Homo sapiens
  Table A; Target 83038; HLA-B*49:01; STRA8; ENSG00000146857; CTA
SEVPSTSSS

SEQ ID NO: 83039 - protein, 8 aa, Homo sapiens
  Table A; Target 83039; HLA-C*14:02; STRA8; ENSG00000146857; CTA
SFLDKSEV

SEQ ID NO: 83040 - protein, 9 aa, Homo sapiens
  Table A; Target 83040; HLA-C*14:02; STRA8; ENSG00000146857; CTA
SFPQNGSSP

SEQ ID NO: 83041 - protein, 11 aa, Homo sapiens
  Table A; Target 83041; HLA-A*29:02; STRA8; ENSG00000146857; CTA
SFPQNGSSPWY

SEQ ID NO: 83042 - protein, 8 aa, Homo sapiens
  Table A; Target 83042; HLA-C*01:02; STRA8; ENSG00000146857; CTA
SFPVDEEM

SEQ ID NO: 83043 - protein, 8 aa, Homo sapiens
  Table A; Target 83043; HLA-C*04:01; STRA8; ENSG00000146857; CTA
SFPVDEEM

SEQ ID NO: 83044 - protein, 8 aa, Homo sapiens
  Table A; Target 83044; HLA-C*14:02; STRA8; ENSG00000146857; CTA
SFPVDEEM

SEQ ID NO: 83045 - protein, 9 aa, Homo sapiens
  Table A; Target 83045; HLA-B*38:01; STRA8; ENSG00000146857; CTA
SHIPELEQT

SEQ ID NO: 83046 - protein, 10 aa, Homo sapiens
  Table A; Target 83046; HLA-B*27:05; STRA8; ENSG00000146857; CTA
SHIPELEQTL

SEQ ID NO: 83047 - protein, 10 aa, Homo sapiens
  Table A; Target 83047; HLA-B*39:01; STRA8; ENSG00000146857; CTA
SHIPELEQTL

SEQ ID NO: 83048 - protein, 9 aa, Homo sapiens
  Table A; Target 83048; HLA-A*01:01; STRA8; ENSG00000146857; CTA
SLEEVKKEY

SEQ ID NO: 83049 - protein, 9 aa, Homo sapiens
  Table A; Target 83049; HLA-A*29:02; STRA8; ENSG00000146857; CTA
SLEEVKKEY

SEQ ID NO: 83050 - protein, 9 aa, Homo sapiens
  Table A; Target 83050; HLA-A*30:02; STRA8; ENSG00000146857; CTA
SLEEVKKEY

SEQ ID NO: 83051 - protein, 9 aa, Homo sapiens
  Table A; Target 83051; HLA-A*32:01; STRA8; ENSG00000146857; CTA
SLEEVKKEY

SEQ ID NO: 83052 - protein, 9 aa, Homo sapiens
  Table A; Target 83052; HLA-B*15:01; STRA8; ENSG00000146857; CTA
SLEEVKKEY

SEQ ID NO: 83053 - protein, 9 aa, Homo sapiens
  Table A; Target 83053; HLA-B*15:03; STRA8; ENSG00000146857; CTA
SLEEVKKEY

SEQ ID NO: 83054 - protein, 9 aa, Homo sapiens
  Table A; Target 83054; HLA-B*18:01; STRA8; ENSG00000146857; CTA
SLEEVKKEY

SEQ ID NO: 83055 - protein, 9 aa, Homo sapiens
  Table A; Target 83055; HLA-B*44:02; STRA8; ENSG00000146857; CTA
SLEEVKKEY

SEQ ID NO: 83056 - protein, 9 aa, Homo sapiens
  Table A; Target 83056; HLA-B*44:03; STRA8; ENSG00000146857; CTA
SLEEVKKEY

SEQ ID NO: 83057 - protein, 9 aa, Homo sapiens
  Table A; Target 83057; HLA-B*46:01; STRA8; ENSG00000146857; CTA
SLEEVKKEY

SEQ ID NO: 83058 - protein, 9 aa, Homo sapiens
  Table A; Target 83058; HLA-B*58:01; STRA8; ENSG00000146857; CTA
SLEEVKKEY

SEQ ID NO: 83059 - protein, 9 aa, Homo sapiens
  Table A; Target 83059; HLA-C*02:02; STRA8; ENSG00000146857; CTA
SLEEVKKEY

SEQ ID NO: 83060 - protein, 9 aa, Homo sapiens
  Table A; Target 83060; HLA-C*03:03; STRA8; ENSG00000146857; CTA
SLEEVKKEY

SEQ ID NO: 83061 - protein, 9 aa, Homo sapiens
  Table A; Target 83061; HLA-C*07:04; STRA8; ENSG00000146857; CTA
SLEEVKKEY

SEQ ID NO: 83062 - protein, 9 aa, Homo sapiens
  Table A; Target 83062; HLA-C*12:03; STRA8; ENSG00000146857; CTA
SLEEVKKEY

SEQ ID NO: 83063 - protein, 9 aa, Homo sapiens
  Table A; Target 83063; HLA-C*16:01; STRA8; ENSG00000146857; CTA
SLEEVKKEY

SEQ ID NO: 83064 - protein, 9 aa, Homo sapiens
  Table A; Target 83064; HLA-C*16:02; STRA8; ENSG00000146857; CTA
SLEEVKKEY

SEQ ID NO: 83065 - protein, 9 aa, Homo sapiens
  Table A; Target 83065; HLA-C*16:04; STRA8; ENSG00000146857; CTA
SLEEVKKEY

SEQ ID NO: 83066 - protein, 9 aa, Homo sapiens
  Table A; Target 83066; HLA-A*03:01; STRA8; ENSG00000146857; CTA
SLRQAWAQK

SEQ ID NO: 83067 - protein, 9 aa, Homo sapiens
  Table A; Target 83067; HLA-A*02:01; STRA8; ENSG00000146857; CTA
SLVSTPEEI

SEQ ID NO: 83068 - protein, 9 aa, Homo sapiens
  Table A; Target 83068; HLA-A*02:03; STRA8; ENSG00000146857; CTA
SLVSTPEEI

SEQ ID NO: 83069 - protein, 9 aa, Homo sapiens
  Table A; Target 83069; HLA-B*13:02; STRA8; ENSG00000146857; CTA
SLVSTPEEI

SEQ ID NO: 83070 - protein, 9 aa, Homo sapiens
  Table A; Target 83070; HLA-B*55:01; STRA8; ENSG00000146857; CTA
SLVSTPEEI

SEQ ID NO: 83071 - protein, 9 aa, Homo sapiens
  Table A; Target 83071; HLA-A*02:01; STRA8; ENSG00000146857; CTA
SMYSGNDSF

SEQ ID NO: 83072 - protein, 9 aa, Homo sapiens
  Table A; Target 83072; HLA-A*23:01; STRA8; ENSG00000146857; CTA
SMYSGNDSF

SEQ ID NO: 83073 - protein, 9 aa, Homo sapiens
  Table A; Target 83073; HLA-A*24:02; STRA8; ENSG00000146857; CTA
SMYSGNDSF

SEQ ID NO: 83074 - protein, 9 aa, Homo sapiens
  Table A; Target 83074; HLA-A*25:01; STRA8; ENSG00000146857; CTA
SMYSGNDSF

SEQ ID NO: 83075 - protein, 9 aa, Homo sapiens
  Table A; Target 83075; HLA-A*26:01; STRA8; ENSG00000146857; CTA
SMYSGNDSF

SEQ ID NO: 83076 - protein, 9 aa, Homo sapiens
  Table A; Target 83076; HLA-A*29:02; STRA8; ENSG00000146857; CTA
SMYSGNDSF

SEQ ID NO: 83077 - protein, 9 aa, Homo sapiens
  Table A; Target 83077; HLA-A*30:02; STRA8; ENSG00000146857; CTA
SMYSGNDSF

SEQ ID NO: 83078 - protein, 9 aa, Homo sapiens
  Table A; Target 83078; HLA-A*32:01; STRA8; ENSG00000146857; CTA
SMYSGNDSF

SEQ ID NO: 83079 - protein, 9 aa, Homo sapiens
  Table A; Target 83079; HLA-B*07:02; STRA8; ENSG00000146857; CTA
SMYSGNDSF

SEQ ID NO: 83080 - protein, 9 aa, Homo sapiens
  Table A; Target 83080; HLA-B*08:01; STRA8; ENSG00000146857; CTA
SMYSGNDSF

SEQ ID NO: 83081 - protein, 9 aa, Homo sapiens
  Table A; Target 83081; HLA-B*13:02; STRA8; ENSG00000146857; CTA
SMYSGNDSF

SEQ ID NO: 83082 - protein, 9 aa, Homo sapiens
  Table A; Target 83082; HLA-B*15:03; STRA8; ENSG00000146857; CTA
SMYSGNDSF

SEQ ID NO: 83083 - protein, 9 aa, Homo sapiens
  Table A; Target 83083; HLA-B*27:05; STRA8; ENSG00000146857; CTA
SMYSGNDSF

SEQ ID NO: 83084 - protein, 9 aa, Homo sapiens
  Table A; Target 83084; HLA-B*35:01; STRA8; ENSG00000146857; CTA
SMYSGNDSF

SEQ ID NO: 83085 - protein, 9 aa, Homo sapiens
  Table A; Target 83085; HLA-B*37:01; STRA8; ENSG00000146857; CTA
SMYSGNDSF

SEQ ID NO: 83086 - protein, 9 aa, Homo sapiens
  Table A; Target 83086; HLA-B*38:01; STRA8; ENSG00000146857; CTA
SMYSGNDSF

SEQ ID NO: 83087 - protein, 9 aa, Homo sapiens
  Table A; Target 83087; HLA-B*39:01; STRA8; ENSG00000146857; CTA
SMYSGNDSF

SEQ ID NO: 83088 - protein, 9 aa, Homo sapiens
  Table A; Target 83088; HLA-B*46:01; STRA8; ENSG00000146857; CTA
SMYSGNDSF

SEQ ID NO: 83089 - protein, 9 aa, Homo sapiens
  Table A; Target 83089; HLA-B*55:01; STRA8; ENSG00000146857; CTA
SMYSGNDSF

SEQ ID NO: 83090 - protein, 9 aa, Homo sapiens
  Table A; Target 83090; HLA-B*58:01; STRA8; ENSG00000146857; CTA
SMYSGNDSF

SEQ ID NO: 83091 - protein, 9 aa, Homo sapiens
  Table A; Target 83091; HLA-C*01:02; STRA8; ENSG00000146857; CTA
SMYSGNDSF

SEQ ID NO: 83092 - protein, 9 aa, Homo sapiens
  Table A; Target 83092; HLA-C*02:02; STRA8; ENSG00000146857; CTA
SMYSGNDSF

SEQ ID NO: 83093 - protein, 9 aa, Homo sapiens
  Table A; Target 83093; HLA-C*03:03; STRA8; ENSG00000146857; CTA
SMYSGNDSF

SEQ ID NO: 83094 - protein, 9 aa, Homo sapiens
  Table A; Target 83094; HLA-C*03:04; STRA8; ENSG00000146857; CTA
SMYSGNDSF

SEQ ID NO: 83095 - protein, 9 aa, Homo sapiens
  Table A; Target 83095; HLA-C*04:01; STRA8; ENSG00000146857; CTA
SMYSGNDSF

SEQ ID NO: 83096 - protein, 9 aa, Homo sapiens
  Table A; Target 83096; HLA-C*05:01; STRA8; ENSG00000146857; CTA
SMYSGNDSF

SEQ ID NO: 83097 - protein, 9 aa, Homo sapiens
  Table A; Target 83097; HLA-C*07:02; STRA8; ENSG00000146857; CTA
SMYSGNDSF

SEQ ID NO: 83098 - protein, 9 aa, Homo sapiens
  Table A; Target 83098; HLA-C*07:04; STRA8; ENSG00000146857; CTA
SMYSGNDSF

SEQ ID NO: 83099 - protein, 9 aa, Homo sapiens
  Table A; Target 83099; HLA-C*12:03; STRA8; ENSG00000146857; CTA
SMYSGNDSF

SEQ ID NO: 83100 - protein, 9 aa, Homo sapiens
  Table A; Target 83100; HLA-C*14:02; STRA8; ENSG00000146857; CTA
SMYSGNDSF

SEQ ID NO: 83101 - protein, 9 aa, Homo sapiens
  Table A; Target 83101; HLA-C*16:01; STRA8; ENSG00000146857; CTA
SMYSGNDSF

SEQ ID NO: 83102 - protein, 9 aa, Homo sapiens
  Table A; Target 83102; HLA-C*16:04; STRA8; ENSG00000146857; CTA
SMYSGNDSF

SEQ ID NO: 83103 - protein, 9 aa, Homo sapiens
  Table A; Target 83103; HLA-B*15:03; STRA8; ENSG00000146857; CTA
SQARHRATL

SEQ ID NO: 83104 - protein, 9 aa, Homo sapiens
  Table A; Target 83104; HLA-C*16:01; STRA8; ENSG00000146857; CTA
SQARHRATL

SEQ ID NO: 83105 - protein, 9 aa, Homo sapiens
  Table A; Target 83105; HLA-B*13:02; STRA8; ENSG00000146857; CTA
SQGASCSLV

SEQ ID NO: 83106 - protein, 9 aa, Homo sapiens
  Table A; Target 83106; HLA-A*03:02; STRA8; ENSG00000146857; CTA
SQSDLIASK

SEQ ID NO: 83107 - protein, 9 aa, Homo sapiens
  Table A; Target 83107; HLA-A*11:01; STRA8; ENSG00000146857; CTA
SQSDLIASK

SEQ ID NO: 83108 - protein, 9 aa, Homo sapiens
  Table A; Target 83108; HLA-B*13:02; STRA8; ENSG00000146857; CTA
SQSDLIASK

SEQ ID NO: 83109 - protein, 9 aa, Homo sapiens
  Table A; Target 83109; HLA-B*27:02; STRA8; ENSG00000146857; CTA
SQSDLIASK

SEQ ID NO: 83110 - protein, 9 aa, Homo sapiens
  Table A; Target 83110; HLA-B*27:05; STRA8; ENSG00000146857; CTA
SQSDLIASK

SEQ ID NO: 83111 - protein, 9 aa, Homo sapiens
  Table A; Target 83111; HLA-C*07:06; STRA8; ENSG00000146857; CTA
SQSDLIASK

SEQ ID NO: 83112 - protein, 10 aa, Homo sapiens
  Table A; Target 83112; HLA-A*11:01; STRA8; ENSG00000146857; CTA
SQSDLIASKW

SEQ ID NO: 83113 - protein, 10 aa, Homo sapiens
  Table A; Target 83113; HLA-A*23:01; STRA8; ENSG00000146857; CTA
SQSDLIASKW

SEQ ID NO: 83114 - protein, 10 aa, Homo sapiens
  Table A; Target 83114; HLA-A*24:02; STRA8; ENSG00000146857; CTA
SQSDLIASKW

SEQ ID NO: 83115 - protein, 10 aa, Homo sapiens
  Table A; Target 83115; HLA-A*25:01; STRA8; ENSG00000146857; CTA
SQSDLIASKW

SEQ ID NO: 83116 - protein, 10 aa, Homo sapiens
  Table A; Target 83116; HLA-A*26:01; STRA8; ENSG00000146857; CTA
SQSDLIASKW

SEQ ID NO: 83117 - protein, 10 aa, Homo sapiens
  Table A; Target 83117; HLA-A*29:02; STRA8; ENSG00000146857; CTA
SQSDLIASKW

SEQ ID NO: 83118 - protein, 10 aa, Homo sapiens
  Table A; Target 83118; HLA-A*30:01; STRA8; ENSG00000146857; CTA
SQSDLIASKW

SEQ ID NO: 83119 - protein, 10 aa, Homo sapiens
  Table A; Target 83119; HLA-A*30:02; STRA8; ENSG00000146857; CTA
SQSDLIASKW

SEQ ID NO: 83120 - protein, 10 aa, Homo sapiens
  Table A; Target 83120; HLA-A*32:01; STRA8; ENSG00000146857; CTA
SQSDLIASKW

SEQ ID NO: 83121 - protein, 10 aa, Homo sapiens
  Table A; Target 83121; HLA-A*68:01; STRA8; ENSG00000146857; CTA
SQSDLIASKW

SEQ ID NO: 83122 - protein, 10 aa, Homo sapiens
  Table A; Target 83122; HLA-A*68:02; STRA8; ENSG00000146857; CTA
SQSDLIASKW

SEQ ID NO: 83123 - protein, 10 aa, Homo sapiens
  Table A; Target 83123; HLA-B*13:02; STRA8; ENSG00000146857; CTA
SQSDLIASKW

SEQ ID NO: 83124 - protein, 10 aa, Homo sapiens
  Table A; Target 83124; HLA-B*15:01; STRA8; ENSG00000146857; CTA
SQSDLIASKW

SEQ ID NO: 83125 - protein, 10 aa, Homo sapiens
  Table A; Target 83125; HLA-B*15:03; STRA8; ENSG00000146857; CTA
SQSDLIASKW

SEQ ID NO: 83126 - protein, 10 aa, Homo sapiens
  Table A; Target 83126; HLA-B*27:02; STRA8; ENSG00000146857; CTA
SQSDLIASKW

SEQ ID NO: 83127 - protein, 10 aa, Homo sapiens
  Table A; Target 83127; HLA-B*27:05; STRA8; ENSG00000146857; CTA
SQSDLIASKW

SEQ ID NO: 83128 - protein, 10 aa, Homo sapiens
  Table A; Target 83128; HLA-B*38:01; STRA8; ENSG00000146857; CTA
SQSDLIASKW

SEQ ID NO: 83129 - protein, 10 aa, Homo sapiens
  Table A; Target 83129; HLA-B*44:02; STRA8; ENSG00000146857; CTA
SQSDLIASKW

SEQ ID NO: 83130 - protein, 10 aa, Homo sapiens
  Table A; Target 83130; HLA-B*44:03; STRA8; ENSG00000146857; CTA
SQSDLIASKW

SEQ ID NO: 83131 - protein, 10 aa, Homo sapiens
  Table A; Target 83131; HLA-B*57:01; STRA8; ENSG00000146857; CTA
SQSDLIASKW

SEQ ID NO: 83132 - protein, 10 aa, Homo sapiens
  Table A; Target 83132; HLA-B*58:01; STRA8; ENSG00000146857; CTA
SQSDLIASKW

SEQ ID NO: 83133 - protein, 10 aa, Homo sapiens
  Table A; Target 83133; HLA-C*02:02; STRA8; ENSG00000146857; CTA
SQSDLIASKW

SEQ ID NO: 83134 - protein, 10 aa, Homo sapiens
  Table A; Target 83134; HLA-C*06:02; STRA8; ENSG00000146857; CTA
SQSDLIASKW

SEQ ID NO: 83135 - protein, 10 aa, Homo sapiens
  Table A; Target 83135; HLA-C*07:04; STRA8; ENSG00000146857; CTA
SQSDLIASKW

SEQ ID NO: 83136 - protein, 10 aa, Homo sapiens
  Table A; Target 83136; HLA-C*07:06; STRA8; ENSG00000146857; CTA
SQSDLIASKW

SEQ ID NO: 83137 - protein, 10 aa, Homo sapiens
  Table A; Target 83137; HLA-C*12:03; STRA8; ENSG00000146857; CTA
SQSDLIASKW

SEQ ID NO: 83138 - protein, 10 aa, Homo sapiens
  Table A; Target 83138; HLA-C*16:04; STRA8; ENSG00000146857; CTA
SQSDLIASKW

SEQ ID NO: 83139 - protein, 8 aa, Homo sapiens
  Table A; Target 83139; HLA-A*11:01; STRA8; ENSG00000146857; CTA
SSLEEVKK

SEQ ID NO: 83140 - protein, 10 aa, Homo sapiens
  Table A; Target 83140; HLA-A*01:01; STRA8; ENSG00000146857; CTA
SSLEEVKKEY

SEQ ID NO: 83141 - protein, 10 aa, Homo sapiens
  Table A; Target 83141; HLA-A*29:02; STRA8; ENSG00000146857; CTA
SSLEEVKKEY

SEQ ID NO: 83142 - protein, 10 aa, Homo sapiens
  Table A; Target 83142; HLA-A*30:02; STRA8; ENSG00000146857; CTA
SSLEEVKKEY

SEQ ID NO: 83143 - protein, 10 aa, Homo sapiens
  Table A; Target 83143; HLA-B*44:02; STRA8; ENSG00000146857; CTA
SSLEEVKKEY

SEQ ID NO: 83144 - protein, 10 aa, Homo sapiens
  Table A; Target 83144; HLA-B*44:03; STRA8; ENSG00000146857; CTA
SSLEEVKKEY

SEQ ID NO: 83145 - protein, 10 aa, Homo sapiens
  Table A; Target 83145; HLA-B*57:01; STRA8; ENSG00000146857; CTA
SSLEEVKKEY

SEQ ID NO: 83146 - protein, 10 aa, Homo sapiens
  Table A; Target 83146; HLA-B*58:01; STRA8; ENSG00000146857; CTA
SSLEEVKKEY

SEQ ID NO: 83147 - protein, 10 aa, Homo sapiens
  Table A; Target 83147; HLA-C*16:01; STRA8; ENSG00000146857; CTA
SSLEEVKKEY

SEQ ID NO: 83148 - protein, 10 aa, Homo sapiens
  Table A; Target 83148; HLA-C*16:02; STRA8; ENSG00000146857; CTA
SSLEEVKKEY

SEQ ID NO: 83149 - protein, 9 aa, Homo sapiens
  Table A; Target 83149; HLA-A*02:01; STRA8; ENSG00000146857; CTA
SSSSVLASC

SEQ ID NO: 83150 - protein, 9 aa, Homo sapiens
  Table A; Target 83150; HLA-B*54:01; STRA8; ENSG00000146857; CTA
SSSSVLASC

SEQ ID NO: 83151 - protein, 9 aa, Homo sapiens
  Table A; Target 83151; HLA-B*56:01; STRA8; ENSG00000146857; CTA
SSSSVLASC

SEQ ID NO: 83152 - protein, 10 aa, Homo sapiens
  Table A; Target 83152; HLA-C*06:02; STRA8; ENSG00000146857; CTA
SSSSVLASCN

SEQ ID NO: 83153 - protein, 9 aa, Homo sapiens
  Table A; Target 83153; HLA-B*07:02; STRA8; ENSG00000146857; CTA
STSSSSSVL

SEQ ID NO: 83154 - protein, 9 aa, Homo sapiens
  Table A; Target 83154; HLA-B*27:05; STRA8; ENSG00000146857; CTA
STSSSSSVL

SEQ ID NO: 83155 - protein, 9 aa, Homo sapiens
  Table A; Target 83155; HLA-B*35:03; STRA8; ENSG00000146857; CTA
STSSSSSVL

SEQ ID NO: 83156 - protein, 9 aa, Homo sapiens
  Table A; Target 83156; HLA-B*39:01; STRA8; ENSG00000146857; CTA
STSSSSSVL

SEQ ID NO: 83157 - protein, 9 aa, Homo sapiens
  Table A; Target 83157; HLA-C*01:02; STRA8; ENSG00000146857; CTA
STSSSSSVL

SEQ ID NO: 83158 - protein, 9 aa, Homo sapiens
  Table A; Target 83158; HLA-C*03:03; STRA8; ENSG00000146857; CTA
STSSSSSVL

SEQ ID NO: 83159 - protein, 9 aa, Homo sapiens
  Table A; Target 83159; HLA-C*03:04; STRA8; ENSG00000146857; CTA
STSSSSSVL

SEQ ID NO: 83160 - protein, 9 aa, Homo sapiens
  Table A; Target 83160; HLA-C*12:03; STRA8; ENSG00000146857; CTA
STSSSSSVL

SEQ ID NO: 83161 - protein, 9 aa, Homo sapiens
  Table A; Target 83161; HLA-C*14:02; STRA8; ENSG00000146857; CTA
STSSSSSVL

SEQ ID NO: 83162 - protein, 9 aa, Homo sapiens
  Table A; Target 83162; HLA-A*30:01; STRA8; ENSG00000146857; CTA
TETFDDEDL

SEQ ID NO: 83163 - protein, 9 aa, Homo sapiens
  Table A; Target 83163; HLA-B*39:01; STRA8; ENSG00000146857; CTA
TETFDDEDL

SEQ ID NO: 83164 - protein, 9 aa, Homo sapiens
  Table A; Target 83164; HLA-B*40:01; STRA8; ENSG00000146857; CTA
TETFDDEDL

SEQ ID NO: 83165 - protein, 9 aa, Homo sapiens
  Table A; Target 83165; HLA-B*40:02; STRA8; ENSG00000146857; CTA
TETFDDEDL

SEQ ID NO: 83166 - protein, 9 aa, Homo sapiens
  Table A; Target 83166; HLA-B*07:02; STRA8; ENSG00000146857; CTA
TGSGIITPQ

SEQ ID NO: 83167 - protein, 9 aa, Homo sapiens
  Table A; Target 83167; HLA-B*27:02; STRA8; ENSG00000146857; CTA
TGSGIITPQ

SEQ ID NO: 83168 - protein, 9 aa, Homo sapiens
  Table A; Target 83168; HLA-B*27:05; STRA8; ENSG00000146857; CTA
TGSGIITPQ

SEQ ID NO: 83169 - protein, 9 aa, Homo sapiens
  Table A; Target 83169; HLA-C*04:01; STRA8; ENSG00000146857; CTA
TGSGIITPQ

SEQ ID NO: 83170 - protein, 9 aa, Homo sapiens
  Table A; Target 83170; HLA-C*06:02; STRA8; ENSG00000146857; CTA
TGSGIITPQ

SEQ ID NO: 83171 - protein, 9 aa, Homo sapiens
  Table A; Target 83171; HLA-C*07:01; STRA8; ENSG00000146857; CTA
TGSGIITPQ

SEQ ID NO: 83172 - protein, 9 aa, Homo sapiens
  Table A; Target 83172; HLA-C*07:04; STRA8; ENSG00000146857; CTA
TGSGIITPQ

SEQ ID NO: 83173 - protein, 9 aa, Homo sapiens
  Table A; Target 83173; HLA-C*12:03; STRA8; ENSG00000146857; CTA
TGSGIITPQ

SEQ ID NO: 83174 - protein, 9 aa, Homo sapiens
  Table A; Target 83174; HLA-A*02:01; STRA8; ENSG00000146857; CTA
TLAALFNNL

SEQ ID NO: 83175 - protein, 9 aa, Homo sapiens
  Table A; Target 83175; HLA-A*02:03; STRA8; ENSG00000146857; CTA
TLAALFNNL

SEQ ID NO: 83176 - protein, 9 aa, Homo sapiens
  Table A; Target 83176; HLA-A*02:04; STRA8; ENSG00000146857; CTA
TLAALFNNL

SEQ ID NO: 83177 - protein, 9 aa, Homo sapiens
  Table A; Target 83177; HLA-A*02:07; STRA8; ENSG00000146857; CTA
TLAALFNNL

SEQ ID NO: 83178 - protein, 9 aa, Homo sapiens
  Table A; Target 83178; HLA-A*03:01; STRA8; ENSG00000146857; CTA
TLAALFNNL

SEQ ID NO: 83179 - protein, 9 aa, Homo sapiens
  Table A; Target 83179; HLA-A*03:02; STRA8; ENSG00000146857; CTA
TLAALFNNL

SEQ ID NO: 83180 - protein, 9 aa, Homo sapiens
  Table A; Target 83180; HLA-A*23:01; STRA8; ENSG00000146857; CTA
TLAALFNNL

SEQ ID NO: 83181 - protein, 9 aa, Homo sapiens
  Table A; Target 83181; HLA-A*24:02; STRA8; ENSG00000146857; CTA
TLAALFNNL

SEQ ID NO: 83182 - protein, 9 aa, Homo sapiens
  Table A; Target 83182; HLA-A*25:01; STRA8; ENSG00000146857; CTA
TLAALFNNL

SEQ ID NO: 83183 - protein, 9 aa, Homo sapiens
  Table A; Target 83183; HLA-A*26:01; STRA8; ENSG00000146857; CTA
TLAALFNNL

SEQ ID NO: 83184 - protein, 9 aa, Homo sapiens
  Table A; Target 83184; HLA-A*30:01; STRA8; ENSG00000146857; CTA
TLAALFNNL

SEQ ID NO: 83185 - protein, 9 aa, Homo sapiens
  Table A; Target 83185; HLA-A*31:01; STRA8; ENSG00000146857; CTA
TLAALFNNL

SEQ ID NO: 83186 - protein, 9 aa, Homo sapiens
  Table A; Target 83186; HLA-A*32:01; STRA8; ENSG00000146857; CTA
TLAALFNNL

SEQ ID NO: 83187 - protein, 9 aa, Homo sapiens
  Table A; Target 83187; HLA-A*33:03; STRA8; ENSG00000146857; CTA
TLAALFNNL

SEQ ID NO: 83188 - protein, 9 aa, Homo sapiens
  Table A; Target 83188; HLA-A*68:01; STRA8; ENSG00000146857; CTA
TLAALFNNL

SEQ ID NO: 83189 - protein, 9 aa, Homo sapiens
  Table A; Target 83189; HLA-B*08:01; STRA8; ENSG00000146857; CTA
TLAALFNNL

SEQ ID NO: 83190 - protein, 9 aa, Homo sapiens
  Table A; Target 83190; HLA-B*13:02; STRA8; ENSG00000146857; CTA
TLAALFNNL

SEQ ID NO: 83191 - protein, 9 aa, Homo sapiens
  Table A; Target 83191; HLA-B*15:01; STRA8; ENSG00000146857; CTA
TLAALFNNL

SEQ ID NO: 83192 - protein, 9 aa, Homo sapiens
  Table A; Target 83192; HLA-B*27:05; STRA8; ENSG00000146857; CTA
TLAALFNNL

SEQ ID NO: 83193 - protein, 9 aa, Homo sapiens
  Table A; Target 83193; HLA-B*35:03; STRA8; ENSG00000146857; CTA
TLAALFNNL

SEQ ID NO: 83194 - protein, 9 aa, Homo sapiens
  Table A; Target 83194; HLA-B*38:01; STRA8; ENSG00000146857; CTA
TLAALFNNL

SEQ ID NO: 83195 - protein, 9 aa, Homo sapiens
  Table A; Target 83195; HLA-B*39:01; STRA8; ENSG00000146857; CTA
TLAALFNNL

SEQ ID NO: 83196 - protein, 9 aa, Homo sapiens
  Table A; Target 83196; HLA-B*40:01; STRA8; ENSG00000146857; CTA
TLAALFNNL

SEQ ID NO: 83197 - protein, 9 aa, Homo sapiens
  Table A; Target 83197; HLA-B*40:02; STRA8; ENSG00000146857; CTA
TLAALFNNL

SEQ ID NO: 83198 - protein, 9 aa, Homo sapiens
  Table A; Target 83198; HLA-B*55:01; STRA8; ENSG00000146857; CTA
TLAALFNNL

SEQ ID NO: 83199 - protein, 9 aa, Homo sapiens
  Table A; Target 83199; HLA-C*01:02; STRA8; ENSG00000146857; CTA
TLAALFNNL

SEQ ID NO: 83200 - protein, 9 aa, Homo sapiens
  Table A; Target 83200; HLA-C*02:02; STRA8; ENSG00000146857; CTA
TLAALFNNL

SEQ ID NO: 83201 - protein, 9 aa, Homo sapiens
  Table A; Target 83201; HLA-C*06:02; STRA8; ENSG00000146857; CTA
TLAALFNNL

SEQ ID NO: 83202 - protein, 9 aa, Homo sapiens
  Table A; Target 83202; HLA-C*07:04; STRA8; ENSG00000146857; CTA
TLAALFNNL

SEQ ID NO: 83203 - protein, 9 aa, Homo sapiens
  Table A; Target 83203; HLA-C*16:02; STRA8; ENSG00000146857; CTA
TLAALFNNL

SEQ ID NO: 83204 - protein, 8 aa, Homo sapiens
  Table A; Target 83204; HLA-A*01:01; STRA8; ENSG00000146857; CTA
TLDNLLKL

SEQ ID NO: 83205 - protein, 8 aa, Homo sapiens
  Table A; Target 83205; HLA-A*02:01; STRA8; ENSG00000146857; CTA
TLDNLLKL

SEQ ID NO: 83206 - protein, 8 aa, Homo sapiens
  Table A; Target 83206; HLA-A*02:04; STRA8; ENSG00000146857; CTA
TLDNLLKL

SEQ ID NO: 83207 - protein, 8 aa, Homo sapiens
  Table A; Target 83207; HLA-A*02:07; STRA8; ENSG00000146857; CTA
TLDNLLKL

SEQ ID NO: 83208 - protein, 8 aa, Homo sapiens
  Table A; Target 83208; HLA-C*04:01; STRA8; ENSG00000146857; CTA
TLDNLLKL

SEQ ID NO: 83209 - protein, 8 aa, Homo sapiens
  Table A; Target 83209; HLA-C*05:01; STRA8; ENSG00000146857; CTA
TLDNLLKL

SEQ ID NO: 83210 - protein, 9 aa, Homo sapiens
  Table A; Target 83210; HLA-A*02:07; STRA8; ENSG00000146857; CTA
TLDNLLKLK

SEQ ID NO: 83211 - protein, 9 aa, Homo sapiens
  Table A; Target 83211; HLA-A*03:01; STRA8; ENSG00000146857; CTA
TLDNLLKLK

SEQ ID NO: 83212 - protein, 9 aa, Homo sapiens
  Table A; Target 83212; HLA-A*03:02; STRA8; ENSG00000146857; CTA
TLDNLLKLK

SEQ ID NO: 83213 - protein, 10 aa, Homo sapiens
  Table A; Target 83213; HLA-A*02:07; STRA8; ENSG00000146857; CTA
TLDNLLKLKA

SEQ ID NO: 83214 - protein, 10 aa, Homo sapiens
  Table A; Target 83214; HLA-C*04:01; STRA8; ENSG00000146857; CTA
TMDLLTGSGI

SEQ ID NO: 83215 - protein, 11 aa, Homo sapiens
  Table A; Target 83215; HLA-B*35:01; STRA8; ENSG00000146857; CTA
TPEEILFEDAF

SEQ ID NO: 83216 - protein, 11 aa, Homo sapiens
  Table A; Target 83216; HLA-B*55:01; STRA8; ENSG00000146857; CTA
TPEEILFEDAF

SEQ ID NO: 83217 - protein, 9 aa, Homo sapiens
  Table A; Target 83217; HLA-B*35:01; STRA8; ENSG00000146857; CTA
TPEENSNPH

SEQ ID NO: 83218 - protein, 9 aa, Homo sapiens
  Table A; Target 83218; HLA-B*35:03; STRA8; ENSG00000146857; CTA
TPEENSNPH

SEQ ID NO: 83219 - protein, 9 aa, Homo sapiens
  Table A; Target 83219; HLA-B*55:01; STRA8; ENSG00000146857; CTA
TPEENSNPH

SEQ ID NO: 83220 - protein, 11 aa, Homo sapiens
  Table A; Target 83220; HLA-A*68:01; STRA8; ENSG00000146857; CTA
TPEENSNPHDR

SEQ ID NO: 83221 - protein, 9 aa, Homo sapiens
  Table A; Target 83221; HLA-B*35:03; STRA8; ENSG00000146857; CTA
TPQEAALPI

SEQ ID NO: 83222 - protein, 9 aa, Homo sapiens
  Table A; Target 83222; HLA-B*51:01; STRA8; ENSG00000146857; CTA
TPQEAALPI

SEQ ID NO: 83223 - protein, 9 aa, Homo sapiens
  Table A; Target 83223; HLA-C*07:02; STRA8; ENSG00000146857; CTA
TPQEAALPI

SEQ ID NO: 83224 - protein, 10 aa, Homo sapiens
  Table A; Target 83224; HLA-B*51:01; STRA8; ENSG00000146857; CTA
TPQEAALPIV

SEQ ID NO: 83225 - protein, 10 aa, Homo sapiens
  Table A; Target 83225; HLA-B*54:01; STRA8; ENSG00000146857; CTA
TPQEAALPIV

SEQ ID NO: 83226 - protein, 10 aa, Homo sapiens
  Table A; Target 83226; HLA-B*56:01; STRA8; ENSG00000146857; CTA
TPQEAALPIV

SEQ ID NO: 83227 - protein, 8 aa, Homo sapiens
  Table A; Target 83227; HLA-B*07:02; STRA8; ENSG00000146857; CTA
TPQLPAQL

SEQ ID NO: 83228 - protein, 8 aa, Homo sapiens
  Table A; Target 83228; HLA-B*08:01; STRA8; ENSG00000146857; CTA
TPQLPAQL

SEQ ID NO: 83229 - protein, 8 aa, Homo sapiens
  Table A; Target 83229; HLA-C*07:02; STRA8; ENSG00000146857; CTA
TPQLPAQL

SEQ ID NO: 83230 - protein, 11 aa, Homo sapiens
  Table A; Target 83230; HLA-B*07:02; STRA8; ENSG00000146857; CTA
TPQLPAQLQEL

SEQ ID NO: 83231 - protein, 11 aa, Homo sapiens
  Table A; Target 83231; HLA-B*35:03; STRA8; ENSG00000146857; CTA
TPQLPAQLQEL

SEQ ID NO: 83232 - protein, 11 aa, Homo sapiens
  Table A; Target 83232; HLA-B*56:01; STRA8; ENSG00000146857; CTA
TPQLPAQLQEL

SEQ ID NO: 83233 - protein, 11 aa, Homo sapiens
  Table A; Target 83233; HLA-C*07:02; STRA8; ENSG00000146857; CTA
TPQLPAQLQEL

SEQ ID NO: 83234 - protein, 9 aa, Homo sapiens
  Table A; Target 83234; HLA-A*23:01; STRA8; ENSG00000146857; CTA
TQVKQEASF

SEQ ID NO: 83235 - protein, 9 aa, Homo sapiens
  Table A; Target 83235; HLA-A*24:02; STRA8; ENSG00000146857; CTA
TQVKQEASF

SEQ ID NO: 83236 - protein, 9 aa, Homo sapiens
  Table A; Target 83236; HLA-A*25:01; STRA8; ENSG00000146857; CTA
TQVKQEASF

SEQ ID NO: 83237 - protein, 9 aa, Homo sapiens
  Table A; Target 83237; HLA-A*32:01; STRA8; ENSG00000146857; CTA
TQVKQEASF

SEQ ID NO: 83238 - protein, 9 aa, Homo sapiens
  Table A; Target 83238; HLA-B*13:02; STRA8; ENSG00000146857; CTA
TQVKQEASF

SEQ ID NO: 83239 - protein, 9 aa, Homo sapiens
  Table A; Target 83239; HLA-B*15:03; STRA8; ENSG00000146857; CTA
TQVKQEASF

SEQ ID NO: 83240 - protein, 9 aa, Homo sapiens
  Table A; Target 83240; HLA-B*18:01; STRA8; ENSG00000146857; CTA
TQVKQEASF

SEQ ID NO: 83241 - protein, 9 aa, Homo sapiens
  Table A; Target 83241; HLA-B*27:02; STRA8; ENSG00000146857; CTA
TQVKQEASF

SEQ ID NO: 83242 - protein, 9 aa, Homo sapiens
  Table A; Target 83242; HLA-B*27:05; STRA8; ENSG00000146857; CTA
TQVKQEASF

SEQ ID NO: 83243 - protein, 9 aa, Homo sapiens
  Table A; Target 83243; HLA-B*38:01; STRA8; ENSG00000146857; CTA
TQVKQEASF

SEQ ID NO: 83244 - protein, 9 aa, Homo sapiens
  Table A; Target 83244; HLA-B*39:01; STRA8; ENSG00000146857; CTA
TQVKQEASF

SEQ ID NO: 83245 - protein, 9 aa, Homo sapiens
  Table A; Target 83245; HLA-B*44:03; STRA8; ENSG00000146857; CTA
TQVKQEASF

SEQ ID NO: 83246 - protein, 9 aa, Homo sapiens
  Table A; Target 83246; HLA-B*46:01; STRA8; ENSG00000146857; CTA
TQVKQEASF

SEQ ID NO: 83247 - protein, 9 aa, Homo sapiens
  Table A; Target 83247; HLA-B*58:01; STRA8; ENSG00000146857; CTA
TQVKQEASF

SEQ ID NO: 83248 - protein, 9 aa, Homo sapiens
  Table A; Target 83248; HLA-C*07:04; STRA8; ENSG00000146857; CTA
TQVKQEASF

SEQ ID NO: 83249 - protein, 9 aa, Homo sapiens
  Table A; Target 83249; HLA-C*14:02; STRA8; ENSG00000146857; CTA
TQVKQEASF

SEQ ID NO: 83250 - protein, 9 aa, Homo sapiens
  Table A; Target 83250; HLA-C*16:04; STRA8; ENSG00000146857; CTA
TQVKQEASF

SEQ ID NO: 83251 - protein, 8 aa, Homo sapiens
  Table A; Target 83251; HLA-C*03:03; STRA8; ENSG00000146857; CTA
TSSSSSVL

SEQ ID NO: 83252 - protein, 8 aa, Homo sapiens
  Table A; Target 83252; HLA-C*03:04; STRA8; ENSG00000146857; CTA
TSSSSSVL

SEQ ID NO: 83253 - protein, 8 aa, Homo sapiens
  Table A; Target 83253; HLA-C*05:01; STRA8; ENSG00000146857; CTA
TSSSSSVL

SEQ ID NO: 83254 - protein, 8 aa, Homo sapiens
  Table A; Target 83254; HLA-B*39:01; STRA8; ENSG00000146857; CTA
TVYSQSDL

SEQ ID NO: 83255 - protein, 9 aa, Homo sapiens
  Table A; Target 83255; HLA-A*68:02; STRA8; ENSG00000146857; CTA
TVYSQSDLI

SEQ ID NO: 83256 - protein, 9 aa, Homo sapiens
  Table A; Target 83256; HLA-B*13:02; STRA8; ENSG00000146857; CTA
TVYSQSDLI

SEQ ID NO: 83257 - protein, 9 aa, Homo sapiens
  Table A; Target 83257; HLA-B*27:05; STRA8; ENSG00000146857; CTA
TVYSQSDLI

SEQ ID NO: 83258 - protein, 9 aa, Homo sapiens
  Table A; Target 83258; HLA-B*38:01; STRA8; ENSG00000146857; CTA
TVYSQSDLI

SEQ ID NO: 83259 - protein, 9 aa, Homo sapiens
  Table A; Target 83259; HLA-B*39:01; STRA8; ENSG00000146857; CTA
TVYSQSDLI

SEQ ID NO: 83260 - protein, 9 aa, Homo sapiens
  Table A; Target 83260; HLA-B*49:01; STRA8; ENSG00000146857; CTA
TVYSQSDLI

SEQ ID NO: 83261 - protein, 9 aa, Homo sapiens
  Table A; Target 83261; HLA-B*51:01; STRA8; ENSG00000146857; CTA
TVYSQSDLI

SEQ ID NO: 83262 - protein, 9 aa, Homo sapiens
  Table A; Target 83262; HLA-C*06:02; STRA8; ENSG00000146857; CTA
TVYSQSDLI

SEQ ID NO: 83263 - protein, 10 aa, Homo sapiens
  Table A; Target 83263; HLA-B*35:03; STRA8; ENSG00000146857; CTA
TVYSQSDLIA

SEQ ID NO: 83264 - protein, 10 aa, Homo sapiens
  Table A; Target 83264; HLA-B*54:01; STRA8; ENSG00000146857; CTA
TVYSQSDLIA

SEQ ID NO: 83265 - protein, 10 aa, Homo sapiens
  Table A; Target 83265; HLA-B*56:01; STRA8; ENSG00000146857; CTA
TVYSQSDLIA

SEQ ID NO: 83266 - protein, 11 aa, Homo sapiens
  Table A; Target 83266; HLA-A*03:01; STRA8; ENSG00000146857; CTA
TVYSQSDLIAS

SEQ ID NO: 83267 - protein, 11 aa, Homo sapiens
  Table A; Target 83267; HLA-A*03:02; STRA8; ENSG00000146857; CTA
TVYSQSDLIAS

SEQ ID NO: 83268 - protein, 11 aa, Homo sapiens
  Table A; Target 83268; HLA-A*11:01; STRA8; ENSG00000146857; CTA
TVYSQSDLIAS

SEQ ID NO: 83269 - protein, 11 aa, Homo sapiens
  Table A; Target 83269; HLA-A*31:01; STRA8; ENSG00000146857; CTA
TVYSQSDLIAS

SEQ ID NO: 83270 - protein, 11 aa, Homo sapiens
  Table A; Target 83270; HLA-A*33:01; STRA8; ENSG00000146857; CTA
TVYSQSDLIAS

SEQ ID NO: 83271 - protein, 11 aa, Homo sapiens
  Table A; Target 83271; HLA-B*27:05; STRA8; ENSG00000146857; CTA
TVYSQSDLIAS

SEQ ID NO: 83272 - protein, 10 aa, Homo sapiens
  Table A; Target 83272; HLA-C*12:03; STRA8; ENSG00000146857; CTA
VASFLDKSEV

SEQ ID NO: 83273 - protein, 10 aa, Homo sapiens
  Table A; Target 83273; HLA-C*16:02; STRA8; ENSG00000146857; CTA
VASFLDKSEV

SEQ ID NO: 83274 - protein, 10 aa, Homo sapiens
  Table A; Target 83274; HLA-B*37:01; STRA8; ENSG00000146857; CTA
VDSQGASCSL

SEQ ID NO: 83275 - protein, 10 aa, Homo sapiens
  Table A; Target 83275; HLA-B*40:02; STRA8; ENSG00000146857; CTA
VDSQGASCSL

SEQ ID NO: 83276 - protein, 9 aa, Homo sapiens
  Table A; Target 83276; HLA-B*15:03; STRA8; ENSG00000146857; CTA
VKKEYASMY

SEQ ID NO: 83277 - protein, 10 aa, Homo sapiens
  Table A; Target 83277; HLA-B*07:02; STRA8; ENSG00000146857; CTA
VPSTSSSSSV

SEQ ID NO: 83278 - protein, 10 aa, Homo sapiens
  Table A; Target 83278; HLA-B*56:01; STRA8; ENSG00000146857; CTA
VPSTSSSSSV

SEQ ID NO: 83279 - protein, 10 aa, Homo sapiens
  Table A; Target 83279; HLA-C*07:02; STRA8; ENSG00000146857; CTA
VPSTSSSSSV

SEQ ID NO: 83280 - protein, 11 aa, Homo sapiens
  Table A; Target 83280; HLA-B*07:02; STRA8; ENSG00000146857; CTA
VPSTSSSSSVL

SEQ ID NO: 83281 - protein, 11 aa, Homo sapiens
  Table A; Target 83281; HLA-B*35:01; STRA8; ENSG00000146857; CTA
VPSTSSSSSVL

SEQ ID NO: 83282 - protein, 11 aa, Homo sapiens
  Table A; Target 83282; HLA-B*35:03; STRA8; ENSG00000146857; CTA
VPSTSSSSSVL

SEQ ID NO: 83283 - protein, 11 aa, Homo sapiens
  Table A; Target 83283; HLA-B*55:01; STRA8; ENSG00000146857; CTA
VPSTSSSSSVL

SEQ ID NO: 83284 - protein, 11 aa, Homo sapiens
  Table A; Target 83284; HLA-B*56:01; STRA8; ENSG00000146857; CTA
VPSTSSSSSVL

SEQ ID NO: 83285 - protein, 11 aa, Homo sapiens
  Table A; Target 83285; HLA-C*01:02; STRA8; ENSG00000146857; CTA
VPSTSSSSSVL

SEQ ID NO: 83286 - protein, 11 aa, Homo sapiens
  Table A; Target 83286; HLA-C*03:03; STRA8; ENSG00000146857; CTA
VPSTSSSSSVL

SEQ ID NO: 83287 - protein, 11 aa, Homo sapiens
  Table A; Target 83287; HLA-C*07:02; STRA8; ENSG00000146857; CTA
VPSTSSSSSVL

SEQ ID NO: 83288 - protein, 9 aa, Homo sapiens
  Table A; Target 83288; HLA-A*01:01; STRA8; ENSG00000146857; CTA
VSAAISHLW

SEQ ID NO: 83289 - protein, 9 aa, Homo sapiens
  Table A; Target 83289; HLA-A*23:01; STRA8; ENSG00000146857; CTA
VSAAISHLW

SEQ ID NO: 83290 - protein, 9 aa, Homo sapiens
  Table A; Target 83290; HLA-A*24:02; STRA8; ENSG00000146857; CTA
VSAAISHLW

SEQ ID NO: 83291 - protein, 9 aa, Homo sapiens
  Table A; Target 83291; HLA-A*25:01; STRA8; ENSG00000146857; CTA
VSAAISHLW

SEQ ID NO: 83292 - protein, 9 aa, Homo sapiens
  Table A; Target 83292; HLA-A*32:01; STRA8; ENSG00000146857; CTA
VSAAISHLW

SEQ ID NO: 83293 - protein, 9 aa, Homo sapiens
  Table A; Target 83293; HLA-A*33:03; STRA8; ENSG00000146857; CTA
VSAAISHLW

SEQ ID NO: 83294 - protein, 9 aa, Homo sapiens
  Table A; Target 83294; HLA-B*44:02; STRA8; ENSG00000146857; CTA
VSAAISHLW

SEQ ID NO: 83295 - protein, 9 aa, Homo sapiens
  Table A; Target 83295; HLA-B*44:03; STRA8; ENSG00000146857; CTA
VSAAISHLW

SEQ ID NO: 83296 - protein, 9 aa, Homo sapiens
  Table A; Target 83296; HLA-C*02:02; STRA8; ENSG00000146857; CTA
VSAAISHLW

SEQ ID NO: 83297 - protein, 9 aa, Homo sapiens
  Table A; Target 83297; HLA-C*12:03; STRA8; ENSG00000146857; CTA
VSAAISHLW

SEQ ID NO: 83298 - protein, 9 aa, Homo sapiens
  Table A; Target 83298; HLA-C*16:01; STRA8; ENSG00000146857; CTA
VSAAISHLW

SEQ ID NO: 83299 - protein, 9 aa, Homo sapiens
  Table A; Target 83299; HLA-C*16:04; STRA8; ENSG00000146857; CTA
VSAAISHLW

SEQ ID NO: 83300 - protein, 9 aa, Homo sapiens
  Table A; Target 83300; HLA-A*23:01; STRA8; ENSG00000146857; CTA
VSTPEEILF

SEQ ID NO: 83301 - protein, 9 aa, Homo sapiens
  Table A; Target 83301; HLA-B*38:01; STRA8; ENSG00000146857; CTA
VSTPEEILF

SEQ ID NO: 83302 - protein, 9 aa, Homo sapiens
  Table A; Target 83302; HLA-B*57:01; STRA8; ENSG00000146857; CTA
VSTPEEILF

SEQ ID NO: 83303 - protein, 9 aa, Homo sapiens
  Table A; Target 83303; HLA-B*58:01; STRA8; ENSG00000146857; CTA
VSTPEEILF

SEQ ID NO: 83304 - protein, 9 aa, Homo sapiens
  Table A; Target 83304; HLA-C*02:02; STRA8; ENSG00000146857; CTA
VSTPEEILF

SEQ ID NO: 83305 - protein, 9 aa, Homo sapiens
  Table A; Target 83305; HLA-C*16:01; STRA8; ENSG00000146857; CTA
VSTPEEILF

SEQ ID NO: 83306 - protein, 8 aa, Homo sapiens
  Table A; Target 83306; HLA-A*23:01; STRA8; ENSG00000146857; CTA
VYSQSDLI

SEQ ID NO: 83307 - protein, 8 aa, Homo sapiens
  Table A; Target 83307; HLA-A*24:02; STRA8; ENSG00000146857; CTA
VYSQSDLI

SEQ ID NO: 83308 - protein, 8 aa, Homo sapiens
  Table A; Target 83308; HLA-C*04:01; STRA8; ENSG00000146857; CTA
VYSQSDLI

SEQ ID NO: 83309 - protein, 9 aa, Homo sapiens
  Table A; Target 83309; HLA-C*14:02; STRA8; ENSG00000146857; CTA
VYSQSDLIA

SEQ ID NO: 83310 - protein, 11 aa, Homo sapiens
  Table A; Target 83310; HLA-A*03:02; STRA8; ENSG00000146857; CTA
VYSQSDLIASK

SEQ ID NO: 83311 - protein, 11 aa, Homo sapiens
  Table A; Target 83311; HLA-A*33:01; STRA8; ENSG00000146857; CTA
VYSQSDLIASK

SEQ ID NO: 83312 - protein, 11 aa, Homo sapiens
  Table A; Target 83312; HLA-B*27:02; STRA8; ENSG00000146857; CTA
VYSQSDLIASK

SEQ ID NO: 83313 - protein, 11 aa, Homo sapiens
  Table A; Target 83313; HLA-B*38:01; STRA8; ENSG00000146857; CTA
YASMYSGNDSF

SEQ ID NO: 83314 - protein, 11 aa, Homo sapiens
  Table A; Target 83314; HLA-B*39:01; STRA8; ENSG00000146857; CTA
YASMYSGNDSF

SEQ ID NO: 83315 - protein, 11 aa, Homo sapiens
  Table A; Target 83315; HLA-C*03:03; STRA8; ENSG00000146857; CTA
YASMYSGNDSF

SEQ ID NO: 83316 - protein, 9 aa, Homo sapiens
  Table A; Target 83316; HLA-A*02:04; STRA8; ENSG00000146857; CTA
YLNFYKQTM

SEQ ID NO: 83317 - protein, 9 aa, Homo sapiens
  Table A; Target 83317; HLA-B*08:01; STRA8; ENSG00000146857; CTA
YLNFYKQTM

SEQ ID NO: 83318 - protein, 10 aa, Homo sapiens
  Table A; Target 83318; HLA-A*01:01; STRA8; ENSG00000146857; CTA
YSGNDSFPQN

SEQ ID NO: 83319 - protein, 10 aa, Homo sapiens
  Table A; Target 83319; HLA-A*01:01; STRA8; ENSG00000146857; CTA
YSQSDLIASK

SEQ ID NO: 83320 - protein, 10 aa, Homo sapiens
  Table A; Target 83320; HLA-A*03:02; STRA8; ENSG00000146857; CTA
YSQSDLIASK

SEQ ID NO: 83321 - protein, 10 aa, Homo sapiens
  Table A; Target 83321; HLA-A*11:01; STRA8; ENSG00000146857; CTA
YSQSDLIASK

SEQ ID NO: 83322 - protein, 10 aa, Homo sapiens
  Table A; Target 83322; HLA-A*68:01; STRA8; ENSG00000146857; CTA
YSQSDLIASK

SEQ ID NO: 83323 - protein, 10 aa, Homo sapiens
  Table A; Target 83323; HLA-B*27:02; STRA8; ENSG00000146857; CTA
YSQSDLIASK

SEQ ID NO: 83324 - protein, 10 aa, Homo sapiens
  Table A; Target 83324; HLA-C*07:06; STRA8; ENSG00000146857; CTA
YSQSDLIASK

SEQ ID NO: 83325 - protein, 11 aa, Homo sapiens
  Table A; Target 83325; HLA-A*01:01; STRA8; ENSG00000146857; CTA
YSQSDLIASKW

SEQ ID NO: 83326 - protein, 11 aa, Homo sapiens
  Table A; Target 83326; HLA-A*25:01; STRA8; ENSG00000146857; CTA
YSQSDLIASKW

SEQ ID NO: 83327 - protein, 11 aa, Homo sapiens
  Table A; Target 83327; HLA-A*32:01; STRA8; ENSG00000146857; CTA
YSQSDLIASKW

SEQ ID NO: 83328 - protein, 11 aa, Homo sapiens
  Table A; Target 83328; HLA-A*33:01; STRA8; ENSG00000146857; CTA
YSQSDLIASKW

SEQ ID NO: 83329 - protein, 11 aa, Homo sapiens
  Table A; Target 83329; HLA-B*44:02; STRA8; ENSG00000146857; CTA
YSQSDLIASKW

SEQ ID NO: 83330 - protein, 11 aa, Homo sapiens
  Table A; Target 83330; HLA-B*57:01; STRA8; ENSG00000146857; CTA
YSQSDLIASKW

SEQ ID NO: 83331 - protein, 11 aa, Homo sapiens
  Table A; Target 83331; HLA-C*07:01; STRA8; ENSG00000146857; CTA
YSQSDLIASKW

SEQ ID NO: 83332 - protein, 11 aa, Homo sapiens
  Table A; Target 83332; HLA-C*12:03; STRA8; ENSG00000146857; CTA
YSQSDLIASKW

SEQ ID NO: 83333 - protein, 11 aa, Homo sapiens
  Table A; Target 83333; HLA-C*16:04; STRA8; ENSG00000146857; CTA
YSQSDLIASKW

SEQ ID NO: 83334 - protein, 10 aa, Homo sapiens
  Table A; Target 83334; HLA-B*44:02; TDRD1; ENSG00000095627; TAA
ADIQSRNKHW

SEQ ID NO: 83335 - protein, 9 aa, Homo sapiens
  Table A; Target 83335; HLA-A*30:01; TDRD1; ENSG00000095627; TAA
ADKLVTFGL

SEQ ID NO: 83336 - protein, 9 aa, Homo sapiens
  Table A; Target 83336; HLA-B*37:01; TDRD1; ENSG00000095627; TAA
ADKLVTFGL

SEQ ID NO: 83337 - protein, 9 aa, Homo sapiens
  Table A; Target 83337; HLA-B*40:02; TDRD1; ENSG00000095627; TAA
ADKLVTFGL

SEQ ID NO: 83338 - protein, 9 aa, Homo sapiens
  Table A; Target 83338; HLA-A*30:01; TDRD1; ENSG00000095627; TAA
ADYGNIETL

SEQ ID NO: 83339 - protein, 9 aa, Homo sapiens
  Table A; Target 83339; HLA-B*37:01; TDRD1; ENSG00000095627; TAA
ADYGNIETL

SEQ ID NO: 83340 - protein, 9 aa, Homo sapiens
  Table A; Target 83340; HLA-B*38:01; TDRD1; ENSG00000095627; TAA
ADYGNIETL

SEQ ID NO: 83341 - protein, 9 aa, Homo sapiens
  Table A; Target 83341; HLA-B*40:01; TDRD1; ENSG00000095627; TAA
ADYGNIETL

SEQ ID NO: 83342 - protein, 9 aa, Homo sapiens
  Table A; Target 83342; HLA-B*40:02; TDRD1; ENSG00000095627; TAA
ADYGNIETL

SEQ ID NO: 83343 - protein, 9 aa, Homo sapiens
  Table A; Target 83343; HLA-B*49:01; TDRD1; ENSG00000095627; TAA
ADYGNIETL

SEQ ID NO: 83344 - protein, 9 aa, Homo sapiens
  Table A; Target 83344; HLA-C*12:03; TDRD1; ENSG00000095627; TAA
ADYGNIETL

SEQ ID NO: 83345 - protein, 9 aa, Homo sapiens
  Table A; Target 83345; HLA-A*30:01; TDRD1; ENSG00000095627; TAA
AEIGQPCCA

SEQ ID NO: 83346 - protein, 9 aa, Homo sapiens
  Table A; Target 83346; HLA-B*49:01; TDRD1; ENSG00000095627; TAA
AEIGQPCCA

SEQ ID NO: 83347 - protein, 10 aa, Homo sapiens
  Table A; Target 83347; HLA-A*30:01; TDRD1; ENSG00000095627; TAA
AEIGQPCCAF

SEQ ID NO: 83348 - protein, 10 aa, Homo sapiens
  Table A; Target 83348; HLA-B*44:02; TDRD1; ENSG00000095627; TAA
AEIGQPCCAF

SEQ ID NO: 83349 - protein, 10 aa, Homo sapiens
  Table A; Target 83349; HLA-B*44:03; TDRD1; ENSG00000095627; TAA
AEIGQPCCAF

SEQ ID NO: 83350 - protein, 10 aa, Homo sapiens
  Table A; Target 83350; HLA-C*16:04; TDRD1; ENSG00000095627; TAA
AEIGQPCCAF

SEQ ID NO: 83351 - protein, 10 aa, Homo sapiens
  Table A; Target 83351; HLA-A*30:01; TDRD1; ENSG00000095627; TAA
AELQASLSKY

SEQ ID NO: 83352 - protein, 10 aa, Homo sapiens
  Table A; Target 83352; HLA-A*30:02; TDRD1; ENSG00000095627; TAA
AELQASLSKY

SEQ ID NO: 83353 - protein, 10 aa, Homo sapiens
  Table A; Target 83353; HLA-B*15:03; TDRD1; ENSG00000095627; TAA
AELQASLSKY

SEQ ID NO: 83354 - protein, 10 aa, Homo sapiens
  Table A; Target 83354; HLA-B*18:01; TDRD1; ENSG00000095627; TAA
AELQASLSKY

SEQ ID NO: 83355 - protein, 10 aa, Homo sapiens
  Table A; Target 83355; HLA-B*27:02; TDRD1; ENSG00000095627; TAA
AELQASLSKY

SEQ ID NO: 83356 - protein, 10 aa, Homo sapiens
  Table A; Target 83356; HLA-B*40:01; TDRD1; ENSG00000095627; TAA
AELQASLSKY

SEQ ID NO: 83357 - protein, 10 aa, Homo sapiens
  Table A; Target 83357; HLA-B*49:01; TDRD1; ENSG00000095627; TAA
AELQASLSKY

SEQ ID NO: 83358 - protein, 10 aa, Homo sapiens
  Table A; Target 83358; HLA-C*16:04; TDRD1; ENSG00000095627; TAA
AELQASLSKY

SEQ ID NO: 83359 - protein, 9 aa, Homo sapiens
  Table A; Target 83359; HLA-A*30:01; TDRD1; ENSG00000095627; TAA
AEQWKTIEL

SEQ ID NO: 83360 - protein, 9 aa, Homo sapiens
  Table A; Target 83360; HLA-B*37:01; TDRD1; ENSG00000095627; TAA
AEQWKTIEL

SEQ ID NO: 83361 - protein, 9 aa, Homo sapiens
  Table A; Target 83361; HLA-B*40:01; TDRD1; ENSG00000095627; TAA
AEQWKTIEL

SEQ ID NO: 83362 - protein, 9 aa, Homo sapiens
  Table A; Target 83362; HLA-B*44:02; TDRD1; ENSG00000095627; TAA
AEQWKTIEL

SEQ ID NO: 83363 - protein, 9 aa, Homo sapiens
  Table A; Target 83363; HLA-B*44:03; TDRD1; ENSG00000095627; TAA
AEQWKTIEL

SEQ ID NO: 83364 - protein, 9 aa, Homo sapiens
  Table A; Target 83364; HLA-B*49:01; TDRD1; ENSG00000095627; TAA
AEQWKTIEL

SEQ ID NO: 83365 - protein, 9 aa, Homo sapiens
  Table A; Target 83365; HLA-B*40:02; TDRD1; ENSG00000095627; TAA
AERIMFSDL

SEQ ID NO: 83366 - protein, 9 aa, Homo sapiens
  Table A; Target 83366; HLA-B*49:01; TDRD1; ENSG00000095627; TAA
AERIMFSDL

SEQ ID NO: 83367 - protein, 10 aa, Homo sapiens
  Table A; Target 83367; HLA-B*44:03; TDRD1; ENSG00000095627; TAA
AESNSPPKEV

SEQ ID NO: 83368 - protein, 10 aa, Homo sapiens
  Table A; Target 83368; HLA-B*49:01; TDRD1; ENSG00000095627; TAA
AESNSPPKEV

SEQ ID NO: 83369 - protein, 9 aa, Homo sapiens
  Table A; Target 83369; HLA-C*14:02; TDRD1; ENSG00000095627; TAA
AFFAGDGSW

SEQ ID NO: 83370 - protein, 10 aa, Homo sapiens
  Table A; Target 83370; HLA-A*29:02; TDRD1; ENSG00000095627; TAA
AFFAGDGSWY

SEQ ID NO: 83371 - protein, 10 aa, Homo sapiens
  Table A; Target 83371; HLA-A*30:02; TDRD1; ENSG00000095627; TAA
AFFAGDGSWY

SEQ ID NO: 83372 - protein, 11 aa, Homo sapiens
  Table A; Target 83372; HLA-A*31:01; TDRD1; ENSG00000095627; TAA
AFFAGDGSWYR

SEQ ID NO: 83373 - protein, 8 aa, Homo sapiens
  Table A; Target 83373; HLA-C*12:03; TDRD1; ENSG00000095627; TAA
AGFAVGEQ

SEQ ID NO: 83374 - protein, 10 aa, Homo sapiens
  Table A; Target 83374; HLA-A*30:01; TDRD1; ENSG00000095627; TAA
AGFAVGEQSM

SEQ ID NO: 83375 - protein, 10 aa, Homo sapiens
  Table A; Target 83375; HLA-C*14:02; TDRD1; ENSG00000095627; TAA
AGFAVGEQSM

SEQ ID NO: 83376 - protein, 10 aa, Homo sapiens
  Table A; Target 83376; HLA-C*16:04; TDRD1; ENSG00000095627; TAA
AGFAVGEQSM

SEQ ID NO: 83377 - protein, 9 aa, Homo sapiens
  Table A; Target 83377; HLA-B*38:01; TDRD1; ENSG00000095627; TAA
AHIQTPEDF

SEQ ID NO: 83378 - protein, 10 aa, Homo sapiens
  Table A; Target 83378; HLA-B*38:01; TDRD1; ENSG00000095627; TAA
AHIQTPEDFF

SEQ ID NO: 83379 - protein, 11 aa, Homo sapiens
  Table A; Target 83379; HLA-A*03:01; TDRD1; ENSG00000095627; TAA
AIIQNVDVQQK

SEQ ID NO: 83380 - protein, 11 aa, Homo sapiens
  Table A; Target 83380; HLA-A*03:02; TDRD1; ENSG00000095627; TAA
AIIQNVDVQQK

SEQ ID NO: 83381 - protein, 11 aa, Homo sapiens
  Table A; Target 83381; HLA-A*68:01; TDRD1; ENSG00000095627; TAA
AIIQNVDVQQK

SEQ ID NO: 83382 - protein, 11 aa, Homo sapiens
  Table A; Target 83382; HLA-B*27:02; TDRD1; ENSG00000095627; TAA
AIIQNVDVQQK

SEQ ID NO: 83383 - protein, 11 aa, Homo sapiens
  Table A; Target 83383; HLA-C*07:06; TDRD1; ENSG00000095627; TAA
AIIQNVDVQQK

SEQ ID NO: 83384 - protein, 8 aa, Homo sapiens
  Table A; Target 83384; HLA-B*15:03; TDRD1; ENSG00000095627; TAA
AKYTSDDF

SEQ ID NO: 83385 - protein, 9 aa, Homo sapiens
  Table A; Target 83385; HLA-B*15:03; TDRD1; ENSG00000095627; TAA
AKYTVDQTW

SEQ ID NO: 83386 - protein, 9 aa, Homo sapiens
  Table A; Target 83386; HLA-B*58:01; TDRD1; ENSG00000095627; TAA
AKYTVDQTW

SEQ ID NO: 83387 - protein, 10 aa, Homo sapiens
  Table A; Target 83387; HLA-A*03:01; TDRD1; ENSG00000095627; TAA
ALKKLNDLNK

SEQ ID NO: 83388 - protein, 9 aa, Homo sapiens
  Table A; Target 83388; HLA-A*03:01; TDRD1; ENSG00000095627; TAA
ALNTEKMYR

SEQ ID NO: 83389 - protein, 9 aa, Homo sapiens
  Table A; Target 83389; HLA-A*03:02; TDRD1; ENSG00000095627; TAA
ALNTEKMYR

SEQ ID NO: 83390 - protein, 9 aa, Homo sapiens
  Table A; Target 83390; HLA-A*11:01; TDRD1; ENSG00000095627; TAA
ALNTEKMYR

SEQ ID NO: 83391 - protein, 9 aa, Homo sapiens
  Table A; Target 83391; HLA-A*31:01; TDRD1; ENSG00000095627; TAA
ALNTEKMYR

SEQ ID NO: 83392 - protein, 9 aa, Homo sapiens
  Table A; Target 83392; HLA-A*02:07; TDRD1; ENSG00000095627; TAA
ALPFQIIRC

SEQ ID NO: 83393 - protein, 8 aa, Homo sapiens
  Table A; Target 83393; HLA-B*07:02; TDRD1; ENSG00000095627; TAA
APKSRPPY

SEQ ID NO: 83394 - protein, 8 aa, Homo sapiens
  Table A; Target 83394; HLA-B*08:01; TDRD1; ENSG00000095627; TAA
APKSRPPY

SEQ ID NO: 83395 - protein, 9 aa, Homo sapiens
  Table A; Target 83395; HLA-B*27:05; TDRD1; ENSG00000095627; TAA
AQFSEDDQW

SEQ ID NO: 83396 - protein, 9 aa, Homo sapiens
  Table A; Target 83396; HLA-B*38:01; TDRD1; ENSG00000095627; TAA
AQFSEDDQW

SEQ ID NO: 83397 - protein, 8 aa, Homo sapiens
  Table A; Target 83397; HLA-C*05:01; TDRD1; ENSG00000095627; TAA
ASEESVLV

SEQ ID NO: 83398 - protein, 10 aa, Homo sapiens
  Table A; Target 83398; HLA-A*01:01; TDRD1; ENSG00000095627; TAA
ASEESVLVGY

SEQ ID NO: 83399 - protein, 10 aa, Homo sapiens
  Table A; Target 83399; HLA-A*11:01; TDRD1; ENSG00000095627; TAA
ASEESVLVGY

SEQ ID NO: 83400 - protein, 10 aa, Homo sapiens
  Table A; Target 83400; HLA-A*29:02; TDRD1; ENSG00000095627; TAA
ASEESVLVGY

SEQ ID NO: 83401 - protein, 10 aa, Homo sapiens
  Table A; Target 83401; HLA-A*30:02; TDRD1; ENSG00000095627; TAA
ASEESVLVGY

SEQ ID NO: 83402 - protein, 10 aa, Homo sapiens
  Table A; Target 83402; HLA-B*58:01; TDRD1; ENSG00000095627; TAA
ASEESVLVGY

SEQ ID NO: 83403 - protein, 10 aa, Homo sapiens
  Table A; Target 83403; HLA-C*05:01; TDRD1; ENSG00000095627; TAA
ASEESVLVGY

SEQ ID NO: 83404 - protein, 10 aa, Homo sapiens
  Table A; Target 83404; HLA-A*25:01; TDRD1; ENSG00000095627; TAA
ATKPLLMEQY

SEQ ID NO: 83405 - protein, 10 aa, Homo sapiens
  Table A; Target 83405; HLA-A*26:01; TDRD1; ENSG00000095627; TAA
ATKPLLMEQY

SEQ ID NO: 83406 - protein, 10 aa, Homo sapiens
  Table A; Target 83406; HLA-A*29:02; TDRD1; ENSG00000095627; TAA
ATKPLLMEQY

SEQ ID NO: 83407 - protein, 10 aa, Homo sapiens
  Table A; Target 83407; HLA-A*30:02; TDRD1; ENSG00000095627; TAA
ATKPLLMEQY

SEQ ID NO: 83408 - protein, 10 aa, Homo sapiens
  Table A; Target 83408; HLA-A*32:01; TDRD1; ENSG00000095627; TAA
ATKPLLMEQY

SEQ ID NO: 83409 - protein, 10 aa, Homo sapiens
  Table A; Target 83409; HLA-B*15:01; TDRD1; ENSG00000095627; TAA
ATKPLLMEQY

SEQ ID NO: 83410 - protein, 10 aa, Homo sapiens
  Table A; Target 83410; HLA-B*57:01; TDRD1; ENSG00000095627; TAA
ATKPLLMEQY

SEQ ID NO: 83411 - protein, 8 aa, Homo sapiens
  Table A; Target 83411; HLA-A*32:01; TDRD1; ENSG00000095627; TAA
ATSSAEQW

SEQ ID NO: 83412 - protein, 8 aa, Homo sapiens
  Table A; Target 83412; HLA-B*58:01; TDRD1; ENSG00000095627; TAA
ATSSAEQW

SEQ ID NO: 83413 - protein, 11 aa, Homo sapiens
  Table A; Target 83413; HLA-A*03:02; TDRD1; ENSG00000095627; TAA
AVEVELPNSGK

SEQ ID NO: 83414 - protein, 11 aa, Homo sapiens
  Table A; Target 83414; HLA-A*11:01; TDRD1; ENSG00000095627; TAA
AVEVELPNSGK

SEQ ID NO: 83415 - protein, 11 aa, Homo sapiens
  Table A; Target 83415; HLA-A*03:01; TDRD1; ENSG00000095627; TAA
AVGEQSMVTDK

SEQ ID NO: 83416 - protein, 11 aa, Homo sapiens
  Table A; Target 83416; HLA-A*03:02; TDRD1; ENSG00000095627; TAA
AVGEQSMVTDK

SEQ ID NO: 83417 - protein, 11 aa, Homo sapiens
  Table A; Target 83417; HLA-A*11:01; TDRD1; ENSG00000095627; TAA
AVGEQSMVTDK

SEQ ID NO: 83418 - protein, 9 aa, Homo sapiens
  Table A; Target 83418; HLA-A*24:02; TDRD1; ENSG00000095627; TAA
AYASEESVL

SEQ ID NO: 83419 - protein, 9 aa, Homo sapiens
  Table A; Target 83419; HLA-C*14:02; TDRD1; ENSG00000095627; TAA
AYASEESVL

SEQ ID NO: 83420 - protein, 9 aa, Homo sapiens
  Table A; Target 83420; HLA-C*16:02; TDRD1; ENSG00000095627; TAA
CCTELQKQV

SEQ ID NO: 83421 - protein, 8 aa, Homo sapiens
  Table A; Target 83421; HLA-B*37:01; TDRD1; ENSG00000095627; TAA
CEQTKQYL

SEQ ID NO: 83422 - protein, 9 aa, Homo sapiens
  Table A; Target 83422; HLA-B*38:01; TDRD1; ENSG00000095627; TAA
CHVLKEDAL

SEQ ID NO: 83423 - protein, 9 aa, Homo sapiens
  Table A; Target 83423; HLA-B*39:01; TDRD1; ENSG00000095627; TAA
CHVLKEDAL

SEQ ID NO: 83424 - protein, 10 aa, Homo sapiens
  Table A; Target 83424; HLA-A*29:02; TDRD1; ENSG00000095627; TAA
CMLTAELLEY

SEQ ID NO: 83425 - protein, 9 aa, Homo sapiens
  Table A; Target 83425; HLA-B*51:01; TDRD1; ENSG00000095627; TAA
CPLGVTKEI

SEQ ID NO: 83426 - protein, 10 aa, Homo sapiens
  Table A; Target 83426; HLA-B*56:01; TDRD1; ENSG00000095627; TAA
CPLGVTKEIA

SEQ ID NO: 83427 - protein, 9 aa, Homo sapiens
  Table A; Target 83427; HLA-A*31:01; TDRD1; ENSG00000095627; TAA
CQLADIQSR

SEQ ID NO: 83428 - protein, 9 aa, Homo sapiens
  Table A; Target 83428; HLA-B*15:01; TDRD1; ENSG00000095627; TAA
CQQKLPNGF

SEQ ID NO: 83429 - protein, 9 aa, Homo sapiens
  Table A; Target 83429; HLA-B*15:03; TDRD1; ENSG00000095627; TAA
CQQKLPNGF

SEQ ID NO: 83430 - protein, 10 aa, Homo sapiens
  Table A; Target 83430; HLA-A*11:01; TDRD1; ENSG00000095627; TAA
CTELQKQVEK

SEQ ID NO: 83431 - protein, 10 aa, Homo sapiens
  Table A; Target 83431; HLA-A*31:01; TDRD1; ENSG00000095627; TAA
CVAGIKLQAR

SEQ ID NO: 83432 - protein, 10 aa, Homo sapiens
  Table A; Target 83432; HLA-A*33:03; TDRD1; ENSG00000095627; TAA
CVAGIKLQAR

SEQ ID NO: 83433 - protein, 9 aa, Homo sapiens
  Table A; Target 83433; HLA-B*08:01; TDRD1; ENSG00000095627; TAA
DALKKLNDL

SEQ ID NO: 83434 - protein, 9 aa, Homo sapiens
  Table A; Target 83434; HLA-B*51:01; TDRD1; ENSG00000095627; TAA
DALKKLNDL

SEQ ID NO: 83435 - protein, 11 aa, Homo sapiens
  Table A; Target 83435; HLA-A*33:01; TDRD1; ENSG00000095627; TAA
DALKKLNDLNK

SEQ ID NO: 83436 - protein, 8 aa, Homo sapiens
  Table A; Target 83436; HLA-B*18:01; TDRD1; ENSG00000095627; TAA
DEFCGVVA

SEQ ID NO: 83437 - protein, 8 aa, Homo sapiens
  Table A; Target 83437; HLA-B*18:01; TDRD1; ENSG00000095627; TAA
DEHLVLKS

SEQ ID NO: 83438 - protein, 9 aa, Homo sapiens
  Table A; Target 83438; HLA-B*18:01; TDRD1; ENSG00000095627; TAA
DEHLVLKSA

SEQ ID NO: 83439 - protein, 8 aa, Homo sapiens
  Table A; Target 83439; HLA-B*18:01; TDRD1; ENSG00000095627; TAA
DELRMISS

SEQ ID NO: 83440 - protein, 9 aa, Homo sapiens
  Table A; Target 83440; HLA-B*18:01; TDRD1; ENSG00000095627; TAA
DELRMISST

SEQ ID NO: 83441 - protein, 10 aa, Homo sapiens
  Table A; Target 83441; HLA-B*18:01; TDRD1; ENSG00000095627; TAA
DELRMISSTF

SEQ ID NO: 83442 - protein, 10 aa, Homo sapiens
  Table A; Target 83442; HLA-B*44:02; TDRD1; ENSG00000095627; TAA
DELRMISSTF

SEQ ID NO: 83443 - protein, 10 aa, Homo sapiens
  Table A; Target 83443; HLA-B*44:03; TDRD1; ENSG00000095627; TAA
DELRMISSTF

SEQ ID NO: 83444 - protein, 9 aa, Homo sapiens
  Table A; Target 83444; HLA-B*18:01; TDRD1; ENSG00000095627; TAA
DHVLIEMGY

SEQ ID NO: 83445 - protein, 9 aa, Homo sapiens
  Table A; Target 83445; HLA-B*39:01; TDRD1; ENSG00000095627; TAA
DHVLIEMGY

SEQ ID NO: 83446 - protein, 11 aa, Homo sapiens
  Table A; Target 83446; HLA-B*38:01; TDRD1; ENSG00000095627; TAA
DHVLIEMGYGL

SEQ ID NO: 83447 - protein, 10 aa, Homo sapiens
  Table A; Target 83447; HLA-A*25:01; TDRD1; ENSG00000095627; TAA
DILEEEVVTF

SEQ ID NO: 83448 - protein, 10 aa, Homo sapiens
  Table A; Target 83448; HLA-A*26:01; TDRD1; ENSG00000095627; TAA
DILEEEVVTF

SEQ ID NO: 83449 - protein, 8 aa, Homo sapiens
  Table A; Target 83449; HLA-B*08:01; TDRD1; ENSG00000095627; TAA
DLIPKVLT

SEQ ID NO: 83450 - protein, 9 aa, Homo sapiens
  Table A; Target 83450; HLA-A*02:01; TDRD1; ENSG00000095627; TAA
DLIPKVLTL

SEQ ID NO: 83451 - protein, 9 aa, Homo sapiens
  Table A; Target 83451; HLA-A*02:03; TDRD1; ENSG00000095627; TAA
DLIPKVLTL

SEQ ID NO: 83452 - protein, 9 aa, Homo sapiens
  Table A; Target 83452; HLA-A*02:04; TDRD1; ENSG00000095627; TAA
DLIPKVLTL

SEQ ID NO: 83453 - protein, 9 aa, Homo sapiens
  Table A; Target 83453; HLA-A*25:01; TDRD1; ENSG00000095627; TAA
DLIPKVLTL

SEQ ID NO: 83454 - protein, 9 aa, Homo sapiens
  Table A; Target 83454; HLA-A*26:01; TDRD1; ENSG00000095627; TAA
DLIPKVLTL

SEQ ID NO: 83455 - protein, 9 aa, Homo sapiens
  Table A; Target 83455; HLA-A*33:01; TDRD1; ENSG00000095627; TAA
DLIPKVLTL

SEQ ID NO: 83456 - protein, 9 aa, Homo sapiens
  Table A; Target 83456; HLA-A*68:02; TDRD1; ENSG00000095627; TAA
DLIPKVLTL

SEQ ID NO: 83457 - protein, 9 aa, Homo sapiens
  Table A; Target 83457; HLA-B*08:01; TDRD1; ENSG00000095627; TAA
DLIPKVLTL

SEQ ID NO: 83458 - protein, 9 aa, Homo sapiens
  Table A; Target 83458; HLA-B*18:01; TDRD1; ENSG00000095627; TAA
DLIPKVLTL

SEQ ID NO: 83459 - protein, 9 aa, Homo sapiens
  Table A; Target 83459; HLA-B*51:01; TDRD1; ENSG00000095627; TAA
DLIPKVLTL

SEQ ID NO: 83460 - protein, 9 aa, Homo sapiens
  Table A; Target 83460; HLA-A*33:01; TDRD1; ENSG00000095627; TAA
DLNKSLAEH

SEQ ID NO: 83461 - protein, 10 aa, Homo sapiens
  Table A; Target 83461; HLA-A*33:01; TDRD1; ENSG00000095627; TAA
DLPNDRLVNK

SEQ ID NO: 83462 - protein, 9 aa, Homo sapiens
  Table A; Target 83462; HLA-A*33:01; TDRD1; ENSG00000095627; TAA
DLRSLQLKK

SEQ ID NO: 83463 - protein, 10 aa, Homo sapiens
  Table A; Target 83463; HLA-A*30:02; TDRD1; ENSG00000095627; TAA
DQLPPRSDFY

SEQ ID NO: 83464 - protein, 11 aa, Homo sapiens
  Table A; Target 83464; HLA-B*39:01; TDRD1; ENSG00000095627; TAA
DQSDPEDVGKM

SEQ ID NO: 83465 - protein, 9 aa, Homo sapiens
  Table A; Target 83465; HLA-B*08:01; TDRD1; ENSG00000095627; TAA
DQWYRASVL

SEQ ID NO: 83466 - protein, 8 aa, Homo sapiens
  Table A; Target 83466; HLA-A*01:01; TDRD1; ENSG00000095627; TAA
DTDVEVLY

SEQ ID NO: 83467 - protein, 8 aa, Homo sapiens
  Table A; Target 83467; HLA-C*03:03; TDRD1; ENSG00000095627; TAA
DTDVEVLY

SEQ ID NO: 83468 - protein, 8 aa, Homo sapiens
  Table A; Target 83468; HLA-C*04:01; TDRD1; ENSG00000095627; TAA
DTDVEVLY

SEQ ID NO: 83469 - protein, 8 aa, Homo sapiens
  Table A; Target 83469; HLA-C*05:01; TDRD1; ENSG00000095627; TAA
DTDVEVLY

SEQ ID NO: 83470 - protein, 9 aa, Homo sapiens
  Table A; Target 83470; HLA-A*01:01; TDRD1; ENSG00000095627; TAA
DTDVEVLYA

SEQ ID NO: 83471 - protein, 11 aa, Homo sapiens
  Table A; Target 83471; HLA-A*01:01; TDRD1; ENSG00000095627; TAA
DTDVEVLYADY

SEQ ID NO: 83472 - protein, 9 aa, Homo sapiens
  Table A; Target 83472; HLA-A*23:01; TDRD1; ENSG00000095627; TAA
DVADKLVTF

SEQ ID NO: 83473 - protein, 9 aa, Homo sapiens
  Table A; Target 83473; HLA-A*25:01; TDRD1; ENSG00000095627; TAA
DVADKLVTF

SEQ ID NO: 83474 - protein, 9 aa, Homo sapiens
  Table A; Target 83474; HLA-A*32:01; TDRD1; ENSG00000095627; TAA
DVADKLVTF

SEQ ID NO: 83475 - protein, 9 aa, Homo sapiens
  Table A; Target 83475; HLA-A*33:01; TDRD1; ENSG00000095627; TAA
DVADKLVTF

SEQ ID NO: 83476 - protein, 9 aa, Homo sapiens
  Table A; Target 83476; HLA-A*33:03; TDRD1; ENSG00000095627; TAA
DVADKLVTF

SEQ ID NO: 83477 - protein, 9 aa, Homo sapiens
  Table A; Target 83477; HLA-A*68:01; TDRD1; ENSG00000095627; TAA
DVADKLVTF

SEQ ID NO: 83478 - protein, 9 aa, Homo sapiens
  Table A; Target 83478; HLA-A*68:02; TDRD1; ENSG00000095627; TAA
DVADKLVTF

SEQ ID NO: 83479 - protein, 9 aa, Homo sapiens
  Table A; Target 83479; HLA-B*08:01; TDRD1; ENSG00000095627; TAA
DVADKLVTF

SEQ ID NO: 83480 - protein, 9 aa, Homo sapiens
  Table A; Target 83480; HLA-B*18:01; TDRD1; ENSG00000095627; TAA
DVADKLVTF

SEQ ID NO: 83481 - protein, 9 aa, Homo sapiens
  Table A; Target 83481; HLA-B*35:01; TDRD1; ENSG00000095627; TAA
DVADKLVTF

SEQ ID NO: 83482 - protein, 9 aa, Homo sapiens
  Table A; Target 83482; HLA-C*07:04; TDRD1; ENSG00000095627; TAA
DVADKLVTF

SEQ ID NO: 83483 - protein, 9 aa, Homo sapiens
  Table A; Target 83483; HLA-C*07:06; TDRD1; ENSG00000095627; TAA
DVADKLVTF

SEQ ID NO: 83484 - protein, 11 aa, Homo sapiens
  Table A; Target 83484; HLA-A*26:01; TDRD1; ENSG00000095627; TAA
DVADKLVTFGL

SEQ ID NO: 83485 - protein, 11 aa, Homo sapiens
  Table A; Target 83485; HLA-A*68:01; TDRD1; ENSG00000095627; TAA
DVADKLVTFGL

SEQ ID NO: 83486 - protein, 11 aa, Homo sapiens
  Table A; Target 83486; HLA-A*68:02; TDRD1; ENSG00000095627; TAA
DVADKLVTFGL

SEQ ID NO: 83487 - protein, 9 aa, Homo sapiens
  Table A; Target 83487; HLA-A*01:01; TDRD1; ENSG00000095627; TAA
DVEVLYADY

SEQ ID NO: 83488 - protein, 9 aa, Homo sapiens
  Table A; Target 83488; HLA-A*25:01; TDRD1; ENSG00000095627; TAA
DVEVLYADY

SEQ ID NO: 83489 - protein, 9 aa, Homo sapiens
  Table A; Target 83489; HLA-A*26:01; TDRD1; ENSG00000095627; TAA
DVEVLYADY

SEQ ID NO: 83490 - protein, 9 aa, Homo sapiens
  Table A; Target 83490; HLA-A*25:01; TDRD1; ENSG00000095627; TAA
DVKETSVPL

SEQ ID NO: 83491 - protein, 9 aa, Homo sapiens
  Table A; Target 83491; HLA-A*26:01; TDRD1; ENSG00000095627; TAA
DVKETSVPL

SEQ ID NO: 83492 - protein, 9 aa, Homo sapiens
  Table A; Target 83492; HLA-A*33:01; TDRD1; ENSG00000095627; TAA
DVKETSVPL

SEQ ID NO: 83493 - protein, 9 aa, Homo sapiens
  Table A; Target 83493; HLA-A*33:03; TDRD1; ENSG00000095627; TAA
DVKETSVPL

SEQ ID NO: 83494 - protein, 9 aa, Homo sapiens
  Table A; Target 83494; HLA-B*08:01; TDRD1; ENSG00000095627; TAA
DVKETSVPL

SEQ ID NO: 83495 - protein, 10 aa, Homo sapiens
  Table A; Target 83495; HLA-A*26:01; TDRD1; ENSG00000095627; TAA
DVKETSVPLG

SEQ ID NO: 83496 - protein, 11 aa, Homo sapiens
  Table A; Target 83496; HLA-A*68:01; TDRD1; ENSG00000095627; TAA
DVKETSVPLGV

SEQ ID NO: 83497 - protein, 11 aa, Homo sapiens
  Table A; Target 83497; HLA-A*33:01; TDRD1; ENSG00000095627; TAA
DVLIDEHLVLK

SEQ ID NO: 83498 - protein, 10 aa, Homo sapiens
  Table A; Target 83498; HLA-A*33:01; TDRD1; ENSG00000095627; TAA
DVQQKKAHVL

SEQ ID NO: 83499 - protein, 10 aa, Homo sapiens
  Table A; Target 83499; HLA-B*08:01; TDRD1; ENSG00000095627; TAA
DVQQKKAHVL

SEQ ID NO: 83500 - protein, 8 aa, Homo sapiens
  Table A; Target 83500; HLA-C*14:02; TDRD1; ENSG00000095627; TAA
DYGNIETL

SEQ ID NO: 83501 - protein, 9 aa, Homo sapiens
  Table A; Target 83501; HLA-C*14:02; TDRD1; ENSG00000095627; TAA
DYIPVKGEV

SEQ ID NO: 83502 - protein, 11 aa, Homo sapiens
  Table A; Target 83502; HLA-A*24:02; TDRD1; ENSG00000095627; TAA
DYIPVKGEVCI

SEQ ID NO: 83503 - protein, 8 aa, Homo sapiens
  Table A; Target 83503; HLA-B*08:01; TDRD1; ENSG00000095627; TAA
EAITRFQM

SEQ ID NO: 83504 - protein, 8 aa, Homo sapiens
  Table A; Target 83504; HLA-C*16:01; TDRD1; ENSG00000095627; TAA
EAITRFQM

SEQ ID NO: 83505 - protein, 9 aa, Homo sapiens
  Table A; Target 83505; HLA-B*08:01; TDRD1; ENSG00000095627; TAA
EAITRFQMC

SEQ ID NO: 83506 - protein, 9 aa, Homo sapiens
  Table A; Target 83506; HLA-A*30:01; TDRD1; ENSG00000095627; TAA
EEAITRFQM

SEQ ID NO: 83507 - protein, 9 aa, Homo sapiens
  Table A; Target 83507; HLA-B*18:01; TDRD1; ENSG00000095627; TAA
EEAITRFQM

SEQ ID NO: 83508 - protein, 9 aa, Homo sapiens
  Table A; Target 83508; HLA-B*37:01; TDRD1; ENSG00000095627; TAA
EEAITRFQM

SEQ ID NO: 83509 - protein, 9 aa, Homo sapiens
  Table A; Target 83509; HLA-B*40:01; TDRD1; ENSG00000095627; TAA
EEAITRFQM

SEQ ID NO: 83510 - protein, 9 aa, Homo sapiens
  Table A; Target 83510; HLA-B*44:02; TDRD1; ENSG00000095627; TAA
EEAITRFQM

SEQ ID NO: 83511 - protein, 9 aa, Homo sapiens
  Table A; Target 83511; HLA-B*44:03; TDRD1; ENSG00000095627; TAA
EEAITRFQM

SEQ ID NO: 83512 - protein, 9 aa, Homo sapiens
  Table A; Target 83512; HLA-B*49:01; TDRD1; ENSG00000095627; TAA
EEEVVTFAV

SEQ ID NO: 83513 - protein, 9 aa, Homo sapiens
  Table A; Target 83513; HLA-B*44:02; TDRD1; ENSG00000095627; TAA
EEIIPLNRI

SEQ ID NO: 83514 - protein, 9 aa, Homo sapiens
  Table A; Target 83514; HLA-B*44:03; TDRD1; ENSG00000095627; TAA
EEIIPLNRI

SEQ ID NO: 83515 - protein, 9 aa, Homo sapiens
  Table A; Target 83515; HLA-B*49:01; TDRD1; ENSG00000095627; TAA
EEIIPLNRI

SEQ ID NO: 83516 - protein, 10 aa, Homo sapiens
  Table A; Target 83516; HLA-B*18:01; TDRD1; ENSG00000095627; TAA
EEIIPLNRIY

SEQ ID NO: 83517 - protein, 10 aa, Homo sapiens
  Table A; Target 83517; HLA-C*16:04; TDRD1; ENSG00000095627; TAA
EEIIPLNRIY

SEQ ID NO: 83518 - protein, 8 aa, Homo sapiens
  Table A; Target 83518; HLA-B*37:01; TDRD1; ENSG00000095627; TAA
EESVLVGY

SEQ ID NO: 83519 - protein, 8 aa, Homo sapiens
  Table A; Target 83519; HLA-B*44:02; TDRD1; ENSG00000095627; TAA
EESVLVGY

SEQ ID NO: 83520 - protein, 8 aa, Homo sapiens
  Table A; Target 83520; HLA-B*44:03; TDRD1; ENSG00000095627; TAA
EESVLVGY

SEQ ID NO: 83521 - protein, 8 aa, Homo sapiens
  Table A; Target 83521; HLA-C*04:01; TDRD1; ENSG00000095627; TAA
EESVLVGY

SEQ ID NO: 83522 - protein, 8 aa, Homo sapiens
  Table A; Target 83522; HLA-C*16:04; TDRD1; ENSG00000095627; TAA
EESVLVGY

SEQ ID NO: 83523 - protein, 9 aa, Homo sapiens
  Table A; Target 83523; HLA-B*44:02; TDRD1; ENSG00000095627; TAA
EESVLVGYV

SEQ ID NO: 83524 - protein, 9 aa, Homo sapiens
  Table A; Target 83524; HLA-B*44:03; TDRD1; ENSG00000095627; TAA
EESVLVGYV

SEQ ID NO: 83525 - protein, 9 aa, Homo sapiens
  Table A; Target 83525; HLA-B*49:01; TDRD1; ENSG00000095627; TAA
EESVLVGYV

SEQ ID NO: 83526 - protein, 11 aa, Homo sapiens
  Table A; Target 83526; HLA-B*18:01; TDRD1; ENSG00000095627; TAA
EESVLVGYVDY

SEQ ID NO: 83527 - protein, 11 aa, Homo sapiens
  Table A; Target 83527; HLA-B*44:02; TDRD1; ENSG00000095627; TAA
EESVLVGYVDY

SEQ ID NO: 83528 - protein, 11 aa, Homo sapiens
  Table A; Target 83528; HLA-B*44:03; TDRD1; ENSG00000095627; TAA
EESVLVGYVDY

SEQ ID NO: 83529 - protein, 8 aa, Homo sapiens
  Table A; Target 83529; HLA-B*18:01; TDRD1; ENSG00000095627; TAA
EEVTADEL

SEQ ID NO: 83530 - protein, 8 aa, Homo sapiens
  Table A; Target 83530; HLA-B*40:01; TDRD1; ENSG00000095627; TAA
EEVTADEL

SEQ ID NO: 83531 - protein, 10 aa, Homo sapiens
  Table A; Target 83531; HLA-B*40:01; TDRD1; ENSG00000095627; TAA
EEVTADELRM

SEQ ID NO: 83532 - protein, 10 aa, Homo sapiens
  Table A; Target 83532; HLA-B*44:03; TDRD1; ENSG00000095627; TAA
EEVTADELRM

SEQ ID NO: 83533 - protein, 11 aa, Homo sapiens
  Table A; Target 83533; HLA-B*44:02; TDRD1; ENSG00000095627; TAA
EEVTADELRMI

SEQ ID NO: 83534 - protein, 11 aa, Homo sapiens
  Table A; Target 83534; HLA-B*44:03; TDRD1; ENSG00000095627; TAA
EEVTADELRMI

SEQ ID NO: 83535 - protein, 11 aa, Homo sapiens
  Table A; Target 83535; HLA-B*49:01; TDRD1; ENSG00000095627; TAA
EEVTADELRMI

SEQ ID NO: 83536 - protein, 11 aa, Homo sapiens
  Table A; Target 83536; HLA-C*16:04; TDRD1; ENSG00000095627; TAA
EEVTADELRMI

SEQ ID NO: 83537 - protein, 8 aa, Homo sapiens
  Table A; Target 83537; HLA-A*30:01; TDRD1; ENSG00000095627; TAA
EEVVTFAV

SEQ ID NO: 83538 - protein, 8 aa, Homo sapiens
  Table A; Target 83538; HLA-B*18:01; TDRD1; ENSG00000095627; TAA
EEVVTFAV

SEQ ID NO: 83539 - protein, 8 aa, Homo sapiens
  Table A; Target 83539; HLA-B*49:01; TDRD1; ENSG00000095627; TAA
EEVVTFAV

SEQ ID NO: 83540 - protein, 10 aa, Homo sapiens
  Table A; Target 83540; HLA-B*49:01; TDRD1; ENSG00000095627; TAA
EEVVTFAVEV

SEQ ID NO: 83541 - protein, 9 aa, Homo sapiens
  Table A; Target 83541; HLA-A*68:02; TDRD1; ENSG00000095627; TAA
EIAIWAERI

SEQ ID NO: 83542 - protein, 9 aa, Homo sapiens
  Table A; Target 83542; HLA-A*26:01; TDRD1; ENSG00000095627; TAA
EIIPLNRIY

SEQ ID NO: 83543 - protein, 9 aa, Homo sapiens
  Table A; Target 83543; HLA-B*44:02; TDRD1; ENSG00000095627; TAA
EIIPLNRIY

SEQ ID NO: 83544 - protein, 9 aa, Homo sapiens
  Table A; Target 83544; HLA-B*44:03; TDRD1; ENSG00000095627; TAA
EIIPLNRIY

SEQ ID NO: 83545 - protein, 11 aa, Homo sapiens
  Table A; Target 83545; HLA-A*68:02; TDRD1; ENSG00000095627; TAA
EIIPLNRIYHL

SEQ ID NO: 83546 - protein, 9 aa, Homo sapiens
  Table A; Target 83546; HLA-A*01:01; TDRD1; ENSG00000095627; TAA
EIISPNLFY

SEQ ID NO: 83547 - protein, 9 aa, Homo sapiens
  Table A; Target 83547; HLA-A*25:01; TDRD1; ENSG00000095627; TAA
EIISPNLFY

SEQ ID NO: 83548 - protein, 9 aa, Homo sapiens
  Table A; Target 83548; HLA-A*26:01; TDRD1; ENSG00000095627; TAA
EIISPNLFY

SEQ ID NO: 83549 - protein, 9 aa, Homo sapiens
  Table A; Target 83549; HLA-A*29:02; TDRD1; ENSG00000095627; TAA
EIISPNLFY

SEQ ID NO: 83550 - protein, 10 aa, Homo sapiens
  Table A; Target 83550; HLA-A*68:02; TDRD1; ENSG00000095627; TAA
EIISPNLFYA

SEQ ID NO: 83551 - protein, 11 aa, Homo sapiens
  Table A; Target 83551; HLA-A*68:02; TDRD1; ENSG00000095627; TAA
EIISPNLFYAL

SEQ ID NO: 83552 - protein, 9 aa, Homo sapiens
  Table A; Target 83552; HLA-A*23:01; TDRD1; ENSG00000095627; TAA
EIKGTVTEF

SEQ ID NO: 83553 - protein, 9 aa, Homo sapiens
  Table A; Target 83553; HLA-A*25:01; TDRD1; ENSG00000095627; TAA
EIKGTVTEF

SEQ ID NO: 83554 - protein, 9 aa, Homo sapiens
  Table A; Target 83554; HLA-A*32:01; TDRD1; ENSG00000095627; TAA
EIKGTVTEF

SEQ ID NO: 83555 - protein, 9 aa, Homo sapiens
  Table A; Target 83555; HLA-A*33:01; TDRD1; ENSG00000095627; TAA
EIKGTVTEF

SEQ ID NO: 83556 - protein, 9 aa, Homo sapiens
  Table A; Target 83556; HLA-A*33:03; TDRD1; ENSG00000095627; TAA
EIKGTVTEF

SEQ ID NO: 83557 - protein, 9 aa, Homo sapiens
  Table A; Target 83557; HLA-A*68:01; TDRD1; ENSG00000095627; TAA
EIKGTVTEF

SEQ ID NO: 83558 - protein, 9 aa, Homo sapiens
  Table A; Target 83558; HLA-B*08:01; TDRD1; ENSG00000095627; TAA
EIKGTVTEF

SEQ ID NO: 83559 - protein, 9 aa, Homo sapiens
  Table A; Target 83559; HLA-B*15:01; TDRD1; ENSG00000095627; TAA
EIKGTVTEF

SEQ ID NO: 83560 - protein, 9 aa, Homo sapiens
  Table A; Target 83560; HLA-B*46:01; TDRD1; ENSG00000095627; TAA
EIKGTVTEF

SEQ ID NO: 83561 - protein, 9 aa, Homo sapiens
  Table A; Target 83561; HLA-C*01:02; TDRD1; ENSG00000095627; TAA
EIKGTVTEF

SEQ ID NO: 83562 - protein, 9 aa, Homo sapiens
  Table A; Target 83562; HLA-C*07:04; TDRD1; ENSG00000095627; TAA
EIKGTVTEF

SEQ ID NO: 83563 - protein, 9 aa, Homo sapiens
  Table A; Target 83563; HLA-C*07:06; TDRD1; ENSG00000095627; TAA
EIKGTVTEF

SEQ ID NO: 83564 - protein, 9 aa, Homo sapiens
  Table A; Target 83564; HLA-C*14:02; TDRD1; ENSG00000095627; TAA
EIKGTVTEF

SEQ ID NO: 83565 - protein, 10 aa, Homo sapiens
  Table A; Target 83565; HLA-A*33:03; TDRD1; ENSG00000095627; TAA
EIKGTVTEFK

SEQ ID NO: 83566 - protein, 10 aa, Homo sapiens
  Table A; Target 83566; HLA-A*68:01; TDRD1; ENSG00000095627; TAA
EIKGTVTEFK

SEQ ID NO: 83567 - protein, 9 aa, Homo sapiens
  Table A; Target 83567; HLA-A*33:01; TDRD1; ENSG00000095627; TAA
EILPNGHVK

SEQ ID NO: 83568 - protein, 9 aa, Homo sapiens
  Table A; Target 83568; HLA-A*33:03; TDRD1; ENSG00000095627; TAA
EILPNGHVK

SEQ ID NO: 83569 - protein, 9 aa, Homo sapiens
  Table A; Target 83569; HLA-A*68:01; TDRD1; ENSG00000095627; TAA
EILPNGHVK

SEQ ID NO: 83570 - protein, 10 aa, Homo sapiens
  Table A; Target 83570; HLA-A*68:02; TDRD1; ENSG00000095627; TAA
EILPNGHVKV

SEQ ID NO: 83571 - protein, 11 aa, Homo sapiens
  Table A; Target 83571; HLA-A*26:01; TDRD1; ENSG00000095627; TAA
ELIDKSETPHV

SEQ ID NO: 83572 - protein, 9 aa, Homo sapiens
  Table A; Target 83572; HLA-A*25:01; TDRD1; ENSG00000095627; TAA
ELNGSSSQL

SEQ ID NO: 83573 - protein, 9 aa, Homo sapiens
  Table A; Target 83573; HLA-A*26:01; TDRD1; ENSG00000095627; TAA
ELNGSSSQL

SEQ ID NO: 83574 - protein, 9 aa, Homo sapiens
  Table A; Target 83574; HLA-A*01:01; TDRD1; ENSG00000095627; TAA
ELQASLSKY

SEQ ID NO: 83575 - protein, 9 aa, Homo sapiens
  Table A; Target 83575; HLA-A*25:01; TDRD1; ENSG00000095627; TAA
ELQASLSKY

SEQ ID NO: 83576 - protein, 9 aa, Homo sapiens
  Table A; Target 83576; HLA-A*26:01; TDRD1; ENSG00000095627; TAA
ELQASLSKY

SEQ ID NO: 83577 - protein, 9 aa, Homo sapiens
  Table A; Target 83577; HLA-A*30:02; TDRD1; ENSG00000095627; TAA
ELQASLSKY

SEQ ID NO: 83578 - protein, 9 aa, Homo sapiens
  Table A; Target 83578; HLA-A*33:03; TDRD1; ENSG00000095627; TAA
ELQASLSKY

SEQ ID NO: 83579 - protein, 9 aa, Homo sapiens
  Table A; Target 83579; HLA-B*15:01; TDRD1; ENSG00000095627; TAA
ELQASLSKY

SEQ ID NO: 83580 - protein, 9 aa, Homo sapiens
  Table A; Target 83580; HLA-B*44:02; TDRD1; ENSG00000095627; TAA
ELQASLSKY

SEQ ID NO: 83581 - protein, 9 aa, Homo sapiens
  Table A; Target 83581; HLA-B*44:03; TDRD1; ENSG00000095627; TAA
ELQASLSKY

SEQ ID NO: 83582 - protein, 9 aa, Homo sapiens
  Table A; Target 83582; HLA-C*07:04; TDRD1; ENSG00000095627; TAA
ELQASLSKY

SEQ ID NO: 83583 - protein, 9 aa, Homo sapiens
  Table A; Target 83583; HLA-A*02:04; TDRD1; ENSG00000095627; TAA
ELQVHVQGL

SEQ ID NO: 83584 - protein, 9 aa, Homo sapiens
  Table A; Target 83584; HLA-A*25:01; TDRD1; ENSG00000095627; TAA
ELQVHVQGL

SEQ ID NO: 83585 - protein, 9 aa, Homo sapiens
  Table A; Target 83585; HLA-B*08:01; TDRD1; ENSG00000095627; TAA
ELQVHVQGL

SEQ ID NO: 83586 - protein, 9 aa, Homo sapiens
  Table A; Target 83586; HLA-A*25:01; TDRD1; ENSG00000095627; TAA
ELRMISSTF

SEQ ID NO: 83587 - protein, 9 aa, Homo sapiens
  Table A; Target 83587; HLA-A*26:01; TDRD1; ENSG00000095627; TAA
ELRMISSTF

SEQ ID NO: 83588 - protein, 9 aa, Homo sapiens
  Table A; Target 83588; HLA-A*25:01; TDRD1; ENSG00000095627; TAA
ELTDLSTCY

SEQ ID NO: 83589 - protein, 9 aa, Homo sapiens
  Table A; Target 83589; HLA-A*26:01; TDRD1; ENSG00000095627; TAA
ELTDLSTCY

SEQ ID NO: 83590 - protein, 9 aa, Homo sapiens
  Table A; Target 83590; HLA-A*29:02; TDRD1; ENSG00000095627; TAA
ELTDLSTCY

SEQ ID NO: 83591 - protein, 9 aa, Homo sapiens
  Table A; Target 83591; HLA-A*30:02; TDRD1; ENSG00000095627; TAA
ELTDLSTCY

SEQ ID NO: 83592 - protein, 9 aa, Homo sapiens
  Table A; Target 83592; HLA-B*15:01; TDRD1; ENSG00000095627; TAA
ELTDLSTCY

SEQ ID NO: 83593 - protein, 9 aa, Homo sapiens
  Table A; Target 83593; HLA-B*18:01; TDRD1; ENSG00000095627; TAA
ELTDLSTCY

SEQ ID NO: 83594 - protein, 9 aa, Homo sapiens
  Table A; Target 83594; HLA-C*07:04; TDRD1; ENSG00000095627; TAA
ELTDLSTCY

SEQ ID NO: 83595 - protein, 9 aa, Homo sapiens
  Table A; Target 83595; HLA-A*33:01; TDRD1; ENSG00000095627; TAA
ENKLPPHES

SEQ ID NO: 83596 - protein, 11 aa, Homo sapiens
  Table A; Target 83596; HLA-A*33:01; TDRD1; ENSG00000095627; TAA
ENKLPPHESLR

SEQ ID NO: 83597 - protein, 9 aa, Homo sapiens
  Table A; Target 83597; HLA-A*33:01; TDRD1; ENSG00000095627; TAA
ENKSSIETK

SEQ ID NO: 83598 - protein, 9 aa, Homo sapiens
  Table A; Target 83598; HLA-A*33:03; TDRD1; ENSG00000095627; TAA
ENKSSIETK

SEQ ID NO: 83599 - protein, 9 aa, Homo sapiens
  Table A; Target 83599; HLA-A*68:02; TDRD1; ENSG00000095627; TAA
ENSSLVELI

SEQ ID NO: 83600 - protein, 11 aa, Homo sapiens
  Table A; Target 83600; HLA-B*27:02; TDRD1; ENSG00000095627; TAA
ENSSLVELIDK

SEQ ID NO: 83601 - protein, 11 aa, Homo sapiens
  Table A; Target 83601; HLA-A*33:03; TDRD1; ENSG00000095627; TAA
EPFNFEKNENK

SEQ ID NO: 83602 - protein, 11 aa, Homo sapiens
  Table A; Target 83602; HLA-A*68:01; TDRD1; ENSG00000095627; TAA
EPFNFEKNENK

SEQ ID NO: 83603 - protein, 10 aa, Homo sapiens
  Table A; Target 83603; HLA-A*01:01; TDRD1; ENSG00000095627; TAA
ESVLVGYVDY

SEQ ID NO: 83604 - protein, 10 aa, Homo sapiens
  Table A; Target 83604; HLA-A*25:01; TDRD1; ENSG00000095627; TAA
ESVLVGYVDY

SEQ ID NO: 83605 - protein, 10 aa, Homo sapiens
  Table A; Target 83605; HLA-A*26:01; TDRD1; ENSG00000095627; TAA
ESVLVGYVDY

SEQ ID NO: 83606 - protein, 10 aa, Homo sapiens
  Table A; Target 83606; HLA-A*25:01; TDRD1; ENSG00000095627; TAA
ETKDVEVNNK

SEQ ID NO: 83607 - protein, 10 aa, Homo sapiens
  Table A; Target 83607; HLA-A*26:01; TDRD1; ENSG00000095627; TAA
ETKDVEVNNK

SEQ ID NO: 83608 - protein, 10 aa, Homo sapiens
  Table A; Target 83608; HLA-A*33:01; TDRD1; ENSG00000095627; TAA
ETKDVEVNNK

SEQ ID NO: 83609 - protein, 10 aa, Homo sapiens
  Table A; Target 83609; HLA-A*33:03; TDRD1; ENSG00000095627; TAA
ETKDVEVNNK

SEQ ID NO: 83610 - protein, 10 aa, Homo sapiens
  Table A; Target 83610; HLA-A*68:01; TDRD1; ENSG00000095627; TAA
ETKDVEVNNK

SEQ ID NO: 83611 - protein, 10 aa, Homo sapiens
  Table A; Target 83611; HLA-C*07:06; TDRD1; ENSG00000095627; TAA
ETKDVEVNNK

SEQ ID NO: 83612 - protein, 9 aa, Homo sapiens
  Table A; Target 83612; HLA-A*33:01; TDRD1; ENSG00000095627; TAA
ETPHVSVSK

SEQ ID NO: 83613 - protein, 9 aa, Homo sapiens
  Table A; Target 83613; HLA-A*33:03; TDRD1; ENSG00000095627; TAA
ETPHVSVSK

SEQ ID NO: 83614 - protein, 9 aa, Homo sapiens
  Table A; Target 83614; HLA-A*68:01; TDRD1; ENSG00000095627; TAA
ETPHVSVSK

SEQ ID NO: 83615 - protein, 9 aa, Homo sapiens
  Table A; Target 83615; HLA-C*07:06; TDRD1; ENSG00000095627; TAA
ETPHVSVSK

SEQ ID NO: 83616 - protein, 10 aa, Homo sapiens
  Table A; Target 83616; HLA-A*25:01; TDRD1; ENSG00000095627; TAA
ETPHVSVSKV

SEQ ID NO: 83617 - protein, 10 aa, Homo sapiens
  Table A; Target 83617; HLA-A*26:01; TDRD1; ENSG00000095627; TAA
ETPHVSVSKV

SEQ ID NO: 83618 - protein, 10 aa, Homo sapiens
  Table A; Target 83618; HLA-A*68:02; TDRD1; ENSG00000095627; TAA
ETPHVSVSKV

SEQ ID NO: 83619 - protein, 11 aa, Homo sapiens
  Table A; Target 83619; HLA-A*68:01; TDRD1; ENSG00000095627; TAA
ETSVPLGVEGK

SEQ ID NO: 83620 - protein, 9 aa, Homo sapiens
  Table A; Target 83620; HLA-A*01:01; TDRD1; ENSG00000095627; TAA
ETYANVHEK

SEQ ID NO: 83621 - protein, 9 aa, Homo sapiens
  Table A; Target 83621; HLA-A*03:01; TDRD1; ENSG00000095627; TAA
ETYANVHEK

SEQ ID NO: 83622 - protein, 9 aa, Homo sapiens
  Table A; Target 83622; HLA-A*03:02; TDRD1; ENSG00000095627; TAA
ETYANVHEK

SEQ ID NO: 83623 - protein, 9 aa, Homo sapiens
  Table A; Target 83623; HLA-A*11:01; TDRD1; ENSG00000095627; TAA
ETYANVHEK

SEQ ID NO: 83624 - protein, 9 aa, Homo sapiens
  Table A; Target 83624; HLA-A*25:01; TDRD1; ENSG00000095627; TAA
ETYANVHEK

SEQ ID NO: 83625 - protein, 9 aa, Homo sapiens
  Table A; Target 83625; HLA-A*26:01; TDRD1; ENSG00000095627; TAA
ETYANVHEK

SEQ ID NO: 83626 - protein, 9 aa, Homo sapiens
  Table A; Target 83626; HLA-A*33:01; TDRD1; ENSG00000095627; TAA
ETYANVHEK

SEQ ID NO: 83627 - protein, 9 aa, Homo sapiens
  Table A; Target 83627; HLA-A*33:03; TDRD1; ENSG00000095627; TAA
ETYANVHEK

SEQ ID NO: 83628 - protein, 9 aa, Homo sapiens
  Table A; Target 83628; HLA-A*68:01; TDRD1; ENSG00000095627; TAA
ETYANVHEK

SEQ ID NO: 83629 - protein, 9 aa, Homo sapiens
  Table A; Target 83629; HLA-C*07:06; TDRD1; ENSG00000095627; TAA
ETYANVHEK

SEQ ID NO: 83630 - protein, 9 aa, Homo sapiens
  Table A; Target 83630; HLA-A*25:01; TDRD1; ENSG00000095627; TAA
EVLEYMNQL

SEQ ID NO: 83631 - protein, 9 aa, Homo sapiens
  Table A; Target 83631; HLA-A*26:01; TDRD1; ENSG00000095627; TAA
EVLEYMNQL

SEQ ID NO: 83632 - protein, 9 aa, Homo sapiens
  Table A; Target 83632; HLA-A*33:01; TDRD1; ENSG00000095627; TAA
EVLEYMNQL

SEQ ID NO: 83633 - protein, 9 aa, Homo sapiens
  Table A; Target 83633; HLA-A*33:03; TDRD1; ENSG00000095627; TAA
EVLEYMNQL

SEQ ID NO: 83634 - protein, 9 aa, Homo sapiens
  Table A; Target 83634; HLA-A*68:01; TDRD1; ENSG00000095627; TAA
EVLEYMNQL

SEQ ID NO: 83635 - protein, 9 aa, Homo sapiens
  Table A; Target 83635; HLA-A*68:02; TDRD1; ENSG00000095627; TAA
EVLEYMNQL

SEQ ID NO: 83636 - protein, 9 aa, Homo sapiens
  Table A; Target 83636; HLA-B*35:03; TDRD1; ENSG00000095627; TAA
EVLEYMNQL

SEQ ID NO: 83637 - protein, 9 aa, Homo sapiens
  Table A; Target 83637; HLA-C*01:02; TDRD1; ENSG00000095627; TAA
EVLEYMNQL

SEQ ID NO: 83638 - protein, 9 aa, Homo sapiens
  Table A; Target 83638; HLA-C*07:06; TDRD1; ENSG00000095627; TAA
EVLEYMNQL

SEQ ID NO: 83639 - protein, 11 aa, Homo sapiens
  Table A; Target 83639; HLA-A*33:01; TDRD1; ENSG00000095627; TAA
EVNIKPGNNVR

SEQ ID NO: 83640 - protein, 11 aa, Homo sapiens
  Table A; Target 83640; HLA-A*33:03; TDRD1; ENSG00000095627; TAA
EVNIKPGNNVR

SEQ ID NO: 83641 - protein, 9 aa, Homo sapiens
  Table A; Target 83641; HLA-A*26:01; TDRD1; ENSG00000095627; TAA
EVTADELRM

SEQ ID NO: 83642 - protein, 10 aa, Homo sapiens
  Table A; Target 83642; HLA-A*25:01; TDRD1; ENSG00000095627; TAA
EVTADELRMI

SEQ ID NO: 83643 - protein, 9 aa, Homo sapiens
  Table A; Target 83643; HLA-A*25:01; TDRD1; ENSG00000095627; TAA
EVTENGIGV

SEQ ID NO: 83644 - protein, 9 aa, Homo sapiens
  Table A; Target 83644; HLA-A*26:01; TDRD1; ENSG00000095627; TAA
EVTENGIGV

SEQ ID NO: 83645 - protein, 9 aa, Homo sapiens
  Table A; Target 83645; HLA-A*68:01; TDRD1; ENSG00000095627; TAA
EVTENGIGV

SEQ ID NO: 83646 - protein, 9 aa, Homo sapiens
  Table A; Target 83646; HLA-A*68:02; TDRD1; ENSG00000095627; TAA
EVTENGIGV

SEQ ID NO: 83647 - protein, 11 aa, Homo sapiens
  Table A; Target 83647; HLA-A*25:01; TDRD1; ENSG00000095627; TAA
EVTENGIGVEL

SEQ ID NO: 83648 - protein, 11 aa, Homo sapiens
  Table A; Target 83648; HLA-A*26:01; TDRD1; ENSG00000095627; TAA
EVTENGIGVEL

SEQ ID NO: 83649 - protein, 11 aa, Homo sapiens
  Table A; Target 83649; HLA-A*33:03; TDRD1; ENSG00000095627; TAA
EVTENGIGVEL

SEQ ID NO: 83650 - protein, 11 aa, Homo sapiens
  Table A; Target 83650; HLA-A*68:01; TDRD1; ENSG00000095627; TAA
EVTENGIGVEL

SEQ ID NO: 83651 - protein, 11 aa, Homo sapiens
  Table A; Target 83651; HLA-A*68:02; TDRD1; ENSG00000095627; TAA
EVTENGIGVEL

SEQ ID NO: 83652 - protein, 11 aa, Homo sapiens
  Table A; Target 83652; HLA-B*39:01; TDRD1; ENSG00000095627; TAA
EVTENGIGVEL

SEQ ID NO: 83653 - protein, 10 aa, Homo sapiens
  Table A; Target 83653; HLA-A*68:01; TDRD1; ENSG00000095627; TAA
EVVGSKGDRK

SEQ ID NO: 83654 - protein, 9 aa, Homo sapiens
  Table A; Target 83654; HLA-A*25:01; TDRD1; ENSG00000095627; TAA
EVVTFAVEV

SEQ ID NO: 83655 - protein, 9 aa, Homo sapiens
  Table A; Target 83655; HLA-A*26:01; TDRD1; ENSG00000095627; TAA
EVVTFAVEV

SEQ ID NO: 83656 - protein, 9 aa, Homo sapiens
  Table A; Target 83656; HLA-A*33:03; TDRD1; ENSG00000095627; TAA
EVVTFAVEV

SEQ ID NO: 83657 - protein, 9 aa, Homo sapiens
  Table A; Target 83657; HLA-A*68:01; TDRD1; ENSG00000095627; TAA
EVVTFAVEV

SEQ ID NO: 83658 - protein, 9 aa, Homo sapiens
  Table A; Target 83658; HLA-B*13:02; TDRD1; ENSG00000095627; TAA
EVVTFAVEV

SEQ ID NO: 83659 - protein, 9 aa, Homo sapiens
  Table A; Target 83659; HLA-C*07:06; TDRD1; ENSG00000095627; TAA
EVVTFAVEV

SEQ ID NO: 83660 - protein, 11 aa, Homo sapiens
  Table A; Target 83660; HLA-A*68:02; TDRD1; ENSG00000095627; TAA
EVVTFAVEVEL

SEQ ID NO: 83661 - protein, 9 aa, Homo sapiens
  Table A; Target 83661; HLA-A*33:01; TDRD1; ENSG00000095627; TAA
EYCNAPKSR

SEQ ID NO: 83662 - protein, 9 aa, Homo sapiens
  Table A; Target 83662; HLA-A*33:03; TDRD1; ENSG00000095627; TAA
EYCNAPKSR

SEQ ID NO: 83663 - protein, 10 aa, Homo sapiens
  Table A; Target 83663; HLA-A*23:01; TDRD1; ENSG00000095627; TAA
EYMNQLSASL

SEQ ID NO: 83664 - protein, 10 aa, Homo sapiens
  Table A; Target 83664; HLA-A*24:02; TDRD1; ENSG00000095627; TAA
EYMNQLSASL

SEQ ID NO: 83665 - protein, 10 aa, Homo sapiens
  Table A; Target 83665; HLA-A*33:03; TDRD1; ENSG00000095627; TAA
EYMNQLSASL

SEQ ID NO: 83666 - protein, 10 aa, Homo sapiens
  Table A; Target 83666; HLA-C*14:02; TDRD1; ENSG00000095627; TAA
EYMNQLSASL

SEQ ID NO: 83667 - protein, 11 aa, Homo sapiens
  Table A; Target 83667; HLA-A*33:03; TDRD1; ENSG00000095627; TAA
EYMNQLSASLK

SEQ ID NO: 83668 - protein, 8 aa, Homo sapiens
  Table A; Target 83668; HLA-B*39:01; TDRD1; ENSG00000095627; TAA
FAGDGSWY

SEQ ID NO: 83669 - protein, 8 aa, Homo sapiens
  Table A; Target 83669; HLA-C*07:01; TDRD1; ENSG00000095627; TAA
FAGDGSWY

SEQ ID NO: 83670 - protein, 8 aa, Homo sapiens
  Table A; Target 83670; HLA-B*35:03; TDRD1; ENSG00000095627; TAA
FAVGEQSM

SEQ ID NO: 83671 - protein, 8 aa, Homo sapiens
  Table A; Target 83671; HLA-B*39:01; TDRD1; ENSG00000095627; TAA
FAVGEQSM

SEQ ID NO: 83672 - protein, 8 aa, Homo sapiens
  Table A; Target 83672; HLA-C*03:04; TDRD1; ENSG00000095627; TAA
FAVGEQSM

SEQ ID NO: 83673 - protein, 9 aa, Homo sapiens
  Table A; Target 83673; HLA-B*35:03; TDRD1; ENSG00000095627; TAA
FAVGEQSMV

SEQ ID NO: 83674 - protein, 9 aa, Homo sapiens
  Table A; Target 83674; HLA-B*51:01; TDRD1; ENSG00000095627; TAA
FAVGEQSMV

SEQ ID NO: 83675 - protein, 9 aa, Homo sapiens
  Table A; Target 83675; HLA-C*02:02; TDRD1; ENSG00000095627; TAA
FAVGEQSMV

SEQ ID NO: 83676 - protein, 9 aa, Homo sapiens
  Table A; Target 83676; HLA-C*03:03; TDRD1; ENSG00000095627; TAA
FAVGEQSMV

SEQ ID NO: 83677 - protein, 9 aa, Homo sapiens
  Table A; Target 83677; HLA-C*03:04; TDRD1; ENSG00000095627; TAA
FAVGEQSMV

SEQ ID NO: 83678 - protein, 9 aa, Homo sapiens
  Table A; Target 83678; HLA-C*12:03; TDRD1; ENSG00000095627; TAA
FAVGEQSMV

SEQ ID NO: 83679 - protein, 9 aa, Homo sapiens
  Table A; Target 83679; HLA-C*16:02; TDRD1; ENSG00000095627; TAA
FAVGEQSMV

SEQ ID NO: 83680 - protein, 9 aa, Homo sapiens
  Table A; Target 83680; HLA-C*16:04; TDRD1; ENSG00000095627; TAA
FAVGEQSMV

SEQ ID NO: 83681 - protein, 9 aa, Homo sapiens
  Table A; Target 83681; HLA-A*29:02; TDRD1; ENSG00000095627; TAA
FFAGDGSWY

SEQ ID NO: 83682 - protein, 11 aa, Homo sapiens
  Table A; Target 83682; HLA-A*02:01; TDRD1; ENSG00000095627; TAA
FLLCEQTKQYL

SEQ ID NO: 83683 - protein, 11 aa, Homo sapiens
  Table A; Target 83683; HLA-A*03:02; TDRD1; ENSG00000095627; TAA
FLLNNSTNQNK

SEQ ID NO: 83684 - protein, 9 aa, Homo sapiens
  Table A; Target 83684; HLA-A*02:03; TDRD1; ENSG00000095627; TAA
FLNLPFQGI

SEQ ID NO: 83685 - protein, 9 aa, Homo sapiens
  Table A; Target 83685; HLA-A*02:04; TDRD1; ENSG00000095627; TAA
FLNLPFQGI

SEQ ID NO: 83686 - protein, 9 aa, Homo sapiens
  Table A; Target 83686; HLA-A*02:07; TDRD1; ENSG00000095627; TAA
FLNLPFQGI

SEQ ID NO: 83687 - protein, 9 aa, Homo sapiens
  Table A; Target 83687; HLA-A*02:01; TDRD1; ENSG00000095627; TAA
FMLNQNVML

SEQ ID NO: 83688 - protein, 9 aa, Homo sapiens
  Table A; Target 83688; HLA-A*02:04; TDRD1; ENSG00000095627; TAA
FMLNQNVML

SEQ ID NO: 83689 - protein, 9 aa, Homo sapiens
  Table A; Target 83689; HLA-A*02:07; TDRD1; ENSG00000095627; TAA
FMLNQNVML

SEQ ID NO: 83690 - protein, 9 aa, Homo sapiens
  Table A; Target 83690; HLA-A*23:01; TDRD1; ENSG00000095627; TAA
FMLNQNVML

SEQ ID NO: 83691 - protein, 9 aa, Homo sapiens
  Table A; Target 83691; HLA-B*55:01; TDRD1; ENSG00000095627; TAA
FMLNQNVML

SEQ ID NO: 83692 - protein, 9 aa, Homo sapiens
  Table A; Target 83692; HLA-C*14:02; TDRD1; ENSG00000095627; TAA
FMLNQNVML

SEQ ID NO: 83693 - protein, 11 aa, Homo sapiens
  Table A; Target 83693; HLA-A*02:01; TDRD1; ENSG00000095627; TAA
FMLNQNVMLSV

SEQ ID NO: 83694 - protein, 8 aa, Homo sapiens
  Table A; Target 83694; HLA-B*08:01; TDRD1; ENSG00000095627; TAA
FQIIRCSL

SEQ ID NO: 83695 - protein, 9 aa, Homo sapiens
  Table A; Target 83695; HLA-A*01:01; TDRD1; ENSG00000095627; TAA
FSDLRSLQL

SEQ ID NO: 83696 - protein, 9 aa, Homo sapiens
  Table A; Target 83696; HLA-A*02:07; TDRD1; ENSG00000095627; TAA
FSDLRSLQL

SEQ ID NO: 83697 - protein, 9 aa, Homo sapiens
  Table A; Target 83697; HLA-C*03:03; TDRD1; ENSG00000095627; TAA
FSDLRSLQL

SEQ ID NO: 83698 - protein, 9 aa, Homo sapiens
  Table A; Target 83698; HLA-C*03:04; TDRD1; ENSG00000095627; TAA
FSDLRSLQL

SEQ ID NO: 83699 - protein, 9 aa, Homo sapiens
  Table A; Target 83699; HLA-C*05:01; TDRD1; ENSG00000095627; TAA
FSDLRSLQL

SEQ ID NO: 83700 - protein, 9 aa, Homo sapiens
  Table A; Target 83700; HLA-C*16:01; TDRD1; ENSG00000095627; TAA
FSDLRSLQL

SEQ ID NO: 83701 - protein, 10 aa, Homo sapiens
  Table A; Target 83701; HLA-A*01:01; TDRD1; ENSG00000095627; TAA
FSDLRSLQLK

SEQ ID NO: 83702 - protein, 8 aa, Homo sapiens
  Table A; Target 83702; HLA-C*03:03; TDRD1; ENSG00000095627; TAA
FTSLGPPL

SEQ ID NO: 83703 - protein, 8 aa, Homo sapiens
  Table A; Target 83703; HLA-C*03:04; TDRD1; ENSG00000095627; TAA
FTSLGPPL

SEQ ID NO: 83704 - protein, 9 aa, Homo sapiens
  Table A; Target 83704; HLA-A*26:01; TDRD1; ENSG00000095627; TAA
FVANVIPAE

SEQ ID NO: 83705 - protein, 10 aa, Homo sapiens
  Table A; Target 83705; HLA-A*26:01; TDRD1; ENSG00000095627; TAA
FVANVIPAEG

SEQ ID NO: 83706 - protein, 10 aa, Homo sapiens
  Table A; Target 83706; HLA-A*68:02; TDRD1; ENSG00000095627; TAA
FVANVIPAEG

SEQ ID NO: 83707 - protein, 10 aa, Homo sapiens
  Table A; Target 83707; HLA-B*27:05; TDRD1; ENSG00000095627; TAA
FVANVIPAEG

SEQ ID NO: 83708 - protein, 10 aa, Homo sapiens
  Table A; Target 83708; HLA-C*02:02; TDRD1; ENSG00000095627; TAA
FVANVIPAEG

SEQ ID NO: 83709 - protein, 10 aa, Homo sapiens
  Table A; Target 83709; HLA-A*01:01; TDRD1; ENSG00000095627; TAA
FVDYGNIEEV

SEQ ID NO: 83710 - protein, 10 aa, Homo sapiens
  Table A; Target 83710; HLA-A*02:01; TDRD1; ENSG00000095627; TAA
FVDYGNIEEV

SEQ ID NO: 83711 - protein, 10 aa, Homo sapiens
  Table A; Target 83711; HLA-A*02:07; TDRD1; ENSG00000095627; TAA
FVDYGNIEEV

SEQ ID NO: 83712 - protein, 8 aa, Homo sapiens
  Table A; Target 83712; HLA-B*37:01; TDRD1; ENSG00000095627; TAA
GDFYVQLY

SEQ ID NO: 83713 - protein, 8 aa, Homo sapiens
  Table A; Target 83713; HLA-B*15:03; TDRD1; ENSG00000095627; TAA
GEVCIAKY

SEQ ID NO: 83714 - protein, 8 aa, Homo sapiens
  Table A; Target 83714; HLA-B*18:01; TDRD1; ENSG00000095627; TAA
GEVCIAKY

SEQ ID NO: 83715 - protein, 9 aa, Homo sapiens
  Table A; Target 83715; HLA-C*01:02; TDRD1; ENSG00000095627; TAA
GFAVGEQSM

SEQ ID NO: 83716 - protein, 9 aa, Homo sapiens
  Table A; Target 83716; HLA-C*14:02; TDRD1; ENSG00000095627; TAA
GFAVGEQSM

SEQ ID NO: 83717 - protein, 10 aa, Homo sapiens
  Table A; Target 83717; HLA-A*03:01; TDRD1; ENSG00000095627; TAA
GINGEVVGSK

SEQ ID NO: 83718 - protein, 10 aa, Homo sapiens
  Table A; Target 83718; HLA-A*03:02; TDRD1; ENSG00000095627; TAA
GINGEVVGSK

SEQ ID NO: 83719 - protein, 10 aa, Homo sapiens
  Table A; Target 83719; HLA-A*11:01; TDRD1; ENSG00000095627; TAA
GINGEVVGSK

SEQ ID NO: 83720 - protein, 10 aa, Homo sapiens
  Table A; Target 83720; HLA-A*30:02; TDRD1; ENSG00000095627; TAA
GINGEVVGSK

SEQ ID NO: 83721 - protein, 9 aa, Homo sapiens
  Table A; Target 83721; HLA-A*02:01; TDRD1; ENSG00000095627; TAA
GITKNVHTV

SEQ ID NO: 83722 - protein, 9 aa, Homo sapiens
  Table A; Target 83722; HLA-A*02:03; TDRD1; ENSG00000095627; TAA
GITKNVHTV

SEQ ID NO: 83723 - protein, 9 aa, Homo sapiens
  Table A; Target 83723; HLA-A*02:04; TDRD1; ENSG00000095627; TAA
GITKNVHTV

SEQ ID NO: 83724 - protein, 9 aa, Homo sapiens
  Table A; Target 83724; HLA-B*13:02; TDRD1; ENSG00000095627; TAA
GITKNVHTV

SEQ ID NO: 83725 - protein, 9 aa, Homo sapiens
  Table A; Target 83725; HLA-B*55:01; TDRD1; ENSG00000095627; TAA
GITKNVHTV

SEQ ID NO: 83726 - protein, 9 aa, Homo sapiens
  Table A; Target 83726; HLA-C*16:02; TDRD1; ENSG00000095627; TAA
GITKNVHTV

SEQ ID NO: 83727 - protein, 10 aa, Homo sapiens
  Table A; Target 83727; HLA-A*03:01; TDRD1; ENSG00000095627; TAA
GLAKNITPQR

SEQ ID NO: 83728 - protein, 11 aa, Homo sapiens
  Table A; Target 83728; HLA-A*03:01; TDRD1; ENSG00000095627; TAA
GLKPSGQDSKK

SEQ ID NO: 83729 - protein, 11 aa, Homo sapiens
  Table A; Target 83729; HLA-A*03:02; TDRD1; ENSG00000095627; TAA
GLQATSSAEQW

SEQ ID NO: 83730 - protein, 9 aa, Homo sapiens
  Table A; Target 83730; HLA-A*02:07; TDRD1; ENSG00000095627; TAA
GMPENQEKL

SEQ ID NO: 83731 - protein, 9 aa, Homo sapiens
  Table A; Target 83731; HLA-B*07:02; TDRD1; ENSG00000095627; TAA
GPPLRSTTC

SEQ ID NO: 83732 - protein, 9 aa, Homo sapiens
  Table A; Target 83732; HLA-B*56:01; TDRD1; ENSG00000095627; TAA
GPPLRSTTC

SEQ ID NO: 83733 - protein, 9 aa, Homo sapiens
  Table A; Target 83733; HLA-C*07:02; TDRD1; ENSG00000095627; TAA
GPPLRSTTC

SEQ ID NO: 83734 - protein, 9 aa, Homo sapiens
  Table A; Target 83734; HLA-A*03:01; TDRD1; ENSG00000095627; TAA
GSWYRALVK

SEQ ID NO: 83735 - protein, 9 aa, Homo sapiens
  Table A; Target 83735; HLA-A*11:01; TDRD1; ENSG00000095627; TAA
GTLPNHPNF

SEQ ID NO: 83736 - protein, 9 aa, Homo sapiens
  Table A; Target 83736; HLA-A*23:01; TDRD1; ENSG00000095627; TAA
GTLPNHPNF

SEQ ID NO: 83737 - protein, 9 aa, Homo sapiens
  Table A; Target 83737; HLA-A*24:02; TDRD1; ENSG00000095627; TAA
GTLPNHPNF

SEQ ID NO: 83738 - protein, 9 aa, Homo sapiens
  Table A; Target 83738; HLA-A*29:02; TDRD1; ENSG00000095627; TAA
GTLPNHPNF

SEQ ID NO: 83739 - protein, 9 aa, Homo sapiens
  Table A; Target 83739; HLA-A*30:02; TDRD1; ENSG00000095627; TAA
GTLPNHPNF

SEQ ID NO: 83740 - protein, 9 aa, Homo sapiens
  Table A; Target 83740; HLA-A*31:01; TDRD1; ENSG00000095627; TAA
GTLPNHPNF

SEQ ID NO: 83741 - protein, 9 aa, Homo sapiens
  Table A; Target 83741; HLA-A*32:01; TDRD1; ENSG00000095627; TAA
GTLPNHPNF

SEQ ID NO: 83742 - protein, 9 aa, Homo sapiens
  Table A; Target 83742; HLA-B*57:01; TDRD1; ENSG00000095627; TAA
GTLPNHPNF

SEQ ID NO: 83743 - protein, 9 aa, Homo sapiens
  Table A; Target 83743; HLA-B*58:01; TDRD1; ENSG00000095627; TAA
GTLPNHPNF

SEQ ID NO: 83744 - protein, 9 aa, Homo sapiens
  Table A; Target 83744; HLA-C*02:02; TDRD1; ENSG00000095627; TAA
GTLPNHPNF

SEQ ID NO: 83745 - protein, 9 aa, Homo sapiens
  Table A; Target 83745; HLA-C*16:01; TDRD1; ENSG00000095627; TAA
GTLPNHPNF

SEQ ID NO: 83746 - protein, 10 aa, Homo sapiens
  Table A; Target 83746; HLA-A*11:01; TDRD1; ENSG00000095627; TAA
GTLPNHPNFR

SEQ ID NO: 83747 - protein, 10 aa, Homo sapiens
  Table A; Target 83747; HLA-A*31:01; TDRD1; ENSG00000095627; TAA
GTLPNHPNFR

SEQ ID NO: 83748 - protein, 9 aa, Homo sapiens
  Table A; Target 83748; HLA-B*13:02; TDRD1; ENSG00000095627; TAA
GTSDTDVEV

SEQ ID NO: 83749 - protein, 11 aa, Homo sapiens
  Table A; Target 83749; HLA-A*01:01; TDRD1; ENSG00000095627; TAA
GTSDTDVEVLY

SEQ ID NO: 83750 - protein, 11 aa, Homo sapiens
  Table A; Target 83750; HLA-A*03:02; TDRD1; ENSG00000095627; TAA
GTSDTDVEVLY

SEQ ID NO: 83751 - protein, 11 aa, Homo sapiens
  Table A; Target 83751; HLA-A*11:01; TDRD1; ENSG00000095627; TAA
GTSDTDVEVLY

SEQ ID NO: 83752 - protein, 11 aa, Homo sapiens
  Table A; Target 83752; HLA-A*26:01; TDRD1; ENSG00000095627; TAA
GTSDTDVEVLY

SEQ ID NO: 83753 - protein, 11 aa, Homo sapiens
  Table A; Target 83753; HLA-A*29:02; TDRD1; ENSG00000095627; TAA
GTSDTDVEVLY

SEQ ID NO: 83754 - protein, 11 aa, Homo sapiens
  Table A; Target 83754; HLA-A*30:02; TDRD1; ENSG00000095627; TAA
GTSDTDVEVLY

SEQ ID NO: 83755 - protein, 9 aa, Homo sapiens
  Table A; Target 83755; HLA-A*11:01; TDRD1; ENSG00000095627; TAA
GTVDVADKL

SEQ ID NO: 83756 - protein, 9 aa, Homo sapiens
  Table A; Target 83756; HLA-A*25:01; TDRD1; ENSG00000095627; TAA
GTVDVADKL

SEQ ID NO: 83757 - protein, 9 aa, Homo sapiens
  Table A; Target 83757; HLA-A*68:02; TDRD1; ENSG00000095627; TAA
GTVDVADKL

SEQ ID NO: 83758 - protein, 9 aa, Homo sapiens
  Table A; Target 83758; HLA-B*27:05; TDRD1; ENSG00000095627; TAA
GTVDVADKL

SEQ ID NO: 83759 - protein, 9 aa, Homo sapiens
  Table A; Target 83759; HLA-B*40:01; TDRD1; ENSG00000095627; TAA
GTVDVADKL

SEQ ID NO: 83760 - protein, 9 aa, Homo sapiens
  Table A; Target 83760; HLA-B*58:01; TDRD1; ENSG00000095627; TAA
GTVDVADKL

SEQ ID NO: 83761 - protein, 9 aa, Homo sapiens
  Table A; Target 83761; HLA-C*03:04; TDRD1; ENSG00000095627; TAA
GTVDVADKL

SEQ ID NO: 83762 - protein, 9 aa, Homo sapiens
  Table A; Target 83762; HLA-C*07:06; TDRD1; ENSG00000095627; TAA
GTVDVADKL

SEQ ID NO: 83763 - protein, 8 aa, Homo sapiens
  Table A; Target 83763; HLA-C*05:01; TDRD1; ENSG00000095627; TAA
GVDQTVDV

SEQ ID NO: 83764 - protein, 9 aa, Homo sapiens
  Table A; Target 83764; HLA-C*05:01; TDRD1; ENSG00000095627; TAA
GVDQTVDVV

SEQ ID NO: 83765 - protein, 10 aa, Homo sapiens
  Table A; Target 83765; HLA-C*05:01; TDRD1; ENSG00000095627; TAA
GVDQTVDVVV

SEQ ID NO: 83766 - protein, 9 aa, Homo sapiens
  Table A; Target 83766; HLA-A*25:01; TDRD1; ENSG00000095627; TAA
GVKPSLGIW

SEQ ID NO: 83767 - protein, 9 aa, Homo sapiens
  Table A; Target 83767; HLA-B*57:01; TDRD1; ENSG00000095627; TAA
GVKPSLGIW

SEQ ID NO: 83768 - protein, 9 aa, Homo sapiens
  Table A; Target 83768; HLA-A*25:01; TDRD1; ENSG00000095627; TAA
GVTKEIAIW

SEQ ID NO: 83769 - protein, 9 aa, Homo sapiens
  Table A; Target 83769; HLA-B*57:01; TDRD1; ENSG00000095627; TAA
GVTKEIAIW

SEQ ID NO: 83770 - protein, 9 aa, Homo sapiens
  Table A; Target 83770; HLA-B*58:01; TDRD1; ENSG00000095627; TAA
GVTKEIAIW

SEQ ID NO: 83771 - protein, 9 aa, Homo sapiens
  Table A; Target 83771; HLA-A*32:01; TDRD1; ENSG00000095627; TAA
GVVAHIQTP

SEQ ID NO: 83772 - protein, 10 aa, Homo sapiens
  Table A; Target 83772; HLA-A*23:01; TDRD1; ENSG00000095627; TAA
GYVDYGNFEI

SEQ ID NO: 83773 - protein, 10 aa, Homo sapiens
  Table A; Target 83773; HLA-A*24:02; TDRD1; ENSG00000095627; TAA
GYVDYGNFEI

SEQ ID NO: 83774 - protein, 11 aa, Homo sapiens
  Table A; Target 83774; HLA-A*24:02; TDRD1; ENSG00000095627; TAA
GYVDYGNFEIL

SEQ ID NO: 83775 - protein, 9 aa, Homo sapiens
  Table A; Target 83775; HLA-B*44:02; TDRD1; ENSG00000095627; TAA
HEHILLFLL

SEQ ID NO: 83776 - protein, 8 aa, Homo sapiens
  Table A; Target 83776; HLA-B*18:01; TDRD1; ENSG00000095627; TAA
HELQVHVQ

SEQ ID NO: 83777 - protein, 10 aa, Homo sapiens
  Table A; Target 83777; HLA-A*30:01; TDRD1; ENSG00000095627; TAA
HELQVHVQGL

SEQ ID NO: 83778 - protein, 10 aa, Homo sapiens
  Table A; Target 83778; HLA-B*18:01; TDRD1; ENSG00000095627; TAA
HELQVHVQGL

SEQ ID NO: 83779 - protein, 10 aa, Homo sapiens
  Table A; Target 83779; HLA-B*37:01; TDRD1; ENSG00000095627; TAA
HELQVHVQGL

SEQ ID NO: 83780 - protein, 10 aa, Homo sapiens
  Table A; Target 83780; HLA-B*40:01; TDRD1; ENSG00000095627; TAA
HELQVHVQGL

SEQ ID NO: 83781 - protein, 10 aa, Homo sapiens
  Table A; Target 83781; HLA-B*40:02; TDRD1; ENSG00000095627; TAA
HELQVHVQGL

SEQ ID NO: 83782 - protein, 10 aa, Homo sapiens
  Table A; Target 83782; HLA-B*44:02; TDRD1; ENSG00000095627; TAA
HELQVHVQGL

SEQ ID NO: 83783 - protein, 10 aa, Homo sapiens
  Table A; Target 83783; HLA-B*44:03; TDRD1; ENSG00000095627; TAA
HELQVHVQGL

SEQ ID NO: 83784 - protein, 10 aa, Homo sapiens
  Table A; Target 83784; HLA-B*49:01; TDRD1; ENSG00000095627; TAA
HELQVHVQGL

SEQ ID NO: 83785 - protein, 8 aa, Homo sapiens
  Table A; Target 83785; HLA-B*13:02; TDRD1; ENSG00000095627; TAA
HLALPFQI

SEQ ID NO: 83786 - protein, 9 aa, Homo sapiens
  Table A; Target 83786; HLA-B*35:01; TDRD1; ENSG00000095627; TAA
HPGDFYVQL

SEQ ID NO: 83787 - protein, 9 aa, Homo sapiens
  Table A; Target 83787; HLA-B*35:03; TDRD1; ENSG00000095627; TAA
HPGDFYVQL

SEQ ID NO: 83788 - protein, 10 aa, Homo sapiens
  Table A; Target 83788; HLA-A*29:02; TDRD1; ENSG00000095627; TAA
HPGDFYVQLY

SEQ ID NO: 83789 - protein, 10 aa, Homo sapiens
  Table A; Target 83789; HLA-B*35:01; TDRD1; ENSG00000095627; TAA
HPGDFYVQLY

SEQ ID NO: 83790 - protein, 10 aa, Homo sapiens
  Table A; Target 83790; HLA-B*55:01; TDRD1; ENSG00000095627; TAA
HPGDFYVQLY

SEQ ID NO: 83791 - protein, 9 aa, Homo sapiens
  Table A; Target 83791; HLA-A*03:02; TDRD1; ENSG00000095627; TAA
HVLKEDALK

SEQ ID NO: 83792 - protein, 8 aa, Homo sapiens
  Table A; Target 83792; HLA-C*03:04; TDRD1; ENSG00000095627; TAA
HVSVSKVL

SEQ ID NO: 83793 - protein, 9 aa, Homo sapiens
  Table A; Target 83793; HLA-C*07:06; TDRD1; ENSG00000095627; TAA
HWSEEAITR

SEQ ID NO: 83794 - protein, 10 aa, Homo sapiens
  Table A; Target 83794; HLA-A*24:02; TDRD1; ENSG00000095627; TAA
HWSEEAITRF

SEQ ID NO: 83795 - protein, 10 aa, Homo sapiens
  Table A; Target 83795; HLA-B*57:01; TDRD1; ENSG00000095627; TAA
IAKYTVDQTW

SEQ ID NO: 83796 - protein, 10 aa, Homo sapiens
  Table A; Target 83796; HLA-B*58:01; TDRD1; ENSG00000095627; TAA
IAKYTVDQTW

SEQ ID NO: 83797 - protein, 8 aa, Homo sapiens
  Table A; Target 83797; HLA-B*27:02; TDRD1; ENSG00000095627; TAA
IDEHLVLK

SEQ ID NO: 83798 - protein, 9 aa, Homo sapiens
  Table A; Target 83798; HLA-A*30:01; TDRD1; ENSG00000095627; TAA
IEEVTADEL

SEQ ID NO: 83799 - protein, 9 aa, Homo sapiens
  Table A; Target 83799; HLA-A*23:01; TDRD1; ENSG00000095627; TAA
IELPVDKTI

SEQ ID NO: 83800 - protein, 9 aa, Homo sapiens
  Table A; Target 83800; HLA-A*30:01; TDRD1; ENSG00000095627; TAA
IELPVDKTI

SEQ ID NO: 83801 - protein, 9 aa, Homo sapiens
  Table A; Target 83801; HLA-B*18:01; TDRD1; ENSG00000095627; TAA
IELPVDKTI

SEQ ID NO: 83802 - protein, 9 aa, Homo sapiens
  Table A; Target 83802; HLA-B*40:01; TDRD1; ENSG00000095627; TAA
IELPVDKTI

SEQ ID NO: 83803 - protein, 9 aa, Homo sapiens
  Table A; Target 83803; HLA-B*44:02; TDRD1; ENSG00000095627; TAA
IELPVDKTI

SEQ ID NO: 83804 - protein, 9 aa, Homo sapiens
  Table A; Target 83804; HLA-B*44:03; TDRD1; ENSG00000095627; TAA
IELPVDKTI

SEQ ID NO: 83805 - protein, 9 aa, Homo sapiens
  Table A; Target 83805; HLA-B*49:01; TDRD1; ENSG00000095627; TAA
IELPVDKTI

SEQ ID NO: 83806 - protein, 11 aa, Homo sapiens
  Table A; Target 83806; HLA-A*30:01; TDRD1; ENSG00000095627; TAA
IELPVDKTIQA

SEQ ID NO: 83807 - protein, 11 aa, Homo sapiens
  Table A; Target 83807; HLA-B*49:01; TDRD1; ENSG00000095627; TAA
IELPVDKTIQA

SEQ ID NO: 83808 - protein, 9 aa, Homo sapiens
  Table A; Target 83808; HLA-B*40:02; TDRD1; ENSG00000095627; TAA
IEMGYGLKP

SEQ ID NO: 83809 - protein, 9 aa, Homo sapiens
  Table A; Target 83809; HLA-B*49:01; TDRD1; ENSG00000095627; TAA
IEMGYGLKP

SEQ ID NO: 83810 - protein, 8 aa, Homo sapiens
  Table A; Target 83810; HLA-A*30:01; TDRD1; ENSG00000095627; TAA
IETKDVEV

SEQ ID NO: 83811 - protein, 8 aa, Homo sapiens
  Table A; Target 83811; HLA-B*40:01; TDRD1; ENSG00000095627; TAA
IETKDVEV

SEQ ID NO: 83812 - protein, 8 aa, Homo sapiens
  Table A; Target 83812; HLA-B*49:01; TDRD1; ENSG00000095627; TAA
IETKDVEV

SEQ ID NO: 83813 - protein, 9 aa, Homo sapiens
  Table A; Target 83813; HLA-B*49:01; TDRD1; ENSG00000095627; TAA
IETLPLCRV

SEQ ID NO: 83814 - protein, 10 aa, Homo sapiens
  Table A; Target 83814; HLA-A*03:02; TDRD1; ENSG00000095627; TAA
IIQNVDVQQK

SEQ ID NO: 83815 - protein, 10 aa, Homo sapiens
  Table A; Target 83815; HLA-A*11:01; TDRD1; ENSG00000095627; TAA
IIQNVDVQQK

SEQ ID NO: 83816 - protein, 10 aa, Homo sapiens
  Table A; Target 83816; HLA-A*68:01; TDRD1; ENSG00000095627; TAA
IIQNVDVQQK

SEQ ID NO: 83817 - protein, 10 aa, Homo sapiens
  Table A; Target 83817; HLA-B*27:02; TDRD1; ENSG00000095627; TAA
IIQNVDVQQK

SEQ ID NO: 83818 - protein, 10 aa, Homo sapiens
  Table A; Target 83818; HLA-C*07:06; TDRD1; ENSG00000095627; TAA
IIQNVDVQQK

SEQ ID NO: 83819 - protein, 11 aa, Homo sapiens
  Table A; Target 83819; HLA-A*03:02; TDRD1; ENSG00000095627; TAA
IIQNVDVQQKK

SEQ ID NO: 83820 - protein, 11 aa, Homo sapiens
  Table A; Target 83820; HLA-A*11:01; TDRD1; ENSG00000095627; TAA
IIQNVDVQQKK

SEQ ID NO: 83821 - protein, 11 aa, Homo sapiens
  Table A; Target 83821; HLA-A*68:01; TDRD1; ENSG00000095627; TAA
IIQNVDVQQKK

SEQ ID NO: 83822 - protein, 11 aa, Homo sapiens
  Table A; Target 83822; HLA-A*68:02; TDRD1; ENSG00000095627; TAA
IISDVLIDEHL

SEQ ID NO: 83823 - protein, 8 aa, Homo sapiens
  Table A; Target 83823; HLA-A*29:02; TDRD1; ENSG00000095627; TAA
IISPNLFY

SEQ ID NO: 83824 - protein, 9 aa, Homo sapiens
  Table A; Target 83824; HLA-A*03:02; TDRD1; ENSG00000095627; TAA
IITVKVVDK

SEQ ID NO: 83825 - protein, 8 aa, Homo sapiens
  Table A; Target 83825; HLA-B*15:03; TDRD1; ENSG00000095627; TAA
IKGTVTEF

SEQ ID NO: 83826 - protein, 9 aa, Homo sapiens
  Table A; Target 83826; HLA-A*02:07; TDRD1; ENSG00000095627; TAA
ILEEEVVTF

SEQ ID NO: 83827 - protein, 9 aa, Homo sapiens
  Table A; Target 83827; HLA-A*23:01; TDRD1; ENSG00000095627; TAA
ILEEEVVTF

SEQ ID NO: 83828 - protein, 9 aa, Homo sapiens
  Table A; Target 83828; HLA-A*32:01; TDRD1; ENSG00000095627; TAA
ILEEEVVTF

SEQ ID NO: 83829 - protein, 9 aa, Homo sapiens
  Table A; Target 83829; HLA-B*15:01; TDRD1; ENSG00000095627; TAA
ILEEEVVTF

SEQ ID NO: 83830 - protein, 9 aa, Homo sapiens
  Table A; Target 83830; HLA-B*15:03; TDRD1; ENSG00000095627; TAA
ILEEEVVTF

SEQ ID NO: 83831 - protein, 9 aa, Homo sapiens
  Table A; Target 83831; HLA-B*35:01; TDRD1; ENSG00000095627; TAA
ILEEEVVTF

SEQ ID NO: 83832 - protein, 9 aa, Homo sapiens
  Table A; Target 83832; HLA-B*38:01; TDRD1; ENSG00000095627; TAA
ILEEEVVTF

SEQ ID NO: 83833 - protein, 9 aa, Homo sapiens
  Table A; Target 83833; HLA-B*55:01; TDRD1; ENSG00000095627; TAA
ILEEEVVTF

SEQ ID NO: 83834 - protein, 9 aa, Homo sapiens
  Table A; Target 83834; HLA-B*58:01; TDRD1; ENSG00000095627; TAA
ILEEEVVTF

SEQ ID NO: 83835 - protein, 9 aa, Homo sapiens
  Table A; Target 83835; HLA-C*03:03; TDRD1; ENSG00000095627; TAA
ILEEEVVTF

SEQ ID NO: 83836 - protein, 9 aa, Homo sapiens
  Table A; Target 83836; HLA-C*05:01; TDRD1; ENSG00000095627; TAA
ILEEEVVTF

SEQ ID NO: 83837 - protein, 9 aa, Homo sapiens
  Table A; Target 83837; HLA-C*07:04; TDRD1; ENSG00000095627; TAA
ILEEEVVTF

SEQ ID NO: 83838 - protein, 9 aa, Homo sapiens
  Table A; Target 83838; HLA-A*02:07; TDRD1; ENSG00000095627; TAA
ILPNGHVKV

SEQ ID NO: 83839 - protein, 9 aa, Homo sapiens
  Table A; Target 83839; HLA-A*02:01; TDRD1; ENSG00000095627; TAA
IMFSDLRSL

SEQ ID NO: 83840 - protein, 9 aa, Homo sapiens
  Table A; Target 83840; HLA-A*02:03; TDRD1; ENSG00000095627; TAA
IMFSDLRSL

SEQ ID NO: 83841 - protein, 9 aa, Homo sapiens
  Table A; Target 83841; HLA-A*02:04; TDRD1; ENSG00000095627; TAA
IMFSDLRSL

SEQ ID NO: 83842 - protein, 9 aa, Homo sapiens
  Table A; Target 83842; HLA-A*03:01; TDRD1; ENSG00000095627; TAA
IMFSDLRSL

SEQ ID NO: 83843 - protein, 9 aa, Homo sapiens
  Table A; Target 83843; HLA-B*46:01; TDRD1; ENSG00000095627; TAA
IMFSDLRSL

SEQ ID NO: 83844 - protein, 11 aa, Homo sapiens
  Table A; Target 83844; HLA-A*02:01; TDRD1; ENSG00000095627; TAA
IMFSDLRSLQL

SEQ ID NO: 83845 - protein, 9 aa, Homo sapiens
  Table A; Target 83845; HLA-B*07:02; TDRD1; ENSG00000095627; TAA
IPKVLTLNV

SEQ ID NO: 83846 - protein, 9 aa, Homo sapiens
  Table A; Target 83846; HLA-B*08:01; TDRD1; ENSG00000095627; TAA
IPKVLTLNV

SEQ ID NO: 83847 - protein, 9 aa, Homo sapiens
  Table A; Target 83847; HLA-B*51:01; TDRD1; ENSG00000095627; TAA
IPKVLTLNV

SEQ ID NO: 83848 - protein, 9 aa, Homo sapiens
  Table A; Target 83848; HLA-B*54:01; TDRD1; ENSG00000095627; TAA
IPKVLTLNV

SEQ ID NO: 83849 - protein, 9 aa, Homo sapiens
  Table A; Target 83849; HLA-B*56:01; TDRD1; ENSG00000095627; TAA
IPKVLTLNV

SEQ ID NO: 83850 - protein, 9 aa, Homo sapiens
  Table A; Target 83850; HLA-C*07:02; TDRD1; ENSG00000095627; TAA
IPKVLTLNV

SEQ ID NO: 83851 - protein, 9 aa, Homo sapiens
  Table A; Target 83851; HLA-B*08:01; TDRD1; ENSG00000095627; TAA
IPLNRIYHL

SEQ ID NO: 83852 - protein, 9 aa, Homo sapiens
  Table A; Target 83852; HLA-B*35:03; TDRD1; ENSG00000095627; TAA
IPVKGEVCI

SEQ ID NO: 83853 - protein, 9 aa, Homo sapiens
  Table A; Target 83853; HLA-B*51:01; TDRD1; ENSG00000095627; TAA
IPVKGEVCI

SEQ ID NO: 83854 - protein, 9 aa, Homo sapiens
  Table A; Target 83854; HLA-B*55:01; TDRD1; ENSG00000095627; TAA
IPVKGEVCI

SEQ ID NO: 83855 - protein, 9 aa, Homo sapiens
  Table A; Target 83855; HLA-B*56:01; TDRD1; ENSG00000095627; TAA
IPVKGEVCI

SEQ ID NO: 83856 - protein, 10 aa, Homo sapiens
  Table A; Target 83856; HLA-B*54:01; TDRD1; ENSG00000095627; TAA
IPVKGEVCIA

SEQ ID NO: 83857 - protein, 10 aa, Homo sapiens
  Table A; Target 83857; HLA-B*56:01; TDRD1; ENSG00000095627; TAA
IPVKGEVCIA

SEQ ID NO: 83858 - protein, 8 aa, Homo sapiens
  Table A; Target 83858; HLA-B*13:02; TDRD1; ENSG00000095627; TAA
IQANVLEI

SEQ ID NO: 83859 - protein, 9 aa, Homo sapiens
  Table A; Target 83859; HLA-A*30:01; TDRD1; ENSG00000095627; TAA
IQANVLEII

SEQ ID NO: 83860 - protein, 9 aa, Homo sapiens
  Table A; Target 83860; HLA-B*13:02; TDRD1; ENSG00000095627; TAA
IQANVLEII

SEQ ID NO: 83861 - protein, 9 aa, Homo sapiens
  Table A; Target 83861; HLA-B*38:01; TDRD1; ENSG00000095627; TAA
IQANVLEII

SEQ ID NO: 83862 - protein, 9 aa, Homo sapiens
  Table A; Target 83862; HLA-C*06:02; TDRD1; ENSG00000095627; TAA
IQANVLEII

SEQ ID NO: 83863 - protein, 9 aa, Homo sapiens
  Table A; Target 83863; HLA-A*03:02; TDRD1; ENSG00000095627; TAA
IQNVDVQQK

SEQ ID NO: 83864 - protein, 9 aa, Homo sapiens
  Table A; Target 83864; HLA-A*11:01; TDRD1; ENSG00000095627; TAA
IQNVDVQQK

SEQ ID NO: 83865 - protein, 9 aa, Homo sapiens
  Table A; Target 83865; HLA-A*31:01; TDRD1; ENSG00000095627; TAA
IQNVDVQQK

SEQ ID NO: 83866 - protein, 9 aa, Homo sapiens
  Table A; Target 83866; HLA-B*27:05; TDRD1; ENSG00000095627; TAA
IQNVDVQQK

SEQ ID NO: 83867 - protein, 9 aa, Homo sapiens
  Table A; Target 83867; HLA-C*07:06; TDRD1; ENSG00000095627; TAA
IQNVDVQQK

SEQ ID NO: 83868 - protein, 10 aa, Homo sapiens
  Table A; Target 83868; HLA-A*03:01; TDRD1; ENSG00000095627; TAA
ISNPGLFTSL

SEQ ID NO: 83869 - protein, 10 aa, Homo sapiens
  Table A; Target 83869; HLA-A*23:01; TDRD1; ENSG00000095627; TAA
ISNPGLFTSL

SEQ ID NO: 83870 - protein, 10 aa, Homo sapiens
  Table A; Target 83870; HLA-A*24:02; TDRD1; ENSG00000095627; TAA
ISNPGLFTSL

SEQ ID NO: 83871 - protein, 10 aa, Homo sapiens
  Table A; Target 83871; HLA-A*25:01; TDRD1; ENSG00000095627; TAA
ISNPGLFTSL

SEQ ID NO: 83872 - protein, 10 aa, Homo sapiens
  Table A; Target 83872; HLA-A*31:01; TDRD1; ENSG00000095627; TAA
ISNPGLFTSL

SEQ ID NO: 83873 - protein, 10 aa, Homo sapiens
  Table A; Target 83873; HLA-A*32:01; TDRD1; ENSG00000095627; TAA
ISNPGLFTSL

SEQ ID NO: 83874 - protein, 10 aa, Homo sapiens
  Table A; Target 83874; HLA-B*07:02; TDRD1; ENSG00000095627; TAA
ISNPGLFTSL

SEQ ID NO: 83875 - protein, 10 aa, Homo sapiens
  Table A; Target 83875; HLA-B*15:03; TDRD1; ENSG00000095627; TAA
ISNPGLFTSL

SEQ ID NO: 83876 - protein, 10 aa, Homo sapiens
  Table A; Target 83876; HLA-B*46:01; TDRD1; ENSG00000095627; TAA
ISNPGLFTSL

SEQ ID NO: 83877 - protein, 10 aa, Homo sapiens
  Table A; Target 83877; HLA-B*57:01; TDRD1; ENSG00000095627; TAA
ISNPGLFTSL

SEQ ID NO: 83878 - protein, 10 aa, Homo sapiens
  Table A; Target 83878; HLA-B*58:01; TDRD1; ENSG00000095627; TAA
ISNPGLFTSL

SEQ ID NO: 83879 - protein, 10 aa, Homo sapiens
  Table A; Target 83879; HLA-C*01:02; TDRD1; ENSG00000095627; TAA
ISNPGLFTSL

SEQ ID NO: 83880 - protein, 10 aa, Homo sapiens
  Table A; Target 83880; HLA-C*02:02; TDRD1; ENSG00000095627; TAA
ISNPGLFTSL

SEQ ID NO: 83881 - protein, 10 aa, Homo sapiens
  Table A; Target 83881; HLA-C*03:03; TDRD1; ENSG00000095627; TAA
ISNPGLFTSL

SEQ ID NO: 83882 - protein, 10 aa, Homo sapiens
  Table A; Target 83882; HLA-C*03:04; TDRD1; ENSG00000095627; TAA
ISNPGLFTSL

SEQ ID NO: 83883 - protein, 10 aa, Homo sapiens
  Table A; Target 83883; HLA-C*12:03; TDRD1; ENSG00000095627; TAA
ISNPGLFTSL

SEQ ID NO: 83884 - protein, 10 aa, Homo sapiens
  Table A; Target 83884; HLA-C*14:02; TDRD1; ENSG00000095627; TAA
ISNPGLFTSL

SEQ ID NO: 83885 - protein, 9 aa, Homo sapiens
  Table A; Target 83885; HLA-A*02:07; TDRD1; ENSG00000095627; TAA
ISPNLFYAL

SEQ ID NO: 83886 - protein, 9 aa, Homo sapiens
  Table A; Target 83886; HLA-A*24:02; TDRD1; ENSG00000095627; TAA
ISPNLFYAL

SEQ ID NO: 83887 - protein, 9 aa, Homo sapiens
  Table A; Target 83887; HLA-C*01:02; TDRD1; ENSG00000095627; TAA
ISPNLFYAL

SEQ ID NO: 83888 - protein, 8 aa, Homo sapiens
  Table A; Target 83888; HLA-C*03:04; TDRD1; ENSG00000095627; TAA
ISSTFLNL

SEQ ID NO: 83889 - protein, 10 aa, Homo sapiens
  Table A; Target 83889; HLA-B*57:01; TDRD1; ENSG00000095627; TAA
ISSTFLNLPF

SEQ ID NO: 83890 - protein, 8 aa, Homo sapiens
  Table A; Target 83890; HLA-C*16:02; TDRD1; ENSG00000095627; TAA
ITKNVHTV

SEQ ID NO: 83891 - protein, 9 aa, Homo sapiens
  Table A; Target 83891; HLA-B*08:01; TDRD1; ENSG00000095627; TAA
ITPQRQSAL

SEQ ID NO: 83892 - protein, 9 aa, Homo sapiens
  Table A; Target 83892; HLA-B*46:01; TDRD1; ENSG00000095627; TAA
ITPQRQSAL

SEQ ID NO: 83893 - protein, 9 aa, Homo sapiens
  Table A; Target 83893; HLA-C*03:04; TDRD1; ENSG00000095627; TAA
ITPQRQSAL

SEQ ID NO: 83894 - protein, 9 aa, Homo sapiens
  Table A; Target 83894; HLA-C*14:02; TDRD1; ENSG00000095627; TAA
ITPQRQSAL

SEQ ID NO: 83895 - protein, 9 aa, Homo sapiens
  Table A; Target 83895; HLA-C*16:01; TDRD1; ENSG00000095627; TAA
ITPQRQSAL

SEQ ID NO: 83896 - protein, 8 aa, Homo sapiens
  Table A; Target 83896; HLA-C*03:04; TDRD1; ENSG00000095627; TAA
ITSSHLAL

SEQ ID NO: 83897 - protein, 9 aa, Homo sapiens
  Table A; Target 83897; HLA-A*68:02; TDRD1; ENSG00000095627; TAA
ITVKVVDKL

SEQ ID NO: 83898 - protein, 9 aa, Homo sapiens
  Table A; Target 83898; HLA-B*40:01; TDRD1; ENSG00000095627; TAA
ITVKVVDKL

SEQ ID NO: 83899 - protein, 9 aa, Homo sapiens
  Table A; Target 83899; HLA-B*58:01; TDRD1; ENSG00000095627; TAA
ITVKVVDKL

SEQ ID NO: 83900 - protein, 9 aa, Homo sapiens
  Table A; Target 83900; HLA-A*02:07; TDRD1; ENSG00000095627; TAA
IVDILEEEV

SEQ ID NO: 83901 - protein, 9 aa, Homo sapiens
  Table A; Target 83901; HLA-C*05:01; TDRD1; ENSG00000095627; TAA
IVDILEEEV

SEQ ID NO: 83902 - protein, 11 aa, Homo sapiens
  Table A; Target 83902; HLA-A*03:01; TDRD1; ENSG00000095627; TAA
IVVDKSDLIPK

SEQ ID NO: 83903 - protein, 11 aa, Homo sapiens
  Table A; Target 83903; HLA-A*03:02; TDRD1; ENSG00000095627; TAA
IVVDKSDLIPK

SEQ ID NO: 83904 - protein, 11 aa, Homo sapiens
  Table A; Target 83904; HLA-A*31:01; TDRD1; ENSG00000095627; TAA
IVVDKSDLIPK

SEQ ID NO: 83905 - protein, 11 aa, Homo sapiens
  Table A; Target 83905; HLA-A*33:01; TDRD1; ENSG00000095627; TAA
IVVDKSDLIPK

SEQ ID NO: 83906 - protein, 11 aa, Homo sapiens
  Table A; Target 83906; HLA-A*68:01; TDRD1; ENSG00000095627; TAA
IVVDKSDLIPK

SEQ ID NO: 83907 - protein, 11 aa, Homo sapiens
  Table A; Target 83907; HLA-B*27:02; TDRD1; ENSG00000095627; TAA
IVVDKSDLIPK

SEQ ID NO: 83908 - protein, 11 aa, Homo sapiens
  Table A; Target 83908; HLA-A*24:02; TDRD1; ENSG00000095627; TAA
IYHLNRNIDLF

SEQ ID NO: 83909 - protein, 8 aa, Homo sapiens
  Table A; Target 83909; HLA-A*30:02; TDRD1; ENSG00000095627; TAA
IYSPGEFY

SEQ ID NO: 83910 - protein, 8 aa, Homo sapiens
  Table A; Target 83910; HLA-C*14:02; TDRD1; ENSG00000095627; TAA
IYSPGEFY

SEQ ID NO: 83911 - protein, 9 aa, Homo sapiens
  Table A; Target 83911; HLA-A*30:02; TDRD1; ENSG00000095627; TAA
KAHVLYIDY

SEQ ID NO: 83912 - protein, 11 aa, Homo sapiens
  Table A; Target 83912; HLA-A*30:02; TDRD1; ENSG00000095627; TAA
KATKPLLMEQY

SEQ ID NO: 83913 - protein, 11 aa, Homo sapiens
  Table A; Target 83913; HLA-A*03:01; TDRD1; ENSG00000095627; TAA
KDLPNDRLVNK

SEQ ID NO: 83914 - protein, 11 aa, Homo sapiens
  Table A; Target 83914; HLA-A*31:01; TDRD1; ENSG00000095627; TAA
KDLPNDRLVNK

SEQ ID NO: 83915 - protein, 8 aa, Homo sapiens
  Table A; Target 83915; HLA-B*37:01; TDRD1; ENSG00000095627; TAA
KDVEVNNK

SEQ ID NO: 83916 - protein, 9 aa, Homo sapiens
  Table A; Target 83916; HLA-B*44:03; TDRD1; ENSG00000095627; TAA
KEILPNGHV

SEQ ID NO: 83917 - protein, 9 aa, Homo sapiens
  Table A; Target 83917; HLA-B*49:01; TDRD1; ENSG00000095627; TAA
KEILPNGHV

SEQ ID NO: 83918 - protein, 11 aa, Homo sapiens
  Table A; Target 83918; HLA-B*49:01; TDRD1; ENSG00000095627; TAA
KEILPNGHVKV

SEQ ID NO: 83919 - protein, 9 aa, Homo sapiens
  Table A; Target 83919; HLA-A*02:03; TDRD1; ENSG00000095627; TAA
KETSVPLGV

SEQ ID NO: 83920 - protein, 9 aa, Homo sapiens
  Table A; Target 83920; HLA-A*30:01; TDRD1; ENSG00000095627; TAA
KETSVPLGV

SEQ ID NO: 83921 - protein, 9 aa, Homo sapiens
  Table A; Target 83921; HLA-A*32:01; TDRD1; ENSG00000095627; TAA
KETSVPLGV

SEQ ID NO: 83922 - protein, 9 aa, Homo sapiens
  Table A; Target 83922; HLA-B*13:02; TDRD1; ENSG00000095627; TAA
KETSVPLGV

SEQ ID NO: 83923 - protein, 9 aa, Homo sapiens
  Table A; Target 83923; HLA-B*37:01; TDRD1; ENSG00000095627; TAA
KETSVPLGV

SEQ ID NO: 83924 - protein, 9 aa, Homo sapiens
  Table A; Target 83924; HLA-B*40:01; TDRD1; ENSG00000095627; TAA
KETSVPLGV

SEQ ID NO: 83925 - protein, 9 aa, Homo sapiens
  Table A; Target 83925; HLA-B*40:02; TDRD1; ENSG00000095627; TAA
KETSVPLGV

SEQ ID NO: 83926 - protein, 9 aa, Homo sapiens
  Table A; Target 83926; HLA-B*44:02; TDRD1; ENSG00000095627; TAA
KETSVPLGV

SEQ ID NO: 83927 - protein, 9 aa, Homo sapiens
  Table A; Target 83927; HLA-B*44:03; TDRD1; ENSG00000095627; TAA
KETSVPLGV

SEQ ID NO: 83928 - protein, 9 aa, Homo sapiens
  Table A; Target 83928; HLA-B*49:01; TDRD1; ENSG00000095627; TAA
KETSVPLGV

SEQ ID NO: 83929 - protein, 9 aa, Homo sapiens
  Table A; Target 83929; HLA-C*02:02; TDRD1; ENSG00000095627; TAA
KETSVPLGV

SEQ ID NO: 83930 - protein, 9 aa, Homo sapiens
  Table A; Target 83930; HLA-C*16:02; TDRD1; ENSG00000095627; TAA
KETSVPLGV

SEQ ID NO: 83931 - protein, 9 aa, Homo sapiens
  Table A; Target 83931; HLA-C*16:04; TDRD1; ENSG00000095627; TAA
KETSVPLGV

SEQ ID NO: 83932 - protein, 8 aa, Homo sapiens
  Table A; Target 83932; HLA-B*18:01; TDRD1; ENSG00000095627; TAA
KETYANVH

SEQ ID NO: 83933 - protein, 10 aa, Homo sapiens
  Table A; Target 83933; HLA-B*40:01; TDRD1; ENSG00000095627; TAA
KGMPENQEKL

SEQ ID NO: 83934 - protein, 10 aa, Homo sapiens
  Table A; Target 83934; HLA-B*58:01; TDRD1; ENSG00000095627; TAA
KGMPENQEKL

SEQ ID NO: 83935 - protein, 10 aa, Homo sapiens
  Table A; Target 83935; HLA-A*03:01; TDRD1; ENSG00000095627; TAA
KIITVKVVDK

SEQ ID NO: 83936 - protein, 10 aa, Homo sapiens
  Table A; Target 83936; HLA-A*03:02; TDRD1; ENSG00000095627; TAA
KIITVKVVDK

SEQ ID NO: 83937 - protein, 10 aa, Homo sapiens
  Table A; Target 83937; HLA-A*11:01; TDRD1; ENSG00000095627; TAA
KIITVKVVDK

SEQ ID NO: 83938 - protein, 9 aa, Homo sapiens
  Table A; Target 83938; HLA-B*15:03; TDRD1; ENSG00000095627; TAA
KKLPAGNSV

SEQ ID NO: 83939 - protein, 9 aa, Homo sapiens
  Table A; Target 83939; HLA-A*02:01; TDRD1; ENSG00000095627; TAA
KLAELQASL

SEQ ID NO: 83940 - protein, 9 aa, Homo sapiens
  Table A; Target 83940; HLA-A*02:03; TDRD1; ENSG00000095627; TAA
KLAELQASL

SEQ ID NO: 83941 - protein, 9 aa, Homo sapiens
  Table A; Target 83941; HLA-A*02:04; TDRD1; ENSG00000095627; TAA
KLAELQASL

SEQ ID NO: 83942 - protein, 9 aa, Homo sapiens
  Table A; Target 83942; HLA-A*02:07; TDRD1; ENSG00000095627; TAA
KLAELQASL

SEQ ID NO: 83943 - protein, 9 aa, Homo sapiens
  Table A; Target 83943; HLA-A*03:01; TDRD1; ENSG00000095627; TAA
KLAELQASL

SEQ ID NO: 83944 - protein, 9 aa, Homo sapiens
  Table A; Target 83944; HLA-A*03:02; TDRD1; ENSG00000095627; TAA
KLAELQASL

SEQ ID NO: 83945 - protein, 9 aa, Homo sapiens
  Table A; Target 83945; HLA-A*32:01; TDRD1; ENSG00000095627; TAA
KLAELQASL

SEQ ID NO: 83946 - protein, 9 aa, Homo sapiens
  Table A; Target 83946; HLA-B*07:02; TDRD1; ENSG00000095627; TAA
KLAELQASL

SEQ ID NO: 83947 - protein, 9 aa, Homo sapiens
  Table A; Target 83947; HLA-B*08:01; TDRD1; ENSG00000095627; TAA
KLAELQASL

SEQ ID NO: 83948 - protein, 9 aa, Homo sapiens
  Table A; Target 83948; HLA-B*13:02; TDRD1; ENSG00000095627; TAA
KLAELQASL

SEQ ID NO: 83949 - protein, 9 aa, Homo sapiens
  Table A; Target 83949; HLA-B*15:01; TDRD1; ENSG00000095627; TAA
KLAELQASL

SEQ ID NO: 83950 - protein, 9 aa, Homo sapiens
  Table A; Target 83950; HLA-B*15:03; TDRD1; ENSG00000095627; TAA
KLAELQASL

SEQ ID NO: 83951 - protein, 9 aa, Homo sapiens
  Table A; Target 83951; HLA-B*40:01; TDRD1; ENSG00000095627; TAA
KLAELQASL

SEQ ID NO: 83952 - protein, 9 aa, Homo sapiens
  Table A; Target 83952; HLA-B*46:01; TDRD1; ENSG00000095627; TAA
KLAELQASL

SEQ ID NO: 83953 - protein, 9 aa, Homo sapiens
  Table A; Target 83953; HLA-B*55:01; TDRD1; ENSG00000095627; TAA
KLAELQASL

SEQ ID NO: 83954 - protein, 9 aa, Homo sapiens
  Table A; Target 83954; HLA-B*58:01; TDRD1; ENSG00000095627; TAA
KLAELQASL

SEQ ID NO: 83955 - protein, 9 aa, Homo sapiens
  Table A; Target 83955; HLA-C*01:02; TDRD1; ENSG00000095627; TAA
KLAELQASL

SEQ ID NO: 83956 - protein, 9 aa, Homo sapiens
  Table A; Target 83956; HLA-C*02:02; TDRD1; ENSG00000095627; TAA
KLAELQASL

SEQ ID NO: 83957 - protein, 9 aa, Homo sapiens
  Table A; Target 83957; HLA-C*16:01; TDRD1; ENSG00000095627; TAA
KLAELQASL

SEQ ID NO: 83958 - protein, 11 aa, Homo sapiens
  Table A; Target 83958; HLA-A*03:01; TDRD1; ENSG00000095627; TAA
KLAELQASLSK

SEQ ID NO: 83959 - protein, 11 aa, Homo sapiens
  Table A; Target 83959; HLA-A*03:02; TDRD1; ENSG00000095627; TAA
KLAELQASLSK

SEQ ID NO: 83960 - protein, 11 aa, Homo sapiens
  Table A; Target 83960; HLA-A*11:01; TDRD1; ENSG00000095627; TAA
KLAELQASLSK

SEQ ID NO: 83961 - protein, 11 aa, Homo sapiens
  Table A; Target 83961; HLA-A*03:02; TDRD1; ENSG00000095627; TAA
KLENKSSIETK

SEQ ID NO: 83962 - protein, 10 aa, Homo sapiens
  Table A; Target 83962; HLA-A*02:01; TDRD1; ENSG00000095627; TAA
KLLDHVLIEM

SEQ ID NO: 83963 - protein, 10 aa, Homo sapiens
  Table A; Target 83963; HLA-A*02:03; TDRD1; ENSG00000095627; TAA
KLLDHVLIEM

SEQ ID NO: 83964 - protein, 10 aa, Homo sapiens
  Table A; Target 83964; HLA-A*02:04; TDRD1; ENSG00000095627; TAA
KLLDHVLIEM

SEQ ID NO: 83965 - protein, 10 aa, Homo sapiens
  Table A; Target 83965; HLA-A*02:07; TDRD1; ENSG00000095627; TAA
KLLDHVLIEM

SEQ ID NO: 83966 - protein, 10 aa, Homo sapiens
  Table A; Target 83966; HLA-A*03:01; TDRD1; ENSG00000095627; TAA
KLLDHVLIEM

SEQ ID NO: 83967 - protein, 9 aa, Homo sapiens
  Table A; Target 83967; HLA-A*02:01; TDRD1; ENSG00000095627; TAA
KLLELPMQA

SEQ ID NO: 83968 - protein, 9 aa, Homo sapiens
  Table A; Target 83968; HLA-A*02:03; TDRD1; ENSG00000095627; TAA
KLNDLNKSL

SEQ ID NO: 83969 - protein, 9 aa, Homo sapiens
  Table A; Target 83969; HLA-A*02:04; TDRD1; ENSG00000095627; TAA
KLNDLNKSL

SEQ ID NO: 83970 - protein, 9 aa, Homo sapiens
  Table A; Target 83970; HLA-A*31:01; TDRD1; ENSG00000095627; TAA
KLNDLNKSL

SEQ ID NO: 83971 - protein, 9 aa, Homo sapiens
  Table A; Target 83971; HLA-A*32:01; TDRD1; ENSG00000095627; TAA
KLNDLNKSL

SEQ ID NO: 83972 - protein, 9 aa, Homo sapiens
  Table A; Target 83972; HLA-C*01:02; TDRD1; ENSG00000095627; TAA
KLNDLNKSL

SEQ ID NO: 83973 - protein, 11 aa, Homo sapiens
  Table A; Target 83973; HLA-C*01:02; TDRD1; ENSG00000095627; TAA
KLPAGNSVSPP

SEQ ID NO: 83974 - protein, 9 aa, Homo sapiens
  Table A; Target 83974; HLA-A*02:01; TDRD1; ENSG00000095627; TAA
KLQARVVEV

SEQ ID NO: 83975 - protein, 9 aa, Homo sapiens
  Table A; Target 83975; HLA-A*02:03; TDRD1; ENSG00000095627; TAA
KLQARVVEV

SEQ ID NO: 83976 - protein, 9 aa, Homo sapiens
  Table A; Target 83976; HLA-A*02:04; TDRD1; ENSG00000095627; TAA
KLQARVVEV

SEQ ID NO: 83977 - protein, 9 aa, Homo sapiens
  Table A; Target 83977; HLA-A*02:07; TDRD1; ENSG00000095627; TAA
KLQARVVEV

SEQ ID NO: 83978 - protein, 9 aa, Homo sapiens
  Table A; Target 83978; HLA-B*08:01; TDRD1; ENSG00000095627; TAA
KLQARVVEV

SEQ ID NO: 83979 - protein, 9 aa, Homo sapiens
  Table A; Target 83979; HLA-B*37:01; TDRD1; ENSG00000095627; TAA
KLQARVVEV

SEQ ID NO: 83980 - protein, 9 aa, Homo sapiens
  Table A; Target 83980; HLA-A*02:01; TDRD1; ENSG00000095627; TAA
KLVENSLSI

SEQ ID NO: 83981 - protein, 9 aa, Homo sapiens
  Table A; Target 83981; HLA-A*02:03; TDRD1; ENSG00000095627; TAA
KLVENSLSI

SEQ ID NO: 83982 - protein, 9 aa, Homo sapiens
  Table A; Target 83982; HLA-A*02:07; TDRD1; ENSG00000095627; TAA
KLVENSLSI

SEQ ID NO: 83983 - protein, 9 aa, Homo sapiens
  Table A; Target 83983; HLA-B*13:02; TDRD1; ENSG00000095627; TAA
KLVENSLSI

SEQ ID NO: 83984 - protein, 9 aa, Homo sapiens
  Table A; Target 83984; HLA-B*46:01; TDRD1; ENSG00000095627; TAA
KLVENSLSI

SEQ ID NO: 83985 - protein, 9 aa, Homo sapiens
  Table A; Target 83985; HLA-B*49:01; TDRD1; ENSG00000095627; TAA
KLVENSLSI

SEQ ID NO: 83986 - protein, 9 aa, Homo sapiens
  Table A; Target 83986; HLA-B*55:01; TDRD1; ENSG00000095627; TAA
KLVENSLSI

SEQ ID NO: 83987 - protein, 9 aa, Homo sapiens
  Table A; Target 83987; HLA-B*58:01; TDRD1; ENSG00000095627; TAA
KLVENSLSI

SEQ ID NO: 83988 - protein, 10 aa, Homo sapiens
  Table A; Target 83988; HLA-A*02:01; TDRD1; ENSG00000095627; TAA
KLVQNKIITV

SEQ ID NO: 83989 - protein, 10 aa, Homo sapiens
  Table A; Target 83989; HLA-A*02:03; TDRD1; ENSG00000095627; TAA
KLVQNKIITV

SEQ ID NO: 83990 - protein, 10 aa, Homo sapiens
  Table A; Target 83990; HLA-A*02:04; TDRD1; ENSG00000095627; TAA
KLVQNKIITV

SEQ ID NO: 83991 - protein, 10 aa, Homo sapiens
  Table A; Target 83991; HLA-A*02:07; TDRD1; ENSG00000095627; TAA
KLVQNKIITV

SEQ ID NO: 83992 - protein, 10 aa, Homo sapiens
  Table A; Target 83992; HLA-B*55:01; TDRD1; ENSG00000095627; TAA
KLVQNKIITV

SEQ ID NO: 83993 - protein, 11 aa, Homo sapiens
  Table A; Target 83993; HLA-A*03:01; TDRD1; ENSG00000095627; TAA
KLVQNKIITVK

SEQ ID NO: 83994 - protein, 9 aa, Homo sapiens
  Table A; Target 83994; HLA-A*03:01; TDRD1; ENSG00000095627; TAA
KLVTFGLAK

SEQ ID NO: 83995 - protein, 9 aa, Homo sapiens
  Table A; Target 83995; HLA-A*03:02; TDRD1; ENSG00000095627; TAA
KLVTFGLAK

SEQ ID NO: 83996 - protein, 9 aa, Homo sapiens
  Table A; Target 83996; HLA-A*11:01; TDRD1; ENSG00000095627; TAA
KLVTFGLAK

SEQ ID NO: 83997 - protein, 10 aa, Homo sapiens
  Table A; Target 83997; HLA-A*03:02; TDRD1; ENSG00000095627; TAA
KMTEPFNFEK

SEQ ID NO: 83998 - protein, 9 aa, Homo sapiens
  Table A; Target 83998; HLA-B*56:01; TDRD1; ENSG00000095627; TAA
KPGNNVRPA

SEQ ID NO: 83999 - protein, 10 aa, Homo sapiens
  Table A; Target 83999; HLA-B*07:02; TDRD1; ENSG00000095627; TAA
KPSDVKETSV

SEQ ID NO: 84000 - protein, 10 aa, Homo sapiens
  Table A; Target 84000; HLA-B*55:01; TDRD1; ENSG00000095627; TAA
KPSDVKETSV

SEQ ID NO: 84001 - protein, 10 aa, Homo sapiens
  Table A; Target 84001; HLA-B*56:01; TDRD1; ENSG00000095627; TAA
KPSDVKETSV

SEQ ID NO: 84002 - protein, 10 aa, Homo sapiens
  Table A; Target 84002; HLA-C*07:02; TDRD1; ENSG00000095627; TAA
KPSDVKETSV

SEQ ID NO: 84003 - protein, 10 aa, Homo sapiens
  Table A; Target 84003; HLA-A*03:01; TDRD1; ENSG00000095627; TAA
KSDCPLGVTK

SEQ ID NO: 84004 - protein, 10 aa, Homo sapiens
  Table A; Target 84004; HLA-A*03:02; TDRD1; ENSG00000095627; TAA
KSDCPLGVTK

SEQ ID NO: 84005 - protein, 10 aa, Homo sapiens
  Table A; Target 84005; HLA-A*11:01; TDRD1; ENSG00000095627; TAA
KSDCPLGVTK

SEQ ID NO: 84006 - protein, 9 aa, Homo sapiens
  Table A; Target 84006; HLA-C*05:01; TDRD1; ENSG00000095627; TAA
KSDLIPKVL

SEQ ID NO: 84007 - protein, 9 aa, Homo sapiens
  Table A; Target 84007; HLA-A*01:01; TDRD1; ENSG00000095627; TAA
KSETPHVSV

SEQ ID NO: 84008 - protein, 9 aa, Homo sapiens
  Table A; Target 84008; HLA-B*58:01; TDRD1; ENSG00000095627; TAA
KSETPHVSV

SEQ ID NO: 84009 - protein, 9 aa, Homo sapiens
  Table A; Target 84009; HLA-C*05:01; TDRD1; ENSG00000095627; TAA
KSETPHVSV

SEQ ID NO: 84010 - protein, 11 aa, Homo sapiens
  Table A; Target 84010; HLA-A*03:02; TDRD1; ENSG00000095627; TAA
KSETPHVSVSK

SEQ ID NO: 84011 - protein, 11 aa, Homo sapiens
  Table A; Target 84011; HLA-A*11:01; TDRD1; ENSG00000095627; TAA
KSETPHVSVSK

SEQ ID NO: 84012 - protein, 9 aa, Homo sapiens
  Table A; Target 84012; HLA-A*31:01; TDRD1; ENSG00000095627; TAA
KSRPPYRPR

SEQ ID NO: 84013 - protein, 9 aa, Homo sapiens
  Table A; Target 84013; HLA-A*03:01; TDRD1; ENSG00000095627; TAA
KTIELPVDK

SEQ ID NO: 84014 - protein, 9 aa, Homo sapiens
  Table A; Target 84014; HLA-A*03:02; TDRD1; ENSG00000095627; TAA
KTIELPVDK

SEQ ID NO: 84015 - protein, 9 aa, Homo sapiens
  Table A; Target 84015; HLA-A*11:01; TDRD1; ENSG00000095627; TAA
KTIELPVDK

SEQ ID NO: 84016 - protein, 9 aa, Homo sapiens
  Table A; Target 84016; HLA-A*32:01; TDRD1; ENSG00000095627; TAA
KTMEIKGTV

SEQ ID NO: 84017 - protein, 11 aa, Homo sapiens
  Table A; Target 84017; HLA-B*57:01; TDRD1; ENSG00000095627; TAA
KVLTLNVGDEF

SEQ ID NO: 84018 - protein, 9 aa, Homo sapiens
  Table A; Target 84018; HLA-A*32:01; TDRD1; ENSG00000095627; TAA
KVNPLEWTW

SEQ ID NO: 84019 - protein, 9 aa, Homo sapiens
  Table A; Target 84019; HLA-B*57:01; TDRD1; ENSG00000095627; TAA
KVNPLEWTW

SEQ ID NO: 84020 - protein, 9 aa, Homo sapiens
  Table A; Target 84020; HLA-B*58:01; TDRD1; ENSG00000095627; TAA
KVNPLEWTW

SEQ ID NO: 84021 - protein, 9 aa, Homo sapiens
  Table A; Target 84021; HLA-A*31:01; TDRD1; ENSG00000095627; TAA
KYCDQLPPR

SEQ ID NO: 84022 - protein, 10 aa, Homo sapiens
  Table A; Target 84022; HLA-A*31:01; TDRD1; ENSG00000095627; TAA
KYTSDDFWYR

SEQ ID NO: 84023 - protein, 8 aa, Homo sapiens
  Table A; Target 84023; HLA-B*58:01; TDRD1; ENSG00000095627; TAA
KYTVDQTW

SEQ ID NO: 84024 - protein, 9 aa, Homo sapiens
  Table A; Target 84024; HLA-A*03:01; TDRD1; ENSG00000095627; TAA
LADIQSRNK

SEQ ID NO: 84025 - protein, 9 aa, Homo sapiens
  Table A; Target 84025; HLA-A*03:02; TDRD1; ENSG00000095627; TAA
LADIQSRNK

SEQ ID NO: 84026 - protein, 9 aa, Homo sapiens
  Table A; Target 84026; HLA-A*11:01; TDRD1; ENSG00000095627; TAA
LADIQSRNK

SEQ ID NO: 84027 - protein, 8 aa, Homo sapiens
  Table A; Target 84027; HLA-C*05:01; TDRD1; ENSG00000095627; TAA
LAELQASL

SEQ ID NO: 84028 - protein, 11 aa, Homo sapiens
  Table A; Target 84028; HLA-A*01:01; TDRD1; ENSG00000095627; TAA
LAELQASLSKY

SEQ ID NO: 84029 - protein, 8 aa, Homo sapiens
  Table A; Target 84029; HLA-B*08:01; TDRD1; ENSG00000095627; TAA
LAGVKPSL

SEQ ID NO: 84030 - protein, 8 aa, Homo sapiens
  Table A; Target 84030; HLA-B*46:01; TDRD1; ENSG00000095627; TAA
LAGVKPSL

SEQ ID NO: 84031 - protein, 8 aa, Homo sapiens
  Table A; Target 84031; HLA-C*01:02; TDRD1; ENSG00000095627; TAA
LAGVKPSL

SEQ ID NO: 84032 - protein, 8 aa, Homo sapiens
  Table A; Target 84032; HLA-C*03:03; TDRD1; ENSG00000095627; TAA
LAGVKPSL

SEQ ID NO: 84033 - protein, 8 aa, Homo sapiens
  Table A; Target 84033; HLA-C*03:04; TDRD1; ENSG00000095627; TAA
LAGVKPSL

SEQ ID NO: 84034 - protein, 8 aa, Homo sapiens
  Table A; Target 84034; HLA-C*16:01; TDRD1; ENSG00000095627; TAA
LAGVKPSL

SEQ ID NO: 84035 - protein, 9 aa, Homo sapiens
  Table A; Target 84035; HLA-A*31:01; TDRD1; ENSG00000095627; TAA
LAKNITPQR

SEQ ID NO: 84036 - protein, 9 aa, Homo sapiens
  Table A; Target 84036; HLA-A*33:01; TDRD1; ENSG00000095627; TAA
LAKNITPQR

SEQ ID NO: 84037 - protein, 9 aa, Homo sapiens
  Table A; Target 84037; HLA-A*33:03; TDRD1; ENSG00000095627; TAA
LAKNITPQR

SEQ ID NO: 84038 - protein, 9 aa, Homo sapiens
  Table A; Target 84038; HLA-A*68:01; TDRD1; ENSG00000095627; TAA
LAKNITPQR

SEQ ID NO: 84039 - protein, 9 aa, Homo sapiens
  Table A; Target 84039; HLA-C*07:06; TDRD1; ENSG00000095627; TAA
LAKNITPQR

SEQ ID NO: 84040 - protein, 8 aa, Homo sapiens
  Table A; Target 84040; HLA-B*51:01; TDRD1; ENSG00000095627; TAA
LALPFQII

SEQ ID NO: 84041 - protein, 9 aa, Homo sapiens
  Table A; Target 84041; HLA-B*57:01; TDRD1; ENSG00000095627; TAA
LALPFQIIR

SEQ ID NO: 84042 - protein, 10 aa, Homo sapiens
  Table A; Target 84042; HLA-A*02:04; TDRD1; ENSG00000095627; TAA
LALPFQIIRC

SEQ ID NO: 84043 - protein, 9 aa, Homo sapiens
  Table A; Target 84043; HLA-B*35:03; TDRD1; ENSG00000095627; TAA
LAYASEESV

SEQ ID NO: 84044 - protein, 9 aa, Homo sapiens
  Table A; Target 84044; HLA-B*46:01; TDRD1; ENSG00000095627; TAA
LAYASEESV

SEQ ID NO: 84045 - protein, 9 aa, Homo sapiens
  Table A; Target 84045; HLA-B*51:01; TDRD1; ENSG00000095627; TAA
LAYASEESV

SEQ ID NO: 84046 - protein, 9 aa, Homo sapiens
  Table A; Target 84046; HLA-C*02:02; TDRD1; ENSG00000095627; TAA
LAYASEESV

SEQ ID NO: 84047 - protein, 9 aa, Homo sapiens
  Table A; Target 84047; HLA-C*03:03; TDRD1; ENSG00000095627; TAA
LAYASEESV

SEQ ID NO: 84048 - protein, 9 aa, Homo sapiens
  Table A; Target 84048; HLA-C*03:04; TDRD1; ENSG00000095627; TAA
LAYASEESV

SEQ ID NO: 84049 - protein, 9 aa, Homo sapiens
  Table A; Target 84049; HLA-C*16:04; TDRD1; ENSG00000095627; TAA
LAYASEESV

SEQ ID NO: 84050 - protein, 10 aa, Homo sapiens
  Table A; Target 84050; HLA-B*27:05; TDRD1; ENSG00000095627; TAA
LAYASEESVL

SEQ ID NO: 84051 - protein, 10 aa, Homo sapiens
  Table A; Target 84051; HLA-B*35:03; TDRD1; ENSG00000095627; TAA
LAYASEESVL

SEQ ID NO: 84052 - protein, 10 aa, Homo sapiens
  Table A; Target 84052; HLA-C*02:02; TDRD1; ENSG00000095627; TAA
LAYASEESVL

SEQ ID NO: 84053 - protein, 10 aa, Homo sapiens
  Table A; Target 84053; HLA-C*03:03; TDRD1; ENSG00000095627; TAA
LAYASEESVL

SEQ ID NO: 84054 - protein, 10 aa, Homo sapiens
  Table A; Target 84054; HLA-C*03:04; TDRD1; ENSG00000095627; TAA
LAYASEESVL

SEQ ID NO: 84055 - protein, 8 aa, Homo sapiens
  Table A; Target 84055; HLA-B*18:01; TDRD1; ENSG00000095627; TAA
LDHVLIEM

SEQ ID NO: 84056 - protein, 8 aa, Homo sapiens
  Table A; Target 84056; HLA-B*37:01; TDRD1; ENSG00000095627; TAA
LDHVLIEM

SEQ ID NO: 84057 - protein, 8 aa, Homo sapiens
  Table A; Target 84057; HLA-B*18:01; TDRD1; ENSG00000095627; TAA
LEAPPCKM

SEQ ID NO: 84058 - protein, 8 aa, Homo sapiens
  Table A; Target 84058; HLA-B*49:01; TDRD1; ENSG00000095627; TAA
LEAPPCKM

SEQ ID NO: 84059 - protein, 8 aa, Homo sapiens
  Table A; Target 84059; HLA-B*18:01; TDRD1; ENSG00000095627; TAA
LEEEVVTF

SEQ ID NO: 84060 - protein, 8 aa, Homo sapiens
  Table A; Target 84060; HLA-B*37:01; TDRD1; ENSG00000095627; TAA
LEEEVVTF

SEQ ID NO: 84061 - protein, 8 aa, Homo sapiens
  Table A; Target 84061; HLA-B*40:01; TDRD1; ENSG00000095627; TAA
LEEEVVTF

SEQ ID NO: 84062 - protein, 8 aa, Homo sapiens
  Table A; Target 84062; HLA-B*49:01; TDRD1; ENSG00000095627; TAA
LEEEVVTF

SEQ ID NO: 84063 - protein, 9 aa, Homo sapiens
  Table A; Target 84063; HLA-B*49:01; TDRD1; ENSG00000095627; TAA
LEEEVVTFA

SEQ ID NO: 84064 - protein, 8 aa, Homo sapiens
  Table A; Target 84064; HLA-A*30:01; TDRD1; ENSG00000095627; TAA
LEIISPNL

SEQ ID NO: 84065 - protein, 8 aa, Homo sapiens
  Table A; Target 84065; HLA-B*18:01; TDRD1; ENSG00000095627; TAA
LEIISPNL

SEQ ID NO: 84066 - protein, 8 aa, Homo sapiens
  Table A; Target 84066; HLA-B*40:01; TDRD1; ENSG00000095627; TAA
LEIISPNL

SEQ ID NO: 84067 - protein, 8 aa, Homo sapiens
  Table A; Target 84067; HLA-B*49:01; TDRD1; ENSG00000095627; TAA
LEIISPNL

SEQ ID NO: 84068 - protein, 9 aa, Homo sapiens
  Table A; Target 84068; HLA-B*18:01; TDRD1; ENSG00000095627; TAA
LEIISPNLF

SEQ ID NO: 84069 - protein, 9 aa, Homo sapiens
  Table A; Target 84069; HLA-B*44:02; TDRD1; ENSG00000095627; TAA
LEIISPNLF

SEQ ID NO: 84070 - protein, 9 aa, Homo sapiens
  Table A; Target 84070; HLA-B*44:03; TDRD1; ENSG00000095627; TAA
LEIISPNLF

SEQ ID NO: 84071 - protein, 9 aa, Homo sapiens
  Table A; Target 84071; HLA-B*49:01; TDRD1; ENSG00000095627; TAA
LEIISPNLF

SEQ ID NO: 84072 - protein, 10 aa, Homo sapiens
  Table A; Target 84072; HLA-A*29:02; TDRD1; ENSG00000095627; TAA
LEIISPNLFY

SEQ ID NO: 84073 - protein, 10 aa, Homo sapiens
  Table A; Target 84073; HLA-B*44:02; TDRD1; ENSG00000095627; TAA
LEIISPNLFY

SEQ ID NO: 84074 - protein, 10 aa, Homo sapiens
  Table A; Target 84074; HLA-B*44:03; TDRD1; ENSG00000095627; TAA
LEIISPNLFY

SEQ ID NO: 84075 - protein, 8 aa, Homo sapiens
  Table A; Target 84075; HLA-B*18:01; TDRD1; ENSG00000095627; TAA
LELPMQAI

SEQ ID NO: 84076 - protein, 8 aa, Homo sapiens
  Table A; Target 84076; HLA-B*49:01; TDRD1; ENSG00000095627; TAA
LELPMQAI

SEQ ID NO: 84077 - protein, 9 aa, Homo sapiens
  Table A; Target 84077; HLA-A*30:01; TDRD1; ENSG00000095627; TAA
LENSSLVEL

SEQ ID NO: 84078 - protein, 9 aa, Homo sapiens
  Table A; Target 84078; HLA-B*18:01; TDRD1; ENSG00000095627; TAA
LENSSLVEL

SEQ ID NO: 84079 - protein, 9 aa, Homo sapiens
  Table A; Target 84079; HLA-B*40:01; TDRD1; ENSG00000095627; TAA
LENSSLVEL

SEQ ID NO: 84080 - protein, 9 aa, Homo sapiens
  Table A; Target 84080; HLA-B*40:02; TDRD1; ENSG00000095627; TAA
LENSSLVEL

SEQ ID NO: 84081 - protein, 9 aa, Homo sapiens
  Table A; Target 84081; HLA-B*44:02; TDRD1; ENSG00000095627; TAA
LENSSLVEL

SEQ ID NO: 84082 - protein, 9 aa, Homo sapiens
  Table A; Target 84082; HLA-B*44:03; TDRD1; ENSG00000095627; TAA
LENSSLVEL

SEQ ID NO: 84083 - protein, 9 aa, Homo sapiens
  Table A; Target 84083; HLA-B*49:01; TDRD1; ENSG00000095627; TAA
LENSSLVEL

SEQ ID NO: 84084 - protein, 10 aa, Homo sapiens
  Table A; Target 84084; HLA-B*49:01; TDRD1; ENSG00000095627; TAA
LENSSLVELI

SEQ ID NO: 84085 - protein, 9 aa, Homo sapiens
  Table A; Target 84085; HLA-A*30:01; TDRD1; ENSG00000095627; TAA
LEYMNQLSA

SEQ ID NO: 84086 - protein, 9 aa, Homo sapiens
  Table A; Target 84086; HLA-B*49:01; TDRD1; ENSG00000095627; TAA
LEYMNQLSA

SEQ ID NO: 84087 - protein, 8 aa, Homo sapiens
  Table A; Target 84087; HLA-C*03:04; TDRD1; ENSG00000095627; TAA
LIDEHLVL

SEQ ID NO: 84088 - protein, 8 aa, Homo sapiens
  Table A; Target 84088; HLA-C*05:01; TDRD1; ENSG00000095627; TAA
LIDEHLVL

SEQ ID NO: 84089 - protein, 9 aa, Homo sapiens
  Table A; Target 84089; HLA-A*01:01; TDRD1; ENSG00000095627; TAA
LIDEHLVLK

SEQ ID NO: 84090 - protein, 9 aa, Homo sapiens
  Table A; Target 84090; HLA-A*02:07; TDRD1; ENSG00000095627; TAA
LIDEHLVLK

SEQ ID NO: 84091 - protein, 9 aa, Homo sapiens
  Table A; Target 84091; HLA-A*03:01; TDRD1; ENSG00000095627; TAA
LIDEHLVLK

SEQ ID NO: 84092 - protein, 9 aa, Homo sapiens
  Table A; Target 84092; HLA-A*03:02; TDRD1; ENSG00000095627; TAA
LIDEHLVLK

SEQ ID NO: 84093 - protein, 9 aa, Homo sapiens
  Table A; Target 84093; HLA-A*11:01; TDRD1; ENSG00000095627; TAA
LIDEHLVLK

SEQ ID NO: 84094 - protein, 9 aa, Homo sapiens
  Table A; Target 84094; HLA-C*05:01; TDRD1; ENSG00000095627; TAA
LIDEHLVLK

SEQ ID NO: 84095 - protein, 8 aa, Homo sapiens
  Table A; Target 84095; HLA-B*51:01; TDRD1; ENSG00000095627; TAA
LIPKVLTL

SEQ ID NO: 84096 - protein, 8 aa, Homo sapiens
  Table A; Target 84096; HLA-C*05:01; TDRD1; ENSG00000095627; TAA
LLDAGFAV

SEQ ID NO: 84097 - protein, 9 aa, Homo sapiens
  Table A; Target 84097; HLA-A*01:01; TDRD1; ENSG00000095627; TAA
LLDHVLIEM

SEQ ID NO: 84098 - protein, 9 aa, Homo sapiens
  Table A; Target 84098; HLA-A*02:01; TDRD1; ENSG00000095627; TAA
LLDHVLIEM

SEQ ID NO: 84099 - protein, 9 aa, Homo sapiens
  Table A; Target 84099; HLA-A*02:07; TDRD1; ENSG00000095627; TAA
LLDHVLIEM

SEQ ID NO: 84100 - protein, 9 aa, Homo sapiens
  Table A; Target 84100; HLA-C*05:01; TDRD1; ENSG00000095627; TAA
LLDHVLIEM

SEQ ID NO: 84101 - protein, 11 aa, Homo sapiens
  Table A; Target 84101; HLA-A*01:01; TDRD1; ENSG00000095627; TAA
LLDHVLIEMGY

SEQ ID NO: 84102 - protein, 10 aa, Homo sapiens
  Table A; Target 84102; HLA-A*03:01; TDRD1; ENSG00000095627; TAA
LLNNSTNQNK

SEQ ID NO: 84103 - protein, 10 aa, Homo sapiens
  Table A; Target 84103; HLA-A*03:02; TDRD1; ENSG00000095627; TAA
LLNNSTNQNK

SEQ ID NO: 84104 - protein, 9 aa, Homo sapiens
  Table A; Target 84104; HLA-B*08:01; TDRD1; ENSG00000095627; TAA
LNKLVENSL

SEQ ID NO: 84105 - protein, 9 aa, Homo sapiens
  Table A; Target 84105; HLA-B*56:01; TDRD1; ENSG00000095627; TAA
LPAGNSVSP

SEQ ID NO: 84106 - protein, 8 aa, Homo sapiens
  Table A; Target 84106; HLA-B*54:01; TDRD1; ENSG00000095627; TAA
LPFQGIRC

SEQ ID NO: 84107 - protein, 8 aa, Homo sapiens
  Table A; Target 84107; HLA-B*56:01; TDRD1; ENSG00000095627; TAA
LPFQGIRC

SEQ ID NO: 84108 - protein, 10 aa, Homo sapiens
  Table A; Target 84108; HLA-B*07:02; TDRD1; ENSG00000095627; TAA
LPFQGIRCQL

SEQ ID NO: 84109 - protein, 10 aa, Homo sapiens
  Table A; Target 84109; HLA-C*07:02; TDRD1; ENSG00000095627; TAA
LPFQGIRCQL

SEQ ID NO: 84110 - protein, 8 aa, Homo sapiens
  Table A; Target 84110; HLA-B*51:01; TDRD1; ENSG00000095627; TAA
LPFQIIRC

SEQ ID NO: 84111 - protein, 8 aa, Homo sapiens
  Table A; Target 84111; HLA-B*54:01; TDRD1; ENSG00000095627; TAA
LPFQIIRC

SEQ ID NO: 84112 - protein, 8 aa, Homo sapiens
  Table A; Target 84112; HLA-B*56:01; TDRD1; ENSG00000095627; TAA
LPFQIIRC

SEQ ID NO: 84113 - protein, 8 aa, Homo sapiens
  Table A; Target 84113; HLA-B*51:01; TDRD1; ENSG00000095627; TAA
LPMQAIKC

SEQ ID NO: 84114 - protein, 8 aa, Homo sapiens
  Table A; Target 84114; HLA-B*54:01; TDRD1; ENSG00000095627; TAA
LPMQAIKC

SEQ ID NO: 84115 - protein, 8 aa, Homo sapiens
  Table A; Target 84115; HLA-B*56:01; TDRD1; ENSG00000095627; TAA
LPMQAIKC

SEQ ID NO: 84116 - protein, 9 aa, Homo sapiens
  Table A; Target 84116; HLA-B*51:01; TDRD1; ENSG00000095627; TAA
LPMQAIKCV

SEQ ID NO: 84117 - protein, 9 aa, Homo sapiens
  Table A; Target 84117; HLA-B*54:01; TDRD1; ENSG00000095627; TAA
LPMQAIKCV

SEQ ID NO: 84118 - protein, 9 aa, Homo sapiens
  Table A; Target 84118; HLA-B*56:01; TDRD1; ENSG00000095627; TAA
LPMQAIKCV

SEQ ID NO: 84119 - protein, 10 aa, Homo sapiens
  Table A; Target 84119; HLA-B*07:02; TDRD1; ENSG00000095627; TAA
LPMQAIKCVL

SEQ ID NO: 84120 - protein, 10 aa, Homo sapiens
  Table A; Target 84120; HLA-B*35:03; TDRD1; ENSG00000095627; TAA
LPMQAIKCVL

SEQ ID NO: 84121 - protein, 10 aa, Homo sapiens
  Table A; Target 84121; HLA-C*07:02; TDRD1; ENSG00000095627; TAA
LPMQAIKCVL

SEQ ID NO: 84122 - protein, 11 aa, Homo sapiens
  Table A; Target 84122; HLA-B*54:01; TDRD1; ENSG00000095627; TAA
LPMQAIKCVLA

SEQ ID NO: 84123 - protein, 9 aa, Homo sapiens
  Table A; Target 84123; HLA-A*03:02; TDRD1; ENSG00000095627; TAA
LPNDRLVNK

SEQ ID NO: 84124 - protein, 9 aa, Homo sapiens
  Table A; Target 84124; HLA-B*07:02; TDRD1; ENSG00000095627; TAA
LPNGFKAEI

SEQ ID NO: 84125 - protein, 9 aa, Homo sapiens
  Table A; Target 84125; HLA-B*08:01; TDRD1; ENSG00000095627; TAA
LPNGFKAEI

SEQ ID NO: 84126 - protein, 9 aa, Homo sapiens
  Table A; Target 84126; HLA-B*35:03; TDRD1; ENSG00000095627; TAA
LPNGFKAEI

SEQ ID NO: 84127 - protein, 9 aa, Homo sapiens
  Table A; Target 84127; HLA-B*51:01; TDRD1; ENSG00000095627; TAA
LPNGFKAEI

SEQ ID NO: 84128 - protein, 9 aa, Homo sapiens
  Table A; Target 84128; HLA-B*54:01; TDRD1; ENSG00000095627; TAA
LPNGFKAEI

SEQ ID NO: 84129 - protein, 9 aa, Homo sapiens
  Table A; Target 84129; HLA-B*56:01; TDRD1; ENSG00000095627; TAA
LPNGFKAEI

SEQ ID NO: 84130 - protein, 9 aa, Homo sapiens
  Table A; Target 84130; HLA-C*07:02; TDRD1; ENSG00000095627; TAA
LPNGFKAEI

SEQ ID NO: 84131 - protein, 8 aa, Homo sapiens
  Table A; Target 84131; HLA-B*08:01; TDRD1; ENSG00000095627; TAA
LPNGHVKV

SEQ ID NO: 84132 - protein, 8 aa, Homo sapiens
  Table A; Target 84132; HLA-B*51:01; TDRD1; ENSG00000095627; TAA
LPNGHVKV

SEQ ID NO: 84133 - protein, 8 aa, Homo sapiens
  Table A; Target 84133; HLA-B*56:01; TDRD1; ENSG00000095627; TAA
LPNGHVKV

SEQ ID NO: 84134 - protein, 10 aa, Homo sapiens
  Table A; Target 84134; HLA-B*54:01; TDRD1; ENSG00000095627; TAA
LPPRSDFYPA

SEQ ID NO: 84135 - protein, 9 aa, Homo sapiens
  Table A; Target 84135; HLA-B*08:01; TDRD1; ENSG00000095627; TAA
LPVDKTIQA

SEQ ID NO: 84136 - protein, 9 aa, Homo sapiens
  Table A; Target 84136; HLA-B*35:01; TDRD1; ENSG00000095627; TAA
LPVDKTIQA

SEQ ID NO: 84137 - protein, 9 aa, Homo sapiens
  Table A; Target 84137; HLA-B*35:03; TDRD1; ENSG00000095627; TAA
LPVDKTIQA

SEQ ID NO: 84138 - protein, 9 aa, Homo sapiens
  Table A; Target 84138; HLA-B*51:01; TDRD1; ENSG00000095627; TAA
LPVDKTIQA

SEQ ID NO: 84139 - protein, 9 aa, Homo sapiens
  Table A; Target 84139; HLA-B*54:01; TDRD1; ENSG00000095627; TAA
LPVDKTIQA

SEQ ID NO: 84140 - protein, 9 aa, Homo sapiens
  Table A; Target 84140; HLA-B*55:01; TDRD1; ENSG00000095627; TAA
LPVDKTIQA

SEQ ID NO: 84141 - protein, 9 aa, Homo sapiens
  Table A; Target 84141; HLA-B*56:01; TDRD1; ENSG00000095627; TAA
LPVDKTIQA

SEQ ID NO: 84142 - protein, 11 aa, Homo sapiens
  Table A; Target 84142; HLA-B*51:01; TDRD1; ENSG00000095627; TAA
LPVDKTIQANV

SEQ ID NO: 84143 - protein, 11 aa, Homo sapiens
  Table A; Target 84143; HLA-B*56:01; TDRD1; ENSG00000095627; TAA
LPVDKTIQANV

SEQ ID NO: 84144 - protein, 8 aa, Homo sapiens
  Table A; Target 84144; HLA-A*30:02; TDRD1; ENSG00000095627; TAA
LQASLSKY

SEQ ID NO: 84145 - protein, 8 aa, Homo sapiens
  Table A; Target 84145; HLA-A*32:01; TDRD1; ENSG00000095627; TAA
LQASLSKY

SEQ ID NO: 84146 - protein, 8 aa, Homo sapiens
  Table A; Target 84146; HLA-B*15:01; TDRD1; ENSG00000095627; TAA
LQASLSKY

SEQ ID NO: 84147 - protein, 8 aa, Homo sapiens
  Table A; Target 84147; HLA-B*15:03; TDRD1; ENSG00000095627; TAA
LQASLSKY

SEQ ID NO: 84148 - protein, 8 aa, Homo sapiens
  Table A; Target 84148; HLA-B*46:01; TDRD1; ENSG00000095627; TAA
LQASLSKY

SEQ ID NO: 84149 - protein, 8 aa, Homo sapiens
  Table A; Target 84149; HLA-C*02:02; TDRD1; ENSG00000095627; TAA
LQASLSKY

SEQ ID NO: 84150 - protein, 8 aa, Homo sapiens
  Table A; Target 84150; HLA-C*07:04; TDRD1; ENSG00000095627; TAA
LQASLSKY

SEQ ID NO: 84151 - protein, 8 aa, Homo sapiens
  Table A; Target 84151; HLA-C*16:02; TDRD1; ENSG00000095627; TAA
LQASLSKY

SEQ ID NO: 84152 - protein, 10 aa, Homo sapiens
  Table A; Target 84152; HLA-B*58:01; TDRD1; ENSG00000095627; TAA
LQATSSAEQW

SEQ ID NO: 84153 - protein, 10 aa, Homo sapiens
  Table A; Target 84153; HLA-C*16:04; TDRD1; ENSG00000095627; TAA
LQATSSAEQW

SEQ ID NO: 84154 - protein, 8 aa, Homo sapiens
  Table A; Target 84154; HLA-B*15:01; TDRD1; ENSG00000095627; TAA
LQVHVQGL

SEQ ID NO: 84155 - protein, 9 aa, Homo sapiens
  Table A; Target 84155; HLA-A*01:01; TDRD1; ENSG00000095627; TAA
LSASLKETY

SEQ ID NO: 84156 - protein, 9 aa, Homo sapiens
  Table A; Target 84156; HLA-A*26:01; TDRD1; ENSG00000095627; TAA
LSASLKETY

SEQ ID NO: 84157 - protein, 9 aa, Homo sapiens
  Table A; Target 84157; HLA-A*29:02; TDRD1; ENSG00000095627; TAA
LSASLKETY

SEQ ID NO: 84158 - protein, 9 aa, Homo sapiens
  Table A; Target 84158; HLA-A*30:02; TDRD1; ENSG00000095627; TAA
LSASLKETY

SEQ ID NO: 84159 - protein, 9 aa, Homo sapiens
  Table A; Target 84159; HLA-A*32:01; TDRD1; ENSG00000095627; TAA
LSASLKETY

SEQ ID NO: 84160 - protein, 9 aa, Homo sapiens
  Table A; Target 84160; HLA-B*15:01; TDRD1; ENSG00000095627; TAA
LSASLKETY

SEQ ID NO: 84161 - protein, 9 aa, Homo sapiens
  Table A; Target 84161; HLA-B*15:03; TDRD1; ENSG00000095627; TAA
LSASLKETY

SEQ ID NO: 84162 - protein, 9 aa, Homo sapiens
  Table A; Target 84162; HLA-B*18:01; TDRD1; ENSG00000095627; TAA
LSASLKETY

SEQ ID NO: 84163 - protein, 9 aa, Homo sapiens
  Table A; Target 84163; HLA-B*46:01; TDRD1; ENSG00000095627; TAA
LSASLKETY

SEQ ID NO: 84164 - protein, 9 aa, Homo sapiens
  Table A; Target 84164; HLA-B*57:01; TDRD1; ENSG00000095627; TAA
LSASLKETY

SEQ ID NO: 84165 - protein, 9 aa, Homo sapiens
  Table A; Target 84165; HLA-B*58:01; TDRD1; ENSG00000095627; TAA
LSASLKETY

SEQ ID NO: 84166 - protein, 9 aa, Homo sapiens
  Table A; Target 84166; HLA-C*02:02; TDRD1; ENSG00000095627; TAA
LSASLKETY

SEQ ID NO: 84167 - protein, 9 aa, Homo sapiens
  Table A; Target 84167; HLA-C*07:04; TDRD1; ENSG00000095627; TAA
LSASLKETY

SEQ ID NO: 84168 - protein, 9 aa, Homo sapiens
  Table A; Target 84168; HLA-C*12:03; TDRD1; ENSG00000095627; TAA
LSASLKETY

SEQ ID NO: 84169 - protein, 9 aa, Homo sapiens
  Table A; Target 84169; HLA-C*16:01; TDRD1; ENSG00000095627; TAA
LSASLKETY

SEQ ID NO: 84170 - protein, 9 aa, Homo sapiens
  Table A; Target 84170; HLA-C*16:02; TDRD1; ENSG00000095627; TAA
LSASLKETY

SEQ ID NO: 84171 - protein, 9 aa, Homo sapiens
  Table A; Target 84171; HLA-C*16:04; TDRD1; ENSG00000095627; TAA
LSASLKETY

SEQ ID NO: 84172 - protein, 9 aa, Homo sapiens
  Table A; Target 84172; HLA-A*01:01; TDRD1; ENSG00000095627; TAA
LSISNPGLF

SEQ ID NO: 84173 - protein, 9 aa, Homo sapiens
  Table A; Target 84173; HLA-A*23:01; TDRD1; ENSG00000095627; TAA
LSISNPGLF

SEQ ID NO: 84174 - protein, 9 aa, Homo sapiens
  Table A; Target 84174; HLA-B*57:01; TDRD1; ENSG00000095627; TAA
LSISNPGLF

SEQ ID NO: 84175 - protein, 9 aa, Homo sapiens
  Table A; Target 84175; HLA-B*58:01; TDRD1; ENSG00000095627; TAA
LSISNPGLF

SEQ ID NO: 84176 - protein, 9 aa, Homo sapiens
  Table A; Target 84176; HLA-C*02:02; TDRD1; ENSG00000095627; TAA
LSISNPGLF

SEQ ID NO: 84177 - protein, 8 aa, Homo sapiens
  Table A; Target 84177; HLA-A*01:01; TDRD1; ENSG00000095627; TAA
LTAELLEY

SEQ ID NO: 84178 - protein, 8 aa, Homo sapiens
  Table A; Target 84178; HLA-B*18:01; TDRD1; ENSG00000095627; TAA
LTAELLEY

SEQ ID NO: 84179 - protein, 8 aa, Homo sapiens
  Table A; Target 84179; HLA-B*46:01; TDRD1; ENSG00000095627; TAA
LTAELLEY

SEQ ID NO: 84180 - protein, 8 aa, Homo sapiens
  Table A; Target 84180; HLA-A*01:01; TDRD1; ENSG00000095627; TAA
LTDLSTCY

SEQ ID NO: 84181 - protein, 8 aa, Homo sapiens
  Table A; Target 84181; HLA-C*05:01; TDRD1; ENSG00000095627; TAA
LTDLSTCY

SEQ ID NO: 84182 - protein, 9 aa, Homo sapiens
  Table A; Target 84182; HLA-A*23:01; TDRD1; ENSG00000095627; TAA
LTLNVGDEF

SEQ ID NO: 84183 - protein, 9 aa, Homo sapiens
  Table A; Target 84183; HLA-B*57:01; TDRD1; ENSG00000095627; TAA
LTLNVGDEF

SEQ ID NO: 84184 - protein, 9 aa, Homo sapiens
  Table A; Target 84184; HLA-B*58:01; TDRD1; ENSG00000095627; TAA
LTLNVGDEF

SEQ ID NO: 84185 - protein, 9 aa, Homo sapiens
  Table A; Target 84185; HLA-C*03:03; TDRD1; ENSG00000095627; TAA
LTLNVGDEF

SEQ ID NO: 84186 - protein, 9 aa, Homo sapiens
  Table A; Target 84186; HLA-C*03:04; TDRD1; ENSG00000095627; TAA
LTLNVGDEF

SEQ ID NO: 84187 - protein, 9 aa, Homo sapiens
  Table A; Target 84187; HLA-B*13:02; TDRD1; ENSG00000095627; TAA
LVNKHELQV

SEQ ID NO: 84188 - protein, 9 aa, Homo sapiens
  Table A; Target 84188; HLA-A*02:01; TDRD1; ENSG00000095627; TAA
LVQNKIITV

SEQ ID NO: 84189 - protein, 9 aa, Homo sapiens
  Table A; Target 84189; HLA-A*02:03; TDRD1; ENSG00000095627; TAA
LVQNKIITV

SEQ ID NO: 84190 - protein, 9 aa, Homo sapiens
  Table A; Target 84190; HLA-A*02:04; TDRD1; ENSG00000095627; TAA
LVQNKIITV

SEQ ID NO: 84191 - protein, 9 aa, Homo sapiens
  Table A; Target 84191; HLA-A*02:07; TDRD1; ENSG00000095627; TAA
LVQNKIITV

SEQ ID NO: 84192 - protein, 9 aa, Homo sapiens
  Table A; Target 84192; HLA-A*68:02; TDRD1; ENSG00000095627; TAA
LVQNKIITV

SEQ ID NO: 84193 - protein, 9 aa, Homo sapiens
  Table A; Target 84193; HLA-B*08:01; TDRD1; ENSG00000095627; TAA
LVQNKIITV

SEQ ID NO: 84194 - protein, 9 aa, Homo sapiens
  Table A; Target 84194; HLA-B*13:02; TDRD1; ENSG00000095627; TAA
LVQNKIITV

SEQ ID NO: 84195 - protein, 9 aa, Homo sapiens
  Table A; Target 84195; HLA-C*02:02; TDRD1; ENSG00000095627; TAA
LVQNKIITV

SEQ ID NO: 84196 - protein, 9 aa, Homo sapiens
  Table A; Target 84196; HLA-C*12:03; TDRD1; ENSG00000095627; TAA
LVQNKIITV

SEQ ID NO: 84197 - protein, 10 aa, Homo sapiens
  Table A; Target 84197; HLA-A*03:01; TDRD1; ENSG00000095627; TAA
LVQNKIITVK

SEQ ID NO: 84198 - protein, 10 aa, Homo sapiens
  Table A; Target 84198; HLA-A*03:02; TDRD1; ENSG00000095627; TAA
LVQNKIITVK

SEQ ID NO: 84199 - protein, 10 aa, Homo sapiens
  Table A; Target 84199; HLA-A*11:01; TDRD1; ENSG00000095627; TAA
LVQNKIITVK

SEQ ID NO: 84200 - protein, 11 aa, Homo sapiens
  Table A; Target 84200; HLA-A*23:01; TDRD1; ENSG00000095627; TAA
LYADYGNIETL

SEQ ID NO: 84201 - protein, 11 aa, Homo sapiens
  Table A; Target 84201; HLA-A*24:02; TDRD1; ENSG00000095627; TAA
LYADYGNIETL

SEQ ID NO: 84202 - protein, 10 aa, Homo sapiens
  Table A; Target 84202; HLA-A*23:01; TDRD1; ENSG00000095627; TAA
LYIDYGNEEI

SEQ ID NO: 84203 - protein, 10 aa, Homo sapiens
  Table A; Target 84203; HLA-A*24:02; TDRD1; ENSG00000095627; TAA
LYIDYGNEEI

SEQ ID NO: 84204 - protein, 10 aa, Homo sapiens
  Table A; Target 84204; HLA-C*14:02; TDRD1; ENSG00000095627; TAA
LYIDYGNEEI

SEQ ID NO: 84205 - protein, 9 aa, Homo sapiens
  Table A; Target 84205; HLA-A*01:01; TDRD1; ENSG00000095627; TAA
LYSSEVLEY

SEQ ID NO: 84206 - protein, 9 aa, Homo sapiens
  Table A; Target 84206; HLA-A*23:01; TDRD1; ENSG00000095627; TAA
LYSSEVLEY

SEQ ID NO: 84207 - protein, 9 aa, Homo sapiens
  Table A; Target 84207; HLA-A*24:02; TDRD1; ENSG00000095627; TAA
LYSSEVLEY

SEQ ID NO: 84208 - protein, 9 aa, Homo sapiens
  Table A; Target 84208; HLA-A*29:02; TDRD1; ENSG00000095627; TAA
LYSSEVLEY

SEQ ID NO: 84209 - protein, 9 aa, Homo sapiens
  Table A; Target 84209; HLA-A*30:02; TDRD1; ENSG00000095627; TAA
LYSSEVLEY

SEQ ID NO: 84210 - protein, 9 aa, Homo sapiens
  Table A; Target 84210; HLA-B*15:03; TDRD1; ENSG00000095627; TAA
LYSSEVLEY

SEQ ID NO: 84211 - protein, 9 aa, Homo sapiens
  Table A; Target 84211; HLA-B*35:01; TDRD1; ENSG00000095627; TAA
LYSSEVLEY

SEQ ID NO: 84212 - protein, 9 aa, Homo sapiens
  Table A; Target 84212; HLA-C*01:02; TDRD1; ENSG00000095627; TAA
LYSSEVLEY

SEQ ID NO: 84213 - protein, 9 aa, Homo sapiens
  Table A; Target 84213; HLA-C*02:02; TDRD1; ENSG00000095627; TAA
LYSSEVLEY

SEQ ID NO: 84214 - protein, 9 aa, Homo sapiens
  Table A; Target 84214; HLA-C*07:04; TDRD1; ENSG00000095627; TAA
LYSSEVLEY

SEQ ID NO: 84215 - protein, 9 aa, Homo sapiens
  Table A; Target 84215; HLA-C*14:02; TDRD1; ENSG00000095627; TAA
LYSSEVLEY

SEQ ID NO: 84216 - protein, 9 aa, Homo sapiens
  Table A; Target 84216; HLA-C*16:01; TDRD1; ENSG00000095627; TAA
LYSSEVLEY

SEQ ID NO: 84217 - protein, 8 aa, Homo sapiens
  Table A; Target 84217; HLA-B*18:01; TDRD1; ENSG00000095627; TAA
MEIKGTVT

SEQ ID NO: 84218 - protein, 8 aa, Homo sapiens
  Table A; Target 84218; HLA-B*40:02; TDRD1; ENSG00000095627; TAA
MEIKGTVT

SEQ ID NO: 84219 - protein, 8 aa, Homo sapiens
  Table A; Target 84219; HLA-B*49:01; TDRD1; ENSG00000095627; TAA
MEIKGTVT

SEQ ID NO: 84220 - protein, 9 aa, Homo sapiens
  Table A; Target 84220; HLA-B*49:01; TDRD1; ENSG00000095627; TAA
MEIKGTVTE

SEQ ID NO: 84221 - protein, 10 aa, Homo sapiens
  Table A; Target 84221; HLA-A*23:01; TDRD1; ENSG00000095627; TAA
MEIKGTVTEF

SEQ ID NO: 84222 - protein, 10 aa, Homo sapiens
  Table A; Target 84222; HLA-A*25:01; TDRD1; ENSG00000095627; TAA
MEIKGTVTEF

SEQ ID NO: 84223 - protein, 10 aa, Homo sapiens
  Table A; Target 84223; HLA-A*26:01; TDRD1; ENSG00000095627; TAA
MEIKGTVTEF

SEQ ID NO: 84224 - protein, 10 aa, Homo sapiens
  Table A; Target 84224; HLA-A*30:01; TDRD1; ENSG00000095627; TAA
MEIKGTVTEF

SEQ ID NO: 84225 - protein, 10 aa, Homo sapiens
  Table A; Target 84225; HLA-B*15:03; TDRD1; ENSG00000095627; TAA
MEIKGTVTEF

SEQ ID NO: 84226 - protein, 10 aa, Homo sapiens
  Table A; Target 84226; HLA-B*18:01; TDRD1; ENSG00000095627; TAA
MEIKGTVTEF

SEQ ID NO: 84227 - protein, 10 aa, Homo sapiens
  Table A; Target 84227; HLA-B*27:02; TDRD1; ENSG00000095627; TAA
MEIKGTVTEF

SEQ ID NO: 84228 - protein, 10 aa, Homo sapiens
  Table A; Target 84228; HLA-B*35:01; TDRD1; ENSG00000095627; TAA
MEIKGTVTEF

SEQ ID NO: 84229 - protein, 10 aa, Homo sapiens
  Table A; Target 84229; HLA-B*37:01; TDRD1; ENSG00000095627; TAA
MEIKGTVTEF

SEQ ID NO: 84230 - protein, 10 aa, Homo sapiens
  Table A; Target 84230; HLA-B*40:01; TDRD1; ENSG00000095627; TAA
MEIKGTVTEF

SEQ ID NO: 84231 - protein, 10 aa, Homo sapiens
  Table A; Target 84231; HLA-B*40:02; TDRD1; ENSG00000095627; TAA
MEIKGTVTEF

SEQ ID NO: 84232 - protein, 10 aa, Homo sapiens
  Table A; Target 84232; HLA-B*44:02; TDRD1; ENSG00000095627; TAA
MEIKGTVTEF

SEQ ID NO: 84233 - protein, 10 aa, Homo sapiens
  Table A; Target 84233; HLA-B*44:03; TDRD1; ENSG00000095627; TAA
MEIKGTVTEF

SEQ ID NO: 84234 - protein, 10 aa, Homo sapiens
  Table A; Target 84234; HLA-B*49:01; TDRD1; ENSG00000095627; TAA
MEIKGTVTEF

SEQ ID NO: 84235 - protein, 10 aa, Homo sapiens
  Table A; Target 84235; HLA-C*16:04; TDRD1; ENSG00000095627; TAA
MEIKGTVTEF

SEQ ID NO: 84236 - protein, 10 aa, Homo sapiens
  Table A; Target 84236; HLA-A*30:01; TDRD1; ENSG00000095627; TAA
MELNGSSSQL

SEQ ID NO: 84237 - protein, 10 aa, Homo sapiens
  Table A; Target 84237; HLA-B*40:01; TDRD1; ENSG00000095627; TAA
MELNGSSSQL

SEQ ID NO: 84238 - protein, 10 aa, Homo sapiens
  Table A; Target 84238; HLA-B*49:01; TDRD1; ENSG00000095627; TAA
MELNGSSSQL

SEQ ID NO: 84239 - protein, 11 aa, Homo sapiens
  Table A; Target 84239; HLA-B*49:01; TDRD1; ENSG00000095627; TAA
MELNGSSSQLI

SEQ ID NO: 84240 - protein, 9 aa, Homo sapiens
  Table A; Target 84240; HLA-B*49:01; TDRD1; ENSG00000095627; TAA
MEQYCSIKI

SEQ ID NO: 84241 - protein, 9 aa, Homo sapiens
  Table A; Target 84241; HLA-A*02:07; TDRD1; ENSG00000095627; TAA
MISSTFLNL

SEQ ID NO: 84242 - protein, 9 aa, Homo sapiens
  Table A; Target 84242; HLA-A*03:01; TDRD1; ENSG00000095627; TAA
MISSTFLNL

SEQ ID NO: 84243 - protein, 9 aa, Homo sapiens
  Table A; Target 84243; HLA-A*68:02; TDRD1; ENSG00000095627; TAA
MISSTFLNL

SEQ ID NO: 84244 - protein, 8 aa, Homo sapiens
  Table A; Target 84244; HLA-B*08:01; TDRD1; ENSG00000095627; TAA
MLNQNVML

SEQ ID NO: 84245 - protein, 10 aa, Homo sapiens
  Table A; Target 84245; HLA-A*02:03; TDRD1; ENSG00000095627; TAA
MLNQNVMLSV

SEQ ID NO: 84246 - protein, 11 aa, Homo sapiens
  Table A; Target 84246; HLA-A*03:01; TDRD1; ENSG00000095627; TAA
MLNQNVMLSVK

SEQ ID NO: 84247 - protein, 9 aa, Homo sapiens
  Table A; Target 84247; HLA-A*03:01; TDRD1; ENSG00000095627; TAA
MLSVKGITK

SEQ ID NO: 84248 - protein, 9 aa, Homo sapiens
  Table A; Target 84248; HLA-A*03:02; TDRD1; ENSG00000095627; TAA
MLSVKGITK

SEQ ID NO: 84249 - protein, 9 aa, Homo sapiens
  Table A; Target 84249; HLA-C*07:06; TDRD1; ENSG00000095627; TAA
MLSVKGITK

SEQ ID NO: 84250 - protein, 9 aa, Homo sapiens
  Table A; Target 84250; HLA-A*01:01; TDRD1; ENSG00000095627; TAA
MLTAELLEY

SEQ ID NO: 84251 - protein, 9 aa, Homo sapiens
  Table A; Target 84251; HLA-A*29:02; TDRD1; ENSG00000095627; TAA
MLTAELLEY

SEQ ID NO: 84252 - protein, 9 aa, Homo sapiens
  Table A; Target 84252; HLA-A*30:02; TDRD1; ENSG00000095627; TAA
MLTAELLEY

SEQ ID NO: 84253 - protein, 9 aa, Homo sapiens
  Table A; Target 84253; HLA-B*15:01; TDRD1; ENSG00000095627; TAA
MLTAELLEY

SEQ ID NO: 84254 - protein, 9 aa, Homo sapiens
  Table A; Target 84254; HLA-B*15:03; TDRD1; ENSG00000095627; TAA
MLTAELLEY

SEQ ID NO: 84255 - protein, 9 aa, Homo sapiens
  Table A; Target 84255; HLA-B*35:01; TDRD1; ENSG00000095627; TAA
MLTAELLEY

SEQ ID NO: 84256 - protein, 9 aa, Homo sapiens
  Table A; Target 84256; HLA-B*46:01; TDRD1; ENSG00000095627; TAA
MLTAELLEY

SEQ ID NO: 84257 - protein, 9 aa, Homo sapiens
  Table A; Target 84257; HLA-B*55:01; TDRD1; ENSG00000095627; TAA
MLTAELLEY

SEQ ID NO: 84258 - protein, 9 aa, Homo sapiens
  Table A; Target 84258; HLA-C*07:04; TDRD1; ENSG00000095627; TAA
MLTAELLEY

SEQ ID NO: 84259 - protein, 9 aa, Homo sapiens
  Table A; Target 84259; HLA-C*16:01; TDRD1; ENSG00000095627; TAA
MLTAELLEY

SEQ ID NO: 84260 - protein, 8 aa, Homo sapiens
  Table A; Target 84260; HLA-C*14:02; TDRD1; ENSG00000095627; TAA
MNQLSASL

SEQ ID NO: 84261 - protein, 8 aa, Homo sapiens
  Table A; Target 84261; HLA-B*35:03; TDRD1; ENSG00000095627; TAA
MPENQEKL

SEQ ID NO: 84262 - protein, 10 aa, Homo sapiens
  Table A; Target 84262; HLA-B*35:01; TDRD1; ENSG00000095627; TAA
MPENQEKLCM

SEQ ID NO: 84263 - protein, 10 aa, Homo sapiens
  Table A; Target 84263; HLA-B*35:03; TDRD1; ENSG00000095627; TAA
MPENQEKLCM

SEQ ID NO: 84264 - protein, 10 aa, Homo sapiens
  Table A; Target 84264; HLA-B*55:01; TDRD1; ENSG00000095627; TAA
MPENQEKLCM

SEQ ID NO: 84265 - protein, 8 aa, Homo sapiens
  Table A; Target 84265; HLA-B*08:01; TDRD1; ENSG00000095627; TAA
MQAIKCVL

SEQ ID NO: 84266 - protein, 9 aa, Homo sapiens
  Table A; Target 84266; HLA-A*01:01; TDRD1; ENSG00000095627; TAA
MTEPFNFEK

SEQ ID NO: 84267 - protein, 9 aa, Homo sapiens
  Table A; Target 84267; HLA-A*11:01; TDRD1; ENSG00000095627; TAA
MTEPFNFEK

SEQ ID NO: 84268 - protein, 9 aa, Homo sapiens
  Table A; Target 84268; HLA-A*68:02; TDRD1; ENSG00000095627; TAA
MTTENNIVV

SEQ ID NO: 84269 - protein, 11 aa, Homo sapiens
  Table A; Target 84269; HLA-A*03:02; TDRD1; ENSG00000095627; TAA
MTTENNIVVDK

SEQ ID NO: 84270 - protein, 11 aa, Homo sapiens
  Table A; Target 84270; HLA-A*11:01; TDRD1; ENSG00000095627; TAA
MTTENNIVVDK

SEQ ID NO: 84271 - protein, 11 aa, Homo sapiens
  Table A; Target 84271; HLA-A*68:01; TDRD1; ENSG00000095627; TAA
MTTENNIVVDK

SEQ ID NO: 84272 - protein, 11 aa, Homo sapiens
  Table A; Target 84272; HLA-A*68:02; TDRD1; ENSG00000095627; TAA
MTTENNIVVDK

SEQ ID NO: 84273 - protein, 11 aa, Homo sapiens
  Table A; Target 84273; HLA-B*27:02; TDRD1; ENSG00000095627; TAA
MTTENNIVVDK

SEQ ID NO: 84274 - protein, 11 aa, Homo sapiens
  Table A; Target 84274; HLA-C*07:06; TDRD1; ENSG00000095627; TAA
MTTENNIVVDK

SEQ ID NO: 84275 - protein, 9 aa, Homo sapiens
  Table A; Target 84275; HLA-C*16:02; TDRD1; ENSG00000095627; TAA
MVTDKPSDV

SEQ ID NO: 84276 - protein, 10 aa, Homo sapiens
  Table A; Target 84276; HLA-A*68:01; TDRD1; ENSG00000095627; TAA
MVTDKPSDVK

SEQ ID NO: 84277 - protein, 9 aa, Homo sapiens
  Table A; Target 84277; HLA-C*16:01; TDRD1; ENSG00000095627; TAA
NAPKSRPPY

SEQ ID NO: 84278 - protein, 10 aa, Homo sapiens
  Table A; Target 84278; HLA-B*49:01; TDRD1; ENSG00000095627; TAA
NEEIIPLNRI

SEQ ID NO: 84279 - protein, 11 aa, Homo sapiens
  Table A; Target 84279; HLA-B*18:01; TDRD1; ENSG00000095627; TAA
NEEIIPLNRIY

SEQ ID NO: 84280 - protein, 11 aa, Homo sapiens
  Table A; Target 84280; HLA-B*44:02; TDRD1; ENSG00000095627; TAA
NEEIIPLNRIY

SEQ ID NO: 84281 - protein, 11 aa, Homo sapiens
  Table A; Target 84281; HLA-B*44:03; TDRD1; ENSG00000095627; TAA
NEEIIPLNRIY

SEQ ID NO: 84282 - protein, 8 aa, Homo sapiens
  Table A; Target 84282; HLA-B*18:01; TDRD1; ENSG00000095627; TAA
NENKLPPH

SEQ ID NO: 84283 - protein, 9 aa, Homo sapiens
  Table A; Target 84283; HLA-C*14:02; TDRD1; ENSG00000095627; TAA
NFMLNQNVM

SEQ ID NO: 84284 - protein, 9 aa, Homo sapiens
  Table A; Target 84284; HLA-A*33:03; TDRD1; ENSG00000095627; TAA
NIKPGNNVR

SEQ ID NO: 84285 - protein, 9 aa, Homo sapiens
  Table A; Target 84285; HLA-B*15:03; TDRD1; ENSG00000095627; TAA
NKLPPHESL

SEQ ID NO: 84286 - protein, 8 aa, Homo sapiens
  Table A; Target 84286; HLA-B*07:02; TDRD1; ENSG00000095627; TAA
NPGLFTSL

SEQ ID NO: 84287 - protein, 8 aa, Homo sapiens
  Table A; Target 84287; HLA-B*08:01; TDRD1; ENSG00000095627; TAA
NPGLFTSL

SEQ ID NO: 84288 - protein, 8 aa, Homo sapiens
  Table A; Target 84288; HLA-B*35:03; TDRD1; ENSG00000095627; TAA
NPGLFTSL

SEQ ID NO: 84289 - protein, 8 aa, Homo sapiens
  Table A; Target 84289; HLA-C*07:02; TDRD1; ENSG00000095627; TAA
NPGLFTSL

SEQ ID NO: 84290 - protein, 9 aa, Homo sapiens
  Table A; Target 84290; HLA-B*07:02; TDRD1; ENSG00000095627; TAA
NPNGINGEV

SEQ ID NO: 84291 - protein, 9 aa, Homo sapiens
  Table A; Target 84291; HLA-B*56:01; TDRD1; ENSG00000095627; TAA
NPNGINGEV

SEQ ID NO: 84292 - protein, 10 aa, Homo sapiens
  Table A; Target 84292; HLA-B*07:02; TDRD1; ENSG00000095627; TAA
NPNGINGEVV

SEQ ID NO: 84293 - protein, 10 aa, Homo sapiens
  Table A; Target 84293; HLA-B*35:01; TDRD1; ENSG00000095627; TAA
NPNGINGEVV

SEQ ID NO: 84294 - protein, 10 aa, Homo sapiens
  Table A; Target 84294; HLA-B*35:03; TDRD1; ENSG00000095627; TAA
NPNGINGEVV

SEQ ID NO: 84295 - protein, 10 aa, Homo sapiens
  Table A; Target 84295; HLA-B*56:01; TDRD1; ENSG00000095627; TAA
NPNGINGEVV

SEQ ID NO: 84296 - protein, 11 aa, Homo sapiens
  Table A; Target 84296; HLA-B*35:01; TDRD1; ENSG00000095627; TAA
NPNGINGEVVG

SEQ ID NO: 84297 - protein, 11 aa, Homo sapiens
  Table A; Target 84297; HLA-B*35:03; TDRD1; ENSG00000095627; TAA
NPNGINGEVVG

SEQ ID NO: 84298 - protein, 11 aa, Homo sapiens
  Table A; Target 84298; HLA-B*56:01; TDRD1; ENSG00000095627; TAA
NPNGINGEVVG

SEQ ID NO: 84299 - protein, 11 aa, Homo sapiens
  Table A; Target 84299; HLA-A*30:02; TDRD1; ENSG00000095627; TAA
NQLSASLKETY

SEQ ID NO: 84300 - protein, 11 aa, Homo sapiens
  Table A; Target 84300; HLA-A*32:01; TDRD1; ENSG00000095627; TAA
NQLSASLKETY

SEQ ID NO: 84301 - protein, 11 aa, Homo sapiens
  Table A; Target 84301; HLA-B*15:01; TDRD1; ENSG00000095627; TAA
NQLSASLKETY

SEQ ID NO: 84302 - protein, 11 aa, Homo sapiens
  Table A; Target 84302; HLA-B*15:03; TDRD1; ENSG00000095627; TAA
NQLSASLKETY

SEQ ID NO: 84303 - protein, 11 aa, Homo sapiens
  Table A; Target 84303; HLA-B*39:01; TDRD1; ENSG00000095627; TAA
NQLSASLKETY

SEQ ID NO: 84304 - protein, 11 aa, Homo sapiens
  Table A; Target 84304; HLA-C*16:04; TDRD1; ENSG00000095627; TAA
NQLSASLKETY

SEQ ID NO: 84305 - protein, 8 aa, Homo sapiens
  Table A; Target 84305; HLA-B*18:01; TDRD1; ENSG00000095627; TAA
NQNKFIEM

SEQ ID NO: 84306 - protein, 8 aa, Homo sapiens
  Table A; Target 84306; HLA-B*37:01; TDRD1; ENSG00000095627; TAA
NQNKFIEM

SEQ ID NO: 84307 - protein, 8 aa, Homo sapiens
  Table A; Target 84307; HLA-B*13:02; TDRD1; ENSG00000095627; TAA
NQNVMLSV

SEQ ID NO: 84308 - protein, 9 aa, Homo sapiens
  Table A; Target 84308; HLA-A*02:07; TDRD1; ENSG00000095627; TAA
NSPPKEVNI

SEQ ID NO: 84309 - protein, 9 aa, Homo sapiens
  Table A; Target 84309; HLA-C*01:02; TDRD1; ENSG00000095627; TAA
NSPPKEVNI

SEQ ID NO: 84310 - protein, 10 aa, Homo sapiens
  Table A; Target 84310; HLA-B*27:02; TDRD1; ENSG00000095627; TAA
NSSLVELIDK

SEQ ID NO: 84311 - protein, 8 aa, Homo sapiens
  Table A; Target 84311; HLA-C*05:01; TDRD1; ENSG00000095627; TAA
NVDVQQKK

SEQ ID NO: 84312 - protein, 9 aa, Homo sapiens
  Table A; Target 84312; HLA-A*03:01; TDRD1; ENSG00000095627; TAA
NVHTVSVEK

SEQ ID NO: 84313 - protein, 9 aa, Homo sapiens
  Table A; Target 84313; HLA-A*03:02; TDRD1; ENSG00000095627; TAA
NVHTVSVEK

SEQ ID NO: 84314 - protein, 9 aa, Homo sapiens
  Table A; Target 84314; HLA-A*11:01; TDRD1; ENSG00000095627; TAA
NVHTVSVEK

SEQ ID NO: 84315 - protein, 9 aa, Homo sapiens
  Table A; Target 84315; HLA-A*33:01; TDRD1; ENSG00000095627; TAA
NVHTVSVEK

SEQ ID NO: 84316 - protein, 9 aa, Homo sapiens
  Table A; Target 84316; HLA-A*33:03; TDRD1; ENSG00000095627; TAA
NVHTVSVEK

SEQ ID NO: 84317 - protein, 9 aa, Homo sapiens
  Table A; Target 84317; HLA-A*68:01; TDRD1; ENSG00000095627; TAA
NVHTVSVEK

SEQ ID NO: 84318 - protein, 9 aa, Homo sapiens
  Table A; Target 84318; HLA-C*07:06; TDRD1; ENSG00000095627; TAA
NVHTVSVEK

SEQ ID NO: 84319 - protein, 9 aa, Homo sapiens
  Table A; Target 84319; HLA-A*25:01; TDRD1; ENSG00000095627; TAA
NVIPAEGNW

SEQ ID NO: 84320 - protein, 9 aa, Homo sapiens
  Table A; Target 84320; HLA-A*26:01; TDRD1; ENSG00000095627; TAA
NVIPAEGNW

SEQ ID NO: 84321 - protein, 9 aa, Homo sapiens
  Table A; Target 84321; HLA-A*32:01; TDRD1; ENSG00000095627; TAA
NVIPAEGNW

SEQ ID NO: 84322 - protein, 9 aa, Homo sapiens
  Table A; Target 84322; HLA-B*57:01; TDRD1; ENSG00000095627; TAA
NVIPAEGNW

SEQ ID NO: 84323 - protein, 9 aa, Homo sapiens
  Table A; Target 84323; HLA-B*58:01; TDRD1; ENSG00000095627; TAA
NVIPAEGNW

SEQ ID NO: 84324 - protein, 11 aa, Homo sapiens
  Table A; Target 84324; HLA-A*03:02; TDRD1; ENSG00000095627; TAA
NVMLSVKGITK

SEQ ID NO: 84325 - protein, 11 aa, Homo sapiens
  Table A; Target 84325; HLA-A*11:01; TDRD1; ENSG00000095627; TAA
NVMLSVKGITK

SEQ ID NO: 84326 - protein, 11 aa, Homo sapiens
  Table A; Target 84326; HLA-C*07:06; TDRD1; ENSG00000095627; TAA
NVMLSVKGITK

SEQ ID NO: 84327 - protein, 8 aa, Homo sapiens
  Table A; Target 84327; HLA-B*08:01; TDRD1; ENSG00000095627; TAA
NVMSRNNL

SEQ ID NO: 84328 - protein, 9 aa, Homo sapiens
  Table A; Target 84328; HLA-A*01:01; TDRD1; ENSG00000095627; TAA
PGDFYVQLY

SEQ ID NO: 84329 - protein, 9 aa, Homo sapiens
  Table A; Target 84329; HLA-C*05:01; TDRD1; ENSG00000095627; TAA
PSDVKETSV

SEQ ID NO: 84330 - protein, 9 aa, Homo sapiens
  Table A; Target 84330; HLA-A*25:01; TDRD1; ENSG00000095627; TAA
QATSSAEQW

SEQ ID NO: 84331 - protein, 9 aa, Homo sapiens
  Table A; Target 84331; HLA-B*57:01; TDRD1; ENSG00000095627; TAA
QATSSAEQW

SEQ ID NO: 84332 - protein, 9 aa, Homo sapiens
  Table A; Target 84332; HLA-B*58:01; TDRD1; ENSG00000095627; TAA
QATSSAEQW

SEQ ID NO: 84333 - protein, 9 aa, Homo sapiens
  Table A; Target 84333; HLA-C*07:06; TDRD1; ENSG00000095627; TAA
QATSSAEQW

SEQ ID NO: 84334 - protein, 10 aa, Homo sapiens
  Table A; Target 84334; HLA-A*03:01; TDRD1; ENSG00000095627; TAA
QLADIQSRNK

SEQ ID NO: 84335 - protein, 10 aa, Homo sapiens
  Table A; Target 84335; HLA-A*03:02; TDRD1; ENSG00000095627; TAA
QLADIQSRNK

SEQ ID NO: 84336 - protein, 10 aa, Homo sapiens
  Table A; Target 84336; HLA-A*11:01; TDRD1; ENSG00000095627; TAA
QLADIQSRNK

SEQ ID NO: 84337 - protein, 8 aa, Homo sapiens
  Table A; Target 84337; HLA-B*08:01; TDRD1; ENSG00000095627; TAA
QLKKTMEI

SEQ ID NO: 84338 - protein, 9 aa, Homo sapiens
  Table A; Target 84338; HLA-A*29:02; TDRD1; ENSG00000095627; TAA
QLPPRSDFY

SEQ ID NO: 84339 - protein, 10 aa, Homo sapiens
  Table A; Target 84339; HLA-A*01:01; TDRD1; ENSG00000095627; TAA
QLSASLKETY

SEQ ID NO: 84340 - protein, 10 aa, Homo sapiens
  Table A; Target 84340; HLA-A*29:02; TDRD1; ENSG00000095627; TAA
QLSASLKETY

SEQ ID NO: 84341 - protein, 10 aa, Homo sapiens
  Table A; Target 84341; HLA-A*30:02; TDRD1; ENSG00000095627; TAA
QLSASLKETY

SEQ ID NO: 84342 - protein, 10 aa, Homo sapiens
  Table A; Target 84342; HLA-A*32:01; TDRD1; ENSG00000095627; TAA
QLSASLKETY

SEQ ID NO: 84343 - protein, 10 aa, Homo sapiens
  Table A; Target 84343; HLA-B*15:01; TDRD1; ENSG00000095627; TAA
QLSASLKETY

SEQ ID NO: 84344 - protein, 10 aa, Homo sapiens
  Table A; Target 84344; HLA-B*15:03; TDRD1; ENSG00000095627; TAA
QLSASLKETY

SEQ ID NO: 84345 - protein, 10 aa, Homo sapiens
  Table A; Target 84345; HLA-B*27:02; TDRD1; ENSG00000095627; TAA
QLSASLKETY

SEQ ID NO: 84346 - protein, 10 aa, Homo sapiens
  Table A; Target 84346; HLA-B*35:01; TDRD1; ENSG00000095627; TAA
QLSASLKETY

SEQ ID NO: 84347 - protein, 10 aa, Homo sapiens
  Table A; Target 84347; HLA-B*44:03; TDRD1; ENSG00000095627; TAA
QLSASLKETY

SEQ ID NO: 84348 - protein, 10 aa, Homo sapiens
  Table A; Target 84348; HLA-B*58:01; TDRD1; ENSG00000095627; TAA
QLSASLKETY

SEQ ID NO: 84349 - protein, 10 aa, Homo sapiens
  Table A; Target 84349; HLA-C*07:04; TDRD1; ENSG00000095627; TAA
QLSASLKETY

SEQ ID NO: 84350 - protein, 10 aa, Homo sapiens
  Table A; Target 84350; HLA-A*01:01; TDRD1; ENSG00000095627; TAA
QLYSSEVLEY

SEQ ID NO: 84351 - protein, 10 aa, Homo sapiens
  Table A; Target 84351; HLA-A*03:01; TDRD1; ENSG00000095627; TAA
QLYSSEVLEY

SEQ ID NO: 84352 - protein, 10 aa, Homo sapiens
  Table A; Target 84352; HLA-A*25:01; TDRD1; ENSG00000095627; TAA
QLYSSEVLEY

SEQ ID NO: 84353 - protein, 10 aa, Homo sapiens
  Table A; Target 84353; HLA-A*26:01; TDRD1; ENSG00000095627; TAA
QLYSSEVLEY

SEQ ID NO: 84354 - protein, 10 aa, Homo sapiens
  Table A; Target 84354; HLA-A*29:02; TDRD1; ENSG00000095627; TAA
QLYSSEVLEY

SEQ ID NO: 84355 - protein, 10 aa, Homo sapiens
  Table A; Target 84355; HLA-A*30:02; TDRD1; ENSG00000095627; TAA
QLYSSEVLEY

SEQ ID NO: 84356 - protein, 10 aa, Homo sapiens
  Table A; Target 84356; HLA-B*15:01; TDRD1; ENSG00000095627; TAA
QLYSSEVLEY

SEQ ID NO: 84357 - protein, 10 aa, Homo sapiens
  Table A; Target 84357; HLA-B*15:03; TDRD1; ENSG00000095627; TAA
QLYSSEVLEY

SEQ ID NO: 84358 - protein, 8 aa, Homo sapiens
  Table A; Target 84358; HLA-B*27:02; TDRD1; ENSG00000095627; TAA
QNVDVQQK

SEQ ID NO: 84359 - protein, 8 aa, Homo sapiens
  Table A; Target 84359; HLA-B*07:02; TDRD1; ENSG00000095627; TAA
QPITSSHL

SEQ ID NO: 84360 - protein, 8 aa, Homo sapiens
  Table A; Target 84360; HLA-B*08:01; TDRD1; ENSG00000095627; TAA
QPITSSHL

SEQ ID NO: 84361 - protein, 8 aa, Homo sapiens
  Table A; Target 84361; HLA-B*35:03; TDRD1; ENSG00000095627; TAA
QPITSSHL

SEQ ID NO: 84362 - protein, 8 aa, Homo sapiens
  Table A; Target 84362; HLA-C*07:02; TDRD1; ENSG00000095627; TAA
QPITSSHL

SEQ ID NO: 84363 - protein, 9 aa, Homo sapiens
  Table A; Target 84363; HLA-B*56:01; TDRD1; ENSG00000095627; TAA
QPITSSHLA

SEQ ID NO: 84364 - protein, 10 aa, Homo sapiens
  Table A; Target 84364; HLA-B*07:02; TDRD1; ENSG00000095627; TAA
QPITSSHLAL

SEQ ID NO: 84365 - protein, 10 aa, Homo sapiens
  Table A; Target 84365; HLA-B*35:03; TDRD1; ENSG00000095627; TAA
QPITSSHLAL

SEQ ID NO: 84366 - protein, 8 aa, Homo sapiens
  Table A; Target 84366; HLA-B*08:01; TDRD1; ENSG00000095627; TAA
QQKKAHVL

SEQ ID NO: 84367 - protein, 9 aa, Homo sapiens
  Table A; Target 84367; HLA-A*01:01; TDRD1; ENSG00000095627; TAA
QSALNTEKM

SEQ ID NO: 84368 - protein, 9 aa, Homo sapiens
  Table A; Target 84368; HLA-B*58:01; TDRD1; ENSG00000095627; TAA
QSALNTEKM

SEQ ID NO: 84369 - protein, 10 aa, Homo sapiens
  Table A; Target 84369; HLA-A*01:01; TDRD1; ENSG00000095627; TAA
QSALNTEKMY

SEQ ID NO: 84370 - protein, 10 aa, Homo sapiens
  Table A; Target 84370; HLA-A*01:01; TDRD1; ENSG00000095627; TAA
QSDPEDVGKM

SEQ ID NO: 84371 - protein, 9 aa, Homo sapiens
  Table A; Target 84371; HLA-A*02:01; TDRD1; ENSG00000095627; TAA
QTVDVVVCV

SEQ ID NO: 84372 - protein, 9 aa, Homo sapiens
  Table A; Target 84372; HLA-A*26:01; TDRD1; ENSG00000095627; TAA
QTVDVVVCV

SEQ ID NO: 84373 - protein, 9 aa, Homo sapiens
  Table A; Target 84373; HLA-A*68:01; TDRD1; ENSG00000095627; TAA
QTVDVVVCV

SEQ ID NO: 84374 - protein, 9 aa, Homo sapiens
  Table A; Target 84374; HLA-B*13:02; TDRD1; ENSG00000095627; TAA
QTVDVVVCV

SEQ ID NO: 84375 - protein, 9 aa, Homo sapiens
  Table A; Target 84375; HLA-C*02:02; TDRD1; ENSG00000095627; TAA
QTVDVVVCV

SEQ ID NO: 84376 - protein, 10 aa, Homo sapiens
  Table A; Target 84376; HLA-A*68:02; TDRD1; ENSG00000095627; TAA
QTVDVVVCVI

SEQ ID NO: 84377 - protein, 11 aa, Homo sapiens
  Table A; Target 84377; HLA-A*68:02; TDRD1; ENSG00000095627; TAA
QTWNRAIIQNV

SEQ ID NO: 84378 - protein, 9 aa, Homo sapiens
  Table A; Target 84378; HLA-B*54:01; TDRD1; ENSG00000095627; TAA
QVHVQGLQA

SEQ ID NO: 84379 - protein, 9 aa, Homo sapiens
  Table A; Target 84379; HLA-B*56:01; TDRD1; ENSG00000095627; TAA
QVHVQGLQA

SEQ ID NO: 84380 - protein, 8 aa, Homo sapiens
  Table A; Target 84380; HLA-B*08:01; TDRD1; ENSG00000095627; TAA
RALVKEIL

SEQ ID NO: 84381 - protein, 9 aa, Homo sapiens
  Table A; Target 84381; HLA-A*31:01; TDRD1; ENSG00000095627; TAA
RCGLFGSLR

SEQ ID NO: 84382 - protein, 8 aa, Homo sapiens
  Table A; Target 84382; HLA-B*37:01; TDRD1; ENSG00000095627; TAA
RDWSAHSI

SEQ ID NO: 84383 - protein, 9 aa, Homo sapiens
  Table A; Target 84383; HLA-A*02:01; TDRD1; ENSG00000095627; TAA
RLCPIIPKL

SEQ ID NO: 84384 - protein, 9 aa, Homo sapiens
  Table A; Target 84384; HLA-A*02:03; TDRD1; ENSG00000095627; TAA
RLCPIIPKL

SEQ ID NO: 84385 - protein, 9 aa, Homo sapiens
  Table A; Target 84385; HLA-A*02:04; TDRD1; ENSG00000095627; TAA
RLCPIIPKL

SEQ ID NO: 84386 - protein, 9 aa, Homo sapiens
  Table A; Target 84386; HLA-A*02:07; TDRD1; ENSG00000095627; TAA
RLCPIIPKL

SEQ ID NO: 84387 - protein, 9 aa, Homo sapiens
  Table A; Target 84387; HLA-A*03:01; TDRD1; ENSG00000095627; TAA
RLCPIIPKL

SEQ ID NO: 84388 - protein, 9 aa, Homo sapiens
  Table A; Target 84388; HLA-A*24:02; TDRD1; ENSG00000095627; TAA
RLCPIIPKL

SEQ ID NO: 84389 - protein, 10 aa, Homo sapiens
  Table A; Target 84389; HLA-A*03:01; TDRD1; ENSG00000095627; TAA
RLKSSENGNK

SEQ ID NO: 84390 - protein, 11 aa, Homo sapiens
  Table A; Target 84390; HLA-A*03:01; TDRD1; ENSG00000095627; TAA
RLKSSENGNKK

SEQ ID NO: 84391 - protein, 8 aa, Homo sapiens
  Table A; Target 84391; HLA-B*08:01; TDRD1; ENSG00000095627; TAA
RLVNKHEL

SEQ ID NO: 84392 - protein, 10 aa, Homo sapiens
  Table A; Target 84392; HLA-B*07:02; TDRD1; ENSG00000095627; TAA
RPVQPNFHKL

SEQ ID NO: 84393 - protein, 10 aa, Homo sapiens
  Table A; Target 84393; HLA-C*07:02; TDRD1; ENSG00000095627; TAA
RPVQPNFHKL

SEQ ID NO: 84394 - protein, 11 aa, Homo sapiens
  Table A; Target 84394; HLA-A*30:02; TDRD1; ENSG00000095627; TAA
RQSALNTEKMY

SEQ ID NO: 84395 - protein, 9 aa, Homo sapiens
  Table A; Target 84395; HLA-A*03:02; TDRD1; ENSG00000095627; TAA
RVQPITSSH

SEQ ID NO: 84396 - protein, 9 aa, Homo sapiens
  Table A; Target 84396; HLA-A*30:02; TDRD1; ENSG00000095627; TAA
RVQPITSSH

SEQ ID NO: 84397 - protein, 9 aa, Homo sapiens
  Table A; Target 84397; HLA-A*31:01; TDRD1; ENSG00000095627; TAA
RVQPITSSH

SEQ ID NO: 84398 - protein, 9 aa, Homo sapiens
  Table A; Target 84398; HLA-A*32:01; TDRD1; ENSG00000095627; TAA
RVQPITSSH

SEQ ID NO: 84399 - protein, 9 aa, Homo sapiens
  Table A; Target 84399; HLA-B*15:01; TDRD1; ENSG00000095627; TAA
RVQPITSSH

SEQ ID NO: 84400 - protein, 10 aa, Homo sapiens
  Table A; Target 84400; HLA-A*32:01; TDRD1; ENSG00000095627; TAA
RVVEVTENGI

SEQ ID NO: 84401 - protein, 10 aa, Homo sapiens
  Table A; Target 84401; HLA-B*58:01; TDRD1; ENSG00000095627; TAA
RVVEVTENGI

SEQ ID NO: 84402 - protein, 9 aa, Homo sapiens
  Table A; Target 84402; HLA-A*03:02; TDRD1; ENSG00000095627; TAA
SAESNSPPK

SEQ ID NO: 84403 - protein, 9 aa, Homo sapiens
  Table A; Target 84403; HLA-A*11:01; TDRD1; ENSG00000095627; TAA
SAESNSPPK

SEQ ID NO: 84404 - protein, 8 aa, Homo sapiens
  Table A; Target 84404; HLA-A*33:01; TDRD1; ENSG00000095627; TAA
SAHSIVCR

SEQ ID NO: 84405 - protein, 8 aa, Homo sapiens
  Table A; Target 84405; HLA-A*33:03; TDRD1; ENSG00000095627; TAA
SAHSIVCR

SEQ ID NO: 84406 - protein, 8 aa, Homo sapiens
  Table A; Target 84406; HLA-C*05:01; TDRD1; ENSG00000095627; TAA
SALNTEKM

SEQ ID NO: 84407 - protein, 9 aa, Homo sapiens
  Table A; Target 84407; HLA-A*30:02; TDRD1; ENSG00000095627; TAA
SALNTEKMY

SEQ ID NO: 84408 - protein, 9 aa, Homo sapiens
  Table A; Target 84408; HLA-B*15:03; TDRD1; ENSG00000095627; TAA
SALNTEKMY

SEQ ID NO: 84409 - protein, 9 aa, Homo sapiens
  Table A; Target 84409; HLA-C*02:02; TDRD1; ENSG00000095627; TAA
SALNTEKMY

SEQ ID NO: 84410 - protein, 9 aa, Homo sapiens
  Table A; Target 84410; HLA-C*03:03; TDRD1; ENSG00000095627; TAA
SALNTEKMY

SEQ ID NO: 84411 - protein, 9 aa, Homo sapiens
  Table A; Target 84411; HLA-C*12:03; TDRD1; ENSG00000095627; TAA
SALNTEKMY

SEQ ID NO: 84412 - protein, 9 aa, Homo sapiens
  Table A; Target 84412; HLA-C*16:01; TDRD1; ENSG00000095627; TAA
SALNTEKMY

SEQ ID NO: 84413 - protein, 9 aa, Homo sapiens
  Table A; Target 84413; HLA-C*16:02; TDRD1; ENSG00000095627; TAA
SALNTEKMY

SEQ ID NO: 84414 - protein, 8 aa, Homo sapiens
  Table A; Target 84414; HLA-B*08:01; TDRD1; ENSG00000095627; TAA
SASLKETY

SEQ ID NO: 84415 - protein, 8 aa, Homo sapiens
  Table A; Target 84415; HLA-B*15:01; TDRD1; ENSG00000095627; TAA
SASLKETY

SEQ ID NO: 84416 - protein, 8 aa, Homo sapiens
  Table A; Target 84416; HLA-C*16:01; TDRD1; ENSG00000095627; TAA
SASLKETY

SEQ ID NO: 84417 - protein, 8 aa, Homo sapiens
  Table A; Target 84417; HLA-C*16:02; TDRD1; ENSG00000095627; TAA
SASLKETY

SEQ ID NO: 84418 - protein, 8 aa, Homo sapiens
  Table A; Target 84418; HLA-C*16:01; TDRD1; ENSG00000095627; TAA
SASPHKDL

SEQ ID NO: 84419 - protein, 8 aa, Homo sapiens
  Table A; Target 84419; HLA-C*16:02; TDRD1; ENSG00000095627; TAA
SASPHKDL

SEQ ID NO: 84420 - protein, 9 aa, Homo sapiens
  Table A; Target 84420; HLA-A*03:02; TDRD1; ENSG00000095627; TAA
SDCPLGVTK

SEQ ID NO: 84421 - protein, 9 aa, Homo sapiens
  Table A; Target 84421; HLA-A*11:01; TDRD1; ENSG00000095627; TAA
SDCPLGVTK

SEQ ID NO: 84422 - protein, 8 aa, Homo sapiens
  Table A; Target 84422; HLA-B*37:01; TDRD1; ENSG00000095627; TAA
SDLIPKVL

SEQ ID NO: 84423 - protein, 8 aa, Homo sapiens
  Table A; Target 84423; HLA-B*40:02; TDRD1; ENSG00000095627; TAA
SDLIPKVL

SEQ ID NO: 84424 - protein, 10 aa, Homo sapiens
  Table A; Target 84424; HLA-B*37:01; TDRD1; ENSG00000095627; TAA
SDLIPKVLTL

SEQ ID NO: 84425 - protein, 8 aa, Homo sapiens
  Table A; Target 84425; HLA-B*37:01; TDRD1; ENSG00000095627; TAA
SDLRSLQL

SEQ ID NO: 84426 - protein, 8 aa, Homo sapiens
  Table A; Target 84426; HLA-B*37:01; TDRD1; ENSG00000095627; TAA
SDTDVEVL

SEQ ID NO: 84427 - protein, 9 aa, Homo sapiens
  Table A; Target 84427; HLA-A*29:02; TDRD1; ENSG00000095627; TAA
SDTDVEVLY

SEQ ID NO: 84428 - protein, 9 aa, Homo sapiens
  Table A; Target 84428; HLA-A*30:02; TDRD1; ENSG00000095627; TAA
SDTDVEVLY

SEQ ID NO: 84429 - protein, 9 aa, Homo sapiens
  Table A; Target 84429; HLA-B*15:03; TDRD1; ENSG00000095627; TAA
SDTDVEVLY

SEQ ID NO: 84430 - protein, 9 aa, Homo sapiens
  Table A; Target 84430; HLA-B*18:01; TDRD1; ENSG00000095627; TAA
SDTDVEVLY

SEQ ID NO: 84431 - protein, 9 aa, Homo sapiens
  Table A; Target 84431; HLA-B*35:01; TDRD1; ENSG00000095627; TAA
SDTDVEVLY

SEQ ID NO: 84432 - protein, 9 aa, Homo sapiens
  Table A; Target 84432; HLA-B*39:01; TDRD1; ENSG00000095627; TAA
SDTDVEVLY

SEQ ID NO: 84433 - protein, 9 aa, Homo sapiens
  Table A; Target 84433; HLA-B*44:02; TDRD1; ENSG00000095627; TAA
SDTDVEVLY

SEQ ID NO: 84434 - protein, 9 aa, Homo sapiens
  Table A; Target 84434; HLA-B*44:03; TDRD1; ENSG00000095627; TAA
SDTDVEVLY

SEQ ID NO: 84435 - protein, 9 aa, Homo sapiens
  Table A; Target 84435; HLA-C*04:01; TDRD1; ENSG00000095627; TAA
SDTDVEVLY

SEQ ID NO: 84436 - protein, 9 aa, Homo sapiens
  Table A; Target 84436; HLA-C*07:01; TDRD1; ENSG00000095627; TAA
SDTDVEVLY

SEQ ID NO: 84437 - protein, 9 aa, Homo sapiens
  Table A; Target 84437; HLA-C*07:04; TDRD1; ENSG00000095627; TAA
SDTDVEVLY

SEQ ID NO: 84438 - protein, 9 aa, Homo sapiens
  Table A; Target 84438; HLA-C*07:06; TDRD1; ENSG00000095627; TAA
SDTDVEVLY

SEQ ID NO: 84439 - protein, 9 aa, Homo sapiens
  Table A; Target 84439; HLA-C*12:03; TDRD1; ENSG00000095627; TAA
SDTDVEVLY

SEQ ID NO: 84440 - protein, 9 aa, Homo sapiens
  Table A; Target 84440; HLA-C*16:01; TDRD1; ENSG00000095627; TAA
SDTDVEVLY

SEQ ID NO: 84441 - protein, 9 aa, Homo sapiens
  Table A; Target 84441; HLA-C*16:02; TDRD1; ENSG00000095627; TAA
SDTDVEVLY

SEQ ID NO: 84442 - protein, 9 aa, Homo sapiens
  Table A; Target 84442; HLA-C*16:04; TDRD1; ENSG00000095627; TAA
SDTDVEVLY

SEQ ID NO: 84443 - protein, 8 aa, Homo sapiens
  Table A; Target 84443; HLA-B*37:01; TDRD1; ENSG00000095627; TAA
SDVKETSV

SEQ ID NO: 84444 - protein, 9 aa, Homo sapiens
  Table A; Target 84444; HLA-A*30:01; TDRD1; ENSG00000095627; TAA
SDVLIDEHL

SEQ ID NO: 84445 - protein, 9 aa, Homo sapiens
  Table A; Target 84445; HLA-B*40:01; TDRD1; ENSG00000095627; TAA
SDVLIDEHL

SEQ ID NO: 84446 - protein, 8 aa, Homo sapiens
  Table A; Target 84446; HLA-B*18:01; TDRD1; ENSG00000095627; TAA
SEEAITRF

SEQ ID NO: 84447 - protein, 8 aa, Homo sapiens
  Table A; Target 84447; HLA-B*37:01; TDRD1; ENSG00000095627; TAA
SEEAITRF

SEQ ID NO: 84448 - protein, 8 aa, Homo sapiens
  Table A; Target 84448; HLA-B*44:02; TDRD1; ENSG00000095627; TAA
SEEAITRF

SEQ ID NO: 84449 - protein, 8 aa, Homo sapiens
  Table A; Target 84449; HLA-B*44:03; TDRD1; ENSG00000095627; TAA
SEEAITRF

SEQ ID NO: 84450 - protein, 10 aa, Homo sapiens
  Table A; Target 84450; HLA-A*30:01; TDRD1; ENSG00000095627; TAA
SEEAITRFQM

SEQ ID NO: 84451 - protein, 10 aa, Homo sapiens
  Table A; Target 84451; HLA-B*18:01; TDRD1; ENSG00000095627; TAA
SEEAITRFQM

SEQ ID NO: 84452 - protein, 10 aa, Homo sapiens
  Table A; Target 84452; HLA-B*40:01; TDRD1; ENSG00000095627; TAA
SEEAITRFQM

SEQ ID NO: 84453 - protein, 10 aa, Homo sapiens
  Table A; Target 84453; HLA-B*44:02; TDRD1; ENSG00000095627; TAA
SEEAITRFQM

SEQ ID NO: 84454 - protein, 10 aa, Homo sapiens
  Table A; Target 84454; HLA-B*44:03; TDRD1; ENSG00000095627; TAA
SEEAITRFQM

SEQ ID NO: 84455 - protein, 9 aa, Homo sapiens
  Table A; Target 84455; HLA-A*30:02; TDRD1; ENSG00000095627; TAA
SEESVLVGY

SEQ ID NO: 84456 - protein, 9 aa, Homo sapiens
  Table A; Target 84456; HLA-B*15:03; TDRD1; ENSG00000095627; TAA
SEESVLVGY

SEQ ID NO: 84457 - protein, 9 aa, Homo sapiens
  Table A; Target 84457; HLA-B*18:01; TDRD1; ENSG00000095627; TAA
SEESVLVGY

SEQ ID NO: 84458 - protein, 9 aa, Homo sapiens
  Table A; Target 84458; HLA-B*27:02; TDRD1; ENSG00000095627; TAA
SEESVLVGY

SEQ ID NO: 84459 - protein, 9 aa, Homo sapiens
  Table A; Target 84459; HLA-B*35:01; TDRD1; ENSG00000095627; TAA
SEESVLVGY

SEQ ID NO: 84460 - protein, 9 aa, Homo sapiens
  Table A; Target 84460; HLA-B*37:01; TDRD1; ENSG00000095627; TAA
SEESVLVGY

SEQ ID NO: 84461 - protein, 9 aa, Homo sapiens
  Table A; Target 84461; HLA-B*40:01; TDRD1; ENSG00000095627; TAA
SEESVLVGY

SEQ ID NO: 84462 - protein, 9 aa, Homo sapiens
  Table A; Target 84462; HLA-B*44:02; TDRD1; ENSG00000095627; TAA
SEESVLVGY

SEQ ID NO: 84463 - protein, 9 aa, Homo sapiens
  Table A; Target 84463; HLA-C*16:04; TDRD1; ENSG00000095627; TAA
SEESVLVGY

SEQ ID NO: 84464 - protein, 10 aa, Homo sapiens
  Table A; Target 84464; HLA-B*49:01; TDRD1; ENSG00000095627; TAA
SEESVLVGYV

SEQ ID NO: 84465 - protein, 10 aa, Homo sapiens
  Table A; Target 84465; HLA-B*37:01; TDRD1; ENSG00000095627; TAA
SENGNKKNNF

SEQ ID NO: 84466 - protein, 10 aa, Homo sapiens
  Table A; Target 84466; HLA-B*44:02; TDRD1; ENSG00000095627; TAA
SENGNKKNNF

SEQ ID NO: 84467 - protein, 10 aa, Homo sapiens
  Table A; Target 84467; HLA-B*44:03; TDRD1; ENSG00000095627; TAA
SENGNKKNNF

SEQ ID NO: 84468 - protein, 10 aa, Homo sapiens
  Table A; Target 84468; HLA-C*16:04; TDRD1; ENSG00000095627; TAA
SENGNKKNNF

SEQ ID NO: 84469 - protein, 8 aa, Homo sapiens
  Table A; Target 84469; HLA-B*49:01; TDRD1; ENSG00000095627; TAA
SENGTVDV

SEQ ID NO: 84470 - protein, 9 aa, Homo sapiens
  Table A; Target 84470; HLA-A*30:01; TDRD1; ENSG00000095627; TAA
SENGTVDVA

SEQ ID NO: 84471 - protein, 8 aa, Homo sapiens
  Table A; Target 84471; HLA-A*30:01; TDRD1; ENSG00000095627; TAA
SETPHVSV

SEQ ID NO: 84472 - protein, 8 aa, Homo sapiens
  Table A; Target 84472; HLA-B*18:01; TDRD1; ENSG00000095627; TAA
SETPHVSV

SEQ ID NO: 84473 - protein, 8 aa, Homo sapiens
  Table A; Target 84473; HLA-B*37:01; TDRD1; ENSG00000095627; TAA
SETPHVSV

SEQ ID NO: 84474 - protein, 8 aa, Homo sapiens
  Table A; Target 84474; HLA-B*40:01; TDRD1; ENSG00000095627; TAA
SETPHVSV

SEQ ID NO: 84475 - protein, 8 aa, Homo sapiens
  Table A; Target 84475; HLA-B*40:02; TDRD1; ENSG00000095627; TAA
SETPHVSV

SEQ ID NO: 84476 - protein, 8 aa, Homo sapiens
  Table A; Target 84476; HLA-B*49:01; TDRD1; ENSG00000095627; TAA
SETPHVSV

SEQ ID NO: 84477 - protein, 8 aa, Homo sapiens
  Table A; Target 84477; HLA-C*16:02; TDRD1; ENSG00000095627; TAA
SETPHVSV

SEQ ID NO: 84478 - protein, 9 aa, Homo sapiens
  Table A; Target 84478; HLA-B*37:01; TDRD1; ENSG00000095627; TAA
SETPHVSVS

SEQ ID NO: 84479 - protein, 10 aa, Homo sapiens
  Table A; Target 84479; HLA-A*30:01; TDRD1; ENSG00000095627; TAA
SEVLEYMNQL

SEQ ID NO: 84480 - protein, 10 aa, Homo sapiens
  Table A; Target 84480; HLA-B*40:01; TDRD1; ENSG00000095627; TAA
SEVLEYMNQL

SEQ ID NO: 84481 - protein, 10 aa, Homo sapiens
  Table A; Target 84481; HLA-B*40:02; TDRD1; ENSG00000095627; TAA
SEVLEYMNQL

SEQ ID NO: 84482 - protein, 10 aa, Homo sapiens
  Table A; Target 84482; HLA-B*44:03; TDRD1; ENSG00000095627; TAA
SEVLEYMNQL

SEQ ID NO: 84483 - protein, 10 aa, Homo sapiens
  Table A; Target 84483; HLA-B*49:01; TDRD1; ENSG00000095627; TAA
SEVLEYMNQL

SEQ ID NO: 84484 - protein, 9 aa, Homo sapiens
  Table A; Target 84484; HLA-C*05:01; TDRD1; ENSG00000095627; TAA
SIETKDVEV

SEQ ID NO: 84485 - protein, 11 aa, Homo sapiens
  Table A; Target 84485; HLA-A*68:02; TDRD1; ENSG00000095627; TAA
SISNPGLFTSL

SEQ ID NO: 84486 - protein, 9 aa, Homo sapiens
  Table A; Target 84486; HLA-B*15:03; TDRD1; ENSG00000095627; TAA
SKVLLDAGF

SEQ ID NO: 84487 - protein, 9 aa, Homo sapiens
  Table A; Target 84487; HLA-A*02:03; TDRD1; ENSG00000095627; TAA
SLGPPLRST

SEQ ID NO: 84488 - protein, 9 aa, Homo sapiens
  Table A; Target 84488; HLA-A*02:03; TDRD1; ENSG00000095627; TAA
SLKETYANV

SEQ ID NO: 84489 - protein, 9 aa, Homo sapiens
  Table A; Target 84489; HLA-A*02:07; TDRD1; ENSG00000095627; TAA
SLKETYANV

SEQ ID NO: 84490 - protein, 9 aa, Homo sapiens
  Table A; Target 84490; HLA-B*13:02; TDRD1; ENSG00000095627; TAA
SLKETYANV

SEQ ID NO: 84491 - protein, 9 aa, Homo sapiens
  Table A; Target 84491; HLA-B*46:01; TDRD1; ENSG00000095627; TAA
SLKETYANV

SEQ ID NO: 84492 - protein, 8 aa, Homo sapiens
  Table A; Target 84492; HLA-B*08:01; TDRD1; ENSG00000095627; TAA
SLQLKKTM

SEQ ID NO: 84493 - protein, 9 aa, Homo sapiens
  Table A; Target 84493; HLA-A*02:01; TDRD1; ENSG00000095627; TAA
SLSISNPGL

SEQ ID NO: 84494 - protein, 9 aa, Homo sapiens
  Table A; Target 84494; HLA-A*02:04; TDRD1; ENSG00000095627; TAA
SLSISNPGL

SEQ ID NO: 84495 - protein, 9 aa, Homo sapiens
  Table A; Target 84495; HLA-A*02:07; TDRD1; ENSG00000095627; TAA
SNPGLFTSL

SEQ ID NO: 84496 - protein, 9 aa, Homo sapiens
  Table A; Target 84496; HLA-A*24:02; TDRD1; ENSG00000095627; TAA
SNPGLFTSL

SEQ ID NO: 84497 - protein, 9 aa, Homo sapiens
  Table A; Target 84497; HLA-C*01:02; TDRD1; ENSG00000095627; TAA
SNPGLFTSL

SEQ ID NO: 84498 - protein, 8 aa, Homo sapiens
  Table A; Target 84498; HLA-B*56:01; TDRD1; ENSG00000095627; TAA
SPFNVMSR

SEQ ID NO: 84499 - protein, 11 aa, Homo sapiens
  Table A; Target 84499; HLA-B*07:02; TDRD1; ENSG00000095627; TAA
SPFNVMSRNNL

SEQ ID NO: 84500 - protein, 11 aa, Homo sapiens
  Table A; Target 84500; HLA-C*07:02; TDRD1; ENSG00000095627; TAA
SPFNVMSRNNL

SEQ ID NO: 84501 - protein, 8 aa, Homo sapiens
  Table A; Target 84501; HLA-B*08:01; TDRD1; ENSG00000095627; TAA
SPNLFYAL

SEQ ID NO: 84502 - protein, 8 aa, Homo sapiens
  Table A; Target 84502; HLA-B*51:01; TDRD1; ENSG00000095627; TAA
SPPKEVNI

SEQ ID NO: 84503 - protein, 8 aa, Homo sapiens
  Table A; Target 84503; HLA-B*15:01; TDRD1; ENSG00000095627; TAA
SQCKQTYY

SEQ ID NO: 84504 - protein, 8 aa, Homo sapiens
  Table A; Target 84504; HLA-B*15:03; TDRD1; ENSG00000095627; TAA
SQCKQTYY

SEQ ID NO: 84505 - protein, 8 aa, Homo sapiens
  Table A; Target 84505; HLA-C*07:01; TDRD1; ENSG00000095627; TAA
SQCKQTYY

SEQ ID NO: 84506 - protein, 9 aa, Homo sapiens
  Table A; Target 84506; HLA-A*11:01; TDRD1; ENSG00000095627; TAA
SSLVELIDK

SEQ ID NO: 84507 - protein, 9 aa, Homo sapiens
  Table A; Target 84507; HLA-A*29:02; TDRD1; ENSG00000095627; TAA
SSTFLNLPF

SEQ ID NO: 84508 - protein, 10 aa, Homo sapiens
  Table A; Target 84508; HLA-A*31:01; TDRD1; ENSG00000095627; TAA
STNQNKFIEM

SEQ ID NO: 84509 - protein, 11 aa, Homo sapiens
  Table A; Target 84509; HLA-A*11:01; TDRD1; ENSG00000095627; TAA
STNQNKFIEMK

SEQ ID NO: 84510 - protein, 9 aa, Homo sapiens
  Table A; Target 84510; HLA-A*02:03; TDRD1; ENSG00000095627; TAA
SVKGITKNV

SEQ ID NO: 84511 - protein, 9 aa, Homo sapiens
  Table A; Target 84511; HLA-A*68:02; TDRD1; ENSG00000095627; TAA
SVKGITKNV

SEQ ID NO: 84512 - protein, 9 aa, Homo sapiens
  Table A; Target 84512; HLA-C*02:02; TDRD1; ENSG00000095627; TAA
SVKGITKNV

SEQ ID NO: 84513 - protein, 9 aa, Homo sapiens
  Table A; Target 84513; HLA-A*25:01; TDRD1; ENSG00000095627; TAA
SVKSPFNVM

SEQ ID NO: 84514 - protein, 9 aa, Homo sapiens
  Table A; Target 84514; HLA-A*26:01; TDRD1; ENSG00000095627; TAA
SVKSPFNVM

SEQ ID NO: 84515 - protein, 9 aa, Homo sapiens
  Table A; Target 84515; HLA-A*32:01; TDRD1; ENSG00000095627; TAA
SVKSPFNVM

SEQ ID NO: 84516 - protein, 9 aa, Homo sapiens
  Table A; Target 84516; HLA-A*33:03; TDRD1; ENSG00000095627; TAA
SVKSPFNVM

SEQ ID NO: 84517 - protein, 9 aa, Homo sapiens
  Table A; Target 84517; HLA-B*07:02; TDRD1; ENSG00000095627; TAA
SVKSPFNVM

SEQ ID NO: 84518 - protein, 9 aa, Homo sapiens
  Table A; Target 84518; HLA-B*08:01; TDRD1; ENSG00000095627; TAA
SVKSPFNVM

SEQ ID NO: 84519 - protein, 9 aa, Homo sapiens
  Table A; Target 84519; HLA-B*15:01; TDRD1; ENSG00000095627; TAA
SVKSPFNVM

SEQ ID NO: 84520 - protein, 9 aa, Homo sapiens
  Table A; Target 84520; HLA-B*35:01; TDRD1; ENSG00000095627; TAA
SVKSPFNVM

SEQ ID NO: 84521 - protein, 9 aa, Homo sapiens
  Table A; Target 84521; HLA-B*46:01; TDRD1; ENSG00000095627; TAA
SVKSPFNVM

SEQ ID NO: 84522 - protein, 9 aa, Homo sapiens
  Table A; Target 84522; HLA-B*54:01; TDRD1; ENSG00000095627; TAA
SVKSPFNVM

SEQ ID NO: 84523 - protein, 9 aa, Homo sapiens
  Table A; Target 84523; HLA-C*01:02; TDRD1; ENSG00000095627; TAA
SVKSPFNVM

SEQ ID NO: 84524 - protein, 9 aa, Homo sapiens
  Table A; Target 84524; HLA-C*02:02; TDRD1; ENSG00000095627; TAA
SVKSPFNVM

SEQ ID NO: 84525 - protein, 9 aa, Homo sapiens
  Table A; Target 84525; HLA-C*03:03; TDRD1; ENSG00000095627; TAA
SVKSPFNVM

SEQ ID NO: 84526 - protein, 9 aa, Homo sapiens
  Table A; Target 84526; HLA-C*03:04; TDRD1; ENSG00000095627; TAA
SVKSPFNVM

SEQ ID NO: 84527 - protein, 9 aa, Homo sapiens
  Table A; Target 84527; HLA-C*07:04; TDRD1; ENSG00000095627; TAA
SVKSPFNVM

SEQ ID NO: 84528 - protein, 9 aa, Homo sapiens
  Table A; Target 84528; HLA-C*12:03; TDRD1; ENSG00000095627; TAA
SVKSPFNVM

SEQ ID NO: 84529 - protein, 10 aa, Homo sapiens
  Table A; Target 84529; HLA-C*07:02; TDRD1; ENSG00000095627; TAA
SVKSPFNVMS

SEQ ID NO: 84530 - protein, 11 aa, Homo sapiens
  Table A; Target 84530; HLA-A*31:01; TDRD1; ENSG00000095627; TAA
SVKSPFNVMSR

SEQ ID NO: 84531 - protein, 11 aa, Homo sapiens
  Table A; Target 84531; HLA-A*33:01; TDRD1; ENSG00000095627; TAA
SVKSPFNVMSR

SEQ ID NO: 84532 - protein, 11 aa, Homo sapiens
  Table A; Target 84532; HLA-A*33:03; TDRD1; ENSG00000095627; TAA
SVKSPFNVMSR

SEQ ID NO: 84533 - protein, 11 aa, Homo sapiens
  Table A; Target 84533; HLA-A*68:01; TDRD1; ENSG00000095627; TAA
SVKSPFNVMSR

SEQ ID NO: 84534 - protein, 11 aa, Homo sapiens
  Table A; Target 84534; HLA-C*07:06; TDRD1; ENSG00000095627; TAA
SVKSPFNVMSR

SEQ ID NO: 84535 - protein, 9 aa, Homo sapiens
  Table A; Target 84535; HLA-A*29:02; TDRD1; ENSG00000095627; TAA
SVLVGYVDY

SEQ ID NO: 84536 - protein, 9 aa, Homo sapiens
  Table A; Target 84536; HLA-A*30:02; TDRD1; ENSG00000095627; TAA
SVLVGYVDY

SEQ ID NO: 84537 - protein, 9 aa, Homo sapiens
  Table A; Target 84537; HLA-B*15:01; TDRD1; ENSG00000095627; TAA
SVLVGYVDY

SEQ ID NO: 84538 - protein, 9 aa, Homo sapiens
  Table A; Target 84538; HLA-B*35:01; TDRD1; ENSG00000095627; TAA
SVLVGYVDY

SEQ ID NO: 84539 - protein, 9 aa, Homo sapiens
  Table A; Target 84539; HLA-B*56:01; TDRD1; ENSG00000095627; TAA
SVSKVLLDA

SEQ ID NO: 84540 - protein, 9 aa, Homo sapiens
  Table A; Target 84540; HLA-A*02:03; TDRD1; ENSG00000095627; TAA
SVSSNPNGI

SEQ ID NO: 84541 - protein, 9 aa, Homo sapiens
  Table A; Target 84541; HLA-B*13:02; TDRD1; ENSG00000095627; TAA
SVSSNPNGI

SEQ ID NO: 84542 - protein, 8 aa, Homo sapiens
  Table A; Target 84542; HLA-B*51:01; TDRD1; ENSG00000095627; TAA
TADELRMI

SEQ ID NO: 84543 - protein, 8 aa, Homo sapiens
  Table A; Target 84543; HLA-C*05:01; TDRD1; ENSG00000095627; TAA
TADELRMI

SEQ ID NO: 84544 - protein, 10 aa, Homo sapiens
  Table A; Target 84544; HLA-B*44:02; TDRD1; ENSG00000095627; TAA
TEFKHPGDFY

SEQ ID NO: 84545 - protein, 10 aa, Homo sapiens
  Table A; Target 84545; HLA-B*44:03; TDRD1; ENSG00000095627; TAA
TEFKHPGDFY

SEQ ID NO: 84546 - protein, 9 aa, Homo sapiens
  Table A; Target 84546; HLA-A*11:01; TDRD1; ENSG00000095627; TAA
TELQKQVEK

SEQ ID NO: 84547 - protein, 9 aa, Homo sapiens
  Table A; Target 84547; HLA-B*15:03; TDRD1; ENSG00000095627; TAA
TENGIGVEL

SEQ ID NO: 84548 - protein, 9 aa, Homo sapiens
  Table A; Target 84548; HLA-B*18:01; TDRD1; ENSG00000095627; TAA
TENGIGVEL

SEQ ID NO: 84549 - protein, 9 aa, Homo sapiens
  Table A; Target 84549; HLA-B*27:02; TDRD1; ENSG00000095627; TAA
TENGIGVEL

SEQ ID NO: 84550 - protein, 9 aa, Homo sapiens
  Table A; Target 84550; HLA-B*27:05; TDRD1; ENSG00000095627; TAA
TENGIGVEL

SEQ ID NO: 84551 - protein, 9 aa, Homo sapiens
  Table A; Target 84551; HLA-B*35:03; TDRD1; ENSG00000095627; TAA
TENGIGVEL

SEQ ID NO: 84552 - protein, 9 aa, Homo sapiens
  Table A; Target 84552; HLA-B*37:01; TDRD1; ENSG00000095627; TAA
TENGIGVEL

SEQ ID NO: 84553 - protein, 9 aa, Homo sapiens
  Table A; Target 84553; HLA-B*38:01; TDRD1; ENSG00000095627; TAA
TENGIGVEL

SEQ ID NO: 84554 - protein, 9 aa, Homo sapiens
  Table A; Target 84554; HLA-B*39:01; TDRD1; ENSG00000095627; TAA
TENGIGVEL

SEQ ID NO: 84555 - protein, 9 aa, Homo sapiens
  Table A; Target 84555; HLA-B*40:02; TDRD1; ENSG00000095627; TAA
TENGIGVEL

SEQ ID NO: 84556 - protein, 9 aa, Homo sapiens
  Table A; Target 84556; HLA-B*44:02; TDRD1; ENSG00000095627; TAA
TENGIGVEL

SEQ ID NO: 84557 - protein, 9 aa, Homo sapiens
  Table A; Target 84557; HLA-B*44:03; TDRD1; ENSG00000095627; TAA
TENGIGVEL

SEQ ID NO: 84558 - protein, 9 aa, Homo sapiens
  Table A; Target 84558; HLA-B*49:01; TDRD1; ENSG00000095627; TAA
TENGIGVEL

SEQ ID NO: 84559 - protein, 9 aa, Homo sapiens
  Table A; Target 84559; HLA-C*02:02; TDRD1; ENSG00000095627; TAA
TENGIGVEL

SEQ ID NO: 84560 - protein, 9 aa, Homo sapiens
  Table A; Target 84560; HLA-C*07:04; TDRD1; ENSG00000095627; TAA
TENGIGVEL

SEQ ID NO: 84561 - protein, 9 aa, Homo sapiens
  Table A; Target 84561; HLA-C*16:04; TDRD1; ENSG00000095627; TAA
TENGIGVEL

SEQ ID NO: 84562 - protein, 9 aa, Homo sapiens
  Table A; Target 84562; HLA-A*03:02; TDRD1; ENSG00000095627; TAA
TENNIVVDK

SEQ ID NO: 84563 - protein, 9 aa, Homo sapiens
  Table A; Target 84563; HLA-A*11:01; TDRD1; ENSG00000095627; TAA
TENNIVVDK

SEQ ID NO: 84564 - protein, 9 aa, Homo sapiens
  Table A; Target 84564; HLA-A*68:01; TDRD1; ENSG00000095627; TAA
TENNIVVDK

SEQ ID NO: 84565 - protein, 9 aa, Homo sapiens
  Table A; Target 84565; HLA-B*27:02; TDRD1; ENSG00000095627; TAA
TENNIVVDK

SEQ ID NO: 84566 - protein, 9 aa, Homo sapiens
  Table A; Target 84566; HLA-B*27:05; TDRD1; ENSG00000095627; TAA
TENNIVVDK

SEQ ID NO: 84567 - protein, 8 aa, Homo sapiens
  Table A; Target 84567; HLA-C*14:02; TDRD1; ENSG00000095627; TAA
TFAVEVEL

SEQ ID NO: 84568 - protein, 9 aa, Homo sapiens
  Table A; Target 84568; HLA-B*13:02; TDRD1; ENSG00000095627; TAA
TIQANVLEI

SEQ ID NO: 84569 - protein, 9 aa, Homo sapiens
  Table A; Target 84569; HLA-B*15:03; TDRD1; ENSG00000095627; TAA
TKNVHTVSV

SEQ ID NO: 84570 - protein, 9 aa, Homo sapiens
  Table A; Target 84570; HLA-B*15:03; TDRD1; ENSG00000095627; TAA
TKPLLMEQY

SEQ ID NO: 84571 - protein, 8 aa, Homo sapiens
  Table A; Target 84571; HLA-B*46:01; TDRD1; ENSG00000095627; TAA
TLNVGDEF

SEQ ID NO: 84572 - protein, 8 aa, Homo sapiens
  Table A; Target 84572; HLA-C*01:02; TDRD1; ENSG00000095627; TAA
TLNVGDEF

SEQ ID NO: 84573 - protein, 8 aa, Homo sapiens
  Table A; Target 84573; HLA-C*05:01; TDRD1; ENSG00000095627; TAA
TLNVGDEF

SEQ ID NO: 84574 - protein, 8 aa, Homo sapiens
  Table A; Target 84574; HLA-C*14:02; TDRD1; ENSG00000095627; TAA
TLNVGDEF

SEQ ID NO: 84575 - protein, 10 aa, Homo sapiens
  Table A; Target 84575; HLA-A*02:07; TDRD1; ENSG00000095627; TAA
TLPNHPNFRL

SEQ ID NO: 84576 - protein, 9 aa, Homo sapiens
  Table A; Target 84576; HLA-A*33:01; TDRD1; ENSG00000095627; TAA
TNQNKFIEM

SEQ ID NO: 84577 - protein, 9 aa, Homo sapiens
  Table A; Target 84577; HLA-A*33:03; TDRD1; ENSG00000095627; TAA
TNQNKFIEM

SEQ ID NO: 84578 - protein, 9 aa, Homo sapiens
  Table A; Target 84578; HLA-B*08:01; TDRD1; ENSG00000095627; TAA
TNQNKFIEM

SEQ ID NO: 84579 - protein, 9 aa, Homo sapiens
  Table A; Target 84579; HLA-C*16:01; TDRD1; ENSG00000095627; TAA
TNQNKFIEM

SEQ ID NO: 84580 - protein, 9 aa, Homo sapiens
  Table A; Target 84580; HLA-B*07:02; TDRD1; ENSG00000095627; TAA
TPHVSVSKV

SEQ ID NO: 84581 - protein, 9 aa, Homo sapiens
  Table A; Target 84581; HLA-B*51:01; TDRD1; ENSG00000095627; TAA
TPHVSVSKV

SEQ ID NO: 84582 - protein, 9 aa, Homo sapiens
  Table A; Target 84582; HLA-B*56:01; TDRD1; ENSG00000095627; TAA
TPHVSVSKV

SEQ ID NO: 84583 - protein, 8 aa, Homo sapiens
  Table A; Target 84583; HLA-B*07:02; TDRD1; ENSG00000095627; TAA
TPQRQSAL

SEQ ID NO: 84584 - protein, 8 aa, Homo sapiens
  Table A; Target 84584; HLA-B*08:01; TDRD1; ENSG00000095627; TAA
TPQRQSAL

SEQ ID NO: 84585 - protein, 8 aa, Homo sapiens
  Table A; Target 84585; HLA-C*07:02; TDRD1; ENSG00000095627; TAA
TPQRQSAL

SEQ ID NO: 84586 - protein, 8 aa, Homo sapiens
  Table A; Target 84586; HLA-C*05:01; TDRD1; ENSG00000095627; TAA
TSDTDVEV

SEQ ID NO: 84587 - protein, 9 aa, Homo sapiens
  Table A; Target 84587; HLA-B*35:03; TDRD1; ENSG00000095627; TAA
TSDTDVEVL

SEQ ID NO: 84588 - protein, 9 aa, Homo sapiens
  Table A; Target 84588; HLA-B*38:01; TDRD1; ENSG00000095627; TAA
TSDTDVEVL

SEQ ID NO: 84589 - protein, 9 aa, Homo sapiens
  Table A; Target 84589; HLA-C*05:01; TDRD1; ENSG00000095627; TAA
TSDTDVEVL

SEQ ID NO: 84590 - protein, 10 aa, Homo sapiens
  Table A; Target 84590; HLA-C*05:01; TDRD1; ENSG00000095627; TAA
TSDTDVEVLY

SEQ ID NO: 84591 - protein, 8 aa, Homo sapiens
  Table A; Target 84591; HLA-A*33:03; TDRD1; ENSG00000095627; TAA
TSLGPPLR

SEQ ID NO: 84592 - protein, 10 aa, Homo sapiens
  Table A; Target 84592; HLA-A*68:01; TDRD1; ENSG00000095627; TAA
TSVPLGVEGK

SEQ ID NO: 84593 - protein, 10 aa, Homo sapiens
  Table A; Target 84593; HLA-A*01:01; TDRD1; ENSG00000095627; TAA
TTENNIVVDK

SEQ ID NO: 84594 - protein, 10 aa, Homo sapiens
  Table A; Target 84594; HLA-A*03:02; TDRD1; ENSG00000095627; TAA
TTENNIVVDK

SEQ ID NO: 84595 - protein, 10 aa, Homo sapiens
  Table A; Target 84595; HLA-A*11:01; TDRD1; ENSG00000095627; TAA
TTENNIVVDK

SEQ ID NO: 84596 - protein, 10 aa, Homo sapiens
  Table A; Target 84596; HLA-A*68:01; TDRD1; ENSG00000095627; TAA
TTENNIVVDK

SEQ ID NO: 84597 - protein, 10 aa, Homo sapiens
  Table A; Target 84597; HLA-B*27:02; TDRD1; ENSG00000095627; TAA
TTENNIVVDK

SEQ ID NO: 84598 - protein, 10 aa, Homo sapiens
  Table A; Target 84598; HLA-C*07:06; TDRD1; ENSG00000095627; TAA
TTENNIVVDK

SEQ ID NO: 84599 - protein, 8 aa, Homo sapiens
  Table A; Target 84599; HLA-C*04:01; TDRD1; ENSG00000095627; TAA
TVDVADKL

SEQ ID NO: 84600 - protein, 8 aa, Homo sapiens
  Table A; Target 84600; HLA-C*05:01; TDRD1; ENSG00000095627; TAA
TVDVADKL

SEQ ID NO: 84601 - protein, 9 aa, Homo sapiens
  Table A; Target 84601; HLA-C*05:01; TDRD1; ENSG00000095627; TAA
TVDVADKLV

SEQ ID NO: 84602 - protein, 11 aa, Homo sapiens
  Table A; Target 84602; HLA-A*02:07; TDRD1; ENSG00000095627; TAA
TVDVADKLVTF

SEQ ID NO: 84603 - protein, 11 aa, Homo sapiens
  Table A; Target 84603; HLA-B*38:01; TDRD1; ENSG00000095627; TAA
TVDVADKLVTF

SEQ ID NO: 84604 - protein, 11 aa, Homo sapiens
  Table A; Target 84604; HLA-C*04:01; TDRD1; ENSG00000095627; TAA
TVDVADKLVTF

SEQ ID NO: 84605 - protein, 11 aa, Homo sapiens
  Table A; Target 84605; HLA-C*05:01; TDRD1; ENSG00000095627; TAA
TVDVADKLVTF

SEQ ID NO: 84606 - protein, 8 aa, Homo sapiens
  Table A; Target 84606; HLA-C*05:01; TDRD1; ENSG00000095627; TAA
TVDVVVCV

SEQ ID NO: 84607 - protein, 9 aa, Homo sapiens
  Table A; Target 84607; HLA-A*02:07; TDRD1; ENSG00000095627; TAA
TVDVVVCVI

SEQ ID NO: 84608 - protein, 9 aa, Homo sapiens
  Table A; Target 84608; HLA-B*38:01; TDRD1; ENSG00000095627; TAA
TVDVVVCVI

SEQ ID NO: 84609 - protein, 9 aa, Homo sapiens
  Table A; Target 84609; HLA-C*05:01; TDRD1; ENSG00000095627; TAA
TVDVVVCVI

SEQ ID NO: 84610 - protein, 10 aa, Homo sapiens
  Table A; Target 84610; HLA-A*01:01; TDRD1; ENSG00000095627; TAA
TVDVVVCVIY

SEQ ID NO: 84611 - protein, 8 aa, Homo sapiens
  Table A; Target 84611; HLA-B*08:01; TDRD1; ENSG00000095627; TAA
TVKVVDKL

SEQ ID NO: 84612 - protein, 8 aa, Homo sapiens
  Table A; Target 84612; HLA-C*04:01; TDRD1; ENSG00000095627; TAA
VADKLVTF

SEQ ID NO: 84613 - protein, 8 aa, Homo sapiens
  Table A; Target 84613; HLA-C*05:01; TDRD1; ENSG00000095627; TAA
VADKLVTF

SEQ ID NO: 84614 - protein, 9 aa, Homo sapiens
  Table A; Target 84614; HLA-A*31:01; TDRD1; ENSG00000095627; TAA
VAGIKLQAR

SEQ ID NO: 84615 - protein, 9 aa, Homo sapiens
  Table A; Target 84615; HLA-A*23:01; TDRD1; ENSG00000095627; TAA
VCRPVQPNF

SEQ ID NO: 84616 - protein, 9 aa, Homo sapiens
  Table A; Target 84616; HLA-A*24:02; TDRD1; ENSG00000095627; TAA
VCRPVQPNF

SEQ ID NO: 84617 - protein, 9 aa, Homo sapiens
  Table A; Target 84617; HLA-A*32:01; TDRD1; ENSG00000095627; TAA
VCRPVQPNF

SEQ ID NO: 84618 - protein, 9 aa, Homo sapiens
  Table A; Target 84618; HLA-B*15:03; TDRD1; ENSG00000095627; TAA
VCRPVQPNF

SEQ ID NO: 84619 - protein, 9 aa, Homo sapiens
  Table A; Target 84619; HLA-B*46:01; TDRD1; ENSG00000095627; TAA
VCRPVQPNF

SEQ ID NO: 84620 - protein, 9 aa, Homo sapiens
  Table A; Target 84620; HLA-B*57:01; TDRD1; ENSG00000095627; TAA
VCRPVQPNF

SEQ ID NO: 84621 - protein, 9 aa, Homo sapiens
  Table A; Target 84621; HLA-B*58:01; TDRD1; ENSG00000095627; TAA
VCRPVQPNF

SEQ ID NO: 84622 - protein, 9 aa, Homo sapiens
  Table A; Target 84622; HLA-C*16:01; TDRD1; ENSG00000095627; TAA
VCRPVQPNF

SEQ ID NO: 84623 - protein, 9 aa, Homo sapiens
  Table A; Target 84623; HLA-A*30:01; TDRD1; ENSG00000095627; TAA
VDKLENSSL

SEQ ID NO: 84624 - protein, 9 aa, Homo sapiens
  Table A; Target 84624; HLA-B*37:01; TDRD1; ENSG00000095627; TAA
VDKLENSSL

SEQ ID NO: 84625 - protein, 9 aa, Homo sapiens
  Table A; Target 84625; HLA-B*40:02; TDRD1; ENSG00000095627; TAA
VDKLENSSL

SEQ ID NO: 84626 - protein, 8 aa, Homo sapiens
  Table A; Target 84626; HLA-B*37:01; TDRD1; ENSG00000095627; TAA
VDVVVCVI

SEQ ID NO: 84627 - protein, 8 aa, Homo sapiens
  Table A; Target 84627; HLA-B*40:02; TDRD1; ENSG00000095627; TAA
VDVVVCVI

SEQ ID NO: 84628 - protein, 8 aa, Homo sapiens
  Table A; Target 84628; HLA-B*49:01; TDRD1; ENSG00000095627; TAA
VDVVVCVI

SEQ ID NO: 84629 - protein, 9 aa, Homo sapiens
  Table A; Target 84629; HLA-B*18:01; TDRD1; ENSG00000095627; TAA
VDVVVCVIY

SEQ ID NO: 84630 - protein, 9 aa, Homo sapiens
  Table A; Target 84630; HLA-C*07:01; TDRD1; ENSG00000095627; TAA
VDVVVCVIY

SEQ ID NO: 84631 - protein, 9 aa, Homo sapiens
  Table A; Target 84631; HLA-C*12:03; TDRD1; ENSG00000095627; TAA
VDVVVCVIY

SEQ ID NO: 84632 - protein, 8 aa, Homo sapiens
  Table A; Target 84632; HLA-B*37:01; TDRD1; ENSG00000095627; TAA
VDYGNFEI

SEQ ID NO: 84633 - protein, 9 aa, Homo sapiens
  Table A; Target 84633; HLA-A*30:01; TDRD1; ENSG00000095627; TAA
VDYGNFEIL

SEQ ID NO: 84634 - protein, 9 aa, Homo sapiens
  Table A; Target 84634; HLA-B*37:01; TDRD1; ENSG00000095627; TAA
VDYGNFEIL

SEQ ID NO: 84635 - protein, 9 aa, Homo sapiens
  Table A; Target 84635; HLA-B*40:01; TDRD1; ENSG00000095627; TAA
VDYGNFEIL

SEQ ID NO: 84636 - protein, 9 aa, Homo sapiens
  Table A; Target 84636; HLA-B*40:02; TDRD1; ENSG00000095627; TAA
VDYGNFEIL

SEQ ID NO: 84637 - protein, 9 aa, Homo sapiens
  Table A; Target 84637; HLA-C*12:03; TDRD1; ENSG00000095627; TAA
VDYGNFEIL

SEQ ID NO: 84638 - protein, 9 aa, Homo sapiens
  Table A; Target 84638; HLA-A*30:01; TDRD1; ENSG00000095627; TAA
VDYGNIEEV

SEQ ID NO: 84639 - protein, 9 aa, Homo sapiens
  Table A; Target 84639; HLA-B*13:02; TDRD1; ENSG00000095627; TAA
VDYGNIEEV

SEQ ID NO: 84640 - protein, 9 aa, Homo sapiens
  Table A; Target 84640; HLA-B*40:02; TDRD1; ENSG00000095627; TAA
VDYGNIEEV

SEQ ID NO: 84641 - protein, 9 aa, Homo sapiens
  Table A; Target 84641; HLA-B*49:01; TDRD1; ENSG00000095627; TAA
VDYGNIEEV

SEQ ID NO: 84642 - protein, 9 aa, Homo sapiens
  Table A; Target 84642; HLA-C*12:03; TDRD1; ENSG00000095627; TAA
VDYGNIEEV

SEQ ID NO: 84643 - protein, 8 aa, Homo sapiens
  Table A; Target 84643; HLA-B*18:01; TDRD1; ENSG00000095627; TAA
VEGKVNPL

SEQ ID NO: 84644 - protein, 8 aa, Homo sapiens
  Table A; Target 84644; HLA-B*37:01; TDRD1; ENSG00000095627; TAA
VEGKVNPL

SEQ ID NO: 84645 - protein, 8 aa, Homo sapiens
  Table A; Target 84645; HLA-B*40:01; TDRD1; ENSG00000095627; TAA
VEGKVNPL

SEQ ID NO: 84646 - protein, 10 aa, Homo sapiens
  Table A; Target 84646; HLA-B*27:02; TDRD1; ENSG00000095627; TAA
VEGKVNPLEW

SEQ ID NO: 84647 - protein, 10 aa, Homo sapiens
  Table A; Target 84647; HLA-B*44:02; TDRD1; ENSG00000095627; TAA
VEGKVNPLEW

SEQ ID NO: 84648 - protein, 10 aa, Homo sapiens
  Table A; Target 84648; HLA-B*44:03; TDRD1; ENSG00000095627; TAA
VEGKVNPLEW

SEQ ID NO: 84649 - protein, 9 aa, Homo sapiens
  Table A; Target 84649; HLA-A*30:01; TDRD1; ENSG00000095627; TAA
VELGVDQTV

SEQ ID NO: 84650 - protein, 9 aa, Homo sapiens
  Table A; Target 84650; HLA-B*13:02; TDRD1; ENSG00000095627; TAA
VELGVDQTV

SEQ ID NO: 84651 - protein, 9 aa, Homo sapiens
  Table A; Target 84651; HLA-B*18:01; TDRD1; ENSG00000095627; TAA
VELGVDQTV

SEQ ID NO: 84652 - protein, 9 aa, Homo sapiens
  Table A; Target 84652; HLA-B*40:01; TDRD1; ENSG00000095627; TAA
VELGVDQTV

SEQ ID NO: 84653 - protein, 9 aa, Homo sapiens
  Table A; Target 84653; HLA-B*40:02; TDRD1; ENSG00000095627; TAA
VELGVDQTV

SEQ ID NO: 84654 - protein, 9 aa, Homo sapiens
  Table A; Target 84654; HLA-B*44:02; TDRD1; ENSG00000095627; TAA
VELGVDQTV

SEQ ID NO: 84655 - protein, 9 aa, Homo sapiens
  Table A; Target 84655; HLA-B*44:03; TDRD1; ENSG00000095627; TAA
VELGVDQTV

SEQ ID NO: 84656 - protein, 9 aa, Homo sapiens
  Table A; Target 84656; HLA-B*49:01; TDRD1; ENSG00000095627; TAA
VELGVDQTV

SEQ ID NO: 84657 - protein, 9 aa, Homo sapiens
  Table A; Target 84657; HLA-C*16:04; TDRD1; ENSG00000095627; TAA
VELGVDQTV

SEQ ID NO: 84658 - protein, 11 aa, Homo sapiens
  Table A; Target 84658; HLA-B*40:01; TDRD1; ENSG00000095627; TAA
VELGVDQTVDV

SEQ ID NO: 84659 - protein, 11 aa, Homo sapiens
  Table A; Target 84659; HLA-B*49:01; TDRD1; ENSG00000095627; TAA
VELGVDQTVDV

SEQ ID NO: 84660 - protein, 9 aa, Homo sapiens
  Table A; Target 84660; HLA-A*23:01; TDRD1; ENSG00000095627; TAA
VELPNSGKL

SEQ ID NO: 84661 - protein, 9 aa, Homo sapiens
  Table A; Target 84661; HLA-A*30:01; TDRD1; ENSG00000095627; TAA
VELPNSGKL

SEQ ID NO: 84662 - protein, 9 aa, Homo sapiens
  Table A; Target 84662; HLA-B*18:01; TDRD1; ENSG00000095627; TAA
VELPNSGKL

SEQ ID NO: 84663 - protein, 9 aa, Homo sapiens
  Table A; Target 84663; HLA-B*37:01; TDRD1; ENSG00000095627; TAA
VELPNSGKL

SEQ ID NO: 84664 - protein, 9 aa, Homo sapiens
  Table A; Target 84664; HLA-B*40:01; TDRD1; ENSG00000095627; TAA
VELPNSGKL

SEQ ID NO: 84665 - protein, 9 aa, Homo sapiens
  Table A; Target 84665; HLA-B*40:02; TDRD1; ENSG00000095627; TAA
VELPNSGKL

SEQ ID NO: 84666 - protein, 9 aa, Homo sapiens
  Table A; Target 84666; HLA-B*44:02; TDRD1; ENSG00000095627; TAA
VELPNSGKL

SEQ ID NO: 84667 - protein, 9 aa, Homo sapiens
  Table A; Target 84667; HLA-B*44:03; TDRD1; ENSG00000095627; TAA
VELPNSGKL

SEQ ID NO: 84668 - protein, 9 aa, Homo sapiens
  Table A; Target 84668; HLA-B*49:01; TDRD1; ENSG00000095627; TAA
VELPNSGKL

SEQ ID NO: 84669 - protein, 10 aa, Homo sapiens
  Table A; Target 84669; HLA-B*40:01; TDRD1; ENSG00000095627; TAA
VELPNSGKLL

SEQ ID NO: 84670 - protein, 10 aa, Homo sapiens
  Table A; Target 84670; HLA-B*44:02; TDRD1; ENSG00000095627; TAA
VELPNSGKLL

SEQ ID NO: 84671 - protein, 10 aa, Homo sapiens
  Table A; Target 84671; HLA-B*44:03; TDRD1; ENSG00000095627; TAA
VELPNSGKLL

SEQ ID NO: 84672 - protein, 9 aa, Homo sapiens
  Table A; Target 84672; HLA-B*49:01; TDRD1; ENSG00000095627; TAA
VELTDLSTC

SEQ ID NO: 84673 - protein, 10 aa, Homo sapiens
  Table A; Target 84673; HLA-A*30:02; TDRD1; ENSG00000095627; TAA
VELTDLSTCY

SEQ ID NO: 84674 - protein, 10 aa, Homo sapiens
  Table A; Target 84674; HLA-B*15:03; TDRD1; ENSG00000095627; TAA
VELTDLSTCY

SEQ ID NO: 84675 - protein, 10 aa, Homo sapiens
  Table A; Target 84675; HLA-B*18:01; TDRD1; ENSG00000095627; TAA
VELTDLSTCY

SEQ ID NO: 84676 - protein, 10 aa, Homo sapiens
  Table A; Target 84676; HLA-B*44:02; TDRD1; ENSG00000095627; TAA
VELTDLSTCY

SEQ ID NO: 84677 - protein, 10 aa, Homo sapiens
  Table A; Target 84677; HLA-B*44:03; TDRD1; ENSG00000095627; TAA
VELTDLSTCY

SEQ ID NO: 84678 - protein, 10 aa, Homo sapiens
  Table A; Target 84678; HLA-C*16:04; TDRD1; ENSG00000095627; TAA
VELTDLSTCY

SEQ ID NO: 84679 - protein, 9 aa, Homo sapiens
  Table A; Target 84679; HLA-B*18:01; TDRD1; ENSG00000095627; TAA
VENSLSISN

SEQ ID NO: 84680 - protein, 9 aa, Homo sapiens
  Table A; Target 84680; HLA-A*30:01; TDRD1; ENSG00000095627; TAA
VEVELPNSG

SEQ ID NO: 84681 - protein, 9 aa, Homo sapiens
  Table A; Target 84681; HLA-B*18:01; TDRD1; ENSG00000095627; TAA
VEVELPNSG

SEQ ID NO: 84682 - protein, 9 aa, Homo sapiens
  Table A; Target 84682; HLA-B*40:02; TDRD1; ENSG00000095627; TAA
VEVELPNSG

SEQ ID NO: 84683 - protein, 9 aa, Homo sapiens
  Table A; Target 84683; HLA-B*49:01; TDRD1; ENSG00000095627; TAA
VEVELPNSG

SEQ ID NO: 84684 - protein, 10 aa, Homo sapiens
  Table A; Target 84684; HLA-B*27:02; TDRD1; ENSG00000095627; TAA
VEVELPNSGK

SEQ ID NO: 84685 - protein, 10 aa, Homo sapiens
  Table A; Target 84685; HLA-B*27:05; TDRD1; ENSG00000095627; TAA
VEVELPNSGK

SEQ ID NO: 84686 - protein, 10 aa, Homo sapiens
  Table A; Target 84686; HLA-B*49:01; TDRD1; ENSG00000095627; TAA
VEVELPNSGK

SEQ ID NO: 84687 - protein, 11 aa, Homo sapiens
  Table A; Target 84687; HLA-B*40:02; TDRD1; ENSG00000095627; TAA
VEVELPNSGKL

SEQ ID NO: 84688 - protein, 11 aa, Homo sapiens
  Table A; Target 84688; HLA-B*44:03; TDRD1; ENSG00000095627; TAA
VEVELPNSGKL

SEQ ID NO: 84689 - protein, 11 aa, Homo sapiens
  Table A; Target 84689; HLA-B*49:01; TDRD1; ENSG00000095627; TAA
VEVELPNSGKL

SEQ ID NO: 84690 - protein, 8 aa, Homo sapiens
  Table A; Target 84690; HLA-B*18:01; TDRD1; ENSG00000095627; TAA
VEVLYADY

SEQ ID NO: 84691 - protein, 8 aa, Homo sapiens
  Table A; Target 84691; HLA-B*49:01; TDRD1; ENSG00000095627; TAA
VEVTENGI

SEQ ID NO: 84692 - protein, 10 aa, Homo sapiens
  Table A; Target 84692; HLA-A*30:01; TDRD1; ENSG00000095627; TAA
VEVTENGIGV

SEQ ID NO: 84693 - protein, 10 aa, Homo sapiens
  Table A; Target 84693; HLA-B*40:01; TDRD1; ENSG00000095627; TAA
VEVTENGIGV

SEQ ID NO: 84694 - protein, 10 aa, Homo sapiens
  Table A; Target 84694; HLA-B*49:01; TDRD1; ENSG00000095627; TAA
VEVTENGIGV

SEQ ID NO: 84695 - protein, 8 aa, Homo sapiens
  Table A; Target 84695; HLA-C*05:01; TDRD1; ENSG00000095627; TAA
VGDEFCGV

SEQ ID NO: 84696 - protein, 9 aa, Homo sapiens
  Table A; Target 84696; HLA-B*39:01; TDRD1; ENSG00000095627; TAA
VHVQGLQAT

SEQ ID NO: 84697 - protein, 8 aa, Homo sapiens
  Table A; Target 84697; HLA-B*39:01; TDRD1; ENSG00000095627; TAA
VIYSPGEF

SEQ ID NO: 84698 - protein, 8 aa, Homo sapiens
  Table A; Target 84698; HLA-B*46:01; TDRD1; ENSG00000095627; TAA
VIYSPGEF

SEQ ID NO: 84699 - protein, 8 aa, Homo sapiens
  Table A; Target 84699; HLA-C*02:02; TDRD1; ENSG00000095627; TAA
VIYSPGEF

SEQ ID NO: 84700 - protein, 8 aa, Homo sapiens
  Table A; Target 84700; HLA-C*05:01; TDRD1; ENSG00000095627; TAA
VIYSPGEF

SEQ ID NO: 84701 - protein, 9 aa, Homo sapiens
  Table A; Target 84701; HLA-A*01:01; TDRD1; ENSG00000095627; TAA
VIYSPGEFY

SEQ ID NO: 84702 - protein, 9 aa, Homo sapiens
  Table A; Target 84702; HLA-A*03:01; TDRD1; ENSG00000095627; TAA
VIYSPGEFY

SEQ ID NO: 84703 - protein, 9 aa, Homo sapiens
  Table A; Target 84703; HLA-A*29:02; TDRD1; ENSG00000095627; TAA
VIYSPGEFY

SEQ ID NO: 84704 - protein, 9 aa, Homo sapiens
  Table A; Target 84704; HLA-A*30:02; TDRD1; ENSG00000095627; TAA
VIYSPGEFY

SEQ ID NO: 84705 - protein, 9 aa, Homo sapiens
  Table A; Target 84705; HLA-B*15:01; TDRD1; ENSG00000095627; TAA
VIYSPGEFY

SEQ ID NO: 84706 - protein, 9 aa, Homo sapiens
  Table A; Target 84706; HLA-B*15:03; TDRD1; ENSG00000095627; TAA
VIYSPGEFY

SEQ ID NO: 84707 - protein, 9 aa, Homo sapiens
  Table A; Target 84707; HLA-B*46:01; TDRD1; ENSG00000095627; TAA
VIYSPGEFY

SEQ ID NO: 84708 - protein, 9 aa, Homo sapiens
  Table A; Target 84708; HLA-C*02:02; TDRD1; ENSG00000095627; TAA
VIYSPGEFY

SEQ ID NO: 84709 - protein, 9 aa, Homo sapiens
  Table A; Target 84709; HLA-C*07:04; TDRD1; ENSG00000095627; TAA
VIYSPGEFY

SEQ ID NO: 84710 - protein, 8 aa, Homo sapiens
  Table A; Target 84710; HLA-B*15:03; TDRD1; ENSG00000095627; TAA
VKSPFNVM

SEQ ID NO: 84711 - protein, 9 aa, Homo sapiens
  Table A; Target 84711; HLA-A*02:01; TDRD1; ENSG00000095627; TAA
VLAGVKPSL

SEQ ID NO: 84712 - protein, 9 aa, Homo sapiens
  Table A; Target 84712; HLA-A*02:03; TDRD1; ENSG00000095627; TAA
VLAGVKPSL

SEQ ID NO: 84713 - protein, 9 aa, Homo sapiens
  Table A; Target 84713; HLA-A*02:04; TDRD1; ENSG00000095627; TAA
VLAGVKPSL

SEQ ID NO: 84714 - protein, 9 aa, Homo sapiens
  Table A; Target 84714; HLA-A*02:07; TDRD1; ENSG00000095627; TAA
VLAGVKPSL

SEQ ID NO: 84715 - protein, 9 aa, Homo sapiens
  Table A; Target 84715; HLA-A*23:01; TDRD1; ENSG00000095627; TAA
VLAGVKPSL

SEQ ID NO: 84716 - protein, 9 aa, Homo sapiens
  Table A; Target 84716; HLA-A*24:02; TDRD1; ENSG00000095627; TAA
VLAGVKPSL

SEQ ID NO: 84717 - protein, 9 aa, Homo sapiens
  Table A; Target 84717; HLA-A*30:01; TDRD1; ENSG00000095627; TAA
VLAGVKPSL

SEQ ID NO: 84718 - protein, 9 aa, Homo sapiens
  Table A; Target 84718; HLA-A*32:01; TDRD1; ENSG00000095627; TAA
VLAGVKPSL

SEQ ID NO: 84719 - protein, 9 aa, Homo sapiens
  Table A; Target 84719; HLA-B*07:02; TDRD1; ENSG00000095627; TAA
VLAGVKPSL

SEQ ID NO: 84720 - protein, 9 aa, Homo sapiens
  Table A; Target 84720; HLA-B*08:01; TDRD1; ENSG00000095627; TAA
VLAGVKPSL

SEQ ID NO: 84721 - protein, 9 aa, Homo sapiens
  Table A; Target 84721; HLA-B*13:02; TDRD1; ENSG00000095627; TAA
VLAGVKPSL

SEQ ID NO: 84722 - protein, 9 aa, Homo sapiens
  Table A; Target 84722; HLA-B*15:01; TDRD1; ENSG00000095627; TAA
VLAGVKPSL

SEQ ID NO: 84723 - protein, 9 aa, Homo sapiens
  Table A; Target 84723; HLA-B*15:03; TDRD1; ENSG00000095627; TAA
VLAGVKPSL

SEQ ID NO: 84724 - protein, 9 aa, Homo sapiens
  Table A; Target 84724; HLA-B*35:03; TDRD1; ENSG00000095627; TAA
VLAGVKPSL

SEQ ID NO: 84725 - protein, 9 aa, Homo sapiens
  Table A; Target 84725; HLA-B*38:01; TDRD1; ENSG00000095627; TAA
VLAGVKPSL

SEQ ID NO: 84726 - protein, 9 aa, Homo sapiens
  Table A; Target 84726; HLA-B*39:01; TDRD1; ENSG00000095627; TAA
VLAGVKPSL

SEQ ID NO: 84727 - protein, 9 aa, Homo sapiens
  Table A; Target 84727; HLA-B*40:01; TDRD1; ENSG00000095627; TAA
VLAGVKPSL

SEQ ID NO: 84728 - protein, 9 aa, Homo sapiens
  Table A; Target 84728; HLA-B*44:03; TDRD1; ENSG00000095627; TAA
VLAGVKPSL

SEQ ID NO: 84729 - protein, 9 aa, Homo sapiens
  Table A; Target 84729; HLA-B*46:01; TDRD1; ENSG00000095627; TAA
VLAGVKPSL

SEQ ID NO: 84730 - protein, 9 aa, Homo sapiens
  Table A; Target 84730; HLA-B*55:01; TDRD1; ENSG00000095627; TAA
VLAGVKPSL

SEQ ID NO: 84731 - protein, 9 aa, Homo sapiens
  Table A; Target 84731; HLA-B*58:01; TDRD1; ENSG00000095627; TAA
VLAGVKPSL

SEQ ID NO: 84732 - protein, 9 aa, Homo sapiens
  Table A; Target 84732; HLA-C*01:02; TDRD1; ENSG00000095627; TAA
VLAGVKPSL

SEQ ID NO: 84733 - protein, 9 aa, Homo sapiens
  Table A; Target 84733; HLA-C*02:02; TDRD1; ENSG00000095627; TAA
VLAGVKPSL

SEQ ID NO: 84734 - protein, 9 aa, Homo sapiens
  Table A; Target 84734; HLA-C*03:03; TDRD1; ENSG00000095627; TAA
VLAGVKPSL

SEQ ID NO: 84735 - protein, 9 aa, Homo sapiens
  Table A; Target 84735; HLA-C*03:04; TDRD1; ENSG00000095627; TAA
VLAGVKPSL

SEQ ID NO: 84736 - protein, 9 aa, Homo sapiens
  Table A; Target 84736; HLA-C*07:02; TDRD1; ENSG00000095627; TAA
VLAGVKPSL

SEQ ID NO: 84737 - protein, 9 aa, Homo sapiens
  Table A; Target 84737; HLA-C*07:04; TDRD1; ENSG00000095627; TAA
VLAGVKPSL

SEQ ID NO: 84738 - protein, 9 aa, Homo sapiens
  Table A; Target 84738; HLA-C*14:02; TDRD1; ENSG00000095627; TAA
VLAGVKPSL

SEQ ID NO: 84739 - protein, 9 aa, Homo sapiens
  Table A; Target 84739; HLA-C*16:01; TDRD1; ENSG00000095627; TAA
VLAGVKPSL

SEQ ID NO: 84740 - protein, 9 aa, Homo sapiens
  Table A; Target 84740; HLA-C*16:02; TDRD1; ENSG00000095627; TAA
VLAGVKPSL

SEQ ID NO: 84741 - protein, 9 aa, Homo sapiens
  Table A; Target 84741; HLA-A*02:01; TDRD1; ENSG00000095627; TAA
VLEIISPNL

SEQ ID NO: 84742 - protein, 9 aa, Homo sapiens
  Table A; Target 84742; HLA-A*02:04; TDRD1; ENSG00000095627; TAA
VLEIISPNL

SEQ ID NO: 84743 - protein, 9 aa, Homo sapiens
  Table A; Target 84743; HLA-A*02:07; TDRD1; ENSG00000095627; TAA
VLEIISPNL

SEQ ID NO: 84744 - protein, 10 aa, Homo sapiens
  Table A; Target 84744; HLA-A*01:01; TDRD1; ENSG00000095627; TAA
VLEIISPNLF

SEQ ID NO: 84745 - protein, 11 aa, Homo sapiens
  Table A; Target 84745; HLA-A*01:01; TDRD1; ENSG00000095627; TAA
VLEIISPNLFY

SEQ ID NO: 84746 - protein, 11 aa, Homo sapiens
  Table A; Target 84746; HLA-A*29:02; TDRD1; ENSG00000095627; TAA
VLEIISPNLFY

SEQ ID NO: 84747 - protein, 9 aa, Homo sapiens
  Table A; Target 84747; HLA-A*02:01; TDRD1; ENSG00000095627; TAA
VLIDEHLVL

SEQ ID NO: 84748 - protein, 9 aa, Homo sapiens
  Table A; Target 84748; HLA-A*02:03; TDRD1; ENSG00000095627; TAA
VLIDEHLVL

SEQ ID NO: 84749 - protein, 9 aa, Homo sapiens
  Table A; Target 84749; HLA-A*02:04; TDRD1; ENSG00000095627; TAA
VLIDEHLVL

SEQ ID NO: 84750 - protein, 9 aa, Homo sapiens
  Table A; Target 84750; HLA-A*02:07; TDRD1; ENSG00000095627; TAA
VLIDEHLVL

SEQ ID NO: 84751 - protein, 9 aa, Homo sapiens
  Table A; Target 84751; HLA-A*23:01; TDRD1; ENSG00000095627; TAA
VLIDEHLVL

SEQ ID NO: 84752 - protein, 9 aa, Homo sapiens
  Table A; Target 84752; HLA-A*24:02; TDRD1; ENSG00000095627; TAA
VLIDEHLVL

SEQ ID NO: 84753 - protein, 9 aa, Homo sapiens
  Table A; Target 84753; HLA-A*29:02; TDRD1; ENSG00000095627; TAA
VLIDEHLVL

SEQ ID NO: 84754 - protein, 9 aa, Homo sapiens
  Table A; Target 84754; HLA-B*15:01; TDRD1; ENSG00000095627; TAA
VLIDEHLVL

SEQ ID NO: 84755 - protein, 9 aa, Homo sapiens
  Table A; Target 84755; HLA-B*38:01; TDRD1; ENSG00000095627; TAA
VLIDEHLVL

SEQ ID NO: 84756 - protein, 9 aa, Homo sapiens
  Table A; Target 84756; HLA-C*02:02; TDRD1; ENSG00000095627; TAA
VLIDEHLVL

SEQ ID NO: 84757 - protein, 9 aa, Homo sapiens
  Table A; Target 84757; HLA-C*03:04; TDRD1; ENSG00000095627; TAA
VLIDEHLVL

SEQ ID NO: 84758 - protein, 10 aa, Homo sapiens
  Table A; Target 84758; HLA-A*03:01; TDRD1; ENSG00000095627; TAA
VLIDEHLVLK

SEQ ID NO: 84759 - protein, 10 aa, Homo sapiens
  Table A; Target 84759; HLA-A*03:02; TDRD1; ENSG00000095627; TAA
VLIDEHLVLK

SEQ ID NO: 84760 - protein, 10 aa, Homo sapiens
  Table A; Target 84760; HLA-A*11:01; TDRD1; ENSG00000095627; TAA
VLIDEHLVLK

SEQ ID NO: 84761 - protein, 9 aa, Homo sapiens
  Table A; Target 84761; HLA-A*02:01; TDRD1; ENSG00000095627; TAA
VLIEMGYGL

SEQ ID NO: 84762 - protein, 9 aa, Homo sapiens
  Table A; Target 84762; HLA-A*02:03; TDRD1; ENSG00000095627; TAA
VLIEMGYGL

SEQ ID NO: 84763 - protein, 9 aa, Homo sapiens
  Table A; Target 84763; HLA-A*02:04; TDRD1; ENSG00000095627; TAA
VLIEMGYGL

SEQ ID NO: 84764 - protein, 9 aa, Homo sapiens
  Table A; Target 84764; HLA-A*02:07; TDRD1; ENSG00000095627; TAA
VLIEMGYGL

SEQ ID NO: 84765 - protein, 9 aa, Homo sapiens
  Table A; Target 84765; HLA-A*23:01; TDRD1; ENSG00000095627; TAA
VLIEMGYGL

SEQ ID NO: 84766 - protein, 9 aa, Homo sapiens
  Table A; Target 84766; HLA-B*55:01; TDRD1; ENSG00000095627; TAA
VLIEMGYGL

SEQ ID NO: 84767 - protein, 9 aa, Homo sapiens
  Table A; Target 84767; HLA-A*03:01; TDRD1; ENSG00000095627; TAA
VLKEDALKK

SEQ ID NO: 84768 - protein, 10 aa, Homo sapiens
  Table A; Target 84768; HLA-A*02:03; TDRD1; ENSG00000095627; TAA
VLKEDALKKL

SEQ ID NO: 84769 - protein, 9 aa, Homo sapiens
  Table A; Target 84769; HLA-A*03:01; TDRD1; ENSG00000095627; TAA
VLKSASPHK

SEQ ID NO: 84770 - protein, 9 aa, Homo sapiens
  Table A; Target 84770; HLA-A*02:01; TDRD1; ENSG00000095627; TAA
VLLDAGFAV

SEQ ID NO: 84771 - protein, 9 aa, Homo sapiens
  Table A; Target 84771; HLA-A*02:04; TDRD1; ENSG00000095627; TAA
VLLDAGFAV

SEQ ID NO: 84772 - protein, 9 aa, Homo sapiens
  Table A; Target 84772; HLA-A*02:07; TDRD1; ENSG00000095627; TAA
VLLDAGFAV

SEQ ID NO: 84773 - protein, 9 aa, Homo sapiens
  Table A; Target 84773; HLA-B*13:02; TDRD1; ENSG00000095627; TAA
VLLDAGFAV

SEQ ID NO: 84774 - protein, 9 aa, Homo sapiens
  Table A; Target 84774; HLA-B*55:01; TDRD1; ENSG00000095627; TAA
VLLDAGFAV

SEQ ID NO: 84775 - protein, 10 aa, Homo sapiens
  Table A; Target 84775; HLA-A*03:01; TDRD1; ENSG00000095627; TAA
VMLSVKGITK

SEQ ID NO: 84776 - protein, 10 aa, Homo sapiens
  Table A; Target 84776; HLA-A*03:02; TDRD1; ENSG00000095627; TAA
VMLSVKGITK

SEQ ID NO: 84777 - protein, 10 aa, Homo sapiens
  Table A; Target 84777; HLA-A*11:01; TDRD1; ENSG00000095627; TAA
VMLSVKGITK

SEQ ID NO: 84778 - protein, 9 aa, Homo sapiens
  Table A; Target 84778; HLA-B*51:01; TDRD1; ENSG00000095627; TAA
VPLGVEGKV

SEQ ID NO: 84779 - protein, 11 aa, Homo sapiens
  Table A; Target 84779; HLA-A*29:02; TDRD1; ENSG00000095627; TAA
VQLYSSEVLEY

SEQ ID NO: 84780 - protein, 11 aa, Homo sapiens
  Table A; Target 84780; HLA-A*30:02; TDRD1; ENSG00000095627; TAA
VQLYSSEVLEY

SEQ ID NO: 84781 - protein, 8 aa, Homo sapiens
  Table A; Target 84781; HLA-A*02:03; TDRD1; ENSG00000095627; TAA
VQNKIITV

SEQ ID NO: 84782 - protein, 8 aa, Homo sapiens
  Table A; Target 84782; HLA-A*32:01; TDRD1; ENSG00000095627; TAA
VQNKIITV

SEQ ID NO: 84783 - protein, 8 aa, Homo sapiens
  Table A; Target 84783; HLA-B*13:02; TDRD1; ENSG00000095627; TAA
VQNKIITV

SEQ ID NO: 84784 - protein, 8 aa, Homo sapiens
  Table A; Target 84784; HLA-B*15:01; TDRD1; ENSG00000095627; TAA
VQNKIITV

SEQ ID NO: 84785 - protein, 9 aa, Homo sapiens
  Table A; Target 84785; HLA-A*03:01; TDRD1; ENSG00000095627; TAA
VQNKIITVK

SEQ ID NO: 84786 - protein, 9 aa, Homo sapiens
  Table A; Target 84786; HLA-A*03:02; TDRD1; ENSG00000095627; TAA
VQNKIITVK

SEQ ID NO: 84787 - protein, 9 aa, Homo sapiens
  Table A; Target 84787; HLA-A*11:01; TDRD1; ENSG00000095627; TAA
VQNKIITVK

SEQ ID NO: 84788 - protein, 9 aa, Homo sapiens
  Table A; Target 84788; HLA-A*31:01; TDRD1; ENSG00000095627; TAA
VQNKIITVK

SEQ ID NO: 84789 - protein, 9 aa, Homo sapiens
  Table A; Target 84789; HLA-B*27:05; TDRD1; ENSG00000095627; TAA
VQNKIITVK

SEQ ID NO: 84790 - protein, 9 aa, Homo sapiens
  Table A; Target 84790; HLA-A*24:02; TDRD1; ENSG00000095627; TAA
VQPITSSHL

SEQ ID NO: 84791 - protein, 9 aa, Homo sapiens
  Table A; Target 84791; HLA-B*15:01; TDRD1; ENSG00000095627; TAA
VQPITSSHL

SEQ ID NO: 84792 - protein, 9 aa, Homo sapiens
  Table A; Target 84792; HLA-B*15:03; TDRD1; ENSG00000095627; TAA
VQPITSSHL

SEQ ID NO: 84793 - protein, 9 aa, Homo sapiens
  Table A; Target 84793; HLA-C*01:02; TDRD1; ENSG00000095627; TAA
VQPITSSHL

SEQ ID NO: 84794 - protein, 8 aa, Homo sapiens
  Table A; Target 84794; HLA-A*24:02; TDRD1; ENSG00000095627; TAA
VQPNFHKL

SEQ ID NO: 84795 - protein, 9 aa, Homo sapiens
  Table A; Target 84795; HLA-B*08:01; TDRD1; ENSG00000095627; TAA
VQQKKAHVL

SEQ ID NO: 84796 - protein, 8 aa, Homo sapiens
  Table A; Target 84796; HLA-C*05:01; TDRD1; ENSG00000095627; TAA
VTDKPSDV

SEQ ID NO: 84797 - protein, 9 aa, Homo sapiens
  Table A; Target 84797; HLA-A*01:01; TDRD1; ENSG00000095627; TAA
VTDKPSDVK

SEQ ID NO: 84798 - protein, 9 aa, Homo sapiens
  Table A; Target 84798; HLA-A*03:01; TDRD1; ENSG00000095627; TAA
VTDKPSDVK

SEQ ID NO: 84799 - protein, 9 aa, Homo sapiens
  Table A; Target 84799; HLA-A*03:02; TDRD1; ENSG00000095627; TAA
VTDKPSDVK

SEQ ID NO: 84800 - protein, 9 aa, Homo sapiens
  Table A; Target 84800; HLA-A*11:01; TDRD1; ENSG00000095627; TAA
VTDKPSDVK

SEQ ID NO: 84801 - protein, 9 aa, Homo sapiens
  Table A; Target 84801; HLA-C*05:01; TDRD1; ENSG00000095627; TAA
VTDKPSDVK

SEQ ID NO: 84802 - protein, 11 aa, Homo sapiens
  Table A; Target 84802; HLA-A*01:01; TDRD1; ENSG00000095627; TAA
VTEFKHPGDFY

SEQ ID NO: 84803 - protein, 10 aa, Homo sapiens
  Table A; Target 84803; HLA-A*01:01; TDRD1; ENSG00000095627; TAA
VTENGIGVEL

SEQ ID NO: 84804 - protein, 10 aa, Homo sapiens
  Table A; Target 84804; HLA-C*05:01; TDRD1; ENSG00000095627; TAA
VTENGIGVEL

SEQ ID NO: 84805 - protein, 9 aa, Homo sapiens
  Table A; Target 84805; HLA-A*02:01; TDRD1; ENSG00000095627; TAA
VTFAVEVEL

SEQ ID NO: 84806 - protein, 9 aa, Homo sapiens
  Table A; Target 84806; HLA-A*23:01; TDRD1; ENSG00000095627; TAA
VTFAVEVEL

SEQ ID NO: 84807 - protein, 9 aa, Homo sapiens
  Table A; Target 84807; HLA-A*68:02; TDRD1; ENSG00000095627; TAA
VTFAVEVEL

SEQ ID NO: 84808 - protein, 9 aa, Homo sapiens
  Table A; Target 84808; HLA-B*35:03; TDRD1; ENSG00000095627; TAA
VTFAVEVEL

SEQ ID NO: 84809 - protein, 9 aa, Homo sapiens
  Table A; Target 84809; HLA-B*40:01; TDRD1; ENSG00000095627; TAA
VTFAVEVEL

SEQ ID NO: 84810 - protein, 9 aa, Homo sapiens
  Table A; Target 84810; HLA-B*58:01; TDRD1; ENSG00000095627; TAA
VTFAVEVEL

SEQ ID NO: 84811 - protein, 9 aa, Homo sapiens
  Table A; Target 84811; HLA-C*02:02; TDRD1; ENSG00000095627; TAA
VTFAVEVEL

SEQ ID NO: 84812 - protein, 9 aa, Homo sapiens
  Table A; Target 84812; HLA-C*03:03; TDRD1; ENSG00000095627; TAA
VTFAVEVEL

SEQ ID NO: 84813 - protein, 9 aa, Homo sapiens
  Table A; Target 84813; HLA-C*03:04; TDRD1; ENSG00000095627; TAA
VTFAVEVEL

SEQ ID NO: 84814 - protein, 9 aa, Homo sapiens
  Table A; Target 84814; HLA-C*07:06; TDRD1; ENSG00000095627; TAA
VTFAVEVEL

SEQ ID NO: 84815 - protein, 9 aa, Homo sapiens
  Table A; Target 84815; HLA-C*16:04; TDRD1; ENSG00000095627; TAA
VTFAVEVEL

SEQ ID NO: 84816 - protein, 9 aa, Homo sapiens
  Table A; Target 84816; HLA-C*06:02; TDRD1; ENSG00000095627; TAA
VTFGLAKNI

SEQ ID NO: 84817 - protein, 9 aa, Homo sapiens
  Table A; Target 84817; HLA-C*16:02; TDRD1; ENSG00000095627; TAA
VTFGLAKNI

SEQ ID NO: 84818 - protein, 8 aa, Homo sapiens
  Table A; Target 84818; HLA-B*57:01; TDRD1; ENSG00000095627; TAA
VTKEIAIW

SEQ ID NO: 84819 - protein, 10 aa, Homo sapiens
  Table A; Target 84819; HLA-A*02:07; TDRD1; ENSG00000095627; TAA
VVDKLENSSL

SEQ ID NO: 84820 - protein, 10 aa, Homo sapiens
  Table A; Target 84820; HLA-C*05:01; TDRD1; ENSG00000095627; TAA
VVDKLENSSL

SEQ ID NO: 84821 - protein, 8 aa, Homo sapiens
  Table A; Target 84821; HLA-C*05:01; TDRD1; ENSG00000095627; TAA
VVDKSDLI

SEQ ID NO: 84822 - protein, 10 aa, Homo sapiens
  Table A; Target 84822; HLA-A*03:01; TDRD1; ENSG00000095627; TAA
VVDKSDLIPK

SEQ ID NO: 84823 - protein, 10 aa, Homo sapiens
  Table A; Target 84823; HLA-A*03:02; TDRD1; ENSG00000095627; TAA
VVDKSDLIPK

SEQ ID NO: 84824 - protein, 10 aa, Homo sapiens
  Table A; Target 84824; HLA-A*11:01; TDRD1; ENSG00000095627; TAA
VVDKSDLIPK

SEQ ID NO: 84825 - protein, 10 aa, Homo sapiens
  Table A; Target 84825; HLA-B*27:02; TDRD1; ENSG00000095627; TAA
VVDKSDLIPK

SEQ ID NO: 84826 - protein, 11 aa, Homo sapiens
  Table A; Target 84826; HLA-A*02:07; TDRD1; ENSG00000095627; TAA
VVDKSDLIPKV

SEQ ID NO: 84827 - protein, 9 aa, Homo sapiens
  Table A; Target 84827; HLA-C*05:01; TDRD1; ENSG00000095627; TAA
VVEVTENGI

SEQ ID NO: 84828 - protein, 9 aa, Homo sapiens
  Table A; Target 84828; HLA-C*05:01; TDRD1; ENSG00000095627; TAA
WSEEAITRF

SEQ ID NO: 84829 - protein, 9 aa, Homo sapiens
  Table A; Target 84829; HLA-A*29:02; TDRD1; ENSG00000095627; TAA
WYRASVLAY

SEQ ID NO: 84830 - protein, 10 aa, Homo sapiens
  Table A; Target 84830; HLA-B*35:03; TDRD1; ENSG00000095627; TAA
YADYGNIETL

SEQ ID NO: 84831 - protein, 10 aa, Homo sapiens
  Table A; Target 84831; HLA-B*38:01; TDRD1; ENSG00000095627; TAA
YADYGNIETL

SEQ ID NO: 84832 - protein, 10 aa, Homo sapiens
  Table A; Target 84832; HLA-B*39:01; TDRD1; ENSG00000095627; TAA
YADYGNIETL

SEQ ID NO: 84833 - protein, 10 aa, Homo sapiens
  Table A; Target 84833; HLA-B*40:01; TDRD1; ENSG00000095627; TAA
YADYGNIETL

SEQ ID NO: 84834 - protein, 10 aa, Homo sapiens
  Table A; Target 84834; HLA-C*02:02; TDRD1; ENSG00000095627; TAA
YADYGNIETL

SEQ ID NO: 84835 - protein, 10 aa, Homo sapiens
  Table A; Target 84835; HLA-C*03:03; TDRD1; ENSG00000095627; TAA
YADYGNIETL

SEQ ID NO: 84836 - protein, 10 aa, Homo sapiens
  Table A; Target 84836; HLA-C*03:04; TDRD1; ENSG00000095627; TAA
YADYGNIETL

SEQ ID NO: 84837 - protein, 10 aa, Homo sapiens
  Table A; Target 84837; HLA-C*05:01; TDRD1; ENSG00000095627; TAA
YADYGNIETL

SEQ ID NO: 84838 - protein, 9 aa, Homo sapiens
  Table A; Target 84838; HLA-C*16:01; TDRD1; ENSG00000095627; TAA
YANVHEKDY

SEQ ID NO: 84839 - protein, 9 aa, Homo sapiens
  Table A; Target 84839; HLA-C*16:02; TDRD1; ENSG00000095627; TAA
YANVHEKDY

SEQ ID NO: 84840 - protein, 8 aa, Homo sapiens
  Table A; Target 84840; HLA-B*35:03; TDRD1; ENSG00000095627; TAA
YASEESVL

SEQ ID NO: 84841 - protein, 8 aa, Homo sapiens
  Table A; Target 84841; HLA-B*39:01; TDRD1; ENSG00000095627; TAA
YASEESVL

SEQ ID NO: 84842 - protein, 8 aa, Homo sapiens
  Table A; Target 84842; HLA-C*03:03; TDRD1; ENSG00000095627; TAA
YASEESVL

SEQ ID NO: 84843 - protein, 8 aa, Homo sapiens
  Table A; Target 84843; HLA-C*03:04; TDRD1; ENSG00000095627; TAA
YASEESVL

SEQ ID NO: 84844 - protein, 8 aa, Homo sapiens
  Table A; Target 84844; HLA-C*05:01; TDRD1; ENSG00000095627; TAA
YASEESVL

SEQ ID NO: 84845 - protein, 9 aa, Homo sapiens
  Table A; Target 84845; HLA-B*13:02; TDRD1; ENSG00000095627; TAA
YASEESVLV

SEQ ID NO: 84846 - protein, 9 aa, Homo sapiens
  Table A; Target 84846; HLA-B*39:01; TDRD1; ENSG00000095627; TAA
YASEESVLV

SEQ ID NO: 84847 - protein, 9 aa, Homo sapiens
  Table A; Target 84847; HLA-B*51:01; TDRD1; ENSG00000095627; TAA
YASEESVLV

SEQ ID NO: 84848 - protein, 9 aa, Homo sapiens
  Table A; Target 84848; HLA-C*02:02; TDRD1; ENSG00000095627; TAA
YASEESVLV

SEQ ID NO: 84849 - protein, 9 aa, Homo sapiens
  Table A; Target 84849; HLA-C*03:04; TDRD1; ENSG00000095627; TAA
YASEESVLV

SEQ ID NO: 84850 - protein, 9 aa, Homo sapiens
  Table A; Target 84850; HLA-C*05:01; TDRD1; ENSG00000095627; TAA
YASEESVLV

SEQ ID NO: 84851 - protein, 9 aa, Homo sapiens
  Table A; Target 84851; HLA-C*12:03; TDRD1; ENSG00000095627; TAA
YASEESVLV

SEQ ID NO: 84852 - protein, 11 aa, Homo sapiens
  Table A; Target 84852; HLA-A*01:01; TDRD1; ENSG00000095627; TAA
YASEESVLVGY

SEQ ID NO: 84853 - protein, 11 aa, Homo sapiens
  Table A; Target 84853; HLA-A*25:01; TDRD1; ENSG00000095627; TAA
YASEESVLVGY

SEQ ID NO: 84854 - protein, 11 aa, Homo sapiens
  Table A; Target 84854; HLA-A*26:01; TDRD1; ENSG00000095627; TAA
YASEESVLVGY

SEQ ID NO: 84855 - protein, 11 aa, Homo sapiens
  Table A; Target 84855; HLA-A*29:02; TDRD1; ENSG00000095627; TAA
YASEESVLVGY

SEQ ID NO: 84856 - protein, 11 aa, Homo sapiens
  Table A; Target 84856; HLA-A*30:02; TDRD1; ENSG00000095627; TAA
YASEESVLVGY

SEQ ID NO: 84857 - protein, 11 aa, Homo sapiens
  Table A; Target 84857; HLA-A*68:01; TDRD1; ENSG00000095627; TAA
YASEESVLVGY

SEQ ID NO: 84858 - protein, 11 aa, Homo sapiens
  Table A; Target 84858; HLA-B*35:01; TDRD1; ENSG00000095627; TAA
YASEESVLVGY

SEQ ID NO: 84859 - protein, 11 aa, Homo sapiens
  Table A; Target 84859; HLA-B*55:01; TDRD1; ENSG00000095627; TAA
YASEESVLVGY

SEQ ID NO: 84860 - protein, 11 aa, Homo sapiens
  Table A; Target 84860; HLA-C*02:02; TDRD1; ENSG00000095627; TAA
YASEESVLVGY

SEQ ID NO: 84861 - protein, 11 aa, Homo sapiens
  Table A; Target 84861; HLA-C*03:03; TDRD1; ENSG00000095627; TAA
YASEESVLVGY

SEQ ID NO: 84862 - protein, 11 aa, Homo sapiens
  Table A; Target 84862; HLA-C*07:06; TDRD1; ENSG00000095627; TAA
YASEESVLVGY

SEQ ID NO: 84863 - protein, 11 aa, Homo sapiens
  Table A; Target 84863; HLA-C*16:02; TDRD1; ENSG00000095627; TAA
YASEESVLVGY

SEQ ID NO: 84864 - protein, 11 aa, Homo sapiens
  Table A; Target 84864; HLA-C*16:04; TDRD1; ENSG00000095627; TAA
YASEESVLVGY

SEQ ID NO: 84865 - protein, 9 aa, Homo sapiens
  Table A; Target 84865; HLA-A*02:04; TDRD1; ENSG00000095627; TAA
YGNFEILSL

SEQ ID NO: 84866 - protein, 9 aa, Homo sapiens
  Table A; Target 84866; HLA-B*35:03; TDRD1; ENSG00000095627; TAA
YGNFEILSL

SEQ ID NO: 84867 - protein, 9 aa, Homo sapiens
  Table A; Target 84867; HLA-C*03:04; TDRD1; ENSG00000095627; TAA
YGNFEILSL

SEQ ID NO: 84868 - protein, 9 aa, Homo sapiens
  Table A; Target 84868; HLA-A*01:01; TDRD1; ENSG00000095627; TAA
YIDYGNEEI

SEQ ID NO: 84869 - protein, 9 aa, Homo sapiens
  Table A; Target 84869; HLA-A*02:07; TDRD1; ENSG00000095627; TAA
YIDYGNEEI

SEQ ID NO: 84870 - protein, 9 aa, Homo sapiens
  Table A; Target 84870; HLA-B*38:01; TDRD1; ENSG00000095627; TAA
YIDYGNEEI

SEQ ID NO: 84871 - protein, 9 aa, Homo sapiens
  Table A; Target 84871; HLA-C*05:01; TDRD1; ENSG00000095627; TAA
YIDYGNEEI

SEQ ID NO: 84872 - protein, 10 aa, Homo sapiens
  Table A; Target 84872; HLA-A*02:01; TDRD1; ENSG00000095627; TAA
YLASQEDNSV

SEQ ID NO: 84873 - protein, 10 aa, Homo sapiens
  Table A; Target 84873; HLA-A*02:03; TDRD1; ENSG00000095627; TAA
YLASQEDNSV

SEQ ID NO: 84874 - protein, 10 aa, Homo sapiens
  Table A; Target 84874; HLA-B*13:02; TDRD1; ENSG00000095627; TAA
YLASQEDNSV

SEQ ID NO: 84875 - protein, 10 aa, Homo sapiens
  Table A; Target 84875; HLA-B*39:01; TDRD1; ENSG00000095627; TAA
YLASQEDNSV

SEQ ID NO: 84876 - protein, 10 aa, Homo sapiens
  Table A; Target 84876; HLA-B*55:01; TDRD1; ENSG00000095627; TAA
YLASQEDNSV

SEQ ID NO: 84877 - protein, 9 aa, Homo sapiens
  Table A; Target 84877; HLA-A*02:01; TDRD1; ENSG00000095627; TAA
YMNQLSASL

SEQ ID NO: 84878 - protein, 9 aa, Homo sapiens
  Table A; Target 84878; HLA-A*02:03; TDRD1; ENSG00000095627; TAA
YMNQLSASL

SEQ ID NO: 84879 - protein, 9 aa, Homo sapiens
  Table A; Target 84879; HLA-A*02:04; TDRD1; ENSG00000095627; TAA
YMNQLSASL

SEQ ID NO: 84880 - protein, 9 aa, Homo sapiens
  Table A; Target 84880; HLA-A*02:07; TDRD1; ENSG00000095627; TAA
YMNQLSASL

SEQ ID NO: 84881 - protein, 9 aa, Homo sapiens
  Table A; Target 84881; HLA-A*23:01; TDRD1; ENSG00000095627; TAA
YMNQLSASL

SEQ ID NO: 84882 - protein, 9 aa, Homo sapiens
  Table A; Target 84882; HLA-A*24:02; TDRD1; ENSG00000095627; TAA
YMNQLSASL

SEQ ID NO: 84883 - protein, 9 aa, Homo sapiens
  Table A; Target 84883; HLA-A*32:01; TDRD1; ENSG00000095627; TAA
YMNQLSASL

SEQ ID NO: 84884 - protein, 9 aa, Homo sapiens
  Table A; Target 84884; HLA-B*08:01; TDRD1; ENSG00000095627; TAA
YMNQLSASL

SEQ ID NO: 84885 - protein, 9 aa, Homo sapiens
  Table A; Target 84885; HLA-B*15:01; TDRD1; ENSG00000095627; TAA
YMNQLSASL

SEQ ID NO: 84886 - protein, 9 aa, Homo sapiens
  Table A; Target 84886; HLA-B*15:03; TDRD1; ENSG00000095627; TAA
YMNQLSASL

SEQ ID NO: 84887 - protein, 9 aa, Homo sapiens
  Table A; Target 84887; HLA-B*37:01; TDRD1; ENSG00000095627; TAA
YMNQLSASL

SEQ ID NO: 84888 - protein, 9 aa, Homo sapiens
  Table A; Target 84888; HLA-B*39:01; TDRD1; ENSG00000095627; TAA
YMNQLSASL

SEQ ID NO: 84889 - protein, 9 aa, Homo sapiens
  Table A; Target 84889; HLA-B*46:01; TDRD1; ENSG00000095627; TAA
YMNQLSASL

SEQ ID NO: 84890 - protein, 9 aa, Homo sapiens
  Table A; Target 84890; HLA-C*01:02; TDRD1; ENSG00000095627; TAA
YMNQLSASL

SEQ ID NO: 84891 - protein, 9 aa, Homo sapiens
  Table A; Target 84891; HLA-C*03:03; TDRD1; ENSG00000095627; TAA
YMNQLSASL

SEQ ID NO: 84892 - protein, 9 aa, Homo sapiens
  Table A; Target 84892; HLA-C*07:02; TDRD1; ENSG00000095627; TAA
YMNQLSASL

SEQ ID NO: 84893 - protein, 9 aa, Homo sapiens
  Table A; Target 84893; HLA-C*07:04; TDRD1; ENSG00000095627; TAA
YMNQLSASL

SEQ ID NO: 84894 - protein, 9 aa, Homo sapiens
  Table A; Target 84894; HLA-C*14:02; TDRD1; ENSG00000095627; TAA
YMNQLSASL

SEQ ID NO: 84895 - protein, 10 aa, Homo sapiens
  Table A; Target 84895; HLA-A*01:01; TDRD1; ENSG00000095627; TAA
YMNQLSASLK

SEQ ID NO: 84896 - protein, 9 aa, Homo sapiens
  Table A; Target 84896; HLA-B*35:03; TDRD1; ENSG00000095627; TAA
YPAIGDICC

SEQ ID NO: 84897 - protein, 9 aa, Homo sapiens
  Table A; Target 84897; HLA-B*54:01; TDRD1; ENSG00000095627; TAA
YPAIGDICC

SEQ ID NO: 84898 - protein, 10 aa, Homo sapiens
  Table A; Target 84898; HLA-B*54:01; TDRD1; ENSG00000095627; TAA
YPAIGDICCA

SEQ ID NO: 84899 - protein, 10 aa, Homo sapiens
  Table A; Target 84899; HLA-B*56:01; TDRD1; ENSG00000095627; TAA
YPAIGDICCA

SEQ ID NO: 84900 - protein, 8 aa, Homo sapiens
  Table A; Target 84900; HLA-B*51:01; TDRD1; ENSG00000095627; TAA
YPRIISDV

SEQ ID NO: 84901 - protein, 8 aa, Homo sapiens
  Table A; Target 84901; HLA-B*54:01; TDRD1; ENSG00000095627; TAA
YPRIISDV

SEQ ID NO: 84902 - protein, 9 aa, Homo sapiens
  Table A; Target 84902; HLA-B*07:02; TDRD1; ENSG00000095627; TAA
YPRIISDVL

SEQ ID NO: 84903 - protein, 9 aa, Homo sapiens
  Table A; Target 84903; HLA-B*35:01; TDRD1; ENSG00000095627; TAA
YPRIISDVL

SEQ ID NO: 84904 - protein, 9 aa, Homo sapiens
  Table A; Target 84904; HLA-B*35:03; TDRD1; ENSG00000095627; TAA
YPRIISDVL

SEQ ID NO: 84905 - protein, 9 aa, Homo sapiens
  Table A; Target 84905; HLA-B*51:01; TDRD1; ENSG00000095627; TAA
YPRIISDVL

SEQ ID NO: 84906 - protein, 9 aa, Homo sapiens
  Table A; Target 84906; HLA-C*07:02; TDRD1; ENSG00000095627; TAA
YPRIISDVL

SEQ ID NO: 84907 - protein, 8 aa, Homo sapiens
  Table A; Target 84907; HLA-A*01:01; TDRD1; ENSG00000095627; TAA
YSSEVLEY

SEQ ID NO: 84908 - protein, 8 aa, Homo sapiens
  Table A; Target 84908; HLA-A*26:01; TDRD1; ENSG00000095627; TAA
YSSEVLEY

SEQ ID NO: 84909 - protein, 8 aa, Homo sapiens
  Table A; Target 84909; HLA-A*29:02; TDRD1; ENSG00000095627; TAA
YSSEVLEY

SEQ ID NO: 84910 - protein, 8 aa, Homo sapiens
  Table A; Target 84910; HLA-A*30:02; TDRD1; ENSG00000095627; TAA
YSSEVLEY

SEQ ID NO: 84911 - protein, 8 aa, Homo sapiens
  Table A; Target 84911; HLA-B*15:01; TDRD1; ENSG00000095627; TAA
YSSEVLEY

SEQ ID NO: 84912 - protein, 8 aa, Homo sapiens
  Table A; Target 84912; HLA-B*15:03; TDRD1; ENSG00000095627; TAA
YSSEVLEY

SEQ ID NO: 84913 - protein, 8 aa, Homo sapiens
  Table A; Target 84913; HLA-B*18:01; TDRD1; ENSG00000095627; TAA
YSSEVLEY

SEQ ID NO: 84914 - protein, 8 aa, Homo sapiens
  Table A; Target 84914; HLA-B*35:01; TDRD1; ENSG00000095627; TAA
YSSEVLEY

SEQ ID NO: 84915 - protein, 8 aa, Homo sapiens
  Table A; Target 84915; HLA-B*39:01; TDRD1; ENSG00000095627; TAA
YSSEVLEY

SEQ ID NO: 84916 - protein, 8 aa, Homo sapiens
  Table A; Target 84916; HLA-B*46:01; TDRD1; ENSG00000095627; TAA
YSSEVLEY

SEQ ID NO: 84917 - protein, 8 aa, Homo sapiens
  Table A; Target 84917; HLA-B*58:01; TDRD1; ENSG00000095627; TAA
YSSEVLEY

SEQ ID NO: 84918 - protein, 8 aa, Homo sapiens
  Table A; Target 84918; HLA-C*02:02; TDRD1; ENSG00000095627; TAA
YSSEVLEY

SEQ ID NO: 84919 - protein, 8 aa, Homo sapiens
  Table A; Target 84919; HLA-C*03:03; TDRD1; ENSG00000095627; TAA
YSSEVLEY

SEQ ID NO: 84920 - protein, 8 aa, Homo sapiens
  Table A; Target 84920; HLA-C*03:04; TDRD1; ENSG00000095627; TAA
YSSEVLEY

SEQ ID NO: 84921 - protein, 8 aa, Homo sapiens
  Table A; Target 84921; HLA-C*05:01; TDRD1; ENSG00000095627; TAA
YSSEVLEY

SEQ ID NO: 84922 - protein, 8 aa, Homo sapiens
  Table A; Target 84922; HLA-C*07:04; TDRD1; ENSG00000095627; TAA
YSSEVLEY

SEQ ID NO: 84923 - protein, 8 aa, Homo sapiens
  Table A; Target 84923; HLA-C*07:06; TDRD1; ENSG00000095627; TAA
YSSEVLEY

SEQ ID NO: 84924 - protein, 8 aa, Homo sapiens
  Table A; Target 84924; HLA-C*12:03; TDRD1; ENSG00000095627; TAA
YSSEVLEY

SEQ ID NO: 84925 - protein, 8 aa, Homo sapiens
  Table A; Target 84925; HLA-C*14:02; TDRD1; ENSG00000095627; TAA
YSSEVLEY

SEQ ID NO: 84926 - protein, 8 aa, Homo sapiens
  Table A; Target 84926; HLA-C*16:01; TDRD1; ENSG00000095627; TAA
YSSEVLEY

SEQ ID NO: 84927 - protein, 8 aa, Homo sapiens
  Table A; Target 84927; HLA-C*16:02; TDRD1; ENSG00000095627; TAA
YSSEVLEY

SEQ ID NO: 84928 - protein, 8 aa, Homo sapiens
  Table A; Target 84928; HLA-C*16:04; TDRD1; ENSG00000095627; TAA
YSSEVLEY

SEQ ID NO: 84929 - protein, 9 aa, Homo sapiens
  Table A; Target 84929; HLA-A*01:01; TDRD1; ENSG00000095627; TAA
YSSEVLEYM

SEQ ID NO: 84930 - protein, 9 aa, Homo sapiens
  Table A; Target 84930; HLA-A*02:01; TDRD1; ENSG00000095627; TAA
YSSEVLEYM

SEQ ID NO: 84931 - protein, 9 aa, Homo sapiens
  Table A; Target 84931; HLA-A*02:07; TDRD1; ENSG00000095627; TAA
YSSEVLEYM

SEQ ID NO: 84932 - protein, 9 aa, Homo sapiens
  Table A; Target 84932; HLA-A*26:01; TDRD1; ENSG00000095627; TAA
YSSEVLEYM

SEQ ID NO: 84933 - protein, 9 aa, Homo sapiens
  Table A; Target 84933; HLA-A*68:02; TDRD1; ENSG00000095627; TAA
YSSEVLEYM

SEQ ID NO: 84934 - protein, 9 aa, Homo sapiens
  Table A; Target 84934; HLA-B*35:01; TDRD1; ENSG00000095627; TAA
YSSEVLEYM

SEQ ID NO: 84935 - protein, 9 aa, Homo sapiens
  Table A; Target 84935; HLA-B*46:01; TDRD1; ENSG00000095627; TAA
YSSEVLEYM

SEQ ID NO: 84936 - protein, 9 aa, Homo sapiens
  Table A; Target 84936; HLA-C*02:02; TDRD1; ENSG00000095627; TAA
YSSEVLEYM

SEQ ID NO: 84937 - protein, 9 aa, Homo sapiens
  Table A; Target 84937; HLA-C*03:04; TDRD1; ENSG00000095627; TAA
YSSEVLEYM

SEQ ID NO: 84938 - protein, 9 aa, Homo sapiens
  Table A; Target 84938; HLA-C*05:01; TDRD1; ENSG00000095627; TAA
YSSEVLEYM

SEQ ID NO: 84939 - protein, 9 aa, Homo sapiens
  Table A; Target 84939; HLA-A*68:01; TDRD1; ENSG00000095627; TAA
YTSDDFWYR

SEQ ID NO: 84940 - protein, 9 aa, Homo sapiens
  Table A; Target 84940; HLA-A*68:02; TDRD1; ENSG00000095627; TAA
YTSDDFWYR

SEQ ID NO: 84941 - protein, 9 aa, Homo sapiens
  Table A; Target 84941; HLA-A*11:01; TDRD1; ENSG00000095627; TAA
YTVDQTWNR

SEQ ID NO: 84942 - protein, 9 aa, Homo sapiens
  Table A; Target 84942; HLA-A*31:01; TDRD1; ENSG00000095627; TAA
YTVDQTWNR

SEQ ID NO: 84943 - protein, 9 aa, Homo sapiens
  Table A; Target 84943; HLA-A*33:01; TDRD1; ENSG00000095627; TAA
YTVDQTWNR

SEQ ID NO: 84944 - protein, 9 aa, Homo sapiens
  Table A; Target 84944; HLA-A*33:03; TDRD1; ENSG00000095627; TAA
YTVDQTWNR

SEQ ID NO: 84945 - protein, 9 aa, Homo sapiens
  Table A; Target 84945; HLA-A*68:01; TDRD1; ENSG00000095627; TAA
YTVDQTWNR

SEQ ID NO: 84946 - protein, 9 aa, Homo sapiens
  Table A; Target 84946; HLA-A*68:02; TDRD1; ENSG00000095627; TAA
YTVDQTWNR

SEQ ID NO: 84947 - protein, 9 aa, Homo sapiens
  Table A; Target 84947; HLA-B*27:02; TDRD1; ENSG00000095627; TAA
YTVDQTWNR

SEQ ID NO: 84948 - protein, 9 aa, Homo sapiens
  Table A; Target 84948; HLA-C*07:06; TDRD1; ENSG00000095627; TAA
YTVDQTWNR

SEQ ID NO: 84949 - protein, 9 aa, Homo sapiens
  Table A; Target 84949; HLA-A*01:01; TDRD1; ENSG00000095627; TAA
YVDYGNFEI

SEQ ID NO: 84950 - protein, 9 aa, Homo sapiens
  Table A; Target 84950; HLA-A*02:01; TDRD1; ENSG00000095627; TAA
YVDYGNFEI

SEQ ID NO: 84951 - protein, 9 aa, Homo sapiens
  Table A; Target 84951; HLA-A*02:07; TDRD1; ENSG00000095627; TAA
YVDYGNFEI

SEQ ID NO: 84952 - protein, 9 aa, Homo sapiens
  Table A; Target 84952; HLA-C*05:01; TDRD1; ENSG00000095627; TAA
YVDYGNFEI

SEQ ID NO: 84953 - protein, 10 aa, Homo sapiens
  Table A; Target 84953; HLA-A*02:07; TDRD1; ENSG00000095627; TAA
YVDYGNFEIL

SEQ ID NO: 84954 - protein, 9 aa, Homo sapiens
  Table A; Target 84954; HLA-A*33:03; TDRD1; ENSG00000095627; TAA
YYCSTACQR

SEQ ID NO: 84955 - protein, 9 aa, Homo sapiens
  Table A; Target 84955; HLA-B*46:01; TDRD12; ENSG00000173809; TAA
AAIQYFQNL

SEQ ID NO: 84956 - protein, 9 aa, Homo sapiens
  Table A; Target 84956; HLA-B*58:01; TDRD12; ENSG00000173809; TAA
AAIQYFQNL

SEQ ID NO: 84957 - protein, 9 aa, Homo sapiens
  Table A; Target 84957; HLA-C*01:02; TDRD12; ENSG00000173809; TAA
AAIQYFQNL

SEQ ID NO: 84958 - protein, 9 aa, Homo sapiens
  Table A; Target 84958; HLA-C*02:02; TDRD12; ENSG00000173809; TAA
AAIQYFQNL

SEQ ID NO: 84959 - protein, 9 aa, Homo sapiens
  Table A; Target 84959; HLA-C*03:03; TDRD12; ENSG00000173809; TAA
AAIQYFQNL

SEQ ID NO: 84960 - protein, 9 aa, Homo sapiens
  Table A; Target 84960; HLA-C*03:04; TDRD12; ENSG00000173809; TAA
AAIQYFQNL

SEQ ID NO: 84961 - protein, 9 aa, Homo sapiens
  Table A; Target 84961; HLA-C*16:02; TDRD12; ENSG00000173809; TAA
AAIQYFQNL

SEQ ID NO: 84962 - protein, 9 aa, Homo sapiens
  Table A; Target 84962; HLA-C*16:04; TDRD12; ENSG00000173809; TAA
AAIQYFQNL

SEQ ID NO: 84963 - protein, 9 aa, Homo sapiens
  Table A; Target 84963; HLA-A*31:01; TDRD12; ENSG00000173809; TAA
ACQSLLFLR

SEQ ID NO: 84964 - protein, 9 aa, Homo sapiens
  Table A; Target 84964; HLA-A*31:01; TDRD12; ENSG00000173809; TAA
ACYKSLPSR

SEQ ID NO: 84965 - protein, 10 aa, Homo sapiens
  Table A; Target 84965; HLA-A*03:01; TDRD12; ENSG00000173809; TAA
ACYMSPTKNK

SEQ ID NO: 84966 - protein, 10 aa, Homo sapiens
  Table A; Target 84966; HLA-A*03:02; TDRD12; ENSG00000173809; TAA
ACYMSPTKNK

SEQ ID NO: 84967 - protein, 10 aa, Homo sapiens
  Table A; Target 84967; HLA-A*11:01; TDRD12; ENSG00000173809; TAA
ACYMSPTKNK

SEQ ID NO: 84968 - protein, 9 aa, Homo sapiens
  Table A; Target 84968; HLA-A*30:01; TDRD12; ENSG00000173809; TAA
ADAKVPAEL

SEQ ID NO: 84969 - protein, 9 aa, Homo sapiens
  Table A; Target 84969; HLA-B*37:01; TDRD12; ENSG00000173809; TAA
ADAKVPAEL

SEQ ID NO: 84970 - protein, 9 aa, Homo sapiens
  Table A; Target 84970; HLA-B*38:01; TDRD12; ENSG00000173809; TAA
ADAKVPAEL

SEQ ID NO: 84971 - protein, 9 aa, Homo sapiens
  Table A; Target 84971; HLA-B*39:01; TDRD12; ENSG00000173809; TAA
ADAKVPAEL

SEQ ID NO: 84972 - protein, 9 aa, Homo sapiens
  Table A; Target 84972; HLA-B*40:01; TDRD12; ENSG00000173809; TAA
ADAKVPAEL

SEQ ID NO: 84973 - protein, 9 aa, Homo sapiens
  Table A; Target 84973; HLA-B*40:02; TDRD12; ENSG00000173809; TAA
ADAKVPAEL

SEQ ID NO: 84974 - protein, 9 aa, Homo sapiens
  Table A; Target 84974; HLA-B*44:02; TDRD12; ENSG00000173809; TAA
ADAKVPAEL

SEQ ID NO: 84975 - protein, 9 aa, Homo sapiens
  Table A; Target 84975; HLA-B*44:03; TDRD12; ENSG00000173809; TAA
ADAKVPAEL

SEQ ID NO: 84976 - protein, 9 aa, Homo sapiens
  Table A; Target 84976; HLA-C*02:02; TDRD12; ENSG00000173809; TAA
ADAKVPAEL

SEQ ID NO: 84977 - protein, 9 aa, Homo sapiens
  Table A; Target 84977; HLA-C*16:02; TDRD12; ENSG00000173809; TAA
ADAKVPAEL

SEQ ID NO: 84978 - protein, 9 aa, Homo sapiens
  Table A; Target 84978; HLA-C*16:04; TDRD12; ENSG00000173809; TAA
ADAKVPAEL

SEQ ID NO: 84979 - protein, 10 aa, Homo sapiens
  Table A; Target 84979; HLA-A*30:02; TDRD12; ENSG00000173809; TAA
ADAKVPAELY

SEQ ID NO: 84980 - protein, 10 aa, Homo sapiens
  Table A; Target 84980; HLA-B*44:02; TDRD12; ENSG00000173809; TAA
ADAKVPAELY

SEQ ID NO: 84981 - protein, 10 aa, Homo sapiens
  Table A; Target 84981; HLA-B*44:03; TDRD12; ENSG00000173809; TAA
ADAKVPAELY

SEQ ID NO: 84982 - protein, 11 aa, Homo sapiens
  Table A; Target 84982; HLA-A*30:01; TDRD12; ENSG00000173809; TAA
ADPDVPEASAL

SEQ ID NO: 84983 - protein, 11 aa, Homo sapiens
  Table A; Target 84983; HLA-B*40:01; TDRD12; ENSG00000173809; TAA
ADPDVPEASAL

SEQ ID NO: 84984 - protein, 9 aa, Homo sapiens
  Table A; Target 84984; HLA-B*37:01; TDRD12; ENSG00000173809; TAA
ADQYLAECF

SEQ ID NO: 84985 - protein, 9 aa, Homo sapiens
  Table A; Target 84985; HLA-B*44:02; TDRD12; ENSG00000173809; TAA
ADQYLAECF

SEQ ID NO: 84986 - protein, 8 aa, Homo sapiens
  Table A; Target 84986; HLA-A*30:01; TDRD12; ENSG00000173809; TAA
AEILSMGM

SEQ ID NO: 84987 - protein, 8 aa, Homo sapiens
  Table A; Target 84987; HLA-B*18:01; TDRD12; ENSG00000173809; TAA
AEILSMGM

SEQ ID NO: 84988 - protein, 8 aa, Homo sapiens
  Table A; Target 84988; HLA-B*37:01; TDRD12; ENSG00000173809; TAA
AEILSMGM

SEQ ID NO: 84989 - protein, 8 aa, Homo sapiens
  Table A; Target 84989; HLA-B*40:01; TDRD12; ENSG00000173809; TAA
AEILSMGM

SEQ ID NO: 84990 - protein, 8 aa, Homo sapiens
  Table A; Target 84990; HLA-B*40:02; TDRD12; ENSG00000173809; TAA
AEILSMGM

SEQ ID NO: 84991 - protein, 8 aa, Homo sapiens
  Table A; Target 84991; HLA-B*44:02; TDRD12; ENSG00000173809; TAA
AEILSMGM

SEQ ID NO: 84992 - protein, 8 aa, Homo sapiens
  Table A; Target 84992; HLA-B*44:03; TDRD12; ENSG00000173809; TAA
AEILSMGM

SEQ ID NO: 84993 - protein, 8 aa, Homo sapiens
  Table A; Target 84993; HLA-B*49:01; TDRD12; ENSG00000173809; TAA
AEILSMGM

SEQ ID NO: 84994 - protein, 10 aa, Homo sapiens
  Table A; Target 84994; HLA-A*30:01; TDRD12; ENSG00000173809; TAA
AEILSMGMGI

SEQ ID NO: 84995 - protein, 10 aa, Homo sapiens
  Table A; Target 84995; HLA-B*27:02; TDRD12; ENSG00000173809; TAA
AEILSMGMGI

SEQ ID NO: 84996 - protein, 10 aa, Homo sapiens
  Table A; Target 84996; HLA-B*40:01; TDRD12; ENSG00000173809; TAA
AEILSMGMGI

SEQ ID NO: 84997 - protein, 10 aa, Homo sapiens
  Table A; Target 84997; HLA-B*40:02; TDRD12; ENSG00000173809; TAA
AEILSMGMGI

SEQ ID NO: 84998 - protein, 10 aa, Homo sapiens
  Table A; Target 84998; HLA-B*44:02; TDRD12; ENSG00000173809; TAA
AEILSMGMGI

SEQ ID NO: 84999 - protein, 10 aa, Homo sapiens
  Table A; Target 84999; HLA-B*44:03; TDRD12; ENSG00000173809; TAA
AEILSMGMGI

SEQ ID NO: 85000 - protein, 10 aa, Homo sapiens
  Table A; Target 85000; HLA-B*49:01; TDRD12; ENSG00000173809; TAA
AEILSMGMGI

SEQ ID NO: 85001 - protein, 10 aa, Homo sapiens
  Table A; Target 85001; HLA-C*16:04; TDRD12; ENSG00000173809; TAA
AEILSMGMGI

SEQ ID NO: 85002 - protein, 9 aa, Homo sapiens
  Table A; Target 85002; HLA-B*44:02; TDRD12; ENSG00000173809; TAA
AEKTLFHRV

SEQ ID NO: 85003 - protein, 9 aa, Homo sapiens
  Table A; Target 85003; HLA-B*49:01; TDRD12; ENSG00000173809; TAA
AEKTLFHRV

SEQ ID NO: 85004 - protein, 10 aa, Homo sapiens
  Table A; Target 85004; HLA-B*49:01; TDRD12; ENSG00000173809; TAA
AELYEFTAGV

SEQ ID NO: 85005 - protein, 11 aa, Homo sapiens
  Table A; Target 85005; HLA-B*40:01; TDRD12; ENSG00000173809; TAA
AELYEFTAGVL

SEQ ID NO: 85006 - protein, 8 aa, Homo sapiens
  Table A; Target 85006; HLA-B*37:01; TDRD12; ENSG00000173809; TAA
AETEIVCK

SEQ ID NO: 85007 - protein, 9 aa, Homo sapiens
  Table A; Target 85007; HLA-A*30:01; TDRD12; ENSG00000173809; TAA
AETEIVCKV

SEQ ID NO: 85008 - protein, 9 aa, Homo sapiens
  Table A; Target 85008; HLA-B*13:02; TDRD12; ENSG00000173809; TAA
AETEIVCKV

SEQ ID NO: 85009 - protein, 9 aa, Homo sapiens
  Table A; Target 85009; HLA-B*18:01; TDRD12; ENSG00000173809; TAA
AETEIVCKV

SEQ ID NO: 85010 - protein, 9 aa, Homo sapiens
  Table A; Target 85010; HLA-B*37:01; TDRD12; ENSG00000173809; TAA
AETEIVCKV

SEQ ID NO: 85011 - protein, 9 aa, Homo sapiens
  Table A; Target 85011; HLA-B*40:01; TDRD12; ENSG00000173809; TAA
AETEIVCKV

SEQ ID NO: 85012 - protein, 9 aa, Homo sapiens
  Table A; Target 85012; HLA-B*40:02; TDRD12; ENSG00000173809; TAA
AETEIVCKV

SEQ ID NO: 85013 - protein, 9 aa, Homo sapiens
  Table A; Target 85013; HLA-B*44:02; TDRD12; ENSG00000173809; TAA
AETEIVCKV

SEQ ID NO: 85014 - protein, 9 aa, Homo sapiens
  Table A; Target 85014; HLA-B*44:03; TDRD12; ENSG00000173809; TAA
AETEIVCKV

SEQ ID NO: 85015 - protein, 9 aa, Homo sapiens
  Table A; Target 85015; HLA-B*49:01; TDRD12; ENSG00000173809; TAA
AETEIVCKV

SEQ ID NO: 85016 - protein, 9 aa, Homo sapiens
  Table A; Target 85016; HLA-C*02:02; TDRD12; ENSG00000173809; TAA
AETEIVCKV

SEQ ID NO: 85017 - protein, 9 aa, Homo sapiens
  Table A; Target 85017; HLA-C*16:02; TDRD12; ENSG00000173809; TAA
AETEIVCKV

SEQ ID NO: 85018 - protein, 9 aa, Homo sapiens
  Table A; Target 85018; HLA-C*16:04; TDRD12; ENSG00000173809; TAA
AETEIVCKV

SEQ ID NO: 85019 - protein, 10 aa, Homo sapiens
  Table A; Target 85019; HLA-B*44:02; TDRD12; ENSG00000173809; TAA
AETEIVCKVV

SEQ ID NO: 85020 - protein, 10 aa, Homo sapiens
  Table A; Target 85020; HLA-B*44:03; TDRD12; ENSG00000173809; TAA
AETEIVCKVV

SEQ ID NO: 85021 - protein, 10 aa, Homo sapiens
  Table A; Target 85021; HLA-B*49:01; TDRD12; ENSG00000173809; TAA
AETEIVCKVV

SEQ ID NO: 85022 - protein, 8 aa, Homo sapiens
  Table A; Target 85022; HLA-A*11:01; TDRD12; ENSG00000173809; TAA
AILDNFKK

SEQ ID NO: 85023 - protein, 10 aa, Homo sapiens
  Table A; Target 85023; HLA-A*03:01; TDRD12; ENSG00000173809; TAA
AIQYFQNLLK

SEQ ID NO: 85024 - protein, 10 aa, Homo sapiens
  Table A; Target 85024; HLA-A*03:02; TDRD12; ENSG00000173809; TAA
AIQYFQNLLK

SEQ ID NO: 85025 - protein, 10 aa, Homo sapiens
  Table A; Target 85025; HLA-A*11:01; TDRD12; ENSG00000173809; TAA
AIQYFQNLLK

SEQ ID NO: 85026 - protein, 9 aa, Homo sapiens
  Table A; Target 85026; HLA-A*32:01; TDRD12; ENSG00000173809; TAA
AITDATCVI

SEQ ID NO: 85027 - protein, 9 aa, Homo sapiens
  Table A; Target 85027; HLA-B*13:02; TDRD12; ENSG00000173809; TAA
AITDATCVI

SEQ ID NO: 85028 - protein, 9 aa, Homo sapiens
  Table A; Target 85028; HLA-C*06:02; TDRD12; ENSG00000173809; TAA
AITDATCVI

SEQ ID NO: 85029 - protein, 10 aa, Homo sapiens
  Table A; Target 85029; HLA-B*56:01; TDRD12; ENSG00000173809; TAA
AIVKSITSSA

SEQ ID NO: 85030 - protein, 8 aa, Homo sapiens
  Table A; Target 85030; HLA-B*15:03; TDRD12; ENSG00000173809; TAA
AKRGITIY

SEQ ID NO: 85031 - protein, 8 aa, Homo sapiens
  Table A; Target 85031; HLA-B*15:03; TDRD12; ENSG00000173809; TAA
AKVPAELY

SEQ ID NO: 85032 - protein, 10 aa, Homo sapiens
  Table A; Target 85032; HLA-B*15:03; TDRD12; ENSG00000173809; TAA
AKVPAELYEF

SEQ ID NO: 85033 - protein, 9 aa, Homo sapiens
  Table A; Target 85033; HLA-A*01:01; TDRD12; ENSG00000173809; TAA
ALDDILVEF

SEQ ID NO: 85034 - protein, 9 aa, Homo sapiens
  Table A; Target 85034; HLA-A*02:01; TDRD12; ENSG00000173809; TAA
ALDDILVEF

SEQ ID NO: 85035 - protein, 9 aa, Homo sapiens
  Table A; Target 85035; HLA-A*02:04; TDRD12; ENSG00000173809; TAA
ALDDILVEF

SEQ ID NO: 85036 - protein, 9 aa, Homo sapiens
  Table A; Target 85036; HLA-A*02:07; TDRD12; ENSG00000173809; TAA
ALDDILVEF

SEQ ID NO: 85037 - protein, 9 aa, Homo sapiens
  Table A; Target 85037; HLA-A*23:01; TDRD12; ENSG00000173809; TAA
ALDDILVEF

SEQ ID NO: 85038 - protein, 9 aa, Homo sapiens
  Table A; Target 85038; HLA-A*24:02; TDRD12; ENSG00000173809; TAA
ALDDILVEF

SEQ ID NO: 85039 - protein, 9 aa, Homo sapiens
  Table A; Target 85039; HLA-A*29:02; TDRD12; ENSG00000173809; TAA
ALDDILVEF

SEQ ID NO: 85040 - protein, 9 aa, Homo sapiens
  Table A; Target 85040; HLA-A*32:01; TDRD12; ENSG00000173809; TAA
ALDDILVEF

SEQ ID NO: 85041 - protein, 9 aa, Homo sapiens
  Table A; Target 85041; HLA-B*15:01; TDRD12; ENSG00000173809; TAA
ALDDILVEF

SEQ ID NO: 85042 - protein, 9 aa, Homo sapiens
  Table A; Target 85042; HLA-B*35:01; TDRD12; ENSG00000173809; TAA
ALDDILVEF

SEQ ID NO: 85043 - protein, 9 aa, Homo sapiens
  Table A; Target 85043; HLA-B*35:03; TDRD12; ENSG00000173809; TAA
ALDDILVEF

SEQ ID NO: 85044 - protein, 9 aa, Homo sapiens
  Table A; Target 85044; HLA-B*37:01; TDRD12; ENSG00000173809; TAA
ALDDILVEF

SEQ ID NO: 85045 - protein, 9 aa, Homo sapiens
  Table A; Target 85045; HLA-B*38:01; TDRD12; ENSG00000173809; TAA
ALDDILVEF

SEQ ID NO: 85046 - protein, 9 aa, Homo sapiens
  Table A; Target 85046; HLA-B*46:01; TDRD12; ENSG00000173809; TAA
ALDDILVEF

SEQ ID NO: 85047 - protein, 9 aa, Homo sapiens
  Table A; Target 85047; HLA-B*55:01; TDRD12; ENSG00000173809; TAA
ALDDILVEF

SEQ ID NO: 85048 - protein, 9 aa, Homo sapiens
  Table A; Target 85048; HLA-B*58:01; TDRD12; ENSG00000173809; TAA
ALDDILVEF

SEQ ID NO: 85049 - protein, 9 aa, Homo sapiens
  Table A; Target 85049; HLA-C*02:02; TDRD12; ENSG00000173809; TAA
ALDDILVEF

SEQ ID NO: 85050 - protein, 9 aa, Homo sapiens
  Table A; Target 85050; HLA-C*04:01; TDRD12; ENSG00000173809; TAA
ALDDILVEF

SEQ ID NO: 85051 - protein, 9 aa, Homo sapiens
  Table A; Target 85051; HLA-C*05:01; TDRD12; ENSG00000173809; TAA
ALDDILVEF

SEQ ID NO: 85052 - protein, 9 aa, Homo sapiens
  Table A; Target 85052; HLA-C*07:04; TDRD12; ENSG00000173809; TAA
ALDDILVEF

SEQ ID NO: 85053 - protein, 10 aa, Homo sapiens
  Table A; Target 85053; HLA-A*02:01; TDRD12; ENSG00000173809; TAA
ALDDILVEFI

SEQ ID NO: 85054 - protein, 10 aa, Homo sapiens
  Table A; Target 85054; HLA-A*02:07; TDRD12; ENSG00000173809; TAA
ALDDILVEFI

SEQ ID NO: 85055 - protein, 9 aa, Homo sapiens
  Table A; Target 85055; HLA-A*01:01; TDRD12; ENSG00000173809; TAA
ALDFIPSQA

SEQ ID NO: 85056 - protein, 9 aa, Homo sapiens
  Table A; Target 85056; HLA-A*02:01; TDRD12; ENSG00000173809; TAA
ALDFIPSQA

SEQ ID NO: 85057 - protein, 9 aa, Homo sapiens
  Table A; Target 85057; HLA-A*02:03; TDRD12; ENSG00000173809; TAA
ALDFIPSQA

SEQ ID NO: 85058 - protein, 9 aa, Homo sapiens
  Table A; Target 85058; HLA-A*02:07; TDRD12; ENSG00000173809; TAA
ALDFIPSQA

SEQ ID NO: 85059 - protein, 9 aa, Homo sapiens
  Table A; Target 85059; HLA-B*55:01; TDRD12; ENSG00000173809; TAA
ALDFIPSQA

SEQ ID NO: 85060 - protein, 9 aa, Homo sapiens
  Table A; Target 85060; HLA-C*05:01; TDRD12; ENSG00000173809; TAA
ALDFIPSQA

SEQ ID NO: 85061 - protein, 11 aa, Homo sapiens
  Table A; Target 85061; HLA-A*03:01; TDRD12; ENSG00000173809; TAA
ALDFIPSQAQK

SEQ ID NO: 85062 - protein, 11 aa, Homo sapiens
  Table A; Target 85062; HLA-A*03:02; TDRD12; ENSG00000173809; TAA
ALDFIPSQAQK

SEQ ID NO: 85063 - protein, 8 aa, Homo sapiens
  Table A; Target 85063; HLA-A*02:07; TDRD12; ENSG00000173809; TAA
ALPSFGYI

SEQ ID NO: 85064 - protein, 10 aa, Homo sapiens
  Table A; Target 85064; HLA-A*02:07; TDRD12; ENSG00000173809; TAA
ALPSFGYIKI

SEQ ID NO: 85065 - protein, 9 aa, Homo sapiens
  Table A; Target 85065; HLA-A*03:02; TDRD12; ENSG00000173809; TAA
ALSQKSNEK

SEQ ID NO: 85066 - protein, 9 aa, Homo sapiens
  Table A; Target 85066; HLA-A*02:01; TDRD12; ENSG00000173809; TAA
ALTDDCVPL

SEQ ID NO: 85067 - protein, 10 aa, Homo sapiens
  Table A; Target 85067; HLA-A*02:01; TDRD12; ENSG00000173809; TAA
ALTDDCVPLL

SEQ ID NO: 85068 - protein, 10 aa, Homo sapiens
  Table A; Target 85068; HLA-A*02:04; TDRD12; ENSG00000173809; TAA
ALTDDCVPLL

SEQ ID NO: 85069 - protein, 9 aa, Homo sapiens
  Table A; Target 85069; HLA-A*02:04; TDRD12; ENSG00000173809; TAA
ALTLWPMFL

SEQ ID NO: 85070 - protein, 9 aa, Homo sapiens
  Table A; Target 85070; HLA-A*02:01; TDRD12; ENSG00000173809; TAA
ALYGNVQQV

SEQ ID NO: 85071 - protein, 9 aa, Homo sapiens
  Table A; Target 85071; HLA-A*02:03; TDRD12; ENSG00000173809; TAA
ALYGNVQQV

SEQ ID NO: 85072 - protein, 9 aa, Homo sapiens
  Table A; Target 85072; HLA-A*02:04; TDRD12; ENSG00000173809; TAA
ALYGNVQQV

SEQ ID NO: 85073 - protein, 9 aa, Homo sapiens
  Table A; Target 85073; HLA-A*02:07; TDRD12; ENSG00000173809; TAA
ALYGNVQQV

SEQ ID NO: 85074 - protein, 9 aa, Homo sapiens
  Table A; Target 85074; HLA-A*03:01; TDRD12; ENSG00000173809; TAA
ALYGNVQQV

SEQ ID NO: 85075 - protein, 9 aa, Homo sapiens
  Table A; Target 85075; HLA-A*30:01; TDRD12; ENSG00000173809; TAA
ALYGNVQQV

SEQ ID NO: 85076 - protein, 9 aa, Homo sapiens
  Table A; Target 85076; HLA-A*32:01; TDRD12; ENSG00000173809; TAA
ALYGNVQQV

SEQ ID NO: 85077 - protein, 9 aa, Homo sapiens
  Table A; Target 85077; HLA-B*13:02; TDRD12; ENSG00000173809; TAA
ALYGNVQQV

SEQ ID NO: 85078 - protein, 9 aa, Homo sapiens
  Table A; Target 85078; HLA-B*46:01; TDRD12; ENSG00000173809; TAA
ALYGNVQQV

SEQ ID NO: 85079 - protein, 9 aa, Homo sapiens
  Table A; Target 85079; HLA-B*49:01; TDRD12; ENSG00000173809; TAA
ALYGNVQQV

SEQ ID NO: 85080 - protein, 9 aa, Homo sapiens
  Table A; Target 85080; HLA-B*55:01; TDRD12; ENSG00000173809; TAA
ALYGNVQQV

SEQ ID NO: 85081 - protein, 9 aa, Homo sapiens
  Table A; Target 85081; HLA-B*56:01; TDRD12; ENSG00000173809; TAA
ALYGNVQQV

SEQ ID NO: 85082 - protein, 9 aa, Homo sapiens
  Table A; Target 85082; HLA-C*02:02; TDRD12; ENSG00000173809; TAA
ALYGNVQQV

SEQ ID NO: 85083 - protein, 9 aa, Homo sapiens
  Table A; Target 85083; HLA-C*06:02; TDRD12; ENSG00000173809; TAA
ALYGNVQQV

SEQ ID NO: 85084 - protein, 9 aa, Homo sapiens
  Table A; Target 85084; HLA-C*12:03; TDRD12; ENSG00000173809; TAA
ALYGNVQQV

SEQ ID NO: 85085 - protein, 9 aa, Homo sapiens
  Table A; Target 85085; HLA-C*16:02; TDRD12; ENSG00000173809; TAA
ALYGNVQQV

SEQ ID NO: 85086 - protein, 10 aa, Homo sapiens
  Table A; Target 85086; HLA-A*02:01; TDRD12; ENSG00000173809; TAA
ALYGNVQQVV

SEQ ID NO: 85087 - protein, 10 aa, Homo sapiens
  Table A; Target 85087; HLA-A*02:03; TDRD12; ENSG00000173809; TAA
ALYGNVQQVV

SEQ ID NO: 85088 - protein, 10 aa, Homo sapiens
  Table A; Target 85088; HLA-A*02:04; TDRD12; ENSG00000173809; TAA
ALYGNVQQVV

SEQ ID NO: 85089 - protein, 10 aa, Homo sapiens
  Table A; Target 85089; HLA-A*02:07; TDRD12; ENSG00000173809; TAA
ALYGNVQQVV

SEQ ID NO: 85090 - protein, 10 aa, Homo sapiens
  Table A; Target 85090; HLA-A*30:01; TDRD12; ENSG00000173809; TAA
ALYGNVQQVV

SEQ ID NO: 85091 - protein, 10 aa, Homo sapiens
  Table A; Target 85091; HLA-B*13:02; TDRD12; ENSG00000173809; TAA
ALYGNVQQVV

SEQ ID NO: 85092 - protein, 10 aa, Homo sapiens
  Table A; Target 85092; HLA-B*55:01; TDRD12; ENSG00000173809; TAA
ALYGNVQQVV

SEQ ID NO: 85093 - protein, 10 aa, Homo sapiens
  Table A; Target 85093; HLA-C*02:02; TDRD12; ENSG00000173809; TAA
ALYGNVQQVV

SEQ ID NO: 85094 - protein, 8 aa, Homo sapiens
  Table A; Target 85094; HLA-A*01:01; TDRD12; ENSG00000173809; TAA
AMEEAALY

SEQ ID NO: 85095 - protein, 8 aa, Homo sapiens
  Table A; Target 85095; HLA-B*07:02; TDRD12; ENSG00000173809; TAA
APHQIVAV

SEQ ID NO: 85096 - protein, 8 aa, Homo sapiens
  Table A; Target 85096; HLA-B*08:01; TDRD12; ENSG00000173809; TAA
APHQIVAV

SEQ ID NO: 85097 - protein, 8 aa, Homo sapiens
  Table A; Target 85097; HLA-B*51:01; TDRD12; ENSG00000173809; TAA
APHQIVAV

SEQ ID NO: 85098 - protein, 8 aa, Homo sapiens
  Table A; Target 85098; HLA-B*54:01; TDRD12; ENSG00000173809; TAA
APHQIVAV

SEQ ID NO: 85099 - protein, 8 aa, Homo sapiens
  Table A; Target 85099; HLA-B*55:01; TDRD12; ENSG00000173809; TAA
APHQIVAV

SEQ ID NO: 85100 - protein, 8 aa, Homo sapiens
  Table A; Target 85100; HLA-B*56:01; TDRD12; ENSG00000173809; TAA
APHQIVAV

SEQ ID NO: 85101 - protein, 8 aa, Homo sapiens
  Table A; Target 85101; HLA-C*07:02; TDRD12; ENSG00000173809; TAA
APHQIVAV

SEQ ID NO: 85102 - protein, 9 aa, Homo sapiens
  Table A; Target 85102; HLA-B*54:01; TDRD12; ENSG00000173809; TAA
APHQIVAVG

SEQ ID NO: 85103 - protein, 9 aa, Homo sapiens
  Table A; Target 85103; HLA-B*56:01; TDRD12; ENSG00000173809; TAA
APHQIVAVG

SEQ ID NO: 85104 - protein, 10 aa, Homo sapiens
  Table A; Target 85104; HLA-B*07:02; TDRD12; ENSG00000173809; TAA
APHQIVAVGV

SEQ ID NO: 85105 - protein, 10 aa, Homo sapiens
  Table A; Target 85105; HLA-B*56:01; TDRD12; ENSG00000173809; TAA
APHQIVAVGV

SEQ ID NO: 85106 - protein, 10 aa, Homo sapiens
  Table A; Target 85106; HLA-B*07:02; TDRD12; ENSG00000173809; TAA
APSFNKLNPA

SEQ ID NO: 85107 - protein, 10 aa, Homo sapiens
  Table A; Target 85107; HLA-B*56:01; TDRD12; ENSG00000173809; TAA
APSFNKLNPA

SEQ ID NO: 85108 - protein, 11 aa, Homo sapiens
  Table A; Target 85108; HLA-B*07:02; TDRD12; ENSG00000173809; TAA
APSFNKLNPAL

SEQ ID NO: 85109 - protein, 11 aa, Homo sapiens
  Table A; Target 85109; HLA-B*56:01; TDRD12; ENSG00000173809; TAA
APSFNKLNPAL

SEQ ID NO: 85110 - protein, 11 aa, Homo sapiens
  Table A; Target 85110; HLA-C*07:02; TDRD12; ENSG00000173809; TAA
APSFNKLNPAL

SEQ ID NO: 85111 - protein, 11 aa, Homo sapiens
  Table A; Target 85111; HLA-A*30:02; TDRD12; ENSG00000173809; TAA
AQFIFELLGEY

SEQ ID NO: 85112 - protein, 11 aa, Homo sapiens
  Table A; Target 85112; HLA-B*15:01; TDRD12; ENSG00000173809; TAA
AQFIFELLGEY

SEQ ID NO: 85113 - protein, 9 aa, Homo sapiens
  Table A; Target 85113; HLA-B*13:02; TDRD12; ENSG00000173809; TAA
AQKTLIFTC

SEQ ID NO: 85114 - protein, 8 aa, Homo sapiens
  Table A; Target 85114; HLA-A*32:01; TDRD12; ENSG00000173809; TAA
AQSLQHTW

SEQ ID NO: 85115 - protein, 8 aa, Homo sapiens
  Table A; Target 85115; HLA-B*15:01; TDRD12; ENSG00000173809; TAA
AQSLQHTW

SEQ ID NO: 85116 - protein, 8 aa, Homo sapiens
  Table A; Target 85116; HLA-B*27:02; TDRD12; ENSG00000173809; TAA
AQSLQHTW

SEQ ID NO: 85117 - protein, 8 aa, Homo sapiens
  Table A; Target 85117; HLA-B*37:01; TDRD12; ENSG00000173809; TAA
AQSLQHTW

SEQ ID NO: 85118 - protein, 8 aa, Homo sapiens
  Table A; Target 85118; HLA-B*44:02; TDRD12; ENSG00000173809; TAA
AQSLQHTW

SEQ ID NO: 85119 - protein, 8 aa, Homo sapiens
  Table A; Target 85119; HLA-B*58:01; TDRD12; ENSG00000173809; TAA
AQSLQHTW

SEQ ID NO: 85120 - protein, 8 aa, Homo sapiens
  Table A; Target 85120; HLA-C*16:04; TDRD12; ENSG00000173809; TAA
AQSLQHTW

SEQ ID NO: 85121 - protein, 8 aa, Homo sapiens
  Table A; Target 85121; HLA-B*40:02; TDRD12; ENSG00000173809; TAA
ASHAVGVL

SEQ ID NO: 85122 - protein, 8 aa, Homo sapiens
  Table A; Target 85122; HLA-C*03:04; TDRD12; ENSG00000173809; TAA
ASHAVGVL

SEQ ID NO: 85123 - protein, 8 aa, Homo sapiens
  Table A; Target 85123; HLA-C*07:04; TDRD12; ENSG00000173809; TAA
ASHAVGVL

SEQ ID NO: 85124 - protein, 8 aa, Homo sapiens
  Table A; Target 85124; HLA-C*12:03; TDRD12; ENSG00000173809; TAA
ASHAVGVL

SEQ ID NO: 85125 - protein, 9 aa, Homo sapiens
  Table A; Target 85125; HLA-A*03:01; TDRD12; ENSG00000173809; TAA
ASHAVGVLR

SEQ ID NO: 85126 - protein, 9 aa, Homo sapiens
  Table A; Target 85126; HLA-A*03:02; TDRD12; ENSG00000173809; TAA
ASHAVGVLR

SEQ ID NO: 85127 - protein, 9 aa, Homo sapiens
  Table A; Target 85127; HLA-A*11:01; TDRD12; ENSG00000173809; TAA
ASHAVGVLR

SEQ ID NO: 85128 - protein, 9 aa, Homo sapiens
  Table A; Target 85128; HLA-A*31:01; TDRD12; ENSG00000173809; TAA
ASHAVGVLR

SEQ ID NO: 85129 - protein, 9 aa, Homo sapiens
  Table A; Target 85129; HLA-A*33:01; TDRD12; ENSG00000173809; TAA
ASHAVGVLR

SEQ ID NO: 85130 - protein, 9 aa, Homo sapiens
  Table A; Target 85130; HLA-A*33:03; TDRD12; ENSG00000173809; TAA
ASHAVGVLR

SEQ ID NO: 85131 - protein, 9 aa, Homo sapiens
  Table A; Target 85131; HLA-A*68:01; TDRD12; ENSG00000173809; TAA
ASHAVGVLR

SEQ ID NO: 85132 - protein, 9 aa, Homo sapiens
  Table A; Target 85132; HLA-B*27:05; TDRD12; ENSG00000173809; TAA
ASHAVGVLR

SEQ ID NO: 85133 - protein, 9 aa, Homo sapiens
  Table A; Target 85133; HLA-B*57:01; TDRD12; ENSG00000173809; TAA
ASHAVGVLR

SEQ ID NO: 85134 - protein, 9 aa, Homo sapiens
  Table A; Target 85134; HLA-B*58:01; TDRD12; ENSG00000173809; TAA
ASHAVGVLR

SEQ ID NO: 85135 - protein, 9 aa, Homo sapiens
  Table A; Target 85135; HLA-C*07:06; TDRD12; ENSG00000173809; TAA
ASHAVGVLR

SEQ ID NO: 85136 - protein, 10 aa, Homo sapiens
  Table A; Target 85136; HLA-A*01:01; TDRD12; ENSG00000173809; TAA
ASHAVGVLRY

SEQ ID NO: 85137 - protein, 10 aa, Homo sapiens
  Table A; Target 85137; HLA-A*29:02; TDRD12; ENSG00000173809; TAA
ASHAVGVLRY

SEQ ID NO: 85138 - protein, 10 aa, Homo sapiens
  Table A; Target 85138; HLA-A*30:02; TDRD12; ENSG00000173809; TAA
ASHAVGVLRY

SEQ ID NO: 85139 - protein, 10 aa, Homo sapiens
  Table A; Target 85139; HLA-B*44:03; TDRD12; ENSG00000173809; TAA
ASHAVGVLRY

SEQ ID NO: 85140 - protein, 10 aa, Homo sapiens
  Table A; Target 85140; HLA-B*57:01; TDRD12; ENSG00000173809; TAA
ASHAVGVLRY

SEQ ID NO: 85141 - protein, 9 aa, Homo sapiens
  Table A; Target 85141; HLA-A*03:01; TDRD12; ENSG00000173809; TAA
ATAQDKAVK

SEQ ID NO: 85142 - protein, 9 aa, Homo sapiens
  Table A; Target 85142; HLA-A*03:02; TDRD12; ENSG00000173809; TAA
ATAQDKAVK

SEQ ID NO: 85143 - protein, 9 aa, Homo sapiens
  Table A; Target 85143; HLA-A*11:01; TDRD12; ENSG00000173809; TAA
ATAQDKAVK

SEQ ID NO: 85144 - protein, 9 aa, Homo sapiens
  Table A; Target 85144; HLA-A*29:02; TDRD12; ENSG00000173809; TAA
ATCVIHFSF

SEQ ID NO: 85145 - protein, 9 aa, Homo sapiens
  Table A; Target 85145; HLA-A*32:01; TDRD12; ENSG00000173809; TAA
ATCVIHFSF

SEQ ID NO: 85146 - protein, 9 aa, Homo sapiens
  Table A; Target 85146; HLA-B*57:01; TDRD12; ENSG00000173809; TAA
ATCVIHFSF

SEQ ID NO: 85147 - protein, 10 aa, Homo sapiens
  Table A; Target 85147; HLA-A*01:01; TDRD12; ENSG00000173809; TAA
ATLNAEMNEY

SEQ ID NO: 85148 - protein, 10 aa, Homo sapiens
  Table A; Target 85148; HLA-A*03:02; TDRD12; ENSG00000173809; TAA
ATLNAEMNEY

SEQ ID NO: 85149 - protein, 10 aa, Homo sapiens
  Table A; Target 85149; HLA-A*11:01; TDRD12; ENSG00000173809; TAA
ATLNAEMNEY

SEQ ID NO: 85150 - protein, 10 aa, Homo sapiens
  Table A; Target 85150; HLA-A*25:01; TDRD12; ENSG00000173809; TAA
ATLNAEMNEY

SEQ ID NO: 85151 - protein, 10 aa, Homo sapiens
  Table A; Target 85151; HLA-A*26:01; TDRD12; ENSG00000173809; TAA
ATLNAEMNEY

SEQ ID NO: 85152 - protein, 10 aa, Homo sapiens
  Table A; Target 85152; HLA-A*29:02; TDRD12; ENSG00000173809; TAA
ATLNAEMNEY

SEQ ID NO: 85153 - protein, 10 aa, Homo sapiens
  Table A; Target 85153; HLA-A*30:02; TDRD12; ENSG00000173809; TAA
ATLNAEMNEY

SEQ ID NO: 85154 - protein, 10 aa, Homo sapiens
  Table A; Target 85154; HLA-A*32:01; TDRD12; ENSG00000173809; TAA
ATLNAEMNEY

SEQ ID NO: 85155 - protein, 10 aa, Homo sapiens
  Table A; Target 85155; HLA-B*15:01; TDRD12; ENSG00000173809; TAA
ATLNAEMNEY

SEQ ID NO: 85156 - protein, 10 aa, Homo sapiens
  Table A; Target 85156; HLA-B*15:03; TDRD12; ENSG00000173809; TAA
ATLNAEMNEY

SEQ ID NO: 85157 - protein, 10 aa, Homo sapiens
  Table A; Target 85157; HLA-B*27:02; TDRD12; ENSG00000173809; TAA
ATLNAEMNEY

SEQ ID NO: 85158 - protein, 10 aa, Homo sapiens
  Table A; Target 85158; HLA-B*39:01; TDRD12; ENSG00000173809; TAA
ATLNAEMNEY

SEQ ID NO: 85159 - protein, 10 aa, Homo sapiens
  Table A; Target 85159; HLA-B*46:01; TDRD12; ENSG00000173809; TAA
ATLNAEMNEY

SEQ ID NO: 85160 - protein, 10 aa, Homo sapiens
  Table A; Target 85160; HLA-B*57:01; TDRD12; ENSG00000173809; TAA
ATLNAEMNEY

SEQ ID NO: 85161 - protein, 10 aa, Homo sapiens
  Table A; Target 85161; HLA-B*58:01; TDRD12; ENSG00000173809; TAA
ATLNAEMNEY

SEQ ID NO: 85162 - protein, 10 aa, Homo sapiens
  Table A; Target 85162; HLA-C*01:02; TDRD12; ENSG00000173809; TAA
ATLNAEMNEY

SEQ ID NO: 85163 - protein, 10 aa, Homo sapiens
  Table A; Target 85163; HLA-C*03:04; TDRD12; ENSG00000173809; TAA
ATLNAEMNEY

SEQ ID NO: 85164 - protein, 10 aa, Homo sapiens
  Table A; Target 85164; HLA-C*16:04; TDRD12; ENSG00000173809; TAA
ATLNAEMNEY

SEQ ID NO: 85165 - protein, 11 aa, Homo sapiens
  Table A; Target 85165; HLA-B*57:01; TDRD12; ENSG00000173809; TAA
ATLNAEMNEYF

SEQ ID NO: 85166 - protein, 11 aa, Homo sapiens
  Table A; Target 85166; HLA-B*58:01; TDRD12; ENSG00000173809; TAA
ATLNAEMNEYF

SEQ ID NO: 85167 - protein, 9 aa, Homo sapiens
  Table A; Target 85167; HLA-A*11:01; TDRD12; ENSG00000173809; TAA
ATTQVEARL

SEQ ID NO: 85168 - protein, 9 aa, Homo sapiens
  Table A; Target 85168; HLA-A*32:01; TDRD12; ENSG00000173809; TAA
ATTQVEARL

SEQ ID NO: 85169 - protein, 9 aa, Homo sapiens
  Table A; Target 85169; HLA-A*68:02; TDRD12; ENSG00000173809; TAA
ATTQVEARL

SEQ ID NO: 85170 - protein, 9 aa, Homo sapiens
  Table A; Target 85170; HLA-B*27:05; TDRD12; ENSG00000173809; TAA
ATTQVEARL

SEQ ID NO: 85171 - protein, 9 aa, Homo sapiens
  Table A; Target 85171; HLA-B*38:01; TDRD12; ENSG00000173809; TAA
ATTQVEARL

SEQ ID NO: 85172 - protein, 9 aa, Homo sapiens
  Table A; Target 85172; HLA-B*40:01; TDRD12; ENSG00000173809; TAA
ATTQVEARL

SEQ ID NO: 85173 - protein, 9 aa, Homo sapiens
  Table A; Target 85173; HLA-B*44:03; TDRD12; ENSG00000173809; TAA
ATTQVEARL

SEQ ID NO: 85174 - protein, 9 aa, Homo sapiens
  Table A; Target 85174; HLA-B*57:01; TDRD12; ENSG00000173809; TAA
ATTQVEARL

SEQ ID NO: 85175 - protein, 9 aa, Homo sapiens
  Table A; Target 85175; HLA-B*58:01; TDRD12; ENSG00000173809; TAA
ATTQVEARL

SEQ ID NO: 85176 - protein, 9 aa, Homo sapiens
  Table A; Target 85176; HLA-C*07:06; TDRD12; ENSG00000173809; TAA
ATTQVEARL

SEQ ID NO: 85177 - protein, 9 aa, Homo sapiens
  Table A; Target 85177; HLA-C*16:01; TDRD12; ENSG00000173809; TAA
ATTQVEARL

SEQ ID NO: 85178 - protein, 9 aa, Homo sapiens
  Table A; Target 85178; HLA-C*16:02; TDRD12; ENSG00000173809; TAA
ATTQVEARL

SEQ ID NO: 85179 - protein, 9 aa, Homo sapiens
  Table A; Target 85179; HLA-A*02:01; TDRD12; ENSG00000173809; TAA
AVEEDTFEV

SEQ ID NO: 85180 - protein, 9 aa, Homo sapiens
  Table A; Target 85180; HLA-A*02:07; TDRD12; ENSG00000173809; TAA
AVEEDTFEV

SEQ ID NO: 85181 - protein, 9 aa, Homo sapiens
  Table A; Target 85181; HLA-B*13:02; TDRD12; ENSG00000173809; TAA
AVEEDTFEV

SEQ ID NO: 85182 - protein, 9 aa, Homo sapiens
  Table A; Target 85182; HLA-C*05:01; TDRD12; ENSG00000173809; TAA
AVEEDTFEV

SEQ ID NO: 85183 - protein, 10 aa, Homo sapiens
  Table A; Target 85183; HLA-A*01:01; TDRD12; ENSG00000173809; TAA
AVEEDTFEVY

SEQ ID NO: 85184 - protein, 10 aa, Homo sapiens
  Table A; Target 85184; HLA-A*25:01; TDRD12; ENSG00000173809; TAA
AVEEDTFEVY

SEQ ID NO: 85185 - protein, 10 aa, Homo sapiens
  Table A; Target 85185; HLA-A*30:02; TDRD12; ENSG00000173809; TAA
AVEEDTFEVY

SEQ ID NO: 85186 - protein, 10 aa, Homo sapiens
  Table A; Target 85186; HLA-B*15:01; TDRD12; ENSG00000173809; TAA
AVEEDTFEVY

SEQ ID NO: 85187 - protein, 10 aa, Homo sapiens
  Table A; Target 85187; HLA-B*35:01; TDRD12; ENSG00000173809; TAA
AVEEDTFEVY

SEQ ID NO: 85188 - protein, 10 aa, Homo sapiens
  Table A; Target 85188; HLA-C*05:01; TDRD12; ENSG00000173809; TAA
AVEEDTFEVY

SEQ ID NO: 85189 - protein, 11 aa, Homo sapiens
  Table A; Target 85189; HLA-A*02:01; TDRD12; ENSG00000173809; TAA
AVEEDTFEVYL

SEQ ID NO: 85190 - protein, 11 aa, Homo sapiens
  Table A; Target 85190; HLA-A*02:07; TDRD12; ENSG00000173809; TAA
AVEEDTFEVYL

SEQ ID NO: 85191 - protein, 8 aa, Homo sapiens
  Table A; Target 85191; HLA-A*11:01; TDRD12; ENSG00000173809; TAA
AVGVHWNK

SEQ ID NO: 85192 - protein, 9 aa, Homo sapiens
  Table A; Target 85192; HLA-C*01:02; TDRD12; ENSG00000173809; TAA
AVKCNMDSL

SEQ ID NO: 85193 - protein, 11 aa, Homo sapiens
  Table A; Target 85193; HLA-B*15:01; TDRD12; ENSG00000173809; TAA
CAVEEDTFEVY

SEQ ID NO: 85194 - protein, 11 aa, Homo sapiens
  Table A; Target 85194; HLA-B*35:01; TDRD12; ENSG00000173809; TAA
CAVEEDTFEVY

SEQ ID NO: 85195 - protein, 9 aa, Homo sapiens
  Table A; Target 85195; HLA-B*18:01; TDRD12; ENSG00000173809; TAA
CDVIVTTPY

SEQ ID NO: 85196 - protein, 9 aa, Homo sapiens
  Table A; Target 85196; HLA-C*04:01; TDRD12; ENSG00000173809; TAA
CDVIVTTPY

SEQ ID NO: 85197 - protein, 9 aa, Homo sapiens
  Table A; Target 85197; HLA-C*07:01; TDRD12; ENSG00000173809; TAA
CDVIVTTPY

SEQ ID NO: 85198 - protein, 8 aa, Homo sapiens
  Table A; Target 85198; HLA-B*18:01; TDRD12; ENSG00000173809; TAA
CDVVVISH

SEQ ID NO: 85199 - protein, 8 aa, Homo sapiens
  Table A; Target 85199; HLA-B*18:01; TDRD12; ENSG00000173809; TAA
CESNPLLY

SEQ ID NO: 85200 - protein, 8 aa, Homo sapiens
  Table A; Target 85200; HLA-B*37:01; TDRD12; ENSG00000173809; TAA
CESNPLLY

SEQ ID NO: 85201 - protein, 8 aa, Homo sapiens
  Table A; Target 85201; HLA-B*44:03; TDRD12; ENSG00000173809; TAA
CESNPLLY

SEQ ID NO: 85202 - protein, 9 aa, Homo sapiens
  Table A; Target 85202; HLA-B*44:02; TDRD12; ENSG00000173809; TAA
CESNPLLYL

SEQ ID NO: 85203 - protein, 9 aa, Homo sapiens
  Table A; Target 85203; HLA-B*44:03; TDRD12; ENSG00000173809; TAA
CESNPLLYL

SEQ ID NO: 85204 - protein, 9 aa, Homo sapiens
  Table A; Target 85204; HLA-B*49:01; TDRD12; ENSG00000173809; TAA
CESNPLLYL

SEQ ID NO: 85205 - protein, 9 aa, Homo sapiens
  Table A; Target 85205; HLA-B*08:01; TDRD12; ENSG00000173809; TAA
CPYLKAFGF

SEQ ID NO: 85206 - protein, 11 aa, Homo sapiens
  Table A; Target 85206; HLA-B*57:01; TDRD12; ENSG00000173809; TAA
CTKPVTLHIDF

SEQ ID NO: 85207 - protein, 9 aa, Homo sapiens
  Table A; Target 85207; HLA-A*03:01; TDRD12; ENSG00000173809; TAA
CVNDDLVAK

SEQ ID NO: 85208 - protein, 9 aa, Homo sapiens
  Table A; Target 85208; HLA-A*03:02; TDRD12; ENSG00000173809; TAA
CVNDDLVAK

SEQ ID NO: 85209 - protein, 9 aa, Homo sapiens
  Table A; Target 85209; HLA-A*11:01; TDRD12; ENSG00000173809; TAA
CVNDDLVAK

SEQ ID NO: 85210 - protein, 9 aa, Homo sapiens
  Table A; Target 85210; HLA-A*31:01; TDRD12; ENSG00000173809; TAA
CVNDDLVAK

SEQ ID NO: 85211 - protein, 9 aa, Homo sapiens
  Table A; Target 85211; HLA-A*68:01; TDRD12; ENSG00000173809; TAA
CVNDDLVAK

SEQ ID NO: 85212 - protein, 9 aa, Homo sapiens
  Table A; Target 85212; HLA-C*07:06; TDRD12; ENSG00000173809; TAA
CVNDDLVAK

SEQ ID NO: 85213 - protein, 11 aa, Homo sapiens
  Table A; Target 85213; HLA-A*29:02; TDRD12; ENSG00000173809; TAA
CVNDDLVAKNY

SEQ ID NO: 85214 - protein, 11 aa, Homo sapiens
  Table A; Target 85214; HLA-A*30:02; TDRD12; ENSG00000173809; TAA
CVNDDLVAKNY

SEQ ID NO: 85215 - protein, 9 aa, Homo sapiens
  Table A; Target 85215; HLA-A*33:01; TDRD12; ENSG00000173809; TAA
DAKIPACEE

SEQ ID NO: 85216 - protein, 8 aa, Homo sapiens
  Table A; Target 85216; HLA-A*25:01; TDRD12; ENSG00000173809; TAA
DAKVILAL

SEQ ID NO: 85217 - protein, 8 aa, Homo sapiens
  Table A; Target 85217; HLA-B*08:01; TDRD12; ENSG00000173809; TAA
DAKVILAL

SEQ ID NO: 85218 - protein, 8 aa, Homo sapiens
  Table A; Target 85218; HLA-B*18:01; TDRD12; ENSG00000173809; TAA
DAKVILAL

SEQ ID NO: 85219 - protein, 8 aa, Homo sapiens
  Table A; Target 85219; HLA-B*51:01; TDRD12; ENSG00000173809; TAA
DAKVILAL

SEQ ID NO: 85220 - protein, 9 aa, Homo sapiens
  Table A; Target 85220; HLA-A*33:01; TDRD12; ENSG00000173809; TAA
DAKVILALG

SEQ ID NO: 85221 - protein, 8 aa, Homo sapiens
  Table A; Target 85221; HLA-A*33:01; TDRD12; ENSG00000173809; TAA
DAKVPAEL

SEQ ID NO: 85222 - protein, 8 aa, Homo sapiens
  Table A; Target 85222; HLA-B*08:01; TDRD12; ENSG00000173809; TAA
DAKVPAEL

SEQ ID NO: 85223 - protein, 8 aa, Homo sapiens
  Table A; Target 85223; HLA-B*51:01; TDRD12; ENSG00000173809; TAA
DAKVPAEL

SEQ ID NO: 85224 - protein, 8 aa, Homo sapiens
  Table A; Target 85224; HLA-C*03:04; TDRD12; ENSG00000173809; TAA
DAKVPAEL

SEQ ID NO: 85225 - protein, 9 aa, Homo sapiens
  Table A; Target 85225; HLA-A*01:01; TDRD12; ENSG00000173809; TAA
DAKVPAELY

SEQ ID NO: 85226 - protein, 9 aa, Homo sapiens
  Table A; Target 85226; HLA-A*25:01; TDRD12; ENSG00000173809; TAA
DAKVPAELY

SEQ ID NO: 85227 - protein, 9 aa, Homo sapiens
  Table A; Target 85227; HLA-A*26:01; TDRD12; ENSG00000173809; TAA
DAKVPAELY

SEQ ID NO: 85228 - protein, 9 aa, Homo sapiens
  Table A; Target 85228; HLA-A*29:02; TDRD12; ENSG00000173809; TAA
DAKVPAELY

SEQ ID NO: 85229 - protein, 9 aa, Homo sapiens
  Table A; Target 85229; HLA-A*30:02; TDRD12; ENSG00000173809; TAA
DAKVPAELY

SEQ ID NO: 85230 - protein, 9 aa, Homo sapiens
  Table A; Target 85230; HLA-A*33:01; TDRD12; ENSG00000173809; TAA
DAKVPAELY

SEQ ID NO: 85231 - protein, 9 aa, Homo sapiens
  Table A; Target 85231; HLA-A*33:03; TDRD12; ENSG00000173809; TAA
DAKVPAELY

SEQ ID NO: 85232 - protein, 9 aa, Homo sapiens
  Table A; Target 85232; HLA-A*68:01; TDRD12; ENSG00000173809; TAA
DAKVPAELY

SEQ ID NO: 85233 - protein, 9 aa, Homo sapiens
  Table A; Target 85233; HLA-B*15:01; TDRD12; ENSG00000173809; TAA
DAKVPAELY

SEQ ID NO: 85234 - protein, 9 aa, Homo sapiens
  Table A; Target 85234; HLA-B*15:03; TDRD12; ENSG00000173809; TAA
DAKVPAELY

SEQ ID NO: 85235 - protein, 9 aa, Homo sapiens
  Table A; Target 85235; HLA-B*18:01; TDRD12; ENSG00000173809; TAA
DAKVPAELY

SEQ ID NO: 85236 - protein, 9 aa, Homo sapiens
  Table A; Target 85236; HLA-B*35:01; TDRD12; ENSG00000173809; TAA
DAKVPAELY

SEQ ID NO: 85237 - protein, 9 aa, Homo sapiens
  Table A; Target 85237; HLA-B*46:01; TDRD12; ENSG00000173809; TAA
DAKVPAELY

SEQ ID NO: 85238 - protein, 9 aa, Homo sapiens
  Table A; Target 85238; HLA-B*51:01; TDRD12; ENSG00000173809; TAA
DAKVPAELY

SEQ ID NO: 85239 - protein, 9 aa, Homo sapiens
  Table A; Target 85239; HLA-C*02:02; TDRD12; ENSG00000173809; TAA
DAKVPAELY

SEQ ID NO: 85240 - protein, 9 aa, Homo sapiens
  Table A; Target 85240; HLA-C*03:03; TDRD12; ENSG00000173809; TAA
DAKVPAELY

SEQ ID NO: 85241 - protein, 9 aa, Homo sapiens
  Table A; Target 85241; HLA-C*07:01; TDRD12; ENSG00000173809; TAA
DAKVPAELY

SEQ ID NO: 85242 - protein, 9 aa, Homo sapiens
  Table A; Target 85242; HLA-C*07:04; TDRD12; ENSG00000173809; TAA
DAKVPAELY

SEQ ID NO: 85243 - protein, 9 aa, Homo sapiens
  Table A; Target 85243; HLA-C*07:06; TDRD12; ENSG00000173809; TAA
DAKVPAELY

SEQ ID NO: 85244 - protein, 9 aa, Homo sapiens
  Table A; Target 85244; HLA-C*12:03; TDRD12; ENSG00000173809; TAA
DAKVPAELY

SEQ ID NO: 85245 - protein, 9 aa, Homo sapiens
  Table A; Target 85245; HLA-C*16:04; TDRD12; ENSG00000173809; TAA
DAKVPAELY

SEQ ID NO: 85246 - protein, 11 aa, Homo sapiens
  Table A; Target 85246; HLA-A*33:01; TDRD12; ENSG00000173809; TAA
DAKVPAELYEF

SEQ ID NO: 85247 - protein, 8 aa, Homo sapiens
  Table A; Target 85247; HLA-B*51:01; TDRD12; ENSG00000173809; TAA
DASHAVGV

SEQ ID NO: 85248 - protein, 9 aa, Homo sapiens
  Table A; Target 85248; HLA-A*25:01; TDRD12; ENSG00000173809; TAA
DASHAVGVL

SEQ ID NO: 85249 - protein, 9 aa, Homo sapiens
  Table A; Target 85249; HLA-A*26:01; TDRD12; ENSG00000173809; TAA
DASHAVGVL

SEQ ID NO: 85250 - protein, 9 aa, Homo sapiens
  Table A; Target 85250; HLA-A*33:01; TDRD12; ENSG00000173809; TAA
DASHAVGVL

SEQ ID NO: 85251 - protein, 9 aa, Homo sapiens
  Table A; Target 85251; HLA-A*68:01; TDRD12; ENSG00000173809; TAA
DASHAVGVL

SEQ ID NO: 85252 - protein, 9 aa, Homo sapiens
  Table A; Target 85252; HLA-B*35:01; TDRD12; ENSG00000173809; TAA
DASHAVGVL

SEQ ID NO: 85253 - protein, 9 aa, Homo sapiens
  Table A; Target 85253; HLA-B*35:03; TDRD12; ENSG00000173809; TAA
DASHAVGVL

SEQ ID NO: 85254 - protein, 9 aa, Homo sapiens
  Table A; Target 85254; HLA-B*39:01; TDRD12; ENSG00000173809; TAA
DASHAVGVL

SEQ ID NO: 85255 - protein, 9 aa, Homo sapiens
  Table A; Target 85255; HLA-B*51:01; TDRD12; ENSG00000173809; TAA
DASHAVGVL

SEQ ID NO: 85256 - protein, 9 aa, Homo sapiens
  Table A; Target 85256; HLA-C*03:04; TDRD12; ENSG00000173809; TAA
DASHAVGVL

SEQ ID NO: 85257 - protein, 9 aa, Homo sapiens
  Table A; Target 85257; HLA-C*05:01; TDRD12; ENSG00000173809; TAA
DASHAVGVL

SEQ ID NO: 85258 - protein, 9 aa, Homo sapiens
  Table A; Target 85258; HLA-C*07:02; TDRD12; ENSG00000173809; TAA
DASHAVGVL

SEQ ID NO: 85259 - protein, 9 aa, Homo sapiens
  Table A; Target 85259; HLA-C*07:06; TDRD12; ENSG00000173809; TAA
DASHAVGVL

SEQ ID NO: 85260 - protein, 9 aa, Homo sapiens
  Table A; Target 85260; HLA-C*12:03; TDRD12; ENSG00000173809; TAA
DASHAVGVL

SEQ ID NO: 85261 - protein, 10 aa, Homo sapiens
  Table A; Target 85261; HLA-A*33:01; TDRD12; ENSG00000173809; TAA
DASHAVGVLR

SEQ ID NO: 85262 - protein, 10 aa, Homo sapiens
  Table A; Target 85262; HLA-A*33:03; TDRD12; ENSG00000173809; TAA
DASHAVGVLR

SEQ ID NO: 85263 - protein, 10 aa, Homo sapiens
  Table A; Target 85263; HLA-A*68:01; TDRD12; ENSG00000173809; TAA
DASHAVGVLR

SEQ ID NO: 85264 - protein, 10 aa, Homo sapiens
  Table A; Target 85264; HLA-A*68:02; TDRD12; ENSG00000173809; TAA
DASHAVGVLR

SEQ ID NO: 85265 - protein, 10 aa, Homo sapiens
  Table A; Target 85265; HLA-B*27:02; TDRD12; ENSG00000173809; TAA
DASHAVGVLR

SEQ ID NO: 85266 - protein, 10 aa, Homo sapiens
  Table A; Target 85266; HLA-C*07:06; TDRD12; ENSG00000173809; TAA
DASHAVGVLR

SEQ ID NO: 85267 - protein, 11 aa, Homo sapiens
  Table A; Target 85267; HLA-A*01:01; TDRD12; ENSG00000173809; TAA
DASHAVGVLRY

SEQ ID NO: 85268 - protein, 11 aa, Homo sapiens
  Table A; Target 85268; HLA-A*25:01; TDRD12; ENSG00000173809; TAA
DASHAVGVLRY

SEQ ID NO: 85269 - protein, 11 aa, Homo sapiens
  Table A; Target 85269; HLA-A*26:01; TDRD12; ENSG00000173809; TAA
DASHAVGVLRY

SEQ ID NO: 85270 - protein, 11 aa, Homo sapiens
  Table A; Target 85270; HLA-A*68:01; TDRD12; ENSG00000173809; TAA
DASHAVGVLRY

SEQ ID NO: 85271 - protein, 8 aa, Homo sapiens
  Table A; Target 85271; HLA-B*51:01; TDRD12; ENSG00000173809; TAA
DATCVIHF

SEQ ID NO: 85272 - protein, 8 aa, Homo sapiens
  Table A; Target 85272; HLA-B*51:01; TDRD12; ENSG00000173809; TAA
DAWALDDI

SEQ ID NO: 85273 - protein, 9 aa, Homo sapiens
  Table A; Target 85273; HLA-B*35:03; TDRD12; ENSG00000173809; TAA
DAWALDDIL

SEQ ID NO: 85274 - protein, 8 aa, Homo sapiens
  Table A; Target 85274; HLA-B*51:01; TDRD12; ENSG00000173809; TAA
DCVPLLAI

SEQ ID NO: 85275 - protein, 8 aa, Homo sapiens
  Table A; Target 85275; HLA-B*18:01; TDRD12; ENSG00000173809; TAA
DDILVEFI

SEQ ID NO: 85276 - protein, 8 aa, Homo sapiens
  Table A; Target 85276; HLA-B*18:01; TDRD12; ENSG00000173809; TAA
DDLVAKNY

SEQ ID NO: 85277 - protein, 8 aa, Homo sapiens
  Table A; Target 85277; HLA-B*37:01; TDRD12; ENSG00000173809; TAA
DDLVAKNY

SEQ ID NO: 85278 - protein, 8 aa, Homo sapiens
  Table A; Target 85278; HLA-B*44:02; TDRD12; ENSG00000173809; TAA
DDLVAKNY

SEQ ID NO: 85279 - protein, 8 aa, Homo sapiens
  Table A; Target 85279; HLA-B*44:03; TDRD12; ENSG00000173809; TAA
DDLVAKNY

SEQ ID NO: 85280 - protein, 8 aa, Homo sapiens
  Table A; Target 85280; HLA-C*07:01; TDRD12; ENSG00000173809; TAA
DDLVAKNY

SEQ ID NO: 85281 - protein, 8 aa, Homo sapiens
  Table A; Target 85281; HLA-C*12:03; TDRD12; ENSG00000173809; TAA
DDLVAKNY

SEQ ID NO: 85282 - protein, 9 aa, Homo sapiens
  Table A; Target 85282; HLA-B*18:01; TDRD12; ENSG00000173809; TAA
DEKNSCVKL

SEQ ID NO: 85283 - protein, 8 aa, Homo sapiens
  Table A; Target 85283; HLA-B*18:01; TDRD12; ENSG00000173809; TAA
DEVEVLFL

SEQ ID NO: 85284 - protein, 8 aa, Homo sapiens
  Table A; Target 85284; HLA-B*49:01; TDRD12; ENSG00000173809; TAA
DEVEVLFL

SEQ ID NO: 85285 - protein, 10 aa, Homo sapiens
  Table A; Target 85285; HLA-B*18:01; TDRD12; ENSG00000173809; TAA
DEVEVLFLEA

SEQ ID NO: 85286 - protein, 9 aa, Homo sapiens
  Table A; Target 85286; HLA-A*33:01; TDRD12; ENSG00000173809; TAA
DFAKNIPVK

SEQ ID NO: 85287 - protein, 9 aa, Homo sapiens
  Table A; Target 85287; HLA-A*33:03; TDRD12; ENSG00000173809; TAA
DFAKNIPVK

SEQ ID NO: 85288 - protein, 9 aa, Homo sapiens
  Table A; Target 85288; HLA-A*33:01; TDRD12; ENSG00000173809; TAA
DFIPSQAQK

SEQ ID NO: 85289 - protein, 9 aa, Homo sapiens
  Table A; Target 85289; HLA-A*33:03; TDRD12; ENSG00000173809; TAA
DFIPSQAQK

SEQ ID NO: 85290 - protein, 9 aa, Homo sapiens
  Table A; Target 85290; HLA-A*68:01; TDRD12; ENSG00000173809; TAA
DFIPSQAQK

SEQ ID NO: 85291 - protein, 11 aa, Homo sapiens
  Table A; Target 85291; HLA-A*23:01; TDRD12; ENSG00000173809; TAA
DFIPSQAQKTL

SEQ ID NO: 85292 - protein, 9 aa, Homo sapiens
  Table A; Target 85292; HLA-A*25:01; TDRD12; ENSG00000173809; TAA
DGISDLQQL

SEQ ID NO: 85293 - protein, 9 aa, Homo sapiens
  Table A; Target 85293; HLA-B*35:03; TDRD12; ENSG00000173809; TAA
DGISDLQQL

SEQ ID NO: 85294 - protein, 9 aa, Homo sapiens
  Table A; Target 85294; HLA-B*38:01; TDRD12; ENSG00000173809; TAA
DGISDLQQL

SEQ ID NO: 85295 - protein, 9 aa, Homo sapiens
  Table A; Target 85295; HLA-B*27:05; TDRD12; ENSG00000173809; TAA
DHDVDYQKL

SEQ ID NO: 85296 - protein, 9 aa, Homo sapiens
  Table A; Target 85296; HLA-B*38:01; TDRD12; ENSG00000173809; TAA
DHDVDYQKL

SEQ ID NO: 85297 - protein, 9 aa, Homo sapiens
  Table A; Target 85297; HLA-B*39:01; TDRD12; ENSG00000173809; TAA
DHDVDYQKL

SEQ ID NO: 85298 - protein, 9 aa, Homo sapiens
  Table A; Target 85298; HLA-B*08:01; TDRD12; ENSG00000173809; TAA
DIEIKPLTL

SEQ ID NO: 85299 - protein, 8 aa, Homo sapiens
  Table A; Target 85299; HLA-B*08:01; TDRD12; ENSG00000173809; TAA
DKKAKSVL

SEQ ID NO: 85300 - protein, 8 aa, Homo sapiens
  Table A; Target 85300; HLA-A*33:01; TDRD12; ENSG00000173809; TAA
DLKKALQR

SEQ ID NO: 85301 - protein, 8 aa, Homo sapiens
  Table A; Target 85301; HLA-A*33:03; TDRD12; ENSG00000173809; TAA
DLKKALQR

SEQ ID NO: 85302 - protein, 8 aa, Homo sapiens
  Table A; Target 85302; HLA-B*08:01; TDRD12; ENSG00000173809; TAA
DLQQLQKL

SEQ ID NO: 85303 - protein, 9 aa, Homo sapiens
  Table A; Target 85303; HLA-A*33:01; TDRD12; ENSG00000173809; TAA
DLQQLQKLK

SEQ ID NO: 85304 - protein, 11 aa, Homo sapiens
  Table A; Target 85304; HLA-A*33:01; TDRD12; ENSG00000173809; TAA
DLRPTATAQDK

SEQ ID NO: 85305 - protein, 9 aa, Homo sapiens
  Table A; Target 85305; HLA-B*08:01; TDRD12; ENSG00000173809; TAA
DLVAKNYAC

SEQ ID NO: 85306 - protein, 10 aa, Homo sapiens
  Table A; Target 85306; HLA-A*25:01; TDRD12; ENSG00000173809; TAA
DLVAKNYACY

SEQ ID NO: 85307 - protein, 10 aa, Homo sapiens
  Table A; Target 85307; HLA-A*26:01; TDRD12; ENSG00000173809; TAA
DLVAKNYACY

SEQ ID NO: 85308 - protein, 10 aa, Homo sapiens
  Table A; Target 85308; HLA-A*26:01; TDRD12; ENSG00000173809; TAA
DLYATLNAEM

SEQ ID NO: 85309 - protein, 10 aa, Homo sapiens
  Table A; Target 85309; HLA-B*35:03; TDRD12; ENSG00000173809; TAA
DPDVPEASAL

SEQ ID NO: 85310 - protein, 10 aa, Homo sapiens
  Table A; Target 85310; HLA-C*05:01; TDRD12; ENSG00000173809; TAA
DPDVPEASAL

SEQ ID NO: 85311 - protein, 8 aa, Homo sapiens
  Table A; Target 85311; HLA-B*51:01; TDRD12; ENSG00000173809; TAA
DPLRADGI

SEQ ID NO: 85312 - protein, 8 aa, Homo sapiens
  Table A; Target 85312; HLA-B*08:01; TDRD12; ENSG00000173809; TAA
DPMVHITN

SEQ ID NO: 85313 - protein, 9 aa, Homo sapiens
  Table A; Target 85313; HLA-A*25:01; TDRD12; ENSG00000173809; TAA
DPMVHITNL

SEQ ID NO: 85314 - protein, 9 aa, Homo sapiens
  Table A; Target 85314; HLA-A*33:03; TDRD12; ENSG00000173809; TAA
DPMVHITNL

SEQ ID NO: 85315 - protein, 9 aa, Homo sapiens
  Table A; Target 85315; HLA-B*07:02; TDRD12; ENSG00000173809; TAA
DPMVHITNL

SEQ ID NO: 85316 - protein, 9 aa, Homo sapiens
  Table A; Target 85316; HLA-B*08:01; TDRD12; ENSG00000173809; TAA
DPMVHITNL

SEQ ID NO: 85317 - protein, 9 aa, Homo sapiens
  Table A; Target 85317; HLA-B*35:01; TDRD12; ENSG00000173809; TAA
DPMVHITNL

SEQ ID NO: 85318 - protein, 9 aa, Homo sapiens
  Table A; Target 85318; HLA-B*35:03; TDRD12; ENSG00000173809; TAA
DPMVHITNL

SEQ ID NO: 85319 - protein, 9 aa, Homo sapiens
  Table A; Target 85319; HLA-B*51:01; TDRD12; ENSG00000173809; TAA
DPMVHITNL

SEQ ID NO: 85320 - protein, 9 aa, Homo sapiens
  Table A; Target 85320; HLA-C*07:02; TDRD12; ENSG00000173809; TAA
DPMVHITNL

SEQ ID NO: 85321 - protein, 8 aa, Homo sapiens
  Table A; Target 85321; HLA-B*08:01; TDRD12; ENSG00000173809; TAA
DPYIVITA

SEQ ID NO: 85322 - protein, 8 aa, Homo sapiens
  Table A; Target 85322; HLA-B*18:01; TDRD12; ENSG00000173809; TAA
DPYIVITA

SEQ ID NO: 85323 - protein, 8 aa, Homo sapiens
  Table A; Target 85323; HLA-B*35:01; TDRD12; ENSG00000173809; TAA
DPYIVITA

SEQ ID NO: 85324 - protein, 8 aa, Homo sapiens
  Table A; Target 85324; HLA-B*51:01; TDRD12; ENSG00000173809; TAA
DPYIVITA

SEQ ID NO: 85325 - protein, 8 aa, Homo sapiens
  Table A; Target 85325; HLA-B*54:01; TDRD12; ENSG00000173809; TAA
DPYIVITA

SEQ ID NO: 85326 - protein, 8 aa, Homo sapiens
  Table A; Target 85326; HLA-B*55:01; TDRD12; ENSG00000173809; TAA
DPYIVITA

SEQ ID NO: 85327 - protein, 8 aa, Homo sapiens
  Table A; Target 85327; HLA-B*56:01; TDRD12; ENSG00000173809; TAA
DPYIVITA

SEQ ID NO: 85328 - protein, 9 aa, Homo sapiens
  Table A; Target 85328; HLA-A*25:01; TDRD12; ENSG00000173809; TAA
DPYIVITAM

SEQ ID NO: 85329 - protein, 9 aa, Homo sapiens
  Table A; Target 85329; HLA-A*26:01; TDRD12; ENSG00000173809; TAA
DPYIVITAM

SEQ ID NO: 85330 - protein, 9 aa, Homo sapiens
  Table A; Target 85330; HLA-A*33:01; TDRD12; ENSG00000173809; TAA
DPYIVITAM

SEQ ID NO: 85331 - protein, 9 aa, Homo sapiens
  Table A; Target 85331; HLA-B*07:02; TDRD12; ENSG00000173809; TAA
DPYIVITAM

SEQ ID NO: 85332 - protein, 9 aa, Homo sapiens
  Table A; Target 85332; HLA-B*08:01; TDRD12; ENSG00000173809; TAA
DPYIVITAM

SEQ ID NO: 85333 - protein, 9 aa, Homo sapiens
  Table A; Target 85333; HLA-B*18:01; TDRD12; ENSG00000173809; TAA
DPYIVITAM

SEQ ID NO: 85334 - protein, 9 aa, Homo sapiens
  Table A; Target 85334; HLA-B*35:01; TDRD12; ENSG00000173809; TAA
DPYIVITAM

SEQ ID NO: 85335 - protein, 9 aa, Homo sapiens
  Table A; Target 85335; HLA-B*35:03; TDRD12; ENSG00000173809; TAA
DPYIVITAM

SEQ ID NO: 85336 - protein, 9 aa, Homo sapiens
  Table A; Target 85336; HLA-B*51:01; TDRD12; ENSG00000173809; TAA
DPYIVITAM

SEQ ID NO: 85337 - protein, 9 aa, Homo sapiens
  Table A; Target 85337; HLA-B*54:01; TDRD12; ENSG00000173809; TAA
DPYIVITAM

SEQ ID NO: 85338 - protein, 9 aa, Homo sapiens
  Table A; Target 85338; HLA-B*55:01; TDRD12; ENSG00000173809; TAA
DPYIVITAM

SEQ ID NO: 85339 - protein, 9 aa, Homo sapiens
  Table A; Target 85339; HLA-C*07:02; TDRD12; ENSG00000173809; TAA
DPYIVITAM

SEQ ID NO: 85340 - protein, 8 aa, Homo sapiens
  Table A; Target 85340; HLA-B*18:01; TDRD12; ENSG00000173809; TAA
DQYLAECF

SEQ ID NO: 85341 - protein, 9 aa, Homo sapiens
  Table A; Target 85341; HLA-B*39:01; TDRD12; ENSG00000173809; TAA
DQYLAECFL

SEQ ID NO: 85342 - protein, 9 aa, Homo sapiens
  Table A; Target 85342; HLA-A*33:01; TDRD12; ENSG00000173809; TAA
DSHGVNFPA

SEQ ID NO: 85343 - protein, 9 aa, Homo sapiens
  Table A; Target 85343; HLA-A*03:02; TDRD12; ENSG00000173809; TAA
DSNKTTVEK

SEQ ID NO: 85344 - protein, 9 aa, Homo sapiens
  Table A; Target 85344; HLA-A*11:01; TDRD12; ENSG00000173809; TAA
DSNKTTVEK

SEQ ID NO: 85345 - protein, 9 aa, Homo sapiens
  Table A; Target 85345; HLA-A*33:01; TDRD12; ENSG00000173809; TAA
DSNKTTVEK

SEQ ID NO: 85346 - protein, 9 aa, Homo sapiens
  Table A; Target 85346; HLA-A*33:03; TDRD12; ENSG00000173809; TAA
DSNKTTVEK

SEQ ID NO: 85347 - protein, 9 aa, Homo sapiens
  Table A; Target 85347; HLA-A*68:01; TDRD12; ENSG00000173809; TAA
DSNKTTVEK

SEQ ID NO: 85348 - protein, 9 aa, Homo sapiens
  Table A; Target 85348; HLA-C*07:06; TDRD12; ENSG00000173809; TAA
DSNKTTVEK

SEQ ID NO: 85349 - protein, 9 aa, Homo sapiens
  Table A; Target 85349; HLA-B*39:01; TDRD12; ENSG00000173809; TAA
DSSPLSADL

SEQ ID NO: 85350 - protein, 10 aa, Homo sapiens
  Table A; Target 85350; HLA-A*01:01; TDRD12; ENSG00000173809; TAA
DSSPLSADLK

SEQ ID NO: 85351 - protein, 10 aa, Homo sapiens
  Table A; Target 85351; HLA-A*68:01; TDRD12; ENSG00000173809; TAA
DSSPLSADLK

SEQ ID NO: 85352 - protein, 10 aa, Homo sapiens
  Table A; Target 85352; HLA-B*27:02; TDRD12; ENSG00000173809; TAA
DSSPLSADLK

SEQ ID NO: 85353 - protein, 10 aa, Homo sapiens
  Table A; Target 85353; HLA-C*07:06; TDRD12; ENSG00000173809; TAA
DSSPLSADLK

SEQ ID NO: 85354 - protein, 11 aa, Homo sapiens
  Table A; Target 85354; HLA-A*01:01; TDRD12; ENSG00000173809; TAA
DSSPLSADLKK

SEQ ID NO: 85355 - protein, 11 aa, Homo sapiens
  Table A; Target 85355; HLA-A*11:01; TDRD12; ENSG00000173809; TAA
DSSPLSADLKK

SEQ ID NO: 85356 - protein, 11 aa, Homo sapiens
  Table A; Target 85356; HLA-A*33:01; TDRD12; ENSG00000173809; TAA
DSSPLSADLKK

SEQ ID NO: 85357 - protein, 11 aa, Homo sapiens
  Table A; Target 85357; HLA-A*68:01; TDRD12; ENSG00000173809; TAA
DSSPLSADLKK

SEQ ID NO: 85358 - protein, 9 aa, Homo sapiens
  Table A; Target 85358; HLA-A*01:01; TDRD12; ENSG00000173809; TAA
DSTDIVPAK

SEQ ID NO: 85359 - protein, 9 aa, Homo sapiens
  Table A; Target 85359; HLA-A*03:02; TDRD12; ENSG00000173809; TAA
DSTDIVPAK

SEQ ID NO: 85360 - protein, 9 aa, Homo sapiens
  Table A; Target 85360; HLA-A*11:01; TDRD12; ENSG00000173809; TAA
DSTDIVPAK

SEQ ID NO: 85361 - protein, 9 aa, Homo sapiens
  Table A; Target 85361; HLA-A*25:01; TDRD12; ENSG00000173809; TAA
DSTDIVPAK

SEQ ID NO: 85362 - protein, 9 aa, Homo sapiens
  Table A; Target 85362; HLA-A*26:01; TDRD12; ENSG00000173809; TAA
DSTDIVPAK

SEQ ID NO: 85363 - protein, 9 aa, Homo sapiens
  Table A; Target 85363; HLA-A*33:01; TDRD12; ENSG00000173809; TAA
DSTDIVPAK

SEQ ID NO: 85364 - protein, 9 aa, Homo sapiens
  Table A; Target 85364; HLA-A*33:03; TDRD12; ENSG00000173809; TAA
DSTDIVPAK

SEQ ID NO: 85365 - protein, 9 aa, Homo sapiens
  Table A; Target 85365; HLA-A*68:01; TDRD12; ENSG00000173809; TAA
DSTDIVPAK

SEQ ID NO: 85366 - protein, 9 aa, Homo sapiens
  Table A; Target 85366; HLA-A*68:02; TDRD12; ENSG00000173809; TAA
DSTDIVPAK

SEQ ID NO: 85367 - protein, 9 aa, Homo sapiens
  Table A; Target 85367; HLA-B*27:02; TDRD12; ENSG00000173809; TAA
DSTDIVPAK

SEQ ID NO: 85368 - protein, 9 aa, Homo sapiens
  Table A; Target 85368; HLA-B*27:05; TDRD12; ENSG00000173809; TAA
DSTDIVPAK

SEQ ID NO: 85369 - protein, 9 aa, Homo sapiens
  Table A; Target 85369; HLA-C*07:06; TDRD12; ENSG00000173809; TAA
DSTDIVPAK

SEQ ID NO: 85370 - protein, 10 aa, Homo sapiens
  Table A; Target 85370; HLA-A*33:01; TDRD12; ENSG00000173809; TAA
DSTDIVPAKK

SEQ ID NO: 85371 - protein, 10 aa, Homo sapiens
  Table A; Target 85371; HLA-A*68:01; TDRD12; ENSG00000173809; TAA
DSTDIVPAKK

SEQ ID NO: 85372 - protein, 10 aa, Homo sapiens
  Table A; Target 85372; HLA-A*68:02; TDRD12; ENSG00000173809; TAA
DSTDIVPAKK

SEQ ID NO: 85373 - protein, 10 aa, Homo sapiens
  Table A; Target 85373; HLA-C*07:06; TDRD12; ENSG00000173809; TAA
DSTDIVPAKK

SEQ ID NO: 85374 - protein, 11 aa, Homo sapiens
  Table A; Target 85374; HLA-A*25:01; TDRD12; ENSG00000173809; TAA
DSTDIVPAKKW

SEQ ID NO: 85375 - protein, 8 aa, Homo sapiens
  Table A; Target 85375; HLA-A*01:01; TDRD12; ENSG00000173809; TAA
DTFEVYLY

SEQ ID NO: 85376 - protein, 8 aa, Homo sapiens
  Table A; Target 85376; HLA-A*26:01; TDRD12; ENSG00000173809; TAA
DTFEVYLY

SEQ ID NO: 85377 - protein, 8 aa, Homo sapiens
  Table A; Target 85377; HLA-B*18:01; TDRD12; ENSG00000173809; TAA
DTFEVYLY

SEQ ID NO: 85378 - protein, 8 aa, Homo sapiens
  Table A; Target 85378; HLA-B*35:01; TDRD12; ENSG00000173809; TAA
DTFEVYLY

SEQ ID NO: 85379 - protein, 9 aa, Homo sapiens
  Table A; Target 85379; HLA-A*26:01; TDRD12; ENSG00000173809; TAA
DTFEVYLYV

SEQ ID NO: 85380 - protein, 9 aa, Homo sapiens
  Table A; Target 85380; HLA-A*68:02; TDRD12; ENSG00000173809; TAA
DTFEVYLYV

SEQ ID NO: 85381 - protein, 9 aa, Homo sapiens
  Table A; Target 85381; HLA-B*51:01; TDRD12; ENSG00000173809; TAA
DTFEVYLYV

SEQ ID NO: 85382 - protein, 11 aa, Homo sapiens
  Table A; Target 85382; HLA-A*68:02; TDRD12; ENSG00000173809; TAA
DTFEVYLYVTI

SEQ ID NO: 85383 - protein, 11 aa, Homo sapiens
  Table A; Target 85383; HLA-A*25:01; TDRD12; ENSG00000173809; TAA
DTNKRVESSVY

SEQ ID NO: 85384 - protein, 11 aa, Homo sapiens
  Table A; Target 85384; HLA-A*26:01; TDRD12; ENSG00000173809; TAA
DTNKRVESSVY

SEQ ID NO: 85385 - protein, 8 aa, Homo sapiens
  Table A; Target 85385; HLA-A*25:01; TDRD12; ENSG00000173809; TAA
DVIVTTPY

SEQ ID NO: 85386 - protein, 8 aa, Homo sapiens
  Table A; Target 85386; HLA-A*26:01; TDRD12; ENSG00000173809; TAA
DVIVTTPY

SEQ ID NO: 85387 - protein, 8 aa, Homo sapiens
  Table A; Target 85387; HLA-B*18:01; TDRD12; ENSG00000173809; TAA
DVIVTTPY

SEQ ID NO: 85388 - protein, 8 aa, Homo sapiens
  Table A; Target 85388; HLA-B*35:01; TDRD12; ENSG00000173809; TAA
DVIVTTPY

SEQ ID NO: 85389 - protein, 8 aa, Homo sapiens
  Table A; Target 85389; HLA-B*46:01; TDRD12; ENSG00000173809; TAA
DVIVTTPY

SEQ ID NO: 85390 - protein, 9 aa, Homo sapiens
  Table A; Target 85390; HLA-A*26:01; TDRD12; ENSG00000173809; TAA
DVIVTTPYS

SEQ ID NO: 85391 - protein, 10 aa, Homo sapiens
  Table A; Target 85391; HLA-A*25:01; TDRD12; ENSG00000173809; TAA
DVIVTTPYSL

SEQ ID NO: 85392 - protein, 10 aa, Homo sapiens
  Table A; Target 85392; HLA-A*68:01; TDRD12; ENSG00000173809; TAA
DVIVTTPYSL

SEQ ID NO: 85393 - protein, 11 aa, Homo sapiens
  Table A; Target 85393; HLA-A*25:01; TDRD12; ENSG00000173809; TAA
DVIVTTPYSLL

SEQ ID NO: 85394 - protein, 11 aa, Homo sapiens
  Table A; Target 85394; HLA-A*26:01; TDRD12; ENSG00000173809; TAA
DVIVTTPYSLL

SEQ ID NO: 85395 - protein, 8 aa, Homo sapiens
  Table A; Target 85395; HLA-B*08:01; TDRD12; ENSG00000173809; TAA
DVPEASAL

SEQ ID NO: 85396 - protein, 8 aa, Homo sapiens
  Table A; Target 85396; HLA-B*51:01; TDRD12; ENSG00000173809; TAA
DVPEASAL

SEQ ID NO: 85397 - protein, 8 aa, Homo sapiens
  Table A; Target 85397; HLA-C*01:02; TDRD12; ENSG00000173809; TAA
DVPEASAL

SEQ ID NO: 85398 - protein, 10 aa, Homo sapiens
  Table A; Target 85398; HLA-A*26:01; TDRD12; ENSG00000173809; TAA
DVPEASALSQ

SEQ ID NO: 85399 - protein, 11 aa, Homo sapiens
  Table A; Target 85399; HLA-A*03:02; TDRD12; ENSG00000173809; TAA
DVPEASALSQK

SEQ ID NO: 85400 - protein, 11 aa, Homo sapiens
  Table A; Target 85400; HLA-A*11:01; TDRD12; ENSG00000173809; TAA
DVPEASALSQK

SEQ ID NO: 85401 - protein, 11 aa, Homo sapiens
  Table A; Target 85401; HLA-A*25:01; TDRD12; ENSG00000173809; TAA
DVPEASALSQK

SEQ ID NO: 85402 - protein, 11 aa, Homo sapiens
  Table A; Target 85402; HLA-A*26:01; TDRD12; ENSG00000173809; TAA
DVPEASALSQK

SEQ ID NO: 85403 - protein, 11 aa, Homo sapiens
  Table A; Target 85403; HLA-A*33:01; TDRD12; ENSG00000173809; TAA
DVPEASALSQK

SEQ ID NO: 85404 - protein, 11 aa, Homo sapiens
  Table A; Target 85404; HLA-A*33:03; TDRD12; ENSG00000173809; TAA
DVPEASALSQK

SEQ ID NO: 85405 - protein, 11 aa, Homo sapiens
  Table A; Target 85405; HLA-A*68:01; TDRD12; ENSG00000173809; TAA
DVPEASALSQK

SEQ ID NO: 85406 - protein, 11 aa, Homo sapiens
  Table A; Target 85406; HLA-C*07:06; TDRD12; ENSG00000173809; TAA
DVPEASALSQK

SEQ ID NO: 85407 - protein, 8 aa, Homo sapiens
  Table A; Target 85407; HLA-B*08:01; TDRD12; ENSG00000173809; TAA
DYLEKPRL

SEQ ID NO: 85408 - protein, 11 aa, Homo sapiens
  Table A; Target 85408; HLA-A*33:01; TDRD12; ENSG00000173809; TAA
DYLEKPRLNIK

SEQ ID NO: 85409 - protein, 9 aa, Homo sapiens
  Table A; Target 85409; HLA-A*24:02; TDRD12; ENSG00000173809; TAA
DYNVRAEIL

SEQ ID NO: 85410 - protein, 9 aa, Homo sapiens
  Table A; Target 85410; HLA-B*08:01; TDRD12; ENSG00000173809; TAA
DYNVRAEIL

SEQ ID NO: 85411 - protein, 9 aa, Homo sapiens
  Table A; Target 85411; HLA-C*14:02; TDRD12; ENSG00000173809; TAA
DYNVRAEIL

SEQ ID NO: 85412 - protein, 9 aa, Homo sapiens
  Table A; Target 85412; HLA-A*24:02; TDRD12; ENSG00000173809; TAA
DYQKLNSAM

SEQ ID NO: 85413 - protein, 9 aa, Homo sapiens
  Table A; Target 85413; HLA-A*33:01; TDRD12; ENSG00000173809; TAA
DYQKLNSAM

SEQ ID NO: 85414 - protein, 9 aa, Homo sapiens
  Table A; Target 85414; HLA-A*33:03; TDRD12; ENSG00000173809; TAA
DYQKLNSAM

SEQ ID NO: 85415 - protein, 9 aa, Homo sapiens
  Table A; Target 85415; HLA-C*14:02; TDRD12; ENSG00000173809; TAA
DYQKLNSAM

SEQ ID NO: 85416 - protein, 11 aa, Homo sapiens
  Table A; Target 85416; HLA-A*68:01; TDRD12; ENSG00000173809; TAA
EAALYGNVQQV

SEQ ID NO: 85417 - protein, 11 aa, Homo sapiens
  Table A; Target 85417; HLA-A*68:02; TDRD12; ENSG00000173809; TAA
EAALYGNVQQV

SEQ ID NO: 85418 - protein, 10 aa, Homo sapiens
  Table A; Target 85418; HLA-A*33:03; TDRD12; ENSG00000173809; TAA
EAKEDKKAGR

SEQ ID NO: 85419 - protein, 9 aa, Homo sapiens
  Table A; Target 85419; HLA-A*33:01; TDRD12; ENSG00000173809; TAA
EAKNTKLPR

SEQ ID NO: 85420 - protein, 9 aa, Homo sapiens
  Table A; Target 85420; HLA-A*33:03; TDRD12; ENSG00000173809; TAA
EAKNTKLPR

SEQ ID NO: 85421 - protein, 9 aa, Homo sapiens
  Table A; Target 85421; HLA-A*68:01; TDRD12; ENSG00000173809; TAA
EAKNTKLPR

SEQ ID NO: 85422 - protein, 9 aa, Homo sapiens
  Table A; Target 85422; HLA-A*25:01; TDRD12; ENSG00000173809; TAA
EANEQMFAI

SEQ ID NO: 85423 - protein, 9 aa, Homo sapiens
  Table A; Target 85423; HLA-A*33:01; TDRD12; ENSG00000173809; TAA
EANEQMFAI

SEQ ID NO: 85424 - protein, 9 aa, Homo sapiens
  Table A; Target 85424; HLA-A*33:03; TDRD12; ENSG00000173809; TAA
EANEQMFAI

SEQ ID NO: 85425 - protein, 9 aa, Homo sapiens
  Table A; Target 85425; HLA-B*51:01; TDRD12; ENSG00000173809; TAA
EANEQMFAI

SEQ ID NO: 85426 - protein, 8 aa, Homo sapiens
  Table A; Target 85426; HLA-B*37:01; TDRD12; ENSG00000173809; TAA
EDSHGVNF

SEQ ID NO: 85427 - protein, 9 aa, Homo sapiens
  Table A; Target 85427; HLA-A*26:01; TDRD12; ENSG00000173809; TAA
EEAALYGNV

SEQ ID NO: 85428 - protein, 9 aa, Homo sapiens
  Table A; Target 85428; HLA-B*44:02; TDRD12; ENSG00000173809; TAA
EEAALYGNV

SEQ ID NO: 85429 - protein, 9 aa, Homo sapiens
  Table A; Target 85429; HLA-B*44:03; TDRD12; ENSG00000173809; TAA
EEAALYGNV

SEQ ID NO: 85430 - protein, 9 aa, Homo sapiens
  Table A; Target 85430; HLA-B*49:01; TDRD12; ENSG00000173809; TAA
EEAALYGNV

SEQ ID NO: 85431 - protein, 8 aa, Homo sapiens
  Table A; Target 85431; HLA-B*18:01; TDRD12; ENSG00000173809; TAA
EEDTFEVY

SEQ ID NO: 85432 - protein, 8 aa, Homo sapiens
  Table A; Target 85432; HLA-B*44:02; TDRD12; ENSG00000173809; TAA
EEDTFEVY

SEQ ID NO: 85433 - protein, 8 aa, Homo sapiens
  Table A; Target 85433; HLA-B*44:03; TDRD12; ENSG00000173809; TAA
EEDTFEVY

SEQ ID NO: 85434 - protein, 9 aa, Homo sapiens
  Table A; Target 85434; HLA-B*40:01; TDRD12; ENSG00000173809; TAA
EEDTFEVYL

SEQ ID NO: 85435 - protein, 9 aa, Homo sapiens
  Table A; Target 85435; HLA-B*44:02; TDRD12; ENSG00000173809; TAA
EEDTFEVYL

SEQ ID NO: 85436 - protein, 9 aa, Homo sapiens
  Table A; Target 85436; HLA-B*49:01; TDRD12; ENSG00000173809; TAA
EEDTFEVYL

SEQ ID NO: 85437 - protein, 10 aa, Homo sapiens
  Table A; Target 85437; HLA-B*44:02; TDRD12; ENSG00000173809; TAA
EEDTFEVYLY

SEQ ID NO: 85438 - protein, 10 aa, Homo sapiens
  Table A; Target 85438; HLA-B*44:03; TDRD12; ENSG00000173809; TAA
EEDTFEVYLY

SEQ ID NO: 85439 - protein, 8 aa, Homo sapiens
  Table A; Target 85439; HLA-B*18:01; TDRD12; ENSG00000173809; TAA
EEGQVCVV

SEQ ID NO: 85440 - protein, 8 aa, Homo sapiens
  Table A; Target 85440; HLA-B*49:01; TDRD12; ENSG00000173809; TAA
EEGQVCVV

SEQ ID NO: 85441 - protein, 9 aa, Homo sapiens
  Table A; Target 85441; HLA-A*25:01; TDRD12; ENSG00000173809; TAA
EEGQVCVVY

SEQ ID NO: 85442 - protein, 9 aa, Homo sapiens
  Table A; Target 85442; HLA-A*26:01; TDRD12; ENSG00000173809; TAA
EEGQVCVVY

SEQ ID NO: 85443 - protein, 9 aa, Homo sapiens
  Table A; Target 85443; HLA-A*30:01; TDRD12; ENSG00000173809; TAA
EEGQVCVVY

SEQ ID NO: 85444 - protein, 9 aa, Homo sapiens
  Table A; Target 85444; HLA-B*18:01; TDRD12; ENSG00000173809; TAA
EEGQVCVVY

SEQ ID NO: 85445 - protein, 9 aa, Homo sapiens
  Table A; Target 85445; HLA-B*27:02; TDRD12; ENSG00000173809; TAA
EEGQVCVVY

SEQ ID NO: 85446 - protein, 9 aa, Homo sapiens
  Table A; Target 85446; HLA-B*35:01; TDRD12; ENSG00000173809; TAA
EEGQVCVVY

SEQ ID NO: 85447 - protein, 9 aa, Homo sapiens
  Table A; Target 85447; HLA-B*40:01; TDRD12; ENSG00000173809; TAA
EEGQVCVVY

SEQ ID NO: 85448 - protein, 9 aa, Homo sapiens
  Table A; Target 85448; HLA-B*44:02; TDRD12; ENSG00000173809; TAA
EEGQVCVVY

SEQ ID NO: 85449 - protein, 9 aa, Homo sapiens
  Table A; Target 85449; HLA-B*44:03; TDRD12; ENSG00000173809; TAA
EEGQVCVVY

SEQ ID NO: 85450 - protein, 9 aa, Homo sapiens
  Table A; Target 85450; HLA-C*07:01; TDRD12; ENSG00000173809; TAA
EEGQVCVVY

SEQ ID NO: 85451 - protein, 9 aa, Homo sapiens
  Table A; Target 85451; HLA-C*07:06; TDRD12; ENSG00000173809; TAA
EEGQVCVVY

SEQ ID NO: 85452 - protein, 9 aa, Homo sapiens
  Table A; Target 85452; HLA-C*16:04; TDRD12; ENSG00000173809; TAA
EEGQVCVVY

SEQ ID NO: 85453 - protein, 10 aa, Homo sapiens
  Table A; Target 85453; HLA-B*27:02; TDRD12; ENSG00000173809; TAA
EESLSQTPPR

SEQ ID NO: 85454 - protein, 10 aa, Homo sapiens
  Table A; Target 85454; HLA-A*25:01; TDRD12; ENSG00000173809; TAA
EFIDEGRTGL

SEQ ID NO: 85455 - protein, 10 aa, Homo sapiens
  Table A; Target 85455; HLA-A*26:01; TDRD12; ENSG00000173809; TAA
EFIDEGRTGL

SEQ ID NO: 85456 - protein, 9 aa, Homo sapiens
  Table A; Target 85456; HLA-A*33:03; TDRD12; ENSG00000173809; TAA
EFTAGVLEA

SEQ ID NO: 85457 - protein, 9 aa, Homo sapiens
  Table A; Target 85457; HLA-C*14:02; TDRD12; ENSG00000173809; TAA
EFTAGVLEA

SEQ ID NO: 85458 - protein, 10 aa, Homo sapiens
  Table A; Target 85458; HLA-A*33:03; TDRD12; ENSG00000173809; TAA
EFTAGVLEAK

SEQ ID NO: 85459 - protein, 9 aa, Homo sapiens
  Table A; Target 85459; HLA-A*31:01; TDRD12; ENSG00000173809; TAA
EGRTGLVTR

SEQ ID NO: 85460 - protein, 9 aa, Homo sapiens
  Table A; Target 85460; HLA-A*33:01; TDRD12; ENSG00000173809; TAA
EGRTGLVTR

SEQ ID NO: 85461 - protein, 9 aa, Homo sapiens
  Table A; Target 85461; HLA-A*33:03; TDRD12; ENSG00000173809; TAA
EGRTGLVTR

SEQ ID NO: 85462 - protein, 9 aa, Homo sapiens
  Table A; Target 85462; HLA-A*68:01; TDRD12; ENSG00000173809; TAA
EGRTGLVTR

SEQ ID NO: 85463 - protein, 9 aa, Homo sapiens
  Table A; Target 85463; HLA-C*07:06; TDRD12; ENSG00000173809; TAA
EGRTGLVTR

SEQ ID NO: 85464 - protein, 9 aa, Homo sapiens
  Table A; Target 85464; HLA-B*38:01; TDRD12; ENSG00000173809; TAA
EHIEQLKKL

SEQ ID NO: 85465 - protein, 10 aa, Homo sapiens
  Table A; Target 85465; HLA-A*33:03; TDRD12; ENSG00000173809; TAA
EIEWNPKVTR

SEQ ID NO: 85466 - protein, 10 aa, Homo sapiens
  Table A; Target 85466; HLA-A*68:01; TDRD12; ENSG00000173809; TAA
EIEWNPKVTR

SEQ ID NO: 85467 - protein, 9 aa, Homo sapiens
  Table A; Target 85467; HLA-A*26:01; TDRD12; ENSG00000173809; TAA
EILSMGMGI

SEQ ID NO: 85468 - protein, 11 aa, Homo sapiens
  Table A; Target 85468; HLA-A*33:01; TDRD12; ENSG00000173809; TAA
ELLGEYSMSSR

SEQ ID NO: 85469 - protein, 11 aa, Homo sapiens
  Table A; Target 85469; HLA-A*33:03; TDRD12; ENSG00000173809; TAA
ELLGEYSMSSR

SEQ ID NO: 85470 - protein, 11 aa, Homo sapiens
  Table A; Target 85470; HLA-A*68:01; TDRD12; ENSG00000173809; TAA
ELLGEYSMSSR

SEQ ID NO: 85471 - protein, 9 aa, Homo sapiens
  Table A; Target 85471; HLA-A*02:01; TDRD12; ENSG00000173809; TAA
ELYEFTAGV

SEQ ID NO: 85472 - protein, 9 aa, Homo sapiens
  Table A; Target 85472; HLA-A*02:03; TDRD12; ENSG00000173809; TAA
ELYEFTAGV

SEQ ID NO: 85473 - protein, 9 aa, Homo sapiens
  Table A; Target 85473; HLA-A*02:07; TDRD12; ENSG00000173809; TAA
ELYEFTAGV

SEQ ID NO: 85474 - protein, 9 aa, Homo sapiens
  Table A; Target 85474; HLA-A*26:01; TDRD12; ENSG00000173809; TAA
ELYEFTAGV

SEQ ID NO: 85475 - protein, 9 aa, Homo sapiens
  Table A; Target 85475; HLA-A*68:02; TDRD12; ENSG00000173809; TAA
ELYEFTAGV

SEQ ID NO: 85476 - protein, 10 aa, Homo sapiens
  Table A; Target 85476; HLA-A*25:01; TDRD12; ENSG00000173809; TAA
ELYEFTAGVL

SEQ ID NO: 85477 - protein, 10 aa, Homo sapiens
  Table A; Target 85477; HLA-A*26:01; TDRD12; ENSG00000173809; TAA
ELYEFTAGVL

SEQ ID NO: 85478 - protein, 9 aa, Homo sapiens
  Table A; Target 85478; HLA-A*02:03; TDRD12; ENSG00000173809; TAA
EMIFNLQNV

SEQ ID NO: 85479 - protein, 9 aa, Homo sapiens
  Table A; Target 85479; HLA-A*26:01; TDRD12; ENSG00000173809; TAA
EMIFNLQNV

SEQ ID NO: 85480 - protein, 9 aa, Homo sapiens
  Table A; Target 85480; HLA-A*68:02; TDRD12; ENSG00000173809; TAA
EMIFNLQNV

SEQ ID NO: 85481 - protein, 11 aa, Homo sapiens
  Table A; Target 85481; HLA-A*33:03; TDRD12; ENSG00000173809; TAA
ENQKPGGYLVF

SEQ ID NO: 85482 - protein, 10 aa, Homo sapiens
  Table A; Target 85482; HLA-A*24:02; TDRD12; ENSG00000173809; TAA
EQMFAILDNF

SEQ ID NO: 85483 - protein, 10 aa, Homo sapiens
  Table A; Target 85483; HLA-A*25:01; TDRD12; ENSG00000173809; TAA
EQMFAILDNF

SEQ ID NO: 85484 - protein, 10 aa, Homo sapiens
  Table A; Target 85484; HLA-B*38:01; TDRD12; ENSG00000173809; TAA
EQMFAILDNF

SEQ ID NO: 85485 - protein, 10 aa, Homo sapiens
  Table A; Target 85485; HLA-B*44:02; TDRD12; ENSG00000173809; TAA
EQMFAILDNF

SEQ ID NO: 85486 - protein, 9 aa, Homo sapiens
  Table A; Target 85486; HLA-B*38:01; TDRD12; ENSG00000173809; TAA
ERESAPHQI

SEQ ID NO: 85487 - protein, 8 aa, Homo sapiens
  Table A; Target 85487; HLA-C*12:03; TDRD12; ENSG00000173809; TAA
ESAPHQIV

SEQ ID NO: 85488 - protein, 9 aa, Homo sapiens
  Table A; Target 85488; HLA-B*54:01; TDRD12; ENSG00000173809; TAA
ESAPHQIVA

SEQ ID NO: 85489 - protein, 10 aa, Homo sapiens
  Table A; Target 85489; HLA-A*25:01; TDRD12; ENSG00000173809; TAA
ESAPHQIVAV

SEQ ID NO: 85490 - protein, 10 aa, Homo sapiens
  Table A; Target 85490; HLA-A*26:01; TDRD12; ENSG00000173809; TAA
ESAPHQIVAV

SEQ ID NO: 85491 - protein, 10 aa, Homo sapiens
  Table A; Target 85491; HLA-A*33:03; TDRD12; ENSG00000173809; TAA
ESAPHQIVAV

SEQ ID NO: 85492 - protein, 10 aa, Homo sapiens
  Table A; Target 85492; HLA-A*68:01; TDRD12; ENSG00000173809; TAA
ESAPHQIVAV

SEQ ID NO: 85493 - protein, 10 aa, Homo sapiens
  Table A; Target 85493; HLA-A*68:02; TDRD12; ENSG00000173809; TAA
ESAPHQIVAV

SEQ ID NO: 85494 - protein, 9 aa, Homo sapiens
  Table A; Target 85494; HLA-A*33:01; TDRD12; ENSG00000173809; TAA
ESFMQLPYR

SEQ ID NO: 85495 - protein, 9 aa, Homo sapiens
  Table A; Target 85495; HLA-A*33:03; TDRD12; ENSG00000173809; TAA
ESFMQLPYR

SEQ ID NO: 85496 - protein, 9 aa, Homo sapiens
  Table A; Target 85496; HLA-A*68:01; TDRD12; ENSG00000173809; TAA
ESFMQLPYR

SEQ ID NO: 85497 - protein, 10 aa, Homo sapiens
  Table A; Target 85497; HLA-A*33:03; TDRD12; ENSG00000173809; TAA
ESKTSSENQK

SEQ ID NO: 85498 - protein, 9 aa, Homo sapiens
  Table A; Target 85498; HLA-A*11:01; TDRD12; ENSG00000173809; TAA
ESLSQTPPR

SEQ ID NO: 85499 - protein, 9 aa, Homo sapiens
  Table A; Target 85499; HLA-A*33:01; TDRD12; ENSG00000173809; TAA
ESLSQTPPR

SEQ ID NO: 85500 - protein, 9 aa, Homo sapiens
  Table A; Target 85500; HLA-A*33:03; TDRD12; ENSG00000173809; TAA
ESLSQTPPR

SEQ ID NO: 85501 - protein, 9 aa, Homo sapiens
  Table A; Target 85501; HLA-A*68:01; TDRD12; ENSG00000173809; TAA
ESLSQTPPR

SEQ ID NO: 85502 - protein, 9 aa, Homo sapiens
  Table A; Target 85502; HLA-C*07:06; TDRD12; ENSG00000173809; TAA
ESLSQTPPR

SEQ ID NO: 85503 - protein, 9 aa, Homo sapiens
  Table A; Target 85503; HLA-A*31:01; TDRD12; ENSG00000173809; TAA
ESNPLLYLL

SEQ ID NO: 85504 - protein, 9 aa, Homo sapiens
  Table A; Target 85504; HLA-A*33:01; TDRD12; ENSG00000173809; TAA
ESNPLLYLL

SEQ ID NO: 85505 - protein, 9 aa, Homo sapiens
  Table A; Target 85505; HLA-A*33:03; TDRD12; ENSG00000173809; TAA
ESNPLLYLL

SEQ ID NO: 85506 - protein, 9 aa, Homo sapiens
  Table A; Target 85506; HLA-A*68:02; TDRD12; ENSG00000173809; TAA
ESNPLLYLL

SEQ ID NO: 85507 - protein, 9 aa, Homo sapiens
  Table A; Target 85507; HLA-B*57:01; TDRD12; ENSG00000173809; TAA
ESNPLLYLL

SEQ ID NO: 85508 - protein, 9 aa, Homo sapiens
  Table A; Target 85508; HLA-A*01:01; TDRD12; ENSG00000173809; TAA
ESSSIFCLK

SEQ ID NO: 85509 - protein, 9 aa, Homo sapiens
  Table A; Target 85509; HLA-A*03:02; TDRD12; ENSG00000173809; TAA
ESSSIFCLK

SEQ ID NO: 85510 - protein, 9 aa, Homo sapiens
  Table A; Target 85510; HLA-A*11:01; TDRD12; ENSG00000173809; TAA
ESSSIFCLK

SEQ ID NO: 85511 - protein, 9 aa, Homo sapiens
  Table A; Target 85511; HLA-A*33:01; TDRD12; ENSG00000173809; TAA
ESSSIFCLK

SEQ ID NO: 85512 - protein, 9 aa, Homo sapiens
  Table A; Target 85512; HLA-A*33:03; TDRD12; ENSG00000173809; TAA
ESSSIFCLK

SEQ ID NO: 85513 - protein, 9 aa, Homo sapiens
  Table A; Target 85513; HLA-A*68:01; TDRD12; ENSG00000173809; TAA
ESSSIFCLK

SEQ ID NO: 85514 - protein, 9 aa, Homo sapiens
  Table A; Target 85514; HLA-A*68:02; TDRD12; ENSG00000173809; TAA
ESSSIFCLK

SEQ ID NO: 85515 - protein, 9 aa, Homo sapiens
  Table A; Target 85515; HLA-B*27:02; TDRD12; ENSG00000173809; TAA
ESSSIFCLK

SEQ ID NO: 85516 - protein, 9 aa, Homo sapiens
  Table A; Target 85516; HLA-C*07:06; TDRD12; ENSG00000173809; TAA
ESSSIFCLK

SEQ ID NO: 85517 - protein, 9 aa, Homo sapiens
  Table A; Target 85517; HLA-A*68:01; TDRD12; ENSG00000173809; TAA
ESSVYWPAK

SEQ ID NO: 85518 - protein, 10 aa, Homo sapiens
  Table A; Target 85518; HLA-A*68:01; TDRD12; ENSG00000173809; TAA
ESSVYWPAKR

SEQ ID NO: 85519 - protein, 9 aa, Homo sapiens
  Table A; Target 85519; HLA-B*54:01; TDRD12; ENSG00000173809; TAA
ESYSWPPIA

SEQ ID NO: 85520 - protein, 10 aa, Homo sapiens
  Table A; Target 85520; HLA-A*31:01; TDRD12; ENSG00000173809; TAA
ESYSWPPIAR

SEQ ID NO: 85521 - protein, 10 aa, Homo sapiens
  Table A; Target 85521; HLA-A*33:01; TDRD12; ENSG00000173809; TAA
ESYSWPPIAR

SEQ ID NO: 85522 - protein, 10 aa, Homo sapiens
  Table A; Target 85522; HLA-A*33:03; TDRD12; ENSG00000173809; TAA
ESYSWPPIAR

SEQ ID NO: 85523 - protein, 10 aa, Homo sapiens
  Table A; Target 85523; HLA-A*68:01; TDRD12; ENSG00000173809; TAA
ESYSWPPIAR

SEQ ID NO: 85524 - protein, 10 aa, Homo sapiens
  Table A; Target 85524; HLA-A*68:02; TDRD12; ENSG00000173809; TAA
ESYSWPPIAR

SEQ ID NO: 85525 - protein, 10 aa, Homo sapiens
  Table A; Target 85525; HLA-C*07:06; TDRD12; ENSG00000173809; TAA
ESYSWPPIAR

SEQ ID NO: 85526 - protein, 8 aa, Homo sapiens
  Table A; Target 85526; HLA-C*05:01; TDRD12; ENSG00000173809; TAA
ETDLPRKL

SEQ ID NO: 85527 - protein, 9 aa, Homo sapiens
  Table A; Target 85527; HLA-A*25:01; TDRD12; ENSG00000173809; TAA
EVNQKEDAW

SEQ ID NO: 85528 - protein, 9 aa, Homo sapiens
  Table A; Target 85528; HLA-A*33:03; TDRD12; ENSG00000173809; TAA
EVNQKEDAW

SEQ ID NO: 85529 - protein, 8 aa, Homo sapiens
  Table A; Target 85529; HLA-B*51:01; TDRD12; ENSG00000173809; TAA
EVYLYVTI

SEQ ID NO: 85530 - protein, 9 aa, Homo sapiens
  Table A; Target 85530; HLA-A*03:01; TDRD12; ENSG00000173809; TAA
EVYLYVTIK

SEQ ID NO: 85531 - protein, 9 aa, Homo sapiens
  Table A; Target 85531; HLA-A*33:01; TDRD12; ENSG00000173809; TAA
EVYLYVTIK

SEQ ID NO: 85532 - protein, 9 aa, Homo sapiens
  Table A; Target 85532; HLA-A*33:03; TDRD12; ENSG00000173809; TAA
EVYLYVTIK

SEQ ID NO: 85533 - protein, 9 aa, Homo sapiens
  Table A; Target 85533; HLA-A*68:01; TDRD12; ENSG00000173809; TAA
EVYLYVTIK

SEQ ID NO: 85534 - protein, 9 aa, Homo sapiens
  Table A; Target 85534; HLA-C*04:01; TDRD12; ENSG00000173809; TAA
EYDEKNSCV

SEQ ID NO: 85535 - protein, 8 aa, Homo sapiens
  Table A; Target 85535; HLA-B*54:01; TDRD12; ENSG00000173809; TAA
FAKNIPVK

SEQ ID NO: 85536 - protein, 8 aa, Homo sapiens
  Table A; Target 85536; HLA-C*12:03; TDRD12; ENSG00000173809; TAA
FAKNIPVK

SEQ ID NO: 85537 - protein, 8 aa, Homo sapiens
  Table A; Target 85537; HLA-C*16:01; TDRD12; ENSG00000173809; TAA
FAKNIPVK

SEQ ID NO: 85538 - protein, 9 aa, Homo sapiens
  Table A; Target 85538; HLA-A*30:01; TDRD12; ENSG00000173809; TAA
FELLGEYSM

SEQ ID NO: 85539 - protein, 9 aa, Homo sapiens
  Table A; Target 85539; HLA-B*18:01; TDRD12; ENSG00000173809; TAA
FELLGEYSM

SEQ ID NO: 85540 - protein, 9 aa, Homo sapiens
  Table A; Target 85540; HLA-B*35:03; TDRD12; ENSG00000173809; TAA
FELLGEYSM

SEQ ID NO: 85541 - protein, 9 aa, Homo sapiens
  Table A; Target 85541; HLA-B*37:01; TDRD12; ENSG00000173809; TAA
FELLGEYSM

SEQ ID NO: 85542 - protein, 9 aa, Homo sapiens
  Table A; Target 85542; HLA-B*40:01; TDRD12; ENSG00000173809; TAA
FELLGEYSM

SEQ ID NO: 85543 - protein, 9 aa, Homo sapiens
  Table A; Target 85543; HLA-B*40:02; TDRD12; ENSG00000173809; TAA
FELLGEYSM

SEQ ID NO: 85544 - protein, 9 aa, Homo sapiens
  Table A; Target 85544; HLA-B*49:01; TDRD12; ENSG00000173809; TAA
FELLGEYSM

SEQ ID NO: 85545 - protein, 9 aa, Homo sapiens
  Table A; Target 85545; HLA-B*49:01; TDRD12; ENSG00000173809; TAA
FEVYLYVTI

SEQ ID NO: 85546 - protein, 9 aa, Homo sapiens
  Table A; Target 85546; HLA-B*39:01; TDRD12; ENSG00000173809; TAA
FHAEQGSPA

SEQ ID NO: 85547 - protein, 11 aa, Homo sapiens
  Table A; Target 85547; HLA-B*38:01; TDRD12; ENSG00000173809; TAA
FHTLPPQAVEF

SEQ ID NO: 85548 - protein, 9 aa, Homo sapiens
  Table A; Target 85548; HLA-A*01:01; TDRD12; ENSG00000173809; TAA
FIDEGRTGL

SEQ ID NO: 85549 - protein, 9 aa, Homo sapiens
  Table A; Target 85549; HLA-A*02:01; TDRD12; ENSG00000173809; TAA
FIDEGRTGL

SEQ ID NO: 85550 - protein, 9 aa, Homo sapiens
  Table A; Target 85550; HLA-A*02:07; TDRD12; ENSG00000173809; TAA
FIDEGRTGL

SEQ ID NO: 85551 - protein, 9 aa, Homo sapiens
  Table A; Target 85551; HLA-B*07:02; TDRD12; ENSG00000173809; TAA
FIDEGRTGL

SEQ ID NO: 85552 - protein, 9 aa, Homo sapiens
  Table A; Target 85552; HLA-B*35:03; TDRD12; ENSG00000173809; TAA
FIDEGRTGL

SEQ ID NO: 85553 - protein, 9 aa, Homo sapiens
  Table A; Target 85553; HLA-B*38:01; TDRD12; ENSG00000173809; TAA
FIDEGRTGL

SEQ ID NO: 85554 - protein, 9 aa, Homo sapiens
  Table A; Target 85554; HLA-B*39:01; TDRD12; ENSG00000173809; TAA
FIDEGRTGL

SEQ ID NO: 85555 - protein, 9 aa, Homo sapiens
  Table A; Target 85555; HLA-B*40:01; TDRD12; ENSG00000173809; TAA
FIDEGRTGL

SEQ ID NO: 85556 - protein, 9 aa, Homo sapiens
  Table A; Target 85556; HLA-B*55:01; TDRD12; ENSG00000173809; TAA
FIDEGRTGL

SEQ ID NO: 85557 - protein, 9 aa, Homo sapiens
  Table A; Target 85557; HLA-C*01:02; TDRD12; ENSG00000173809; TAA
FIDEGRTGL

SEQ ID NO: 85558 - protein, 9 aa, Homo sapiens
  Table A; Target 85558; HLA-C*02:02; TDRD12; ENSG00000173809; TAA
FIDEGRTGL

SEQ ID NO: 85559 - protein, 9 aa, Homo sapiens
  Table A; Target 85559; HLA-C*03:03; TDRD12; ENSG00000173809; TAA
FIDEGRTGL

SEQ ID NO: 85560 - protein, 9 aa, Homo sapiens
  Table A; Target 85560; HLA-C*03:04; TDRD12; ENSG00000173809; TAA
FIDEGRTGL

SEQ ID NO: 85561 - protein, 9 aa, Homo sapiens
  Table A; Target 85561; HLA-C*04:01; TDRD12; ENSG00000173809; TAA
FIDEGRTGL

SEQ ID NO: 85562 - protein, 9 aa, Homo sapiens
  Table A; Target 85562; HLA-C*05:01; TDRD12; ENSG00000173809; TAA
FIDEGRTGL

SEQ ID NO: 85563 - protein, 9 aa, Homo sapiens
  Table A; Target 85563; HLA-C*07:04; TDRD12; ENSG00000173809; TAA
FIDEGRTGL

SEQ ID NO: 85564 - protein, 9 aa, Homo sapiens
  Table A; Target 85564; HLA-C*16:01; TDRD12; ENSG00000173809; TAA
FIDEGRTGL

SEQ ID NO: 85565 - protein, 10 aa, Homo sapiens
  Table A; Target 85565; HLA-A*01:01; TDRD12; ENSG00000173809; TAA
FIDEGRTGLV

SEQ ID NO: 85566 - protein, 10 aa, Homo sapiens
  Table A; Target 85566; HLA-A*02:01; TDRD12; ENSG00000173809; TAA
FIDEGRTGLV

SEQ ID NO: 85567 - protein, 10 aa, Homo sapiens
  Table A; Target 85567; HLA-A*02:07; TDRD12; ENSG00000173809; TAA
FIDEGRTGLV

SEQ ID NO: 85568 - protein, 10 aa, Homo sapiens
  Table A; Target 85568; HLA-C*05:01; TDRD12; ENSG00000173809; TAA
FIDEGRTGLV

SEQ ID NO: 85569 - protein, 9 aa, Homo sapiens
  Table A; Target 85569; HLA-A*01:01; TDRD12; ENSG00000173809; TAA
FIFELLGEY

SEQ ID NO: 85570 - protein, 9 aa, Homo sapiens
  Table A; Target 85570; HLA-A*26:01; TDRD12; ENSG00000173809; TAA
FIFELLGEY

SEQ ID NO: 85571 - protein, 9 aa, Homo sapiens
  Table A; Target 85571; HLA-A*29:02; TDRD12; ENSG00000173809; TAA
FIFELLGEY

SEQ ID NO: 85572 - protein, 9 aa, Homo sapiens
  Table A; Target 85572; HLA-A*30:02; TDRD12; ENSG00000173809; TAA
FIFELLGEY

SEQ ID NO: 85573 - protein, 9 aa, Homo sapiens
  Table A; Target 85573; HLA-B*35:01; TDRD12; ENSG00000173809; TAA
FIFELLGEY

SEQ ID NO: 85574 - protein, 9 aa, Homo sapiens
  Table A; Target 85574; HLA-B*46:01; TDRD12; ENSG00000173809; TAA
FIFELLGEY

SEQ ID NO: 85575 - protein, 9 aa, Homo sapiens
  Table A; Target 85575; HLA-C*02:02; TDRD12; ENSG00000173809; TAA
FIFELLGEY

SEQ ID NO: 85576 - protein, 10 aa, Homo sapiens
  Table A; Target 85576; HLA-C*01:02; TDRD12; ENSG00000173809; TAA
FIPSQAQKTL

SEQ ID NO: 85577 - protein, 11 aa, Homo sapiens
  Table A; Target 85577; HLA-A*02:07; TDRD12; ENSG00000173809; TAA
FLDHDVDYQKL

SEQ ID NO: 85578 - protein, 9 aa, Homo sapiens
  Table A; Target 85578; HLA-A*01:01; TDRD12; ENSG00000173809; TAA
FLEANEQMF

SEQ ID NO: 85579 - protein, 9 aa, Homo sapiens
  Table A; Target 85579; HLA-B*38:01; TDRD12; ENSG00000173809; TAA
FLEANEQMF

SEQ ID NO: 85580 - protein, 9 aa, Homo sapiens
  Table A; Target 85580; HLA-C*05:01; TDRD12; ENSG00000173809; TAA
FLEANEQMF

SEQ ID NO: 85581 - protein, 9 aa, Homo sapiens
  Table A; Target 85581; HLA-C*07:04; TDRD12; ENSG00000173809; TAA
FLEANEQMF

SEQ ID NO: 85582 - protein, 9 aa, Homo sapiens
  Table A; Target 85582; HLA-A*02:01; TDRD12; ENSG00000173809; TAA
FLNPDPLRA

SEQ ID NO: 85583 - protein, 9 aa, Homo sapiens
  Table A; Target 85583; HLA-A*02:03; TDRD12; ENSG00000173809; TAA
FLNPDPLRA

SEQ ID NO: 85584 - protein, 9 aa, Homo sapiens
  Table A; Target 85584; HLA-A*02:04; TDRD12; ENSG00000173809; TAA
FLNPDPLRA

SEQ ID NO: 85585 - protein, 9 aa, Homo sapiens
  Table A; Target 85585; HLA-A*02:07; TDRD12; ENSG00000173809; TAA
FLNPDPLRA

SEQ ID NO: 85586 - protein, 9 aa, Homo sapiens
  Table A; Target 85586; HLA-A*29:02; TDRD12; ENSG00000173809; TAA
FLNPDPLRA

SEQ ID NO: 85587 - protein, 9 aa, Homo sapiens
  Table A; Target 85587; HLA-A*30:01; TDRD12; ENSG00000173809; TAA
FLNPDPLRA

SEQ ID NO: 85588 - protein, 9 aa, Homo sapiens
  Table A; Target 85588; HLA-B*13:02; TDRD12; ENSG00000173809; TAA
FLNPDPLRA

SEQ ID NO: 85589 - protein, 9 aa, Homo sapiens
  Table A; Target 85589; HLA-B*54:01; TDRD12; ENSG00000173809; TAA
FLNPDPLRA

SEQ ID NO: 85590 - protein, 9 aa, Homo sapiens
  Table A; Target 85590; HLA-B*55:01; TDRD12; ENSG00000173809; TAA
FLNPDPLRA

SEQ ID NO: 85591 - protein, 9 aa, Homo sapiens
  Table A; Target 85591; HLA-C*02:02; TDRD12; ENSG00000173809; TAA
FLNPDPLRA

SEQ ID NO: 85592 - protein, 9 aa, Homo sapiens
  Table A; Target 85592; HLA-C*14:02; TDRD12; ENSG00000173809; TAA
FLNPDPLRA

SEQ ID NO: 85593 - protein, 10 aa, Homo sapiens
  Table A; Target 85593; HLA-A*02:03; TDRD12; ENSG00000173809; TAA
FLQGKDVQGM

SEQ ID NO: 85594 - protein, 9 aa, Homo sapiens
  Table A; Target 85594; HLA-A*02:01; TDRD12; ENSG00000173809; TAA
FLVDFAKNI

SEQ ID NO: 85595 - protein, 9 aa, Homo sapiens
  Table A; Target 85595; HLA-A*02:03; TDRD12; ENSG00000173809; TAA
FLVDFAKNI

SEQ ID NO: 85596 - protein, 9 aa, Homo sapiens
  Table A; Target 85596; HLA-A*02:04; TDRD12; ENSG00000173809; TAA
FLVDFAKNI

SEQ ID NO: 85597 - protein, 9 aa, Homo sapiens
  Table A; Target 85597; HLA-A*02:07; TDRD12; ENSG00000173809; TAA
FLVDFAKNI

SEQ ID NO: 85598 - protein, 9 aa, Homo sapiens
  Table A; Target 85598; HLA-A*68:02; TDRD12; ENSG00000173809; TAA
FLVDFAKNI

SEQ ID NO: 85599 - protein, 9 aa, Homo sapiens
  Table A; Target 85599; HLA-B*13:02; TDRD12; ENSG00000173809; TAA
FLVDFAKNI

SEQ ID NO: 85600 - protein, 9 aa, Homo sapiens
  Table A; Target 85600; HLA-C*02:02; TDRD12; ENSG00000173809; TAA
FLVDFAKNI

SEQ ID NO: 85601 - protein, 11 aa, Homo sapiens
  Table A; Target 85601; HLA-A*02:01; TDRD12; ENSG00000173809; TAA
FLVDFAKNIPV

SEQ ID NO: 85602 - protein, 11 aa, Homo sapiens
  Table A; Target 85602; HLA-A*02:03; TDRD12; ENSG00000173809; TAA
FLVDFAKNIPV

SEQ ID NO: 85603 - protein, 11 aa, Homo sapiens
  Table A; Target 85603; HLA-A*02:04; TDRD12; ENSG00000173809; TAA
FLVDFAKNIPV

SEQ ID NO: 85604 - protein, 11 aa, Homo sapiens
  Table A; Target 85604; HLA-A*68:02; TDRD12; ENSG00000173809; TAA
FLVDFAKNIPV

SEQ ID NO: 85605 - protein, 9 aa, Homo sapiens
  Table A; Target 85605; HLA-A*02:07; TDRD12; ENSG00000173809; TAA
FMNDPYIVI

SEQ ID NO: 85606 - protein, 9 aa, Homo sapiens
  Table A; Target 85606; HLA-A*23:01; TDRD12; ENSG00000173809; TAA
FMNDPYIVI

SEQ ID NO: 85607 - protein, 9 aa, Homo sapiens
  Table A; Target 85607; HLA-A*24:02; TDRD12; ENSG00000173809; TAA
FMNDPYIVI

SEQ ID NO: 85608 - protein, 9 aa, Homo sapiens
  Table A; Target 85608; HLA-C*02:02; TDRD12; ENSG00000173809; TAA
FMNDPYIVI

SEQ ID NO: 85609 - protein, 11 aa, Homo sapiens
  Table A; Target 85609; HLA-A*02:04; TDRD12; ENSG00000173809; TAA
FMNDPYIVITA

SEQ ID NO: 85610 - protein, 11 aa, Homo sapiens
  Table A; Target 85610; HLA-A*02:07; TDRD12; ENSG00000173809; TAA
FMNDPYIVITA

SEQ ID NO: 85611 - protein, 8 aa, Homo sapiens
  Table A; Target 85611; HLA-B*08:01; TDRD12; ENSG00000173809; TAA
FNKLNPAL

SEQ ID NO: 85612 - protein, 8 aa, Homo sapiens
  Table A; Target 85612; HLA-B*40:02; TDRD12; ENSG00000173809; TAA
FNKLNPAL

SEQ ID NO: 85613 - protein, 10 aa, Homo sapiens
  Table A; Target 85613; HLA-A*25:01; TDRD12; ENSG00000173809; TAA
FPAQSLQHTW

SEQ ID NO: 85614 - protein, 10 aa, Homo sapiens
  Table A; Target 85614; HLA-A*33:03; TDRD12; ENSG00000173809; TAA
FPAQSLQHTW

SEQ ID NO: 85615 - protein, 10 aa, Homo sapiens
  Table A; Target 85615; HLA-A*68:01; TDRD12; ENSG00000173809; TAA
FPAQSLQHTW

SEQ ID NO: 85616 - protein, 10 aa, Homo sapiens
  Table A; Target 85616; HLA-B*27:02; TDRD12; ENSG00000173809; TAA
FPAQSLQHTW

SEQ ID NO: 85617 - protein, 10 aa, Homo sapiens
  Table A; Target 85617; HLA-B*35:01; TDRD12; ENSG00000173809; TAA
FPAQSLQHTW

SEQ ID NO: 85618 - protein, 10 aa, Homo sapiens
  Table A; Target 85618; HLA-B*44:02; TDRD12; ENSG00000173809; TAA
FPAQSLQHTW

SEQ ID NO: 85619 - protein, 10 aa, Homo sapiens
  Table A; Target 85619; HLA-B*54:01; TDRD12; ENSG00000173809; TAA
FPAQSLQHTW

SEQ ID NO: 85620 - protein, 10 aa, Homo sapiens
  Table A; Target 85620; HLA-B*55:01; TDRD12; ENSG00000173809; TAA
FPAQSLQHTW

SEQ ID NO: 85621 - protein, 10 aa, Homo sapiens
  Table A; Target 85621; HLA-B*56:01; TDRD12; ENSG00000173809; TAA
FPAQSLQHTW

SEQ ID NO: 85622 - protein, 10 aa, Homo sapiens
  Table A; Target 85622; HLA-B*57:01; TDRD12; ENSG00000173809; TAA
FPAQSLQHTW

SEQ ID NO: 85623 - protein, 10 aa, Homo sapiens
  Table A; Target 85623; HLA-B*58:01; TDRD12; ENSG00000173809; TAA
FPAQSLQHTW

SEQ ID NO: 85624 - protein, 10 aa, Homo sapiens
  Table A; Target 85624; HLA-C*02:02; TDRD12; ENSG00000173809; TAA
FPAQSLQHTW

SEQ ID NO: 85625 - protein, 8 aa, Homo sapiens
  Table A; Target 85625; HLA-B*07:02; TDRD12; ENSG00000173809; TAA
FPASPKVF

SEQ ID NO: 85626 - protein, 8 aa, Homo sapiens
  Table A; Target 85626; HLA-B*08:01; TDRD12; ENSG00000173809; TAA
FPASPKVF

SEQ ID NO: 85627 - protein, 8 aa, Homo sapiens
  Table A; Target 85627; HLA-B*35:01; TDRD12; ENSG00000173809; TAA
FPASPKVF

SEQ ID NO: 85628 - protein, 8 aa, Homo sapiens
  Table A; Target 85628; HLA-B*35:03; TDRD12; ENSG00000173809; TAA
FPASPKVF

SEQ ID NO: 85629 - protein, 8 aa, Homo sapiens
  Table A; Target 85629; HLA-B*51:01; TDRD12; ENSG00000173809; TAA
FPASPKVF

SEQ ID NO: 85630 - protein, 8 aa, Homo sapiens
  Table A; Target 85630; HLA-C*16:01; TDRD12; ENSG00000173809; TAA
FPASPKVF

SEQ ID NO: 85631 - protein, 9 aa, Homo sapiens
  Table A; Target 85631; HLA-B*54:01; TDRD12; ENSG00000173809; TAA
FPASPKVFG

SEQ ID NO: 85632 - protein, 10 aa, Homo sapiens
  Table A; Target 85632; HLA-B*54:01; TDRD12; ENSG00000173809; TAA
FPASPKVFGG

SEQ ID NO: 85633 - protein, 9 aa, Homo sapiens
  Table A; Target 85633; HLA-B*55:01; TDRD12; ENSG00000173809; TAA
FPGPSHTES

SEQ ID NO: 85634 - protein, 10 aa, Homo sapiens
  Table A; Target 85634; HLA-A*01:01; TDRD12; ENSG00000173809; TAA
FPGPSHTESY

SEQ ID NO: 85635 - protein, 10 aa, Homo sapiens
  Table A; Target 85635; HLA-A*25:01; TDRD12; ENSG00000173809; TAA
FPGPSHTESY

SEQ ID NO: 85636 - protein, 10 aa, Homo sapiens
  Table A; Target 85636; HLA-A*26:01; TDRD12; ENSG00000173809; TAA
FPGPSHTESY

SEQ ID NO: 85637 - protein, 10 aa, Homo sapiens
  Table A; Target 85637; HLA-A*29:02; TDRD12; ENSG00000173809; TAA
FPGPSHTESY

SEQ ID NO: 85638 - protein, 10 aa, Homo sapiens
  Table A; Target 85638; HLA-A*30:02; TDRD12; ENSG00000173809; TAA
FPGPSHTESY

SEQ ID NO: 85639 - protein, 10 aa, Homo sapiens
  Table A; Target 85639; HLA-B*07:02; TDRD12; ENSG00000173809; TAA
FPGPSHTESY

SEQ ID NO: 85640 - protein, 10 aa, Homo sapiens
  Table A; Target 85640; HLA-B*15:01; TDRD12; ENSG00000173809; TAA
FPGPSHTESY

SEQ ID NO: 85641 - protein, 10 aa, Homo sapiens
  Table A; Target 85641; HLA-B*15:03; TDRD12; ENSG00000173809; TAA
FPGPSHTESY

SEQ ID NO: 85642 - protein, 10 aa, Homo sapiens
  Table A; Target 85642; HLA-B*35:01; TDRD12; ENSG00000173809; TAA
FPGPSHTESY

SEQ ID NO: 85643 - protein, 10 aa, Homo sapiens
  Table A; Target 85643; HLA-B*35:03; TDRD12; ENSG00000173809; TAA
FPGPSHTESY

SEQ ID NO: 85644 - protein, 10 aa, Homo sapiens
  Table A; Target 85644; HLA-B*46:01; TDRD12; ENSG00000173809; TAA
FPGPSHTESY

SEQ ID NO: 85645 - protein, 10 aa, Homo sapiens
  Table A; Target 85645; HLA-B*55:01; TDRD12; ENSG00000173809; TAA
FPGPSHTESY

SEQ ID NO: 85646 - protein, 10 aa, Homo sapiens
  Table A; Target 85646; HLA-C*03:03; TDRD12; ENSG00000173809; TAA
FPGPSHTESY

SEQ ID NO: 85647 - protein, 10 aa, Homo sapiens
  Table A; Target 85647; HLA-C*07:04; TDRD12; ENSG00000173809; TAA
FPGPSHTESY

SEQ ID NO: 85648 - protein, 10 aa, Homo sapiens
  Table A; Target 85648; HLA-C*14:02; TDRD12; ENSG00000173809; TAA
FPGPSHTESY

SEQ ID NO: 85649 - protein, 9 aa, Homo sapiens
  Table A; Target 85649; HLA-A*01:01; TDRD12; ENSG00000173809; TAA
FSFPASPKV

SEQ ID NO: 85650 - protein, 9 aa, Homo sapiens
  Table A; Target 85650; HLA-A*02:01; TDRD12; ENSG00000173809; TAA
FSFPASPKV

SEQ ID NO: 85651 - protein, 9 aa, Homo sapiens
  Table A; Target 85651; HLA-A*02:03; TDRD12; ENSG00000173809; TAA
FSFPASPKV

SEQ ID NO: 85652 - protein, 9 aa, Homo sapiens
  Table A; Target 85652; HLA-A*02:04; TDRD12; ENSG00000173809; TAA
FSFPASPKV

SEQ ID NO: 85653 - protein, 9 aa, Homo sapiens
  Table A; Target 85653; HLA-A*02:07; TDRD12; ENSG00000173809; TAA
FSFPASPKV

SEQ ID NO: 85654 - protein, 9 aa, Homo sapiens
  Table A; Target 85654; HLA-A*30:01; TDRD12; ENSG00000173809; TAA
FSFPASPKV

SEQ ID NO: 85655 - protein, 9 aa, Homo sapiens
  Table A; Target 85655; HLA-A*32:01; TDRD12; ENSG00000173809; TAA
FSFPASPKV

SEQ ID NO: 85656 - protein, 9 aa, Homo sapiens
  Table A; Target 85656; HLA-A*68:02; TDRD12; ENSG00000173809; TAA
FSFPASPKV

SEQ ID NO: 85657 - protein, 9 aa, Homo sapiens
  Table A; Target 85657; HLA-B*13:02; TDRD12; ENSG00000173809; TAA
FSFPASPKV

SEQ ID NO: 85658 - protein, 9 aa, Homo sapiens
  Table A; Target 85658; HLA-B*40:02; TDRD12; ENSG00000173809; TAA
FSFPASPKV

SEQ ID NO: 85659 - protein, 9 aa, Homo sapiens
  Table A; Target 85659; HLA-B*46:01; TDRD12; ENSG00000173809; TAA
FSFPASPKV

SEQ ID NO: 85660 - protein, 9 aa, Homo sapiens
  Table A; Target 85660; HLA-B*49:01; TDRD12; ENSG00000173809; TAA
FSFPASPKV

SEQ ID NO: 85661 - protein, 9 aa, Homo sapiens
  Table A; Target 85661; HLA-B*51:01; TDRD12; ENSG00000173809; TAA
FSFPASPKV

SEQ ID NO: 85662 - protein, 9 aa, Homo sapiens
  Table A; Target 85662; HLA-B*54:01; TDRD12; ENSG00000173809; TAA
FSFPASPKV

SEQ ID NO: 85663 - protein, 9 aa, Homo sapiens
  Table A; Target 85663; HLA-B*56:01; TDRD12; ENSG00000173809; TAA
FSFPASPKV

SEQ ID NO: 85664 - protein, 9 aa, Homo sapiens
  Table A; Target 85664; HLA-B*58:01; TDRD12; ENSG00000173809; TAA
FSFPASPKV

SEQ ID NO: 85665 - protein, 9 aa, Homo sapiens
  Table A; Target 85665; HLA-C*02:02; TDRD12; ENSG00000173809; TAA
FSFPASPKV

SEQ ID NO: 85666 - protein, 9 aa, Homo sapiens
  Table A; Target 85666; HLA-C*03:03; TDRD12; ENSG00000173809; TAA
FSFPASPKV

SEQ ID NO: 85667 - protein, 9 aa, Homo sapiens
  Table A; Target 85667; HLA-C*03:04; TDRD12; ENSG00000173809; TAA
FSFPASPKV

SEQ ID NO: 85668 - protein, 9 aa, Homo sapiens
  Table A; Target 85668; HLA-C*05:01; TDRD12; ENSG00000173809; TAA
FSFPASPKV

SEQ ID NO: 85669 - protein, 9 aa, Homo sapiens
  Table A; Target 85669; HLA-C*06:02; TDRD12; ENSG00000173809; TAA
FSFPASPKV

SEQ ID NO: 85670 - protein, 9 aa, Homo sapiens
  Table A; Target 85670; HLA-C*07:04; TDRD12; ENSG00000173809; TAA
FSFPASPKV

SEQ ID NO: 85671 - protein, 9 aa, Homo sapiens
  Table A; Target 85671; HLA-C*12:03; TDRD12; ENSG00000173809; TAA
FSFPASPKV

SEQ ID NO: 85672 - protein, 9 aa, Homo sapiens
  Table A; Target 85672; HLA-C*16:01; TDRD12; ENSG00000173809; TAA
FSFPASPKV

SEQ ID NO: 85673 - protein, 9 aa, Homo sapiens
  Table A; Target 85673; HLA-C*16:02; TDRD12; ENSG00000173809; TAA
FSFPASPKV

SEQ ID NO: 85674 - protein, 9 aa, Homo sapiens
  Table A; Target 85674; HLA-C*16:04; TDRD12; ENSG00000173809; TAA
FSFPASPKV

SEQ ID NO: 85675 - protein, 10 aa, Homo sapiens
  Table A; Target 85675; HLA-A*01:01; TDRD12; ENSG00000173809; TAA
FSFPASPKVF

SEQ ID NO: 85676 - protein, 10 aa, Homo sapiens
  Table A; Target 85676; HLA-A*25:01; TDRD12; ENSG00000173809; TAA
FSFPASPKVF

SEQ ID NO: 85677 - protein, 10 aa, Homo sapiens
  Table A; Target 85677; HLA-A*32:01; TDRD12; ENSG00000173809; TAA
FSFPASPKVF

SEQ ID NO: 85678 - protein, 10 aa, Homo sapiens
  Table A; Target 85678; HLA-B*15:03; TDRD12; ENSG00000173809; TAA
FSFPASPKVF

SEQ ID NO: 85679 - protein, 10 aa, Homo sapiens
  Table A; Target 85679; HLA-B*46:01; TDRD12; ENSG00000173809; TAA
FSFPASPKVF

SEQ ID NO: 85680 - protein, 10 aa, Homo sapiens
  Table A; Target 85680; HLA-B*57:01; TDRD12; ENSG00000173809; TAA
FSFPASPKVF

SEQ ID NO: 85681 - protein, 10 aa, Homo sapiens
  Table A; Target 85681; HLA-B*58:01; TDRD12; ENSG00000173809; TAA
FSFPASPKVF

SEQ ID NO: 85682 - protein, 10 aa, Homo sapiens
  Table A; Target 85682; HLA-C*02:02; TDRD12; ENSG00000173809; TAA
FSFPASPKVF

SEQ ID NO: 85683 - protein, 10 aa, Homo sapiens
  Table A; Target 85683; HLA-C*03:04; TDRD12; ENSG00000173809; TAA
FSFPASPKVF

SEQ ID NO: 85684 - protein, 10 aa, Homo sapiens
  Table A; Target 85684; HLA-C*12:03; TDRD12; ENSG00000173809; TAA
FSFPASPKVF

SEQ ID NO: 85685 - protein, 8 aa, Homo sapiens
  Table A; Target 85685; HLA-B*54:01; TDRD12; ENSG00000173809; TAA
FTAGVLEA

SEQ ID NO: 85686 - protein, 8 aa, Homo sapiens
  Table A; Target 85686; HLA-C*03:03; TDRD12; ENSG00000173809; TAA
FTAGVLEA

SEQ ID NO: 85687 - protein, 8 aa, Homo sapiens
  Table A; Target 85687; HLA-C*03:04; TDRD12; ENSG00000173809; TAA
FTAGVLEA

SEQ ID NO: 85688 - protein, 8 aa, Homo sapiens
  Table A; Target 85688; HLA-C*12:03; TDRD12; ENSG00000173809; TAA
FTAGVLEA

SEQ ID NO: 85689 - protein, 9 aa, Homo sapiens
  Table A; Target 85689; HLA-A*01:01; TDRD12; ENSG00000173809; TAA
FTAGVLEAK

SEQ ID NO: 85690 - protein, 9 aa, Homo sapiens
  Table A; Target 85690; HLA-A*03:01; TDRD12; ENSG00000173809; TAA
FTAGVLEAK

SEQ ID NO: 85691 - protein, 9 aa, Homo sapiens
  Table A; Target 85691; HLA-A*03:02; TDRD12; ENSG00000173809; TAA
FTAGVLEAK

SEQ ID NO: 85692 - protein, 9 aa, Homo sapiens
  Table A; Target 85692; HLA-A*11:01; TDRD12; ENSG00000173809; TAA
FTAGVLEAK

SEQ ID NO: 85693 - protein, 9 aa, Homo sapiens
  Table A; Target 85693; HLA-A*33:01; TDRD12; ENSG00000173809; TAA
FTAGVLEAK

SEQ ID NO: 85694 - protein, 9 aa, Homo sapiens
  Table A; Target 85694; HLA-A*33:03; TDRD12; ENSG00000173809; TAA
FTAGVLEAK

SEQ ID NO: 85695 - protein, 9 aa, Homo sapiens
  Table A; Target 85695; HLA-A*68:01; TDRD12; ENSG00000173809; TAA
FTAGVLEAK

SEQ ID NO: 85696 - protein, 9 aa, Homo sapiens
  Table A; Target 85696; HLA-A*68:02; TDRD12; ENSG00000173809; TAA
FTAGVLEAK

SEQ ID NO: 85697 - protein, 9 aa, Homo sapiens
  Table A; Target 85697; HLA-B*27:02; TDRD12; ENSG00000173809; TAA
FTAGVLEAK

SEQ ID NO: 85698 - protein, 9 aa, Homo sapiens
  Table A; Target 85698; HLA-B*27:05; TDRD12; ENSG00000173809; TAA
FTAGVLEAK

SEQ ID NO: 85699 - protein, 9 aa, Homo sapiens
  Table A; Target 85699; HLA-C*02:02; TDRD12; ENSG00000173809; TAA
FTAGVLEAK

SEQ ID NO: 85700 - protein, 9 aa, Homo sapiens
  Table A; Target 85700; HLA-C*03:04; TDRD12; ENSG00000173809; TAA
FTAGVLEAK

SEQ ID NO: 85701 - protein, 9 aa, Homo sapiens
  Table A; Target 85701; HLA-C*07:06; TDRD12; ENSG00000173809; TAA
FTAGVLEAK

SEQ ID NO: 85702 - protein, 10 aa, Homo sapiens
  Table A; Target 85702; HLA-A*68:02; TDRD12; ENSG00000173809; TAA
FTAGVLEAKE

SEQ ID NO: 85703 - protein, 9 aa, Homo sapiens
  Table A; Target 85703; HLA-A*23:01; TDRD12; ENSG00000173809; TAA
FYILNATNY

SEQ ID NO: 85704 - protein, 9 aa, Homo sapiens
  Table A; Target 85704; HLA-A*24:02; TDRD12; ENSG00000173809; TAA
FYILNATNY

SEQ ID NO: 85705 - protein, 9 aa, Homo sapiens
  Table A; Target 85705; HLA-A*29:02; TDRD12; ENSG00000173809; TAA
FYILNATNY

SEQ ID NO: 85706 - protein, 9 aa, Homo sapiens
  Table A; Target 85706; HLA-A*30:02; TDRD12; ENSG00000173809; TAA
FYILNATNY

SEQ ID NO: 85707 - protein, 9 aa, Homo sapiens
  Table A; Target 85707; HLA-B*15:03; TDRD12; ENSG00000173809; TAA
FYILNATNY

SEQ ID NO: 85708 - protein, 9 aa, Homo sapiens
  Table A; Target 85708; HLA-B*46:01; TDRD12; ENSG00000173809; TAA
FYILNATNY

SEQ ID NO: 85709 - protein, 9 aa, Homo sapiens
  Table A; Target 85709; HLA-C*01:02; TDRD12; ENSG00000173809; TAA
FYILNATNY

SEQ ID NO: 85710 - protein, 9 aa, Homo sapiens
  Table A; Target 85710; HLA-C*02:02; TDRD12; ENSG00000173809; TAA
FYILNATNY

SEQ ID NO: 85711 - protein, 9 aa, Homo sapiens
  Table A; Target 85711; HLA-C*07:04; TDRD12; ENSG00000173809; TAA
FYILNATNY

SEQ ID NO: 85712 - protein, 9 aa, Homo sapiens
  Table A; Target 85712; HLA-C*14:02; TDRD12; ENSG00000173809; TAA
FYILNATNY

SEQ ID NO: 85713 - protein, 10 aa, Homo sapiens
  Table A; Target 85713; HLA-A*23:01; TDRD12; ENSG00000173809; TAA
FYILNATNYF

SEQ ID NO: 85714 - protein, 10 aa, Homo sapiens
  Table A; Target 85714; HLA-A*24:02; TDRD12; ENSG00000173809; TAA
FYILNATNYF

SEQ ID NO: 85715 - protein, 9 aa, Homo sapiens
  Table A; Target 85715; HLA-C*14:02; TDRD12; ENSG00000173809; TAA
FYNSTCQDI

SEQ ID NO: 85716 - protein, 10 aa, Homo sapiens
  Table A; Target 85716; HLA-A*01:01; TDRD12; ENSG00000173809; TAA
GCDVIVTTPY

SEQ ID NO: 85717 - protein, 9 aa, Homo sapiens
  Table A; Target 85717; HLA-B*49:01; TDRD12; ENSG00000173809; TAA
GEYSMSSRP

SEQ ID NO: 85718 - protein, 10 aa, Homo sapiens
  Table A; Target 85718; HLA-A*30:01; TDRD12; ENSG00000173809; TAA
GEYSMSSRPL

SEQ ID NO: 85719 - protein, 10 aa, Homo sapiens
  Table A; Target 85719; HLA-B*40:01; TDRD12; ENSG00000173809; TAA
GEYSMSSRPL

SEQ ID NO: 85720 - protein, 10 aa, Homo sapiens
  Table A; Target 85720; HLA-B*49:01; TDRD12; ENSG00000173809; TAA
GEYSMSSRPL

SEQ ID NO: 85721 - protein, 11 aa, Homo sapiens
  Table A; Target 85721; HLA-A*02:07; TDRD12; ENSG00000173809; TAA
GIDNPEHIEQL

SEQ ID NO: 85722 - protein, 11 aa, Homo sapiens
  Table A; Target 85722; HLA-C*05:01; TDRD12; ENSG00000173809; TAA
GIDNPEHIEQL

SEQ ID NO: 85723 - protein, 10 aa, Homo sapiens
  Table A; Target 85723; HLA-A*03:01; TDRD12; ENSG00000173809; TAA
GISDLQQLQK

SEQ ID NO: 85724 - protein, 10 aa, Homo sapiens
  Table A; Target 85724; HLA-A*03:02; TDRD12; ENSG00000173809; TAA
GISDLQQLQK

SEQ ID NO: 85725 - protein, 10 aa, Homo sapiens
  Table A; Target 85725; HLA-A*11:01; TDRD12; ENSG00000173809; TAA
GISDLQQLQK

SEQ ID NO: 85726 - protein, 10 aa, Homo sapiens
  Table A; Target 85726; HLA-B*27:02; TDRD12; ENSG00000173809; TAA
GISDLQQLQK

SEQ ID NO: 85727 - protein, 11 aa, Homo sapiens
  Table A; Target 85727; HLA-A*02:01; TDRD12; ENSG00000173809; TAA
GISDLQQLQKL

SEQ ID NO: 85728 - protein, 11 aa, Homo sapiens
  Table A; Target 85728; HLA-A*02:04; TDRD12; ENSG00000173809; TAA
GISDLQQLQKL

SEQ ID NO: 85729 - protein, 8 aa, Homo sapiens
  Table A; Target 85729; HLA-B*08:01; TDRD12; ENSG00000173809; TAA
GLAEKTLF

SEQ ID NO: 85730 - protein, 9 aa, Homo sapiens
  Table A; Target 85730; HLA-A*02:03; TDRD12; ENSG00000173809; TAA
GLAEKTLFH

SEQ ID NO: 85731 - protein, 9 aa, Homo sapiens
  Table A; Target 85731; HLA-A*03:01; TDRD12; ENSG00000173809; TAA
GLAEKTLFH

SEQ ID NO: 85732 - protein, 9 aa, Homo sapiens
  Table A; Target 85732; HLA-A*03:02; TDRD12; ENSG00000173809; TAA
GLAEKTLFH

SEQ ID NO: 85733 - protein, 9 aa, Homo sapiens
  Table A; Target 85733; HLA-A*29:02; TDRD12; ENSG00000173809; TAA
GLAEKTLFH

SEQ ID NO: 85734 - protein, 11 aa, Homo sapiens
  Table A; Target 85734; HLA-A*02:01; TDRD12; ENSG00000173809; TAA
GLAEKTLFHRV

SEQ ID NO: 85735 - protein, 11 aa, Homo sapiens
  Table A; Target 85735; HLA-A*02:03; TDRD12; ENSG00000173809; TAA
GLAEKTLFHRV

SEQ ID NO: 85736 - protein, 11 aa, Homo sapiens
  Table A; Target 85736; HLA-A*02:04; TDRD12; ENSG00000173809; TAA
GLAEKTLFHRV

SEQ ID NO: 85737 - protein, 8 aa, Homo sapiens
  Table A; Target 85737; HLA-A*02:01; TDRD12; ENSG00000173809; TAA
GLQPPVVV

SEQ ID NO: 85738 - protein, 9 aa, Homo sapiens
  Table A; Target 85738; HLA-A*02:01; TDRD12; ENSG00000173809; TAA
GLQPPVVVL

SEQ ID NO: 85739 - protein, 9 aa, Homo sapiens
  Table A; Target 85739; HLA-A*02:03; TDRD12; ENSG00000173809; TAA
GLQPPVVVL

SEQ ID NO: 85740 - protein, 9 aa, Homo sapiens
  Table A; Target 85740; HLA-A*02:04; TDRD12; ENSG00000173809; TAA
GLQPPVVVL

SEQ ID NO: 85741 - protein, 9 aa, Homo sapiens
  Table A; Target 85741; HLA-A*02:07; TDRD12; ENSG00000173809; TAA
GLQPPVVVL

SEQ ID NO: 85742 - protein, 9 aa, Homo sapiens
  Table A; Target 85742; HLA-A*03:02; TDRD12; ENSG00000173809; TAA
GLQPPVVVL

SEQ ID NO: 85743 - protein, 9 aa, Homo sapiens
  Table A; Target 85743; HLA-A*32:01; TDRD12; ENSG00000173809; TAA
GLQPPVVVL

SEQ ID NO: 85744 - protein, 9 aa, Homo sapiens
  Table A; Target 85744; HLA-B*13:02; TDRD12; ENSG00000173809; TAA
GLQPPVVVL

SEQ ID NO: 85745 - protein, 9 aa, Homo sapiens
  Table A; Target 85745; HLA-B*15:01; TDRD12; ENSG00000173809; TAA
GLQPPVVVL

SEQ ID NO: 85746 - protein, 9 aa, Homo sapiens
  Table A; Target 85746; HLA-B*39:01; TDRD12; ENSG00000173809; TAA
GLQPPVVVL

SEQ ID NO: 85747 - protein, 9 aa, Homo sapiens
  Table A; Target 85747; HLA-B*55:01; TDRD12; ENSG00000173809; TAA
GLQPPVVVL

SEQ ID NO: 85748 - protein, 9 aa, Homo sapiens
  Table A; Target 85748; HLA-C*07:04; TDRD12; ENSG00000173809; TAA
GLQPPVVVL

SEQ ID NO: 85749 - protein, 10 aa, Homo sapiens
  Table A; Target 85749; HLA-A*03:01; TDRD12; ENSG00000173809; TAA
GLQPPVVVLR

SEQ ID NO: 85750 - protein, 10 aa, Homo sapiens
  Table A; Target 85750; HLA-A*03:02; TDRD12; ENSG00000173809; TAA
GLQPPVVVLR

SEQ ID NO: 85751 - protein, 10 aa, Homo sapiens
  Table A; Target 85751; HLA-A*31:01; TDRD12; ENSG00000173809; TAA
GLQPPVVVLR

SEQ ID NO: 85752 - protein, 10 aa, Homo sapiens
  Table A; Target 85752; HLA-C*07:06; TDRD12; ENSG00000173809; TAA
GLQPPVVVLR

SEQ ID NO: 85753 - protein, 11 aa, Homo sapiens
  Table A; Target 85753; HLA-A*02:04; TDRD12; ENSG00000173809; TAA
GLVTRDQLLHL

SEQ ID NO: 85754 - protein, 8 aa, Homo sapiens
  Table A; Target 85754; HLA-A*03:01; TDRD12; ENSG00000173809; TAA
GLYGLAEK

SEQ ID NO: 85755 - protein, 8 aa, Homo sapiens
  Table A; Target 85755; HLA-A*03:02; TDRD12; ENSG00000173809; TAA
GLYGLAEK

SEQ ID NO: 85756 - protein, 9 aa, Homo sapiens
  Table A; Target 85756; HLA-B*13:02; TDRD12; ENSG00000173809; TAA
GLYGLAEKT

SEQ ID NO: 85757 - protein, 10 aa, Homo sapiens
  Table A; Target 85757; HLA-A*02:03; TDRD12; ENSG00000173809; TAA
GLYGLAEKTL

SEQ ID NO: 85758 - protein, 11 aa, Homo sapiens
  Table A; Target 85758; HLA-A*02:01; TDRD12; ENSG00000173809; TAA
GLYGLAEKTLF

SEQ ID NO: 85759 - protein, 11 aa, Homo sapiens
  Table A; Target 85759; HLA-A*02:04; TDRD12; ENSG00000173809; TAA
GLYGLAEKTLF

SEQ ID NO: 85760 - protein, 11 aa, Homo sapiens
  Table A; Target 85760; HLA-A*29:02; TDRD12; ENSG00000173809; TAA
GLYGLAEKTLF

SEQ ID NO: 85761 - protein, 11 aa, Homo sapiens
  Table A; Target 85761; HLA-B*15:01; TDRD12; ENSG00000173809; TAA
GLYGLAEKTLF

SEQ ID NO: 85762 - protein, 10 aa, Homo sapiens
  Table A; Target 85762; HLA-B*15:01; TDRD12; ENSG00000173809; TAA
GMEDSHGVNF

SEQ ID NO: 85763 - protein, 10 aa, Homo sapiens
  Table A; Target 85763; HLA-B*15:03; TDRD12; ENSG00000173809; TAA
GMEDSHGVNF

SEQ ID NO: 85764 - protein, 10 aa, Homo sapiens
  Table A; Target 85764; HLA-C*07:04; TDRD12; ENSG00000173809; TAA
GMEDSHGVNF

SEQ ID NO: 85765 - protein, 9 aa, Homo sapiens
  Table A; Target 85765; HLA-A*23:01; TDRD12; ENSG00000173809; TAA
GNVQQVVHL

SEQ ID NO: 85766 - protein, 9 aa, Homo sapiens
  Table A; Target 85766; HLA-C*07:04; TDRD12; ENSG00000173809; TAA
GNVQQVVHL

SEQ ID NO: 85767 - protein, 9 aa, Homo sapiens
  Table A; Target 85767; HLA-B*56:01; TDRD12; ENSG00000173809; TAA
GPLAVIVCP

SEQ ID NO: 85768 - protein, 8 aa, Homo sapiens
  Table A; Target 85768; HLA-B*27:05; TDRD12; ENSG00000173809; TAA
GRTGLVTR

SEQ ID NO: 85769 - protein, 9 aa, Homo sapiens
  Table A; Target 85769; HLA-A*11:01; TDRD12; ENSG00000173809; TAA
GVLEAKEDK

SEQ ID NO: 85770 - protein, 10 aa, Homo sapiens
  Table A; Target 85770; HLA-A*03:02; TDRD12; ENSG00000173809; TAA
GVLEAKEDKK

SEQ ID NO: 85771 - protein, 10 aa, Homo sapiens
  Table A; Target 85771; HLA-A*11:01; TDRD12; ENSG00000173809; TAA
GVLEAKEDKK

SEQ ID NO: 85772 - protein, 9 aa, Homo sapiens
  Table A; Target 85772; HLA-A*30:01; TDRD12; ENSG00000173809; TAA
GVNFPAQSL

SEQ ID NO: 85773 - protein, 9 aa, Homo sapiens
  Table A; Target 85773; HLA-A*32:01; TDRD12; ENSG00000173809; TAA
GVNFPAQSL

SEQ ID NO: 85774 - protein, 9 aa, Homo sapiens
  Table A; Target 85774; HLA-B*07:02; TDRD12; ENSG00000173809; TAA
GVNFPAQSL

SEQ ID NO: 85775 - protein, 9 aa, Homo sapiens
  Table A; Target 85775; HLA-B*13:02; TDRD12; ENSG00000173809; TAA
GVNFPAQSL

SEQ ID NO: 85776 - protein, 9 aa, Homo sapiens
  Table A; Target 85776; HLA-B*15:01; TDRD12; ENSG00000173809; TAA
GVNFPAQSL

SEQ ID NO: 85777 - protein, 9 aa, Homo sapiens
  Table A; Target 85777; HLA-B*15:03; TDRD12; ENSG00000173809; TAA
GVNFPAQSL

SEQ ID NO: 85778 - protein, 9 aa, Homo sapiens
  Table A; Target 85778; HLA-B*27:05; TDRD12; ENSG00000173809; TAA
GVNFPAQSL

SEQ ID NO: 85779 - protein, 9 aa, Homo sapiens
  Table A; Target 85779; HLA-B*46:01; TDRD12; ENSG00000173809; TAA
GVNFPAQSL

SEQ ID NO: 85780 - protein, 9 aa, Homo sapiens
  Table A; Target 85780; HLA-B*58:01; TDRD12; ENSG00000173809; TAA
GVNFPAQSL

SEQ ID NO: 85781 - protein, 9 aa, Homo sapiens
  Table A; Target 85781; HLA-C*01:02; TDRD12; ENSG00000173809; TAA
GVNFPAQSL

SEQ ID NO: 85782 - protein, 9 aa, Homo sapiens
  Table A; Target 85782; HLA-C*03:03; TDRD12; ENSG00000173809; TAA
GVNFPAQSL

SEQ ID NO: 85783 - protein, 9 aa, Homo sapiens
  Table A; Target 85783; HLA-C*03:04; TDRD12; ENSG00000173809; TAA
GVNFPAQSL

SEQ ID NO: 85784 - protein, 9 aa, Homo sapiens
  Table A; Target 85784; HLA-C*07:02; TDRD12; ENSG00000173809; TAA
GVNFPAQSL

SEQ ID NO: 85785 - protein, 9 aa, Homo sapiens
  Table A; Target 85785; HLA-C*14:02; TDRD12; ENSG00000173809; TAA
GVNFPAQSL

SEQ ID NO: 85786 - protein, 9 aa, Homo sapiens
  Table A; Target 85786; HLA-C*16:04; TDRD12; ENSG00000173809; TAA
GVNFPAQSL

SEQ ID NO: 85787 - protein, 9 aa, Homo sapiens
  Table A; Target 85787; HLA-A*24:02; TDRD12; ENSG00000173809; TAA
GYIKIIPFY

SEQ ID NO: 85788 - protein, 9 aa, Homo sapiens
  Table A; Target 85788; HLA-A*29:02; TDRD12; ENSG00000173809; TAA
GYIKIIPFY

SEQ ID NO: 85789 - protein, 10 aa, Homo sapiens
  Table A; Target 85789; HLA-C*03:03; TDRD12; ENSG00000173809; TAA
HAEQGSPAEQ

SEQ ID NO: 85790 - protein, 8 aa, Homo sapiens
  Table A; Target 85790; HLA-A*29:02; TDRD12; ENSG00000173809; TAA
HAVGVLRY

SEQ ID NO: 85791 - protein, 8 aa, Homo sapiens
  Table A; Target 85791; HLA-B*35:01; TDRD12; ENSG00000173809; TAA
HAVGVLRY

SEQ ID NO: 85792 - protein, 8 aa, Homo sapiens
  Table A; Target 85792; HLA-C*02:02; TDRD12; ENSG00000173809; TAA
HAVGVLRY

SEQ ID NO: 85793 - protein, 9 aa, Homo sapiens
  Table A; Target 85793; HLA-A*68:02; TDRD12; ENSG00000173809; TAA
HAVGVLRYL

SEQ ID NO: 85794 - protein, 9 aa, Homo sapiens
  Table A; Target 85794; HLA-B*57:01; TDRD12; ENSG00000173809; TAA
HAVGVLRYL

SEQ ID NO: 85795 - protein, 9 aa, Homo sapiens
  Table A; Target 85795; HLA-C*02:02; TDRD12; ENSG00000173809; TAA
HAVGVLRYL

SEQ ID NO: 85796 - protein, 9 aa, Homo sapiens
  Table A; Target 85796; HLA-C*03:04; TDRD12; ENSG00000173809; TAA
HAVGVLRYL

SEQ ID NO: 85797 - protein, 9 aa, Homo sapiens
  Table A; Target 85797; HLA-C*06:02; TDRD12; ENSG00000173809; TAA
HAVGVLRYL

SEQ ID NO: 85798 - protein, 9 aa, Homo sapiens
  Table A; Target 85798; HLA-C*12:03; TDRD12; ENSG00000173809; TAA
HAVGVLRYL

SEQ ID NO: 85799 - protein, 9 aa, Homo sapiens
  Table A; Target 85799; HLA-C*16:02; TDRD12; ENSG00000173809; TAA
HAVGVLRYL

SEQ ID NO: 85800 - protein, 9 aa, Homo sapiens
  Table A; Target 85800; HLA-A*01:01; TDRD12; ENSG00000173809; TAA
HCESNPLLY

SEQ ID NO: 85801 - protein, 9 aa, Homo sapiens
  Table A; Target 85801; HLA-A*03:01; TDRD12; ENSG00000173809; TAA
HCESNPLLY

SEQ ID NO: 85802 - protein, 9 aa, Homo sapiens
  Table A; Target 85802; HLA-A*29:02; TDRD12; ENSG00000173809; TAA
HCESNPLLY

SEQ ID NO: 85803 - protein, 9 aa, Homo sapiens
  Table A; Target 85803; HLA-A*30:02; TDRD12; ENSG00000173809; TAA
HCESNPLLY

SEQ ID NO: 85804 - protein, 9 aa, Homo sapiens
  Table A; Target 85804; HLA-B*35:01; TDRD12; ENSG00000173809; TAA
HCESNPLLY

SEQ ID NO: 85805 - protein, 9 aa, Homo sapiens
  Table A; Target 85805; HLA-C*07:01; TDRD12; ENSG00000173809; TAA
HCESNPLLY

SEQ ID NO: 85806 - protein, 8 aa, Homo sapiens
  Table A; Target 85806; HLA-B*37:01; TDRD12; ENSG00000173809; TAA
HDAKVILA

SEQ ID NO: 85807 - protein, 9 aa, Homo sapiens
  Table A; Target 85807; HLA-A*30:01; TDRD12; ENSG00000173809; TAA
HDAKVILAL

SEQ ID NO: 85808 - protein, 9 aa, Homo sapiens
  Table A; Target 85808; HLA-A*68:02; TDRD12; ENSG00000173809; TAA
HDAKVILAL

SEQ ID NO: 85809 - protein, 9 aa, Homo sapiens
  Table A; Target 85809; HLA-B*13:02; TDRD12; ENSG00000173809; TAA
HDAKVILAL

SEQ ID NO: 85810 - protein, 9 aa, Homo sapiens
  Table A; Target 85810; HLA-B*35:03; TDRD12; ENSG00000173809; TAA
HDAKVILAL

SEQ ID NO: 85811 - protein, 9 aa, Homo sapiens
  Table A; Target 85811; HLA-B*37:01; TDRD12; ENSG00000173809; TAA
HDAKVILAL

SEQ ID NO: 85812 - protein, 9 aa, Homo sapiens
  Table A; Target 85812; HLA-B*38:01; TDRD12; ENSG00000173809; TAA
HDAKVILAL

SEQ ID NO: 85813 - protein, 9 aa, Homo sapiens
  Table A; Target 85813; HLA-B*40:01; TDRD12; ENSG00000173809; TAA
HDAKVILAL

SEQ ID NO: 85814 - protein, 9 aa, Homo sapiens
  Table A; Target 85814; HLA-B*40:02; TDRD12; ENSG00000173809; TAA
HDAKVILAL

SEQ ID NO: 85815 - protein, 9 aa, Homo sapiens
  Table A; Target 85815; HLA-B*44:02; TDRD12; ENSG00000173809; TAA
HDAKVILAL

SEQ ID NO: 85816 - protein, 9 aa, Homo sapiens
  Table A; Target 85816; HLA-B*44:03; TDRD12; ENSG00000173809; TAA
HDAKVILAL

SEQ ID NO: 85817 - protein, 9 aa, Homo sapiens
  Table A; Target 85817; HLA-C*06:02; TDRD12; ENSG00000173809; TAA
HDAKVILAL

SEQ ID NO: 85818 - protein, 8 aa, Homo sapiens
  Table A; Target 85818; HLA-A*30:01; TDRD12; ENSG00000173809; TAA
HDVDYQKL

SEQ ID NO: 85819 - protein, 8 aa, Homo sapiens
  Table A; Target 85819; HLA-B*37:01; TDRD12; ENSG00000173809; TAA
HDVDYQKL

SEQ ID NO: 85820 - protein, 8 aa, Homo sapiens
  Table A; Target 85820; HLA-B*40:02; TDRD12; ENSG00000173809; TAA
HDVDYQKL

SEQ ID NO: 85821 - protein, 10 aa, Homo sapiens
  Table A; Target 85821; HLA-C*14:02; TDRD12; ENSG00000173809; TAA
HFHAEQGSPA

SEQ ID NO: 85822 - protein, 10 aa, Homo sapiens
  Table A; Target 85822; HLA-C*03:03; TDRD12; ENSG00000173809; TAA
HGVNFPAQSL

SEQ ID NO: 85823 - protein, 10 aa, Homo sapiens
  Table A; Target 85823; HLA-C*03:04; TDRD12; ENSG00000173809; TAA
HGVNFPAQSL

SEQ ID NO: 85824 - protein, 8 aa, Homo sapiens
  Table A; Target 85824; HLA-C*01:02; TDRD12; ENSG00000173809; TAA
HITNLSSL

SEQ ID NO: 85825 - protein, 8 aa, Homo sapiens
  Table A; Target 85825; HLA-C*03:04; TDRD12; ENSG00000173809; TAA
HITNLSSL

SEQ ID NO: 85826 - protein, 9 aa, Homo sapiens
  Table A; Target 85826; HLA-A*03:02; TDRD12; ENSG00000173809; TAA
HITNLSSLK

SEQ ID NO: 85827 - protein, 9 aa, Homo sapiens
  Table A; Target 85827; HLA-A*02:01; TDRD12; ENSG00000173809; TAA
HLILDEVEV

SEQ ID NO: 85828 - protein, 9 aa, Homo sapiens
  Table A; Target 85828; HLA-B*35:03; TDRD12; ENSG00000173809; TAA
HLILDEVEV

SEQ ID NO: 85829 - protein, 9 aa, Homo sapiens
  Table A; Target 85829; HLA-B*55:01; TDRD12; ENSG00000173809; TAA
HLILDEVEV

SEQ ID NO: 85830 - protein, 9 aa, Homo sapiens
  Table A; Target 85830; HLA-A*02:01; TDRD12; ENSG00000173809; TAA
HLPEHFHTL

SEQ ID NO: 85831 - protein, 9 aa, Homo sapiens
  Table A; Target 85831; HLA-A*02:03; TDRD12; ENSG00000173809; TAA
HLPEHFHTL

SEQ ID NO: 85832 - protein, 9 aa, Homo sapiens
  Table A; Target 85832; HLA-A*02:04; TDRD12; ENSG00000173809; TAA
HLPEHFHTL

SEQ ID NO: 85833 - protein, 9 aa, Homo sapiens
  Table A; Target 85833; HLA-A*02:07; TDRD12; ENSG00000173809; TAA
HLPEHFHTL

SEQ ID NO: 85834 - protein, 9 aa, Homo sapiens
  Table A; Target 85834; HLA-A*03:01; TDRD12; ENSG00000173809; TAA
HLPEHFHTL

SEQ ID NO: 85835 - protein, 9 aa, Homo sapiens
  Table A; Target 85835; HLA-A*24:02; TDRD12; ENSG00000173809; TAA
HLPEHFHTL

SEQ ID NO: 85836 - protein, 9 aa, Homo sapiens
  Table A; Target 85836; HLA-A*68:02; TDRD12; ENSG00000173809; TAA
HLPEHFHTL

SEQ ID NO: 85837 - protein, 9 aa, Homo sapiens
  Table A; Target 85837; HLA-B*08:01; TDRD12; ENSG00000173809; TAA
HLPEHFHTL

SEQ ID NO: 85838 - protein, 8 aa, Homo sapiens
  Table A; Target 85838; HLA-B*35:03; TDRD12; ENSG00000173809; TAA
HMDLYATL

SEQ ID NO: 85839 - protein, 8 aa, Homo sapiens
  Table A; Target 85839; HLA-C*04:01; TDRD12; ENSG00000173809; TAA
HMDLYATL

SEQ ID NO: 85840 - protein, 8 aa, Homo sapiens
  Table A; Target 85840; HLA-C*05:01; TDRD12; ENSG00000173809; TAA
HMDLYATL

SEQ ID NO: 85841 - protein, 9 aa, Homo sapiens
  Table A; Target 85841; HLA-B*07:02; TDRD12; ENSG00000173809; TAA
HPVLLTIGL

SEQ ID NO: 85842 - protein, 9 aa, Homo sapiens
  Table A; Target 85842; HLA-B*35:01; TDRD12; ENSG00000173809; TAA
HPVLLTIGL

SEQ ID NO: 85843 - protein, 9 aa, Homo sapiens
  Table A; Target 85843; HLA-B*35:03; TDRD12; ENSG00000173809; TAA
HPVLLTIGL

SEQ ID NO: 85844 - protein, 9 aa, Homo sapiens
  Table A; Target 85844; HLA-B*54:01; TDRD12; ENSG00000173809; TAA
HPVLLTIGL

SEQ ID NO: 85845 - protein, 9 aa, Homo sapiens
  Table A; Target 85845; HLA-B*56:01; TDRD12; ENSG00000173809; TAA
HPVLLTIGL

SEQ ID NO: 85846 - protein, 9 aa, Homo sapiens
  Table A; Target 85846; HLA-C*07:02; TDRD12; ENSG00000173809; TAA
HPVLLTIGL

SEQ ID NO: 85847 - protein, 8 aa, Homo sapiens
  Table A; Target 85847; HLA-B*13:02; TDRD12; ENSG00000173809; TAA
HQIVAVGV

SEQ ID NO: 85848 - protein, 9 aa, Homo sapiens
  Table A; Target 85848; HLA-B*15:01; TDRD12; ENSG00000173809; TAA
HQIVAVGVH

SEQ ID NO: 85849 - protein, 9 aa, Homo sapiens
  Table A; Target 85849; HLA-B*15:03; TDRD12; ENSG00000173809; TAA
HQIVAVGVH

SEQ ID NO: 85850 - protein, 10 aa, Homo sapiens
  Table A; Target 85850; HLA-A*25:01; TDRD12; ENSG00000173809; TAA
HQIVAVGVHW

SEQ ID NO: 85851 - protein, 10 aa, Homo sapiens
  Table A; Target 85851; HLA-B*44:02; TDRD12; ENSG00000173809; TAA
HQIVAVGVHW

SEQ ID NO: 85852 - protein, 10 aa, Homo sapiens
  Table A; Target 85852; HLA-B*44:03; TDRD12; ENSG00000173809; TAA
HQIVAVGVHW

SEQ ID NO: 85853 - protein, 10 aa, Homo sapiens
  Table A; Target 85853; HLA-B*57:01; TDRD12; ENSG00000173809; TAA
HQIVAVGVHW

SEQ ID NO: 85854 - protein, 9 aa, Homo sapiens
  Table A; Target 85854; HLA-B*27:05; TDRD12; ENSG00000173809; TAA
HRINPETDL

SEQ ID NO: 85855 - protein, 9 aa, Homo sapiens
  Table A; Target 85855; HLA-B*38:01; TDRD12; ENSG00000173809; TAA
HRINPETDL

SEQ ID NO: 85856 - protein, 9 aa, Homo sapiens
  Table A; Target 85856; HLA-B*39:01; TDRD12; ENSG00000173809; TAA
HRINPETDL

SEQ ID NO: 85857 - protein, 11 aa, Homo sapiens
  Table A; Target 85857; HLA-B*27:02; TDRD12; ENSG00000173809; TAA
HRINPETDLPR

SEQ ID NO: 85858 - protein, 10 aa, Homo sapiens
  Table A; Target 85858; HLA-A*23:01; TDRD12; ENSG00000173809; TAA
HTLPPQAVEF

SEQ ID NO: 85859 - protein, 10 aa, Homo sapiens
  Table A; Target 85859; HLA-A*24:02; TDRD12; ENSG00000173809; TAA
HTLPPQAVEF

SEQ ID NO: 85860 - protein, 10 aa, Homo sapiens
  Table A; Target 85860; HLA-A*25:01; TDRD12; ENSG00000173809; TAA
HTLPPQAVEF

SEQ ID NO: 85861 - protein, 10 aa, Homo sapiens
  Table A; Target 85861; HLA-A*26:01; TDRD12; ENSG00000173809; TAA
HTLPPQAVEF

SEQ ID NO: 85862 - protein, 10 aa, Homo sapiens
  Table A; Target 85862; HLA-A*29:02; TDRD12; ENSG00000173809; TAA
HTLPPQAVEF

SEQ ID NO: 85863 - protein, 10 aa, Homo sapiens
  Table A; Target 85863; HLA-A*32:01; TDRD12; ENSG00000173809; TAA
HTLPPQAVEF

SEQ ID NO: 85864 - protein, 10 aa, Homo sapiens
  Table A; Target 85864; HLA-A*33:01; TDRD12; ENSG00000173809; TAA
HTLPPQAVEF

SEQ ID NO: 85865 - protein, 10 aa, Homo sapiens
  Table A; Target 85865; HLA-B*57:01; TDRD12; ENSG00000173809; TAA
HTLPPQAVEF

SEQ ID NO: 85866 - protein, 10 aa, Homo sapiens
  Table A; Target 85866; HLA-B*58:01; TDRD12; ENSG00000173809; TAA
HTLPPQAVEF

SEQ ID NO: 85867 - protein, 10 aa, Homo sapiens
  Table A; Target 85867; HLA-C*02:02; TDRD12; ENSG00000173809; TAA
HTLPPQAVEF

SEQ ID NO: 85868 - protein, 10 aa, Homo sapiens
  Table A; Target 85868; HLA-C*03:04; TDRD12; ENSG00000173809; TAA
HTLPPQAVEF

SEQ ID NO: 85869 - protein, 10 aa, Homo sapiens
  Table A; Target 85869; HLA-C*07:06; TDRD12; ENSG00000173809; TAA
HTLPPQAVEF

SEQ ID NO: 85870 - protein, 11 aa, Homo sapiens
  Table A; Target 85870; HLA-A*68:02; TDRD12; ENSG00000173809; TAA
HTLPPQAVEFI

SEQ ID NO: 85871 - protein, 9 aa, Homo sapiens
  Table A; Target 85871; HLA-B*37:01; TDRD12; ENSG00000173809; TAA
IDEGRTGLV

SEQ ID NO: 85872 - protein, 9 aa, Homo sapiens
  Table A; Target 85872; HLA-B*49:01; TDRD12; ENSG00000173809; TAA
IDEGRTGLV

SEQ ID NO: 85873 - protein, 11 aa, Homo sapiens
  Table A; Target 85873; HLA-A*31:01; TDRD12; ENSG00000173809; TAA
IDEGRTGLVTR

SEQ ID NO: 85874 - protein, 11 aa, Homo sapiens
  Table A; Target 85874; HLA-A*33:01; TDRD12; ENSG00000173809; TAA
IDEGRTGLVTR

SEQ ID NO: 85875 - protein, 11 aa, Homo sapiens
  Table A; Target 85875; HLA-A*33:03; TDRD12; ENSG00000173809; TAA
IDEGRTGLVTR

SEQ ID NO: 85876 - protein, 11 aa, Homo sapiens
  Table A; Target 85876; HLA-A*68:01; TDRD12; ENSG00000173809; TAA
IDEGRTGLVTR

SEQ ID NO: 85877 - protein, 11 aa, Homo sapiens
  Table A; Target 85877; HLA-C*04:01; TDRD12; ENSG00000173809; TAA
IDEGRTGLVTR

SEQ ID NO: 85878 - protein, 10 aa, Homo sapiens
  Table A; Target 85878; HLA-A*30:01; TDRD12; ENSG00000173809; TAA
IDNPEHIEQL

SEQ ID NO: 85879 - protein, 10 aa, Homo sapiens
  Table A; Target 85879; HLA-B*37:01; TDRD12; ENSG00000173809; TAA
IDNPEHIEQL

SEQ ID NO: 85880 - protein, 10 aa, Homo sapiens
  Table A; Target 85880; HLA-B*38:01; TDRD12; ENSG00000173809; TAA
IDNPEHIEQL

SEQ ID NO: 85881 - protein, 10 aa, Homo sapiens
  Table A; Target 85881; HLA-B*40:01; TDRD12; ENSG00000173809; TAA
IDNPEHIEQL

SEQ ID NO: 85882 - protein, 10 aa, Homo sapiens
  Table A; Target 85882; HLA-B*40:02; TDRD12; ENSG00000173809; TAA
IDNPEHIEQL

SEQ ID NO: 85883 - protein, 11 aa, Homo sapiens
  Table A; Target 85883; HLA-A*03:02; TDRD12; ENSG00000173809; TAA
IDSSPLSADLK

SEQ ID NO: 85884 - protein, 11 aa, Homo sapiens
  Table A; Target 85884; HLA-A*11:01; TDRD12; ENSG00000173809; TAA
IDSSPLSADLK

SEQ ID NO: 85885 - protein, 11 aa, Homo sapiens
  Table A; Target 85885; HLA-B*27:02; TDRD12; ENSG00000173809; TAA
IDSSPLSADLK

SEQ ID NO: 85886 - protein, 9 aa, Homo sapiens
  Table A; Target 85886; HLA-B*49:01; TDRD12; ENSG00000173809; TAA
IDYNVRAEI

SEQ ID NO: 85887 - protein, 9 aa, Homo sapiens
  Table A; Target 85887; HLA-B*51:01; TDRD12; ENSG00000173809; TAA
IDYNVRAEI

SEQ ID NO: 85888 - protein, 10 aa, Homo sapiens
  Table A; Target 85888; HLA-A*30:01; TDRD12; ENSG00000173809; TAA
IDYNVRAEIL

SEQ ID NO: 85889 - protein, 10 aa, Homo sapiens
  Table A; Target 85889; HLA-B*37:01; TDRD12; ENSG00000173809; TAA
IDYNVRAEIL

SEQ ID NO: 85890 - protein, 8 aa, Homo sapiens
  Table A; Target 85890; HLA-B*44:02; TDRD12; ENSG00000173809; TAA
IEDPGCFW

SEQ ID NO: 85891 - protein, 8 aa, Homo sapiens
  Table A; Target 85891; HLA-B*44:03; TDRD12; ENSG00000173809; TAA
IEDPGCFW

SEQ ID NO: 85892 - protein, 9 aa, Homo sapiens
  Table A; Target 85892; HLA-B*49:01; TDRD12; ENSG00000173809; TAA
IEDPGCFWV

SEQ ID NO: 85893 - protein, 10 aa, Homo sapiens
  Table A; Target 85893; HLA-B*49:01; TDRD12; ENSG00000173809; TAA
IEDPGCFWVI

SEQ ID NO: 85894 - protein, 8 aa, Homo sapiens
  Table A; Target 85894; HLA-B*18:01; TDRD12; ENSG00000173809; TAA
IEHLIKEF

SEQ ID NO: 85895 - protein, 8 aa, Homo sapiens
  Table A; Target 85895; HLA-B*37:01; TDRD12; ENSG00000173809; TAA
IEHLIKEF

SEQ ID NO: 85896 - protein, 8 aa, Homo sapiens
  Table A; Target 85896; HLA-B*44:02; TDRD12; ENSG00000173809; TAA
IEHLIKEF

SEQ ID NO: 85897 - protein, 8 aa, Homo sapiens
  Table A; Target 85897; HLA-B*44:03; TDRD12; ENSG00000173809; TAA
IEHLIKEF

SEQ ID NO: 85898 - protein, 9 aa, Homo sapiens
  Table A; Target 85898; HLA-B*44:03; TDRD12; ENSG00000173809; TAA
IEHLIKEFM

SEQ ID NO: 85899 - protein, 8 aa, Homo sapiens
  Table A; Target 85899; HLA-A*23:01; TDRD12; ENSG00000173809; TAA
IEIKPLTL

SEQ ID NO: 85900 - protein, 8 aa, Homo sapiens
  Table A; Target 85900; HLA-A*30:01; TDRD12; ENSG00000173809; TAA
IEIKPLTL

SEQ ID NO: 85901 - protein, 8 aa, Homo sapiens
  Table A; Target 85901; HLA-B*13:02; TDRD12; ENSG00000173809; TAA
IEIKPLTL

SEQ ID NO: 85902 - protein, 8 aa, Homo sapiens
  Table A; Target 85902; HLA-B*18:01; TDRD12; ENSG00000173809; TAA
IEIKPLTL

SEQ ID NO: 85903 - protein, 8 aa, Homo sapiens
  Table A; Target 85903; HLA-B*37:01; TDRD12; ENSG00000173809; TAA
IEIKPLTL

SEQ ID NO: 85904 - protein, 8 aa, Homo sapiens
  Table A; Target 85904; HLA-B*40:01; TDRD12; ENSG00000173809; TAA
IEIKPLTL

SEQ ID NO: 85905 - protein, 8 aa, Homo sapiens
  Table A; Target 85905; HLA-B*40:02; TDRD12; ENSG00000173809; TAA
IEIKPLTL

SEQ ID NO: 85906 - protein, 8 aa, Homo sapiens
  Table A; Target 85906; HLA-B*44:02; TDRD12; ENSG00000173809; TAA
IEIKPLTL

SEQ ID NO: 85907 - protein, 8 aa, Homo sapiens
  Table A; Target 85907; HLA-B*44:03; TDRD12; ENSG00000173809; TAA
IEIKPLTL

SEQ ID NO: 85908 - protein, 8 aa, Homo sapiens
  Table A; Target 85908; HLA-B*49:01; TDRD12; ENSG00000173809; TAA
IEIKPLTL

SEQ ID NO: 85909 - protein, 9 aa, Homo sapiens
  Table A; Target 85909; HLA-A*30:01; TDRD12; ENSG00000173809; TAA
IEVEERESA

SEQ ID NO: 85910 - protein, 9 aa, Homo sapiens
  Table A; Target 85910; HLA-B*40:01; TDRD12; ENSG00000173809; TAA
IEVEERESA

SEQ ID NO: 85911 - protein, 9 aa, Homo sapiens
  Table A; Target 85911; HLA-B*40:02; TDRD12; ENSG00000173809; TAA
IEVEERESA

SEQ ID NO: 85912 - protein, 9 aa, Homo sapiens
  Table A; Target 85912; HLA-B*49:01; TDRD12; ENSG00000173809; TAA
IEVEERESA

SEQ ID NO: 85913 - protein, 10 aa, Homo sapiens
  Table A; Target 85913; HLA-B*44:02; TDRD12; ENSG00000173809; TAA
IEWNPKVTRY

SEQ ID NO: 85914 - protein, 10 aa, Homo sapiens
  Table A; Target 85914; HLA-B*44:03; TDRD12; ENSG00000173809; TAA
IEWNPKVTRY

SEQ ID NO: 85915 - protein, 8 aa, Homo sapiens
  Table A; Target 85915; HLA-C*01:02; TDRD12; ENSG00000173809; TAA
IFELLGEY

SEQ ID NO: 85916 - protein, 8 aa, Homo sapiens
  Table A; Target 85916; HLA-C*04:01; TDRD12; ENSG00000173809; TAA
IFELLGEY

SEQ ID NO: 85917 - protein, 8 aa, Homo sapiens
  Table A; Target 85917; HLA-C*07:01; TDRD12; ENSG00000173809; TAA
IFELLGEY

SEQ ID NO: 85918 - protein, 8 aa, Homo sapiens
  Table A; Target 85918; HLA-C*14:02; TDRD12; ENSG00000173809; TAA
IFELLGEY

SEQ ID NO: 85919 - protein, 8 aa, Homo sapiens
  Table A; Target 85919; HLA-C*01:02; TDRD12; ENSG00000173809; TAA
IFNLQNVL

SEQ ID NO: 85920 - protein, 8 aa, Homo sapiens
  Table A; Target 85920; HLA-C*14:02; TDRD12; ENSG00000173809; TAA
IFNLQNVL

SEQ ID NO: 85921 - protein, 8 aa, Homo sapiens
  Table A; Target 85921; HLA-C*04:01; TDRD12; ENSG00000173809; TAA
IHHKIVGK

SEQ ID NO: 85922 - protein, 9 aa, Homo sapiens
  Table A; Target 85922; HLA-A*02:07; TDRD12; ENSG00000173809; TAA
IIPFYILNA

SEQ ID NO: 85923 - protein, 8 aa, Homo sapiens
  Table A; Target 85923; HLA-A*02:07; TDRD12; ENSG00000173809; TAA
ILDEVEVL

SEQ ID NO: 85924 - protein, 8 aa, Homo sapiens
  Table A; Target 85924; HLA-B*55:01; TDRD12; ENSG00000173809; TAA
ILDEVEVL

SEQ ID NO: 85925 - protein, 8 aa, Homo sapiens
  Table A; Target 85925; HLA-C*04:01; TDRD12; ENSG00000173809; TAA
ILDEVEVL

SEQ ID NO: 85926 - protein, 8 aa, Homo sapiens
  Table A; Target 85926; HLA-C*05:01; TDRD12; ENSG00000173809; TAA
ILDEVEVL

SEQ ID NO: 85927 - protein, 9 aa, Homo sapiens
  Table A; Target 85927; HLA-A*01:01; TDRD12; ENSG00000173809; TAA
ILDEVEVLF

SEQ ID NO: 85928 - protein, 9 aa, Homo sapiens
  Table A; Target 85928; HLA-A*02:01; TDRD12; ENSG00000173809; TAA
ILDEVEVLF

SEQ ID NO: 85929 - protein, 9 aa, Homo sapiens
  Table A; Target 85929; HLA-A*02:07; TDRD12; ENSG00000173809; TAA
ILDEVEVLF

SEQ ID NO: 85930 - protein, 9 aa, Homo sapiens
  Table A; Target 85930; HLA-A*23:01; TDRD12; ENSG00000173809; TAA
ILDEVEVLF

SEQ ID NO: 85931 - protein, 9 aa, Homo sapiens
  Table A; Target 85931; HLA-A*24:02; TDRD12; ENSG00000173809; TAA
ILDEVEVLF

SEQ ID NO: 85932 - protein, 9 aa, Homo sapiens
  Table A; Target 85932; HLA-B*35:01; TDRD12; ENSG00000173809; TAA
ILDEVEVLF

SEQ ID NO: 85933 - protein, 9 aa, Homo sapiens
  Table A; Target 85933; HLA-B*35:03; TDRD12; ENSG00000173809; TAA
ILDEVEVLF

SEQ ID NO: 85934 - protein, 9 aa, Homo sapiens
  Table A; Target 85934; HLA-B*38:01; TDRD12; ENSG00000173809; TAA
ILDEVEVLF

SEQ ID NO: 85935 - protein, 9 aa, Homo sapiens
  Table A; Target 85935; HLA-B*55:01; TDRD12; ENSG00000173809; TAA
ILDEVEVLF

SEQ ID NO: 85936 - protein, 9 aa, Homo sapiens
  Table A; Target 85936; HLA-C*03:03; TDRD12; ENSG00000173809; TAA
ILDEVEVLF

SEQ ID NO: 85937 - protein, 9 aa, Homo sapiens
  Table A; Target 85937; HLA-C*04:01; TDRD12; ENSG00000173809; TAA
ILDEVEVLF

SEQ ID NO: 85938 - protein, 9 aa, Homo sapiens
  Table A; Target 85938; HLA-C*05:01; TDRD12; ENSG00000173809; TAA
ILDEVEVLF

SEQ ID NO: 85939 - protein, 9 aa, Homo sapiens
  Table A; Target 85939; HLA-C*07:04; TDRD12; ENSG00000173809; TAA
ILDEVEVLF

SEQ ID NO: 85940 - protein, 10 aa, Homo sapiens
  Table A; Target 85940; HLA-A*02:01; TDRD12; ENSG00000173809; TAA
ILDEVEVLFL

SEQ ID NO: 85941 - protein, 10 aa, Homo sapiens
  Table A; Target 85941; HLA-A*02:07; TDRD12; ENSG00000173809; TAA
ILDEVEVLFL

SEQ ID NO: 85942 - protein, 9 aa, Homo sapiens
  Table A; Target 85942; HLA-A*02:07; TDRD12; ENSG00000173809; TAA
ILDNFKKNI

SEQ ID NO: 85943 - protein, 11 aa, Homo sapiens
  Table A; Target 85943; HLA-A*02:01; TDRD12; ENSG00000173809; TAA
ILDNFKKNIEV

SEQ ID NO: 85944 - protein, 11 aa, Homo sapiens
  Table A; Target 85944; HLA-A*02:07; TDRD12; ENSG00000173809; TAA
ILDNFKKNIEV

SEQ ID NO: 85945 - protein, 8 aa, Homo sapiens
  Table A; Target 85945; HLA-B*37:01; TDRD12; ENSG00000173809; TAA
ILNATNYF

SEQ ID NO: 85946 - protein, 10 aa, Homo sapiens
  Table A; Target 85946; HLA-B*27:02; TDRD12; ENSG00000173809; TAA
ILVEFIDEGR

SEQ ID NO: 85947 - protein, 8 aa, Homo sapiens
  Table A; Target 85947; HLA-B*35:03; TDRD12; ENSG00000173809; TAA
IPACEESL

SEQ ID NO: 85948 - protein, 8 aa, Homo sapiens
  Table A; Target 85948; HLA-B*51:01; TDRD12; ENSG00000173809; TAA
IPFYILNA

SEQ ID NO: 85949 - protein, 8 aa, Homo sapiens
  Table A; Target 85949; HLA-B*54:01; TDRD12; ENSG00000173809; TAA
IPFYILNA

SEQ ID NO: 85950 - protein, 8 aa, Homo sapiens
  Table A; Target 85950; HLA-B*56:01; TDRD12; ENSG00000173809; TAA
IPFYILNA

SEQ ID NO: 85951 - protein, 9 aa, Homo sapiens
  Table A; Target 85951; HLA-B*54:01; TDRD12; ENSG00000173809; TAA
IPFYILNAT

SEQ ID NO: 85952 - protein, 9 aa, Homo sapiens
  Table A; Target 85952; HLA-B*56:01; TDRD12; ENSG00000173809; TAA
IPFYILNAT

SEQ ID NO: 85953 - protein, 11 aa, Homo sapiens
  Table A; Target 85953; HLA-B*35:01; TDRD12; ENSG00000173809; TAA
IPFYILNATNY

SEQ ID NO: 85954 - protein, 9 aa, Homo sapiens
  Table A; Target 85954; HLA-B*07:02; TDRD12; ENSG00000173809; TAA
IPSQAQKTL

SEQ ID NO: 85955 - protein, 9 aa, Homo sapiens
  Table A; Target 85955; HLA-B*08:01; TDRD12; ENSG00000173809; TAA
IPSQAQKTL

SEQ ID NO: 85956 - protein, 9 aa, Homo sapiens
  Table A; Target 85956; HLA-B*35:01; TDRD12; ENSG00000173809; TAA
IPSQAQKTL

SEQ ID NO: 85957 - protein, 9 aa, Homo sapiens
  Table A; Target 85957; HLA-B*35:03; TDRD12; ENSG00000173809; TAA
IPSQAQKTL

SEQ ID NO: 85958 - protein, 9 aa, Homo sapiens
  Table A; Target 85958; HLA-B*51:01; TDRD12; ENSG00000173809; TAA
IPSQAQKTL

SEQ ID NO: 85959 - protein, 9 aa, Homo sapiens
  Table A; Target 85959; HLA-B*56:01; TDRD12; ENSG00000173809; TAA
IPSQAQKTL

SEQ ID NO: 85960 - protein, 9 aa, Homo sapiens
  Table A; Target 85960; HLA-C*07:02; TDRD12; ENSG00000173809; TAA
IPSQAQKTL

SEQ ID NO: 85961 - protein, 9 aa, Homo sapiens
  Table A; Target 85961; HLA-C*16:02; TDRD12; ENSG00000173809; TAA
IPSQAQKTL

SEQ ID NO: 85962 - protein, 10 aa, Homo sapiens
  Table A; Target 85962; HLA-B*07:02; TDRD12; ENSG00000173809; TAA
IPSQAQKTLI

SEQ ID NO: 85963 - protein, 10 aa, Homo sapiens
  Table A; Target 85963; HLA-B*51:01; TDRD12; ENSG00000173809; TAA
IPSQAQKTLI

SEQ ID NO: 85964 - protein, 10 aa, Homo sapiens
  Table A; Target 85964; HLA-B*56:01; TDRD12; ENSG00000173809; TAA
IPSQAQKTLI

SEQ ID NO: 85965 - protein, 11 aa, Homo sapiens
  Table A; Target 85965; HLA-B*07:02; TDRD12; ENSG00000173809; TAA
IPSQAQKTLIF

SEQ ID NO: 85966 - protein, 8 aa, Homo sapiens
  Table A; Target 85966; HLA-B*51:01; TDRD12; ENSG00000173809; TAA
IPVKSKNI

SEQ ID NO: 85967 - protein, 8 aa, Homo sapiens
  Table A; Target 85967; HLA-B*13:02; TDRD12; ENSG00000173809; TAA
IQYFQNLL

SEQ ID NO: 85968 - protein, 9 aa, Homo sapiens
  Table A; Target 85968; HLA-A*03:01; TDRD12; ENSG00000173809; TAA
IQYFQNLLK

SEQ ID NO: 85969 - protein, 9 aa, Homo sapiens
  Table A; Target 85969; HLA-A*11:01; TDRD12; ENSG00000173809; TAA
IQYFQNLLK

SEQ ID NO: 85970 - protein, 8 aa, Homo sapiens
  Table A; Target 85970; HLA-B*27:02; TDRD12; ENSG00000173809; TAA
IRVVVESF

SEQ ID NO: 85971 - protein, 8 aa, Homo sapiens
  Table A; Target 85971; HLA-C*16:04; TDRD12; ENSG00000173809; TAA
IRVVVESF

SEQ ID NO: 85972 - protein, 9 aa, Homo sapiens
  Table A; Target 85972; HLA-A*01:01; TDRD12; ENSG00000173809; TAA
ISDLQQLQK

SEQ ID NO: 85973 - protein, 9 aa, Homo sapiens
  Table A; Target 85973; HLA-A*11:01; TDRD12; ENSG00000173809; TAA
ISDLQQLQK

SEQ ID NO: 85974 - protein, 10 aa, Homo sapiens
  Table A; Target 85974; HLA-C*05:01; TDRD12; ENSG00000173809; TAA
ISDLQQLQKL

SEQ ID NO: 85975 - protein, 11 aa, Homo sapiens
  Table A; Target 85975; HLA-A*01:01; TDRD12; ENSG00000173809; TAA
ISHCESNPLLY

SEQ ID NO: 85976 - protein, 9 aa, Homo sapiens
  Table A; Target 85976; HLA-B*35:03; TDRD12; ENSG00000173809; TAA
ITAMEEAAL

SEQ ID NO: 85977 - protein, 9 aa, Homo sapiens
  Table A; Target 85977; HLA-C*03:03; TDRD12; ENSG00000173809; TAA
ITAMEEAAL

SEQ ID NO: 85978 - protein, 9 aa, Homo sapiens
  Table A; Target 85978; HLA-C*03:04; TDRD12; ENSG00000173809; TAA
ITAMEEAAL

SEQ ID NO: 85979 - protein, 10 aa, Homo sapiens
  Table A; Target 85979; HLA-A*01:01; TDRD12; ENSG00000173809; TAA
ITAMEEAALY

SEQ ID NO: 85980 - protein, 10 aa, Homo sapiens
  Table A; Target 85980; HLA-A*26:01; TDRD12; ENSG00000173809; TAA
ITAMEEAALY

SEQ ID NO: 85981 - protein, 10 aa, Homo sapiens
  Table A; Target 85981; HLA-A*29:02; TDRD12; ENSG00000173809; TAA
ITAMEEAALY

SEQ ID NO: 85982 - protein, 10 aa, Homo sapiens
  Table A; Target 85982; HLA-A*30:02; TDRD12; ENSG00000173809; TAA
ITAMEEAALY

SEQ ID NO: 85983 - protein, 8 aa, Homo sapiens
  Table A; Target 85983; HLA-C*05:01; TDRD12; ENSG00000173809; TAA
ITDATCVI

SEQ ID NO: 85984 - protein, 8 aa, Homo sapiens
  Table A; Target 85984; HLA-A*03:02; TDRD12; ENSG00000173809; TAA
ITNLSSLK

SEQ ID NO: 85985 - protein, 8 aa, Homo sapiens
  Table A; Target 85985; HLA-A*01:01; TDRD12; ENSG00000173809; TAA
ITSSADQY

SEQ ID NO: 85986 - protein, 8 aa, Homo sapiens
  Table A; Target 85986; HLA-A*30:02; TDRD12; ENSG00000173809; TAA
ITSSADQY

SEQ ID NO: 85987 - protein, 8 aa, Homo sapiens
  Table A; Target 85987; HLA-B*39:01; TDRD12; ENSG00000173809; TAA
ITSSADQY

SEQ ID NO: 85988 - protein, 8 aa, Homo sapiens
  Table A; Target 85988; HLA-C*16:02; TDRD12; ENSG00000173809; TAA
ITSSADQY

SEQ ID NO: 85989 - protein, 9 aa, Homo sapiens
  Table A; Target 85989; HLA-B*27:05; TDRD12; ENSG00000173809; TAA
ITSSADQYL

SEQ ID NO: 85990 - protein, 9 aa, Homo sapiens
  Table A; Target 85990; HLA-B*35:03; TDRD12; ENSG00000173809; TAA
ITSSADQYL

SEQ ID NO: 85991 - protein, 9 aa, Homo sapiens
  Table A; Target 85991; HLA-B*38:01; TDRD12; ENSG00000173809; TAA
ITSSADQYL

SEQ ID NO: 85992 - protein, 9 aa, Homo sapiens
  Table A; Target 85992; HLA-B*39:01; TDRD12; ENSG00000173809; TAA
ITSSADQYL

SEQ ID NO: 85993 - protein, 9 aa, Homo sapiens
  Table A; Target 85993; HLA-C*04:01; TDRD12; ENSG00000173809; TAA
ITSSADQYL

SEQ ID NO: 85994 - protein, 8 aa, Homo sapiens
  Table A; Target 85994; HLA-A*25:01; TDRD12; ENSG00000173809; TAA
IVAVGVHW

SEQ ID NO: 85995 - protein, 8 aa, Homo sapiens
  Table A; Target 85995; HLA-A*32:01; TDRD12; ENSG00000173809; TAA
IVAVGVHW

SEQ ID NO: 85996 - protein, 8 aa, Homo sapiens
  Table A; Target 85996; HLA-B*57:01; TDRD12; ENSG00000173809; TAA
IVAVGVHW

SEQ ID NO: 85997 - protein, 8 aa, Homo sapiens
  Table A; Target 85997; HLA-B*58:01; TDRD12; ENSG00000173809; TAA
IVAVGVHW

SEQ ID NO: 85998 - protein, 8 aa, Homo sapiens
  Table A; Target 85998; HLA-C*05:01; TDRD12; ENSG00000173809; TAA
IVDKHMDL

SEQ ID NO: 85999 - protein, 9 aa, Homo sapiens
  Table A; Target 85999; HLA-A*01:01; TDRD12; ENSG00000173809; TAA
IVDKHMDLY

SEQ ID NO: 86000 - protein, 9 aa, Homo sapiens
  Table A; Target 86000; HLA-A*02:07; TDRD12; ENSG00000173809; TAA
IVDKHMDLY

SEQ ID NO: 86001 - protein, 9 aa, Homo sapiens
  Table A; Target 86001; HLA-A*29:02; TDRD12; ENSG00000173809; TAA
IVDKHMDLY

SEQ ID NO: 86002 - protein, 9 aa, Homo sapiens
  Table A; Target 86002; HLA-A*30:02; TDRD12; ENSG00000173809; TAA
IVDKHMDLY

SEQ ID NO: 86003 - protein, 9 aa, Homo sapiens
  Table A; Target 86003; HLA-B*58:01; TDRD12; ENSG00000173809; TAA
IVDKHMDLY

SEQ ID NO: 86004 - protein, 9 aa, Homo sapiens
  Table A; Target 86004; HLA-A*32:01; TDRD12; ENSG00000173809; TAA
IVGDLRPTA

SEQ ID NO: 86005 - protein, 9 aa, Homo sapiens
  Table A; Target 86005; HLA-B*54:01; TDRD12; ENSG00000173809; TAA
IVGDLRPTA

SEQ ID NO: 86006 - protein, 9 aa, Homo sapiens
  Table A; Target 86006; HLA-B*56:01; TDRD12; ENSG00000173809; TAA
IVGDLRPTA

SEQ ID NO: 86007 - protein, 9 aa, Homo sapiens
  Table A; Target 86007; HLA-A*03:02; TDRD12; ENSG00000173809; TAA
IVGKLHDAK

SEQ ID NO: 86008 - protein, 9 aa, Homo sapiens
  Table A; Target 86008; HLA-A*26:01; TDRD12; ENSG00000173809; TAA
IVITAMEEA

SEQ ID NO: 86009 - protein, 9 aa, Homo sapiens
  Table A; Target 86009; HLA-B*46:01; TDRD12; ENSG00000173809; TAA
IVITAMEEA

SEQ ID NO: 86010 - protein, 9 aa, Homo sapiens
  Table A; Target 86010; HLA-B*56:01; TDRD12; ENSG00000173809; TAA
IVITAMEEA

SEQ ID NO: 86011 - protein, 9 aa, Homo sapiens
  Table A; Target 86011; HLA-A*02:03; TDRD12; ENSG00000173809; TAA
IVKSITSSA

SEQ ID NO: 86012 - protein, 9 aa, Homo sapiens
  Table A; Target 86012; HLA-A*32:01; TDRD12; ENSG00000173809; TAA
IVKSITSSA

SEQ ID NO: 86013 - protein, 9 aa, Homo sapiens
  Table A; Target 86013; HLA-B*07:02; TDRD12; ENSG00000173809; TAA
IVKSITSSA

SEQ ID NO: 86014 - protein, 9 aa, Homo sapiens
  Table A; Target 86014; HLA-B*08:01; TDRD12; ENSG00000173809; TAA
IVKSITSSA

SEQ ID NO: 86015 - protein, 9 aa, Homo sapiens
  Table A; Target 86015; HLA-B*15:01; TDRD12; ENSG00000173809; TAA
IVKSITSSA

SEQ ID NO: 86016 - protein, 9 aa, Homo sapiens
  Table A; Target 86016; HLA-B*40:02; TDRD12; ENSG00000173809; TAA
IVKSITSSA

SEQ ID NO: 86017 - protein, 9 aa, Homo sapiens
  Table A; Target 86017; HLA-B*46:01; TDRD12; ENSG00000173809; TAA
IVKSITSSA

SEQ ID NO: 86018 - protein, 9 aa, Homo sapiens
  Table A; Target 86018; HLA-B*54:01; TDRD12; ENSG00000173809; TAA
IVKSITSSA

SEQ ID NO: 86019 - protein, 9 aa, Homo sapiens
  Table A; Target 86019; HLA-B*55:01; TDRD12; ENSG00000173809; TAA
IVKSITSSA

SEQ ID NO: 86020 - protein, 9 aa, Homo sapiens
  Table A; Target 86020; HLA-B*56:01; TDRD12; ENSG00000173809; TAA
IVKSITSSA

SEQ ID NO: 86021 - protein, 9 aa, Homo sapiens
  Table A; Target 86021; HLA-C*02:02; TDRD12; ENSG00000173809; TAA
IVKSITSSA

SEQ ID NO: 86022 - protein, 9 aa, Homo sapiens
  Table A; Target 86022; HLA-C*07:02; TDRD12; ENSG00000173809; TAA
IVKSITSSA

SEQ ID NO: 86023 - protein, 8 aa, Homo sapiens
  Table A; Target 86023; HLA-A*23:01; TDRD12; ENSG00000173809; TAA
IVTTPYSL

SEQ ID NO: 86024 - protein, 8 aa, Homo sapiens
  Table A; Target 86024; HLA-C*16:01; TDRD12; ENSG00000173809; TAA
IVTTPYSL

SEQ ID NO: 86025 - protein, 9 aa, Homo sapiens
  Table A; Target 86025; HLA-A*23:01; TDRD12; ENSG00000173809; TAA
IVTTPYSLL

SEQ ID NO: 86026 - protein, 9 aa, Homo sapiens
  Table A; Target 86026; HLA-A*24:02; TDRD12; ENSG00000173809; TAA
IVTTPYSLL

SEQ ID NO: 86027 - protein, 9 aa, Homo sapiens
  Table A; Target 86027; HLA-A*25:01; TDRD12; ENSG00000173809; TAA
IVTTPYSLL

SEQ ID NO: 86028 - protein, 9 aa, Homo sapiens
  Table A; Target 86028; HLA-C*01:02; TDRD12; ENSG00000173809; TAA
IVTTPYSLL

SEQ ID NO: 86029 - protein, 9 aa, Homo sapiens
  Table A; Target 86029; HLA-C*03:03; TDRD12; ENSG00000173809; TAA
IVTTPYSLL

SEQ ID NO: 86030 - protein, 9 aa, Homo sapiens
  Table A; Target 86030; HLA-C*03:04; TDRD12; ENSG00000173809; TAA
IVTTPYSLL

SEQ ID NO: 86031 - protein, 9 aa, Homo sapiens
  Table A; Target 86031; HLA-C*05:01; TDRD12; ENSG00000173809; TAA
IVTTPYSLL

SEQ ID NO: 86032 - protein, 9 aa, Homo sapiens
  Table A; Target 86032; HLA-B*57:01; TDRD12; ENSG00000173809; TAA
KAQFIFELL

SEQ ID NO: 86033 - protein, 8 aa, Homo sapiens
  Table A; Target 86033; HLA-C*16:01; TDRD12; ENSG00000173809; TAA
KATTQVEA

SEQ ID NO: 86034 - protein, 8 aa, Homo sapiens
  Table A; Target 86034; HLA-C*16:02; TDRD12; ENSG00000173809; TAA
KATTQVEA

SEQ ID NO: 86035 - protein, 9 aa, Homo sapiens
  Table A; Target 86035; HLA-A*31:01; TDRD12; ENSG00000173809; TAA
KATTQVEAR

SEQ ID NO: 86036 - protein, 9 aa, Homo sapiens
  Table A; Target 86036; HLA-A*68:01; TDRD12; ENSG00000173809; TAA
KATTQVEAR

SEQ ID NO: 86037 - protein, 9 aa, Homo sapiens
  Table A; Target 86037; HLA-B*57:01; TDRD12; ENSG00000173809; TAA
KATTQVEAR

SEQ ID NO: 86038 - protein, 9 aa, Homo sapiens
  Table A; Target 86038; HLA-C*07:06; TDRD12; ENSG00000173809; TAA
KATTQVEAR

SEQ ID NO: 86039 - protein, 9 aa, Homo sapiens
  Table A; Target 86039; HLA-C*16:02; TDRD12; ENSG00000173809; TAA
KATTQVEAR

SEQ ID NO: 86040 - protein, 10 aa, Homo sapiens
  Table A; Target 86040; HLA-B*40:01; TDRD12; ENSG00000173809; TAA
KATTQVEARL

SEQ ID NO: 86041 - protein, 10 aa, Homo sapiens
  Table A; Target 86041; HLA-B*58:01; TDRD12; ENSG00000173809; TAA
KATTQVEARL

SEQ ID NO: 86042 - protein, 10 aa, Homo sapiens
  Table A; Target 86042; HLA-C*16:02; TDRD12; ENSG00000173809; TAA
KATTQVEARL

SEQ ID NO: 86043 - protein, 9 aa, Homo sapiens
  Table A; Target 86043; HLA-B*37:01; TDRD12; ENSG00000173809; TAA
KDASHAVGV

SEQ ID NO: 86044 - protein, 9 aa, Homo sapiens
  Table A; Target 86044; HLA-B*40:02; TDRD12; ENSG00000173809; TAA
KDASHAVGV

SEQ ID NO: 86045 - protein, 9 aa, Homo sapiens
  Table A; Target 86045; HLA-C*16:02; TDRD12; ENSG00000173809; TAA
KDASHAVGV

SEQ ID NO: 86046 - protein, 11 aa, Homo sapiens
  Table A; Target 86046; HLA-A*31:01; TDRD12; ENSG00000173809; TAA
KDASHAVGVLR

SEQ ID NO: 86047 - protein, 8 aa, Homo sapiens
  Table A; Target 86047; HLA-B*37:01; TDRD12; ENSG00000173809; TAA
KDSNKTTV

SEQ ID NO: 86048 - protein, 10 aa, Homo sapiens
  Table A; Target 86048; HLA-A*03:02; TDRD12; ENSG00000173809; TAA
KDSNKTTVEK

SEQ ID NO: 86049 - protein, 9 aa, Homo sapiens
  Table A; Target 86049; HLA-B*40:01; TDRD12; ENSG00000173809; TAA
KEEAKNTKL

SEQ ID NO: 86050 - protein, 9 aa, Homo sapiens
  Table A; Target 86050; HLA-B*40:01; TDRD12; ENSG00000173809; TAA
KEFMNDPYI

SEQ ID NO: 86051 - protein, 9 aa, Homo sapiens
  Table A; Target 86051; HLA-B*44:03; TDRD12; ENSG00000173809; TAA
KEFMNDPYI

SEQ ID NO: 86052 - protein, 9 aa, Homo sapiens
  Table A; Target 86052; HLA-B*49:01; TDRD12; ENSG00000173809; TAA
KEFMNDPYI

SEQ ID NO: 86053 - protein, 10 aa, Homo sapiens
  Table A; Target 86053; HLA-A*30:01; TDRD12; ENSG00000173809; TAA
KEFMNDPYIV

SEQ ID NO: 86054 - protein, 10 aa, Homo sapiens
  Table A; Target 86054; HLA-B*40:01; TDRD12; ENSG00000173809; TAA
KEFMNDPYIV

SEQ ID NO: 86055 - protein, 10 aa, Homo sapiens
  Table A; Target 86055; HLA-A*30:01; TDRD12; ENSG00000173809; TAA
KEMIFNLQNV

SEQ ID NO: 86056 - protein, 10 aa, Homo sapiens
  Table A; Target 86056; HLA-B*40:02; TDRD12; ENSG00000173809; TAA
KEMIFNLQNV

SEQ ID NO: 86057 - protein, 10 aa, Homo sapiens
  Table A; Target 86057; HLA-B*49:01; TDRD12; ENSG00000173809; TAA
KEMIFNLQNV

SEQ ID NO: 86058 - protein, 11 aa, Homo sapiens
  Table A; Target 86058; HLA-A*30:01; TDRD12; ENSG00000173809; TAA
KEMIFNLQNVL

SEQ ID NO: 86059 - protein, 9 aa, Homo sapiens
  Table A; Target 86059; HLA-B*40:02; TDRD12; ENSG00000173809; TAA
KEYDEKNSC

SEQ ID NO: 86060 - protein, 9 aa, Homo sapiens
  Table A; Target 86060; HLA-B*49:01; TDRD12; ENSG00000173809; TAA
KEYDEKNSC

SEQ ID NO: 86061 - protein, 10 aa, Homo sapiens
  Table A; Target 86061; HLA-A*30:01; TDRD12; ENSG00000173809; TAA
KEYDEKNSCV

SEQ ID NO: 86062 - protein, 10 aa, Homo sapiens
  Table A; Target 86062; HLA-B*40:01; TDRD12; ENSG00000173809; TAA
KEYDEKNSCV

SEQ ID NO: 86063 - protein, 10 aa, Homo sapiens
  Table A; Target 86063; HLA-B*40:02; TDRD12; ENSG00000173809; TAA
KEYDEKNSCV

SEQ ID NO: 86064 - protein, 10 aa, Homo sapiens
  Table A; Target 86064; HLA-B*49:01; TDRD12; ENSG00000173809; TAA
KEYDEKNSCV

SEQ ID NO: 86065 - protein, 11 aa, Homo sapiens
  Table A; Target 86065; HLA-A*29:02; TDRD12; ENSG00000173809; TAA
KFPGPSHTESY

SEQ ID NO: 86066 - protein, 11 aa, Homo sapiens
  Table A; Target 86066; HLA-A*30:02; TDRD12; ENSG00000173809; TAA
KFPGPSHTESY

SEQ ID NO: 86067 - protein, 10 aa, Homo sapiens
  Table A; Target 86067; HLA-A*03:01; TDRD12; ENSG00000173809; TAA
KGLQPPVVVL

SEQ ID NO: 86068 - protein, 11 aa, Homo sapiens
  Table A; Target 86068; HLA-A*31:01; TDRD12; ENSG00000173809; TAA
KGLQPPVVVLR

SEQ ID NO: 86069 - protein, 9 aa, Homo sapiens
  Table A; Target 86069; HLA-A*24:02; TDRD12; ENSG00000173809; TAA
KHMDLYATL

SEQ ID NO: 86070 - protein, 9 aa, Homo sapiens
  Table A; Target 86070; HLA-B*38:01; TDRD12; ENSG00000173809; TAA
KHMDLYATL

SEQ ID NO: 86071 - protein, 10 aa, Homo sapiens
  Table A; Target 86071; HLA-A*02:03; TDRD12; ENSG00000173809; TAA
KIIPFYILNA

SEQ ID NO: 86072 - protein, 10 aa, Homo sapiens
  Table A; Target 86072; HLA-A*02:04; TDRD12; ENSG00000173809; TAA
KIIPFYILNA

SEQ ID NO: 86073 - protein, 9 aa, Homo sapiens
  Table A; Target 86073; HLA-C*01:02; TDRD12; ENSG00000173809; TAA
KIPACEESL

SEQ ID NO: 86074 - protein, 9 aa, Homo sapiens
  Table A; Target 86074; HLA-B*15:03; TDRD12; ENSG00000173809; TAA
KKLSSGSQI

SEQ ID NO: 86075 - protein, 10 aa, Homo sapiens
  Table A; Target 86075; HLA-B*15:03; TDRD12; ENSG00000173809; TAA
KKWDNAAIQY

SEQ ID NO: 86076 - protein, 10 aa, Homo sapiens
  Table A; Target 86076; HLA-A*02:03; TDRD12; ENSG00000173809; TAA
KLHDAKVILA

SEQ ID NO: 86077 - protein, 11 aa, Homo sapiens
  Table A; Target 86077; HLA-A*02:04; TDRD12; ENSG00000173809; TAA
KLHDAKVILAL

SEQ ID NO: 86078 - protein, 11 aa, Homo sapiens
  Table A; Target 86078; HLA-A*02:07; TDRD12; ENSG00000173809; TAA
KLHDAKVILAL

SEQ ID NO: 86079 - protein, 10 aa, Homo sapiens
  Table A; Target 86079; HLA-A*02:01; TDRD12; ENSG00000173809; TAA
KLKGLQPPVV

SEQ ID NO: 86080 - protein, 10 aa, Homo sapiens
  Table A; Target 86080; HLA-A*02:03; TDRD12; ENSG00000173809; TAA
KLKGLQPPVV

SEQ ID NO: 86081 - protein, 11 aa, Homo sapiens
  Table A; Target 86081; HLA-A*02:03; TDRD12; ENSG00000173809; TAA
KLKGLQPPVVV

SEQ ID NO: 86082 - protein, 9 aa, Homo sapiens
  Table A; Target 86082; HLA-A*32:01; TDRD12; ENSG00000173809; TAA
KLNPALTLW

SEQ ID NO: 86083 - protein, 9 aa, Homo sapiens
  Table A; Target 86083; HLA-B*57:01; TDRD12; ENSG00000173809; TAA
KLNPALTLW

SEQ ID NO: 86084 - protein, 9 aa, Homo sapiens
  Table A; Target 86084; HLA-B*58:01; TDRD12; ENSG00000173809; TAA
KLNPALTLW

SEQ ID NO: 86085 - protein, 9 aa, Homo sapiens
  Table A; Target 86085; HLA-A*32:01; TDRD12; ENSG00000173809; TAA
KLNSAMNDF

SEQ ID NO: 86086 - protein, 9 aa, Homo sapiens
  Table A; Target 86086; HLA-B*15:01; TDRD12; ENSG00000173809; TAA
KLNSAMNDF

SEQ ID NO: 86087 - protein, 10 aa, Homo sapiens
  Table A; Target 86087; HLA-A*01:01; TDRD12; ENSG00000173809; TAA
KLNSAMNDFY

SEQ ID NO: 86088 - protein, 10 aa, Homo sapiens
  Table A; Target 86088; HLA-A*30:02; TDRD12; ENSG00000173809; TAA
KLNSAMNDFY

SEQ ID NO: 86089 - protein, 10 aa, Homo sapiens
  Table A; Target 86089; HLA-B*15:01; TDRD12; ENSG00000173809; TAA
KLNSAMNDFY

SEQ ID NO: 86090 - protein, 11 aa, Homo sapiens
  Table A; Target 86090; HLA-A*02:01; TDRD12; ENSG00000173809; TAA
KLSSGSQIILA

SEQ ID NO: 86091 - protein, 9 aa, Homo sapiens
  Table A; Target 86091; HLA-B*57:01; TDRD12; ENSG00000173809; TAA
KPADNEIEW

SEQ ID NO: 86092 - protein, 9 aa, Homo sapiens
  Table A; Target 86092; HLA-B*58:01; TDRD12; ENSG00000173809; TAA
KPADNEIEW

SEQ ID NO: 86093 - protein, 9 aa, Homo sapiens
  Table A; Target 86093; HLA-B*07:02; TDRD12; ENSG00000173809; TAA
KPRLNIKSA

SEQ ID NO: 86094 - protein, 9 aa, Homo sapiens
  Table A; Target 86094; HLA-B*54:01; TDRD12; ENSG00000173809; TAA
KPRLNIKSA

SEQ ID NO: 86095 - protein, 9 aa, Homo sapiens
  Table A; Target 86095; HLA-B*55:01; TDRD12; ENSG00000173809; TAA
KPRLNIKSA

SEQ ID NO: 86096 - protein, 9 aa, Homo sapiens
  Table A; Target 86096; HLA-B*56:01; TDRD12; ENSG00000173809; TAA
KPRLNIKSA

SEQ ID NO: 86097 - protein, 9 aa, Homo sapiens
  Table A; Target 86097; HLA-B*35:01; TDRD12; ENSG00000173809; TAA
KPVTLHIDF

SEQ ID NO: 86098 - protein, 8 aa, Homo sapiens
  Table A; Target 86098; HLA-B*15:03; TDRD12; ENSG00000173809; TAA
KRVESSVY

SEQ ID NO: 86099 - protein, 9 aa, Homo sapiens
  Table A; Target 86099; HLA-B*27:02; TDRD12; ENSG00000173809; TAA
KRVESSVYW

SEQ ID NO: 86100 - protein, 8 aa, Homo sapiens
  Table A; Target 86100; HLA-A*03:02; TDRD12; ENSG00000173809; TAA
KSAPSFNK

SEQ ID NO: 86101 - protein, 8 aa, Homo sapiens
  Table A; Target 86101; HLA-A*11:01; TDRD12; ENSG00000173809; TAA
KSAPSFNK

SEQ ID NO: 86102 - protein, 9 aa, Homo sapiens
  Table A; Target 86102; HLA-A*24:02; TDRD12; ENSG00000173809; TAA
KSAPSFNKL

SEQ ID NO: 86103 - protein, 9 aa, Homo sapiens
  Table A; Target 86103; HLA-A*31:01; TDRD12; ENSG00000173809; TAA
KSAPSFNKL

SEQ ID NO: 86104 - protein, 9 aa, Homo sapiens
  Table A; Target 86104; HLA-A*32:01; TDRD12; ENSG00000173809; TAA
KSAPSFNKL

SEQ ID NO: 86105 - protein, 9 aa, Homo sapiens
  Table A; Target 86105; HLA-B*57:01; TDRD12; ENSG00000173809; TAA
KSAPSFNKL

SEQ ID NO: 86106 - protein, 9 aa, Homo sapiens
  Table A; Target 86106; HLA-B*58:01; TDRD12; ENSG00000173809; TAA
KSAPSFNKL

SEQ ID NO: 86107 - protein, 9 aa, Homo sapiens
  Table A; Target 86107; HLA-C*02:02; TDRD12; ENSG00000173809; TAA
KSAPSFNKL

SEQ ID NO: 86108 - protein, 9 aa, Homo sapiens
  Table A; Target 86108; HLA-C*03:04; TDRD12; ENSG00000173809; TAA
KSAPSFNKL

SEQ ID NO: 86109 - protein, 9 aa, Homo sapiens
  Table A; Target 86109; HLA-C*16:01; TDRD12; ENSG00000173809; TAA
KSAPSFNKL

SEQ ID NO: 86110 - protein, 9 aa, Homo sapiens
  Table A; Target 86110; HLA-C*16:02; TDRD12; ENSG00000173809; TAA
KSAPSFNKL

SEQ ID NO: 86111 - protein, 10 aa, Homo sapiens
  Table A; Target 86111; HLA-A*01:01; TDRD12; ENSG00000173809; TAA
KSITSSADQY

SEQ ID NO: 86112 - protein, 10 aa, Homo sapiens
  Table A; Target 86112; HLA-A*30:02; TDRD12; ENSG00000173809; TAA
KSITSSADQY

SEQ ID NO: 86113 - protein, 10 aa, Homo sapiens
  Table A; Target 86113; HLA-B*15:01; TDRD12; ENSG00000173809; TAA
KSITSSADQY

SEQ ID NO: 86114 - protein, 10 aa, Homo sapiens
  Table A; Target 86114; HLA-B*58:01; TDRD12; ENSG00000173809; TAA
KSITSSADQY

SEQ ID NO: 86115 - protein, 10 aa, Homo sapiens
  Table A; Target 86115; HLA-C*16:04; TDRD12; ENSG00000173809; TAA
KSITSSADQY

SEQ ID NO: 86116 - protein, 11 aa, Homo sapiens
  Table A; Target 86116; HLA-B*58:01; TDRD12; ENSG00000173809; TAA
KSITSSADQYL

SEQ ID NO: 86117 - protein, 9 aa, Homo sapiens
  Table A; Target 86117; HLA-A*03:01; TDRD12; ENSG00000173809; TAA
KSNEKPLRL

SEQ ID NO: 86118 - protein, 9 aa, Homo sapiens
  Table A; Target 86118; HLA-A*31:01; TDRD12; ENSG00000173809; TAA
KSNEKPLRL

SEQ ID NO: 86119 - protein, 9 aa, Homo sapiens
  Table A; Target 86119; HLA-B*58:01; TDRD12; ENSG00000173809; TAA
KSNEKPLRL

SEQ ID NO: 86120 - protein, 9 aa, Homo sapiens
  Table A; Target 86120; HLA-A*03:01; TDRD12; ENSG00000173809; TAA
KSVLLLTEK

SEQ ID NO: 86121 - protein, 9 aa, Homo sapiens
  Table A; Target 86121; HLA-A*03:02; TDRD12; ENSG00000173809; TAA
KSVLLLTEK

SEQ ID NO: 86122 - protein, 9 aa, Homo sapiens
  Table A; Target 86122; HLA-A*11:01; TDRD12; ENSG00000173809; TAA
KSVLLLTEK

SEQ ID NO: 86123 - protein, 9 aa, Homo sapiens
  Table A; Target 86123; HLA-B*57:01; TDRD12; ENSG00000173809; TAA
KSVLLLTEK

SEQ ID NO: 86124 - protein, 9 aa, Homo sapiens
  Table A; Target 86124; HLA-A*31:01; TDRD12; ENSG00000173809; TAA
KTSSLLQAL

SEQ ID NO: 86125 - protein, 9 aa, Homo sapiens
  Table A; Target 86125; HLA-A*32:01; TDRD12; ENSG00000173809; TAA
KTSSLLQAL

SEQ ID NO: 86126 - protein, 9 aa, Homo sapiens
  Table A; Target 86126; HLA-B*58:01; TDRD12; ENSG00000173809; TAA
KTSSLLQAL

SEQ ID NO: 86127 - protein, 9 aa, Homo sapiens
  Table A; Target 86127; HLA-C*01:02; TDRD12; ENSG00000173809; TAA
KTSSLLQAL

SEQ ID NO: 86128 - protein, 9 aa, Homo sapiens
  Table A; Target 86128; HLA-A*02:01; TDRD12; ENSG00000173809; TAA
KTSVIDYNV

SEQ ID NO: 86129 - protein, 9 aa, Homo sapiens
  Table A; Target 86129; HLA-A*03:02; TDRD12; ENSG00000173809; TAA
KTSVIDYNV

SEQ ID NO: 86130 - protein, 9 aa, Homo sapiens
  Table A; Target 86130; HLA-A*68:02; TDRD12; ENSG00000173809; TAA
KTSVIDYNV

SEQ ID NO: 86131 - protein, 9 aa, Homo sapiens
  Table A; Target 86131; HLA-B*13:02; TDRD12; ENSG00000173809; TAA
KTSVIDYNV

SEQ ID NO: 86132 - protein, 9 aa, Homo sapiens
  Table A; Target 86132; HLA-B*27:05; TDRD12; ENSG00000173809; TAA
KTSVIDYNV

SEQ ID NO: 86133 - protein, 9 aa, Homo sapiens
  Table A; Target 86133; HLA-B*40:02; TDRD12; ENSG00000173809; TAA
KTSVIDYNV

SEQ ID NO: 86134 - protein, 9 aa, Homo sapiens
  Table A; Target 86134; HLA-B*58:01; TDRD12; ENSG00000173809; TAA
KTSVIDYNV

SEQ ID NO: 86135 - protein, 9 aa, Homo sapiens
  Table A; Target 86135; HLA-C*06:02; TDRD12; ENSG00000173809; TAA
KTSVIDYNV

SEQ ID NO: 86136 - protein, 10 aa, Homo sapiens
  Table A; Target 86136; HLA-A*11:01; TDRD12; ENSG00000173809; TAA
KTSVIDYNVR

SEQ ID NO: 86137 - protein, 10 aa, Homo sapiens
  Table A; Target 86137; HLA-A*31:01; TDRD12; ENSG00000173809; TAA
KTSVIDYNVR

SEQ ID NO: 86138 - protein, 10 aa, Homo sapiens
  Table A; Target 86138; HLA-A*68:01; TDRD12; ENSG00000173809; TAA
KTSVIDYNVR

SEQ ID NO: 86139 - protein, 9 aa, Homo sapiens
  Table A; Target 86139; HLA-A*03:01; TDRD12; ENSG00000173809; TAA
KTTVEKVEK

SEQ ID NO: 86140 - protein, 9 aa, Homo sapiens
  Table A; Target 86140; HLA-A*03:02; TDRD12; ENSG00000173809; TAA
KTTVEKVEK

SEQ ID NO: 86141 - protein, 9 aa, Homo sapiens
  Table A; Target 86141; HLA-A*11:01; TDRD12; ENSG00000173809; TAA
KTTVEKVEK

SEQ ID NO: 86142 - protein, 10 aa, Homo sapiens
  Table A; Target 86142; HLA-B*57:01; TDRD12; ENSG00000173809; TAA
KTTVEKVEKF

SEQ ID NO: 86143 - protein, 10 aa, Homo sapiens
  Table A; Target 86143; HLA-B*58:01; TDRD12; ENSG00000173809; TAA
KTTVEKVEKF

SEQ ID NO: 86144 - protein, 11 aa, Homo sapiens
  Table A; Target 86144; HLA-A*03:02; TDRD12; ENSG00000173809; TAA
KVCVNDDLVAK

SEQ ID NO: 86145 - protein, 11 aa, Homo sapiens
  Table A; Target 86145; HLA-A*11:01; TDRD12; ENSG00000173809; TAA
KVCVNDDLVAK

SEQ ID NO: 86146 - protein, 11 aa, Homo sapiens
  Table A; Target 86146; HLA-B*57:01; TDRD12; ENSG00000173809; TAA
KVILALGNTVW

SEQ ID NO: 86147 - protein, 9 aa, Homo sapiens
  Table A; Target 86147; HLA-A*02:07; TDRD12; ENSG00000173809; TAA
KVPAELYEF

SEQ ID NO: 86148 - protein, 9 aa, Homo sapiens
  Table A; Target 86148; HLA-A*24:02; TDRD12; ENSG00000173809; TAA
KVPAELYEF

SEQ ID NO: 86149 - protein, 9 aa, Homo sapiens
  Table A; Target 86149; HLA-A*29:02; TDRD12; ENSG00000173809; TAA
KVPAELYEF

SEQ ID NO: 86150 - protein, 9 aa, Homo sapiens
  Table A; Target 86150; HLA-B*57:01; TDRD12; ENSG00000173809; TAA
KVPAELYEF

SEQ ID NO: 86151 - protein, 9 aa, Homo sapiens
  Table A; Target 86151; HLA-A*23:01; TDRD12; ENSG00000173809; TAA
KVVESSSIF

SEQ ID NO: 86152 - protein, 9 aa, Homo sapiens
  Table A; Target 86152; HLA-A*24:02; TDRD12; ENSG00000173809; TAA
KVVESSSIF

SEQ ID NO: 86153 - protein, 9 aa, Homo sapiens
  Table A; Target 86153; HLA-A*25:01; TDRD12; ENSG00000173809; TAA
KVVESSSIF

SEQ ID NO: 86154 - protein, 9 aa, Homo sapiens
  Table A; Target 86154; HLA-A*26:01; TDRD12; ENSG00000173809; TAA
KVVESSSIF

SEQ ID NO: 86155 - protein, 9 aa, Homo sapiens
  Table A; Target 86155; HLA-A*30:02; TDRD12; ENSG00000173809; TAA
KVVESSSIF

SEQ ID NO: 86156 - protein, 9 aa, Homo sapiens
  Table A; Target 86156; HLA-A*32:01; TDRD12; ENSG00000173809; TAA
KVVESSSIF

SEQ ID NO: 86157 - protein, 9 aa, Homo sapiens
  Table A; Target 86157; HLA-B*15:01; TDRD12; ENSG00000173809; TAA
KVVESSSIF

SEQ ID NO: 86158 - protein, 9 aa, Homo sapiens
  Table A; Target 86158; HLA-B*15:03; TDRD12; ENSG00000173809; TAA
KVVESSSIF

SEQ ID NO: 86159 - protein, 9 aa, Homo sapiens
  Table A; Target 86159; HLA-B*46:01; TDRD12; ENSG00000173809; TAA
KVVESSSIF

SEQ ID NO: 86160 - protein, 9 aa, Homo sapiens
  Table A; Target 86160; HLA-B*57:01; TDRD12; ENSG00000173809; TAA
KVVESSSIF

SEQ ID NO: 86161 - protein, 9 aa, Homo sapiens
  Table A; Target 86161; HLA-B*58:01; TDRD12; ENSG00000173809; TAA
KVVESSSIF

SEQ ID NO: 86162 - protein, 9 aa, Homo sapiens
  Table A; Target 86162; HLA-C*02:02; TDRD12; ENSG00000173809; TAA
KVVESSSIF

SEQ ID NO: 86163 - protein, 9 aa, Homo sapiens
  Table A; Target 86163; HLA-C*03:03; TDRD12; ENSG00000173809; TAA
KVVESSSIF

SEQ ID NO: 86164 - protein, 9 aa, Homo sapiens
  Table A; Target 86164; HLA-C*03:04; TDRD12; ENSG00000173809; TAA
KVVESSSIF

SEQ ID NO: 86165 - protein, 9 aa, Homo sapiens
  Table A; Target 86165; HLA-C*05:01; TDRD12; ENSG00000173809; TAA
KVVESSSIF

SEQ ID NO: 86166 - protein, 9 aa, Homo sapiens
  Table A; Target 86166; HLA-C*07:04; TDRD12; ENSG00000173809; TAA
KVVESSSIF

SEQ ID NO: 86167 - protein, 9 aa, Homo sapiens
  Table A; Target 86167; HLA-C*12:03; TDRD12; ENSG00000173809; TAA
KVVESSSIF

SEQ ID NO: 86168 - protein, 9 aa, Homo sapiens
  Table A; Target 86168; HLA-C*14:02; TDRD12; ENSG00000173809; TAA
KVVESSSIF

SEQ ID NO: 86169 - protein, 9 aa, Homo sapiens
  Table A; Target 86169; HLA-C*16:04; TDRD12; ENSG00000173809; TAA
KVVESSSIF

SEQ ID NO: 86170 - protein, 9 aa, Homo sapiens
  Table A; Target 86170; HLA-A*29:02; TDRD12; ENSG00000173809; TAA
KWDNAAIQY

SEQ ID NO: 86171 - protein, 9 aa, Homo sapiens
  Table A; Target 86171; HLA-C*04:01; TDRD12; ENSG00000173809; TAA
KWDNAAIQY

SEQ ID NO: 86172 - protein, 10 aa, Homo sapiens
  Table A; Target 86172; HLA-A*24:02; TDRD12; ENSG00000173809; TAA
KWDNAAIQYF

SEQ ID NO: 86173 - protein, 9 aa, Homo sapiens
  Table A; Target 86173; HLA-C*03:03; TDRD12; ENSG00000173809; TAA
LAITDATCV

SEQ ID NO: 86174 - protein, 9 aa, Homo sapiens
  Table A; Target 86174; HLA-C*03:04; TDRD12; ENSG00000173809; TAA
LAITDATCV

SEQ ID NO: 86175 - protein, 9 aa, Homo sapiens
  Table A; Target 86175; HLA-B*57:01; TDRD12; ENSG00000173809; TAA
LAVIVCPGW

SEQ ID NO: 86176 - protein, 10 aa, Homo sapiens
  Table A; Target 86176; HLA-A*03:01; TDRD12; ENSG00000173809; TAA
LDFIPSQAQK

SEQ ID NO: 86177 - protein, 10 aa, Homo sapiens
  Table A; Target 86177; HLA-A*03:02; TDRD12; ENSG00000173809; TAA
LDFIPSQAQK

SEQ ID NO: 86178 - protein, 10 aa, Homo sapiens
  Table A; Target 86178; HLA-A*11:01; TDRD12; ENSG00000173809; TAA
LDFIPSQAQK

SEQ ID NO: 86179 - protein, 10 aa, Homo sapiens
  Table A; Target 86179; HLA-B*27:02; TDRD12; ENSG00000173809; TAA
LDFIPSQAQK

SEQ ID NO: 86180 - protein, 8 aa, Homo sapiens
  Table A; Target 86180; HLA-B*18:01; TDRD12; ENSG00000173809; TAA
LEANEQMF

SEQ ID NO: 86181 - protein, 9 aa, Homo sapiens
  Table A; Target 86181; HLA-B*49:01; TDRD12; ENSG00000173809; TAA
LEANEQMFA

SEQ ID NO: 86182 - protein, 10 aa, Homo sapiens
  Table A; Target 86182; HLA-B*49:01; TDRD12; ENSG00000173809; TAA
LEANEQMFAI

SEQ ID NO: 86183 - protein, 9 aa, Homo sapiens
  Table A; Target 86183; HLA-A*30:01; TDRD12; ENSG00000173809; TAA
LECEKTSSL

SEQ ID NO: 86184 - protein, 9 aa, Homo sapiens
  Table A; Target 86184; HLA-B*18:01; TDRD12; ENSG00000173809; TAA
LECEKTSSL

SEQ ID NO: 86185 - protein, 9 aa, Homo sapiens
  Table A; Target 86185; HLA-B*37:01; TDRD12; ENSG00000173809; TAA
LECEKTSSL

SEQ ID NO: 86186 - protein, 9 aa, Homo sapiens
  Table A; Target 86186; HLA-B*40:01; TDRD12; ENSG00000173809; TAA
LECEKTSSL

SEQ ID NO: 86187 - protein, 9 aa, Homo sapiens
  Table A; Target 86187; HLA-B*40:02; TDRD12; ENSG00000173809; TAA
LECEKTSSL

SEQ ID NO: 86188 - protein, 9 aa, Homo sapiens
  Table A; Target 86188; HLA-B*49:01; TDRD12; ENSG00000173809; TAA
LECEKTSSL

SEQ ID NO: 86189 - protein, 9 aa, Homo sapiens
  Table A; Target 86189; HLA-A*30:01; TDRD12; ENSG00000173809; TAA
LEEGQVCVV

SEQ ID NO: 86190 - protein, 9 aa, Homo sapiens
  Table A; Target 86190; HLA-B*40:01; TDRD12; ENSG00000173809; TAA
LEEGQVCVV

SEQ ID NO: 86191 - protein, 9 aa, Homo sapiens
  Table A; Target 86191; HLA-B*40:02; TDRD12; ENSG00000173809; TAA
LEEGQVCVV

SEQ ID NO: 86192 - protein, 9 aa, Homo sapiens
  Table A; Target 86192; HLA-B*49:01; TDRD12; ENSG00000173809; TAA
LEEGQVCVV

SEQ ID NO: 86193 - protein, 10 aa, Homo sapiens
  Table A; Target 86193; HLA-B*18:01; TDRD12; ENSG00000173809; TAA
LEEGQVCVVY

SEQ ID NO: 86194 - protein, 10 aa, Homo sapiens
  Table A; Target 86194; HLA-B*40:01; TDRD12; ENSG00000173809; TAA
LEEGQVCVVY

SEQ ID NO: 86195 - protein, 10 aa, Homo sapiens
  Table A; Target 86195; HLA-B*44:02; TDRD12; ENSG00000173809; TAA
LEEGQVCVVY

SEQ ID NO: 86196 - protein, 10 aa, Homo sapiens
  Table A; Target 86196; HLA-B*40:02; TDRD12; ENSG00000173809; TAA
LERADAKVPA

SEQ ID NO: 86197 - protein, 10 aa, Homo sapiens
  Table A; Target 86197; HLA-B*27:02; TDRD12; ENSG00000173809; TAA
LEVNQKEDAW

SEQ ID NO: 86198 - protein, 10 aa, Homo sapiens
  Table A; Target 86198; HLA-B*44:02; TDRD12; ENSG00000173809; TAA
LEVNQKEDAW

SEQ ID NO: 86199 - protein, 10 aa, Homo sapiens
  Table A; Target 86199; HLA-B*44:03; TDRD12; ENSG00000173809; TAA
LEVNQKEDAW

SEQ ID NO: 86200 - protein, 10 aa, Homo sapiens
  Table A; Target 86200; HLA-C*16:04; TDRD12; ENSG00000173809; TAA
LEVNQKEDAW

SEQ ID NO: 86201 - protein, 9 aa, Homo sapiens
  Table A; Target 86201; HLA-A*23:01; TDRD12; ENSG00000173809; TAA
LFLEANEQM

SEQ ID NO: 86202 - protein, 9 aa, Homo sapiens
  Table A; Target 86202; HLA-C*14:02; TDRD12; ENSG00000173809; TAA
LFLEANEQM

SEQ ID NO: 86203 - protein, 10 aa, Homo sapiens
  Table A; Target 86203; HLA-A*23:01; TDRD12; ENSG00000173809; TAA
LFLEANEQMF

SEQ ID NO: 86204 - protein, 10 aa, Homo sapiens
  Table A; Target 86204; HLA-A*24:02; TDRD12; ENSG00000173809; TAA
LFLEANEQMF

SEQ ID NO: 86205 - protein, 8 aa, Homo sapiens
  Table A; Target 86205; HLA-B*38:01; TDRD12; ENSG00000173809; TAA
LHDAKVIL

SEQ ID NO: 86206 - protein, 10 aa, Homo sapiens
  Table A; Target 86206; HLA-B*38:01; TDRD12; ENSG00000173809; TAA
LHDAKVILAL

SEQ ID NO: 86207 - protein, 9 aa, Homo sapiens
  Table A; Target 86207; HLA-A*02:01; TDRD12; ENSG00000173809; TAA
LILDEVEVL

SEQ ID NO: 86208 - protein, 9 aa, Homo sapiens
  Table A; Target 86208; HLA-A*02:04; TDRD12; ENSG00000173809; TAA
LILDEVEVL

SEQ ID NO: 86209 - protein, 9 aa, Homo sapiens
  Table A; Target 86209; HLA-A*02:07; TDRD12; ENSG00000173809; TAA
LILDEVEVL

SEQ ID NO: 86210 - protein, 9 aa, Homo sapiens
  Table A; Target 86210; HLA-B*35:03; TDRD12; ENSG00000173809; TAA
LILDEVEVL

SEQ ID NO: 86211 - protein, 9 aa, Homo sapiens
  Table A; Target 86211; HLA-B*40:01; TDRD12; ENSG00000173809; TAA
LILDEVEVL

SEQ ID NO: 86212 - protein, 9 aa, Homo sapiens
  Table A; Target 86212; HLA-C*03:04; TDRD12; ENSG00000173809; TAA
LILDEVEVL

SEQ ID NO: 86213 - protein, 9 aa, Homo sapiens
  Table A; Target 86213; HLA-C*07:04; TDRD12; ENSG00000173809; TAA
LILDEVEVL

SEQ ID NO: 86214 - protein, 10 aa, Homo sapiens
  Table A; Target 86214; HLA-A*23:01; TDRD12; ENSG00000173809; TAA
LILDEVEVLF

SEQ ID NO: 86215 - protein, 11 aa, Homo sapiens
  Table A; Target 86215; HLA-A*02:01; TDRD12; ENSG00000173809; TAA
LILDEVEVLFL

SEQ ID NO: 86216 - protein, 11 aa, Homo sapiens
  Table A; Target 86216; HLA-A*02:04; TDRD12; ENSG00000173809; TAA
LILDEVEVLFL

SEQ ID NO: 86217 - protein, 9 aa, Homo sapiens
  Table A; Target 86217; HLA-B*15:03; TDRD12; ENSG00000173809; TAA
LKIEDPGCF

SEQ ID NO: 86218 - protein, 8 aa, Homo sapiens
  Table A; Target 86218; HLA-B*15:03; TDRD12; ENSG00000173809; TAA
LKTSVIDY

SEQ ID NO: 86219 - protein, 8 aa, Homo sapiens
  Table A; Target 86219; HLA-C*07:01; TDRD12; ENSG00000173809; TAA
LKTSVIDY

SEQ ID NO: 86220 - protein, 8 aa, Homo sapiens
  Table A; Target 86220; HLA-C*07:04; TDRD12; ENSG00000173809; TAA
LKTSVIDY

SEQ ID NO: 86221 - protein, 9 aa, Homo sapiens
  Table A; Target 86221; HLA-A*02:04; TDRD12; ENSG00000173809; TAA
LLFLRLCHL

SEQ ID NO: 86222 - protein, 8 aa, Homo sapiens
  Table A; Target 86222; HLA-A*02:03; TDRD12; ENSG00000173809; TAA
LLKATTQV

SEQ ID NO: 86223 - protein, 8 aa, Homo sapiens
  Table A; Target 86223; HLA-B*08:01; TDRD12; ENSG00000173809; TAA
LLKATTQV

SEQ ID NO: 86224 - protein, 11 aa, Homo sapiens
  Table A; Target 86224; HLA-A*33:01; TDRD12; ENSG00000173809; TAA
LLKATTQVEAR

SEQ ID NO: 86225 - protein, 8 aa, Homo sapiens
  Table A; Target 86225; HLA-A*02:07; TDRD12; ENSG00000173809; TAA
LLPVLTVL

SEQ ID NO: 86226 - protein, 11 aa, Homo sapiens
  Table A; Target 86226; HLA-A*02:07; TDRD12; ENSG00000173809; TAA
LLPVLTVLQTG

SEQ ID NO: 86227 - protein, 11 aa, Homo sapiens
  Table A; Target 86227; HLA-A*02:01; TDRD12; ENSG00000173809; TAA
LLTEKDASHAV

SEQ ID NO: 86228 - protein, 8 aa, Homo sapiens
  Table A; Target 86228; HLA-B*39:01; TDRD12; ENSG00000173809; TAA
LNAEMNEY

SEQ ID NO: 86229 - protein, 8 aa, Homo sapiens
  Table A; Target 86229; HLA-B*46:01; TDRD12; ENSG00000173809; TAA
LNAEMNEY

SEQ ID NO: 86230 - protein, 9 aa, Homo sapiens
  Table A; Target 86230; HLA-A*23:01; TDRD12; ENSG00000173809; TAA
LNIKSAPSF

SEQ ID NO: 86231 - protein, 9 aa, Homo sapiens
  Table A; Target 86231; HLA-A*24:02; TDRD12; ENSG00000173809; TAA
LNIKSAPSF

SEQ ID NO: 86232 - protein, 9 aa, Homo sapiens
  Table A; Target 86232; HLA-B*58:01; TDRD12; ENSG00000173809; TAA
LNIKSAPSF

SEQ ID NO: 86233 - protein, 9 aa, Homo sapiens
  Table A; Target 86233; HLA-A*01:01; TDRD12; ENSG00000173809; TAA
LNSAMNDFY

SEQ ID NO: 86234 - protein, 9 aa, Homo sapiens
  Table A; Target 86234; HLA-A*29:02; TDRD12; ENSG00000173809; TAA
LNSAMNDFY

SEQ ID NO: 86235 - protein, 8 aa, Homo sapiens
  Table A; Target 86235; HLA-B*08:01; TDRD12; ENSG00000173809; TAA
LPEHFHTL

SEQ ID NO: 86236 - protein, 8 aa, Homo sapiens
  Table A; Target 86236; HLA-B*35:03; TDRD12; ENSG00000173809; TAA
LPEHFHTL

SEQ ID NO: 86237 - protein, 8 aa, Homo sapiens
  Table A; Target 86237; HLA-B*51:01; TDRD12; ENSG00000173809; TAA
LPEHFHTL

SEQ ID NO: 86238 - protein, 8 aa, Homo sapiens
  Table A; Target 86238; HLA-B*35:01; TDRD12; ENSG00000173809; TAA
LPPQAVEF

SEQ ID NO: 86239 - protein, 8 aa, Homo sapiens
  Table A; Target 86239; HLA-B*35:03; TDRD12; ENSG00000173809; TAA
LPPQAVEF

SEQ ID NO: 86240 - protein, 8 aa, Homo sapiens
  Table A; Target 86240; HLA-B*51:01; TDRD12; ENSG00000173809; TAA
LPPQAVEF

SEQ ID NO: 86241 - protein, 9 aa, Homo sapiens
  Table A; Target 86241; HLA-B*51:01; TDRD12; ENSG00000173809; TAA
LPPQAVEFI

SEQ ID NO: 86242 - protein, 11 aa, Homo sapiens
  Table A; Target 86242; HLA-B*54:01; TDRD12; ENSG00000173809; TAA
LPPQAVEFIVC

SEQ ID NO: 86243 - protein, 9 aa, Homo sapiens
  Table A; Target 86243; HLA-B*07:02; TDRD12; ENSG00000173809; TAA
LPRKLSSQA

SEQ ID NO: 86244 - protein, 9 aa, Homo sapiens
  Table A; Target 86244; HLA-B*54:01; TDRD12; ENSG00000173809; TAA
LPRKLSSQA

SEQ ID NO: 86245 - protein, 9 aa, Homo sapiens
  Table A; Target 86245; HLA-B*55:01; TDRD12; ENSG00000173809; TAA
LPRKLSSQA

SEQ ID NO: 86246 - protein, 9 aa, Homo sapiens
  Table A; Target 86246; HLA-B*56:01; TDRD12; ENSG00000173809; TAA
LPRKLSSQA

SEQ ID NO: 86247 - protein, 10 aa, Homo sapiens
  Table A; Target 86247; HLA-B*07:02; TDRD12; ENSG00000173809; TAA
LPRKLSSQAL

SEQ ID NO: 86248 - protein, 10 aa, Homo sapiens
  Table A; Target 86248; HLA-C*07:02; TDRD12; ENSG00000173809; TAA
LPRKLSSQAL

SEQ ID NO: 86249 - protein, 9 aa, Homo sapiens
  Table A; Target 86249; HLA-B*51:01; TDRD12; ENSG00000173809; TAA
LPSFGYIKI

SEQ ID NO: 86250 - protein, 9 aa, Homo sapiens
  Table A; Target 86250; HLA-B*54:01; TDRD12; ENSG00000173809; TAA
LPSRNGPLA

SEQ ID NO: 86251 - protein, 9 aa, Homo sapiens
  Table A; Target 86251; HLA-B*56:01; TDRD12; ENSG00000173809; TAA
LPSRNGPLA

SEQ ID NO: 86252 - protein, 10 aa, Homo sapiens
  Table A; Target 86252; HLA-B*07:02; TDRD12; ENSG00000173809; TAA
LPSRNGPLAV

SEQ ID NO: 86253 - protein, 10 aa, Homo sapiens
  Table A; Target 86253; HLA-B*51:01; TDRD12; ENSG00000173809; TAA
LPSRNGPLAV

SEQ ID NO: 86254 - protein, 10 aa, Homo sapiens
  Table A; Target 86254; HLA-B*54:01; TDRD12; ENSG00000173809; TAA
LPSRNGPLAV

SEQ ID NO: 86255 - protein, 10 aa, Homo sapiens
  Table A; Target 86255; HLA-B*56:01; TDRD12; ENSG00000173809; TAA
LPSRNGPLAV

SEQ ID NO: 86256 - protein, 10 aa, Homo sapiens
  Table A; Target 86256; HLA-C*07:02; TDRD12; ENSG00000173809; TAA
LPSRNGPLAV

SEQ ID NO: 86257 - protein, 11 aa, Homo sapiens
  Table A; Target 86257; HLA-B*51:01; TDRD12; ENSG00000173809; TAA
LPSRNGPLAVI

SEQ ID NO: 86258 - protein, 11 aa, Homo sapiens
  Table A; Target 86258; HLA-B*56:01; TDRD12; ENSG00000173809; TAA
LPSRNGPLAVI

SEQ ID NO: 86259 - protein, 9 aa, Homo sapiens
  Table A; Target 86259; HLA-B*54:01; TDRD12; ENSG00000173809; TAA
LPVLTVLQT

SEQ ID NO: 86260 - protein, 9 aa, Homo sapiens
  Table A; Target 86260; HLA-B*56:01; TDRD12; ENSG00000173809; TAA
LPVLTVLQT

SEQ ID NO: 86261 - protein, 10 aa, Homo sapiens
  Table A; Target 86261; HLA-B*54:01; TDRD12; ENSG00000173809; TAA
LPVLTVLQTG

SEQ ID NO: 86262 - protein, 10 aa, Homo sapiens
  Table A; Target 86262; HLA-B*56:01; TDRD12; ENSG00000173809; TAA
LPVLTVLQTG

SEQ ID NO: 86263 - protein, 10 aa, Homo sapiens
  Table A; Target 86263; HLA-C*07:02; TDRD12; ENSG00000173809; TAA
LPVLTVLQTG

SEQ ID NO: 86264 - protein, 11 aa, Homo sapiens
  Table A; Target 86264; HLA-B*54:01; TDRD12; ENSG00000173809; TAA
LPVLTVLQTGA

SEQ ID NO: 86265 - protein, 11 aa, Homo sapiens
  Table A; Target 86265; HLA-B*55:01; TDRD12; ENSG00000173809; TAA
LPVLTVLQTGA

SEQ ID NO: 86266 - protein, 11 aa, Homo sapiens
  Table A; Target 86266; HLA-B*56:01; TDRD12; ENSG00000173809; TAA
LPVLTVLQTGA

SEQ ID NO: 86267 - protein, 8 aa, Homo sapiens
  Table A; Target 86267; HLA-B*08:01; TDRD12; ENSG00000173809; TAA
LPYRAKKF

SEQ ID NO: 86268 - protein, 8 aa, Homo sapiens
  Table A; Target 86268; HLA-B*51:01; TDRD12; ENSG00000173809; TAA
LPYRAKKF

SEQ ID NO: 86269 - protein, 9 aa, Homo sapiens
  Table A; Target 86269; HLA-A*02:01; TDRD12; ENSG00000173809; TAA
LQFLNPDPL

SEQ ID NO: 86270 - protein, 9 aa, Homo sapiens
  Table A; Target 86270; HLA-A*02:04; TDRD12; ENSG00000173809; TAA
LQFLNPDPL

SEQ ID NO: 86271 - protein, 9 aa, Homo sapiens
  Table A; Target 86271; HLA-B*15:01; TDRD12; ENSG00000173809; TAA
LQFLNPDPL

SEQ ID NO: 86272 - protein, 9 aa, Homo sapiens
  Table A; Target 86272; HLA-B*15:03; TDRD12; ENSG00000173809; TAA
LQFLNPDPL

SEQ ID NO: 86273 - protein, 9 aa, Homo sapiens
  Table A; Target 86273; HLA-B*27:05; TDRD12; ENSG00000173809; TAA
LQFLNPDPL

SEQ ID NO: 86274 - protein, 9 aa, Homo sapiens
  Table A; Target 86274; HLA-B*39:01; TDRD12; ENSG00000173809; TAA
LQFLNPDPL

SEQ ID NO: 86275 - protein, 9 aa, Homo sapiens
  Table A; Target 86275; HLA-C*06:02; TDRD12; ENSG00000173809; TAA
LQFLNPDPL

SEQ ID NO: 86276 - protein, 9 aa, Homo sapiens
  Table A; Target 86276; HLA-C*07:04; TDRD12; ENSG00000173809; TAA
LQFLNPDPL

SEQ ID NO: 86277 - protein, 9 aa, Homo sapiens
  Table A; Target 86277; HLA-C*12:03; TDRD12; ENSG00000173809; TAA
LQFLNPDPL

SEQ ID NO: 86278 - protein, 9 aa, Homo sapiens
  Table A; Target 86278; HLA-C*07:04; TDRD12; ENSG00000173809; TAA
LQGKDVQGM

SEQ ID NO: 86279 - protein, 8 aa, Homo sapiens
  Table A; Target 86279; HLA-B*13:02; TDRD12; ENSG00000173809; TAA
LQLLVLKI

SEQ ID NO: 86280 - protein, 8 aa, Homo sapiens
  Table A; Target 86280; HLA-B*15:01; TDRD12; ENSG00000173809; TAA
LQPPVVVL

SEQ ID NO: 86281 - protein, 9 aa, Homo sapiens
  Table A; Target 86281; HLA-A*02:07; TDRD12; ENSG00000173809; TAA
LQPPVVVLR

SEQ ID NO: 86282 - protein, 9 aa, Homo sapiens
  Table A; Target 86282; HLA-A*24:02; TDRD12; ENSG00000173809; TAA
LQPPVVVLR

SEQ ID NO: 86283 - protein, 9 aa, Homo sapiens
  Table A; Target 86283; HLA-A*31:01; TDRD12; ENSG00000173809; TAA
LQPPVVVLR

SEQ ID NO: 86284 - protein, 9 aa, Homo sapiens
  Table A; Target 86284; HLA-A*33:03; TDRD12; ENSG00000173809; TAA
LQPPVVVLR

SEQ ID NO: 86285 - protein, 9 aa, Homo sapiens
  Table A; Target 86285; HLA-A*68:02; TDRD12; ENSG00000173809; TAA
LQPPVVVLR

SEQ ID NO: 86286 - protein, 9 aa, Homo sapiens
  Table A; Target 86286; HLA-C*07:06; TDRD12; ENSG00000173809; TAA
LQPPVVVLR

SEQ ID NO: 86287 - protein, 9 aa, Homo sapiens
  Table A; Target 86287; HLA-B*27:05; TDRD12; ENSG00000173809; TAA
LRADGISDL

SEQ ID NO: 86288 - protein, 9 aa, Homo sapiens
  Table A; Target 86288; HLA-B*39:01; TDRD12; ENSG00000173809; TAA
LRADGISDL

SEQ ID NO: 86289 - protein, 9 aa, Homo sapiens
  Table A; Target 86289; HLA-A*32:01; TDRD12; ENSG00000173809; TAA
LSADLKKAL

SEQ ID NO: 86290 - protein, 9 aa, Homo sapiens
  Table A; Target 86290; HLA-B*07:02; TDRD12; ENSG00000173809; TAA
LSADLKKAL

SEQ ID NO: 86291 - protein, 9 aa, Homo sapiens
  Table A; Target 86291; HLA-C*03:04; TDRD12; ENSG00000173809; TAA
LSADLKKAL

SEQ ID NO: 86292 - protein, 9 aa, Homo sapiens
  Table A; Target 86292; HLA-C*06:02; TDRD12; ENSG00000173809; TAA
LSADLKKAL

SEQ ID NO: 86293 - protein, 9 aa, Homo sapiens
  Table A; Target 86293; HLA-C*16:01; TDRD12; ENSG00000173809; TAA
LSADLKKAL

SEQ ID NO: 86294 - protein, 9 aa, Homo sapiens
  Table A; Target 86294; HLA-C*16:02; TDRD12; ENSG00000173809; TAA
LSADLKKAL

SEQ ID NO: 86295 - protein, 9 aa, Homo sapiens
  Table A; Target 86295; HLA-C*16:01; TDRD12; ENSG00000173809; TAA
LSQTPPRVT

SEQ ID NO: 86296 - protein, 9 aa, Homo sapiens
  Table A; Target 86296; HLA-C*07:04; TDRD12; ENSG00000173809; TAA
LSSGSQIIL

SEQ ID NO: 86297 - protein, 9 aa, Homo sapiens
  Table A; Target 86297; HLA-B*46:01; TDRD12; ENSG00000173809; TAA
LSSQALPSF

SEQ ID NO: 86298 - protein, 9 aa, Homo sapiens
  Table A; Target 86298; HLA-B*57:01; TDRD12; ENSG00000173809; TAA
LSSQALPSF

SEQ ID NO: 86299 - protein, 9 aa, Homo sapiens
  Table A; Target 86299; HLA-B*58:01; TDRD12; ENSG00000173809; TAA
LSSQALPSF

SEQ ID NO: 86300 - protein, 11 aa, Homo sapiens
  Table A; Target 86300; HLA-A*01:01; TDRD12; ENSG00000173809; TAA
LSSQALPSFGY

SEQ ID NO: 86301 - protein, 11 aa, Homo sapiens
  Table A; Target 86301; HLA-A*29:02; TDRD12; ENSG00000173809; TAA
LSSQALPSFGY

SEQ ID NO: 86302 - protein, 11 aa, Homo sapiens
  Table A; Target 86302; HLA-A*30:02; TDRD12; ENSG00000173809; TAA
LSSQALPSFGY

SEQ ID NO: 86303 - protein, 9 aa, Homo sapiens
  Table A; Target 86303; HLA-A*01:01; TDRD12; ENSG00000173809; TAA
LTDDCVPLL

SEQ ID NO: 86304 - protein, 9 aa, Homo sapiens
  Table A; Target 86304; HLA-A*02:01; TDRD12; ENSG00000173809; TAA
LTDDCVPLL

SEQ ID NO: 86305 - protein, 9 aa, Homo sapiens
  Table A; Target 86305; HLA-A*02:07; TDRD12; ENSG00000173809; TAA
LTDDCVPLL

SEQ ID NO: 86306 - protein, 9 aa, Homo sapiens
  Table A; Target 86306; HLA-A*23:01; TDRD12; ENSG00000173809; TAA
LTDDCVPLL

SEQ ID NO: 86307 - protein, 9 aa, Homo sapiens
  Table A; Target 86307; HLA-B*35:03; TDRD12; ENSG00000173809; TAA
LTDDCVPLL

SEQ ID NO: 86308 - protein, 9 aa, Homo sapiens
  Table A; Target 86308; HLA-B*38:01; TDRD12; ENSG00000173809; TAA
LTDDCVPLL

SEQ ID NO: 86309 - protein, 9 aa, Homo sapiens
  Table A; Target 86309; HLA-C*03:03; TDRD12; ENSG00000173809; TAA
LTDDCVPLL

SEQ ID NO: 86310 - protein, 9 aa, Homo sapiens
  Table A; Target 86310; HLA-C*03:04; TDRD12; ENSG00000173809; TAA
LTDDCVPLL

SEQ ID NO: 86311 - protein, 9 aa, Homo sapiens
  Table A; Target 86311; HLA-C*04:01; TDRD12; ENSG00000173809; TAA
LTDDCVPLL

SEQ ID NO: 86312 - protein, 9 aa, Homo sapiens
  Table A; Target 86312; HLA-C*05:01; TDRD12; ENSG00000173809; TAA
LTDDCVPLL

SEQ ID NO: 86313 - protein, 9 aa, Homo sapiens
  Table A; Target 86313; HLA-C*07:04; TDRD12; ENSG00000173809; TAA
LTDDCVPLL

SEQ ID NO: 86314 - protein, 10 aa, Homo sapiens
  Table A; Target 86314; HLA-A*01:01; TDRD12; ENSG00000173809; TAA
LTEKDASHAV

SEQ ID NO: 86315 - protein, 8 aa, Homo sapiens
  Table A; Target 86315; HLA-C*03:03; TDRD12; ENSG00000173809; TAA
LTIDSSPL

SEQ ID NO: 86316 - protein, 8 aa, Homo sapiens
  Table A; Target 86316; HLA-C*03:04; TDRD12; ENSG00000173809; TAA
LTIDSSPL

SEQ ID NO: 86317 - protein, 9 aa, Homo sapiens
  Table A; Target 86317; HLA-C*03:04; TDRD12; ENSG00000173809; TAA
LTLEEGQVC

SEQ ID NO: 86318 - protein, 10 aa, Homo sapiens
  Table A; Target 86318; HLA-A*01:01; TDRD12; ENSG00000173809; TAA
LTVLQTGACY

SEQ ID NO: 86319 - protein, 10 aa, Homo sapiens
  Table A; Target 86319; HLA-A*26:01; TDRD12; ENSG00000173809; TAA
LTVLQTGACY

SEQ ID NO: 86320 - protein, 10 aa, Homo sapiens
  Table A; Target 86320; HLA-A*30:02; TDRD12; ENSG00000173809; TAA
LTVLQTGACY

SEQ ID NO: 86321 - protein, 10 aa, Homo sapiens
  Table A; Target 86321; HLA-B*58:01; TDRD12; ENSG00000173809; TAA
LTVLQTGACY

SEQ ID NO: 86322 - protein, 9 aa, Homo sapiens
  Table A; Target 86322; HLA-A*25:01; TDRD12; ENSG00000173809; TAA
LVAKNYACY

SEQ ID NO: 86323 - protein, 9 aa, Homo sapiens
  Table A; Target 86323; HLA-A*26:01; TDRD12; ENSG00000173809; TAA
LVAKNYACY

SEQ ID NO: 86324 - protein, 9 aa, Homo sapiens
  Table A; Target 86324; HLA-A*29:02; TDRD12; ENSG00000173809; TAA
LVAKNYACY

SEQ ID NO: 86325 - protein, 9 aa, Homo sapiens
  Table A; Target 86325; HLA-A*30:02; TDRD12; ENSG00000173809; TAA
LVAKNYACY

SEQ ID NO: 86326 - protein, 9 aa, Homo sapiens
  Table A; Target 86326; HLA-C*07:04; TDRD12; ENSG00000173809; TAA
LVAKNYACY

SEQ ID NO: 86327 - protein, 9 aa, Homo sapiens
  Table A; Target 86327; HLA-A*23:01; TDRD12; ENSG00000173809; TAA
LYATLNAEM

SEQ ID NO: 86328 - protein, 9 aa, Homo sapiens
  Table A; Target 86328; HLA-A*24:02; TDRD12; ENSG00000173809; TAA
LYATLNAEM

SEQ ID NO: 86329 - protein, 9 aa, Homo sapiens
  Table A; Target 86329; HLA-A*29:02; TDRD12; ENSG00000173809; TAA
LYATLNAEM

SEQ ID NO: 86330 - protein, 9 aa, Homo sapiens
  Table A; Target 86330; HLA-B*27:05; TDRD12; ENSG00000173809; TAA
LYATLNAEM

SEQ ID NO: 86331 - protein, 9 aa, Homo sapiens
  Table A; Target 86331; HLA-C*01:02; TDRD12; ENSG00000173809; TAA
LYATLNAEM

SEQ ID NO: 86332 - protein, 9 aa, Homo sapiens
  Table A; Target 86332; HLA-C*14:02; TDRD12; ENSG00000173809; TAA
LYATLNAEM

SEQ ID NO: 86333 - protein, 9 aa, Homo sapiens
  Table A; Target 86333; HLA-A*23:01; TDRD12; ENSG00000173809; TAA
LYCTKPVTL

SEQ ID NO: 86334 - protein, 9 aa, Homo sapiens
  Table A; Target 86334; HLA-A*24:02; TDRD12; ENSG00000173809; TAA
LYCTKPVTL

SEQ ID NO: 86335 - protein, 9 aa, Homo sapiens
  Table A; Target 86335; HLA-C*14:02; TDRD12; ENSG00000173809; TAA
LYCTKPVTL

SEQ ID NO: 86336 - protein, 10 aa, Homo sapiens
  Table A; Target 86336; HLA-A*23:01; TDRD12; ENSG00000173809; TAA
LYGLAEKTLF

SEQ ID NO: 86337 - protein, 10 aa, Homo sapiens
  Table A; Target 86337; HLA-A*24:02; TDRD12; ENSG00000173809; TAA
LYGLAEKTLF

SEQ ID NO: 86338 - protein, 8 aa, Homo sapiens
  Table A; Target 86338; HLA-A*24:02; TDRD12; ENSG00000173809; TAA
LYGNVQQV

SEQ ID NO: 86339 - protein, 8 aa, Homo sapiens
  Table A; Target 86339; HLA-C*04:01; TDRD12; ENSG00000173809; TAA
LYGNVQQV

SEQ ID NO: 86340 - protein, 8 aa, Homo sapiens
  Table A; Target 86340; HLA-C*14:02; TDRD12; ENSG00000173809; TAA
LYGNVQQV

SEQ ID NO: 86341 - protein, 9 aa, Homo sapiens
  Table A; Target 86341; HLA-A*23:01; TDRD12; ENSG00000173809; TAA
LYGNVQQVV

SEQ ID NO: 86342 - protein, 9 aa, Homo sapiens
  Table A; Target 86342; HLA-A*24:02; TDRD12; ENSG00000173809; TAA
LYGNVQQVV

SEQ ID NO: 86343 - protein, 9 aa, Homo sapiens
  Table A; Target 86343; HLA-C*14:02; TDRD12; ENSG00000173809; TAA
LYGNVQQVV

SEQ ID NO: 86344 - protein, 11 aa, Homo sapiens
  Table A; Target 86344; HLA-A*24:02; TDRD12; ENSG00000173809; TAA
LYGNVQQVVHL

SEQ ID NO: 86345 - protein, 9 aa, Homo sapiens
  Table A; Target 86345; HLA-B*37:01; TDRD12; ENSG00000173809; TAA
MDSLRDSPK

SEQ ID NO: 86346 - protein, 9 aa, Homo sapiens
  Table A; Target 86346; HLA-A*02:07; TDRD12; ENSG00000173809; TAA
MEDSHGVNF

SEQ ID NO: 86347 - protein, 9 aa, Homo sapiens
  Table A; Target 86347; HLA-A*23:01; TDRD12; ENSG00000173809; TAA
MEDSHGVNF

SEQ ID NO: 86348 - protein, 9 aa, Homo sapiens
  Table A; Target 86348; HLA-A*30:01; TDRD12; ENSG00000173809; TAA
MEDSHGVNF

SEQ ID NO: 86349 - protein, 9 aa, Homo sapiens
  Table A; Target 86349; HLA-B*15:03; TDRD12; ENSG00000173809; TAA
MEDSHGVNF

SEQ ID NO: 86350 - protein, 9 aa, Homo sapiens
  Table A; Target 86350; HLA-B*18:01; TDRD12; ENSG00000173809; TAA
MEDSHGVNF

SEQ ID NO: 86351 - protein, 9 aa, Homo sapiens
  Table A; Target 86351; HLA-B*35:01; TDRD12; ENSG00000173809; TAA
MEDSHGVNF

SEQ ID NO: 86352 - protein, 9 aa, Homo sapiens
  Table A; Target 86352; HLA-B*35:03; TDRD12; ENSG00000173809; TAA
MEDSHGVNF

SEQ ID NO: 86353 - protein, 9 aa, Homo sapiens
  Table A; Target 86353; HLA-B*37:01; TDRD12; ENSG00000173809; TAA
MEDSHGVNF

SEQ ID NO: 86354 - protein, 9 aa, Homo sapiens
  Table A; Target 86354; HLA-B*38:01; TDRD12; ENSG00000173809; TAA
MEDSHGVNF

SEQ ID NO: 86355 - protein, 9 aa, Homo sapiens
  Table A; Target 86355; HLA-B*40:01; TDRD12; ENSG00000173809; TAA
MEDSHGVNF

SEQ ID NO: 86356 - protein, 9 aa, Homo sapiens
  Table A; Target 86356; HLA-B*44:02; TDRD12; ENSG00000173809; TAA
MEDSHGVNF

SEQ ID NO: 86357 - protein, 9 aa, Homo sapiens
  Table A; Target 86357; HLA-B*44:03; TDRD12; ENSG00000173809; TAA
MEDSHGVNF

SEQ ID NO: 86358 - protein, 9 aa, Homo sapiens
  Table A; Target 86358; HLA-B*49:01; TDRD12; ENSG00000173809; TAA
MEDSHGVNF

SEQ ID NO: 86359 - protein, 9 aa, Homo sapiens
  Table A; Target 86359; HLA-C*02:02; TDRD12; ENSG00000173809; TAA
MEDSHGVNF

SEQ ID NO: 86360 - protein, 9 aa, Homo sapiens
  Table A; Target 86360; HLA-C*04:01; TDRD12; ENSG00000173809; TAA
MEDSHGVNF

SEQ ID NO: 86361 - protein, 9 aa, Homo sapiens
  Table A; Target 86361; HLA-C*05:01; TDRD12; ENSG00000173809; TAA
MEDSHGVNF

SEQ ID NO: 86362 - protein, 9 aa, Homo sapiens
  Table A; Target 86362; HLA-C*07:04; TDRD12; ENSG00000173809; TAA
MEDSHGVNF

SEQ ID NO: 86363 - protein, 9 aa, Homo sapiens
  Table A; Target 86363; HLA-C*16:04; TDRD12; ENSG00000173809; TAA
MEDSHGVNF

SEQ ID NO: 86364 - protein, 10 aa, Homo sapiens
  Table A; Target 86364; HLA-B*49:01; TDRD12; ENSG00000173809; TAA
MEEAALYGNV

SEQ ID NO: 86365 - protein, 9 aa, Homo sapiens
  Table A; Target 86365; HLA-B*13:02; TDRD12; ENSG00000173809; TAA
MGIDNPEHI

SEQ ID NO: 86366 - protein, 9 aa, Homo sapiens
  Table A; Target 86366; HLA-B*38:01; TDRD12; ENSG00000173809; TAA
MGIDNPEHI

SEQ ID NO: 86367 - protein, 10 aa, Homo sapiens
  Table A; Target 86367; HLA-B*54:01; TDRD12; ENSG00000173809; TAA
MNDPYIVITA

SEQ ID NO: 86368 - protein, 9 aa, Homo sapiens
  Table A; Target 86368; HLA-B*54:01; TDRD12; ENSG00000173809; TAA
MSSRPLHPV

SEQ ID NO: 86369 - protein, 9 aa, Homo sapiens
  Table A; Target 86369; HLA-C*16:01; TDRD12; ENSG00000173809; TAA
MSSRPLHPV

SEQ ID NO: 86370 - protein, 8 aa, Homo sapiens
  Table A; Target 86370; HLA-C*04:01; TDRD12; ENSG00000173809; TAA
NAEMNEYF

SEQ ID NO: 86371 - protein, 8 aa, Homo sapiens
  Table A; Target 86371; HLA-C*05:01; TDRD12; ENSG00000173809; TAA
NAEMNEYF

SEQ ID NO: 86372 - protein, 9 aa, Homo sapiens
  Table A; Target 86372; HLA-C*16:02; TDRD12; ENSG00000173809; TAA
NATNYFGRI

SEQ ID NO: 86373 - protein, 9 aa, Homo sapiens
  Table A; Target 86373; HLA-B*18:01; TDRD12; ENSG00000173809; TAA
NDDLVAKNY

SEQ ID NO: 86374 - protein, 9 aa, Homo sapiens
  Table A; Target 86374; HLA-B*44:02; TDRD12; ENSG00000173809; TAA
NDDLVAKNY

SEQ ID NO: 86375 - protein, 9 aa, Homo sapiens
  Table A; Target 86375; HLA-B*44:03; TDRD12; ENSG00000173809; TAA
NDDLVAKNY

SEQ ID NO: 86376 - protein, 9 aa, Homo sapiens
  Table A; Target 86376; HLA-C*16:04; TDRD12; ENSG00000173809; TAA
NDDLVAKNY

SEQ ID NO: 86377 - protein, 9 aa, Homo sapiens
  Table A; Target 86377; HLA-A*68:02; TDRD12; ENSG00000173809; TAA
NDPYIVITA

SEQ ID NO: 86378 - protein, 9 aa, Homo sapiens
  Table A; Target 86378; HLA-A*02:04; TDRD12; ENSG00000173809; TAA
NEIEWNPKV

SEQ ID NO: 86379 - protein, 9 aa, Homo sapiens
  Table A; Target 86379; HLA-A*30:01; TDRD12; ENSG00000173809; TAA
NEIEWNPKV

SEQ ID NO: 86380 - protein, 9 aa, Homo sapiens
  Table A; Target 86380; HLA-B*18:01; TDRD12; ENSG00000173809; TAA
NEIEWNPKV

SEQ ID NO: 86381 - protein, 9 aa, Homo sapiens
  Table A; Target 86381; HLA-B*44:03; TDRD12; ENSG00000173809; TAA
NEIEWNPKV

SEQ ID NO: 86382 - protein, 9 aa, Homo sapiens
  Table A; Target 86382; HLA-B*49:01; TDRD12; ENSG00000173809; TAA
NEIEWNPKV

SEQ ID NO: 86383 - protein, 8 aa, Homo sapiens
  Table A; Target 86383; HLA-B*18:01; TDRD12; ENSG00000173809; TAA
NEQMFAIL

SEQ ID NO: 86384 - protein, 11 aa, Homo sapiens
  Table A; Target 86384; HLA-A*23:01; TDRD12; ENSG00000173809; TAA
NFPAQSLQHTW

SEQ ID NO: 86385 - protein, 11 aa, Homo sapiens
  Table A; Target 86385; HLA-A*24:02; TDRD12; ENSG00000173809; TAA
NFPAQSLQHTW

SEQ ID NO: 86386 - protein, 8 aa, Homo sapiens
  Table A; Target 86386; HLA-B*51:01; TDRD12; ENSG00000173809; TAA
NGPLAVIV

SEQ ID NO: 86387 - protein, 8 aa, Homo sapiens
  Table A; Target 86387; HLA-B*08:01; TDRD12; ENSG00000173809; TAA
NIKSAPSF

SEQ ID NO: 86388 - protein, 10 aa, Homo sapiens
  Table A; Target 86388; HLA-A*03:01; TDRD12; ENSG00000173809; TAA
NIKSAPSFNK

SEQ ID NO: 86389 - protein, 9 aa, Homo sapiens
  Table A; Target 86389; HLA-A*25:01; TDRD12; ENSG00000173809; TAA
NIRVVVESF

SEQ ID NO: 86390 - protein, 9 aa, Homo sapiens
  Table A; Target 86390; HLA-A*32:01; TDRD12; ENSG00000173809; TAA
NIRVVVESF

SEQ ID NO: 86391 - protein, 9 aa, Homo sapiens
  Table A; Target 86391; HLA-B*15:01; TDRD12; ENSG00000173809; TAA
NIRVVVESF

SEQ ID NO: 86392 - protein, 9 aa, Homo sapiens
  Table A; Target 86392; HLA-B*15:03; TDRD12; ENSG00000173809; TAA
NIRVVVESF

SEQ ID NO: 86393 - protein, 9 aa, Homo sapiens
  Table A; Target 86393; HLA-B*18:01; TDRD12; ENSG00000173809; TAA
NIRVVVESF

SEQ ID NO: 86394 - protein, 9 aa, Homo sapiens
  Table A; Target 86394; HLA-B*46:01; TDRD12; ENSG00000173809; TAA
NIRVVVESF

SEQ ID NO: 86395 - protein, 9 aa, Homo sapiens
  Table A; Target 86395; HLA-B*15:03; TDRD12; ENSG00000173809; TAA
NKRVESSVY

SEQ ID NO: 86396 - protein, 10 aa, Homo sapiens
  Table A; Target 86396; HLA-A*02:07; TDRD12; ENSG00000173809; TAA
NLDYLEKPRL

SEQ ID NO: 86397 - protein, 9 aa, Homo sapiens
  Table A; Target 86397; HLA-A*02:01; TDRD12; ENSG00000173809; TAA
NLLKATTQV

SEQ ID NO: 86398 - protein, 9 aa, Homo sapiens
  Table A; Target 86398; HLA-A*02:03; TDRD12; ENSG00000173809; TAA
NLLKATTQV

SEQ ID NO: 86399 - protein, 9 aa, Homo sapiens
  Table A; Target 86399; HLA-A*02:04; TDRD12; ENSG00000173809; TAA
NLLKATTQV

SEQ ID NO: 86400 - protein, 9 aa, Homo sapiens
  Table A; Target 86400; HLA-A*02:07; TDRD12; ENSG00000173809; TAA
NLLKATTQV

SEQ ID NO: 86401 - protein, 9 aa, Homo sapiens
  Table A; Target 86401; HLA-B*13:02; TDRD12; ENSG00000173809; TAA
NLLKATTQV

SEQ ID NO: 86402 - protein, 9 aa, Homo sapiens
  Table A; Target 86402; HLA-B*55:01; TDRD12; ENSG00000173809; TAA
NLLKATTQV

SEQ ID NO: 86403 - protein, 9 aa, Homo sapiens
  Table A; Target 86403; HLA-A*25:01; TDRD12; ENSG00000173809; TAA
NLQNVLEQW

SEQ ID NO: 86404 - protein, 9 aa, Homo sapiens
  Table A; Target 86404; HLA-B*58:01; TDRD12; ENSG00000173809; TAA
NLQNVLEQW

SEQ ID NO: 86405 - protein, 9 aa, Homo sapiens
  Table A; Target 86405; HLA-A*02:01; TDRD12; ENSG00000173809; TAA
NLSSLKTSV

SEQ ID NO: 86406 - protein, 9 aa, Homo sapiens
  Table A; Target 86406; HLA-A*02:03; TDRD12; ENSG00000173809; TAA
NLSSLKTSV

SEQ ID NO: 86407 - protein, 9 aa, Homo sapiens
  Table A; Target 86407; HLA-A*32:01; TDRD12; ENSG00000173809; TAA
NLSSLKTSV

SEQ ID NO: 86408 - protein, 9 aa, Homo sapiens
  Table A; Target 86408; HLA-B*08:01; TDRD12; ENSG00000173809; TAA
NLSSLKTSV

SEQ ID NO: 86409 - protein, 9 aa, Homo sapiens
  Table A; Target 86409; HLA-B*13:02; TDRD12; ENSG00000173809; TAA
NLSSLKTSV

SEQ ID NO: 86410 - protein, 9 aa, Homo sapiens
  Table A; Target 86410; HLA-B*55:01; TDRD12; ENSG00000173809; TAA
NLSSLKTSV

SEQ ID NO: 86411 - protein, 10 aa, Homo sapiens
  Table A; Target 86411; HLA-A*01:01; TDRD12; ENSG00000173809; TAA
NMDSLRDSPK

SEQ ID NO: 86412 - protein, 10 aa, Homo sapiens
  Table A; Target 86412; HLA-A*03:02; TDRD12; ENSG00000173809; TAA
NMDSLRDSPK

SEQ ID NO: 86413 - protein, 8 aa, Homo sapiens
  Table A; Target 86413; HLA-B*35:03; TDRD12; ENSG00000173809; TAA
NPEHIEQL

SEQ ID NO: 86414 - protein, 10 aa, Homo sapiens
  Table A; Target 86414; HLA-B*35:03; TDRD12; ENSG00000173809; TAA
NPETDLPRKL

SEQ ID NO: 86415 - protein, 9 aa, Homo sapiens
  Table A; Target 86415; HLA-B*39:01; TDRD12; ENSG00000173809; TAA
NQKEDAWAL

SEQ ID NO: 86416 - protein, 9 aa, Homo sapiens
  Table A; Target 86416; HLA-A*02:03; TDRD12; ENSG00000173809; TAA
NQKPGGYLV

SEQ ID NO: 86417 - protein, 9 aa, Homo sapiens
  Table A; Target 86417; HLA-A*02:04; TDRD12; ENSG00000173809; TAA
NQKPGGYLV

SEQ ID NO: 86418 - protein, 9 aa, Homo sapiens
  Table A; Target 86418; HLA-B*13:02; TDRD12; ENSG00000173809; TAA
NQKPGGYLV

SEQ ID NO: 86419 - protein, 9 aa, Homo sapiens
  Table A; Target 86419; HLA-B*38:01; TDRD12; ENSG00000173809; TAA
NQKPGGYLV

SEQ ID NO: 86420 - protein, 9 aa, Homo sapiens
  Table A; Target 86420; HLA-B*39:01; TDRD12; ENSG00000173809; TAA
NQKPGGYLV

SEQ ID NO: 86421 - protein, 9 aa, Homo sapiens
  Table A; Target 86421; HLA-C*02:02; TDRD12; ENSG00000173809; TAA
NQKPGGYLV

SEQ ID NO: 86422 - protein, 10 aa, Homo sapiens
  Table A; Target 86422; HLA-A*23:01; TDRD12; ENSG00000173809; TAA
NQKPGGYLVF

SEQ ID NO: 86423 - protein, 10 aa, Homo sapiens
  Table A; Target 86423; HLA-A*24:02; TDRD12; ENSG00000173809; TAA
NQKPGGYLVF

SEQ ID NO: 86424 - protein, 10 aa, Homo sapiens
  Table A; Target 86424; HLA-A*25:01; TDRD12; ENSG00000173809; TAA
NQKPGGYLVF

SEQ ID NO: 86425 - protein, 10 aa, Homo sapiens
  Table A; Target 86425; HLA-A*30:02; TDRD12; ENSG00000173809; TAA
NQKPGGYLVF

SEQ ID NO: 86426 - protein, 10 aa, Homo sapiens
  Table A; Target 86426; HLA-A*32:01; TDRD12; ENSG00000173809; TAA
NQKPGGYLVF

SEQ ID NO: 86427 - protein, 10 aa, Homo sapiens
  Table A; Target 86427; HLA-B*15:01; TDRD12; ENSG00000173809; TAA
NQKPGGYLVF

SEQ ID NO: 86428 - protein, 10 aa, Homo sapiens
  Table A; Target 86428; HLA-B*15:03; TDRD12; ENSG00000173809; TAA
NQKPGGYLVF

SEQ ID NO: 86429 - protein, 10 aa, Homo sapiens
  Table A; Target 86429; HLA-B*46:01; TDRD12; ENSG00000173809; TAA
NQKPGGYLVF

SEQ ID NO: 86430 - protein, 10 aa, Homo sapiens
  Table A; Target 86430; HLA-C*02:02; TDRD12; ENSG00000173809; TAA
NQKPGGYLVF

SEQ ID NO: 86431 - protein, 10 aa, Homo sapiens
  Table A; Target 86431; HLA-C*07:04; TDRD12; ENSG00000173809; TAA
NQKPGGYLVF

SEQ ID NO: 86432 - protein, 11 aa, Homo sapiens
  Table A; Target 86432; HLA-A*31:01; TDRD12; ENSG00000173809; TAA
NQKPGGYLVFK

SEQ ID NO: 86433 - protein, 8 aa, Homo sapiens
  Table A; Target 86433; HLA-A*01:01; TDRD12; ENSG00000173809; TAA
NSAMNDFY

SEQ ID NO: 86434 - protein, 9 aa, Homo sapiens
  Table A; Target 86434; HLA-A*68:02; TDRD12; ENSG00000173809; TAA
NTVWIDPMV

SEQ ID NO: 86435 - protein, 9 aa, Homo sapiens
  Table A; Target 86435; HLA-A*25:01; TDRD12; ENSG00000173809; TAA
NVRAEILSM

SEQ ID NO: 86436 - protein, 9 aa, Homo sapiens
  Table A; Target 86436; HLA-A*26:01; TDRD12; ENSG00000173809; TAA
NVRAEILSM

SEQ ID NO: 86437 - protein, 9 aa, Homo sapiens
  Table A; Target 86437; HLA-B*07:02; TDRD12; ENSG00000173809; TAA
NVRAEILSM

SEQ ID NO: 86438 - protein, 9 aa, Homo sapiens
  Table A; Target 86438; HLA-B*08:01; TDRD12; ENSG00000173809; TAA
NVRAEILSM

SEQ ID NO: 86439 - protein, 9 aa, Homo sapiens
  Table A; Target 86439; HLA-B*35:01; TDRD12; ENSG00000173809; TAA
NVRAEILSM

SEQ ID NO: 86440 - protein, 9 aa, Homo sapiens
  Table A; Target 86440; HLA-B*40:02; TDRD12; ENSG00000173809; TAA
NVRAEILSM

SEQ ID NO: 86441 - protein, 9 aa, Homo sapiens
  Table A; Target 86441; HLA-B*46:01; TDRD12; ENSG00000173809; TAA
NVRAEILSM

SEQ ID NO: 86442 - protein, 9 aa, Homo sapiens
  Table A; Target 86442; HLA-B*51:01; TDRD12; ENSG00000173809; TAA
NVRAEILSM

SEQ ID NO: 86443 - protein, 9 aa, Homo sapiens
  Table A; Target 86443; HLA-C*01:02; TDRD12; ENSG00000173809; TAA
NVRAEILSM

SEQ ID NO: 86444 - protein, 9 aa, Homo sapiens
  Table A; Target 86444; HLA-C*07:02; TDRD12; ENSG00000173809; TAA
NVRAEILSM

SEQ ID NO: 86445 - protein, 9 aa, Homo sapiens
  Table A; Target 86445; HLA-A*31:01; TDRD12; ENSG00000173809; TAA
NYFGRIVDK

SEQ ID NO: 86446 - protein, 9 aa, Homo sapiens
  Table A; Target 86446; HLA-A*33:01; TDRD12; ENSG00000173809; TAA
NYFGRIVDK

SEQ ID NO: 86447 - protein, 9 aa, Homo sapiens
  Table A; Target 86447; HLA-A*33:03; TDRD12; ENSG00000173809; TAA
NYFGRIVDK

SEQ ID NO: 86448 - protein, 9 aa, Homo sapiens
  Table A; Target 86448; HLA-A*32:01; TDRD12; ENSG00000173809; TAA
PAQSLQHTW

SEQ ID NO: 86449 - protein, 9 aa, Homo sapiens
  Table A; Target 86449; HLA-B*57:01; TDRD12; ENSG00000173809; TAA
PAQSLQHTW

SEQ ID NO: 86450 - protein, 9 aa, Homo sapiens
  Table A; Target 86450; HLA-B*58:01; TDRD12; ENSG00000173809; TAA
PAQSLQHTW

SEQ ID NO: 86451 - protein, 9 aa, Homo sapiens
  Table A; Target 86451; HLA-C*12:03; TDRD12; ENSG00000173809; TAA
PAQSLQHTW

SEQ ID NO: 86452 - protein, 9 aa, Homo sapiens
  Table A; Target 86452; HLA-C*16:02; TDRD12; ENSG00000173809; TAA
PAQSLQHTW

SEQ ID NO: 86453 - protein, 9 aa, Homo sapiens
  Table A; Target 86453; HLA-B*44:02; TDRD12; ENSG00000173809; TAA
PETDLPRKL

SEQ ID NO: 86454 - protein, 9 aa, Homo sapiens
  Table A; Target 86454; HLA-B*44:03; TDRD12; ENSG00000173809; TAA
PETDLPRKL

SEQ ID NO: 86455 - protein, 9 aa, Homo sapiens
  Table A; Target 86455; HLA-C*12:03; TDRD12; ENSG00000173809; TAA
PETDLPRKL

SEQ ID NO: 86456 - protein, 9 aa, Homo sapiens
  Table A; Target 86456; HLA-A*29:02; TDRD12; ENSG00000173809; TAA
PFLDHDVDY

SEQ ID NO: 86457 - protein, 10 aa, Homo sapiens
  Table A; Target 86457; HLA-A*29:02; TDRD12; ENSG00000173809; TAA
PFYILNATNY

SEQ ID NO: 86458 - protein, 9 aa, Homo sapiens
  Table A; Target 86458; HLA-C*07:01; TDRD12; ENSG00000173809; TAA
PGPSHTESY

SEQ ID NO: 86459 - protein, 9 aa, Homo sapiens
  Table A; Target 86459; HLA-A*02:04; TDRD12; ENSG00000173809; TAA
PLHPVLLTI

SEQ ID NO: 86460 - protein, 9 aa, Homo sapiens
  Table A; Target 86460; HLA-B*35:03; TDRD12; ENSG00000173809; TAA
PPAEDAACL

SEQ ID NO: 86461 - protein, 9 aa, Homo sapiens
  Table A; Target 86461; HLA-B*07:02; TDRD12; ENSG00000173809; TAA
PPRVTGTSP

SEQ ID NO: 86462 - protein, 9 aa, Homo sapiens
  Table A; Target 86462; HLA-C*07:02; TDRD12; ENSG00000173809; TAA
PPRVTGTSP

SEQ ID NO: 86463 - protein, 9 aa, Homo sapiens
  Table A; Target 86463; HLA-C*07:02; TDRD12; ENSG00000173809; TAA
PRKLSSQAL

SEQ ID NO: 86464 - protein, 11 aa, Homo sapiens
  Table A; Target 86464; HLA-A*03:02; TDRD12; ENSG00000173809; TAA
PTATAQDKAVK

SEQ ID NO: 86465 - protein, 11 aa, Homo sapiens
  Table A; Target 86465; HLA-A*11:01; TDRD12; ENSG00000173809; TAA
PTATAQDKAVK

SEQ ID NO: 86466 - protein, 8 aa, Homo sapiens
  Table A; Target 86466; HLA-C*14:02; TDRD12; ENSG00000173809; TAA
PYIVITAM

SEQ ID NO: 86467 - protein, 8 aa, Homo sapiens
  Table A; Target 86467; HLA-A*24:02; TDRD12; ENSG00000173809; TAA
PYLKAFGF

SEQ ID NO: 86468 - protein, 10 aa, Homo sapiens
  Table A; Target 86468; HLA-B*54:01; TDRD12; ENSG00000173809; TAA
QALDFIPSQA

SEQ ID NO: 86469 - protein, 8 aa, Homo sapiens
  Table A; Target 86469; HLA-A*30:02; TDRD12; ENSG00000173809; TAA
QALPSFGY

SEQ ID NO: 86470 - protein, 8 aa, Homo sapiens
  Table A; Target 86470; HLA-B*35:01; TDRD12; ENSG00000173809; TAA
QALPSFGY

SEQ ID NO: 86471 - protein, 9 aa, Homo sapiens
  Table A; Target 86471; HLA-A*23:01; TDRD12; ENSG00000173809; TAA
QALPSFGYI

SEQ ID NO: 86472 - protein, 9 aa, Homo sapiens
  Table A; Target 86472; HLA-A*24:02; TDRD12; ENSG00000173809; TAA
QALPSFGYI

SEQ ID NO: 86473 - protein, 9 aa, Homo sapiens
  Table A; Target 86473; HLA-B*51:01; TDRD12; ENSG00000173809; TAA
QALPSFGYI

SEQ ID NO: 86474 - protein, 9 aa, Homo sapiens
  Table A; Target 86474; HLA-A*33:01; TDRD12; ENSG00000173809; TAA
QAVEFIVCR

SEQ ID NO: 86475 - protein, 9 aa, Homo sapiens
  Table A; Target 86475; HLA-A*33:03; TDRD12; ENSG00000173809; TAA
QAVEFIVCR

SEQ ID NO: 86476 - protein, 9 aa, Homo sapiens
  Table A; Target 86476; HLA-A*68:01; TDRD12; ENSG00000173809; TAA
QAVEFIVCR

SEQ ID NO: 86477 - protein, 9 aa, Homo sapiens
  Table A; Target 86477; HLA-B*35:01; TDRD12; ENSG00000173809; TAA
QAVEFIVCR

SEQ ID NO: 86478 - protein, 9 aa, Homo sapiens
  Table A; Target 86478; HLA-C*07:06; TDRD12; ENSG00000173809; TAA
QAVEFIVCR

SEQ ID NO: 86479 - protein, 8 aa, Homo sapiens
  Table A; Target 86479; HLA-B*37:01; TDRD12; ENSG00000173809; TAA
QDIEIKPL

SEQ ID NO: 86480 - protein, 10 aa, Homo sapiens
  Table A; Target 86480; HLA-A*30:01; TDRD12; ENSG00000173809; TAA
QDIEIKPLTL

SEQ ID NO: 86481 - protein, 10 aa, Homo sapiens
  Table A; Target 86481; HLA-B*40:01; TDRD12; ENSG00000173809; TAA
QDIEIKPLTL

SEQ ID NO: 86482 - protein, 10 aa, Homo sapiens
  Table A; Target 86482; HLA-B*40:02; TDRD12; ENSG00000173809; TAA
QDIEIKPLTL

SEQ ID NO: 86483 - protein, 10 aa, Homo sapiens
  Table A; Target 86483; HLA-B*44:02; TDRD12; ENSG00000173809; TAA
QDIEIKPLTL

SEQ ID NO: 86484 - protein, 10 aa, Homo sapiens
  Table A; Target 86484; HLA-B*44:03; TDRD12; ENSG00000173809; TAA
QDIEIKPLTL

SEQ ID NO: 86485 - protein, 9 aa, Homo sapiens
  Table A; Target 86485; HLA-B*37:01; TDRD12; ENSG00000173809; TAA
QDKAVKCNM

SEQ ID NO: 86486 - protein, 10 aa, Homo sapiens
  Table A; Target 86486; HLA-A*29:02; TDRD12; ENSG00000173809; TAA
QFIFELLGEY

SEQ ID NO: 86487 - protein, 10 aa, Homo sapiens
  Table A; Target 86487; HLA-A*30:02; TDRD12; ENSG00000173809; TAA
QFIFELLGEY

SEQ ID NO: 86488 - protein, 9 aa, Homo sapiens
  Table A; Target 86488; HLA-A*25:01; TDRD12; ENSG00000173809; TAA
QIVAVGVHW

SEQ ID NO: 86489 - protein, 9 aa, Homo sapiens
  Table A; Target 86489; HLA-B*44:02; TDRD12; ENSG00000173809; TAA
QIVAVGVHW

SEQ ID NO: 86490 - protein, 9 aa, Homo sapiens
  Table A; Target 86490; HLA-B*44:03; TDRD12; ENSG00000173809; TAA
QIVAVGVHW

SEQ ID NO: 86491 - protein, 9 aa, Homo sapiens
  Table A; Target 86491; HLA-B*57:01; TDRD12; ENSG00000173809; TAA
QIVAVGVHW

SEQ ID NO: 86492 - protein, 9 aa, Homo sapiens
  Table A; Target 86492; HLA-B*58:01; TDRD12; ENSG00000173809; TAA
QIVAVGVHW

SEQ ID NO: 86493 - protein, 10 aa, Homo sapiens
  Table A; Target 86493; HLA-B*15:03; TDRD12; ENSG00000173809; TAA
QKLNSAMNDF

SEQ ID NO: 86494 - protein, 9 aa, Homo sapiens
  Table A; Target 86494; HLA-B*15:03; TDRD12; ENSG00000173809; TAA
QKPGGYLVF

SEQ ID NO: 86495 - protein, 9 aa, Homo sapiens
  Table A; Target 86495; HLA-A*02:07; TDRD12; ENSG00000173809; TAA
QMFAILDNF

SEQ ID NO: 86496 - protein, 9 aa, Homo sapiens
  Table A; Target 86496; HLA-A*23:01; TDRD12; ENSG00000173809; TAA
QMFAILDNF

SEQ ID NO: 86497 - protein, 9 aa, Homo sapiens
  Table A; Target 86497; HLA-A*29:02; TDRD12; ENSG00000173809; TAA
QMFAILDNF

SEQ ID NO: 86498 - protein, 9 aa, Homo sapiens
  Table A; Target 86498; HLA-B*57:01; TDRD12; ENSG00000173809; TAA
QMFAILDNF

SEQ ID NO: 86499 - protein, 9 aa, Homo sapiens
  Table A; Target 86499; HLA-B*08:01; TDRD12; ENSG00000173809; TAA
QVEARLCAV

SEQ ID NO: 86500 - protein, 8 aa, Homo sapiens
  Table A; Target 86500; HLA-A*03:02; TDRD12; ENSG00000173809; TAA
QVLEVNQK

SEQ ID NO: 86501 - protein, 8 aa, Homo sapiens
  Table A; Target 86501; HLA-A*11:01; TDRD12; ENSG00000173809; TAA
QVLEVNQK

SEQ ID NO: 86502 - protein, 9 aa, Homo sapiens
  Table A; Target 86502; HLA-B*54:01; TDRD12; ENSG00000173809; TAA
QYFQNLLKA

SEQ ID NO: 86503 - protein, 10 aa, Homo sapiens
  Table A; Target 86503; HLA-C*05:01; TDRD12; ENSG00000173809; TAA
RADAKVPAEL

SEQ ID NO: 86504 - protein, 11 aa, Homo sapiens
  Table A; Target 86504; HLA-A*01:01; TDRD12; ENSG00000173809; TAA
RADAKVPAELY

SEQ ID NO: 86505 - protein, 8 aa, Homo sapiens
  Table A; Target 86505; HLA-C*05:01; TDRD12; ENSG00000173809; TAA
RADGISDL

SEQ ID NO: 86506 - protein, 11 aa, Homo sapiens
  Table A; Target 86506; HLA-B*38:01; TDRD12; ENSG00000173809; TAA
RADGISDLQQL

SEQ ID NO: 86507 - protein, 11 aa, Homo sapiens
  Table A; Target 86507; HLA-C*05:01; TDRD12; ENSG00000173809; TAA
RADGISDLQQL

SEQ ID NO: 86508 - protein, 10 aa, Homo sapiens
  Table A; Target 86508; HLA-A*03:02; TDRD12; ENSG00000173809; TAA
RDSTDIVPAK

SEQ ID NO: 86509 - protein, 8 aa, Homo sapiens
  Table A; Target 86509; HLA-B*37:01; TDRD12; ENSG00000173809; TAA
RESAPHQI

SEQ ID NO: 86510 - protein, 9 aa, Homo sapiens
  Table A; Target 86510; HLA-B*37:01; TDRD12; ENSG00000173809; TAA
RESAPHQIV

SEQ ID NO: 86511 - protein, 9 aa, Homo sapiens
  Table A; Target 86511; HLA-B*40:01; TDRD12; ENSG00000173809; TAA
RESAPHQIV

SEQ ID NO: 86512 - protein, 9 aa, Homo sapiens
  Table A; Target 86512; HLA-B*44:02; TDRD12; ENSG00000173809; TAA
RESAPHQIV

SEQ ID NO: 86513 - protein, 9 aa, Homo sapiens
  Table A; Target 86513; HLA-B*49:01; TDRD12; ENSG00000173809; TAA
RESAPHQIV

SEQ ID NO: 86514 - protein, 10 aa, Homo sapiens
  Table A; Target 86514; HLA-A*30:01; TDRD12; ENSG00000173809; TAA
RESAPHQIVA

SEQ ID NO: 86515 - protein, 10 aa, Homo sapiens
  Table A; Target 86515; HLA-B*40:01; TDRD12; ENSG00000173809; TAA
RESAPHQIVA

SEQ ID NO: 86516 - protein, 10 aa, Homo sapiens
  Table A; Target 86516; HLA-B*49:01; TDRD12; ENSG00000173809; TAA
RESAPHQIVA

SEQ ID NO: 86517 - protein, 11 aa, Homo sapiens
  Table A; Target 86517; HLA-A*30:01; TDRD12; ENSG00000173809; TAA
RESAPHQIVAV

SEQ ID NO: 86518 - protein, 11 aa, Homo sapiens
  Table A; Target 86518; HLA-B*40:01; TDRD12; ENSG00000173809; TAA
RESAPHQIVAV

SEQ ID NO: 86519 - protein, 11 aa, Homo sapiens
  Table A; Target 86519; HLA-A*30:02; TDRD12; ENSG00000173809; TAA
RGCDVIVTTPY

SEQ ID NO: 86520 - protein, 10 aa, Homo sapiens
  Table A; Target 86520; HLA-A*31:01; TDRD12; ENSG00000173809; TAA
RINPETDLPR

SEQ ID NO: 86521 - protein, 10 aa, Homo sapiens
  Table A; Target 86521; HLA-C*07:06; TDRD12; ENSG00000173809; TAA
RINPETDLPR

SEQ ID NO: 86522 - protein, 11 aa, Homo sapiens
  Table A; Target 86522; HLA-A*03:01; TDRD12; ENSG00000173809; TAA
RINPETDLPRK

SEQ ID NO: 86523 - protein, 11 aa, Homo sapiens
  Table A; Target 86523; HLA-A*03:02; TDRD12; ENSG00000173809; TAA
RINPETDLPRK

SEQ ID NO: 86524 - protein, 11 aa, Homo sapiens
  Table A; Target 86524; HLA-A*11:01; TDRD12; ENSG00000173809; TAA
RINPETDLPRK

SEQ ID NO: 86525 - protein, 10 aa, Homo sapiens
  Table A; Target 86525; HLA-A*29:02; TDRD12; ENSG00000173809; TAA
RIVDKHMDLY

SEQ ID NO: 86526 - protein, 10 aa, Homo sapiens
  Table A; Target 86526; HLA-B*51:01; TDRD12; ENSG00000173809; TAA
RPLHPVLLTI

SEQ ID NO: 86527 - protein, 10 aa, Homo sapiens
  Table A; Target 86527; HLA-B*54:01; TDRD12; ENSG00000173809; TAA
RPLHPVLLTI

SEQ ID NO: 86528 - protein, 10 aa, Homo sapiens
  Table A; Target 86528; HLA-B*55:01; TDRD12; ENSG00000173809; TAA
RPTATAQDKA

SEQ ID NO: 86529 - protein, 10 aa, Homo sapiens
  Table A; Target 86529; HLA-B*56:01; TDRD12; ENSG00000173809; TAA
RPTATAQDKA

SEQ ID NO: 86530 - protein, 11 aa, Homo sapiens
  Table A; Target 86530; HLA-B*56:01; TDRD12; ENSG00000173809; TAA
RPTATAQDKAV

SEQ ID NO: 86531 - protein, 9 aa, Homo sapiens
  Table A; Target 86531; HLA-A*32:01; TDRD12; ENSG00000173809; TAA
RVKPADNEI

SEQ ID NO: 86532 - protein, 9 aa, Homo sapiens
  Table A; Target 86532; HLA-B*58:01; TDRD12; ENSG00000173809; TAA
RVKPADNEI

SEQ ID NO: 86533 - protein, 11 aa, Homo sapiens
  Table A; Target 86533; HLA-A*25:01; TDRD12; ENSG00000173809; TAA
RVKPADNEIEW

SEQ ID NO: 86534 - protein, 11 aa, Homo sapiens
  Table A; Target 86534; HLA-A*31:01; TDRD12; ENSG00000173809; TAA
RVKPADNEIEW

SEQ ID NO: 86535 - protein, 11 aa, Homo sapiens
  Table A; Target 86535; HLA-B*57:01; TDRD12; ENSG00000173809; TAA
RVKPADNEIEW

SEQ ID NO: 86536 - protein, 11 aa, Homo sapiens
  Table A; Target 86536; HLA-B*58:01; TDRD12; ENSG00000173809; TAA
RVKPADNEIEW

SEQ ID NO: 86537 - protein, 10 aa, Homo sapiens
  Table A; Target 86537; HLA-A*03:01; TDRD12; ENSG00000173809; TAA
RVQVLEVNQK

SEQ ID NO: 86538 - protein, 10 aa, Homo sapiens
  Table A; Target 86538; HLA-A*03:02; TDRD12; ENSG00000173809; TAA
RVQVLEVNQK

SEQ ID NO: 86539 - protein, 10 aa, Homo sapiens
  Table A; Target 86539; HLA-A*11:01; TDRD12; ENSG00000173809; TAA
RVQVLEVNQK

SEQ ID NO: 86540 - protein, 10 aa, Homo sapiens
  Table A; Target 86540; HLA-B*27:02; TDRD12; ENSG00000173809; TAA
RVQVLEVNQK

SEQ ID NO: 86541 - protein, 8 aa, Homo sapiens
  Table A; Target 86541; HLA-B*07:02; TDRD12; ENSG00000173809; TAA
SADLKKAL

SEQ ID NO: 86542 - protein, 8 aa, Homo sapiens
  Table A; Target 86542; HLA-B*08:01; TDRD12; ENSG00000173809; TAA
SADLKKAL

SEQ ID NO: 86543 - protein, 8 aa, Homo sapiens
  Table A; Target 86543; HLA-C*03:04; TDRD12; ENSG00000173809; TAA
SADLKKAL

SEQ ID NO: 86544 - protein, 8 aa, Homo sapiens
  Table A; Target 86544; HLA-C*07:02; TDRD12; ENSG00000173809; TAA
SADLKKAL

SEQ ID NO: 86545 - protein, 8 aa, Homo sapiens
  Table A; Target 86545; HLA-C*16:01; TDRD12; ENSG00000173809; TAA
SADLKKAL

SEQ ID NO: 86546 - protein, 9 aa, Homo sapiens
  Table A; Target 86546; HLA-C*05:01; TDRD12; ENSG00000173809; TAA
SADQYLAEC

SEQ ID NO: 86547 - protein, 10 aa, Homo sapiens
  Table A; Target 86547; HLA-C*05:01; TDRD12; ENSG00000173809; TAA
SADQYLAECF

SEQ ID NO: 86548 - protein, 10 aa, Homo sapiens
  Table A; Target 86548; HLA-B*56:01; TDRD12; ENSG00000173809; TAA
SAMNDFYNST

SEQ ID NO: 86549 - protein, 9 aa, Homo sapiens
  Table A; Target 86549; HLA-A*02:03; TDRD12; ENSG00000173809; TAA
SAPHQIVAV

SEQ ID NO: 86550 - protein, 9 aa, Homo sapiens
  Table A; Target 86550; HLA-A*02:07; TDRD12; ENSG00000173809; TAA
SAPHQIVAV

SEQ ID NO: 86551 - protein, 9 aa, Homo sapiens
  Table A; Target 86551; HLA-A*68:02; TDRD12; ENSG00000173809; TAA
SAPHQIVAV

SEQ ID NO: 86552 - protein, 9 aa, Homo sapiens
  Table A; Target 86552; HLA-B*46:01; TDRD12; ENSG00000173809; TAA
SAPHQIVAV

SEQ ID NO: 86553 - protein, 9 aa, Homo sapiens
  Table A; Target 86553; HLA-B*51:01; TDRD12; ENSG00000173809; TAA
SAPHQIVAV

SEQ ID NO: 86554 - protein, 9 aa, Homo sapiens
  Table A; Target 86554; HLA-B*54:01; TDRD12; ENSG00000173809; TAA
SAPHQIVAV

SEQ ID NO: 86555 - protein, 9 aa, Homo sapiens
  Table A; Target 86555; HLA-C*01:02; TDRD12; ENSG00000173809; TAA
SAPHQIVAV

SEQ ID NO: 86556 - protein, 9 aa, Homo sapiens
  Table A; Target 86556; HLA-C*02:02; TDRD12; ENSG00000173809; TAA
SAPHQIVAV

SEQ ID NO: 86557 - protein, 9 aa, Homo sapiens
  Table A; Target 86557; HLA-C*12:03; TDRD12; ENSG00000173809; TAA
SAPHQIVAV

SEQ ID NO: 86558 - protein, 9 aa, Homo sapiens
  Table A; Target 86558; HLA-C*16:02; TDRD12; ENSG00000173809; TAA
SAPHQIVAV

SEQ ID NO: 86559 - protein, 8 aa, Homo sapiens
  Table A; Target 86559; HLA-B*08:01; TDRD12; ENSG00000173809; TAA
SAPSFNKL

SEQ ID NO: 86560 - protein, 8 aa, Homo sapiens
  Table A; Target 86560; HLA-B*51:01; TDRD12; ENSG00000173809; TAA
SAPSFNKL

SEQ ID NO: 86561 - protein, 8 aa, Homo sapiens
  Table A; Target 86561; HLA-C*01:02; TDRD12; ENSG00000173809; TAA
SAPSFNKL

SEQ ID NO: 86562 - protein, 8 aa, Homo sapiens
  Table A; Target 86562; HLA-C*05:01; TDRD12; ENSG00000173809; TAA
SAPSFNKL

SEQ ID NO: 86563 - protein, 9 aa, Homo sapiens
  Table A; Target 86563; HLA-A*30:01; TDRD12; ENSG00000173809; TAA
SDLQQLQKL

SEQ ID NO: 86564 - protein, 9 aa, Homo sapiens
  Table A; Target 86564; HLA-B*37:01; TDRD12; ENSG00000173809; TAA
SDLQQLQKL

SEQ ID NO: 86565 - protein, 9 aa, Homo sapiens
  Table A; Target 86565; HLA-B*40:02; TDRD12; ENSG00000173809; TAA
SDLQQLQKL

SEQ ID NO: 86566 - protein, 9 aa, Homo sapiens
  Table A; Target 86566; HLA-B*44:02; TDRD12; ENSG00000173809; TAA
SDLQQLQKL

SEQ ID NO: 86567 - protein, 9 aa, Homo sapiens
  Table A; Target 86567; HLA-B*44:03; TDRD12; ENSG00000173809; TAA
SDLQQLQKL

SEQ ID NO: 86568 - protein, 9 aa, Homo sapiens
  Table A; Target 86568; HLA-A*30:02; TDRD12; ENSG00000173809; TAA
SENQKPGGY

SEQ ID NO: 86569 - protein, 9 aa, Homo sapiens
  Table A; Target 86569; HLA-B*18:01; TDRD12; ENSG00000173809; TAA
SENQKPGGY

SEQ ID NO: 86570 - protein, 9 aa, Homo sapiens
  Table A; Target 86570; HLA-B*27:02; TDRD12; ENSG00000173809; TAA
SENQKPGGY

SEQ ID NO: 86571 - protein, 9 aa, Homo sapiens
  Table A; Target 86571; HLA-B*37:01; TDRD12; ENSG00000173809; TAA
SENQKPGGY

SEQ ID NO: 86572 - protein, 9 aa, Homo sapiens
  Table A; Target 86572; HLA-B*44:02; TDRD12; ENSG00000173809; TAA
SENQKPGGY

SEQ ID NO: 86573 - protein, 9 aa, Homo sapiens
  Table A; Target 86573; HLA-B*44:03; TDRD12; ENSG00000173809; TAA
SENQKPGGY

SEQ ID NO: 86574 - protein, 9 aa, Homo sapiens
  Table A; Target 86574; HLA-C*02:02; TDRD12; ENSG00000173809; TAA
SENQKPGGY

SEQ ID NO: 86575 - protein, 9 aa, Homo sapiens
  Table A; Target 86575; HLA-C*16:04; TDRD12; ENSG00000173809; TAA
SENQKPGGY

SEQ ID NO: 86576 - protein, 10 aa, Homo sapiens
  Table A; Target 86576; HLA-B*40:01; TDRD12; ENSG00000173809; TAA
SENQKPGGYL

SEQ ID NO: 86577 - protein, 10 aa, Homo sapiens
  Table A; Target 86577; HLA-B*40:02; TDRD12; ENSG00000173809; TAA
SENQKPGGYL

SEQ ID NO: 86578 - protein, 10 aa, Homo sapiens
  Table A; Target 86578; HLA-B*44:02; TDRD12; ENSG00000173809; TAA
SENQKPGGYL

SEQ ID NO: 86579 - protein, 10 aa, Homo sapiens
  Table A; Target 86579; HLA-B*44:03; TDRD12; ENSG00000173809; TAA
SENQKPGGYL

SEQ ID NO: 86580 - protein, 11 aa, Homo sapiens
  Table A; Target 86580; HLA-B*49:01; TDRD12; ENSG00000173809; TAA
SENQKPGGYLV

SEQ ID NO: 86581 - protein, 9 aa, Homo sapiens
  Table A; Target 86581; HLA-A*23:01; TDRD12; ENSG00000173809; TAA
SFNKLNPAL

SEQ ID NO: 86582 - protein, 9 aa, Homo sapiens
  Table A; Target 86582; HLA-C*14:02; TDRD12; ENSG00000173809; TAA
SFNKLNPAL

SEQ ID NO: 86583 - protein, 9 aa, Homo sapiens
  Table A; Target 86583; HLA-A*23:01; TDRD12; ENSG00000173809; TAA
SFPASPKVF

SEQ ID NO: 86584 - protein, 9 aa, Homo sapiens
  Table A; Target 86584; HLA-A*24:02; TDRD12; ENSG00000173809; TAA
SFPASPKVF

SEQ ID NO: 86585 - protein, 9 aa, Homo sapiens
  Table A; Target 86585; HLA-C*14:02; TDRD12; ENSG00000173809; TAA
SFPASPKVF

SEQ ID NO: 86586 - protein, 9 aa, Homo sapiens
  Table A; Target 86586; HLA-A*02:04; TDRD12; ENSG00000173809; TAA
SGSQIILAL

SEQ ID NO: 86587 - protein, 9 aa, Homo sapiens
  Table A; Target 86587; HLA-A*30:01; TDRD12; ENSG00000173809; TAA
SGSQIILAL

SEQ ID NO: 86588 - protein, 9 aa, Homo sapiens
  Table A; Target 86588; HLA-A*68:02; TDRD12; ENSG00000173809; TAA
SGSQIILAL

SEQ ID NO: 86589 - protein, 9 aa, Homo sapiens
  Table A; Target 86589; HLA-B*13:02; TDRD12; ENSG00000173809; TAA
SGSQIILAL

SEQ ID NO: 86590 - protein, 9 aa, Homo sapiens
  Table A; Target 86590; HLA-B*27:05; TDRD12; ENSG00000173809; TAA
SGSQIILAL

SEQ ID NO: 86591 - protein, 9 aa, Homo sapiens
  Table A; Target 86591; HLA-B*35:03; TDRD12; ENSG00000173809; TAA
SGSQIILAL

SEQ ID NO: 86592 - protein, 9 aa, Homo sapiens
  Table A; Target 86592; HLA-C*02:02; TDRD12; ENSG00000173809; TAA
SGSQIILAL

SEQ ID NO: 86593 - protein, 9 aa, Homo sapiens
  Table A; Target 86593; HLA-A*01:01; TDRD12; ENSG00000173809; TAA
SHAVGVLRY

SEQ ID NO: 86594 - protein, 9 aa, Homo sapiens
  Table A; Target 86594; HLA-A*29:02; TDRD12; ENSG00000173809; TAA
SHAVGVLRY

SEQ ID NO: 86595 - protein, 9 aa, Homo sapiens
  Table A; Target 86595; HLA-B*15:03; TDRD12; ENSG00000173809; TAA
SHAVGVLRY

SEQ ID NO: 86596 - protein, 9 aa, Homo sapiens
  Table A; Target 86596; HLA-B*38:01; TDRD12; ENSG00000173809; TAA
SHAVGVLRY

SEQ ID NO: 86597 - protein, 9 aa, Homo sapiens
  Table A; Target 86597; HLA-B*39:01; TDRD12; ENSG00000173809; TAA
SHAVGVLRY

SEQ ID NO: 86598 - protein, 9 aa, Homo sapiens
  Table A; Target 86598; HLA-B*44:03; TDRD12; ENSG00000173809; TAA
SHAVGVLRY

SEQ ID NO: 86599 - protein, 9 aa, Homo sapiens
  Table A; Target 86599; HLA-C*16:01; TDRD12; ENSG00000173809; TAA
SHAVGVLRY

SEQ ID NO: 86600 - protein, 9 aa, Homo sapiens
  Table A; Target 86600; HLA-B*27:05; TDRD12; ENSG00000173809; TAA
SHCESNPLL

SEQ ID NO: 86601 - protein, 9 aa, Homo sapiens
  Table A; Target 86601; HLA-B*38:01; TDRD12; ENSG00000173809; TAA
SHCESNPLL

SEQ ID NO: 86602 - protein, 9 aa, Homo sapiens
  Table A; Target 86602; HLA-B*39:01; TDRD12; ENSG00000173809; TAA
SHCESNPLL

SEQ ID NO: 86603 - protein, 9 aa, Homo sapiens
  Table A; Target 86603; HLA-A*29:02; TDRD12; ENSG00000173809; TAA
SITSSADQY

SEQ ID NO: 86604 - protein, 9 aa, Homo sapiens
  Table A; Target 86604; HLA-A*30:02; TDRD12; ENSG00000173809; TAA
SITSSADQY

SEQ ID NO: 86605 - protein, 9 aa, Homo sapiens
  Table A; Target 86605; HLA-B*15:01; TDRD12; ENSG00000173809; TAA
SITSSADQY

SEQ ID NO: 86606 - protein, 9 aa, Homo sapiens
  Table A; Target 86606; HLA-B*39:01; TDRD12; ENSG00000173809; TAA
SITSSADQY

SEQ ID NO: 86607 - protein, 9 aa, Homo sapiens
  Table A; Target 86607; HLA-C*07:04; TDRD12; ENSG00000173809; TAA
SITSSADQY

SEQ ID NO: 86608 - protein, 10 aa, Homo sapiens
  Table A; Target 86608; HLA-B*27:05; TDRD12; ENSG00000173809; TAA
SITSSADQYL

SEQ ID NO: 86609 - protein, 9 aa, Homo sapiens
  Table A; Target 86609; HLA-A*03:01; TDRD12; ENSG00000173809; TAA
SLKTSVIDY

SEQ ID NO: 86610 - protein, 9 aa, Homo sapiens
  Table A; Target 86610; HLA-A*26:01; TDRD12; ENSG00000173809; TAA
SLKTSVIDY

SEQ ID NO: 86611 - protein, 9 aa, Homo sapiens
  Table A; Target 86611; HLA-A*29:02; TDRD12; ENSG00000173809; TAA
SLKTSVIDY

SEQ ID NO: 86612 - protein, 9 aa, Homo sapiens
  Table A; Target 86612; HLA-A*30:02; TDRD12; ENSG00000173809; TAA
SLKTSVIDY

SEQ ID NO: 86613 - protein, 9 aa, Homo sapiens
  Table A; Target 86613; HLA-A*32:01; TDRD12; ENSG00000173809; TAA
SLKTSVIDY

SEQ ID NO: 86614 - protein, 9 aa, Homo sapiens
  Table A; Target 86614; HLA-B*15:01; TDRD12; ENSG00000173809; TAA
SLKTSVIDY

SEQ ID NO: 86615 - protein, 9 aa, Homo sapiens
  Table A; Target 86615; HLA-B*15:03; TDRD12; ENSG00000173809; TAA
SLKTSVIDY

SEQ ID NO: 86616 - protein, 9 aa, Homo sapiens
  Table A; Target 86616; HLA-B*46:01; TDRD12; ENSG00000173809; TAA
SLKTSVIDY

SEQ ID NO: 86617 - protein, 9 aa, Homo sapiens
  Table A; Target 86617; HLA-C*01:02; TDRD12; ENSG00000173809; TAA
SLKTSVIDY

SEQ ID NO: 86618 - protein, 9 aa, Homo sapiens
  Table A; Target 86618; HLA-C*02:02; TDRD12; ENSG00000173809; TAA
SLKTSVIDY

SEQ ID NO: 86619 - protein, 9 aa, Homo sapiens
  Table A; Target 86619; HLA-C*07:04; TDRD12; ENSG00000173809; TAA
SLKTSVIDY

SEQ ID NO: 86620 - protein, 9 aa, Homo sapiens
  Table A; Target 86620; HLA-C*12:03; TDRD12; ENSG00000173809; TAA
SLKTSVIDY

SEQ ID NO: 86621 - protein, 9 aa, Homo sapiens
  Table A; Target 86621; HLA-C*14:02; TDRD12; ENSG00000173809; TAA
SLKTSVIDY

SEQ ID NO: 86622 - protein, 9 aa, Homo sapiens
  Table A; Target 86622; HLA-C*16:01; TDRD12; ENSG00000173809; TAA
SLKTSVIDY

SEQ ID NO: 86623 - protein, 9 aa, Homo sapiens
  Table A; Target 86623; HLA-A*02:01; TDRD12; ENSG00000173809; TAA
SLLQALDFI

SEQ ID NO: 86624 - protein, 9 aa, Homo sapiens
  Table A; Target 86624; HLA-A*02:04; TDRD12; ENSG00000173809; TAA
SLLQALDFI

SEQ ID NO: 86625 - protein, 9 aa, Homo sapiens
  Table A; Target 86625; HLA-C*01:02; TDRD12; ENSG00000173809; TAA
SLPSRNGPL

SEQ ID NO: 86626 - protein, 9 aa, Homo sapiens
  Table A; Target 86626; HLA-C*07:02; TDRD12; ENSG00000173809; TAA
SLPSRNGPL

SEQ ID NO: 86627 - protein, 11 aa, Homo sapiens
  Table A; Target 86627; HLA-A*02:03; TDRD12; ENSG00000173809; TAA
SLPSRNGPLAV

SEQ ID NO: 86628 - protein, 11 aa, Homo sapiens
  Table A; Target 86628; HLA-A*02:07; TDRD12; ENSG00000173809; TAA
SLPSRNGPLAV

SEQ ID NO: 86629 - protein, 9 aa, Homo sapiens
  Table A; Target 86629; HLA-A*02:01; TDRD12; ENSG00000173809; TAA
SLSQTPPRV

SEQ ID NO: 86630 - protein, 9 aa, Homo sapiens
  Table A; Target 86630; HLA-A*02:03; TDRD12; ENSG00000173809; TAA
SLSQTPPRV

SEQ ID NO: 86631 - protein, 9 aa, Homo sapiens
  Table A; Target 86631; HLA-A*02:04; TDRD12; ENSG00000173809; TAA
SLSQTPPRV

SEQ ID NO: 86632 - protein, 9 aa, Homo sapiens
  Table A; Target 86632; HLA-A*02:07; TDRD12; ENSG00000173809; TAA
SLSQTPPRV

SEQ ID NO: 86633 - protein, 9 aa, Homo sapiens
  Table A; Target 86633; HLA-B*13:02; TDRD12; ENSG00000173809; TAA
SLSQTPPRV

SEQ ID NO: 86634 - protein, 9 aa, Homo sapiens
  Table A; Target 86634; HLA-B*55:01; TDRD12; ENSG00000173809; TAA
SLSQTPPRV

SEQ ID NO: 86635 - protein, 10 aa, Homo sapiens
  Table A; Target 86635; HLA-A*02:01; TDRD12; ENSG00000173809; TAA
SLYCTKPVTL

SEQ ID NO: 86636 - protein, 10 aa, Homo sapiens
  Table A; Target 86636; HLA-A*02:03; TDRD12; ENSG00000173809; TAA
SLYCTKPVTL

SEQ ID NO: 86637 - protein, 10 aa, Homo sapiens
  Table A; Target 86637; HLA-A*02:04; TDRD12; ENSG00000173809; TAA
SLYCTKPVTL

SEQ ID NO: 86638 - protein, 10 aa, Homo sapiens
  Table A; Target 86638; HLA-A*03:01; TDRD12; ENSG00000173809; TAA
SLYCTKPVTL

SEQ ID NO: 86639 - protein, 8 aa, Homo sapiens
  Table A; Target 86639; HLA-B*56:01; TDRD12; ENSG00000173809; TAA
SPFLDHDV

SEQ ID NO: 86640 - protein, 10 aa, Homo sapiens
  Table A; Target 86640; HLA-B*35:01; TDRD12; ENSG00000173809; TAA
SPFLDHDVDY

SEQ ID NO: 86641 - protein, 10 aa, Homo sapiens
  Table A; Target 86641; HLA-B*35:03; TDRD12; ENSG00000173809; TAA
SPFLDHDVDY

SEQ ID NO: 86642 - protein, 10 aa, Homo sapiens
  Table A; Target 86642; HLA-B*55:01; TDRD12; ENSG00000173809; TAA
SPFLDHDVDY

SEQ ID NO: 86643 - protein, 10 aa, Homo sapiens
  Table A; Target 86643; HLA-C*03:03; TDRD12; ENSG00000173809; TAA
SPFLDHDVDY

SEQ ID NO: 86644 - protein, 9 aa, Homo sapiens
  Table A; Target 86644; HLA-B*07:02; TDRD12; ENSG00000173809; TAA
SPKVFGGRL

SEQ ID NO: 86645 - protein, 9 aa, Homo sapiens
  Table A; Target 86645; HLA-C*07:02; TDRD12; ENSG00000173809; TAA
SPKVFGGRL

SEQ ID NO: 86646 - protein, 10 aa, Homo sapiens
  Table A; Target 86646; HLA-B*56:01; TDRD12; ENSG00000173809; TAA
SPLSADLKKA

SEQ ID NO: 86647 - protein, 11 aa, Homo sapiens
  Table A; Target 86647; HLA-B*07:02; TDRD12; ENSG00000173809; TAA
SPLSADLKKAL

SEQ ID NO: 86648 - protein, 11 aa, Homo sapiens
  Table A; Target 86648; HLA-C*07:02; TDRD12; ENSG00000173809; TAA
SPLSADLKKAL

SEQ ID NO: 86649 - protein, 8 aa, Homo sapiens
  Table A; Target 86649; HLA-B*07:02; TDRD12; ENSG00000173809; TAA
SPTKNKNL

SEQ ID NO: 86650 - protein, 8 aa, Homo sapiens
  Table A; Target 86650; HLA-C*07:02; TDRD12; ENSG00000173809; TAA
SPTKNKNL

SEQ ID NO: 86651 - protein, 9 aa, Homo sapiens
  Table A; Target 86651; HLA-A*26:01; TDRD12; ENSG00000173809; TAA
SQALPSFGY

SEQ ID NO: 86652 - protein, 9 aa, Homo sapiens
  Table A; Target 86652; HLA-A*29:02; TDRD12; ENSG00000173809; TAA
SQALPSFGY

SEQ ID NO: 86653 - protein, 9 aa, Homo sapiens
  Table A; Target 86653; HLA-A*30:02; TDRD12; ENSG00000173809; TAA
SQALPSFGY

SEQ ID NO: 86654 - protein, 9 aa, Homo sapiens
  Table A; Target 86654; HLA-A*32:01; TDRD12; ENSG00000173809; TAA
SQALPSFGY

SEQ ID NO: 86655 - protein, 9 aa, Homo sapiens
  Table A; Target 86655; HLA-B*13:02; TDRD12; ENSG00000173809; TAA
SQALPSFGY

SEQ ID NO: 86656 - protein, 9 aa, Homo sapiens
  Table A; Target 86656; HLA-B*15:01; TDRD12; ENSG00000173809; TAA
SQALPSFGY

SEQ ID NO: 86657 - protein, 9 aa, Homo sapiens
  Table A; Target 86657; HLA-B*15:03; TDRD12; ENSG00000173809; TAA
SQALPSFGY

SEQ ID NO: 86658 - protein, 9 aa, Homo sapiens
  Table A; Target 86658; HLA-B*27:05; TDRD12; ENSG00000173809; TAA
SQALPSFGY

SEQ ID NO: 86659 - protein, 9 aa, Homo sapiens
  Table A; Target 86659; HLA-B*37:01; TDRD12; ENSG00000173809; TAA
SQALPSFGY

SEQ ID NO: 86660 - protein, 9 aa, Homo sapiens
  Table A; Target 86660; HLA-B*39:01; TDRD12; ENSG00000173809; TAA
SQALPSFGY

SEQ ID NO: 86661 - protein, 9 aa, Homo sapiens
  Table A; Target 86661; HLA-B*44:02; TDRD12; ENSG00000173809; TAA
SQALPSFGY

SEQ ID NO: 86662 - protein, 9 aa, Homo sapiens
  Table A; Target 86662; HLA-B*44:03; TDRD12; ENSG00000173809; TAA
SQALPSFGY

SEQ ID NO: 86663 - protein, 9 aa, Homo sapiens
  Table A; Target 86663; HLA-B*46:01; TDRD12; ENSG00000173809; TAA
SQALPSFGY

SEQ ID NO: 86664 - protein, 9 aa, Homo sapiens
  Table A; Target 86664; HLA-C*02:02; TDRD12; ENSG00000173809; TAA
SQALPSFGY

SEQ ID NO: 86665 - protein, 9 aa, Homo sapiens
  Table A; Target 86665; HLA-C*07:04; TDRD12; ENSG00000173809; TAA
SQALPSFGY

SEQ ID NO: 86666 - protein, 9 aa, Homo sapiens
  Table A; Target 86666; HLA-C*14:02; TDRD12; ENSG00000173809; TAA
SQALPSFGY

SEQ ID NO: 86667 - protein, 9 aa, Homo sapiens
  Table A; Target 86667; HLA-C*16:01; TDRD12; ENSG00000173809; TAA
SQALPSFGY

SEQ ID NO: 86668 - protein, 9 aa, Homo sapiens
  Table A; Target 86668; HLA-C*16:04; TDRD12; ENSG00000173809; TAA
SQALPSFGY

SEQ ID NO: 86669 - protein, 11 aa, Homo sapiens
  Table A; Target 86669; HLA-A*11:01; TDRD12; ENSG00000173809; TAA
SQALPSFGYIK

SEQ ID NO: 86670 - protein, 8 aa, Homo sapiens
  Table A; Target 86670; HLA-B*13:02; TDRD12; ENSG00000173809; TAA
SQAQKTLI

SEQ ID NO: 86671 - protein, 9 aa, Homo sapiens
  Table A; Target 86671; HLA-A*32:01; TDRD12; ENSG00000173809; TAA
SQAQKTLIF

SEQ ID NO: 86672 - protein, 9 aa, Homo sapiens
  Table A; Target 86672; HLA-B*15:01; TDRD12; ENSG00000173809; TAA
SQAQKTLIF

SEQ ID NO: 86673 - protein, 9 aa, Homo sapiens
  Table A; Target 86673; HLA-B*15:03; TDRD12; ENSG00000173809; TAA
SQAQKTLIF

SEQ ID NO: 86674 - protein, 9 aa, Homo sapiens
  Table A; Target 86674; HLA-B*27:05; TDRD12; ENSG00000173809; TAA
SRNGPLAVI

SEQ ID NO: 86675 - protein, 10 aa, Homo sapiens
  Table A; Target 86675; HLA-A*01:01; TDRD12; ENSG00000173809; TAA
SSENQKPGGY

SEQ ID NO: 86676 - protein, 10 aa, Homo sapiens
  Table A; Target 86676; HLA-A*30:02; TDRD12; ENSG00000173809; TAA
SSENQKPGGY

SEQ ID NO: 86677 - protein, 10 aa, Homo sapiens
  Table A; Target 86677; HLA-A*30:02; TDRD12; ENSG00000173809; TAA
SSLKTSVIDY

SEQ ID NO: 86678 - protein, 8 aa, Homo sapiens
  Table A; Target 86678; HLA-C*01:02; TDRD12; ENSG00000173809; TAA
SSPLSADL

SEQ ID NO: 86679 - protein, 9 aa, Homo sapiens
  Table A; Target 86679; HLA-A*11:01; TDRD12; ENSG00000173809; TAA
SSPLSADLK

SEQ ID NO: 86680 - protein, 10 aa, Homo sapiens
  Table A; Target 86680; HLA-A*01:01; TDRD12; ENSG00000173809; TAA
SSQALPSFGY

SEQ ID NO: 86681 - protein, 10 aa, Homo sapiens
  Table A; Target 86681; HLA-A*29:02; TDRD12; ENSG00000173809; TAA
SSQALPSFGY

SEQ ID NO: 86682 - protein, 10 aa, Homo sapiens
  Table A; Target 86682; HLA-A*30:02; TDRD12; ENSG00000173809; TAA
SSQALPSFGY

SEQ ID NO: 86683 - protein, 9 aa, Homo sapiens
  Table A; Target 86683; HLA-B*57:01; TDRD12; ENSG00000173809; TAA
SSRPLHPVL

SEQ ID NO: 86684 - protein, 9 aa, Homo sapiens
  Table A; Target 86684; HLA-C*16:01; TDRD12; ENSG00000173809; TAA
SSRPLHPVL

SEQ ID NO: 86685 - protein, 9 aa, Homo sapiens
  Table A; Target 86685; HLA-A*31:01; TDRD12; ENSG00000173809; TAA
SSVYWPAKR

SEQ ID NO: 86686 - protein, 8 aa, Homo sapiens
  Table A; Target 86686; HLA-A*01:01; TDRD12; ENSG00000173809; TAA
STDIVPAK

SEQ ID NO: 86687 - protein, 8 aa, Homo sapiens
  Table A; Target 86687; HLA-A*03:01; TDRD12; ENSG00000173809; TAA
STDIVPAK

SEQ ID NO: 86688 - protein, 8 aa, Homo sapiens
  Table A; Target 86688; HLA-A*03:02; TDRD12; ENSG00000173809; TAA
STDIVPAK

SEQ ID NO: 86689 - protein, 8 aa, Homo sapiens
  Table A; Target 86689; HLA-A*11:01; TDRD12; ENSG00000173809; TAA
STDIVPAK

SEQ ID NO: 86690 - protein, 9 aa, Homo sapiens
  Table A; Target 86690; HLA-A*01:01; TDRD12; ENSG00000173809; TAA
STDIVPAKK

SEQ ID NO: 86691 - protein, 9 aa, Homo sapiens
  Table A; Target 86691; HLA-A*03:01; TDRD12; ENSG00000173809; TAA
STDIVPAKK

SEQ ID NO: 86692 - protein, 9 aa, Homo sapiens
  Table A; Target 86692; HLA-A*03:02; TDRD12; ENSG00000173809; TAA
STDIVPAKK

SEQ ID NO: 86693 - protein, 9 aa, Homo sapiens
  Table A; Target 86693; HLA-A*11:01; TDRD12; ENSG00000173809; TAA
STDIVPAKK

SEQ ID NO: 86694 - protein, 10 aa, Homo sapiens
  Table A; Target 86694; HLA-A*25:01; TDRD12; ENSG00000173809; TAA
STDIVPAKKW

SEQ ID NO: 86695 - protein, 10 aa, Homo sapiens
  Table A; Target 86695; HLA-B*44:02; TDRD12; ENSG00000173809; TAA
STDIVPAKKW

SEQ ID NO: 86696 - protein, 10 aa, Homo sapiens
  Table A; Target 86696; HLA-B*44:03; TDRD12; ENSG00000173809; TAA
STDIVPAKKW

SEQ ID NO: 86697 - protein, 10 aa, Homo sapiens
  Table A; Target 86697; HLA-B*57:01; TDRD12; ENSG00000173809; TAA
STDIVPAKKW

SEQ ID NO: 86698 - protein, 10 aa, Homo sapiens
  Table A; Target 86698; HLA-B*58:01; TDRD12; ENSG00000173809; TAA
STDIVPAKKW

SEQ ID NO: 86699 - protein, 10 aa, Homo sapiens
  Table A; Target 86699; HLA-A*03:01; TDRD12; ENSG00000173809; TAA
SVAETEIVCK

SEQ ID NO: 86700 - protein, 10 aa, Homo sapiens
  Table A; Target 86700; HLA-A*03:02; TDRD12; ENSG00000173809; TAA
SVAETEIVCK

SEQ ID NO: 86701 - protein, 10 aa, Homo sapiens
  Table A; Target 86701; HLA-A*11:01; TDRD12; ENSG00000173809; TAA
SVAETEIVCK

SEQ ID NO: 86702 - protein, 10 aa, Homo sapiens
  Table A; Target 86702; HLA-A*68:01; TDRD12; ENSG00000173809; TAA
SVAETEIVCK

SEQ ID NO: 86703 - protein, 10 aa, Homo sapiens
  Table A; Target 86703; HLA-B*27:02; TDRD12; ENSG00000173809; TAA
SVAETEIVCK

SEQ ID NO: 86704 - protein, 10 aa, Homo sapiens
  Table A; Target 86704; HLA-B*27:05; TDRD12; ENSG00000173809; TAA
SVAETEIVCK

SEQ ID NO: 86705 - protein, 10 aa, Homo sapiens
  Table A; Target 86705; HLA-C*07:06; TDRD12; ENSG00000173809; TAA
SVAETEIVCK

SEQ ID NO: 86706 - protein, 11 aa, Homo sapiens
  Table A; Target 86706; HLA-A*26:01; TDRD12; ENSG00000173809; TAA
SVAETEIVCKV

SEQ ID NO: 86707 - protein, 11 aa, Homo sapiens
  Table A; Target 86707; HLA-A*68:02; TDRD12; ENSG00000173809; TAA
SVAETEIVCKV

SEQ ID NO: 86708 - protein, 9 aa, Homo sapiens
  Table A; Target 86708; HLA-A*02:01; TDRD12; ENSG00000173809; TAA
SVIDYNVRA

SEQ ID NO: 86709 - protein, 11 aa, Homo sapiens
  Table A; Target 86709; HLA-A*68:02; TDRD12; ENSG00000173809; TAA
SVIDYNVRAEI

SEQ ID NO: 86710 - protein, 8 aa, Homo sapiens
  Table A; Target 86710; HLA-A*11:01; TDRD12; ENSG00000173809; TAA
SVLLLTEK

SEQ ID NO: 86711 - protein, 8 aa, Homo sapiens
  Table A; Target 86711; HLA-A*31:01; TDRD12; ENSG00000173809; TAA
SVYWPAKR

SEQ ID NO: 86712 - protein, 9 aa, Homo sapiens
  Table A; Target 86712; HLA-A*31:01; TDRD12; ENSG00000173809; TAA
SYSWPPIAR

SEQ ID NO: 86713 - protein, 9 aa, Homo sapiens
  Table A; Target 86713; HLA-A*33:01; TDRD12; ENSG00000173809; TAA
SYSWPPIAR

SEQ ID NO: 86714 - protein, 9 aa, Homo sapiens
  Table A; Target 86714; HLA-A*33:03; TDRD12; ENSG00000173809; TAA
SYSWPPIAR

SEQ ID NO: 86715 - protein, 8 aa, Homo sapiens
  Table A; Target 86715; HLA-B*27:02; TDRD12; ENSG00000173809; TAA
TAGVLEAK

SEQ ID NO: 86716 - protein, 8 aa, Homo sapiens
  Table A; Target 86716; HLA-B*35:03; TDRD12; ENSG00000173809; TAA
TAMEEAAL

SEQ ID NO: 86717 - protein, 8 aa, Homo sapiens
  Table A; Target 86717; HLA-C*03:03; TDRD12; ENSG00000173809; TAA
TAMEEAAL

SEQ ID NO: 86718 - protein, 8 aa, Homo sapiens
  Table A; Target 86718; HLA-C*03:04; TDRD12; ENSG00000173809; TAA
TAMEEAAL

SEQ ID NO: 86719 - protein, 8 aa, Homo sapiens
  Table A; Target 86719; HLA-C*05:01; TDRD12; ENSG00000173809; TAA
TAMEEAAL

SEQ ID NO: 86720 - protein, 9 aa, Homo sapiens
  Table A; Target 86720; HLA-A*01:01; TDRD12; ENSG00000173809; TAA
TAMEEAALY

SEQ ID NO: 86721 - protein, 9 aa, Homo sapiens
  Table A; Target 86721; HLA-A*03:02; TDRD12; ENSG00000173809; TAA
TAMEEAALY

SEQ ID NO: 86722 - protein, 9 aa, Homo sapiens
  Table A; Target 86722; HLA-A*11:01; TDRD12; ENSG00000173809; TAA
TAMEEAALY

SEQ ID NO: 86723 - protein, 9 aa, Homo sapiens
  Table A; Target 86723; HLA-A*23:01; TDRD12; ENSG00000173809; TAA
TAMEEAALY

SEQ ID NO: 86724 - protein, 9 aa, Homo sapiens
  Table A; Target 86724; HLA-A*25:01; TDRD12; ENSG00000173809; TAA
TAMEEAALY

SEQ ID NO: 86725 - protein, 9 aa, Homo sapiens
  Table A; Target 86725; HLA-A*26:01; TDRD12; ENSG00000173809; TAA
TAMEEAALY

SEQ ID NO: 86726 - protein, 9 aa, Homo sapiens
  Table A; Target 86726; HLA-A*29:02; TDRD12; ENSG00000173809; TAA
TAMEEAALY

SEQ ID NO: 86727 - protein, 9 aa, Homo sapiens
  Table A; Target 86727; HLA-A*30:02; TDRD12; ENSG00000173809; TAA
TAMEEAALY

SEQ ID NO: 86728 - protein, 9 aa, Homo sapiens
  Table A; Target 86728; HLA-A*32:01; TDRD12; ENSG00000173809; TAA
TAMEEAALY

SEQ ID NO: 86729 - protein, 9 aa, Homo sapiens
  Table A; Target 86729; HLA-A*33:01; TDRD12; ENSG00000173809; TAA
TAMEEAALY

SEQ ID NO: 86730 - protein, 9 aa, Homo sapiens
  Table A; Target 86730; HLA-A*68:01; TDRD12; ENSG00000173809; TAA
TAMEEAALY

SEQ ID NO: 86731 - protein, 9 aa, Homo sapiens
  Table A; Target 86731; HLA-B*15:01; TDRD12; ENSG00000173809; TAA
TAMEEAALY

SEQ ID NO: 86732 - protein, 9 aa, Homo sapiens
  Table A; Target 86732; HLA-B*15:03; TDRD12; ENSG00000173809; TAA
TAMEEAALY

SEQ ID NO: 86733 - protein, 9 aa, Homo sapiens
  Table A; Target 86733; HLA-B*18:01; TDRD12; ENSG00000173809; TAA
TAMEEAALY

SEQ ID NO: 86734 - protein, 9 aa, Homo sapiens
  Table A; Target 86734; HLA-B*27:02; TDRD12; ENSG00000173809; TAA
TAMEEAALY

SEQ ID NO: 86735 - protein, 9 aa, Homo sapiens
  Table A; Target 86735; HLA-B*35:01; TDRD12; ENSG00000173809; TAA
TAMEEAALY

SEQ ID NO: 86736 - protein, 9 aa, Homo sapiens
  Table A; Target 86736; HLA-B*35:03; TDRD12; ENSG00000173809; TAA
TAMEEAALY

SEQ ID NO: 86737 - protein, 9 aa, Homo sapiens
  Table A; Target 86737; HLA-B*39:01; TDRD12; ENSG00000173809; TAA
TAMEEAALY

SEQ ID NO: 86738 - protein, 9 aa, Homo sapiens
  Table A; Target 86738; HLA-B*46:01; TDRD12; ENSG00000173809; TAA
TAMEEAALY

SEQ ID NO: 86739 - protein, 9 aa, Homo sapiens
  Table A; Target 86739; HLA-B*55:01; TDRD12; ENSG00000173809; TAA
TAMEEAALY

SEQ ID NO: 86740 - protein, 9 aa, Homo sapiens
  Table A; Target 86740; HLA-B*58:01; TDRD12; ENSG00000173809; TAA
TAMEEAALY

SEQ ID NO: 86741 - protein, 9 aa, Homo sapiens
  Table A; Target 86741; HLA-C*02:02; TDRD12; ENSG00000173809; TAA
TAMEEAALY

SEQ ID NO: 86742 - protein, 9 aa, Homo sapiens
  Table A; Target 86742; HLA-C*03:03; TDRD12; ENSG00000173809; TAA
TAMEEAALY

SEQ ID NO: 86743 - protein, 9 aa, Homo sapiens
  Table A; Target 86743; HLA-C*05:01; TDRD12; ENSG00000173809; TAA
TAMEEAALY

SEQ ID NO: 86744 - protein, 9 aa, Homo sapiens
  Table A; Target 86744; HLA-C*07:04; TDRD12; ENSG00000173809; TAA
TAMEEAALY

SEQ ID NO: 86745 - protein, 9 aa, Homo sapiens
  Table A; Target 86745; HLA-C*07:06; TDRD12; ENSG00000173809; TAA
TAMEEAALY

SEQ ID NO: 86746 - protein, 9 aa, Homo sapiens
  Table A; Target 86746; HLA-C*12:03; TDRD12; ENSG00000173809; TAA
TAMEEAALY

SEQ ID NO: 86747 - protein, 9 aa, Homo sapiens
  Table A; Target 86747; HLA-C*14:02; TDRD12; ENSG00000173809; TAA
TAMEEAALY

SEQ ID NO: 86748 - protein, 9 aa, Homo sapiens
  Table A; Target 86748; HLA-C*16:01; TDRD12; ENSG00000173809; TAA
TAMEEAALY

SEQ ID NO: 86749 - protein, 9 aa, Homo sapiens
  Table A; Target 86749; HLA-C*16:02; TDRD12; ENSG00000173809; TAA
TAMEEAALY

SEQ ID NO: 86750 - protein, 9 aa, Homo sapiens
  Table A; Target 86750; HLA-C*16:04; TDRD12; ENSG00000173809; TAA
TAMEEAALY

SEQ ID NO: 86751 - protein, 9 aa, Homo sapiens
  Table A; Target 86751; HLA-C*12:03; TDRD12; ENSG00000173809; TAA
TAQDKAVKC

SEQ ID NO: 86752 - protein, 9 aa, Homo sapiens
  Table A; Target 86752; HLA-C*16:02; TDRD12; ENSG00000173809; TAA
TAQDKAVKC

SEQ ID NO: 86753 - protein, 10 aa, Homo sapiens
  Table A; Target 86753; HLA-C*06:02; TDRD12; ENSG00000173809; TAA
TAQDKAVKCN

SEQ ID NO: 86754 - protein, 9 aa, Homo sapiens
  Table A; Target 86754; HLA-B*35:03; TDRD12; ENSG00000173809; TAA
TATAQDKAV

SEQ ID NO: 86755 - protein, 9 aa, Homo sapiens
  Table A; Target 86755; HLA-C*16:02; TDRD12; ENSG00000173809; TAA
TATAQDKAV

SEQ ID NO: 86756 - protein, 9 aa, Homo sapiens
  Table A; Target 86756; HLA-B*37:01; TDRD12; ENSG00000173809; TAA
TDATCVIHF

SEQ ID NO: 86757 - protein, 9 aa, Homo sapiens
  Table A; Target 86757; HLA-C*04:01; TDRD12; ENSG00000173809; TAA
TDATCVIHF

SEQ ID NO: 86758 - protein, 9 aa, Homo sapiens
  Table A; Target 86758; HLA-C*07:01; TDRD12; ENSG00000173809; TAA
TDATCVIHF

SEQ ID NO: 86759 - protein, 9 aa, Homo sapiens
  Table A; Target 86759; HLA-C*12:03; TDRD12; ENSG00000173809; TAA
TDATCVIHF

SEQ ID NO: 86760 - protein, 9 aa, Homo sapiens
  Table A; Target 86760; HLA-C*16:02; TDRD12; ENSG00000173809; TAA
TDATCVIHF

SEQ ID NO: 86761 - protein, 8 aa, Homo sapiens
  Table A; Target 86761; HLA-A*03:02; TDRD12; ENSG00000173809; TAA
TDIVPAKK

SEQ ID NO: 86762 - protein, 8 aa, Homo sapiens
  Table A; Target 86762; HLA-C*06:02; TDRD12; ENSG00000173809; TAA
TDIVPAKK

SEQ ID NO: 86763 - protein, 9 aa, Homo sapiens
  Table A; Target 86763; HLA-B*44:02; TDRD12; ENSG00000173809; TAA
TDIVPAKKW

SEQ ID NO: 86764 - protein, 9 aa, Homo sapiens
  Table A; Target 86764; HLA-B*44:03; TDRD12; ENSG00000173809; TAA
TDIVPAKKW

SEQ ID NO: 86765 - protein, 9 aa, Homo sapiens
  Table A; Target 86765; HLA-C*16:04; TDRD12; ENSG00000173809; TAA
TDIVPAKKW

SEQ ID NO: 86766 - protein, 9 aa, Homo sapiens
  Table A; Target 86766; HLA-B*37:01; TDRD12; ENSG00000173809; TAA
TDLPRKLSS

SEQ ID NO: 86767 - protein, 8 aa, Homo sapiens
  Table A; Target 86767; HLA-B*18:01; TDRD12; ENSG00000173809; TAA
TEIVCKVV

SEQ ID NO: 86768 - protein, 8 aa, Homo sapiens
  Table A; Target 86768; HLA-B*49:01; TDRD12; ENSG00000173809; TAA
TEIVCKVV

SEQ ID NO: 86769 - protein, 9 aa, Homo sapiens
  Table A; Target 86769; HLA-A*30:01; TDRD12; ENSG00000173809; TAA
TEKDASHAV

SEQ ID NO: 86770 - protein, 9 aa, Homo sapiens
  Table A; Target 86770; HLA-A*32:01; TDRD12; ENSG00000173809; TAA
TEKDASHAV

SEQ ID NO: 86771 - protein, 9 aa, Homo sapiens
  Table A; Target 86771; HLA-B*13:02; TDRD12; ENSG00000173809; TAA
TEKDASHAV

SEQ ID NO: 86772 - protein, 9 aa, Homo sapiens
  Table A; Target 86772; HLA-B*18:01; TDRD12; ENSG00000173809; TAA
TEKDASHAV

SEQ ID NO: 86773 - protein, 9 aa, Homo sapiens
  Table A; Target 86773; HLA-B*37:01; TDRD12; ENSG00000173809; TAA
TEKDASHAV

SEQ ID NO: 86774 - protein, 9 aa, Homo sapiens
  Table A; Target 86774; HLA-B*40:01; TDRD12; ENSG00000173809; TAA
TEKDASHAV

SEQ ID NO: 86775 - protein, 9 aa, Homo sapiens
  Table A; Target 86775; HLA-B*40:02; TDRD12; ENSG00000173809; TAA
TEKDASHAV

SEQ ID NO: 86776 - protein, 9 aa, Homo sapiens
  Table A; Target 86776; HLA-B*44:02; TDRD12; ENSG00000173809; TAA
TEKDASHAV

SEQ ID NO: 86777 - protein, 9 aa, Homo sapiens
  Table A; Target 86777; HLA-B*44:03; TDRD12; ENSG00000173809; TAA
TEKDASHAV

SEQ ID NO: 86778 - protein, 9 aa, Homo sapiens
  Table A; Target 86778; HLA-B*49:01; TDRD12; ENSG00000173809; TAA
TEKDASHAV

SEQ ID NO: 86779 - protein, 9 aa, Homo sapiens
  Table A; Target 86779; HLA-C*02:02; TDRD12; ENSG00000173809; TAA
TEKDASHAV

SEQ ID NO: 86780 - protein, 9 aa, Homo sapiens
  Table A; Target 86780; HLA-C*06:02; TDRD12; ENSG00000173809; TAA
TEKDASHAV

SEQ ID NO: 86781 - protein, 9 aa, Homo sapiens
  Table A; Target 86781; HLA-C*16:01; TDRD12; ENSG00000173809; TAA
TEKDASHAV

SEQ ID NO: 86782 - protein, 9 aa, Homo sapiens
  Table A; Target 86782; HLA-C*16:02; TDRD12; ENSG00000173809; TAA
TEKDASHAV

SEQ ID NO: 86783 - protein, 9 aa, Homo sapiens
  Table A; Target 86783; HLA-C*16:04; TDRD12; ENSG00000173809; TAA
TEKDASHAV

SEQ ID NO: 86784 - protein, 11 aa, Homo sapiens
  Table A; Target 86784; HLA-A*30:01; TDRD12; ENSG00000173809; TAA
TEKDASHAVGV

SEQ ID NO: 86785 - protein, 11 aa, Homo sapiens
  Table A; Target 86785; HLA-B*37:01; TDRD12; ENSG00000173809; TAA
TEKDASHAVGV

SEQ ID NO: 86786 - protein, 11 aa, Homo sapiens
  Table A; Target 86786; HLA-B*40:01; TDRD12; ENSG00000173809; TAA
TEKDASHAVGV

SEQ ID NO: 86787 - protein, 11 aa, Homo sapiens
  Table A; Target 86787; HLA-B*40:02; TDRD12; ENSG00000173809; TAA
TEKDASHAVGV

SEQ ID NO: 86788 - protein, 11 aa, Homo sapiens
  Table A; Target 86788; HLA-B*49:01; TDRD12; ENSG00000173809; TAA
TEKDASHAVGV

SEQ ID NO: 86789 - protein, 11 aa, Homo sapiens
  Table A; Target 86789; HLA-C*06:02; TDRD12; ENSG00000173809; TAA
TEKDASHAVGV

SEQ ID NO: 86790 - protein, 9 aa, Homo sapiens
  Table A; Target 86790; HLA-B*49:01; TDRD12; ENSG00000173809; TAA
TESYSWPPI

SEQ ID NO: 86791 - protein, 9 aa, Homo sapiens
  Table A; Target 86791; HLA-A*01:01; TDRD12; ENSG00000173809; TAA
TIDSSPLSA

SEQ ID NO: 86792 - protein, 9 aa, Homo sapiens
  Table A; Target 86792; HLA-A*02:01; TDRD12; ENSG00000173809; TAA
TIDSSPLSA

SEQ ID NO: 86793 - protein, 9 aa, Homo sapiens
  Table A; Target 86793; HLA-A*02:07; TDRD12; ENSG00000173809; TAA
TIDSSPLSA

SEQ ID NO: 86794 - protein, 9 aa, Homo sapiens
  Table A; Target 86794; HLA-C*05:01; TDRD12; ENSG00000173809; TAA
TIDSSPLSA

SEQ ID NO: 86795 - protein, 11 aa, Homo sapiens
  Table A; Target 86795; HLA-C*05:01; TDRD12; ENSG00000173809; TAA
TIDSSPLSADL

SEQ ID NO: 86796 - protein, 9 aa, Homo sapiens
  Table A; Target 86796; HLA-B*08:01; TDRD12; ENSG00000173809; TAA
TIKDEKVCV

SEQ ID NO: 86797 - protein, 11 aa, Homo sapiens
  Table A; Target 86797; HLA-A*02:01; TDRD12; ENSG00000173809; TAA
TIYADPDVPEA

SEQ ID NO: 86798 - protein, 9 aa, Homo sapiens
  Table A; Target 86798; HLA-A*02:01; TDRD12; ENSG00000173809; TAA
TLEEGQVCV

SEQ ID NO: 86799 - protein, 9 aa, Homo sapiens
  Table A; Target 86799; HLA-B*55:01; TDRD12; ENSG00000173809; TAA
TLEEGQVCV

SEQ ID NO: 86800 - protein, 9 aa, Homo sapiens
  Table A; Target 86800; HLA-C*05:01; TDRD12; ENSG00000173809; TAA
TLEEGQVCV

SEQ ID NO: 86801 - protein, 10 aa, Homo sapiens
  Table A; Target 86801; HLA-A*02:01; TDRD12; ENSG00000173809; TAA
TLEEGQVCVV

SEQ ID NO: 86802 - protein, 11 aa, Homo sapiens
  Table A; Target 86802; HLA-A*01:01; TDRD12; ENSG00000173809; TAA
TLEEGQVCVVY

SEQ ID NO: 86803 - protein, 11 aa, Homo sapiens
  Table A; Target 86803; HLA-A*30:02; TDRD12; ENSG00000173809; TAA
TLEEGQVCVVY

SEQ ID NO: 86804 - protein, 9 aa, Homo sapiens
  Table A; Target 86804; HLA-A*02:01; TDRD12; ENSG00000173809; TAA
TLFHRVQVL

SEQ ID NO: 86805 - protein, 9 aa, Homo sapiens
  Table A; Target 86805; HLA-A*02:03; TDRD12; ENSG00000173809; TAA
TLFHRVQVL

SEQ ID NO: 86806 - protein, 9 aa, Homo sapiens
  Table A; Target 86806; HLA-A*02:04; TDRD12; ENSG00000173809; TAA
TLFHRVQVL

SEQ ID NO: 86807 - protein, 9 aa, Homo sapiens
  Table A; Target 86807; HLA-A*02:07; TDRD12; ENSG00000173809; TAA
TLFHRVQVL

SEQ ID NO: 86808 - protein, 9 aa, Homo sapiens
  Table A; Target 86808; HLA-B*08:01; TDRD12; ENSG00000173809; TAA
TLFHRVQVL

SEQ ID NO: 86809 - protein, 11 aa, Homo sapiens
  Table A; Target 86809; HLA-A*02:01; TDRD12; ENSG00000173809; TAA
TLFHRVQVLEV

SEQ ID NO: 86810 - protein, 11 aa, Homo sapiens
  Table A; Target 86810; HLA-A*02:03; TDRD12; ENSG00000173809; TAA
TLFHRVQVLEV

SEQ ID NO: 86811 - protein, 11 aa, Homo sapiens
  Table A; Target 86811; HLA-A*02:04; TDRD12; ENSG00000173809; TAA
TLFHRVQVLEV

SEQ ID NO: 86812 - protein, 9 aa, Homo sapiens
  Table A; Target 86812; HLA-A*01:01; TDRD12; ENSG00000173809; TAA
TLNAEMNEY

SEQ ID NO: 86813 - protein, 9 aa, Homo sapiens
  Table A; Target 86813; HLA-A*03:01; TDRD12; ENSG00000173809; TAA
TLNAEMNEY

SEQ ID NO: 86814 - protein, 9 aa, Homo sapiens
  Table A; Target 86814; HLA-A*03:02; TDRD12; ENSG00000173809; TAA
TLNAEMNEY

SEQ ID NO: 86815 - protein, 9 aa, Homo sapiens
  Table A; Target 86815; HLA-A*25:01; TDRD12; ENSG00000173809; TAA
TLNAEMNEY

SEQ ID NO: 86816 - protein, 9 aa, Homo sapiens
  Table A; Target 86816; HLA-A*26:01; TDRD12; ENSG00000173809; TAA
TLNAEMNEY

SEQ ID NO: 86817 - protein, 9 aa, Homo sapiens
  Table A; Target 86817; HLA-A*29:02; TDRD12; ENSG00000173809; TAA
TLNAEMNEY

SEQ ID NO: 86818 - protein, 9 aa, Homo sapiens
  Table A; Target 86818; HLA-A*30:02; TDRD12; ENSG00000173809; TAA
TLNAEMNEY

SEQ ID NO: 86819 - protein, 9 aa, Homo sapiens
  Table A; Target 86819; HLA-A*32:01; TDRD12; ENSG00000173809; TAA
TLNAEMNEY

SEQ ID NO: 86820 - protein, 9 aa, Homo sapiens
  Table A; Target 86820; HLA-B*15:01; TDRD12; ENSG00000173809; TAA
TLNAEMNEY

SEQ ID NO: 86821 - protein, 9 aa, Homo sapiens
  Table A; Target 86821; HLA-B*15:03; TDRD12; ENSG00000173809; TAA
TLNAEMNEY

SEQ ID NO: 86822 - protein, 9 aa, Homo sapiens
  Table A; Target 86822; HLA-B*18:01; TDRD12; ENSG00000173809; TAA
TLNAEMNEY

SEQ ID NO: 86823 - protein, 9 aa, Homo sapiens
  Table A; Target 86823; HLA-B*27:05; TDRD12; ENSG00000173809; TAA
TLNAEMNEY

SEQ ID NO: 86824 - protein, 9 aa, Homo sapiens
  Table A; Target 86824; HLA-B*35:01; TDRD12; ENSG00000173809; TAA
TLNAEMNEY

SEQ ID NO: 86825 - protein, 9 aa, Homo sapiens
  Table A; Target 86825; HLA-B*39:01; TDRD12; ENSG00000173809; TAA
TLNAEMNEY

SEQ ID NO: 86826 - protein, 9 aa, Homo sapiens
  Table A; Target 86826; HLA-B*46:01; TDRD12; ENSG00000173809; TAA
TLNAEMNEY

SEQ ID NO: 86827 - protein, 9 aa, Homo sapiens
  Table A; Target 86827; HLA-B*55:01; TDRD12; ENSG00000173809; TAA
TLNAEMNEY

SEQ ID NO: 86828 - protein, 9 aa, Homo sapiens
  Table A; Target 86828; HLA-B*58:01; TDRD12; ENSG00000173809; TAA
TLNAEMNEY

SEQ ID NO: 86829 - protein, 9 aa, Homo sapiens
  Table A; Target 86829; HLA-C*01:02; TDRD12; ENSG00000173809; TAA
TLNAEMNEY

SEQ ID NO: 86830 - protein, 9 aa, Homo sapiens
  Table A; Target 86830; HLA-C*02:02; TDRD12; ENSG00000173809; TAA
TLNAEMNEY

SEQ ID NO: 86831 - protein, 9 aa, Homo sapiens
  Table A; Target 86831; HLA-C*03:03; TDRD12; ENSG00000173809; TAA
TLNAEMNEY

SEQ ID NO: 86832 - protein, 9 aa, Homo sapiens
  Table A; Target 86832; HLA-C*07:04; TDRD12; ENSG00000173809; TAA
TLNAEMNEY

SEQ ID NO: 86833 - protein, 9 aa, Homo sapiens
  Table A; Target 86833; HLA-C*14:02; TDRD12; ENSG00000173809; TAA
TLNAEMNEY

SEQ ID NO: 86834 - protein, 9 aa, Homo sapiens
  Table A; Target 86834; HLA-C*16:01; TDRD12; ENSG00000173809; TAA
TLNAEMNEY

SEQ ID NO: 86835 - protein, 9 aa, Homo sapiens
  Table A; Target 86835; HLA-C*16:02; TDRD12; ENSG00000173809; TAA
TLNAEMNEY

SEQ ID NO: 86836 - protein, 9 aa, Homo sapiens
  Table A; Target 86836; HLA-C*16:04; TDRD12; ENSG00000173809; TAA
TLNAEMNEY

SEQ ID NO: 86837 - protein, 10 aa, Homo sapiens
  Table A; Target 86837; HLA-B*15:01; TDRD12; ENSG00000173809; TAA
TLNAEMNEYF

SEQ ID NO: 86838 - protein, 11 aa, Homo sapiens
  Table A; Target 86838; HLA-A*03:02; TDRD12; ENSG00000173809; TAA
TLNAEMNEYFK

SEQ ID NO: 86839 - protein, 11 aa, Homo sapiens
  Table A; Target 86839; HLA-B*27:02; TDRD12; ENSG00000173809; TAA
TLNAEMNEYFK

SEQ ID NO: 86840 - protein, 9 aa, Homo sapiens
  Table A; Target 86840; HLA-A*02:07; TDRD12; ENSG00000173809; TAA
TLPPQAVEF

SEQ ID NO: 86841 - protein, 9 aa, Homo sapiens
  Table A; Target 86841; HLA-A*23:01; TDRD12; ENSG00000173809; TAA
TLPPQAVEF

SEQ ID NO: 86842 - protein, 9 aa, Homo sapiens
  Table A; Target 86842; HLA-A*24:02; TDRD12; ENSG00000173809; TAA
TLPPQAVEF

SEQ ID NO: 86843 - protein, 9 aa, Homo sapiens
  Table A; Target 86843; HLA-A*25:01; TDRD12; ENSG00000173809; TAA
TLPPQAVEF

SEQ ID NO: 86844 - protein, 9 aa, Homo sapiens
  Table A; Target 86844; HLA-A*26:01; TDRD12; ENSG00000173809; TAA
TLPPQAVEF

SEQ ID NO: 86845 - protein, 9 aa, Homo sapiens
  Table A; Target 86845; HLA-A*29:02; TDRD12; ENSG00000173809; TAA
TLPPQAVEF

SEQ ID NO: 86846 - protein, 9 aa, Homo sapiens
  Table A; Target 86846; HLA-A*32:01; TDRD12; ENSG00000173809; TAA
TLPPQAVEF

SEQ ID NO: 86847 - protein, 9 aa, Homo sapiens
  Table A; Target 86847; HLA-B*15:01; TDRD12; ENSG00000173809; TAA
TLPPQAVEF

SEQ ID NO: 86848 - protein, 9 aa, Homo sapiens
  Table A; Target 86848; HLA-B*15:03; TDRD12; ENSG00000173809; TAA
TLPPQAVEF

SEQ ID NO: 86849 - protein, 9 aa, Homo sapiens
  Table A; Target 86849; HLA-B*35:01; TDRD12; ENSG00000173809; TAA
TLPPQAVEF

SEQ ID NO: 86850 - protein, 9 aa, Homo sapiens
  Table A; Target 86850; HLA-B*37:01; TDRD12; ENSG00000173809; TAA
TLPPQAVEF

SEQ ID NO: 86851 - protein, 9 aa, Homo sapiens
  Table A; Target 86851; HLA-B*46:01; TDRD12; ENSG00000173809; TAA
TLPPQAVEF

SEQ ID NO: 86852 - protein, 9 aa, Homo sapiens
  Table A; Target 86852; HLA-C*01:02; TDRD12; ENSG00000173809; TAA
TLPPQAVEF

SEQ ID NO: 86853 - protein, 9 aa, Homo sapiens
  Table A; Target 86853; HLA-C*02:02; TDRD12; ENSG00000173809; TAA
TLPPQAVEF

SEQ ID NO: 86854 - protein, 9 aa, Homo sapiens
  Table A; Target 86854; HLA-C*07:04; TDRD12; ENSG00000173809; TAA
TLPPQAVEF

SEQ ID NO: 86855 - protein, 10 aa, Homo sapiens
  Table A; Target 86855; HLA-A*02:07; TDRD12; ENSG00000173809; TAA
TLPPQAVEFI

SEQ ID NO: 86856 - protein, 11 aa, Homo sapiens
  Table A; Target 86856; HLA-A*02:07; TDRD12; ENSG00000173809; TAA
TLPPQAVEFIV

SEQ ID NO: 86857 - protein, 10 aa, Homo sapiens
  Table A; Target 86857; HLA-B*35:03; TDRD12; ENSG00000173809; TAA
TPPAEDAACL

SEQ ID NO: 86858 - protein, 11 aa, Homo sapiens
  Table A; Target 86858; HLA-B*56:01; TDRD12; ENSG00000173809; TAA
TPPRVTGTSPA

SEQ ID NO: 86859 - protein, 8 aa, Homo sapiens
  Table A; Target 86859; HLA-B*51:01; TDRD12; ENSG00000173809; TAA
TPYSLLRL

SEQ ID NO: 86860 - protein, 9 aa, Homo sapiens
  Table A; Target 86860; HLA-B*51:01; TDRD12; ENSG00000173809; TAA
TPYSLLRLL

SEQ ID NO: 86861 - protein, 10 aa, Homo sapiens
  Table A; Target 86861; HLA-B*54:01; TDRD12; ENSG00000173809; TAA
TPYSLLRLLA

SEQ ID NO: 86862 - protein, 10 aa, Homo sapiens
  Table A; Target 86862; HLA-B*56:01; TDRD12; ENSG00000173809; TAA
TPYSLLRLLA

SEQ ID NO: 86863 - protein, 11 aa, Homo sapiens
  Table A; Target 86863; HLA-B*54:01; TDRD12; ENSG00000173809; TAA
TPYSLLRLLAC

SEQ ID NO: 86864 - protein, 10 aa, Homo sapiens
  Table A; Target 86864; HLA-A*02:01; TDRD12; ENSG00000173809; TAA
TQVEARLCAV

SEQ ID NO: 86865 - protein, 10 aa, Homo sapiens
  Table A; Target 86865; HLA-A*02:03; TDRD12; ENSG00000173809; TAA
TQVEARLCAV

SEQ ID NO: 86866 - protein, 10 aa, Homo sapiens
  Table A; Target 86866; HLA-B*40:02; TDRD12; ENSG00000173809; TAA
TQVEARLCAV

SEQ ID NO: 86867 - protein, 11 aa, Homo sapiens
  Table A; Target 86867; HLA-A*01:01; TDRD12; ENSG00000173809; TAA
TSSENQKPGGY

SEQ ID NO: 86868 - protein, 11 aa, Homo sapiens
  Table A; Target 86868; HLA-A*30:02; TDRD12; ENSG00000173809; TAA
TSSENQKPGGY

SEQ ID NO: 86869 - protein, 9 aa, Homo sapiens
  Table A; Target 86869; HLA-A*33:03; TDRD12; ENSG00000173809; TAA
TSVIDYNVR

SEQ ID NO: 86870 - protein, 9 aa, Homo sapiens
  Table A; Target 86870; HLA-A*68:01; TDRD12; ENSG00000173809; TAA
TSVIDYNVR

SEQ ID NO: 86871 - protein, 9 aa, Homo sapiens
  Table A; Target 86871; HLA-C*07:06; TDRD12; ENSG00000173809; TAA
TSVIDYNVR

SEQ ID NO: 86872 - protein, 9 aa, Homo sapiens
  Table A; Target 86872; HLA-A*23:01; TDRD12; ENSG00000173809; TAA
TTVEKVEKF

SEQ ID NO: 86873 - protein, 9 aa, Homo sapiens
  Table A; Target 86873; HLA-A*24:02; TDRD12; ENSG00000173809; TAA
TTVEKVEKF

SEQ ID NO: 86874 - protein, 9 aa, Homo sapiens
  Table A; Target 86874; HLA-A*25:01; TDRD12; ENSG00000173809; TAA
TTVEKVEKF

SEQ ID NO: 86875 - protein, 9 aa, Homo sapiens
  Table A; Target 86875; HLA-A*26:01; TDRD12; ENSG00000173809; TAA
TTVEKVEKF

SEQ ID NO: 86876 - protein, 9 aa, Homo sapiens
  Table A; Target 86876; HLA-A*29:02; TDRD12; ENSG00000173809; TAA
TTVEKVEKF

SEQ ID NO: 86877 - protein, 9 aa, Homo sapiens
  Table A; Target 86877; HLA-A*32:01; TDRD12; ENSG00000173809; TAA
TTVEKVEKF

SEQ ID NO: 86878 - protein, 9 aa, Homo sapiens
  Table A; Target 86878; HLA-A*33:01; TDRD12; ENSG00000173809; TAA
TTVEKVEKF

SEQ ID NO: 86879 - protein, 9 aa, Homo sapiens
  Table A; Target 86879; HLA-A*33:03; TDRD12; ENSG00000173809; TAA
TTVEKVEKF

SEQ ID NO: 86880 - protein, 9 aa, Homo sapiens
  Table A; Target 86880; HLA-A*68:01; TDRD12; ENSG00000173809; TAA
TTVEKVEKF

SEQ ID NO: 86881 - protein, 9 aa, Homo sapiens
  Table A; Target 86881; HLA-A*68:02; TDRD12; ENSG00000173809; TAA
TTVEKVEKF

SEQ ID NO: 86882 - protein, 9 aa, Homo sapiens
  Table A; Target 86882; HLA-B*18:01; TDRD12; ENSG00000173809; TAA
TTVEKVEKF

SEQ ID NO: 86883 - protein, 9 aa, Homo sapiens
  Table A; Target 86883; HLA-B*27:02; TDRD12; ENSG00000173809; TAA
TTVEKVEKF

SEQ ID NO: 86884 - protein, 9 aa, Homo sapiens
  Table A; Target 86884; HLA-B*35:01; TDRD12; ENSG00000173809; TAA
TTVEKVEKF

SEQ ID NO: 86885 - protein, 9 aa, Homo sapiens
  Table A; Target 86885; HLA-B*44:02; TDRD12; ENSG00000173809; TAA
TTVEKVEKF

SEQ ID NO: 86886 - protein, 9 aa, Homo sapiens
  Table A; Target 86886; HLA-B*44:03; TDRD12; ENSG00000173809; TAA
TTVEKVEKF

SEQ ID NO: 86887 - protein, 9 aa, Homo sapiens
  Table A; Target 86887; HLA-B*46:01; TDRD12; ENSG00000173809; TAA
TTVEKVEKF

SEQ ID NO: 86888 - protein, 9 aa, Homo sapiens
  Table A; Target 86888; HLA-B*57:01; TDRD12; ENSG00000173809; TAA
TTVEKVEKF

SEQ ID NO: 86889 - protein, 9 aa, Homo sapiens
  Table A; Target 86889; HLA-B*58:01; TDRD12; ENSG00000173809; TAA
TTVEKVEKF

SEQ ID NO: 86890 - protein, 9 aa, Homo sapiens
  Table A; Target 86890; HLA-C*02:02; TDRD12; ENSG00000173809; TAA
TTVEKVEKF

SEQ ID NO: 86891 - protein, 9 aa, Homo sapiens
  Table A; Target 86891; HLA-C*07:06; TDRD12; ENSG00000173809; TAA
TTVEKVEKF

SEQ ID NO: 86892 - protein, 9 aa, Homo sapiens
  Table A; Target 86892; HLA-C*12:03; TDRD12; ENSG00000173809; TAA
TTVEKVEKF

SEQ ID NO: 86893 - protein, 9 aa, Homo sapiens
  Table A; Target 86893; HLA-C*16:01; TDRD12; ENSG00000173809; TAA
TTVEKVEKF

SEQ ID NO: 86894 - protein, 9 aa, Homo sapiens
  Table A; Target 86894; HLA-C*16:02; TDRD12; ENSG00000173809; TAA
TTVEKVEKF

SEQ ID NO: 86895 - protein, 9 aa, Homo sapiens
  Table A; Target 86895; HLA-C*16:04; TDRD12; ENSG00000173809; TAA
TTVEKVEKF

SEQ ID NO: 86896 - protein, 8 aa, Homo sapiens
  Table A; Target 86896; HLA-B*18:01; TDRD12; ENSG00000173809; TAA
TVEKVEKF

SEQ ID NO: 86897 - protein, 8 aa, Homo sapiens
  Table A; Target 86897; HLA-C*05:01; TDRD12; ENSG00000173809; TAA
TVEKVEKF

SEQ ID NO: 86898 - protein, 11 aa, Homo sapiens
  Table A; Target 86898; HLA-A*01:01; TDRD12; ENSG00000173809; TAA
TVEKVEKFGLY

SEQ ID NO: 86899 - protein, 9 aa, Homo sapiens
  Table A; Target 86899; HLA-A*25:01; TDRD12; ENSG00000173809; TAA
TVLQTGACY

SEQ ID NO: 86900 - protein, 9 aa, Homo sapiens
  Table A; Target 86900; HLA-A*26:01; TDRD12; ENSG00000173809; TAA
TVLQTGACY

SEQ ID NO: 86901 - protein, 9 aa, Homo sapiens
  Table A; Target 86901; HLA-A*29:02; TDRD12; ENSG00000173809; TAA
TVLQTGACY

SEQ ID NO: 86902 - protein, 9 aa, Homo sapiens
  Table A; Target 86902; HLA-A*30:02; TDRD12; ENSG00000173809; TAA
TVLQTGACY

SEQ ID NO: 86903 - protein, 9 aa, Homo sapiens
  Table A; Target 86903; HLA-A*32:01; TDRD12; ENSG00000173809; TAA
TVLQTGACY

SEQ ID NO: 86904 - protein, 9 aa, Homo sapiens
  Table A; Target 86904; HLA-B*15:01; TDRD12; ENSG00000173809; TAA
TVLQTGACY

SEQ ID NO: 86905 - protein, 9 aa, Homo sapiens
  Table A; Target 86905; HLA-B*15:03; TDRD12; ENSG00000173809; TAA
TVLQTGACY

SEQ ID NO: 86906 - protein, 9 aa, Homo sapiens
  Table A; Target 86906; HLA-B*35:01; TDRD12; ENSG00000173809; TAA
TVLQTGACY

SEQ ID NO: 86907 - protein, 9 aa, Homo sapiens
  Table A; Target 86907; HLA-B*46:01; TDRD12; ENSG00000173809; TAA
TVLQTGACY

SEQ ID NO: 86908 - protein, 9 aa, Homo sapiens
  Table A; Target 86908; HLA-C*03:03; TDRD12; ENSG00000173809; TAA
TVLQTGACY

SEQ ID NO: 86909 - protein, 9 aa, Homo sapiens
  Table A; Target 86909; HLA-C*07:04; TDRD12; ENSG00000173809; TAA
TVLQTGACY

SEQ ID NO: 86910 - protein, 9 aa, Homo sapiens
  Table A; Target 86910; HLA-C*14:02; TDRD12; ENSG00000173809; TAA
TVLQTGACY

SEQ ID NO: 86911 - protein, 10 aa, Homo sapiens
  Table A; Target 86911; HLA-A*03:01; TDRD12; ENSG00000173809; TAA
TVLQTGACYK

SEQ ID NO: 86912 - protein, 10 aa, Homo sapiens
  Table A; Target 86912; HLA-A*03:02; TDRD12; ENSG00000173809; TAA
TVLQTGACYK

SEQ ID NO: 86913 - protein, 10 aa, Homo sapiens
  Table A; Target 86913; HLA-A*11:01; TDRD12; ENSG00000173809; TAA
TVLQTGACYK

SEQ ID NO: 86914 - protein, 10 aa, Homo sapiens
  Table A; Target 86914; HLA-A*68:01; TDRD12; ENSG00000173809; TAA
TVLQTGACYK

SEQ ID NO: 86915 - protein, 10 aa, Homo sapiens
  Table A; Target 86915; HLA-B*27:02; TDRD12; ENSG00000173809; TAA
TVLQTGACYK

SEQ ID NO: 86916 - protein, 9 aa, Homo sapiens
  Table A; Target 86916; HLA-A*01:01; TDRD12; ENSG00000173809; TAA
VAETEIVCK

SEQ ID NO: 86917 - protein, 9 aa, Homo sapiens
  Table A; Target 86917; HLA-A*03:02; TDRD12; ENSG00000173809; TAA
VAETEIVCK

SEQ ID NO: 86918 - protein, 9 aa, Homo sapiens
  Table A; Target 86918; HLA-A*11:01; TDRD12; ENSG00000173809; TAA
VAETEIVCK

SEQ ID NO: 86919 - protein, 9 aa, Homo sapiens
  Table A; Target 86919; HLA-B*27:02; TDRD12; ENSG00000173809; TAA
VAETEIVCK

SEQ ID NO: 86920 - protein, 9 aa, Homo sapiens
  Table A; Target 86920; HLA-C*05:01; TDRD12; ENSG00000173809; TAA
VAETEIVCK

SEQ ID NO: 86921 - protein, 8 aa, Homo sapiens
  Table A; Target 86921; HLA-B*46:01; TDRD12; ENSG00000173809; TAA
VAKNYACY

SEQ ID NO: 86922 - protein, 9 aa, Homo sapiens
  Table A; Target 86922; HLA-B*46:01; TDRD12; ENSG00000173809; TAA
VAKNYACYM

SEQ ID NO: 86923 - protein, 9 aa, Homo sapiens
  Table A; Target 86923; HLA-C*02:02; TDRD12; ENSG00000173809; TAA
VAKNYACYM

SEQ ID NO: 86924 - protein, 9 aa, Homo sapiens
  Table A; Target 86924; HLA-C*12:03; TDRD12; ENSG00000173809; TAA
VAKNYACYM

SEQ ID NO: 86925 - protein, 9 aa, Homo sapiens
  Table A; Target 86925; HLA-C*16:02; TDRD12; ENSG00000173809; TAA
VAKNYACYM

SEQ ID NO: 86926 - protein, 9 aa, Homo sapiens
  Table A; Target 86926; HLA-A*11:01; TDRD12; ENSG00000173809; TAA
VAVGVHWNK

SEQ ID NO: 86927 - protein, 9 aa, Homo sapiens
  Table A; Target 86927; HLA-A*31:01; TDRD12; ENSG00000173809; TAA
VAVGVHWNK

SEQ ID NO: 86928 - protein, 9 aa, Homo sapiens
  Table A; Target 86928; HLA-A*68:02; TDRD12; ENSG00000173809; TAA
VAVGVHWNK

SEQ ID NO: 86929 - protein, 10 aa, Homo sapiens
  Table A; Target 86929; HLA-A*11:01; TDRD12; ENSG00000173809; TAA
VCVNDDLVAK

SEQ ID NO: 86930 - protein, 10 aa, Homo sapiens
  Table A; Target 86930; HLA-B*27:02; TDRD12; ENSG00000173809; TAA
VCVNDDLVAK

SEQ ID NO: 86931 - protein, 9 aa, Homo sapiens
  Table A; Target 86931; HLA-B*37:01; TDRD12; ENSG00000173809; TAA
VDFAKNIPV

SEQ ID NO: 86932 - protein, 9 aa, Homo sapiens
  Table A; Target 86932; HLA-B*40:02; TDRD12; ENSG00000173809; TAA
VDFAKNIPV

SEQ ID NO: 86933 - protein, 9 aa, Homo sapiens
  Table A; Target 86933; HLA-C*06:02; TDRD12; ENSG00000173809; TAA
VDFAKNIPV

SEQ ID NO: 86934 - protein, 10 aa, Homo sapiens
  Table A; Target 86934; HLA-A*11:01; TDRD12; ENSG00000173809; TAA
VDFAKNIPVK

SEQ ID NO: 86935 - protein, 8 aa, Homo sapiens
  Table A; Target 86935; HLA-C*07:01; TDRD12; ENSG00000173809; TAA
VDKHMDLY

SEQ ID NO: 86936 - protein, 8 aa, Homo sapiens
  Table A; Target 86936; HLA-C*07:04; TDRD12; ENSG00000173809; TAA
VDKHMDLY

SEQ ID NO: 86937 - protein, 8 aa, Homo sapiens
  Table A; Target 86937; HLA-C*12:03; TDRD12; ENSG00000173809; TAA
VDKHMDLY

SEQ ID NO: 86938 - protein, 9 aa, Homo sapiens
  Table A; Target 86938; HLA-A*30:01; TDRD12; ENSG00000173809; TAA
VDYQKLNSA

SEQ ID NO: 86939 - protein, 9 aa, Homo sapiens
  Table A; Target 86939; HLA-B*08:01; TDRD12; ENSG00000173809; TAA
VDYQKLNSA

SEQ ID NO: 86940 - protein, 9 aa, Homo sapiens
  Table A; Target 86940; HLA-B*37:01; TDRD12; ENSG00000173809; TAA
VDYQKLNSA

SEQ ID NO: 86941 - protein, 9 aa, Homo sapiens
  Table A; Target 86941; HLA-B*49:01; TDRD12; ENSG00000173809; TAA
VDYQKLNSA

SEQ ID NO: 86942 - protein, 9 aa, Homo sapiens
  Table A; Target 86942; HLA-B*56:01; TDRD12; ENSG00000173809; TAA
VDYQKLNSA

SEQ ID NO: 86943 - protein, 8 aa, Homo sapiens
  Table A; Target 86943; HLA-B*18:01; TDRD12; ENSG00000173809; TAA
VEARLCAV

SEQ ID NO: 86944 - protein, 8 aa, Homo sapiens
  Table A; Target 86944; HLA-B*49:01; TDRD12; ENSG00000173809; TAA
VEARLCAV

SEQ ID NO: 86945 - protein, 8 aa, Homo sapiens
  Table A; Target 86945; HLA-B*49:01; TDRD12; ENSG00000173809; TAA
VEEDTFEV

SEQ ID NO: 86946 - protein, 9 aa, Homo sapiens
  Table A; Target 86946; HLA-A*01:01; TDRD12; ENSG00000173809; TAA
VEEDTFEVY

SEQ ID NO: 86947 - protein, 9 aa, Homo sapiens
  Table A; Target 86947; HLA-B*15:03; TDRD12; ENSG00000173809; TAA
VEEDTFEVY

SEQ ID NO: 86948 - protein, 9 aa, Homo sapiens
  Table A; Target 86948; HLA-B*18:01; TDRD12; ENSG00000173809; TAA
VEEDTFEVY

SEQ ID NO: 86949 - protein, 9 aa, Homo sapiens
  Table A; Target 86949; HLA-B*40:01; TDRD12; ENSG00000173809; TAA
VEEDTFEVY

SEQ ID NO: 86950 - protein, 9 aa, Homo sapiens
  Table A; Target 86950; HLA-B*44:02; TDRD12; ENSG00000173809; TAA
VEEDTFEVY

SEQ ID NO: 86951 - protein, 9 aa, Homo sapiens
  Table A; Target 86951; HLA-B*44:03; TDRD12; ENSG00000173809; TAA
VEEDTFEVY

SEQ ID NO: 86952 - protein, 9 aa, Homo sapiens
  Table A; Target 86952; HLA-B*49:01; TDRD12; ENSG00000173809; TAA
VEEDTFEVY

SEQ ID NO: 86953 - protein, 9 aa, Homo sapiens
  Table A; Target 86953; HLA-C*16:04; TDRD12; ENSG00000173809; TAA
VEEDTFEVY

SEQ ID NO: 86954 - protein, 10 aa, Homo sapiens
  Table A; Target 86954; HLA-B*40:01; TDRD12; ENSG00000173809; TAA
VEEDTFEVYL

SEQ ID NO: 86955 - protein, 10 aa, Homo sapiens
  Table A; Target 86955; HLA-B*49:01; TDRD12; ENSG00000173809; TAA
VEEDTFEVYL

SEQ ID NO: 86956 - protein, 11 aa, Homo sapiens
  Table A; Target 86956; HLA-B*40:01; TDRD12; ENSG00000173809; TAA
VEERESAPHQI

SEQ ID NO: 86957 - protein, 11 aa, Homo sapiens
  Table A; Target 86957; HLA-B*49:01; TDRD12; ENSG00000173809; TAA
VEERESAPHQI

SEQ ID NO: 86958 - protein, 11 aa, Homo sapiens
  Table A; Target 86958; HLA-A*30:01; TDRD12; ENSG00000173809; TAA
VEFIDEGRTGL

SEQ ID NO: 86959 - protein, 11 aa, Homo sapiens
  Table A; Target 86959; HLA-B*40:01; TDRD12; ENSG00000173809; TAA
VEFIDEGRTGL

SEQ ID NO: 86960 - protein, 11 aa, Homo sapiens
  Table A; Target 86960; HLA-B*40:02; TDRD12; ENSG00000173809; TAA
VEFIDEGRTGL

SEQ ID NO: 86961 - protein, 11 aa, Homo sapiens
  Table A; Target 86961; HLA-B*49:01; TDRD12; ENSG00000173809; TAA
VEFIDEGRTGL

SEQ ID NO: 86962 - protein, 8 aa, Homo sapiens
  Table A; Target 86962; HLA-B*18:01; TDRD12; ENSG00000173809; TAA
VEFIVCRV

SEQ ID NO: 86963 - protein, 8 aa, Homo sapiens
  Table A; Target 86963; HLA-B*37:01; TDRD12; ENSG00000173809; TAA
VEFIVCRV

SEQ ID NO: 86964 - protein, 8 aa, Homo sapiens
  Table A; Target 86964; HLA-B*49:01; TDRD12; ENSG00000173809; TAA
VEFIVCRV

SEQ ID NO: 86965 - protein, 9 aa, Homo sapiens
  Table A; Target 86965; HLA-A*30:01; TDRD12; ENSG00000173809; TAA
VEKFGLYGL

SEQ ID NO: 86966 - protein, 9 aa, Homo sapiens
  Table A; Target 86966; HLA-B*37:01; TDRD12; ENSG00000173809; TAA
VEKFGLYGL

SEQ ID NO: 86967 - protein, 9 aa, Homo sapiens
  Table A; Target 86967; HLA-B*40:02; TDRD12; ENSG00000173809; TAA
VEKFGLYGL

SEQ ID NO: 86968 - protein, 9 aa, Homo sapiens
  Table A; Target 86968; HLA-B*44:02; TDRD12; ENSG00000173809; TAA
VEKFGLYGL

SEQ ID NO: 86969 - protein, 9 aa, Homo sapiens
  Table A; Target 86969; HLA-A*30:01; TDRD12; ENSG00000173809; TAA
VEKVEKFGL

SEQ ID NO: 86970 - protein, 9 aa, Homo sapiens
  Table A; Target 86970; HLA-B*37:01; TDRD12; ENSG00000173809; TAA
VEKVEKFGL

SEQ ID NO: 86971 - protein, 9 aa, Homo sapiens
  Table A; Target 86971; HLA-B*40:02; TDRD12; ENSG00000173809; TAA
VEKVEKFGL

SEQ ID NO: 86972 - protein, 10 aa, Homo sapiens
  Table A; Target 86972; HLA-B*44:02; TDRD12; ENSG00000173809; TAA
VEKVEKFGLY

SEQ ID NO: 86973 - protein, 9 aa, Homo sapiens
  Table A; Target 86973; HLA-A*29:02; TDRD12; ENSG00000173809; TAA
VESFMQLPY

SEQ ID NO: 86974 - protein, 9 aa, Homo sapiens
  Table A; Target 86974; HLA-B*18:01; TDRD12; ENSG00000173809; TAA
VESFMQLPY

SEQ ID NO: 86975 - protein, 9 aa, Homo sapiens
  Table A; Target 86975; HLA-A*30:01; TDRD12; ENSG00000173809; TAA
VESSSIFCL

SEQ ID NO: 86976 - protein, 9 aa, Homo sapiens
  Table A; Target 86976; HLA-B*18:01; TDRD12; ENSG00000173809; TAA
VESSSIFCL

SEQ ID NO: 86977 - protein, 9 aa, Homo sapiens
  Table A; Target 86977; HLA-B*27:02; TDRD12; ENSG00000173809; TAA
VESSSIFCL

SEQ ID NO: 86978 - protein, 9 aa, Homo sapiens
  Table A; Target 86978; HLA-B*37:01; TDRD12; ENSG00000173809; TAA
VESSSIFCL

SEQ ID NO: 86979 - protein, 9 aa, Homo sapiens
  Table A; Target 86979; HLA-B*38:01; TDRD12; ENSG00000173809; TAA
VESSSIFCL

SEQ ID NO: 86980 - protein, 9 aa, Homo sapiens
  Table A; Target 86980; HLA-B*40:01; TDRD12; ENSG00000173809; TAA
VESSSIFCL

SEQ ID NO: 86981 - protein, 9 aa, Homo sapiens
  Table A; Target 86981; HLA-B*40:02; TDRD12; ENSG00000173809; TAA
VESSSIFCL

SEQ ID NO: 86982 - protein, 9 aa, Homo sapiens
  Table A; Target 86982; HLA-B*44:02; TDRD12; ENSG00000173809; TAA
VESSSIFCL

SEQ ID NO: 86983 - protein, 9 aa, Homo sapiens
  Table A; Target 86983; HLA-B*44:03; TDRD12; ENSG00000173809; TAA
VESSSIFCL

SEQ ID NO: 86984 - protein, 9 aa, Homo sapiens
  Table A; Target 86984; HLA-B*49:01; TDRD12; ENSG00000173809; TAA
VESSSIFCL

SEQ ID NO: 86985 - protein, 10 aa, Homo sapiens
  Table A; Target 86985; HLA-A*03:01; TDRD12; ENSG00000173809; TAA
VESSSIFCLK

SEQ ID NO: 86986 - protein, 10 aa, Homo sapiens
  Table A; Target 86986; HLA-B*27:02; TDRD12; ENSG00000173809; TAA
VESSSIFCLK

SEQ ID NO: 86987 - protein, 8 aa, Homo sapiens
  Table A; Target 86987; HLA-A*30:01; TDRD12; ENSG00000173809; TAA
VEVLFLEA

SEQ ID NO: 86988 - protein, 8 aa, Homo sapiens
  Table A; Target 86988; HLA-B*18:01; TDRD12; ENSG00000173809; TAA
VEVLFLEA

SEQ ID NO: 86989 - protein, 8 aa, Homo sapiens
  Table A; Target 86989; HLA-B*49:01; TDRD12; ENSG00000173809; TAA
VEVLFLEA

SEQ ID NO: 86990 - protein, 9 aa, Homo sapiens
  Table A; Target 86990; HLA-B*08:01; TDRD12; ENSG00000173809; TAA
VGDLRPTAT

SEQ ID NO: 86991 - protein, 9 aa, Homo sapiens
  Table A; Target 86991; HLA-A*23:01; TDRD12; ENSG00000173809; TAA
VHITNLSSL

SEQ ID NO: 86992 - protein, 9 aa, Homo sapiens
  Table A; Target 86992; HLA-A*25:01; TDRD12; ENSG00000173809; TAA
VHITNLSSL

SEQ ID NO: 86993 - protein, 9 aa, Homo sapiens
  Table A; Target 86993; HLA-B*38:01; TDRD12; ENSG00000173809; TAA
VHITNLSSL

SEQ ID NO: 86994 - protein, 9 aa, Homo sapiens
  Table A; Target 86994; HLA-B*39:01; TDRD12; ENSG00000173809; TAA
VHITNLSSL

SEQ ID NO: 86995 - protein, 9 aa, Homo sapiens
  Table A; Target 86995; HLA-B*46:01; TDRD12; ENSG00000173809; TAA
VHITNLSSL

SEQ ID NO: 86996 - protein, 9 aa, Homo sapiens
  Table A; Target 86996; HLA-C*01:02; TDRD12; ENSG00000173809; TAA
VHITNLSSL

SEQ ID NO: 86997 - protein, 9 aa, Homo sapiens
  Table A; Target 86997; HLA-C*03:03; TDRD12; ENSG00000173809; TAA
VHITNLSSL

SEQ ID NO: 86998 - protein, 9 aa, Homo sapiens
  Table A; Target 86998; HLA-C*03:04; TDRD12; ENSG00000173809; TAA
VHITNLSSL

SEQ ID NO: 86999 - protein, 9 aa, Homo sapiens
  Table A; Target 86999; HLA-C*14:02; TDRD12; ENSG00000173809; TAA
VHITNLSSL

SEQ ID NO: 87000 - protein, 10 aa, Homo sapiens
  Table A; Target 87000; HLA-B*57:01; TDRD12; ENSG00000173809; TAA
VILALGNTVW

SEQ ID NO: 87001 - protein, 11 aa, Homo sapiens
  Table A; Target 87001; HLA-A*29:02; TDRD12; ENSG00000173809; TAA
VITAMEEAALY

SEQ ID NO: 87002 - protein, 9 aa, Homo sapiens
  Table A; Target 87002; HLA-A*23:01; TDRD12; ENSG00000173809; TAA
VIVTTPYSL

SEQ ID NO: 87003 - protein, 9 aa, Homo sapiens
  Table A; Target 87003; HLA-A*24:02; TDRD12; ENSG00000173809; TAA
VIVTTPYSL

SEQ ID NO: 87004 - protein, 9 aa, Homo sapiens
  Table A; Target 87004; HLA-B*46:01; TDRD12; ENSG00000173809; TAA
VIVTTPYSL

SEQ ID NO: 87005 - protein, 9 aa, Homo sapiens
  Table A; Target 87005; HLA-C*01:02; TDRD12; ENSG00000173809; TAA
VIVTTPYSL

SEQ ID NO: 87006 - protein, 9 aa, Homo sapiens
  Table A; Target 87006; HLA-C*03:03; TDRD12; ENSG00000173809; TAA
VIVTTPYSL

SEQ ID NO: 87007 - protein, 9 aa, Homo sapiens
  Table A; Target 87007; HLA-C*03:04; TDRD12; ENSG00000173809; TAA
VIVTTPYSL

SEQ ID NO: 87008 - protein, 11 aa, Homo sapiens
  Table A; Target 87008; HLA-B*15:03; TDRD12; ENSG00000173809; TAA
VKSITSSADQY

SEQ ID NO: 87009 - protein, 9 aa, Homo sapiens
  Table A; Target 87009; HLA-A*03:01; TDRD12; ENSG00000173809; TAA
VLLTIGLHK

SEQ ID NO: 87010 - protein, 8 aa, Homo sapiens
  Table A; Target 87010; HLA-A*30:02; TDRD12; ENSG00000173809; TAA
VLQTGACY

SEQ ID NO: 87011 - protein, 8 aa, Homo sapiens
  Table A; Target 87011; HLA-A*32:01; TDRD12; ENSG00000173809; TAA
VLQTGACY

SEQ ID NO: 87012 - protein, 8 aa, Homo sapiens
  Table A; Target 87012; HLA-B*15:01; TDRD12; ENSG00000173809; TAA
VLQTGACY

SEQ ID NO: 87013 - protein, 8 aa, Homo sapiens
  Table A; Target 87013; HLA-C*14:02; TDRD12; ENSG00000173809; TAA
VLQTGACY

SEQ ID NO: 87014 - protein, 9 aa, Homo sapiens
  Table A; Target 87014; HLA-A*03:01; TDRD12; ENSG00000173809; TAA
VLQTGACYK

SEQ ID NO: 87015 - protein, 9 aa, Homo sapiens
  Table A; Target 87015; HLA-A*03:02; TDRD12; ENSG00000173809; TAA
VLQTGACYK

SEQ ID NO: 87016 - protein, 9 aa, Homo sapiens
  Table A; Target 87016; HLA-A*11:01; TDRD12; ENSG00000173809; TAA
VLQTGACYK

SEQ ID NO: 87017 - protein, 11 aa, Homo sapiens
  Table A; Target 87017; HLA-A*30:02; TDRD12; ENSG00000173809; TAA
VLTVLQTGACY

SEQ ID NO: 87018 - protein, 8 aa, Homo sapiens
  Table A; Target 87018; HLA-B*27:02; TDRD12; ENSG00000173809; TAA
VNDDLVAK

SEQ ID NO: 87019 - protein, 10 aa, Homo sapiens
  Table A; Target 87019; HLA-A*01:01; TDRD12; ENSG00000173809; TAA
VNDDLVAKNY

SEQ ID NO: 87020 - protein, 10 aa, Homo sapiens
  Table A; Target 87020; HLA-A*29:02; TDRD12; ENSG00000173809; TAA
VNDDLVAKNY

SEQ ID NO: 87021 - protein, 10 aa, Homo sapiens
  Table A; Target 87021; HLA-A*30:02; TDRD12; ENSG00000173809; TAA
VNDDLVAKNY

SEQ ID NO: 87022 - protein, 10 aa, Homo sapiens
  Table A; Target 87022; HLA-B*44:02; TDRD12; ENSG00000173809; TAA
VNDDLVAKNY

SEQ ID NO: 87023 - protein, 10 aa, Homo sapiens
  Table A; Target 87023; HLA-B*44:03; TDRD12; ENSG00000173809; TAA
VNDDLVAKNY

SEQ ID NO: 87024 - protein, 8 aa, Homo sapiens
  Table A; Target 87024; HLA-A*23:01; TDRD12; ENSG00000173809; TAA
VNFPAQSL

SEQ ID NO: 87025 - protein, 8 aa, Homo sapiens
  Table A; Target 87025; HLA-A*30:01; TDRD12; ENSG00000173809; TAA
VNFPAQSL

SEQ ID NO: 87026 - protein, 8 aa, Homo sapiens
  Table A; Target 87026; HLA-A*32:01; TDRD12; ENSG00000173809; TAA
VNFPAQSL

SEQ ID NO: 87027 - protein, 8 aa, Homo sapiens
  Table A; Target 87027; HLA-B*08:01; TDRD12; ENSG00000173809; TAA
VNFPAQSL

SEQ ID NO: 87028 - protein, 8 aa, Homo sapiens
  Table A; Target 87028; HLA-B*15:03; TDRD12; ENSG00000173809; TAA
VNFPAQSL

SEQ ID NO: 87029 - protein, 8 aa, Homo sapiens
  Table A; Target 87029; HLA-B*27:05; TDRD12; ENSG00000173809; TAA
VNFPAQSL

SEQ ID NO: 87030 - protein, 8 aa, Homo sapiens
  Table A; Target 87030; HLA-B*37:01; TDRD12; ENSG00000173809; TAA
VNFPAQSL

SEQ ID NO: 87031 - protein, 8 aa, Homo sapiens
  Table A; Target 87031; HLA-B*39:01; TDRD12; ENSG00000173809; TAA
VNFPAQSL

SEQ ID NO: 87032 - protein, 8 aa, Homo sapiens
  Table A; Target 87032; HLA-B*40:02; TDRD12; ENSG00000173809; TAA
VNFPAQSL

SEQ ID NO: 87033 - protein, 8 aa, Homo sapiens
  Table A; Target 87033; HLA-B*46:01; TDRD12; ENSG00000173809; TAA
VNFPAQSL

SEQ ID NO: 87034 - protein, 8 aa, Homo sapiens
  Table A; Target 87034; HLA-C*03:03; TDRD12; ENSG00000173809; TAA
VNFPAQSL

SEQ ID NO: 87035 - protein, 8 aa, Homo sapiens
  Table A; Target 87035; HLA-C*03:04; TDRD12; ENSG00000173809; TAA
VNFPAQSL

SEQ ID NO: 87036 - protein, 8 aa, Homo sapiens
  Table A; Target 87036; HLA-C*07:04; TDRD12; ENSG00000173809; TAA
VNFPAQSL

SEQ ID NO: 87037 - protein, 8 aa, Homo sapiens
  Table A; Target 87037; HLA-C*12:03; TDRD12; ENSG00000173809; TAA
VNFPAQSL

SEQ ID NO: 87038 - protein, 8 aa, Homo sapiens
  Table A; Target 87038; HLA-C*14:02; TDRD12; ENSG00000173809; TAA
VNFPAQSL

SEQ ID NO: 87039 - protein, 8 aa, Homo sapiens
  Table A; Target 87039; HLA-C*16:01; TDRD12; ENSG00000173809; TAA
VNFPAQSL

SEQ ID NO: 87040 - protein, 8 aa, Homo sapiens
  Table A; Target 87040; HLA-B*18:01; TDRD12; ENSG00000173809; TAA
VPAELYEF

SEQ ID NO: 87041 - protein, 8 aa, Homo sapiens
  Table A; Target 87041; HLA-B*35:01; TDRD12; ENSG00000173809; TAA
VPAELYEF

SEQ ID NO: 87042 - protein, 8 aa, Homo sapiens
  Table A; Target 87042; HLA-B*35:03; TDRD12; ENSG00000173809; TAA
VPAELYEF

SEQ ID NO: 87043 - protein, 8 aa, Homo sapiens
  Table A; Target 87043; HLA-B*46:01; TDRD12; ENSG00000173809; TAA
VPAELYEF

SEQ ID NO: 87044 - protein, 8 aa, Homo sapiens
  Table A; Target 87044; HLA-B*51:01; TDRD12; ENSG00000173809; TAA
VPAELYEF

SEQ ID NO: 87045 - protein, 8 aa, Homo sapiens
  Table A; Target 87045; HLA-B*54:01; TDRD12; ENSG00000173809; TAA
VPAELYEF

SEQ ID NO: 87046 - protein, 8 aa, Homo sapiens
  Table A; Target 87046; HLA-B*55:01; TDRD12; ENSG00000173809; TAA
VPAELYEF

SEQ ID NO: 87047 - protein, 8 aa, Homo sapiens
  Table A; Target 87047; HLA-B*56:01; TDRD12; ENSG00000173809; TAA
VPAELYEF

SEQ ID NO: 87048 - protein, 10 aa, Homo sapiens
  Table A; Target 87048; HLA-B*54:01; TDRD12; ENSG00000173809; TAA
VPAELYEFTA

SEQ ID NO: 87049 - protein, 10 aa, Homo sapiens
  Table A; Target 87049; HLA-B*55:01; TDRD12; ENSG00000173809; TAA
VPAELYEFTA

SEQ ID NO: 87050 - protein, 10 aa, Homo sapiens
  Table A; Target 87050; HLA-B*56:01; TDRD12; ENSG00000173809; TAA
VPAELYEFTA

SEQ ID NO: 87051 - protein, 9 aa, Homo sapiens
  Table A; Target 87051; HLA-B*54:01; TDRD12; ENSG00000173809; TAA
VPLLAITDA

SEQ ID NO: 87052 - protein, 9 aa, Homo sapiens
  Table A; Target 87052; HLA-B*55:01; TDRD12; ENSG00000173809; TAA
VPLLAITDA

SEQ ID NO: 87053 - protein, 9 aa, Homo sapiens
  Table A; Target 87053; HLA-B*56:01; TDRD12; ENSG00000173809; TAA
VPLLAITDA

SEQ ID NO: 87054 - protein, 9 aa, Homo sapiens
  Table A; Target 87054; HLA-B*13:02; TDRD12; ENSG00000173809; TAA
VQQVVHLCL

SEQ ID NO: 87055 - protein, 9 aa, Homo sapiens
  Table A; Target 87055; HLA-A*03:02; TDRD12; ENSG00000173809; TAA
VQVLEVNQK

SEQ ID NO: 87056 - protein, 9 aa, Homo sapiens
  Table A; Target 87056; HLA-A*11:01; TDRD12; ENSG00000173809; TAA
VQVLEVNQK

SEQ ID NO: 87057 - protein, 9 aa, Homo sapiens
  Table A; Target 87057; HLA-B*27:05; TDRD12; ENSG00000173809; TAA
VQVLEVNQK

SEQ ID NO: 87058 - protein, 8 aa, Homo sapiens
  Table A; Target 87058; HLA-B*37:01; TDRD12; ENSG00000173809; TAA
VRAEILSM

SEQ ID NO: 87059 - protein, 10 aa, Homo sapiens
  Table A; Target 87059; HLA-B*27:05; TDRD12; ENSG00000173809; TAA
VRAEILSMGM

SEQ ID NO: 87060 - protein, 9 aa, Homo sapiens
  Table A; Target 87060; HLA-A*03:01; TDRD12; ENSG00000173809; TAA
VTTPYSLLR

SEQ ID NO: 87061 - protein, 9 aa, Homo sapiens
  Table A; Target 87061; HLA-A*11:01; TDRD12; ENSG00000173809; TAA
VTTPYSLLR

SEQ ID NO: 87062 - protein, 9 aa, Homo sapiens
  Table A; Target 87062; HLA-A*29:02; TDRD12; ENSG00000173809; TAA
VTTPYSLLR

SEQ ID NO: 87063 - protein, 9 aa, Homo sapiens
  Table A; Target 87063; HLA-A*31:01; TDRD12; ENSG00000173809; TAA
VTTPYSLLR

SEQ ID NO: 87064 - protein, 9 aa, Homo sapiens
  Table A; Target 87064; HLA-B*57:01; TDRD12; ENSG00000173809; TAA
VTTPYSLLR

SEQ ID NO: 87065 - protein, 9 aa, Homo sapiens
  Table A; Target 87065; HLA-C*07:06; TDRD12; ENSG00000173809; TAA
VTTPYSLLR

SEQ ID NO: 87066 - protein, 10 aa, Homo sapiens
  Table A; Target 87066; HLA-A*01:01; TDRD12; ENSG00000173809; TAA
VVESFMQLPY

SEQ ID NO: 87067 - protein, 10 aa, Homo sapiens
  Table A; Target 87067; HLA-A*29:02; TDRD12; ENSG00000173809; TAA
VVESFMQLPY

SEQ ID NO: 87068 - protein, 10 aa, Homo sapiens
  Table A; Target 87068; HLA-C*07:01; TDRD12; ENSG00000173809; TAA
VVESFMQLPY

SEQ ID NO: 87069 - protein, 8 aa, Homo sapiens
  Table A; Target 87069; HLA-C*05:01; TDRD12; ENSG00000173809; TAA
VVESSSIF

SEQ ID NO: 87070 - protein, 11 aa, Homo sapiens
  Table A; Target 87070; HLA-A*03:01; TDRD12; ENSG00000173809; TAA
VVESSSIFCLK

SEQ ID NO: 87071 - protein, 11 aa, Homo sapiens
  Table A; Target 87071; HLA-A*03:02; TDRD12; ENSG00000173809; TAA
VVESSSIFCLK

SEQ ID NO: 87072 - protein, 11 aa, Homo sapiens
  Table A; Target 87072; HLA-A*11:01; TDRD12; ENSG00000173809; TAA
VVESSSIFCLK

SEQ ID NO: 87073 - protein, 9 aa, Homo sapiens
  Table A; Target 87073; HLA-A*02:07; TDRD12; ENSG00000173809; TAA
VVVESFMQL

SEQ ID NO: 87074 - protein, 9 aa, Homo sapiens
  Table A; Target 87074; HLA-A*23:01; TDRD12; ENSG00000173809; TAA
VVVESFMQL

SEQ ID NO: 87075 - protein, 9 aa, Homo sapiens
  Table A; Target 87075; HLA-A*24:02; TDRD12; ENSG00000173809; TAA
VVVESFMQL

SEQ ID NO: 87076 - protein, 9 aa, Homo sapiens
  Table A; Target 87076; HLA-A*25:01; TDRD12; ENSG00000173809; TAA
VVVESFMQL

SEQ ID NO: 87077 - protein, 9 aa, Homo sapiens
  Table A; Target 87077; HLA-A*26:01; TDRD12; ENSG00000173809; TAA
VVVESFMQL

SEQ ID NO: 87078 - protein, 9 aa, Homo sapiens
  Table A; Target 87078; HLA-B*46:01; TDRD12; ENSG00000173809; TAA
VVVESFMQL

SEQ ID NO: 87079 - protein, 9 aa, Homo sapiens
  Table A; Target 87079; HLA-C*01:02; TDRD12; ENSG00000173809; TAA
VVVESFMQL

SEQ ID NO: 87080 - protein, 9 aa, Homo sapiens
  Table A; Target 87080; HLA-C*02:02; TDRD12; ENSG00000173809; TAA
VVVESFMQL

SEQ ID NO: 87081 - protein, 9 aa, Homo sapiens
  Table A; Target 87081; HLA-C*03:03; TDRD12; ENSG00000173809; TAA
VVVESFMQL

SEQ ID NO: 87082 - protein, 9 aa, Homo sapiens
  Table A; Target 87082; HLA-C*03:04; TDRD12; ENSG00000173809; TAA
VVVESFMQL

SEQ ID NO: 87083 - protein, 9 aa, Homo sapiens
  Table A; Target 87083; HLA-A*23:01; TDRD12; ENSG00000173809; TAA
VWIDPMVHI

SEQ ID NO: 87084 - protein, 9 aa, Homo sapiens
  Table A; Target 87084; HLA-A*24:02; TDRD12; ENSG00000173809; TAA
VWIDPMVHI

SEQ ID NO: 87085 - protein, 11 aa, Homo sapiens
  Table A; Target 87085; HLA-A*24:02; TDRD12; ENSG00000173809; TAA
VYWPAKRGITI

SEQ ID NO: 87086 - protein, 10 aa, Homo sapiens
  Table A; Target 87086; HLA-B*35:01; TDRD12; ENSG00000173809; TAA
WALDDILVEF

SEQ ID NO: 87087 - protein, 8 aa, Homo sapiens
  Table A; Target 87087; HLA-B*18:01; TDRD12; ENSG00000173809; TAA
WDNAAIQY

SEQ ID NO: 87088 - protein, 8 aa, Homo sapiens
  Table A; Target 87088; HLA-C*07:01; TDRD12; ENSG00000173809; TAA
WDNAAIQY

SEQ ID NO: 87089 - protein, 9 aa, Homo sapiens
  Table A; Target 87089; HLA-B*07:02; TDRD12; ENSG00000173809; TAA
WPAKRGITI

SEQ ID NO: 87090 - protein, 9 aa, Homo sapiens
  Table A; Target 87090; HLA-B*08:01; TDRD12; ENSG00000173809; TAA
WPAKRGITI

SEQ ID NO: 87091 - protein, 9 aa, Homo sapiens
  Table A; Target 87091; HLA-B*51:01; TDRD12; ENSG00000173809; TAA
WPAKRGITI

SEQ ID NO: 87092 - protein, 9 aa, Homo sapiens
  Table A; Target 87092; HLA-B*27:02; TDRD12; ENSG00000173809; TAA
YACYMSPTK

SEQ ID NO: 87093 - protein, 9 aa, Homo sapiens
  Table A; Target 87093; HLA-C*03:03; TDRD12; ENSG00000173809; TAA
YACYMSPTK

SEQ ID NO: 87094 - protein, 9 aa, Homo sapiens
  Table A; Target 87094; HLA-A*01:01; TDRD12; ENSG00000173809; TAA
YADPDVPEA

SEQ ID NO: 87095 - protein, 9 aa, Homo sapiens
  Table A; Target 87095; HLA-A*02:01; TDRD12; ENSG00000173809; TAA
YADPDVPEA

SEQ ID NO: 87096 - protein, 9 aa, Homo sapiens
  Table A; Target 87096; HLA-A*02:07; TDRD12; ENSG00000173809; TAA
YADPDVPEA

SEQ ID NO: 87097 - protein, 9 aa, Homo sapiens
  Table A; Target 87097; HLA-B*35:01; TDRD12; ENSG00000173809; TAA
YADPDVPEA

SEQ ID NO: 87098 - protein, 9 aa, Homo sapiens
  Table A; Target 87098; HLA-B*35:03; TDRD12; ENSG00000173809; TAA
YADPDVPEA

SEQ ID NO: 87099 - protein, 9 aa, Homo sapiens
  Table A; Target 87099; HLA-B*38:01; TDRD12; ENSG00000173809; TAA
YADPDVPEA

SEQ ID NO: 87100 - protein, 9 aa, Homo sapiens
  Table A; Target 87100; HLA-B*39:01; TDRD12; ENSG00000173809; TAA
YADPDVPEA

SEQ ID NO: 87101 - protein, 9 aa, Homo sapiens
  Table A; Target 87101; HLA-B*54:01; TDRD12; ENSG00000173809; TAA
YADPDVPEA

SEQ ID NO: 87102 - protein, 9 aa, Homo sapiens
  Table A; Target 87102; HLA-B*55:01; TDRD12; ENSG00000173809; TAA
YADPDVPEA

SEQ ID NO: 87103 - protein, 9 aa, Homo sapiens
  Table A; Target 87103; HLA-B*56:01; TDRD12; ENSG00000173809; TAA
YADPDVPEA

SEQ ID NO: 87104 - protein, 9 aa, Homo sapiens
  Table A; Target 87104; HLA-C*03:03; TDRD12; ENSG00000173809; TAA
YADPDVPEA

SEQ ID NO: 87105 - protein, 9 aa, Homo sapiens
  Table A; Target 87105; HLA-C*03:04; TDRD12; ENSG00000173809; TAA
YADPDVPEA

SEQ ID NO: 87106 - protein, 9 aa, Homo sapiens
  Table A; Target 87106; HLA-C*05:01; TDRD12; ENSG00000173809; TAA
YADPDVPEA

SEQ ID NO: 87107 - protein, 9 aa, Homo sapiens
  Table A; Target 87107; HLA-C*07:04; TDRD12; ENSG00000173809; TAA
YADPDVPEA

SEQ ID NO: 87108 - protein, 9 aa, Homo sapiens
  Table A; Target 87108; HLA-C*12:03; TDRD12; ENSG00000173809; TAA
YADPDVPEA

SEQ ID NO: 87109 - protein, 9 aa, Homo sapiens
  Table A; Target 87109; HLA-C*16:02; TDRD12; ENSG00000173809; TAA
YADPDVPEA

SEQ ID NO: 87110 - protein, 8 aa, Homo sapiens
  Table A; Target 87110; HLA-B*08:01; TDRD12; ENSG00000173809; TAA
YATLNAEM

SEQ ID NO: 87111 - protein, 8 aa, Homo sapiens
  Table A; Target 87111; HLA-B*35:01; TDRD12; ENSG00000173809; TAA
YATLNAEM

SEQ ID NO: 87112 - protein, 8 aa, Homo sapiens
  Table A; Target 87112; HLA-B*35:03; TDRD12; ENSG00000173809; TAA
YATLNAEM

SEQ ID NO: 87113 - protein, 8 aa, Homo sapiens
  Table A; Target 87113; HLA-B*39:01; TDRD12; ENSG00000173809; TAA
YATLNAEM

SEQ ID NO: 87114 - protein, 8 aa, Homo sapiens
  Table A; Target 87114; HLA-B*40:02; TDRD12; ENSG00000173809; TAA
YATLNAEM

SEQ ID NO: 87115 - protein, 8 aa, Homo sapiens
  Table A; Target 87115; HLA-B*46:01; TDRD12; ENSG00000173809; TAA
YATLNAEM

SEQ ID NO: 87116 - protein, 8 aa, Homo sapiens
  Table A; Target 87116; HLA-B*51:01; TDRD12; ENSG00000173809; TAA
YATLNAEM

SEQ ID NO: 87117 - protein, 8 aa, Homo sapiens
  Table A; Target 87117; HLA-B*54:01; TDRD12; ENSG00000173809; TAA
YATLNAEM

SEQ ID NO: 87118 - protein, 8 aa, Homo sapiens
  Table A; Target 87118; HLA-B*55:01; TDRD12; ENSG00000173809; TAA
YATLNAEM

SEQ ID NO: 87119 - protein, 8 aa, Homo sapiens
  Table A; Target 87119; HLA-B*58:01; TDRD12; ENSG00000173809; TAA
YATLNAEM

SEQ ID NO: 87120 - protein, 8 aa, Homo sapiens
  Table A; Target 87120; HLA-C*01:02; TDRD12; ENSG00000173809; TAA
YATLNAEM

SEQ ID NO: 87121 - protein, 8 aa, Homo sapiens
  Table A; Target 87121; HLA-C*02:02; TDRD12; ENSG00000173809; TAA
YATLNAEM

SEQ ID NO: 87122 - protein, 8 aa, Homo sapiens
  Table A; Target 87122; HLA-C*03:03; TDRD12; ENSG00000173809; TAA
YATLNAEM

SEQ ID NO: 87123 - protein, 8 aa, Homo sapiens
  Table A; Target 87123; HLA-C*03:04; TDRD12; ENSG00000173809; TAA
YATLNAEM

SEQ ID NO: 87124 - protein, 8 aa, Homo sapiens
  Table A; Target 87124; HLA-C*05:01; TDRD12; ENSG00000173809; TAA
YATLNAEM

SEQ ID NO: 87125 - protein, 8 aa, Homo sapiens
  Table A; Target 87125; HLA-C*12:03; TDRD12; ENSG00000173809; TAA
YATLNAEM

SEQ ID NO: 87126 - protein, 8 aa, Homo sapiens
  Table A; Target 87126; HLA-C*14:02; TDRD12; ENSG00000173809; TAA
YATLNAEM

SEQ ID NO: 87127 - protein, 8 aa, Homo sapiens
  Table A; Target 87127; HLA-C*16:01; TDRD12; ENSG00000173809; TAA
YATLNAEM

SEQ ID NO: 87128 - protein, 8 aa, Homo sapiens
  Table A; Target 87128; HLA-C*16:02; TDRD12; ENSG00000173809; TAA
YATLNAEM

SEQ ID NO: 87129 - protein, 8 aa, Homo sapiens
  Table A; Target 87129; HLA-C*16:04; TDRD12; ENSG00000173809; TAA
YATLNAEM

SEQ ID NO: 87130 - protein, 11 aa, Homo sapiens
  Table A; Target 87130; HLA-A*01:01; TDRD12; ENSG00000173809; TAA
YATLNAEMNEY

SEQ ID NO: 87131 - protein, 11 aa, Homo sapiens
  Table A; Target 87131; HLA-B*27:02; TDRD12; ENSG00000173809; TAA
YATLNAEMNEY

SEQ ID NO: 87132 - protein, 11 aa, Homo sapiens
  Table A; Target 87132; HLA-B*39:01; TDRD12; ENSG00000173809; TAA
YATLNAEMNEY

SEQ ID NO: 87133 - protein, 11 aa, Homo sapiens
  Table A; Target 87133; HLA-C*16:04; TDRD12; ENSG00000173809; TAA
YATLNAEMNEY

SEQ ID NO: 87134 - protein, 8 aa, Homo sapiens
  Table A; Target 87134; HLA-C*03:03; TDRD12; ENSG00000173809; TAA
YCTKPVTL

SEQ ID NO: 87135 - protein, 8 aa, Homo sapiens
  Table A; Target 87135; HLA-C*03:04; TDRD12; ENSG00000173809; TAA
YCTKPVTL

SEQ ID NO: 87136 - protein, 8 aa, Homo sapiens
  Table A; Target 87136; HLA-C*16:01; TDRD12; ENSG00000173809; TAA
YCTKPVTL

SEQ ID NO: 87137 - protein, 8 aa, Homo sapiens
  Table A; Target 87137; HLA-C*16:02; TDRD12; ENSG00000173809; TAA
YCTKPVTL

SEQ ID NO: 87138 - protein, 8 aa, Homo sapiens
  Table A; Target 87138; HLA-A*30:01; TDRD12; ENSG00000173809; TAA
YEFTAGVL

SEQ ID NO: 87139 - protein, 8 aa, Homo sapiens
  Table A; Target 87139; HLA-B*15:03; TDRD12; ENSG00000173809; TAA
YEFTAGVL

SEQ ID NO: 87140 - protein, 8 aa, Homo sapiens
  Table A; Target 87140; HLA-B*18:01; TDRD12; ENSG00000173809; TAA
YEFTAGVL

SEQ ID NO: 87141 - protein, 8 aa, Homo sapiens
  Table A; Target 87141; HLA-B*37:01; TDRD12; ENSG00000173809; TAA
YEFTAGVL

SEQ ID NO: 87142 - protein, 8 aa, Homo sapiens
  Table A; Target 87142; HLA-B*40:01; TDRD12; ENSG00000173809; TAA
YEFTAGVL

SEQ ID NO: 87143 - protein, 8 aa, Homo sapiens
  Table A; Target 87143; HLA-B*40:02; TDRD12; ENSG00000173809; TAA
YEFTAGVL

SEQ ID NO: 87144 - protein, 8 aa, Homo sapiens
  Table A; Target 87144; HLA-B*49:01; TDRD12; ENSG00000173809; TAA
YEFTAGVL

SEQ ID NO: 87145 - protein, 8 aa, Homo sapiens
  Table A; Target 87145; HLA-C*03:03; TDRD12; ENSG00000173809; TAA
YEFTAGVL

SEQ ID NO: 87146 - protein, 8 aa, Homo sapiens
  Table A; Target 87146; HLA-C*12:03; TDRD12; ENSG00000173809; TAA
YEFTAGVL

SEQ ID NO: 87147 - protein, 10 aa, Homo sapiens
  Table A; Target 87147; HLA-A*30:01; TDRD12; ENSG00000173809; TAA
YEFTAGVLEA

SEQ ID NO: 87148 - protein, 10 aa, Homo sapiens
  Table A; Target 87148; HLA-A*68:02; TDRD12; ENSG00000173809; TAA
YEFTAGVLEA

SEQ ID NO: 87149 - protein, 10 aa, Homo sapiens
  Table A; Target 87149; HLA-B*18:01; TDRD12; ENSG00000173809; TAA
YEFTAGVLEA

SEQ ID NO: 87150 - protein, 10 aa, Homo sapiens
  Table A; Target 87150; HLA-B*40:01; TDRD12; ENSG00000173809; TAA
YEFTAGVLEA

SEQ ID NO: 87151 - protein, 10 aa, Homo sapiens
  Table A; Target 87151; HLA-B*40:02; TDRD12; ENSG00000173809; TAA
YEFTAGVLEA

SEQ ID NO: 87152 - protein, 10 aa, Homo sapiens
  Table A; Target 87152; HLA-B*49:01; TDRD12; ENSG00000173809; TAA
YEFTAGVLEA

SEQ ID NO: 87153 - protein, 10 aa, Homo sapiens
  Table A; Target 87153; HLA-B*54:01; TDRD12; ENSG00000173809; TAA
YEFTAGVLEA

SEQ ID NO: 87154 - protein, 10 aa, Homo sapiens
  Table A; Target 87154; HLA-B*56:01; TDRD12; ENSG00000173809; TAA
YEFTAGVLEA

SEQ ID NO: 87155 - protein, 11 aa, Homo sapiens
  Table A; Target 87155; HLA-B*18:01; TDRD12; ENSG00000173809; TAA
YEFTAGVLEAK

SEQ ID NO: 87156 - protein, 11 aa, Homo sapiens
  Table A; Target 87156; HLA-B*27:02; TDRD12; ENSG00000173809; TAA
YEFTAGVLEAK

SEQ ID NO: 87157 - protein, 11 aa, Homo sapiens
  Table A; Target 87157; HLA-B*49:01; TDRD12; ENSG00000173809; TAA
YEFTAGVLEAK

SEQ ID NO: 87158 - protein, 9 aa, Homo sapiens
  Table A; Target 87158; HLA-A*23:01; TDRD12; ENSG00000173809; TAA
YGLAEKTLF

SEQ ID NO: 87159 - protein, 9 aa, Homo sapiens
  Table A; Target 87159; HLA-A*24:02; TDRD12; ENSG00000173809; TAA
YGLAEKTLF

SEQ ID NO: 87160 - protein, 9 aa, Homo sapiens
  Table A; Target 87160; HLA-C*02:02; TDRD12; ENSG00000173809; TAA
YGLAEKTLF

SEQ ID NO: 87161 - protein, 8 aa, Homo sapiens
  Table A; Target 87161; HLA-B*08:01; TDRD12; ENSG00000173809; TAA
YGNVQQVV

SEQ ID NO: 87162 - protein, 8 aa, Homo sapiens
  Table A; Target 87162; HLA-B*13:02; TDRD12; ENSG00000173809; TAA
YGNVQQVV

SEQ ID NO: 87163 - protein, 8 aa, Homo sapiens
  Table A; Target 87163; HLA-B*40:02; TDRD12; ENSG00000173809; TAA
YGNVQQVV

SEQ ID NO: 87164 - protein, 8 aa, Homo sapiens
  Table A; Target 87164; HLA-B*46:01; TDRD12; ENSG00000173809; TAA
YGNVQQVV

SEQ ID NO: 87165 - protein, 8 aa, Homo sapiens
  Table A; Target 87165; HLA-B*51:01; TDRD12; ENSG00000173809; TAA
YGNVQQVV

SEQ ID NO: 87166 - protein, 8 aa, Homo sapiens
  Table A; Target 87166; HLA-C*03:03; TDRD12; ENSG00000173809; TAA
YGNVQQVV

SEQ ID NO: 87167 - protein, 8 aa, Homo sapiens
  Table A; Target 87167; HLA-C*03:04; TDRD12; ENSG00000173809; TAA
YGNVQQVV

SEQ ID NO: 87168 - protein, 8 aa, Homo sapiens
  Table A; Target 87168; HLA-C*06:02; TDRD12; ENSG00000173809; TAA
YGNVQQVV

SEQ ID NO: 87169 - protein, 8 aa, Homo sapiens
  Table A; Target 87169; HLA-C*07:04; TDRD12; ENSG00000173809; TAA
YGNVQQVV

SEQ ID NO: 87170 - protein, 8 aa, Homo sapiens
  Table A; Target 87170; HLA-C*12:03; TDRD12; ENSG00000173809; TAA
YGNVQQVV

SEQ ID NO: 87171 - protein, 8 aa, Homo sapiens
  Table A; Target 87171; HLA-C*16:02; TDRD12; ENSG00000173809; TAA
YGNVQQVV

SEQ ID NO: 87172 - protein, 8 aa, Homo sapiens
  Table A; Target 87172; HLA-C*16:04; TDRD12; ENSG00000173809; TAA
YGNVQQVV

SEQ ID NO: 87173 - protein, 9 aa, Homo sapiens
  Table A; Target 87173; HLA-B*46:01; TDRD12; ENSG00000173809; TAA
YGNVQQVVH

SEQ ID NO: 87174 - protein, 9 aa, Homo sapiens
  Table A; Target 87174; HLA-C*07:06; TDRD12; ENSG00000173809; TAA
YGNVQQVVH

SEQ ID NO: 87175 - protein, 9 aa, Homo sapiens
  Table A; Target 87175; HLA-A*33:01; TDRD12; ENSG00000173809; TAA
YIHHKIVGK

SEQ ID NO: 87176 - protein, 9 aa, Homo sapiens
  Table A; Target 87176; HLA-B*08:01; TDRD12; ENSG00000173809; TAA
YIHHKIVGK

SEQ ID NO: 87177 - protein, 8 aa, Homo sapiens
  Table A; Target 87177; HLA-A*23:01; TDRD12; ENSG00000173809; TAA
YILNATNY

SEQ ID NO: 87178 - protein, 8 aa, Homo sapiens
  Table A; Target 87178; HLA-A*29:02; TDRD12; ENSG00000173809; TAA
YILNATNY

SEQ ID NO: 87179 - protein, 8 aa, Homo sapiens
  Table A; Target 87179; HLA-A*30:02; TDRD12; ENSG00000173809; TAA
YILNATNY

SEQ ID NO: 87180 - protein, 8 aa, Homo sapiens
  Table A; Target 87180; HLA-A*32:01; TDRD12; ENSG00000173809; TAA
YILNATNY

SEQ ID NO: 87181 - protein, 8 aa, Homo sapiens
  Table A; Target 87181; HLA-B*15:03; TDRD12; ENSG00000173809; TAA
YILNATNY

SEQ ID NO: 87182 - protein, 8 aa, Homo sapiens
  Table A; Target 87182; HLA-B*39:01; TDRD12; ENSG00000173809; TAA
YILNATNY

SEQ ID NO: 87183 - protein, 8 aa, Homo sapiens
  Table A; Target 87183; HLA-B*46:01; TDRD12; ENSG00000173809; TAA
YILNATNY

SEQ ID NO: 87184 - protein, 8 aa, Homo sapiens
  Table A; Target 87184; HLA-B*58:01; TDRD12; ENSG00000173809; TAA
YILNATNY

SEQ ID NO: 87185 - protein, 8 aa, Homo sapiens
  Table A; Target 87185; HLA-C*01:02; TDRD12; ENSG00000173809; TAA
YILNATNY

SEQ ID NO: 87186 - protein, 8 aa, Homo sapiens
  Table A; Target 87186; HLA-C*02:02; TDRD12; ENSG00000173809; TAA
YILNATNY

SEQ ID NO: 87187 - protein, 8 aa, Homo sapiens
  Table A; Target 87187; HLA-C*14:02; TDRD12; ENSG00000173809; TAA
YILNATNY

SEQ ID NO: 87188 - protein, 9 aa, Homo sapiens
  Table A; Target 87188; HLA-A*23:01; TDRD12; ENSG00000173809; TAA
YILNATNYF

SEQ ID NO: 87189 - protein, 9 aa, Homo sapiens
  Table A; Target 87189; HLA-A*24:02; TDRD12; ENSG00000173809; TAA
YILNATNYF

SEQ ID NO: 87190 - protein, 8 aa, Homo sapiens
  Table A; Target 87190; HLA-A*02:01; TDRD12; ENSG00000173809; TAA
YLLPVLTV

SEQ ID NO: 87191 - protein, 8 aa, Homo sapiens
  Table A; Target 87191; HLA-A*02:04; TDRD12; ENSG00000173809; TAA
YLLPVLTV

SEQ ID NO: 87192 - protein, 8 aa, Homo sapiens
  Table A; Target 87192; HLA-A*02:07; TDRD12; ENSG00000173809; TAA
YLLPVLTV

SEQ ID NO: 87193 - protein, 9 aa, Homo sapiens
  Table A; Target 87193; HLA-A*02:01; TDRD12; ENSG00000173809; TAA
YLLPVLTVL

SEQ ID NO: 87194 - protein, 9 aa, Homo sapiens
  Table A; Target 87194; HLA-A*02:03; TDRD12; ENSG00000173809; TAA
YLLPVLTVL

SEQ ID NO: 87195 - protein, 9 aa, Homo sapiens
  Table A; Target 87195; HLA-A*02:04; TDRD12; ENSG00000173809; TAA
YLLPVLTVL

SEQ ID NO: 87196 - protein, 9 aa, Homo sapiens
  Table A; Target 87196; HLA-A*02:07; TDRD12; ENSG00000173809; TAA
YLLPVLTVL

SEQ ID NO: 87197 - protein, 9 aa, Homo sapiens
  Table A; Target 87197; HLA-A*23:01; TDRD12; ENSG00000173809; TAA
YLLPVLTVL

SEQ ID NO: 87198 - protein, 9 aa, Homo sapiens
  Table A; Target 87198; HLA-A*24:02; TDRD12; ENSG00000173809; TAA
YLLPVLTVL

SEQ ID NO: 87199 - protein, 9 aa, Homo sapiens
  Table A; Target 87199; HLA-B*13:02; TDRD12; ENSG00000173809; TAA
YLLPVLTVL

SEQ ID NO: 87200 - protein, 10 aa, Homo sapiens
  Table A; Target 87200; HLA-A*03:01; TDRD12; ENSG00000173809; TAA
YLYVTIKDEK

SEQ ID NO: 87201 - protein, 8 aa, Homo sapiens
  Table A; Target 87201; HLA-B*08:01; TDRD12; ENSG00000173809; TAA
YQKLNSAM

SEQ ID NO: 87202 - protein, 8 aa, Homo sapiens
  Table A; Target 87202; HLA-B*15:01; TDRD12; ENSG00000173809; TAA
YQKLNSAM

SEQ ID NO: 87203 - protein, 8 aa, Homo sapiens
  Table A; Target 87203; HLA-B*15:03; TDRD12; ENSG00000173809; TAA
YQKLNSAM

SEQ ID NO: 87204 - protein, 8 aa, Homo sapiens
  Table A; Target 87204; HLA-B*46:01; TDRD12; ENSG00000173809; TAA
YQKLNSAM

SEQ ID NO: 87205 - protein, 8 aa, Homo sapiens
  Table A; Target 87205; HLA-C*07:04; TDRD12; ENSG00000173809; TAA
YQKLNSAM

SEQ ID NO: 87206 - protein, 8 aa, Homo sapiens
  Table A; Target 87206; HLA-C*03:03; TDRD12; ENSG00000173809; TAA
YSMSSRPL

SEQ ID NO: 87207 - protein, 8 aa, Homo sapiens
  Table A; Target 87207; HLA-C*03:04; TDRD12; ENSG00000173809; TAA
YSMSSRPL

SEQ ID NO: 87208 - protein, 8 aa, Homo sapiens
  Table A; Target 87208; HLA-C*16:01; TDRD12; ENSG00000173809; TAA
YSMSSRPL

SEQ ID NO: 87209 - protein, 8 aa, Homo sapiens
  Table A; Target 87209; HLA-A*31:01; TDRD12; ENSG00000173809; TAA
YSWPPIAR

SEQ ID NO: 87210 - protein, 8 aa, Homo sapiens
  Table A; Target 87210; HLA-C*16:01; TDRD12; ENSG00000173809; TAA
YVTIKDEK

SEQ ID NO: 87211 - protein, 9 aa, Homo sapiens
  Table A; Target 87211; HLA-A*68:02; TDRD12; ENSG00000173809; TAA
YVTIKDEKV

SEQ ID NO: 87212 - protein, 9 aa, Homo sapiens
  Table A; Target 87212; HLA-B*13:02; TDRD12; ENSG00000173809; TAA
YVTIKDEKV

SEQ ID NO: 87213 - protein, 8 aa, Homo sapiens
  Table A; Target 87213; HLA-B*13:02; TFDP3; ENSG00000183434; CTA
AASNIPVV

SEQ ID NO: 87214 - protein, 8 aa, Homo sapiens
  Table A; Target 87214; HLA-C*12:03; TFDP3; ENSG00000183434; CTA
AASNIPVV

SEQ ID NO: 87215 - protein, 8 aa, Homo sapiens
  Table A; Target 87215; HLA-C*16:02; TFDP3; ENSG00000183434; CTA
AASNIPVV

SEQ ID NO: 87216 - protein, 9 aa, Homo sapiens
  Table A; Target 87216; HLA-C*12:03; TFDP3; ENSG00000183434; CTA
AASNIPVVG

SEQ ID NO: 87217 - protein, 10 aa, Homo sapiens
  Table A; Target 87217; HLA-B*40:01; TFDP3; ENSG00000183434; CTA
AEDLKMARNL

SEQ ID NO: 87218 - protein, 10 aa, Homo sapiens
  Table A; Target 87218; HLA-B*44:02; TFDP3; ENSG00000183434; CTA
AEDLKMARNL

SEQ ID NO: 87219 - protein, 10 aa, Homo sapiens
  Table A; Target 87219; HLA-B*44:03; TFDP3; ENSG00000183434; CTA
AEDLKMARNL

SEQ ID NO: 87220 - protein, 8 aa, Homo sapiens
  Table A; Target 87220; HLA-A*31:01; TFDP3; ENSG00000183434; CTA
AFKNLVLR

SEQ ID NO: 87221 - protein, 9 aa, Homo sapiens
  Table A; Target 87221; HLA-B*58:01; TFDP3; ENSG00000183434; CTA
AGSRSNGTW

SEQ ID NO: 87222 - protein, 9 aa, Homo sapiens
  Table A; Target 87222; HLA-B*15:03; TFDP3; ENSG00000183434; CTA
AKYVSLTEA

SEQ ID NO: 87223 - protein, 9 aa, Homo sapiens
  Table A; Target 87223; HLA-A*01:01; TFDP3; ENSG00000183434; CTA
ALEPYVTEM

SEQ ID NO: 87224 - protein, 9 aa, Homo sapiens
  Table A; Target 87224; HLA-A*02:01; TFDP3; ENSG00000183434; CTA
ALEPYVTEM

SEQ ID NO: 87225 - protein, 9 aa, Homo sapiens
  Table A; Target 87225; HLA-A*02:03; TFDP3; ENSG00000183434; CTA
ALEPYVTEM

SEQ ID NO: 87226 - protein, 9 aa, Homo sapiens
  Table A; Target 87226; HLA-A*02:04; TFDP3; ENSG00000183434; CTA
ALEPYVTEM

SEQ ID NO: 87227 - protein, 9 aa, Homo sapiens
  Table A; Target 87227; HLA-A*02:07; TFDP3; ENSG00000183434; CTA
ALEPYVTEM

SEQ ID NO: 87228 - protein, 9 aa, Homo sapiens
  Table A; Target 87228; HLA-A*32:01; TFDP3; ENSG00000183434; CTA
ALEPYVTEM

SEQ ID NO: 87229 - protein, 9 aa, Homo sapiens
  Table A; Target 87229; HLA-B*15:01; TFDP3; ENSG00000183434; CTA
ALEPYVTEM

SEQ ID NO: 87230 - protein, 9 aa, Homo sapiens
  Table A; Target 87230; HLA-B*46:01; TFDP3; ENSG00000183434; CTA
ALEPYVTEM

SEQ ID NO: 87231 - protein, 9 aa, Homo sapiens
  Table A; Target 87231; HLA-B*55:01; TFDP3; ENSG00000183434; CTA
ALEPYVTEM

SEQ ID NO: 87232 - protein, 9 aa, Homo sapiens
  Table A; Target 87232; HLA-C*01:02; TFDP3; ENSG00000183434; CTA
ALEPYVTEM

SEQ ID NO: 87233 - protein, 9 aa, Homo sapiens
  Table A; Target 87233; HLA-C*02:02; TFDP3; ENSG00000183434; CTA
ALEPYVTEM

SEQ ID NO: 87234 - protein, 9 aa, Homo sapiens
  Table A; Target 87234; HLA-C*05:01; TFDP3; ENSG00000183434; CTA
ALEPYVTEM

SEQ ID NO: 87235 - protein, 9 aa, Homo sapiens
  Table A; Target 87235; HLA-C*07:04; TFDP3; ENSG00000183434; CTA
ALEPYVTEM

SEQ ID NO: 87236 - protein, 9 aa, Homo sapiens
  Table A; Target 87236; HLA-C*14:02; TFDP3; ENSG00000183434; CTA
ALEPYVTEM

SEQ ID NO: 87237 - protein, 9 aa, Homo sapiens
  Table A; Target 87237; HLA-C*16:02; TFDP3; ENSG00000183434; CTA
ALEPYVTEM

SEQ ID NO: 87238 - protein, 9 aa, Homo sapiens
  Table A; Target 87238; HLA-A*03:01; TFDP3; ENSG00000183434; CTA
AMNIISREK

SEQ ID NO: 87239 - protein, 9 aa, Homo sapiens
  Table A; Target 87239; HLA-A*03:02; TFDP3; ENSG00000183434; CTA
AMNIISREK

SEQ ID NO: 87240 - protein, 9 aa, Homo sapiens
  Table A; Target 87240; HLA-A*11:01; TFDP3; ENSG00000183434; CTA
AMNIISREK

SEQ ID NO: 87241 - protein, 9 aa, Homo sapiens
  Table A; Target 87241; HLA-A*31:01; TFDP3; ENSG00000183434; CTA
AMNIISREK

SEQ ID NO: 87242 - protein, 9 aa, Homo sapiens
  Table A; Target 87242; HLA-A*26:01; TFDP3; ENSG00000183434; CTA
AQGTFGGVF

SEQ ID NO: 87243 - protein, 9 aa, Homo sapiens
  Table A; Target 87243; HLA-A*30:02; TFDP3; ENSG00000183434; CTA
AQGTFGGVF

SEQ ID NO: 87244 - protein, 9 aa, Homo sapiens
  Table A; Target 87244; HLA-A*32:01; TFDP3; ENSG00000183434; CTA
AQGTFGGVF

SEQ ID NO: 87245 - protein, 9 aa, Homo sapiens
  Table A; Target 87245; HLA-B*13:02; TFDP3; ENSG00000183434; CTA
AQGTFGGVF

SEQ ID NO: 87246 - protein, 9 aa, Homo sapiens
  Table A; Target 87246; HLA-B*15:03; TFDP3; ENSG00000183434; CTA
AQGTFGGVF

SEQ ID NO: 87247 - protein, 9 aa, Homo sapiens
  Table A; Target 87247; HLA-B*27:02; TFDP3; ENSG00000183434; CTA
AQGTFGGVF

SEQ ID NO: 87248 - protein, 9 aa, Homo sapiens
  Table A; Target 87248; HLA-B*27:05; TFDP3; ENSG00000183434; CTA
AQGTFGGVF

SEQ ID NO: 87249 - protein, 9 aa, Homo sapiens
  Table A; Target 87249; HLA-B*37:01; TFDP3; ENSG00000183434; CTA
AQGTFGGVF

SEQ ID NO: 87250 - protein, 9 aa, Homo sapiens
  Table A; Target 87250; HLA-B*38:01; TFDP3; ENSG00000183434; CTA
AQGTFGGVF

SEQ ID NO: 87251 - protein, 9 aa, Homo sapiens
  Table A; Target 87251; HLA-B*39:01; TFDP3; ENSG00000183434; CTA
AQGTFGGVF

SEQ ID NO: 87252 - protein, 9 aa, Homo sapiens
  Table A; Target 87252; HLA-B*44:02; TFDP3; ENSG00000183434; CTA
AQGTFGGVF

SEQ ID NO: 87253 - protein, 9 aa, Homo sapiens
  Table A; Target 87253; HLA-B*44:03; TFDP3; ENSG00000183434; CTA
AQGTFGGVF

SEQ ID NO: 87254 - protein, 9 aa, Homo sapiens
  Table A; Target 87254; HLA-B*46:01; TFDP3; ENSG00000183434; CTA
AQGTFGGVF

SEQ ID NO: 87255 - protein, 9 aa, Homo sapiens
  Table A; Target 87255; HLA-C*02:02; TFDP3; ENSG00000183434; CTA
AQGTFGGVF

SEQ ID NO: 87256 - protein, 9 aa, Homo sapiens
  Table A; Target 87256; HLA-C*04:01; TFDP3; ENSG00000183434; CTA
AQGTFGGVF

SEQ ID NO: 87257 - protein, 9 aa, Homo sapiens
  Table A; Target 87257; HLA-C*07:04; TFDP3; ENSG00000183434; CTA
AQGTFGGVF

SEQ ID NO: 87258 - protein, 9 aa, Homo sapiens
  Table A; Target 87258; HLA-C*12:03; TFDP3; ENSG00000183434; CTA
AQGTFGGVF

SEQ ID NO: 87259 - protein, 9 aa, Homo sapiens
  Table A; Target 87259; HLA-C*16:04; TFDP3; ENSG00000183434; CTA
AQGTFGGVF

SEQ ID NO: 87260 - protein, 9 aa, Homo sapiens
  Table A; Target 87260; HLA-B*13:02; TFDP3; ENSG00000183434; CTA
AQNCQNLRV

SEQ ID NO: 87261 - protein, 9 aa, Homo sapiens
  Table A; Target 87261; HLA-B*27:05; TFDP3; ENSG00000183434; CTA
ARNLVPKAL

SEQ ID NO: 87262 - protein, 9 aa, Homo sapiens
  Table A; Target 87262; HLA-C*16:04; TFDP3; ENSG00000183434; CTA
ARNLVPKAL

SEQ ID NO: 87263 - protein, 9 aa, Homo sapiens
  Table A; Target 87263; HLA-A*01:01; TFDP3; ENSG00000183434; CTA
ASDLTNIAI

SEQ ID NO: 87264 - protein, 9 aa, Homo sapiens
  Table A; Target 87264; HLA-B*38:01; TFDP3; ENSG00000183434; CTA
ASDLTNIAI

SEQ ID NO: 87265 - protein, 9 aa, Homo sapiens
  Table A; Target 87265; HLA-B*40:01; TFDP3; ENSG00000183434; CTA
ASDLTNIAI

SEQ ID NO: 87266 - protein, 9 aa, Homo sapiens
  Table A; Target 87266; HLA-B*58:01; TFDP3; ENSG00000183434; CTA
ASDLTNIAI

SEQ ID NO: 87267 - protein, 9 aa, Homo sapiens
  Table A; Target 87267; HLA-C*05:01; TFDP3; ENSG00000183434; CTA
ASDLTNIAI

SEQ ID NO: 87268 - protein, 11 aa, Homo sapiens
  Table A; Target 87268; HLA-A*01:01; TFDP3; ENSG00000183434; CTA
ASDLTNIAIGM

SEQ ID NO: 87269 - protein, 8 aa, Homo sapiens
  Table A; Target 87269; HLA-C*01:02; TFDP3; ENSG00000183434; CTA
ASPNESAY

SEQ ID NO: 87270 - protein, 11 aa, Homo sapiens
  Table A; Target 87270; HLA-A*11:01; TFDP3; ENSG00000183434; CTA
ASPNESAYDVK

SEQ ID NO: 87271 - protein, 8 aa, Homo sapiens
  Table A; Target 87271; HLA-A*30:02; TFDP3; ENSG00000183434; CTA
ASQNQHSY

SEQ ID NO: 87272 - protein, 8 aa, Homo sapiens
  Table A; Target 87272; HLA-A*32:01; TFDP3; ENSG00000183434; CTA
ASQNQHSY

SEQ ID NO: 87273 - protein, 8 aa, Homo sapiens
  Table A; Target 87273; HLA-B*39:01; TFDP3; ENSG00000183434; CTA
ASQNQHSY

SEQ ID NO: 87274 - protein, 8 aa, Homo sapiens
  Table A; Target 87274; HLA-B*58:01; TFDP3; ENSG00000183434; CTA
ASQNQHSY

SEQ ID NO: 87275 - protein, 8 aa, Homo sapiens
  Table A; Target 87275; HLA-C*01:02; TFDP3; ENSG00000183434; CTA
ASQNQHSY

SEQ ID NO: 87276 - protein, 8 aa, Homo sapiens
  Table A; Target 87276; HLA-C*14:02; TFDP3; ENSG00000183434; CTA
ASQNQHSY

SEQ ID NO: 87277 - protein, 8 aa, Homo sapiens
  Table A; Target 87277; HLA-C*16:01; TFDP3; ENSG00000183434; CTA
ASQNQHSY

SEQ ID NO: 87278 - protein, 8 aa, Homo sapiens
  Table A; Target 87278; HLA-C*16:02; TFDP3; ENSG00000183434; CTA
ASQNQHSY

SEQ ID NO: 87279 - protein, 9 aa, Homo sapiens
  Table A; Target 87279; HLA-A*01:01; TFDP3; ENSG00000183434; CTA
ATSSGGSQY

SEQ ID NO: 87280 - protein, 9 aa, Homo sapiens
  Table A; Target 87280; HLA-A*11:01; TFDP3; ENSG00000183434; CTA
ATSSGGSQY

SEQ ID NO: 87281 - protein, 9 aa, Homo sapiens
  Table A; Target 87281; HLA-A*25:01; TFDP3; ENSG00000183434; CTA
ATSSGGSQY

SEQ ID NO: 87282 - protein, 9 aa, Homo sapiens
  Table A; Target 87282; HLA-A*26:01; TFDP3; ENSG00000183434; CTA
ATSSGGSQY

SEQ ID NO: 87283 - protein, 9 aa, Homo sapiens
  Table A; Target 87283; HLA-A*29:02; TFDP3; ENSG00000183434; CTA
ATSSGGSQY

SEQ ID NO: 87284 - protein, 9 aa, Homo sapiens
  Table A; Target 87284; HLA-A*30:02; TFDP3; ENSG00000183434; CTA
ATSSGGSQY

SEQ ID NO: 87285 - protein, 9 aa, Homo sapiens
  Table A; Target 87285; HLA-A*32:01; TFDP3; ENSG00000183434; CTA
ATSSGGSQY

SEQ ID NO: 87286 - protein, 9 aa, Homo sapiens
  Table A; Target 87286; HLA-B*15:01; TFDP3; ENSG00000183434; CTA
ATSSGGSQY

SEQ ID NO: 87287 - protein, 9 aa, Homo sapiens
  Table A; Target 87287; HLA-B*15:03; TFDP3; ENSG00000183434; CTA
ATSSGGSQY

SEQ ID NO: 87288 - protein, 9 aa, Homo sapiens
  Table A; Target 87288; HLA-B*39:01; TFDP3; ENSG00000183434; CTA
ATSSGGSQY

SEQ ID NO: 87289 - protein, 9 aa, Homo sapiens
  Table A; Target 87289; HLA-B*46:01; TFDP3; ENSG00000183434; CTA
ATSSGGSQY

SEQ ID NO: 87290 - protein, 9 aa, Homo sapiens
  Table A; Target 87290; HLA-B*58:01; TFDP3; ENSG00000183434; CTA
ATSSGGSQY

SEQ ID NO: 87291 - protein, 9 aa, Homo sapiens
  Table A; Target 87291; HLA-C*01:02; TFDP3; ENSG00000183434; CTA
ATSSGGSQY

SEQ ID NO: 87292 - protein, 9 aa, Homo sapiens
  Table A; Target 87292; HLA-C*02:02; TFDP3; ENSG00000183434; CTA
ATSSGGSQY

SEQ ID NO: 87293 - protein, 9 aa, Homo sapiens
  Table A; Target 87293; HLA-C*07:04; TFDP3; ENSG00000183434; CTA
ATSSGGSQY

SEQ ID NO: 87294 - protein, 9 aa, Homo sapiens
  Table A; Target 87294; HLA-C*14:02; TFDP3; ENSG00000183434; CTA
ATSSGGSQY

SEQ ID NO: 87295 - protein, 9 aa, Homo sapiens
  Table A; Target 87295; HLA-C*16:01; TFDP3; ENSG00000183434; CTA
ATSSGGSQY

SEQ ID NO: 87296 - protein, 9 aa, Homo sapiens
  Table A; Target 87296; HLA-C*16:02; TFDP3; ENSG00000183434; CTA
ATSSGGSQY

SEQ ID NO: 87297 - protein, 9 aa, Homo sapiens
  Table A; Target 87297; HLA-C*16:04; TFDP3; ENSG00000183434; CTA
ATSSGGSQY

SEQ ID NO: 87298 - protein, 9 aa, Homo sapiens
  Table A; Target 87298; HLA-A*31:01; TFDP3; ENSG00000183434; CTA
AYDVKNIKR

SEQ ID NO: 87299 - protein, 9 aa, Homo sapiens
  Table A; Target 87299; HLA-A*33:03; TFDP3; ENSG00000183434; CTA
AYDVKNIKR

SEQ ID NO: 87300 - protein, 9 aa, Homo sapiens
  Table A; Target 87300; HLA-C*04:01; TFDP3; ENSG00000183434; CTA
AYDVKNIKR

SEQ ID NO: 87301 - protein, 10 aa, Homo sapiens
  Table A; Target 87301; HLA-A*01:01; TFDP3; ENSG00000183434; CTA
CSISDDKSEY

SEQ ID NO: 87302 - protein, 10 aa, Homo sapiens
  Table A; Target 87302; HLA-A*30:02; TFDP3; ENSG00000183434; CTA
CSISDDKSEY

SEQ ID NO: 87303 - protein, 10 aa, Homo sapiens
  Table A; Target 87303; HLA-B*15:01; TFDP3; ENSG00000183434; CTA
CSISDDKSEY

SEQ ID NO: 87304 - protein, 8 aa, Homo sapiens
  Table A; Target 87304; HLA-B*51:01; TFDP3; ENSG00000183434; CTA
DALNVLMA

SEQ ID NO: 87305 - protein, 8 aa, Homo sapiens
  Table A; Target 87305; HLA-B*54:01; TFDP3; ENSG00000183434; CTA
DALNVLMA

SEQ ID NO: 87306 - protein, 9 aa, Homo sapiens
  Table A; Target 87306; HLA-A*23:01; TFDP3; ENSG00000183434; CTA
DALNVLMAM

SEQ ID NO: 87307 - protein, 9 aa, Homo sapiens
  Table A; Target 87307; HLA-A*25:01; TFDP3; ENSG00000183434; CTA
DALNVLMAM

SEQ ID NO: 87308 - protein, 9 aa, Homo sapiens
  Table A; Target 87308; HLA-A*26:01; TFDP3; ENSG00000183434; CTA
DALNVLMAM

SEQ ID NO: 87309 - protein, 9 aa, Homo sapiens
  Table A; Target 87309; HLA-A*33:01; TFDP3; ENSG00000183434; CTA
DALNVLMAM

SEQ ID NO: 87310 - protein, 9 aa, Homo sapiens
  Table A; Target 87310; HLA-A*33:03; TFDP3; ENSG00000183434; CTA
DALNVLMAM

SEQ ID NO: 87311 - protein, 9 aa, Homo sapiens
  Table A; Target 87311; HLA-B*18:01; TFDP3; ENSG00000183434; CTA
DALNVLMAM

SEQ ID NO: 87312 - protein, 9 aa, Homo sapiens
  Table A; Target 87312; HLA-B*35:01; TFDP3; ENSG00000183434; CTA
DALNVLMAM

SEQ ID NO: 87313 - protein, 9 aa, Homo sapiens
  Table A; Target 87313; HLA-B*35:03; TFDP3; ENSG00000183434; CTA
DALNVLMAM

SEQ ID NO: 87314 - protein, 9 aa, Homo sapiens
  Table A; Target 87314; HLA-B*46:01; TFDP3; ENSG00000183434; CTA
DALNVLMAM

SEQ ID NO: 87315 - protein, 9 aa, Homo sapiens
  Table A; Target 87315; HLA-B*51:01; TFDP3; ENSG00000183434; CTA
DALNVLMAM

SEQ ID NO: 87316 - protein, 9 aa, Homo sapiens
  Table A; Target 87316; HLA-C*03:03; TFDP3; ENSG00000183434; CTA
DALNVLMAM

SEQ ID NO: 87317 - protein, 9 aa, Homo sapiens
  Table A; Target 87317; HLA-C*07:06; TFDP3; ENSG00000183434; CTA
DALNVLMAM

SEQ ID NO: 87318 - protein, 9 aa, Homo sapiens
  Table A; Target 87318; HLA-A*33:01; TFDP3; ENSG00000183434; CTA
DDKSEYLFK

SEQ ID NO: 87319 - protein, 8 aa, Homo sapiens
  Table A; Target 87319; HLA-B*18:01; TFDP3; ENSG00000183434; CTA
DDTEVLMW

SEQ ID NO: 87320 - protein, 9 aa, Homo sapiens
  Table A; Target 87320; HLA-B*18:01; TFDP3; ENSG00000183434; CTA
DENQTSRPV

SEQ ID NO: 87321 - protein, 10 aa, Homo sapiens
  Table A; Target 87321; HLA-B*18:01; TFDP3; ENSG00000183434; CTA
DENQTSRPVA

SEQ ID NO: 87322 - protein, 11 aa, Homo sapiens
  Table A; Target 87322; HLA-A*30:01; TFDP3; ENSG00000183434; CTA
DENQTSRPVAV

SEQ ID NO: 87323 - protein, 11 aa, Homo sapiens
  Table A; Target 87323; HLA-B*18:01; TFDP3; ENSG00000183434; CTA
DENQTSRPVAV

SEQ ID NO: 87324 - protein, 8 aa, Homo sapiens
  Table A; Target 87324; HLA-B*08:01; TFDP3; ENSG00000183434; CTA
DLKMARNL

SEQ ID NO: 87325 - protein, 11 aa, Homo sapiens
  Table A; Target 87325; HLA-A*33:01; TFDP3; ENSG00000183434; CTA
DLKMARNLVPK

SEQ ID NO: 87326 - protein, 9 aa, Homo sapiens
  Table A; Target 87326; HLA-A*26:01; TFDP3; ENSG00000183434; CTA
DLTNIAIGM

SEQ ID NO: 87327 - protein, 9 aa, Homo sapiens
  Table A; Target 87327; HLA-A*68:01; TFDP3; ENSG00000183434; CTA
DLTNIAIGM

SEQ ID NO: 87328 - protein, 9 aa, Homo sapiens
  Table A; Target 87328; HLA-A*68:02; TFDP3; ENSG00000183434; CTA
DLTNIAIGM

SEQ ID NO: 87329 - protein, 9 aa, Homo sapiens
  Table A; Target 87329; HLA-C*07:04; TFDP3; ENSG00000183434; CTA
DLTNIAIGM

SEQ ID NO: 87330 - protein, 8 aa, Homo sapiens
  Table A; Target 87330; HLA-B*08:01; TFDP3; ENSG00000183434; CTA
DQQVVIGM

SEQ ID NO: 87331 - protein, 8 aa, Homo sapiens
  Table A; Target 87331; HLA-B*18:01; TFDP3; ENSG00000183434; CTA
DQQVVIGM

SEQ ID NO: 87332 - protein, 8 aa, Homo sapiens
  Table A; Target 87332; HLA-A*33:01; TFDP3; ENSG00000183434; CTA
DVKNIKRR

SEQ ID NO: 87333 - protein, 8 aa, Homo sapiens
  Table A; Target 87333; HLA-B*51:01; TFDP3; ENSG00000183434; CTA
EANEELKV

SEQ ID NO: 87334 - protein, 9 aa, Homo sapiens
  Table A; Target 87334; HLA-A*25:01; TFDP3; ENSG00000183434; CTA
EANEELKVL

SEQ ID NO: 87335 - protein, 9 aa, Homo sapiens
  Table A; Target 87335; HLA-A*33:01; TFDP3; ENSG00000183434; CTA
EANEELKVL

SEQ ID NO: 87336 - protein, 9 aa, Homo sapiens
  Table A; Target 87336; HLA-A*33:03; TFDP3; ENSG00000183434; CTA
EANEELKVL

SEQ ID NO: 87337 - protein, 9 aa, Homo sapiens
  Table A; Target 87337; HLA-B*35:03; TFDP3; ENSG00000183434; CTA
EANEELKVL

SEQ ID NO: 87338 - protein, 9 aa, Homo sapiens
  Table A; Target 87338; HLA-C*12:03; TFDP3; ENSG00000183434; CTA
EANEELKVL

SEQ ID NO: 87339 - protein, 10 aa, Homo sapiens
  Table A; Target 87339; HLA-A*26:01; TFDP3; ENSG00000183434; CTA
EANEELKVLM

SEQ ID NO: 87340 - protein, 10 aa, Homo sapiens
  Table A; Target 87340; HLA-A*33:03; TFDP3; ENSG00000183434; CTA
EANEELKVLM

SEQ ID NO: 87341 - protein, 10 aa, Homo sapiens
  Table A; Target 87341; HLA-C*07:06; TFDP3; ENSG00000183434; CTA
EANEELKVLM

SEQ ID NO: 87342 - protein, 9 aa, Homo sapiens
  Table A; Target 87342; HLA-B*40:01; TFDP3; ENSG00000183434; CTA
EEQVSQRPL

SEQ ID NO: 87343 - protein, 9 aa, Homo sapiens
  Table A; Target 87343; HLA-B*44:02; TFDP3; ENSG00000183434; CTA
EEQVSQRPL

SEQ ID NO: 87344 - protein, 9 aa, Homo sapiens
  Table A; Target 87344; HLA-B*44:03; TFDP3; ENSG00000183434; CTA
EEQVSQRPL

SEQ ID NO: 87345 - protein, 9 aa, Homo sapiens
  Table A; Target 87345; HLA-A*25:01; TFDP3; ENSG00000183434; CTA
EIHDDTEVL

SEQ ID NO: 87346 - protein, 9 aa, Homo sapiens
  Table A; Target 87346; HLA-B*35:03; TFDP3; ENSG00000183434; CTA
EIHDDTEVL

SEQ ID NO: 87347 - protein, 11 aa, Homo sapiens
  Table A; Target 87347; HLA-A*25:01; TFDP3; ENSG00000183434; CTA
EIHDDTEVLMW

SEQ ID NO: 87348 - protein, 10 aa, Homo sapiens
  Table A; Target 87348; HLA-A*68:02; TFDP3; ENSG00000183434; CTA
ELQQLILQQI

SEQ ID NO: 87349 - protein, 9 aa, Homo sapiens
  Table A; Target 87349; HLA-B*08:01; TFDP3; ENSG00000183434; CTA
ELVAKFRAA

SEQ ID NO: 87350 - protein, 10 aa, Homo sapiens
  Table A; Target 87350; HLA-A*26:01; TFDP3; ENSG00000183434; CTA
EMAQGTFGGV

SEQ ID NO: 87351 - protein, 11 aa, Homo sapiens
  Table A; Target 87351; HLA-A*25:01; TFDP3; ENSG00000183434; CTA
EMAQGTFGGVF

SEQ ID NO: 87352 - protein, 11 aa, Homo sapiens
  Table A; Target 87352; HLA-A*26:01; TFDP3; ENSG00000183434; CTA
EMAQGTFGGVF

SEQ ID NO: 87353 - protein, 11 aa, Homo sapiens
  Table A; Target 87353; HLA-A*33:01; TFDP3; ENSG00000183434; CTA
EMAQGTFGGVF

SEQ ID NO: 87354 - protein, 8 aa, Homo sapiens
  Table A; Target 87354; HLA-B*51:01; TFDP3; ENSG00000183434; CTA
EPYVTEMA

SEQ ID NO: 87355 - protein, 8 aa, Homo sapiens
  Table A; Target 87355; HLA-B*54:01; TFDP3; ENSG00000183434; CTA
EPYVTEMA

SEQ ID NO: 87356 - protein, 8 aa, Homo sapiens
  Table A; Target 87356; HLA-B*56:01; TFDP3; ENSG00000183434; CTA
EPYVTEMA

SEQ ID NO: 87357 - protein, 9 aa, Homo sapiens
  Table A; Target 87357; HLA-A*68:02; TFDP3; ENSG00000183434; CTA
ESAYDVKNI

SEQ ID NO: 87358 - protein, 10 aa, Homo sapiens
  Table A; Target 87358; HLA-A*68:01; TFDP3; ENSG00000183434; CTA
ESAYDVKNIK

SEQ ID NO: 87359 - protein, 10 aa, Homo sapiens
  Table A; Target 87359; HLA-C*07:06; TFDP3; ENSG00000183434; CTA
ESAYDVKNIK

SEQ ID NO: 87360 - protein, 11 aa, Homo sapiens
  Table A; Target 87360; HLA-A*33:03; TFDP3; ENSG00000183434; CTA
ESAYDVKNIKR

SEQ ID NO: 87361 - protein, 11 aa, Homo sapiens
  Table A; Target 87361; HLA-A*68:01; TFDP3; ENSG00000183434; CTA
ESAYDVKNIKR

SEQ ID NO: 87362 - protein, 9 aa, Homo sapiens
  Table A; Target 87362; HLA-A*03:02; TFDP3; ENSG00000183434; CTA
EVVGELVAK

SEQ ID NO: 87363 - protein, 9 aa, Homo sapiens
  Table A; Target 87363; HLA-A*11:01; TFDP3; ENSG00000183434; CTA
EVVGELVAK

SEQ ID NO: 87364 - protein, 9 aa, Homo sapiens
  Table A; Target 87364; HLA-A*25:01; TFDP3; ENSG00000183434; CTA
EVVGELVAK

SEQ ID NO: 87365 - protein, 9 aa, Homo sapiens
  Table A; Target 87365; HLA-A*26:01; TFDP3; ENSG00000183434; CTA
EVVGELVAK

SEQ ID NO: 87366 - protein, 9 aa, Homo sapiens
  Table A; Target 87366; HLA-A*33:01; TFDP3; ENSG00000183434; CTA
EVVGELVAK

SEQ ID NO: 87367 - protein, 9 aa, Homo sapiens
  Table A; Target 87367; HLA-A*33:03; TFDP3; ENSG00000183434; CTA
EVVGELVAK

SEQ ID NO: 87368 - protein, 9 aa, Homo sapiens
  Table A; Target 87368; HLA-A*68:02; TFDP3; ENSG00000183434; CTA
EVVGELVAK

SEQ ID NO: 87369 - protein, 9 aa, Homo sapiens
  Table A; Target 87369; HLA-C*07:06; TFDP3; ENSG00000183434; CTA
EVVGELVAK

SEQ ID NO: 87370 - protein, 10 aa, Homo sapiens
  Table A; Target 87370; HLA-A*25:01; TFDP3; ENSG00000183434; CTA
EVVGELVAKF

SEQ ID NO: 87371 - protein, 10 aa, Homo sapiens
  Table A; Target 87371; HLA-A*29:02; TFDP3; ENSG00000183434; CTA
EVVGELVAKF

SEQ ID NO: 87372 - protein, 10 aa, Homo sapiens
  Table A; Target 87372; HLA-A*33:01; TFDP3; ENSG00000183434; CTA
EVVGELVAKF

SEQ ID NO: 87373 - protein, 10 aa, Homo sapiens
  Table A; Target 87373; HLA-A*33:03; TFDP3; ENSG00000183434; CTA
EVVGELVAKF

SEQ ID NO: 87374 - protein, 10 aa, Homo sapiens
  Table A; Target 87374; HLA-A*68:02; TFDP3; ENSG00000183434; CTA
EVVGELVAKF

SEQ ID NO: 87375 - protein, 10 aa, Homo sapiens
  Table A; Target 87375; HLA-B*35:01; TFDP3; ENSG00000183434; CTA
EVVGELVAKF

SEQ ID NO: 87376 - protein, 10 aa, Homo sapiens
  Table A; Target 87376; HLA-B*44:02; TFDP3; ENSG00000183434; CTA
EVVGELVAKF

SEQ ID NO: 87377 - protein, 10 aa, Homo sapiens
  Table A; Target 87377; HLA-B*44:03; TFDP3; ENSG00000183434; CTA
EVVGELVAKF

SEQ ID NO: 87378 - protein, 10 aa, Homo sapiens
  Table A; Target 87378; HLA-B*57:01; TFDP3; ENSG00000183434; CTA
EVVGELVAKF

SEQ ID NO: 87379 - protein, 10 aa, Homo sapiens
  Table A; Target 87379; HLA-C*07:06; TFDP3; ENSG00000183434; CTA
EVVGELVAKF

SEQ ID NO: 87380 - protein, 11 aa, Homo sapiens
  Table A; Target 87380; HLA-A*33:01; TFDP3; ENSG00000183434; CTA
EVVGELVAKFR

SEQ ID NO: 87381 - protein, 11 aa, Homo sapiens
  Table A; Target 87381; HLA-A*33:03; TFDP3; ENSG00000183434; CTA
EVVGELVAKFR

SEQ ID NO: 87382 - protein, 11 aa, Homo sapiens
  Table A; Target 87382; HLA-A*68:01; TFDP3; ENSG00000183434; CTA
EVVGELVAKFR

SEQ ID NO: 87383 - protein, 11 aa, Homo sapiens
  Table A; Target 87383; HLA-C*07:06; TFDP3; ENSG00000183434; CTA
EVVGELVAKFR

SEQ ID NO: 87384 - protein, 10 aa, Homo sapiens
  Table A; Target 87384; HLA-A*24:02; TFDP3; ENSG00000183434; CTA
EYLFKFNSSF

SEQ ID NO: 87385 - protein, 9 aa, Homo sapiens
  Table A; Target 87385; HLA-A*01:01; TFDP3; ENSG00000183434; CTA
FASQNQHSY

SEQ ID NO: 87386 - protein, 9 aa, Homo sapiens
  Table A; Target 87386; HLA-A*25:01; TFDP3; ENSG00000183434; CTA
FASQNQHSY

SEQ ID NO: 87387 - protein, 9 aa, Homo sapiens
  Table A; Target 87387; HLA-A*26:01; TFDP3; ENSG00000183434; CTA
FASQNQHSY

SEQ ID NO: 87388 - protein, 9 aa, Homo sapiens
  Table A; Target 87388; HLA-A*29:02; TFDP3; ENSG00000183434; CTA
FASQNQHSY

SEQ ID NO: 87389 - protein, 9 aa, Homo sapiens
  Table A; Target 87389; HLA-A*30:02; TFDP3; ENSG00000183434; CTA
FASQNQHSY

SEQ ID NO: 87390 - protein, 9 aa, Homo sapiens
  Table A; Target 87390; HLA-A*32:01; TFDP3; ENSG00000183434; CTA
FASQNQHSY

SEQ ID NO: 87391 - protein, 9 aa, Homo sapiens
  Table A; Target 87391; HLA-B*15:01; TFDP3; ENSG00000183434; CTA
FASQNQHSY

SEQ ID NO: 87392 - protein, 9 aa, Homo sapiens
  Table A; Target 87392; HLA-B*15:03; TFDP3; ENSG00000183434; CTA
FASQNQHSY

SEQ ID NO: 87393 - protein, 9 aa, Homo sapiens
  Table A; Target 87393; HLA-B*18:01; TFDP3; ENSG00000183434; CTA
FASQNQHSY

SEQ ID NO: 87394 - protein, 9 aa, Homo sapiens
  Table A; Target 87394; HLA-B*27:05; TFDP3; ENSG00000183434; CTA
FASQNQHSY

SEQ ID NO: 87395 - protein, 9 aa, Homo sapiens
  Table A; Target 87395; HLA-B*35:01; TFDP3; ENSG00000183434; CTA
FASQNQHSY

SEQ ID NO: 87396 - protein, 9 aa, Homo sapiens
  Table A; Target 87396; HLA-B*39:01; TFDP3; ENSG00000183434; CTA
FASQNQHSY

SEQ ID NO: 87397 - protein, 9 aa, Homo sapiens
  Table A; Target 87397; HLA-B*44:03; TFDP3; ENSG00000183434; CTA
FASQNQHSY

SEQ ID NO: 87398 - protein, 9 aa, Homo sapiens
  Table A; Target 87398; HLA-B*46:01; TFDP3; ENSG00000183434; CTA
FASQNQHSY

SEQ ID NO: 87399 - protein, 9 aa, Homo sapiens
  Table A; Target 87399; HLA-B*54:01; TFDP3; ENSG00000183434; CTA
FASQNQHSY

SEQ ID NO: 87400 - protein, 9 aa, Homo sapiens
  Table A; Target 87400; HLA-B*55:01; TFDP3; ENSG00000183434; CTA
FASQNQHSY

SEQ ID NO: 87401 - protein, 9 aa, Homo sapiens
  Table A; Target 87401; HLA-B*57:01; TFDP3; ENSG00000183434; CTA
FASQNQHSY

SEQ ID NO: 87402 - protein, 9 aa, Homo sapiens
  Table A; Target 87402; HLA-B*58:01; TFDP3; ENSG00000183434; CTA
FASQNQHSY

SEQ ID NO: 87403 - protein, 9 aa, Homo sapiens
  Table A; Target 87403; HLA-C*01:02; TFDP3; ENSG00000183434; CTA
FASQNQHSY

SEQ ID NO: 87404 - protein, 9 aa, Homo sapiens
  Table A; Target 87404; HLA-C*02:02; TFDP3; ENSG00000183434; CTA
FASQNQHSY

SEQ ID NO: 87405 - protein, 9 aa, Homo sapiens
  Table A; Target 87405; HLA-C*03:03; TFDP3; ENSG00000183434; CTA
FASQNQHSY

SEQ ID NO: 87406 - protein, 9 aa, Homo sapiens
  Table A; Target 87406; HLA-C*03:04; TFDP3; ENSG00000183434; CTA
FASQNQHSY

SEQ ID NO: 87407 - protein, 9 aa, Homo sapiens
  Table A; Target 87407; HLA-C*07:04; TFDP3; ENSG00000183434; CTA
FASQNQHSY

SEQ ID NO: 87408 - protein, 9 aa, Homo sapiens
  Table A; Target 87408; HLA-C*07:06; TFDP3; ENSG00000183434; CTA
FASQNQHSY

SEQ ID NO: 87409 - protein, 9 aa, Homo sapiens
  Table A; Target 87409; HLA-C*12:03; TFDP3; ENSG00000183434; CTA
FASQNQHSY

SEQ ID NO: 87410 - protein, 9 aa, Homo sapiens
  Table A; Target 87410; HLA-C*14:02; TFDP3; ENSG00000183434; CTA
FASQNQHSY

SEQ ID NO: 87411 - protein, 9 aa, Homo sapiens
  Table A; Target 87411; HLA-C*16:02; TFDP3; ENSG00000183434; CTA
FASQNQHSY

SEQ ID NO: 87412 - protein, 9 aa, Homo sapiens
  Table A; Target 87412; HLA-C*16:04; TFDP3; ENSG00000183434; CTA
FASQNQHSY

SEQ ID NO: 87413 - protein, 9 aa, Homo sapiens
  Table A; Target 87413; HLA-A*30:01; TFDP3; ENSG00000183434; CTA
FEIHDDTEV

SEQ ID NO: 87414 - protein, 9 aa, Homo sapiens
  Table A; Target 87414; HLA-B*40:01; TFDP3; ENSG00000183434; CTA
FEIHDDTEV

SEQ ID NO: 87415 - protein, 9 aa, Homo sapiens
  Table A; Target 87415; HLA-B*40:02; TFDP3; ENSG00000183434; CTA
FEIHDDTEV

SEQ ID NO: 87416 - protein, 9 aa, Homo sapiens
  Table A; Target 87416; HLA-B*49:01; TFDP3; ENSG00000183434; CTA
FEIHDDTEV

SEQ ID NO: 87417 - protein, 10 aa, Homo sapiens
  Table A; Target 87417; HLA-A*30:01; TFDP3; ENSG00000183434; CTA
FEIHDDTEVL

SEQ ID NO: 87418 - protein, 10 aa, Homo sapiens
  Table A; Target 87418; HLA-B*40:01; TFDP3; ENSG00000183434; CTA
FEIHDDTEVL

SEQ ID NO: 87419 - protein, 10 aa, Homo sapiens
  Table A; Target 87419; HLA-B*40:02; TFDP3; ENSG00000183434; CTA
FEIHDDTEVL

SEQ ID NO: 87420 - protein, 10 aa, Homo sapiens
  Table A; Target 87420; HLA-B*49:01; TFDP3; ENSG00000183434; CTA
FEIHDDTEVL

SEQ ID NO: 87421 - protein, 11 aa, Homo sapiens
  Table A; Target 87421; HLA-B*40:01; TFDP3; ENSG00000183434; CTA
FEIHDDTEVLM

SEQ ID NO: 87422 - protein, 8 aa, Homo sapiens
  Table A; Target 87422; HLA-B*46:01; TFDP3; ENSG00000183434; CTA
FGGVFTTA

SEQ ID NO: 87423 - protein, 8 aa, Homo sapiens
  Table A; Target 87423; HLA-B*54:01; TFDP3; ENSG00000183434; CTA
FGGVFTTA

SEQ ID NO: 87424 - protein, 8 aa, Homo sapiens
  Table A; Target 87424; HLA-B*40:01; TFDP3; ENSG00000183434; CTA
GEKNGMGL

SEQ ID NO: 87425 - protein, 8 aa, Homo sapiens
  Table A; Target 87425; HLA-B*40:02; TFDP3; ENSG00000183434; CTA
GEKNGMGL

SEQ ID NO: 87426 - protein, 9 aa, Homo sapiens
  Table A; Target 87426; HLA-B*49:01; TFDP3; ENSG00000183434; CTA
GEKNGMGLC

SEQ ID NO: 87427 - protein, 9 aa, Homo sapiens
  Table A; Target 87427; HLA-B*15:03; TFDP3; ENSG00000183434; CTA
GKQLLPKTF

SEQ ID NO: 87428 - protein, 11 aa, Homo sapiens
  Table A; Target 87428; HLA-A*30:01; TFDP3; ENSG00000183434; CTA
GQSSVNIDQQV

SEQ ID NO: 87429 - protein, 11 aa, Homo sapiens
  Table A; Target 87429; HLA-B*13:02; TFDP3; ENSG00000183434; CTA
GQSSVNIDQQV

SEQ ID NO: 87430 - protein, 11 aa, Homo sapiens
  Table A; Target 87430; HLA-B*27:05; TFDP3; ENSG00000183434; CTA
GQSSVNIDQQV

SEQ ID NO: 87431 - protein, 11 aa, Homo sapiens
  Table A; Target 87431; HLA-B*38:01; TFDP3; ENSG00000183434; CTA
GQSSVNIDQQV

SEQ ID NO: 87432 - protein, 11 aa, Homo sapiens
  Table A; Target 87432; HLA-C*06:02; TFDP3; ENSG00000183434; CTA
GQSSVNIDQQV

SEQ ID NO: 87433 - protein, 9 aa, Homo sapiens
  Table A; Target 87433; HLA-A*11:01; TFDP3; ENSG00000183434; CTA
GTFGGVFTT

SEQ ID NO: 87434 - protein, 9 aa, Homo sapiens
  Table A; Target 87434; HLA-A*32:01; TFDP3; ENSG00000183434; CTA
GTFGGVFTT

SEQ ID NO: 87435 - protein, 9 aa, Homo sapiens
  Table A; Target 87435; HLA-B*13:02; TFDP3; ENSG00000183434; CTA
GTFGGVFTT

SEQ ID NO: 87436 - protein, 9 aa, Homo sapiens
  Table A; Target 87436; HLA-B*27:05; TFDP3; ENSG00000183434; CTA
GTFGGVFTT

SEQ ID NO: 87437 - protein, 9 aa, Homo sapiens
  Table A; Target 87437; HLA-C*16:02; TFDP3; ENSG00000183434; CTA
GTFGGVFTT

SEQ ID NO: 87438 - protein, 10 aa, Homo sapiens
  Table A; Target 87438; HLA-A*02:01; TFDP3; ENSG00000183434; CTA
GTFGGVFTTA

SEQ ID NO: 87439 - protein, 10 aa, Homo sapiens
  Table A; Target 87439; HLA-A*02:03; TFDP3; ENSG00000183434; CTA
GTFGGVFTTA

SEQ ID NO: 87440 - protein, 10 aa, Homo sapiens
  Table A; Target 87440; HLA-A*03:01; TFDP3; ENSG00000183434; CTA
GTFGGVFTTA

SEQ ID NO: 87441 - protein, 10 aa, Homo sapiens
  Table A; Target 87441; HLA-A*11:01; TFDP3; ENSG00000183434; CTA
GTFGGVFTTA

SEQ ID NO: 87442 - protein, 10 aa, Homo sapiens
  Table A; Target 87442; HLA-A*25:01; TFDP3; ENSG00000183434; CTA
GTFGGVFTTA

SEQ ID NO: 87443 - protein, 10 aa, Homo sapiens
  Table A; Target 87443; HLA-A*26:01; TFDP3; ENSG00000183434; CTA
GTFGGVFTTA

SEQ ID NO: 87444 - protein, 10 aa, Homo sapiens
  Table A; Target 87444; HLA-A*30:01; TFDP3; ENSG00000183434; CTA
GTFGGVFTTA

SEQ ID NO: 87445 - protein, 10 aa, Homo sapiens
  Table A; Target 87445; HLA-A*31:01; TFDP3; ENSG00000183434; CTA
GTFGGVFTTA

SEQ ID NO: 87446 - protein, 10 aa, Homo sapiens
  Table A; Target 87446; HLA-A*32:01; TFDP3; ENSG00000183434; CTA
GTFGGVFTTA

SEQ ID NO: 87447 - protein, 10 aa, Homo sapiens
  Table A; Target 87447; HLA-A*68:02; TFDP3; ENSG00000183434; CTA
GTFGGVFTTA

SEQ ID NO: 87448 - protein, 10 aa, Homo sapiens
  Table A; Target 87448; HLA-B*13:02; TFDP3; ENSG00000183434; CTA
GTFGGVFTTA

SEQ ID NO: 87449 - protein, 10 aa, Homo sapiens
  Table A; Target 87449; HLA-B*27:05; TFDP3; ENSG00000183434; CTA
GTFGGVFTTA

SEQ ID NO: 87450 - protein, 10 aa, Homo sapiens
  Table A; Target 87450; HLA-B*40:02; TFDP3; ENSG00000183434; CTA
GTFGGVFTTA

SEQ ID NO: 87451 - protein, 10 aa, Homo sapiens
  Table A; Target 87451; HLA-B*46:01; TFDP3; ENSG00000183434; CTA
GTFGGVFTTA

SEQ ID NO: 87452 - protein, 10 aa, Homo sapiens
  Table A; Target 87452; HLA-B*49:01; TFDP3; ENSG00000183434; CTA
GTFGGVFTTA

SEQ ID NO: 87453 - protein, 10 aa, Homo sapiens
  Table A; Target 87453; HLA-B*54:01; TFDP3; ENSG00000183434; CTA
GTFGGVFTTA

SEQ ID NO: 87454 - protein, 10 aa, Homo sapiens
  Table A; Target 87454; HLA-B*56:01; TFDP3; ENSG00000183434; CTA
GTFGGVFTTA

SEQ ID NO: 87455 - protein, 10 aa, Homo sapiens
  Table A; Target 87455; HLA-B*57:01; TFDP3; ENSG00000183434; CTA
GTFGGVFTTA

SEQ ID NO: 87456 - protein, 10 aa, Homo sapiens
  Table A; Target 87456; HLA-B*58:01; TFDP3; ENSG00000183434; CTA
GTFGGVFTTA

SEQ ID NO: 87457 - protein, 10 aa, Homo sapiens
  Table A; Target 87457; HLA-C*02:02; TFDP3; ENSG00000183434; CTA
GTFGGVFTTA

SEQ ID NO: 87458 - protein, 10 aa, Homo sapiens
  Table A; Target 87458; HLA-C*12:03; TFDP3; ENSG00000183434; CTA
GTFGGVFTTA

SEQ ID NO: 87459 - protein, 10 aa, Homo sapiens
  Table A; Target 87459; HLA-C*16:04; TFDP3; ENSG00000183434; CTA
GTFGGVFTTA

SEQ ID NO: 87460 - protein, 9 aa, Homo sapiens
  Table A; Target 87460; HLA-A*03:01; TFDP3; ENSG00000183434; CTA
GVFTTAGSR

SEQ ID NO: 87461 - protein, 9 aa, Homo sapiens
  Table A; Target 87461; HLA-A*03:02; TFDP3; ENSG00000183434; CTA
GVFTTAGSR

SEQ ID NO: 87462 - protein, 9 aa, Homo sapiens
  Table A; Target 87462; HLA-A*11:01; TFDP3; ENSG00000183434; CTA
GVFTTAGSR

SEQ ID NO: 87463 - protein, 9 aa, Homo sapiens
  Table A; Target 87463; HLA-A*31:01; TFDP3; ENSG00000183434; CTA
GVFTTAGSR

SEQ ID NO: 87464 - protein, 9 aa, Homo sapiens
  Table A; Target 87464; HLA-A*68:01; TFDP3; ENSG00000183434; CTA
GVFTTAGSR

SEQ ID NO: 87465 - protein, 9 aa, Homo sapiens
  Table A; Target 87465; HLA-B*27:05; TFDP3; ENSG00000183434; CTA
GVFTTAGSR

SEQ ID NO: 87466 - protein, 9 aa, Homo sapiens
  Table A; Target 87466; HLA-C*07:06; TFDP3; ENSG00000183434; CTA
GVFTTAGSR

SEQ ID NO: 87467 - protein, 9 aa, Homo sapiens
  Table A; Target 87467; HLA-A*01:01; TFDP3; ENSG00000183434; CTA
HASPNESAY

SEQ ID NO: 87468 - protein, 9 aa, Homo sapiens
  Table A; Target 87468; HLA-A*25:01; TFDP3; ENSG00000183434; CTA
HASPNESAY

SEQ ID NO: 87469 - protein, 9 aa, Homo sapiens
  Table A; Target 87469; HLA-A*26:01; TFDP3; ENSG00000183434; CTA
HASPNESAY

SEQ ID NO: 87470 - protein, 9 aa, Homo sapiens
  Table A; Target 87470; HLA-A*29:02; TFDP3; ENSG00000183434; CTA
HASPNESAY

SEQ ID NO: 87471 - protein, 9 aa, Homo sapiens
  Table A; Target 87471; HLA-A*30:02; TFDP3; ENSG00000183434; CTA
HASPNESAY

SEQ ID NO: 87472 - protein, 9 aa, Homo sapiens
  Table A; Target 87472; HLA-A*32:01; TFDP3; ENSG00000183434; CTA
HASPNESAY

SEQ ID NO: 87473 - protein, 9 aa, Homo sapiens
  Table A; Target 87473; HLA-B*15:01; TFDP3; ENSG00000183434; CTA
HASPNESAY

SEQ ID NO: 87474 - protein, 9 aa, Homo sapiens
  Table A; Target 87474; HLA-B*15:03; TFDP3; ENSG00000183434; CTA
HASPNESAY

SEQ ID NO: 87475 - protein, 9 aa, Homo sapiens
  Table A; Target 87475; HLA-B*27:05; TFDP3; ENSG00000183434; CTA
HASPNESAY

SEQ ID NO: 87476 - protein, 9 aa, Homo sapiens
  Table A; Target 87476; HLA-B*35:03; TFDP3; ENSG00000183434; CTA
HASPNESAY

SEQ ID NO: 87477 - protein, 9 aa, Homo sapiens
  Table A; Target 87477; HLA-B*39:01; TFDP3; ENSG00000183434; CTA
HASPNESAY

SEQ ID NO: 87478 - protein, 9 aa, Homo sapiens
  Table A; Target 87478; HLA-B*46:01; TFDP3; ENSG00000183434; CTA
HASPNESAY

SEQ ID NO: 87479 - protein, 9 aa, Homo sapiens
  Table A; Target 87479; HLA-B*55:01; TFDP3; ENSG00000183434; CTA
HASPNESAY

SEQ ID NO: 87480 - protein, 9 aa, Homo sapiens
  Table A; Target 87480; HLA-B*58:01; TFDP3; ENSG00000183434; CTA
HASPNESAY

SEQ ID NO: 87481 - protein, 9 aa, Homo sapiens
  Table A; Target 87481; HLA-C*01:02; TFDP3; ENSG00000183434; CTA
HASPNESAY

SEQ ID NO: 87482 - protein, 9 aa, Homo sapiens
  Table A; Target 87482; HLA-C*02:02; TFDP3; ENSG00000183434; CTA
HASPNESAY

SEQ ID NO: 87483 - protein, 9 aa, Homo sapiens
  Table A; Target 87483; HLA-C*03:03; TFDP3; ENSG00000183434; CTA
HASPNESAY

SEQ ID NO: 87484 - protein, 9 aa, Homo sapiens
  Table A; Target 87484; HLA-C*03:04; TFDP3; ENSG00000183434; CTA
HASPNESAY

SEQ ID NO: 87485 - protein, 9 aa, Homo sapiens
  Table A; Target 87485; HLA-C*05:01; TFDP3; ENSG00000183434; CTA
HASPNESAY

SEQ ID NO: 87486 - protein, 9 aa, Homo sapiens
  Table A; Target 87486; HLA-C*07:04; TFDP3; ENSG00000183434; CTA
HASPNESAY

SEQ ID NO: 87487 - protein, 9 aa, Homo sapiens
  Table A; Target 87487; HLA-C*07:06; TFDP3; ENSG00000183434; CTA
HASPNESAY

SEQ ID NO: 87488 - protein, 9 aa, Homo sapiens
  Table A; Target 87488; HLA-C*12:03; TFDP3; ENSG00000183434; CTA
HASPNESAY

SEQ ID NO: 87489 - protein, 9 aa, Homo sapiens
  Table A; Target 87489; HLA-C*14:02; TFDP3; ENSG00000183434; CTA
HASPNESAY

SEQ ID NO: 87490 - protein, 9 aa, Homo sapiens
  Table A; Target 87490; HLA-C*16:01; TFDP3; ENSG00000183434; CTA
HASPNESAY

SEQ ID NO: 87491 - protein, 9 aa, Homo sapiens
  Table A; Target 87491; HLA-C*16:02; TFDP3; ENSG00000183434; CTA
HASPNESAY

SEQ ID NO: 87492 - protein, 9 aa, Homo sapiens
  Table A; Target 87492; HLA-C*16:04; TFDP3; ENSG00000183434; CTA
HASPNESAY

SEQ ID NO: 87493 - protein, 10 aa, Homo sapiens
  Table A; Target 87493; HLA-A*29:02; TFDP3; ENSG00000183434; CTA
HFASQNQHSY

SEQ ID NO: 87494 - protein, 10 aa, Homo sapiens
  Table A; Target 87494; HLA-A*30:02; TFDP3; ENSG00000183434; CTA
HFASQNQHSY

SEQ ID NO: 87495 - protein, 10 aa, Homo sapiens
  Table A; Target 87495; HLA-C*14:02; TFDP3; ENSG00000183434; CTA
HFASQNQHSY

SEQ ID NO: 87496 - protein, 10 aa, Homo sapiens
  Table A; Target 87496; HLA-A*01:01; TFDP3; ENSG00000183434; CTA
HTSTVNPLGK

SEQ ID NO: 87497 - protein, 10 aa, Homo sapiens
  Table A; Target 87497; HLA-A*03:01; TFDP3; ENSG00000183434; CTA
HTSTVNPLGK

SEQ ID NO: 87498 - protein, 10 aa, Homo sapiens
  Table A; Target 87498; HLA-A*03:02; TFDP3; ENSG00000183434; CTA
HTSTVNPLGK

SEQ ID NO: 87499 - protein, 10 aa, Homo sapiens
  Table A; Target 87499; HLA-A*11:01; TFDP3; ENSG00000183434; CTA
HTSTVNPLGK

SEQ ID NO: 87500 - protein, 10 aa, Homo sapiens
  Table A; Target 87500; HLA-A*33:03; TFDP3; ENSG00000183434; CTA
HTSTVNPLGK

SEQ ID NO: 87501 - protein, 10 aa, Homo sapiens
  Table A; Target 87501; HLA-B*27:02; TFDP3; ENSG00000183434; CTA
HTSTVNPLGK

SEQ ID NO: 87502 - protein, 10 aa, Homo sapiens
  Table A; Target 87502; HLA-B*27:05; TFDP3; ENSG00000183434; CTA
HTSTVNPLGK

SEQ ID NO: 87503 - protein, 10 aa, Homo sapiens
  Table A; Target 87503; HLA-C*07:06; TFDP3; ENSG00000183434; CTA
HTSTVNPLGK

SEQ ID NO: 87504 - protein, 8 aa, Homo sapiens
  Table A; Target 87504; HLA-B*08:01; TFDP3; ENSG00000183434; CTA
IAFKNLVL

SEQ ID NO: 87505 - protein, 8 aa, Homo sapiens
  Table A; Target 87505; HLA-B*51:01; TFDP3; ENSG00000183434; CTA
IAFKNLVL

SEQ ID NO: 87506 - protein, 8 aa, Homo sapiens
  Table A; Target 87506; HLA-C*03:03; TFDP3; ENSG00000183434; CTA
IAFKNLVL

SEQ ID NO: 87507 - protein, 8 aa, Homo sapiens
  Table A; Target 87507; HLA-C*03:04; TFDP3; ENSG00000183434; CTA
IAFKNLVL

SEQ ID NO: 87508 - protein, 8 aa, Homo sapiens
  Table A; Target 87508; HLA-C*12:03; TFDP3; ENSG00000183434; CTA
IAFKNLVL

SEQ ID NO: 87509 - protein, 9 aa, Homo sapiens
  Table A; Target 87509; HLA-A*31:01; TFDP3; ENSG00000183434; CTA
IAFKNLVLR

SEQ ID NO: 87510 - protein, 9 aa, Homo sapiens
  Table A; Target 87510; HLA-A*33:01; TFDP3; ENSG00000183434; CTA
IAFKNLVLR

SEQ ID NO: 87511 - protein, 9 aa, Homo sapiens
  Table A; Target 87511; HLA-B*57:01; TFDP3; ENSG00000183434; CTA
IAFKNLVLR

SEQ ID NO: 87512 - protein, 9 aa, Homo sapiens
  Table A; Target 87512; HLA-B*27:05; TFDP3; ENSG00000183434; CTA
IAIGMLATS

SEQ ID NO: 87513 - protein, 9 aa, Homo sapiens
  Table A; Target 87513; HLA-B*37:01; TFDP3; ENSG00000183434; CTA
IDQQVVIGM

SEQ ID NO: 87514 - protein, 9 aa, Homo sapiens
  Table A; Target 87514; HLA-B*54:01; TFDP3; ENSG00000183434; CTA
IGMPQRPAA

SEQ ID NO: 87515 - protein, 9 aa, Homo sapiens
  Table A; Target 87515; HLA-B*56:01; TFDP3; ENSG00000183434; CTA
IGMPQRPAA

SEQ ID NO: 87516 - protein, 9 aa, Homo sapiens
  Table A; Target 87516; HLA-C*16:01; TFDP3; ENSG00000183434; CTA
IGMPQRPAA

SEQ ID NO: 87517 - protein, 8 aa, Homo sapiens
  Table A; Target 87517; HLA-B*38:01; TFDP3; ENSG00000183434; CTA
IHDDTEVL

SEQ ID NO: 87518 - protein, 8 aa, Homo sapiens
  Table A; Target 87518; HLA-B*39:01; TFDP3; ENSG00000183434; CTA
IHDDTEVL

SEQ ID NO: 87519 - protein, 8 aa, Homo sapiens
  Table A; Target 87519; HLA-C*05:01; TFDP3; ENSG00000183434; CTA
IHDDTEVL

SEQ ID NO: 87520 - protein, 9 aa, Homo sapiens
  Table A; Target 87520; HLA-B*35:03; TFDP3; ENSG00000183434; CTA
IHDDTEVLM

SEQ ID NO: 87521 - protein, 9 aa, Homo sapiens
  Table A; Target 87521; HLA-B*39:01; TFDP3; ENSG00000183434; CTA
IHDDTEVLM

SEQ ID NO: 87522 - protein, 9 aa, Homo sapiens
  Table A; Target 87522; HLA-C*04:01; TFDP3; ENSG00000183434; CTA
IHDDTEVLM

SEQ ID NO: 87523 - protein, 9 aa, Homo sapiens
  Table A; Target 87523; HLA-C*05:01; TFDP3; ENSG00000183434; CTA
IHDDTEVLM

SEQ ID NO: 87524 - protein, 10 aa, Homo sapiens
  Table A; Target 87524; HLA-B*38:01; TFDP3; ENSG00000183434; CTA
IHDDTEVLMW

SEQ ID NO: 87525 - protein, 9 aa, Homo sapiens
  Table A; Target 87525; HLA-C*16:02; TFDP3; ENSG00000183434; CTA
IISSSKKTV

SEQ ID NO: 87526 - protein, 8 aa, Homo sapiens
  Table A; Target 87526; HLA-A*03:02; TFDP3; ENSG00000183434; CTA
ILQQIAFK

SEQ ID NO: 87527 - protein, 10 aa, Homo sapiens
  Table A; Target 87527; HLA-B*56:01; TFDP3; ENSG00000183434; CTA
IPVVGSPNPP

SEQ ID NO: 87528 - protein, 8 aa, Homo sapiens
  Table A; Target 87528; HLA-A*01:01; TFDP3; ENSG00000183434; CTA
ISDDKSEY

SEQ ID NO: 87529 - protein, 8 aa, Homo sapiens
  Table A; Target 87529; HLA-C*05:01; TFDP3; ENSG00000183434; CTA
ISDDKSEY

SEQ ID NO: 87530 - protein, 8 aa, Homo sapiens
  Table A; Target 87530; HLA-C*16:01; TFDP3; ENSG00000183434; CTA
ISDDKSEY

SEQ ID NO: 87531 - protein, 8 aa, Homo sapiens
  Table A; Target 87531; HLA-C*16:02; TFDP3; ENSG00000183434; CTA
ISDDKSEY

SEQ ID NO: 87532 - protein, 9 aa, Homo sapiens
  Table A; Target 87532; HLA-A*01:01; TFDP3; ENSG00000183434; CTA
ISDDKSEYL

SEQ ID NO: 87533 - protein, 9 aa, Homo sapiens
  Table A; Target 87533; HLA-A*02:01; TFDP3; ENSG00000183434; CTA
ISDDKSEYL

SEQ ID NO: 87534 - protein, 9 aa, Homo sapiens
  Table A; Target 87534; HLA-A*02:07; TFDP3; ENSG00000183434; CTA
ISDDKSEYL

SEQ ID NO: 87535 - protein, 9 aa, Homo sapiens
  Table A; Target 87535; HLA-A*32:01; TFDP3; ENSG00000183434; CTA
ISDDKSEYL

SEQ ID NO: 87536 - protein, 9 aa, Homo sapiens
  Table A; Target 87536; HLA-B*38:01; TFDP3; ENSG00000183434; CTA
ISDDKSEYL

SEQ ID NO: 87537 - protein, 9 aa, Homo sapiens
  Table A; Target 87537; HLA-B*39:01; TFDP3; ENSG00000183434; CTA
ISDDKSEYL

SEQ ID NO: 87538 - protein, 9 aa, Homo sapiens
  Table A; Target 87538; HLA-C*01:02; TFDP3; ENSG00000183434; CTA
ISDDKSEYL

SEQ ID NO: 87539 - protein, 9 aa, Homo sapiens
  Table A; Target 87539; HLA-C*03:03; TFDP3; ENSG00000183434; CTA
ISDDKSEYL

SEQ ID NO: 87540 - protein, 9 aa, Homo sapiens
  Table A; Target 87540; HLA-C*03:04; TFDP3; ENSG00000183434; CTA
ISDDKSEYL

SEQ ID NO: 87541 - protein, 9 aa, Homo sapiens
  Table A; Target 87541; HLA-C*04:01; TFDP3; ENSG00000183434; CTA
ISDDKSEYL

SEQ ID NO: 87542 - protein, 9 aa, Homo sapiens
  Table A; Target 87542; HLA-C*05:01; TFDP3; ENSG00000183434; CTA
ISDDKSEYL

SEQ ID NO: 87543 - protein, 9 aa, Homo sapiens
  Table A; Target 87543; HLA-C*07:04; TFDP3; ENSG00000183434; CTA
ISDDKSEYL

SEQ ID NO: 87544 - protein, 10 aa, Homo sapiens
  Table A; Target 87544; HLA-A*01:01; TFDP3; ENSG00000183434; CTA
ISDDKSEYLF

SEQ ID NO: 87545 - protein, 10 aa, Homo sapiens
  Table A; Target 87545; HLA-A*02:07; TFDP3; ENSG00000183434; CTA
ISDDKSEYLF

SEQ ID NO: 87546 - protein, 10 aa, Homo sapiens
  Table A; Target 87546; HLA-B*57:01; TFDP3; ENSG00000183434; CTA
ISDDKSEYLF

SEQ ID NO: 87547 - protein, 10 aa, Homo sapiens
  Table A; Target 87547; HLA-C*04:01; TFDP3; ENSG00000183434; CTA
ISDDKSEYLF

SEQ ID NO: 87548 - protein, 10 aa, Homo sapiens
  Table A; Target 87548; HLA-C*05:01; TFDP3; ENSG00000183434; CTA
ISDDKSEYLF

SEQ ID NO: 87549 - protein, 11 aa, Homo sapiens
  Table A; Target 87549; HLA-A*03:01; TFDP3; ENSG00000183434; CTA
ISDDKSEYLFK

SEQ ID NO: 87550 - protein, 9 aa, Homo sapiens
  Table A; Target 87550; HLA-C*16:01; TFDP3; ENSG00000183434; CTA
ISSSKKTVI

SEQ ID NO: 87551 - protein, 10 aa, Homo sapiens
  Table A; Target 87551; HLA-A*32:01; TFDP3; ENSG00000183434; CTA
KALEPYVTEM

SEQ ID NO: 87552 - protein, 10 aa, Homo sapiens
  Table A; Target 87552; HLA-B*27:02; TFDP3; ENSG00000183434; CTA
KALEPYVTEM

SEQ ID NO: 87553 - protein, 10 aa, Homo sapiens
  Table A; Target 87553; HLA-B*40:01; TFDP3; ENSG00000183434; CTA
KALEPYVTEM

SEQ ID NO: 87554 - protein, 10 aa, Homo sapiens
  Table A; Target 87554; HLA-B*40:02; TFDP3; ENSG00000183434; CTA
KALEPYVTEM

SEQ ID NO: 87555 - protein, 10 aa, Homo sapiens
  Table A; Target 87555; HLA-B*46:01; TFDP3; ENSG00000183434; CTA
KALEPYVTEM

SEQ ID NO: 87556 - protein, 10 aa, Homo sapiens
  Table A; Target 87556; HLA-B*57:01; TFDP3; ENSG00000183434; CTA
KALEPYVTEM

SEQ ID NO: 87557 - protein, 10 aa, Homo sapiens
  Table A; Target 87557; HLA-B*58:01; TFDP3; ENSG00000183434; CTA
KALEPYVTEM

SEQ ID NO: 87558 - protein, 10 aa, Homo sapiens
  Table A; Target 87558; HLA-C*01:02; TFDP3; ENSG00000183434; CTA
KALEPYVTEM

SEQ ID NO: 87559 - protein, 10 aa, Homo sapiens
  Table A; Target 87559; HLA-C*02:02; TFDP3; ENSG00000183434; CTA
KALEPYVTEM

SEQ ID NO: 87560 - protein, 10 aa, Homo sapiens
  Table A; Target 87560; HLA-C*03:03; TFDP3; ENSG00000183434; CTA
KALEPYVTEM

SEQ ID NO: 87561 - protein, 10 aa, Homo sapiens
  Table A; Target 87561; HLA-C*03:04; TFDP3; ENSG00000183434; CTA
KALEPYVTEM

SEQ ID NO: 87562 - protein, 10 aa, Homo sapiens
  Table A; Target 87562; HLA-C*05:01; TFDP3; ENSG00000183434; CTA
KALEPYVTEM

SEQ ID NO: 87563 - protein, 10 aa, Homo sapiens
  Table A; Target 87563; HLA-C*12:03; TFDP3; ENSG00000183434; CTA
KALEPYVTEM

SEQ ID NO: 87564 - protein, 10 aa, Homo sapiens
  Table A; Target 87564; HLA-C*16:02; TFDP3; ENSG00000183434; CTA
KALEPYVTEM

SEQ ID NO: 87565 - protein, 10 aa, Homo sapiens
  Table A; Target 87565; HLA-C*16:04; TFDP3; ENSG00000183434; CTA
KALEPYVTEM

SEQ ID NO: 87566 - protein, 9 aa, Homo sapiens
  Table A; Target 87566; HLA-A*03:01; TFDP3; ENSG00000183434; CTA
KMARNLVPK

SEQ ID NO: 87567 - protein, 9 aa, Homo sapiens
  Table A; Target 87567; HLA-A*03:02; TFDP3; ENSG00000183434; CTA
KMARNLVPK

SEQ ID NO: 87568 - protein, 9 aa, Homo sapiens
  Table A; Target 87568; HLA-A*30:02; TFDP3; ENSG00000183434; CTA
KNLVLRNQY

SEQ ID NO: 87569 - protein, 9 aa, Homo sapiens
  Table A; Target 87569; HLA-A*30:01; TFDP3; ENSG00000183434; CTA
KQSELQQLI

SEQ ID NO: 87570 - protein, 9 aa, Homo sapiens
  Table A; Target 87570; HLA-B*13:02; TFDP3; ENSG00000183434; CTA
KQSELQQLI

SEQ ID NO: 87571 - protein, 9 aa, Homo sapiens
  Table A; Target 87571; HLA-B*38:01; TFDP3; ENSG00000183434; CTA
KQSELQQLI

SEQ ID NO: 87572 - protein, 9 aa, Homo sapiens
  Table A; Target 87572; HLA-C*06:02; TFDP3; ENSG00000183434; CTA
KQSELQQLI

SEQ ID NO: 87573 - protein, 10 aa, Homo sapiens
  Table A; Target 87573; HLA-B*58:01; TFDP3; ENSG00000183434; CTA
KTFGQSSVNI

SEQ ID NO: 87574 - protein, 11 aa, Homo sapiens
  Table A; Target 87574; HLA-A*31:01; TFDP3; ENSG00000183434; CTA
KVLMDENQTSR

SEQ ID NO: 87575 - protein, 8 aa, Homo sapiens
  Table A; Target 87575; HLA-A*31:01; TFDP3; ENSG00000183434; CTA
KVWETVQR

SEQ ID NO: 87576 - protein, 9 aa, Homo sapiens
  Table A; Target 87576; HLA-A*03:01; TFDP3; ENSG00000183434; CTA
KVWETVQRK

SEQ ID NO: 87577 - protein, 9 aa, Homo sapiens
  Table A; Target 87577; HLA-A*03:02; TFDP3; ENSG00000183434; CTA
KVWETVQRK

SEQ ID NO: 87578 - protein, 9 aa, Homo sapiens
  Table A; Target 87578; HLA-A*11:01; TFDP3; ENSG00000183434; CTA
KVWETVQRK

SEQ ID NO: 87579 - protein, 9 aa, Homo sapiens
  Table A; Target 87579; HLA-A*31:01; TFDP3; ENSG00000183434; CTA
KVWETVQRK

SEQ ID NO: 87580 - protein, 10 aa, Homo sapiens
  Table A; Target 87580; HLA-A*01:01; TFDP3; ENSG00000183434; CTA
LATSSGGSQY

SEQ ID NO: 87581 - protein, 10 aa, Homo sapiens
  Table A; Target 87581; HLA-A*26:01; TFDP3; ENSG00000183434; CTA
LATSSGGSQY

SEQ ID NO: 87582 - protein, 10 aa, Homo sapiens
  Table A; Target 87582; HLA-A*30:02; TFDP3; ENSG00000183434; CTA
LATSSGGSQY

SEQ ID NO: 87583 - protein, 10 aa, Homo sapiens
  Table A; Target 87583; HLA-B*15:01; TFDP3; ENSG00000183434; CTA
LATSSGGSQY

SEQ ID NO: 87584 - protein, 10 aa, Homo sapiens
  Table A; Target 87584; HLA-B*15:03; TFDP3; ENSG00000183434; CTA
LATSSGGSQY

SEQ ID NO: 87585 - protein, 10 aa, Homo sapiens
  Table A; Target 87585; HLA-B*39:01; TFDP3; ENSG00000183434; CTA
LATSSGGSQY

SEQ ID NO: 87586 - protein, 10 aa, Homo sapiens
  Table A; Target 87586; HLA-B*46:01; TFDP3; ENSG00000183434; CTA
LATSSGGSQY

SEQ ID NO: 87587 - protein, 10 aa, Homo sapiens
  Table A; Target 87587; HLA-C*02:02; TFDP3; ENSG00000183434; CTA
LATSSGGSQY

SEQ ID NO: 87588 - protein, 10 aa, Homo sapiens
  Table A; Target 87588; HLA-C*03:03; TFDP3; ENSG00000183434; CTA
LATSSGGSQY

SEQ ID NO: 87589 - protein, 10 aa, Homo sapiens
  Table A; Target 87589; HLA-C*03:04; TFDP3; ENSG00000183434; CTA
LATSSGGSQY

SEQ ID NO: 87590 - protein, 10 aa, Homo sapiens
  Table A; Target 87590; HLA-C*07:04; TFDP3; ENSG00000183434; CTA
LATSSGGSQY

SEQ ID NO: 87591 - protein, 10 aa, Homo sapiens
  Table A; Target 87591; HLA-C*14:02; TFDP3; ENSG00000183434; CTA
LATSSGGSQY

SEQ ID NO: 87592 - protein, 10 aa, Homo sapiens
  Table A; Target 87592; HLA-C*16:02; TFDP3; ENSG00000183434; CTA
LATSSGGSQY

SEQ ID NO: 87593 - protein, 10 aa, Homo sapiens
  Table A; Target 87593; HLA-C*16:04; TFDP3; ENSG00000183434; CTA
LATSSGGSQY

SEQ ID NO: 87594 - protein, 8 aa, Homo sapiens
  Table A; Target 87594; HLA-A*30:01; TFDP3; ENSG00000183434; CTA
LEPYVTEM

SEQ ID NO: 87595 - protein, 8 aa, Homo sapiens
  Table A; Target 87595; HLA-B*18:01; TFDP3; ENSG00000183434; CTA
LEPYVTEM

SEQ ID NO: 87596 - protein, 8 aa, Homo sapiens
  Table A; Target 87596; HLA-B*37:01; TFDP3; ENSG00000183434; CTA
LEPYVTEM

SEQ ID NO: 87597 - protein, 8 aa, Homo sapiens
  Table A; Target 87597; HLA-B*40:01; TFDP3; ENSG00000183434; CTA
LEPYVTEM

SEQ ID NO: 87598 - protein, 8 aa, Homo sapiens
  Table A; Target 87598; HLA-B*40:02; TFDP3; ENSG00000183434; CTA
LEPYVTEM

SEQ ID NO: 87599 - protein, 8 aa, Homo sapiens
  Table A; Target 87599; HLA-B*49:01; TFDP3; ENSG00000183434; CTA
LEPYVTEM

SEQ ID NO: 87600 - protein, 8 aa, Homo sapiens
  Table A; Target 87600; HLA-B*51:01; TFDP3; ENSG00000183434; CTA
LEPYVTEM

SEQ ID NO: 87601 - protein, 9 aa, Homo sapiens
  Table A; Target 87601; HLA-A*03:01; TFDP3; ENSG00000183434; CTA
LILQQIAFK

SEQ ID NO: 87602 - protein, 9 aa, Homo sapiens
  Table A; Target 87602; HLA-C*07:06; TFDP3; ENSG00000183434; CTA
LMAMNIISR

SEQ ID NO: 87603 - protein, 9 aa, Homo sapiens
  Table A; Target 87603; HLA-A*01:01; TFDP3; ENSG00000183434; CTA
LMDENQTSR

SEQ ID NO: 87604 - protein, 9 aa, Homo sapiens
  Table A; Target 87604; HLA-C*05:01; TFDP3; ENSG00000183434; CTA
LMDENQTSR

SEQ ID NO: 87605 - protein, 10 aa, Homo sapiens
  Table A; Target 87605; HLA-B*07:02; TFDP3; ENSG00000183434; CTA
LPKTFGQSSV

SEQ ID NO: 87606 - protein, 10 aa, Homo sapiens
  Table A; Target 87606; HLA-B*08:01; TFDP3; ENSG00000183434; CTA
LPKTFGQSSV

SEQ ID NO: 87607 - protein, 10 aa, Homo sapiens
  Table A; Target 87607; HLA-B*51:01; TFDP3; ENSG00000183434; CTA
LPKTFGQSSV

SEQ ID NO: 87608 - protein, 10 aa, Homo sapiens
  Table A; Target 87608; HLA-B*54:01; TFDP3; ENSG00000183434; CTA
LPKTFGQSSV

SEQ ID NO: 87609 - protein, 10 aa, Homo sapiens
  Table A; Target 87609; HLA-B*55:01; TFDP3; ENSG00000183434; CTA
LPKTFGQSSV

SEQ ID NO: 87610 - protein, 10 aa, Homo sapiens
  Table A; Target 87610; HLA-B*56:01; TFDP3; ENSG00000183434; CTA
LPKTFGQSSV

SEQ ID NO: 87611 - protein, 10 aa, Homo sapiens
  Table A; Target 87611; HLA-C*07:02; TFDP3; ENSG00000183434; CTA
LPKTFGQSSV

SEQ ID NO: 87612 - protein, 8 aa, Homo sapiens
  Table A; Target 87612; HLA-B*51:01; TFDP3; ENSG00000183434; CTA
LPNSVIHV

SEQ ID NO: 87613 - protein, 8 aa, Homo sapiens
  Table A; Target 87613; HLA-B*56:01; TFDP3; ENSG00000183434; CTA
LPNSVIHV

SEQ ID NO: 87614 - protein, 9 aa, Homo sapiens
  Table A; Target 87614; HLA-B*54:01; TFDP3; ENSG00000183434; CTA
LPNSVIHVP

SEQ ID NO: 87615 - protein, 9 aa, Homo sapiens
  Table A; Target 87615; HLA-B*56:01; TFDP3; ENSG00000183434; CTA
LPNSVIHVP

SEQ ID NO: 87616 - protein, 9 aa, Homo sapiens
  Table A; Target 87616; HLA-A*02:04; TFDP3; ENSG00000183434; CTA
LQQLILQQI

SEQ ID NO: 87617 - protein, 9 aa, Homo sapiens
  Table A; Target 87617; HLA-A*30:01; TFDP3; ENSG00000183434; CTA
LQQLILQQI

SEQ ID NO: 87618 - protein, 9 aa, Homo sapiens
  Table A; Target 87618; HLA-B*13:02; TFDP3; ENSG00000183434; CTA
LQQLILQQI

SEQ ID NO: 87619 - protein, 9 aa, Homo sapiens
  Table A; Target 87619; HLA-B*38:01; TFDP3; ENSG00000183434; CTA
LQQLILQQI

SEQ ID NO: 87620 - protein, 9 aa, Homo sapiens
  Table A; Target 87620; HLA-C*06:02; TFDP3; ENSG00000183434; CTA
LQQLILQQI

SEQ ID NO: 87621 - protein, 9 aa, Homo sapiens
  Table A; Target 87621; HLA-C*07:04; TFDP3; ENSG00000183434; CTA
LQQLILQQI

SEQ ID NO: 87622 - protein, 9 aa, Homo sapiens
  Table A; Target 87622; HLA-A*68:02; TFDP3; ENSG00000183434; CTA
LSMKVWETV

SEQ ID NO: 87623 - protein, 8 aa, Homo sapiens
  Table A; Target 87623; HLA-C*05:01; TFDP3; ENSG00000183434; CTA
LTEANEEL

SEQ ID NO: 87624 - protein, 9 aa, Homo sapiens
  Table A; Target 87624; HLA-A*01:01; TFDP3; ENSG00000183434; CTA
LTEANEELK

SEQ ID NO: 87625 - protein, 9 aa, Homo sapiens
  Table A; Target 87625; HLA-C*01:02; TFDP3; ENSG00000183434; CTA
LTNIAIGML

SEQ ID NO: 87626 - protein, 9 aa, Homo sapiens
  Table A; Target 87626; HLA-A*01:01; TFDP3; ENSG00000183434; CTA
LVPKALEPY

SEQ ID NO: 87627 - protein, 9 aa, Homo sapiens
  Table A; Target 87627; HLA-B*46:01; TFDP3; ENSG00000183434; CTA
LVPKALEPY

SEQ ID NO: 87628 - protein, 9 aa, Homo sapiens
  Table A; Target 87628; HLA-C*07:04; TFDP3; ENSG00000183434; CTA
LVPKALEPY

SEQ ID NO: 87629 - protein, 10 aa, Homo sapiens
  Table A; Target 87629; HLA-A*02:07; TFDP3; ENSG00000183434; CTA
LVPKALEPYV

SEQ ID NO: 87630 - protein, 10 aa, Homo sapiens
  Table A; Target 87630; HLA-B*54:01; TFDP3; ENSG00000183434; CTA
MAKYVSLTEA

SEQ ID NO: 87631 - protein, 8 aa, Homo sapiens
  Table A; Target 87631; HLA-A*11:01; TFDP3; ENSG00000183434; CTA
MAMNIISR

SEQ ID NO: 87632 - protein, 8 aa, Homo sapiens
  Table A; Target 87632; HLA-A*31:01; TFDP3; ENSG00000183434; CTA
MAMNIISR

SEQ ID NO: 87633 - protein, 8 aa, Homo sapiens
  Table A; Target 87633; HLA-A*33:01; TFDP3; ENSG00000183434; CTA
MAMNIISR

SEQ ID NO: 87634 - protein, 8 aa, Homo sapiens
  Table A; Target 87634; HLA-A*33:03; TFDP3; ENSG00000183434; CTA
MAMNIISR

SEQ ID NO: 87635 - protein, 8 aa, Homo sapiens
  Table A; Target 87635; HLA-A*68:01; TFDP3; ENSG00000183434; CTA
MAMNIISR

SEQ ID NO: 87636 - protein, 8 aa, Homo sapiens
  Table A; Target 87636; HLA-B*27:05; TFDP3; ENSG00000183434; CTA
MAMNIISR

SEQ ID NO: 87637 - protein, 8 aa, Homo sapiens
  Table A; Target 87637; HLA-B*54:01; TFDP3; ENSG00000183434; CTA
MAMNIISR

SEQ ID NO: 87638 - protein, 8 aa, Homo sapiens
  Table A; Target 87638; HLA-C*07:06; TFDP3; ENSG00000183434; CTA
MAMNIISR

SEQ ID NO: 87639 - protein, 9 aa, Homo sapiens
  Table A; Target 87639; HLA-C*12:03; TFDP3; ENSG00000183434; CTA
MAMNIISRE

SEQ ID NO: 87640 - protein, 10 aa, Homo sapiens
  Table A; Target 87640; HLA-A*03:01; TFDP3; ENSG00000183434; CTA
MAMNIISREK

SEQ ID NO: 87641 - protein, 10 aa, Homo sapiens
  Table A; Target 87641; HLA-A*11:01; TFDP3; ENSG00000183434; CTA
MAMNIISREK

SEQ ID NO: 87642 - protein, 10 aa, Homo sapiens
  Table A; Target 87642; HLA-C*02:02; TFDP3; ENSG00000183434; CTA
MAQGTFGGVF

SEQ ID NO: 87643 - protein, 9 aa, Homo sapiens
  Table A; Target 87643; HLA-B*54:01; TFDP3; ENSG00000183434; CTA
MARNLVPKA

SEQ ID NO: 87644 - protein, 10 aa, Homo sapiens
  Table A; Target 87644; HLA-C*04:01; TFDP3; ENSG00000183434; CTA
MDENQTSRPV

SEQ ID NO: 87645 - protein, 10 aa, Homo sapiens
  Table A; Target 87645; HLA-C*06:02; TFDP3; ENSG00000183434; CTA
MDENQTSRPV

SEQ ID NO: 87646 - protein, 10 aa, Homo sapiens
  Table A; Target 87646; HLA-C*07:01; TFDP3; ENSG00000183434; CTA
MDENQTSRPV

SEQ ID NO: 87647 - protein, 10 aa, Homo sapiens
  Table A; Target 87647; HLA-C*07:02; TFDP3; ENSG00000183434; CTA
MDENQTSRPV

SEQ ID NO: 87648 - protein, 11 aa, Homo sapiens
  Table A; Target 87648; HLA-A*01:01; TFDP3; ENSG00000183434; CTA
MLATSSGGSQY

SEQ ID NO: 87649 - protein, 11 aa, Homo sapiens
  Table A; Target 87649; HLA-A*25:01; TFDP3; ENSG00000183434; CTA
MLATSSGGSQY

SEQ ID NO: 87650 - protein, 11 aa, Homo sapiens
  Table A; Target 87650; HLA-A*26:01; TFDP3; ENSG00000183434; CTA
MLATSSGGSQY

SEQ ID NO: 87651 - protein, 11 aa, Homo sapiens
  Table A; Target 87651; HLA-A*29:02; TFDP3; ENSG00000183434; CTA
MLATSSGGSQY

SEQ ID NO: 87652 - protein, 11 aa, Homo sapiens
  Table A; Target 87652; HLA-A*30:02; TFDP3; ENSG00000183434; CTA
MLATSSGGSQY

SEQ ID NO: 87653 - protein, 11 aa, Homo sapiens
  Table A; Target 87653; HLA-A*32:01; TFDP3; ENSG00000183434; CTA
MLATSSGGSQY

SEQ ID NO: 87654 - protein, 11 aa, Homo sapiens
  Table A; Target 87654; HLA-B*15:01; TFDP3; ENSG00000183434; CTA
MLATSSGGSQY

SEQ ID NO: 87655 - protein, 11 aa, Homo sapiens
  Table A; Target 87655; HLA-B*15:03; TFDP3; ENSG00000183434; CTA
MLATSSGGSQY

SEQ ID NO: 87656 - protein, 11 aa, Homo sapiens
  Table A; Target 87656; HLA-B*35:01; TFDP3; ENSG00000183434; CTA
MLATSSGGSQY

SEQ ID NO: 87657 - protein, 11 aa, Homo sapiens
  Table A; Target 87657; HLA-B*46:01; TFDP3; ENSG00000183434; CTA
MLATSSGGSQY

SEQ ID NO: 87658 - protein, 11 aa, Homo sapiens
  Table A; Target 87658; HLA-C*02:02; TFDP3; ENSG00000183434; CTA
MLATSSGGSQY

SEQ ID NO: 87659 - protein, 11 aa, Homo sapiens
  Table A; Target 87659; HLA-C*07:04; TFDP3; ENSG00000183434; CTA
MLATSSGGSQY

SEQ ID NO: 87660 - protein, 11 aa, Homo sapiens
  Table A; Target 87660; HLA-C*14:02; TFDP3; ENSG00000183434; CTA
MLATSSGGSQY

SEQ ID NO: 87661 - protein, 10 aa, Homo sapiens
  Table A; Target 87661; HLA-B*07:02; TFDP3; ENSG00000183434; CTA
MPQRPAASNI

SEQ ID NO: 87662 - protein, 10 aa, Homo sapiens
  Table A; Target 87662; HLA-B*51:01; TFDP3; ENSG00000183434; CTA
MPQRPAASNI

SEQ ID NO: 87663 - protein, 10 aa, Homo sapiens
  Table A; Target 87663; HLA-C*07:02; TFDP3; ENSG00000183434; CTA
MPQRPAASNI

SEQ ID NO: 87664 - protein, 10 aa, Homo sapiens
  Table A; Target 87664; HLA-C*07:01; TFDP3; ENSG00000183434; CTA
MTFGLESGSC

SEQ ID NO: 87665 - protein, 9 aa, Homo sapiens
  Table A; Target 87665; HLA-A*33:01; TFDP3; ENSG00000183434; CTA
NCQNLRVER

SEQ ID NO: 87666 - protein, 8 aa, Homo sapiens
  Table A; Target 87666; HLA-B*18:01; TFDP3; ENSG00000183434; CTA
NEELKVLM

SEQ ID NO: 87667 - protein, 8 aa, Homo sapiens
  Table A; Target 87667; HLA-B*37:01; TFDP3; ENSG00000183434; CTA
NEELKVLM

SEQ ID NO: 87668 - protein, 10 aa, Homo sapiens
  Table A; Target 87668; HLA-B*44:02; TFDP3; ENSG00000183434; CTA
NESAYDVKNI

SEQ ID NO: 87669 - protein, 10 aa, Homo sapiens
  Table A; Target 87669; HLA-B*44:03; TFDP3; ENSG00000183434; CTA
NESAYDVKNI

SEQ ID NO: 87670 - protein, 10 aa, Homo sapiens
  Table A; Target 87670; HLA-B*49:01; TFDP3; ENSG00000183434; CTA
NESAYDVKNI

SEQ ID NO: 87671 - protein, 9 aa, Homo sapiens
  Table A; Target 87671; HLA-B*38:01; TFDP3; ENSG00000183434; CTA
NHASPNESA

SEQ ID NO: 87672 - protein, 9 aa, Homo sapiens
  Table A; Target 87672; HLA-B*39:01; TFDP3; ENSG00000183434; CTA
NHASPNESA

SEQ ID NO: 87673 - protein, 10 aa, Homo sapiens
  Table A; Target 87673; HLA-A*30:02; TFDP3; ENSG00000183434; CTA
NHASPNESAY

SEQ ID NO: 87674 - protein, 10 aa, Homo sapiens
  Table A; Target 87674; HLA-B*38:01; TFDP3; ENSG00000183434; CTA
NHASPNESAY

SEQ ID NO: 87675 - protein, 10 aa, Homo sapiens
  Table A; Target 87675; HLA-B*39:01; TFDP3; ENSG00000183434; CTA
NHASPNESAY

SEQ ID NO: 87676 - protein, 8 aa, Homo sapiens
  Table A; Target 87676; HLA-B*38:01; TFDP3; ENSG00000183434; CTA
NIDQQVVI

SEQ ID NO: 87677 - protein, 8 aa, Homo sapiens
  Table A; Target 87677; HLA-C*04:01; TFDP3; ENSG00000183434; CTA
NIDQQVVI

SEQ ID NO: 87678 - protein, 8 aa, Homo sapiens
  Table A; Target 87678; HLA-C*05:01; TFDP3; ENSG00000183434; CTA
NIDQQVVI

SEQ ID NO: 87679 - protein, 10 aa, Homo sapiens
  Table A; Target 87679; HLA-A*02:07; TFDP3; ENSG00000183434; CTA
NIDQQVVIGM

SEQ ID NO: 87680 - protein, 8 aa, Homo sapiens
  Table A; Target 87680; HLA-B*08:01; TFDP3; ENSG00000183434; CTA
NPLGKQLL

SEQ ID NO: 87681 - protein, 9 aa, Homo sapiens
  Table A; Target 87681; HLA-A*02:01; TFDP3; ENSG00000183434; CTA
NQTSRPVAV

SEQ ID NO: 87682 - protein, 9 aa, Homo sapiens
  Table A; Target 87682; HLA-A*02:03; TFDP3; ENSG00000183434; CTA
NQTSRPVAV

SEQ ID NO: 87683 - protein, 9 aa, Homo sapiens
  Table A; Target 87683; HLA-B*08:01; TFDP3; ENSG00000183434; CTA
NQTSRPVAV

SEQ ID NO: 87684 - protein, 9 aa, Homo sapiens
  Table A; Target 87684; HLA-B*13:02; TFDP3; ENSG00000183434; CTA
NQTSRPVAV

SEQ ID NO: 87685 - protein, 9 aa, Homo sapiens
  Table A; Target 87685; HLA-B*37:01; TFDP3; ENSG00000183434; CTA
NQTSRPVAV

SEQ ID NO: 87686 - protein, 9 aa, Homo sapiens
  Table A; Target 87686; HLA-B*39:01; TFDP3; ENSG00000183434; CTA
NQTSRPVAV

SEQ ID NO: 87687 - protein, 9 aa, Homo sapiens
  Table A; Target 87687; HLA-C*02:02; TFDP3; ENSG00000183434; CTA
NQTSRPVAV

SEQ ID NO: 87688 - protein, 9 aa, Homo sapiens
  Table A; Target 87688; HLA-C*07:02; TFDP3; ENSG00000183434; CTA
NQTSRPVAV

SEQ ID NO: 87689 - protein, 9 aa, Homo sapiens
  Table A; Target 87689; HLA-C*16:01; TFDP3; ENSG00000183434; CTA
NQTSRPVAV

SEQ ID NO: 87690 - protein, 9 aa, Homo sapiens
  Table A; Target 87690; HLA-C*16:02; TFDP3; ENSG00000183434; CTA
NQTSRPVAV

SEQ ID NO: 87691 - protein, 8 aa, Homo sapiens
  Table A; Target 87691; HLA-B*13:02; TFDP3; ENSG00000183434; CTA
NQYVEEQV

SEQ ID NO: 87692 - protein, 9 aa, Homo sapiens
  Table A; Target 87692; HLA-B*27:05; TFDP3; ENSG00000183434; CTA
NQYVEEQVS

SEQ ID NO: 87693 - protein, 11 aa, Homo sapiens
  Table A; Target 87693; HLA-A*68:01; TFDP3; ENSG00000183434; CTA
NQYVEEQVSQR

SEQ ID NO: 87694 - protein, 11 aa, Homo sapiens
  Table A; Target 87694; HLA-B*27:05; TFDP3; ENSG00000183434; CTA
NQYVEEQVSQR

SEQ ID NO: 87695 - protein, 11 aa, Homo sapiens
  Table A; Target 87695; HLA-C*07:06; TFDP3; ENSG00000183434; CTA
NQYVEEQVSQR

SEQ ID NO: 87696 - protein, 9 aa, Homo sapiens
  Table A; Target 87696; HLA-C*12:03; TFDP3; ENSG00000183434; CTA
PAASNIPVV

SEQ ID NO: 87697 - protein, 9 aa, Homo sapiens
  Table A; Target 87697; HLA-C*16:02; TFDP3; ENSG00000183434; CTA
PAASNIPVV

SEQ ID NO: 87698 - protein, 9 aa, Homo sapiens
  Table A; Target 87698; HLA-A*02:07; TFDP3; ENSG00000183434; CTA
PLPNSVIHV

SEQ ID NO: 87699 - protein, 9 aa, Homo sapiens
  Table A; Target 87699; HLA-A*02:03; TFDP3; ENSG00000183434; CTA
PVAVHTSTV

SEQ ID NO: 87700 - protein, 11 aa, Homo sapiens
  Table A; Target 87700; HLA-A*24:02; TFDP3; ENSG00000183434; CTA
PYVTEMAQGTF

SEQ ID NO: 87701 - protein, 8 aa, Homo sapiens
  Table A; Target 87701; HLA-A*30:01; TFDP3; ENSG00000183434; CTA
QEVVGELV

SEQ ID NO: 87702 - protein, 8 aa, Homo sapiens
  Table A; Target 87702; HLA-B*18:01; TFDP3; ENSG00000183434; CTA
QEVVGELV

SEQ ID NO: 87703 - protein, 8 aa, Homo sapiens
  Table A; Target 87703; HLA-B*37:01; TFDP3; ENSG00000183434; CTA
QEVVGELV

SEQ ID NO: 87704 - protein, 8 aa, Homo sapiens
  Table A; Target 87704; HLA-B*40:01; TFDP3; ENSG00000183434; CTA
QEVVGELV

SEQ ID NO: 87705 - protein, 8 aa, Homo sapiens
  Table A; Target 87705; HLA-B*49:01; TFDP3; ENSG00000183434; CTA
QEVVGELV

SEQ ID NO: 87706 - protein, 9 aa, Homo sapiens
  Table A; Target 87706; HLA-A*30:01; TFDP3; ENSG00000183434; CTA
QEVVGELVA

SEQ ID NO: 87707 - protein, 9 aa, Homo sapiens
  Table A; Target 87707; HLA-B*18:01; TFDP3; ENSG00000183434; CTA
QEVVGELVA

SEQ ID NO: 87708 - protein, 9 aa, Homo sapiens
  Table A; Target 87708; HLA-B*40:01; TFDP3; ENSG00000183434; CTA
QEVVGELVA

SEQ ID NO: 87709 - protein, 9 aa, Homo sapiens
  Table A; Target 87709; HLA-B*40:02; TFDP3; ENSG00000183434; CTA
QEVVGELVA

SEQ ID NO: 87710 - protein, 9 aa, Homo sapiens
  Table A; Target 87710; HLA-B*49:01; TFDP3; ENSG00000183434; CTA
QEVVGELVA

SEQ ID NO: 87711 - protein, 10 aa, Homo sapiens
  Table A; Target 87711; HLA-B*27:02; TFDP3; ENSG00000183434; CTA
QEVVGELVAK

SEQ ID NO: 87712 - protein, 11 aa, Homo sapiens
  Table A; Target 87712; HLA-A*25:01; TFDP3; ENSG00000183434; CTA
QEVVGELVAKF

SEQ ID NO: 87713 - protein, 11 aa, Homo sapiens
  Table A; Target 87713; HLA-A*30:01; TFDP3; ENSG00000183434; CTA
QEVVGELVAKF

SEQ ID NO: 87714 - protein, 11 aa, Homo sapiens
  Table A; Target 87714; HLA-B*18:01; TFDP3; ENSG00000183434; CTA
QEVVGELVAKF

SEQ ID NO: 87715 - protein, 11 aa, Homo sapiens
  Table A; Target 87715; HLA-B*27:02; TFDP3; ENSG00000183434; CTA
QEVVGELVAKF

SEQ ID NO: 87716 - protein, 11 aa, Homo sapiens
  Table A; Target 87716; HLA-B*40:01; TFDP3; ENSG00000183434; CTA
QEVVGELVAKF

SEQ ID NO: 87717 - protein, 11 aa, Homo sapiens
  Table A; Target 87717; HLA-B*44:02; TFDP3; ENSG00000183434; CTA
QEVVGELVAKF

SEQ ID NO: 87718 - protein, 11 aa, Homo sapiens
  Table A; Target 87718; HLA-B*44:03; TFDP3; ENSG00000183434; CTA
QEVVGELVAKF

SEQ ID NO: 87719 - protein, 11 aa, Homo sapiens
  Table A; Target 87719; HLA-C*16:04; TFDP3; ENSG00000183434; CTA
QEVVGELVAKF

SEQ ID NO: 87720 - protein, 8 aa, Homo sapiens
  Table A; Target 87720; HLA-C*03:04; TFDP3; ENSG00000183434; CTA
QGTFGGVF

SEQ ID NO: 87721 - protein, 8 aa, Homo sapiens
  Table A; Target 87721; HLA-C*04:01; TFDP3; ENSG00000183434; CTA
QGTFGGVF

SEQ ID NO: 87722 - protein, 8 aa, Homo sapiens
  Table A; Target 87722; HLA-C*07:04; TFDP3; ENSG00000183434; CTA
QGTFGGVF

SEQ ID NO: 87723 - protein, 9 aa, Homo sapiens
  Table A; Target 87723; HLA-B*38:01; TFDP3; ENSG00000183434; CTA
QHSYSSPPW

SEQ ID NO: 87724 - protein, 9 aa, Homo sapiens
  Table A; Target 87724; HLA-B*08:01; TFDP3; ENSG00000183434; CTA
QIAFKNLVL

SEQ ID NO: 87725 - protein, 9 aa, Homo sapiens
  Table A; Target 87725; HLA-A*23:01; TFDP3; ENSG00000183434; CTA
QLILQQIAF

SEQ ID NO: 87726 - protein, 9 aa, Homo sapiens
  Table A; Target 87726; HLA-A*32:01; TFDP3; ENSG00000183434; CTA
QLILQQIAF

SEQ ID NO: 87727 - protein, 9 aa, Homo sapiens
  Table A; Target 87727; HLA-B*15:01; TFDP3; ENSG00000183434; CTA
QLILQQIAF

SEQ ID NO: 87728 - protein, 9 aa, Homo sapiens
  Table A; Target 87728; HLA-B*15:03; TFDP3; ENSG00000183434; CTA
QLILQQIAF

SEQ ID NO: 87729 - protein, 9 aa, Homo sapiens
  Table A; Target 87729; HLA-B*44:02; TFDP3; ENSG00000183434; CTA
QLILQQIAF

SEQ ID NO: 87730 - protein, 9 aa, Homo sapiens
  Table A; Target 87730; HLA-B*44:03; TFDP3; ENSG00000183434; CTA
QLILQQIAF

SEQ ID NO: 87731 - protein, 9 aa, Homo sapiens
  Table A; Target 87731; HLA-B*46:01; TFDP3; ENSG00000183434; CTA
QLILQQIAF

SEQ ID NO: 87732 - protein, 9 aa, Homo sapiens
  Table A; Target 87732; HLA-B*13:02; TFDP3; ENSG00000183434; CTA
QQIAFKNLV

SEQ ID NO: 87733 - protein, 11 aa, Homo sapiens
  Table A; Target 87733; HLA-A*31:01; TFDP3; ENSG00000183434; CTA
QQIAFKNLVLR

SEQ ID NO: 87734 - protein, 8 aa, Homo sapiens
  Table A; Target 87734; HLA-B*13:02; TFDP3; ENSG00000183434; CTA
QQLILQQI

SEQ ID NO: 87735 - protein, 10 aa, Homo sapiens
  Table A; Target 87735; HLA-B*15:01; TFDP3; ENSG00000183434; CTA
QQLILQQIAF

SEQ ID NO: 87736 - protein, 10 aa, Homo sapiens
  Table A; Target 87736; HLA-B*15:03; TFDP3; ENSG00000183434; CTA
QQLILQQIAF

SEQ ID NO: 87737 - protein, 10 aa, Homo sapiens
  Table A; Target 87737; HLA-C*07:06; TFDP3; ENSG00000183434; CTA
QQVVIGMPQR

SEQ ID NO: 87738 - protein, 9 aa, Homo sapiens
  Table A; Target 87738; HLA-A*01:01; TFDP3; ENSG00000183434; CTA
QSELQQLIL

SEQ ID NO: 87739 - protein, 9 aa, Homo sapiens
  Table A; Target 87739; HLA-A*03:01; TFDP3; ENSG00000183434; CTA
QTSRPVAVH

SEQ ID NO: 87740 - protein, 9 aa, Homo sapiens
  Table A; Target 87740; HLA-A*03:02; TFDP3; ENSG00000183434; CTA
QTSRPVAVH

SEQ ID NO: 87741 - protein, 9 aa, Homo sapiens
  Table A; Target 87741; HLA-A*32:01; TFDP3; ENSG00000183434; CTA
QTSRPVAVH

SEQ ID NO: 87742 - protein, 9 aa, Homo sapiens
  Table A; Target 87742; HLA-A*68:01; TFDP3; ENSG00000183434; CTA
QVVIGMPQR

SEQ ID NO: 87743 - protein, 9 aa, Homo sapiens
  Table A; Target 87743; HLA-C*07:06; TFDP3; ENSG00000183434; CTA
QVVIGMPQR

SEQ ID NO: 87744 - protein, 10 aa, Homo sapiens
  Table A; Target 87744; HLA-A*31:01; TFDP3; ENSG00000183434; CTA
QYVEEQVSQR

SEQ ID NO: 87745 - protein, 10 aa, Homo sapiens
  Table A; Target 87745; HLA-A*33:01; TFDP3; ENSG00000183434; CTA
QYVEEQVSQR

SEQ ID NO: 87746 - protein, 10 aa, Homo sapiens
  Table A; Target 87746; HLA-A*33:03; TFDP3; ENSG00000183434; CTA
QYVEEQVSQR

SEQ ID NO: 87747 - protein, 10 aa, Homo sapiens
  Table A; Target 87747; HLA-A*68:01; TFDP3; ENSG00000183434; CTA
QYVEEQVSQR

SEQ ID NO: 87748 - protein, 10 aa, Homo sapiens
  Table A; Target 87748; HLA-B*27:02; TFDP3; ENSG00000183434; CTA
QYVEEQVSQR

SEQ ID NO: 87749 - protein, 10 aa, Homo sapiens
  Table A; Target 87749; HLA-C*07:06; TFDP3; ENSG00000183434; CTA
QYVEEQVSQR

SEQ ID NO: 87750 - protein, 9 aa, Homo sapiens
  Table A; Target 87750; HLA-B*08:01; TFDP3; ENSG00000183434; CTA
RIKQKQSEL

SEQ ID NO: 87751 - protein, 9 aa, Homo sapiens
  Table A; Target 87751; HLA-B*07:02; TFDP3; ENSG00000183434; CTA
RPAASNIPV

SEQ ID NO: 87752 - protein, 9 aa, Homo sapiens
  Table A; Target 87752; HLA-B*56:01; TFDP3; ENSG00000183434; CTA
RPAASNIPV

SEQ ID NO: 87753 - protein, 9 aa, Homo sapiens
  Table A; Target 87753; HLA-C*07:02; TFDP3; ENSG00000183434; CTA
RPAASNIPV

SEQ ID NO: 87754 - protein, 10 aa, Homo sapiens
  Table A; Target 87754; HLA-B*07:02; TFDP3; ENSG00000183434; CTA
RPAASNIPVV

SEQ ID NO: 87755 - protein, 10 aa, Homo sapiens
  Table A; Target 87755; HLA-B*56:01; TFDP3; ENSG00000183434; CTA
RPAASNIPVV

SEQ ID NO: 87756 - protein, 10 aa, Homo sapiens
  Table A; Target 87756; HLA-C*07:02; TFDP3; ENSG00000183434; CTA
RPAASNIPVV

SEQ ID NO: 87757 - protein, 10 aa, Homo sapiens
  Table A; Target 87757; HLA-B*56:01; TFDP3; ENSG00000183434; CTA
RPLPNSVIHV

SEQ ID NO: 87758 - protein, 10 aa, Homo sapiens
  Table A; Target 87758; HLA-C*07:02; TFDP3; ENSG00000183434; CTA
RPLPNSVIHV

SEQ ID NO: 87759 - protein, 9 aa, Homo sapiens
  Table A; Target 87759; HLA-B*07:02; TFDP3; ENSG00000183434; CTA
RPVAVHTST

SEQ ID NO: 87760 - protein, 9 aa, Homo sapiens
  Table A; Target 87760; HLA-B*56:01; TFDP3; ENSG00000183434; CTA
RPVAVHTST

SEQ ID NO: 87761 - protein, 9 aa, Homo sapiens
  Table A; Target 87761; HLA-C*07:02; TFDP3; ENSG00000183434; CTA
RPVAVHTST

SEQ ID NO: 87762 - protein, 10 aa, Homo sapiens
  Table A; Target 87762; HLA-B*07:02; TFDP3; ENSG00000183434; CTA
RPVAVHTSTV

SEQ ID NO: 87763 - protein, 10 aa, Homo sapiens
  Table A; Target 87763; HLA-B*51:01; TFDP3; ENSG00000183434; CTA
RPVAVHTSTV

SEQ ID NO: 87764 - protein, 10 aa, Homo sapiens
  Table A; Target 87764; HLA-B*56:01; TFDP3; ENSG00000183434; CTA
RPVAVHTSTV

SEQ ID NO: 87765 - protein, 10 aa, Homo sapiens
  Table A; Target 87765; HLA-C*07:02; TFDP3; ENSG00000183434; CTA
RPVAVHTSTV

SEQ ID NO: 87766 - protein, 9 aa, Homo sapiens
  Table A; Target 87766; HLA-A*03:01; TFDP3; ENSG00000183434; CTA
RTYDALNVL

SEQ ID NO: 87767 - protein, 9 aa, Homo sapiens
  Table A; Target 87767; HLA-B*58:01; TFDP3; ENSG00000183434; CTA
RTYDALNVL

SEQ ID NO: 87768 - protein, 9 aa, Homo sapiens
  Table A; Target 87768; HLA-C*03:04; TFDP3; ENSG00000183434; CTA
RTYDALNVL

SEQ ID NO: 87769 - protein, 10 aa, Homo sapiens
  Table A; Target 87769; HLA-A*31:01; TFDP3; ENSG00000183434; CTA
RTYDALNVLM

SEQ ID NO: 87770 - protein, 10 aa, Homo sapiens
  Table A; Target 87770; HLA-B*57:01; TFDP3; ENSG00000183434; CTA
RTYDALNVLM

SEQ ID NO: 87771 - protein, 10 aa, Homo sapiens
  Table A; Target 87771; HLA-B*58:01; TFDP3; ENSG00000183434; CTA
RTYDALNVLM

SEQ ID NO: 87772 - protein, 9 aa, Homo sapiens
  Table A; Target 87772; HLA-A*31:01; TFDP3; ENSG00000183434; CTA
SAEDLKMAR

SEQ ID NO: 87773 - protein, 9 aa, Homo sapiens
  Table A; Target 87773; HLA-A*33:01; TFDP3; ENSG00000183434; CTA
SAEDLKMAR

SEQ ID NO: 87774 - protein, 9 aa, Homo sapiens
  Table A; Target 87774; HLA-A*33:03; TFDP3; ENSG00000183434; CTA
SAEDLKMAR

SEQ ID NO: 87775 - protein, 9 aa, Homo sapiens
  Table A; Target 87775; HLA-A*68:01; TFDP3; ENSG00000183434; CTA
SAEDLKMAR

SEQ ID NO: 87776 - protein, 9 aa, Homo sapiens
  Table A; Target 87776; HLA-C*07:06; TFDP3; ENSG00000183434; CTA
SAEDLKMAR

SEQ ID NO: 87777 - protein, 9 aa, Homo sapiens
  Table A; Target 87777; HLA-C*07:06; TFDP3; ENSG00000183434; CTA
SAQNCQNLR

SEQ ID NO: 87778 - protein, 9 aa, Homo sapiens
  Table A; Target 87778; HLA-C*12:03; TFDP3; ENSG00000183434; CTA
SASDLTNIA

SEQ ID NO: 87779 - protein, 10 aa, Homo sapiens
  Table A; Target 87779; HLA-A*68:01; TFDP3; ENSG00000183434; CTA
SASDLTNIAI

SEQ ID NO: 87780 - protein, 10 aa, Homo sapiens
  Table A; Target 87780; HLA-B*13:02; TFDP3; ENSG00000183434; CTA
SASDLTNIAI

SEQ ID NO: 87781 - protein, 10 aa, Homo sapiens
  Table A; Target 87781; HLA-C*02:02; TFDP3; ENSG00000183434; CTA
SASDLTNIAI

SEQ ID NO: 87782 - protein, 10 aa, Homo sapiens
  Table A; Target 87782; HLA-C*07:06; TFDP3; ENSG00000183434; CTA
SASDLTNIAI

SEQ ID NO: 87783 - protein, 8 aa, Homo sapiens
  Table A; Target 87783; HLA-B*13:02; TFDP3; ENSG00000183434; CTA
SAYDVKNI

SEQ ID NO: 87784 - protein, 8 aa, Homo sapiens
  Table A; Target 87784; HLA-B*51:01; TFDP3; ENSG00000183434; CTA
SAYDVKNI

SEQ ID NO: 87785 - protein, 8 aa, Homo sapiens
  Table A; Target 87785; HLA-C*06:02; TFDP3; ENSG00000183434; CTA
SAYDVKNI

SEQ ID NO: 87786 - protein, 8 aa, Homo sapiens
  Table A; Target 87786; HLA-C*12:03; TFDP3; ENSG00000183434; CTA
SAYDVKNI

SEQ ID NO: 87787 - protein, 8 aa, Homo sapiens
  Table A; Target 87787; HLA-C*16:02; TFDP3; ENSG00000183434; CTA
SAYDVKNI

SEQ ID NO: 87788 - protein, 8 aa, Homo sapiens
  Table A; Target 87788; HLA-C*16:04; TFDP3; ENSG00000183434; CTA
SAYDVKNI

SEQ ID NO: 87789 - protein, 9 aa, Homo sapiens
  Table A; Target 87789; HLA-A*03:01; TFDP3; ENSG00000183434; CTA
SAYDVKNIK

SEQ ID NO: 87790 - protein, 9 aa, Homo sapiens
  Table A; Target 87790; HLA-A*03:02; TFDP3; ENSG00000183434; CTA
SAYDVKNIK

SEQ ID NO: 87791 - protein, 9 aa, Homo sapiens
  Table A; Target 87791; HLA-A*11:01; TFDP3; ENSG00000183434; CTA
SAYDVKNIK

SEQ ID NO: 87792 - protein, 9 aa, Homo sapiens
  Table A; Target 87792; HLA-A*68:01; TFDP3; ENSG00000183434; CTA
SAYDVKNIK

SEQ ID NO: 87793 - protein, 9 aa, Homo sapiens
  Table A; Target 87793; HLA-C*02:02; TFDP3; ENSG00000183434; CTA
SAYDVKNIK

SEQ ID NO: 87794 - protein, 9 aa, Homo sapiens
  Table A; Target 87794; HLA-C*07:06; TFDP3; ENSG00000183434; CTA
SAYDVKNIK

SEQ ID NO: 87795 - protein, 9 aa, Homo sapiens
  Table A; Target 87795; HLA-C*12:03; TFDP3; ENSG00000183434; CTA
SAYDVKNIK

SEQ ID NO: 87796 - protein, 9 aa, Homo sapiens
  Table A; Target 87796; HLA-C*16:01; TFDP3; ENSG00000183434; CTA
SAYDVKNIK

SEQ ID NO: 87797 - protein, 10 aa, Homo sapiens
  Table A; Target 87797; HLA-A*11:01; TFDP3; ENSG00000183434; CTA
SAYDVKNIKR

SEQ ID NO: 87798 - protein, 10 aa, Homo sapiens
  Table A; Target 87798; HLA-A*31:01; TFDP3; ENSG00000183434; CTA
SAYDVKNIKR

SEQ ID NO: 87799 - protein, 10 aa, Homo sapiens
  Table A; Target 87799; HLA-A*33:01; TFDP3; ENSG00000183434; CTA
SAYDVKNIKR

SEQ ID NO: 87800 - protein, 10 aa, Homo sapiens
  Table A; Target 87800; HLA-A*33:03; TFDP3; ENSG00000183434; CTA
SAYDVKNIKR

SEQ ID NO: 87801 - protein, 10 aa, Homo sapiens
  Table A; Target 87801; HLA-A*68:01; TFDP3; ENSG00000183434; CTA
SAYDVKNIKR

SEQ ID NO: 87802 - protein, 10 aa, Homo sapiens
  Table A; Target 87802; HLA-C*07:06; TFDP3; ENSG00000183434; CTA
SAYDVKNIKR

SEQ ID NO: 87803 - protein, 9 aa, Homo sapiens
  Table A; Target 87803; HLA-C*01:02; TFDP3; ENSG00000183434; CTA
SCQEVVGEL

SEQ ID NO: 87804 - protein, 9 aa, Homo sapiens
  Table A; Target 87804; HLA-B*38:01; TFDP3; ENSG00000183434; CTA
SDDKSEYLF

SEQ ID NO: 87805 - protein, 8 aa, Homo sapiens
  Table A; Target 87805; HLA-B*37:01; TFDP3; ENSG00000183434; CTA
SDLTNIAI

SEQ ID NO: 87806 - protein, 11 aa, Homo sapiens
  Table A; Target 87806; HLA-B*44:02; TFDP3; ENSG00000183434; CTA
SELQQLILQQI

SEQ ID NO: 87807 - protein, 11 aa, Homo sapiens
  Table A; Target 87807; HLA-B*44:03; TFDP3; ENSG00000183434; CTA
SELQQLILQQI

SEQ ID NO: 87808 - protein, 11 aa, Homo sapiens
  Table A; Target 87808; HLA-B*49:01; TFDP3; ENSG00000183434; CTA
SELQQLILQQI

SEQ ID NO: 87809 - protein, 9 aa, Homo sapiens
  Table A; Target 87809; HLA-A*26:01; TFDP3; ENSG00000183434; CTA
SISDDKSEY

SEQ ID NO: 87810 - protein, 9 aa, Homo sapiens
  Table A; Target 87810; HLA-A*30:02; TFDP3; ENSG00000183434; CTA
SISDDKSEY

SEQ ID NO: 87811 - protein, 9 aa, Homo sapiens
  Table A; Target 87811; HLA-A*32:01; TFDP3; ENSG00000183434; CTA
SISDDKSEY

SEQ ID NO: 87812 - protein, 9 aa, Homo sapiens
  Table A; Target 87812; HLA-B*15:01; TFDP3; ENSG00000183434; CTA
SISDDKSEY

SEQ ID NO: 87813 - protein, 9 aa, Homo sapiens
  Table A; Target 87813; HLA-B*46:01; TFDP3; ENSG00000183434; CTA
SISDDKSEY

SEQ ID NO: 87814 - protein, 9 aa, Homo sapiens
  Table A; Target 87814; HLA-C*07:04; TFDP3; ENSG00000183434; CTA
SISDDKSEY

SEQ ID NO: 87815 - protein, 9 aa, Homo sapiens
  Table A; Target 87815; HLA-C*16:01; TFDP3; ENSG00000183434; CTA
SISDDKSEY

SEQ ID NO: 87816 - protein, 9 aa, Homo sapiens
  Table A; Target 87816; HLA-A*02:01; TFDP3; ENSG00000183434; CTA
SLTEANEEL

SEQ ID NO: 87817 - protein, 9 aa, Homo sapiens
  Table A; Target 87817; HLA-B*35:03; TFDP3; ENSG00000183434; CTA
SLTEANEEL

SEQ ID NO: 87818 - protein, 9 aa, Homo sapiens
  Table A; Target 87818; HLA-B*39:01; TFDP3; ENSG00000183434; CTA
SLTEANEEL

SEQ ID NO: 87819 - protein, 9 aa, Homo sapiens
  Table A; Target 87819; HLA-B*55:01; TFDP3; ENSG00000183434; CTA
SLTEANEEL

SEQ ID NO: 87820 - protein, 9 aa, Homo sapiens
  Table A; Target 87820; HLA-C*01:02; TFDP3; ENSG00000183434; CTA
SLTEANEEL

SEQ ID NO: 87821 - protein, 9 aa, Homo sapiens
  Table A; Target 87821; HLA-C*14:02; TFDP3; ENSG00000183434; CTA
SLTEANEEL

SEQ ID NO: 87822 - protein, 11 aa, Homo sapiens
  Table A; Target 87822; HLA-A*02:01; TFDP3; ENSG00000183434; CTA
SLTEANEELKV

SEQ ID NO: 87823 - protein, 10 aa, Homo sapiens
  Table A; Target 87823; HLA-A*31:01; TFDP3; ENSG00000183434; CTA
SMKVWETVQR

SEQ ID NO: 87824 - protein, 10 aa, Homo sapiens
  Table A; Target 87824; HLA-A*33:03; TFDP3; ENSG00000183434; CTA
SMKVWETVQR

SEQ ID NO: 87825 - protein, 11 aa, Homo sapiens
  Table A; Target 87825; HLA-A*30:02; TFDP3; ENSG00000183434; CTA
SNHASPNESAY

SEQ ID NO: 87826 - protein, 9 aa, Homo sapiens
  Table A; Target 87826; HLA-B*07:02; TFDP3; ENSG00000183434; CTA
SPNESAYDV

SEQ ID NO: 87827 - protein, 9 aa, Homo sapiens
  Table A; Target 87827; HLA-B*35:01; TFDP3; ENSG00000183434; CTA
SPNESAYDV

SEQ ID NO: 87828 - protein, 9 aa, Homo sapiens
  Table A; Target 87828; HLA-B*35:03; TFDP3; ENSG00000183434; CTA
SPNESAYDV

SEQ ID NO: 87829 - protein, 9 aa, Homo sapiens
  Table A; Target 87829; HLA-B*55:01; TFDP3; ENSG00000183434; CTA
SPNESAYDV

SEQ ID NO: 87830 - protein, 9 aa, Homo sapiens
  Table A; Target 87830; HLA-B*56:01; TFDP3; ENSG00000183434; CTA
SPNESAYDV

SEQ ID NO: 87831 - protein, 10 aa, Homo sapiens
  Table A; Target 87831; HLA-B*35:01; TFDP3; ENSG00000183434; CTA
SPNESAYDVK

SEQ ID NO: 87832 - protein, 10 aa, Homo sapiens
  Table A; Target 87832; HLA-C*07:06; TFDP3; ENSG00000183434; CTA
SPNESAYDVK

SEQ ID NO: 87833 - protein, 9 aa, Homo sapiens
  Table A; Target 87833; HLA-A*23:01; TFDP3; ENSG00000183434; CTA
SPNPPSTHF

SEQ ID NO: 87834 - protein, 9 aa, Homo sapiens
  Table A; Target 87834; HLA-A*24:02; TFDP3; ENSG00000183434; CTA
SPNPPSTHF

SEQ ID NO: 87835 - protein, 9 aa, Homo sapiens
  Table A; Target 87835; HLA-A*25:01; TFDP3; ENSG00000183434; CTA
SPNPPSTHF

SEQ ID NO: 87836 - protein, 9 aa, Homo sapiens
  Table A; Target 87836; HLA-A*30:02; TFDP3; ENSG00000183434; CTA
SPNPPSTHF

SEQ ID NO: 87837 - protein, 9 aa, Homo sapiens
  Table A; Target 87837; HLA-A*32:01; TFDP3; ENSG00000183434; CTA
SPNPPSTHF

SEQ ID NO: 87838 - protein, 9 aa, Homo sapiens
  Table A; Target 87838; HLA-A*33:01; TFDP3; ENSG00000183434; CTA
SPNPPSTHF

SEQ ID NO: 87839 - protein, 9 aa, Homo sapiens
  Table A; Target 87839; HLA-A*33:03; TFDP3; ENSG00000183434; CTA
SPNPPSTHF

SEQ ID NO: 87840 - protein, 9 aa, Homo sapiens
  Table A; Target 87840; HLA-B*08:01; TFDP3; ENSG00000183434; CTA
SPNPPSTHF

SEQ ID NO: 87841 - protein, 9 aa, Homo sapiens
  Table A; Target 87841; HLA-B*15:01; TFDP3; ENSG00000183434; CTA
SPNPPSTHF

SEQ ID NO: 87842 - protein, 9 aa, Homo sapiens
  Table A; Target 87842; HLA-B*15:03; TFDP3; ENSG00000183434; CTA
SPNPPSTHF

SEQ ID NO: 87843 - protein, 9 aa, Homo sapiens
  Table A; Target 87843; HLA-B*35:01; TFDP3; ENSG00000183434; CTA
SPNPPSTHF

SEQ ID NO: 87844 - protein, 9 aa, Homo sapiens
  Table A; Target 87844; HLA-B*35:03; TFDP3; ENSG00000183434; CTA
SPNPPSTHF

SEQ ID NO: 87845 - protein, 9 aa, Homo sapiens
  Table A; Target 87845; HLA-B*37:01; TFDP3; ENSG00000183434; CTA
SPNPPSTHF

SEQ ID NO: 87846 - protein, 9 aa, Homo sapiens
  Table A; Target 87846; HLA-B*44:03; TFDP3; ENSG00000183434; CTA
SPNPPSTHF

SEQ ID NO: 87847 - protein, 9 aa, Homo sapiens
  Table A; Target 87847; HLA-B*46:01; TFDP3; ENSG00000183434; CTA
SPNPPSTHF

SEQ ID NO: 87848 - protein, 9 aa, Homo sapiens
  Table A; Target 87848; HLA-B*51:01; TFDP3; ENSG00000183434; CTA
SPNPPSTHF

SEQ ID NO: 87849 - protein, 9 aa, Homo sapiens
  Table A; Target 87849; HLA-B*55:01; TFDP3; ENSG00000183434; CTA
SPNPPSTHF

SEQ ID NO: 87850 - protein, 9 aa, Homo sapiens
  Table A; Target 87850; HLA-B*56:01; TFDP3; ENSG00000183434; CTA
SPNPPSTHF

SEQ ID NO: 87851 - protein, 9 aa, Homo sapiens
  Table A; Target 87851; HLA-B*58:01; TFDP3; ENSG00000183434; CTA
SPNPPSTHF

SEQ ID NO: 87852 - protein, 9 aa, Homo sapiens
  Table A; Target 87852; HLA-C*01:02; TFDP3; ENSG00000183434; CTA
SPNPPSTHF

SEQ ID NO: 87853 - protein, 9 aa, Homo sapiens
  Table A; Target 87853; HLA-C*02:02; TFDP3; ENSG00000183434; CTA
SPNPPSTHF

SEQ ID NO: 87854 - protein, 9 aa, Homo sapiens
  Table A; Target 87854; HLA-C*03:03; TFDP3; ENSG00000183434; CTA
SPNPPSTHF

SEQ ID NO: 87855 - protein, 9 aa, Homo sapiens
  Table A; Target 87855; HLA-C*03:04; TFDP3; ENSG00000183434; CTA
SPNPPSTHF

SEQ ID NO: 87856 - protein, 9 aa, Homo sapiens
  Table A; Target 87856; HLA-C*04:01; TFDP3; ENSG00000183434; CTA
SPNPPSTHF

SEQ ID NO: 87857 - protein, 9 aa, Homo sapiens
  Table A; Target 87857; HLA-C*05:01; TFDP3; ENSG00000183434; CTA
SPNPPSTHF

SEQ ID NO: 87858 - protein, 9 aa, Homo sapiens
  Table A; Target 87858; HLA-C*07:02; TFDP3; ENSG00000183434; CTA
SPNPPSTHF

SEQ ID NO: 87859 - protein, 9 aa, Homo sapiens
  Table A; Target 87859; HLA-C*07:06; TFDP3; ENSG00000183434; CTA
SPNPPSTHF

SEQ ID NO: 87860 - protein, 9 aa, Homo sapiens
  Table A; Target 87860; HLA-C*14:02; TFDP3; ENSG00000183434; CTA
SPNPPSTHF

SEQ ID NO: 87861 - protein, 9 aa, Homo sapiens
  Table A; Target 87861; HLA-C*16:01; TFDP3; ENSG00000183434; CTA
SPNPPSTHF

SEQ ID NO: 87862 - protein, 10 aa, Homo sapiens
  Table A; Target 87862; HLA-B*54:01; TFDP3; ENSG00000183434; CTA
SPNPPSTHFA

SEQ ID NO: 87863 - protein, 10 aa, Homo sapiens
  Table A; Target 87863; HLA-B*56:01; TFDP3; ENSG00000183434; CTA
SPNPPSTHFA

SEQ ID NO: 87864 - protein, 9 aa, Homo sapiens
  Table A; Target 87864; HLA-A*02:03; TFDP3; ENSG00000183434; CTA
SQRPLPNSV

SEQ ID NO: 87865 - protein, 9 aa, Homo sapiens
  Table A; Target 87865; HLA-A*32:01; TFDP3; ENSG00000183434; CTA
SQRPLPNSV

SEQ ID NO: 87866 - protein, 9 aa, Homo sapiens
  Table A; Target 87866; HLA-B*13:02; TFDP3; ENSG00000183434; CTA
SQRPLPNSV

SEQ ID NO: 87867 - protein, 9 aa, Homo sapiens
  Table A; Target 87867; HLA-B*15:03; TFDP3; ENSG00000183434; CTA
SQRPLPNSV

SEQ ID NO: 87868 - protein, 11 aa, Homo sapiens
  Table A; Target 87868; HLA-A*32:01; TFDP3; ENSG00000183434; CTA
SQYSGSRVETP

SEQ ID NO: 87869 - protein, 11 aa, Homo sapiens
  Table A; Target 87869; HLA-B*15:01; TFDP3; ENSG00000183434; CTA
SQYSGSRVETP

SEQ ID NO: 87870 - protein, 11 aa, Homo sapiens
  Table A; Target 87870; HLA-A*68:02; TFDP3; ENSG00000183434; CTA
SSFEIHDDTEV

SEQ ID NO: 87871 - protein, 11 aa, Homo sapiens
  Table A; Target 87871; HLA-A*31:01; TFDP3; ENSG00000183434; CTA
SSPPWAGQHNR

SEQ ID NO: 87872 - protein, 9 aa, Homo sapiens
  Table A; Target 87872; HLA-A*68:02; TFDP3; ENSG00000183434; CTA
SSVNIDQQV

SEQ ID NO: 87873 - protein, 9 aa, Homo sapiens
  Table A; Target 87873; HLA-B*13:02; TFDP3; ENSG00000183434; CTA
SSVNIDQQV

SEQ ID NO: 87874 - protein, 8 aa, Homo sapiens
  Table A; Target 87874; HLA-A*11:01; TFDP3; ENSG00000183434; CTA
STVNPLGK

SEQ ID NO: 87875 - protein, 9 aa, Homo sapiens
  Table A; Target 87875; HLA-B*13:02; TFDP3; ENSG00000183434; CTA
SVNIDQQVV

SEQ ID NO: 87876 - protein, 9 aa, Homo sapiens
  Table A; Target 87876; HLA-A*30:01; TFDP3; ENSG00000183434; CTA
TEANEELKV

SEQ ID NO: 87877 - protein, 9 aa, Homo sapiens
  Table A; Target 87877; HLA-B*13:02; TFDP3; ENSG00000183434; CTA
TEANEELKV

SEQ ID NO: 87878 - protein, 9 aa, Homo sapiens
  Table A; Target 87878; HLA-B*40:01; TFDP3; ENSG00000183434; CTA
TEANEELKV

SEQ ID NO: 87879 - protein, 9 aa, Homo sapiens
  Table A; Target 87879; HLA-B*44:03; TFDP3; ENSG00000183434; CTA
TEANEELKV

SEQ ID NO: 87880 - protein, 9 aa, Homo sapiens
  Table A; Target 87880; HLA-B*49:01; TFDP3; ENSG00000183434; CTA
TEANEELKV

SEQ ID NO: 87881 - protein, 10 aa, Homo sapiens
  Table A; Target 87881; HLA-A*30:01; TFDP3; ENSG00000183434; CTA
TEANEELKVL

SEQ ID NO: 87882 - protein, 10 aa, Homo sapiens
  Table A; Target 87882; HLA-B*27:05; TFDP3; ENSG00000183434; CTA
TEANEELKVL

SEQ ID NO: 87883 - protein, 10 aa, Homo sapiens
  Table A; Target 87883; HLA-B*40:01; TFDP3; ENSG00000183434; CTA
TEANEELKVL

SEQ ID NO: 87884 - protein, 10 aa, Homo sapiens
  Table A; Target 87884; HLA-B*40:02; TFDP3; ENSG00000183434; CTA
TEANEELKVL

SEQ ID NO: 87885 - protein, 10 aa, Homo sapiens
  Table A; Target 87885; HLA-B*44:02; TFDP3; ENSG00000183434; CTA
TEANEELKVL

SEQ ID NO: 87886 - protein, 10 aa, Homo sapiens
  Table A; Target 87886; HLA-B*44:03; TFDP3; ENSG00000183434; CTA
TEANEELKVL

SEQ ID NO: 87887 - protein, 10 aa, Homo sapiens
  Table A; Target 87887; HLA-B*49:01; TFDP3; ENSG00000183434; CTA
TEANEELKVL

SEQ ID NO: 87888 - protein, 11 aa, Homo sapiens
  Table A; Target 87888; HLA-A*30:01; TFDP3; ENSG00000183434; CTA
TEANEELKVLM

SEQ ID NO: 87889 - protein, 11 aa, Homo sapiens
  Table A; Target 87889; HLA-B*40:01; TFDP3; ENSG00000183434; CTA
TEANEELKVLM

SEQ ID NO: 87890 - protein, 11 aa, Homo sapiens
  Table A; Target 87890; HLA-B*44:02; TFDP3; ENSG00000183434; CTA
TEANEELKVLM

SEQ ID NO: 87891 - protein, 11 aa, Homo sapiens
  Table A; Target 87891; HLA-B*44:03; TFDP3; ENSG00000183434; CTA
TEANEELKVLM

SEQ ID NO: 87892 - protein, 8 aa, Homo sapiens
  Table A; Target 87892; HLA-B*18:01; TFDP3; ENSG00000183434; CTA
TEMAQGTF

SEQ ID NO: 87893 - protein, 8 aa, Homo sapiens
  Table A; Target 87893; HLA-B*37:01; TFDP3; ENSG00000183434; CTA
TEMAQGTF

SEQ ID NO: 87894 - protein, 8 aa, Homo sapiens
  Table A; Target 87894; HLA-B*44:03; TFDP3; ENSG00000183434; CTA
TEMAQGTF

SEQ ID NO: 87895 - protein, 8 aa, Homo sapiens
  Table A; Target 87895; HLA-C*16:04; TFDP3; ENSG00000183434; CTA
TEMAQGTF

SEQ ID NO: 87896 - protein, 9 aa, Homo sapiens
  Table A; Target 87896; HLA-B*49:01; TFDP3; ENSG00000183434; CTA
TEMAQGTFG

SEQ ID NO: 87897 - protein, 11 aa, Homo sapiens
  Table A; Target 87897; HLA-B*49:01; TFDP3; ENSG00000183434; CTA
TEMAQGTFGGV

SEQ ID NO: 87898 - protein, 9 aa, Homo sapiens
  Table A; Target 87898; HLA-A*23:01; TFDP3; ENSG00000183434; CTA
TFGGVFTTA

SEQ ID NO: 87899 - protein, 9 aa, Homo sapiens
  Table A; Target 87899; HLA-B*54:01; TFDP3; ENSG00000183434; CTA
TFGGVFTTA

SEQ ID NO: 87900 - protein, 9 aa, Homo sapiens
  Table A; Target 87900; HLA-C*14:02; TFDP3; ENSG00000183434; CTA
TFGGVFTTA

SEQ ID NO: 87901 - protein, 10 aa, Homo sapiens
  Table A; Target 87901; HLA-C*04:01; TFDP3; ENSG00000183434; CTA
TFGGVFTTAG

SEQ ID NO: 87902 - protein, 11 aa, Homo sapiens
  Table A; Target 87902; HLA-A*30:02; TFDP3; ENSG00000183434; CTA
THFASQNQHSY

SEQ ID NO: 87903 - protein, 11 aa, Homo sapiens
  Table A; Target 87903; HLA-A*32:01; TFDP3; ENSG00000183434; CTA
THFASQNQHSY

SEQ ID NO: 87904 - protein, 11 aa, Homo sapiens
  Table A; Target 87904; HLA-B*38:01; TFDP3; ENSG00000183434; CTA
THFASQNQHSY

SEQ ID NO: 87905 - protein, 9 aa, Homo sapiens
  Table A; Target 87905; HLA-C*06:02; TFDP3; ENSG00000183434; CTA
TSRPVAVHT

SEQ ID NO: 87906 - protein, 8 aa, Homo sapiens
  Table A; Target 87906; HLA-A*30:02; TFDP3; ENSG00000183434; CTA
TSSGGSQY

SEQ ID NO: 87907 - protein, 8 aa, Homo sapiens
  Table A; Target 87907; HLA-B*39:01; TFDP3; ENSG00000183434; CTA
TSSGGSQY

SEQ ID NO: 87908 - protein, 8 aa, Homo sapiens
  Table A; Target 87908; HLA-C*05:01; TFDP3; ENSG00000183434; CTA
TSSGGSQY

SEQ ID NO: 87909 - protein, 8 aa, Homo sapiens
  Table A; Target 87909; HLA-C*16:01; TFDP3; ENSG00000183434; CTA
TSSGGSQY

SEQ ID NO: 87910 - protein, 9 aa, Homo sapiens
  Table A; Target 87910; HLA-A*03:02; TFDP3; ENSG00000183434; CTA
TSTVNPLGK

SEQ ID NO: 87911 - protein, 9 aa, Homo sapiens
  Table A; Target 87911; HLA-A*11:01; TFDP3; ENSG00000183434; CTA
TSTVNPLGK

SEQ ID NO: 87912 - protein, 9 aa, Homo sapiens
  Table A; Target 87912; HLA-A*68:01; TFDP3; ENSG00000183434; CTA
TSTVNPLGK

SEQ ID NO: 87913 - protein, 9 aa, Homo sapiens
  Table A; Target 87913; HLA-C*07:06; TFDP3; ENSG00000183434; CTA
TSTVNPLGK

SEQ ID NO: 87914 - protein, 11 aa, Homo sapiens
  Table A; Target 87914; HLA-A*25:01; TFDP3; ENSG00000183434; CTA
TTAGSRSNGTW

SEQ ID NO: 87915 - protein, 11 aa, Homo sapiens
  Table A; Target 87915; HLA-A*32:01; TFDP3; ENSG00000183434; CTA
TTAGSRSNGTW

SEQ ID NO: 87916 - protein, 11 aa, Homo sapiens
  Table A; Target 87916; HLA-B*58:01; TFDP3; ENSG00000183434; CTA
TTAGSRSNGTW

SEQ ID NO: 87917 - protein, 9 aa, Homo sapiens
  Table A; Target 87917; HLA-A*31:01; TFDP3; ENSG00000183434; CTA
TVNPLGKQL

SEQ ID NO: 87918 - protein, 9 aa, Homo sapiens
  Table A; Target 87918; HLA-A*32:01; TFDP3; ENSG00000183434; CTA
TVNPLGKQL

SEQ ID NO: 87919 - protein, 9 aa, Homo sapiens
  Table A; Target 87919; HLA-B*07:02; TFDP3; ENSG00000183434; CTA
TVNPLGKQL

SEQ ID NO: 87920 - protein, 9 aa, Homo sapiens
  Table A; Target 87920; HLA-B*27:05; TFDP3; ENSG00000183434; CTA
TVNPLGKQL

SEQ ID NO: 87921 - protein, 9 aa, Homo sapiens
  Table A; Target 87921; HLA-C*01:02; TFDP3; ENSG00000183434; CTA
TVNPLGKQL

SEQ ID NO: 87922 - protein, 9 aa, Homo sapiens
  Table A; Target 87922; HLA-C*07:06; TFDP3; ENSG00000183434; CTA
TVNPLGKQL

SEQ ID NO: 87923 - protein, 9 aa, Homo sapiens
  Table A; Target 87923; HLA-C*16:02; TFDP3; ENSG00000183434; CTA
TVNPLGKQL

SEQ ID NO: 87924 - protein, 10 aa, Homo sapiens
  Table A; Target 87924; HLA-A*23:01; TFDP3; ENSG00000183434; CTA
TVNPLGKQLL

SEQ ID NO: 87925 - protein, 10 aa, Homo sapiens
  Table A; Target 87925; HLA-A*31:01; TFDP3; ENSG00000183434; CTA
TVNPLGKQLL

SEQ ID NO: 87926 - protein, 10 aa, Homo sapiens
  Table A; Target 87926; HLA-A*32:01; TFDP3; ENSG00000183434; CTA
TVNPLGKQLL

SEQ ID NO: 87927 - protein, 11 aa, Homo sapiens
  Table A; Target 87927; HLA-A*24:02; TFDP3; ENSG00000183434; CTA
TWLSASDLTNI

SEQ ID NO: 87928 - protein, 8 aa, Homo sapiens
  Table A; Target 87928; HLA-A*23:01; TFDP3; ENSG00000183434; CTA
TYDALNVL

SEQ ID NO: 87929 - protein, 8 aa, Homo sapiens
  Table A; Target 87929; HLA-B*35:03; TFDP3; ENSG00000183434; CTA
TYDALNVL

SEQ ID NO: 87930 - protein, 8 aa, Homo sapiens
  Table A; Target 87930; HLA-C*04:01; TFDP3; ENSG00000183434; CTA
TYDALNVL

SEQ ID NO: 87931 - protein, 8 aa, Homo sapiens
  Table A; Target 87931; HLA-C*05:01; TFDP3; ENSG00000183434; CTA
TYDALNVL

SEQ ID NO: 87932 - protein, 8 aa, Homo sapiens
  Table A; Target 87932; HLA-C*07:04; TFDP3; ENSG00000183434; CTA
TYDALNVL

SEQ ID NO: 87933 - protein, 8 aa, Homo sapiens
  Table A; Target 87933; HLA-C*14:02; TFDP3; ENSG00000183434; CTA
TYDALNVL

SEQ ID NO: 87934 - protein, 9 aa, Homo sapiens
  Table A; Target 87934; HLA-A*02:07; TFDP3; ENSG00000183434; CTA
TYDALNVLM

SEQ ID NO: 87935 - protein, 9 aa, Homo sapiens
  Table A; Target 87935; HLA-A*23:01; TFDP3; ENSG00000183434; CTA
TYDALNVLM

SEQ ID NO: 87936 - protein, 9 aa, Homo sapiens
  Table A; Target 87936; HLA-A*24:02; TFDP3; ENSG00000183434; CTA
TYDALNVLM

SEQ ID NO: 87937 - protein, 9 aa, Homo sapiens
  Table A; Target 87937; HLA-A*29:02; TFDP3; ENSG00000183434; CTA
TYDALNVLM

SEQ ID NO: 87938 - protein, 9 aa, Homo sapiens
  Table A; Target 87938; HLA-A*33:03; TFDP3; ENSG00000183434; CTA
TYDALNVLM

SEQ ID NO: 87939 - protein, 9 aa, Homo sapiens
  Table A; Target 87939; HLA-B*35:01; TFDP3; ENSG00000183434; CTA
TYDALNVLM

SEQ ID NO: 87940 - protein, 9 aa, Homo sapiens
  Table A; Target 87940; HLA-B*35:03; TFDP3; ENSG00000183434; CTA
TYDALNVLM

SEQ ID NO: 87941 - protein, 9 aa, Homo sapiens
  Table A; Target 87941; HLA-B*38:01; TFDP3; ENSG00000183434; CTA
TYDALNVLM

SEQ ID NO: 87942 - protein, 9 aa, Homo sapiens
  Table A; Target 87942; HLA-B*55:01; TFDP3; ENSG00000183434; CTA
TYDALNVLM

SEQ ID NO: 87943 - protein, 9 aa, Homo sapiens
  Table A; Target 87943; HLA-C*04:01; TFDP3; ENSG00000183434; CTA
TYDALNVLM

SEQ ID NO: 87944 - protein, 9 aa, Homo sapiens
  Table A; Target 87944; HLA-C*05:01; TFDP3; ENSG00000183434; CTA
TYDALNVLM

SEQ ID NO: 87945 - protein, 9 aa, Homo sapiens
  Table A; Target 87945; HLA-C*07:04; TFDP3; ENSG00000183434; CTA
TYDALNVLM

SEQ ID NO: 87946 - protein, 9 aa, Homo sapiens
  Table A; Target 87946; HLA-C*14:02; TFDP3; ENSG00000183434; CTA
TYDALNVLM

SEQ ID NO: 87947 - protein, 9 aa, Homo sapiens
  Table A; Target 87947; HLA-B*08:01; TFDP3; ENSG00000183434; CTA
VAKFRAASN

SEQ ID NO: 87948 - protein, 8 aa, Homo sapiens
  Table A; Target 87948; HLA-B*46:01; TFDP3; ENSG00000183434; CTA
VAVHTSTV

SEQ ID NO: 87949 - protein, 8 aa, Homo sapiens
  Table A; Target 87949; HLA-B*51:01; TFDP3; ENSG00000183434; CTA
VAVHTSTV

SEQ ID NO: 87950 - protein, 8 aa, Homo sapiens
  Table A; Target 87950; HLA-C*03:04; TFDP3; ENSG00000183434; CTA
VAVHTSTV

SEQ ID NO: 87951 - protein, 8 aa, Homo sapiens
  Table A; Target 87951; HLA-C*05:01; TFDP3; ENSG00000183434; CTA
VAVHTSTV

SEQ ID NO: 87952 - protein, 8 aa, Homo sapiens
  Table A; Target 87952; HLA-C*12:03; TFDP3; ENSG00000183434; CTA
VAVHTSTV

SEQ ID NO: 87953 - protein, 11 aa, Homo sapiens
  Table A; Target 87953; HLA-C*03:03; TFDP3; ENSG00000183434; CTA
VAVHTSTVNPL

SEQ ID NO: 87954 - protein, 11 aa, Homo sapiens
  Table A; Target 87954; HLA-C*03:04; TFDP3; ENSG00000183434; CTA
VAVHTSTVNPL

SEQ ID NO: 87955 - protein, 10 aa, Homo sapiens
  Table A; Target 87955; HLA-A*30:01; TFDP3; ENSG00000183434; CTA
VEEQVSQRPL

SEQ ID NO: 87956 - protein, 10 aa, Homo sapiens
  Table A; Target 87956; HLA-B*40:01; TFDP3; ENSG00000183434; CTA
VEEQVSQRPL

SEQ ID NO: 87957 - protein, 10 aa, Homo sapiens
  Table A; Target 87957; HLA-B*40:02; TFDP3; ENSG00000183434; CTA
VEEQVSQRPL

SEQ ID NO: 87958 - protein, 10 aa, Homo sapiens
  Table A; Target 87958; HLA-B*49:01; TFDP3; ENSG00000183434; CTA
VEEQVSQRPL

SEQ ID NO: 87959 - protein, 8 aa, Homo sapiens
  Table A; Target 87959; HLA-B*18:01; TFDP3; ENSG00000183434; CTA
VGELVAKF

SEQ ID NO: 87960 - protein, 8 aa, Homo sapiens
  Table A; Target 87960; HLA-B*37:01; TFDP3; ENSG00000183434; CTA
VGELVAKF

SEQ ID NO: 87961 - protein, 8 aa, Homo sapiens
  Table A; Target 87961; HLA-B*39:01; TFDP3; ENSG00000183434; CTA
VGELVAKF

SEQ ID NO: 87962 - protein, 8 aa, Homo sapiens
  Table A; Target 87962; HLA-C*05:01; TFDP3; ENSG00000183434; CTA
VGELVAKF

SEQ ID NO: 87963 - protein, 11 aa, Homo sapiens
  Table A; Target 87963; HLA-A*23:01; TFDP3; ENSG00000183434; CTA
VGSPNPPSTHF

SEQ ID NO: 87964 - protein, 11 aa, Homo sapiens
  Table A; Target 87964; HLA-A*24:02; TFDP3; ENSG00000183434; CTA
VGSPNPPSTHF

SEQ ID NO: 87965 - protein, 11 aa, Homo sapiens
  Table A; Target 87965; HLA-A*30:02; TFDP3; ENSG00000183434; CTA
VGSPNPPSTHF

SEQ ID NO: 87966 - protein, 9 aa, Homo sapiens
  Table A; Target 87966; HLA-B*38:01; TFDP3; ENSG00000183434; CTA
VHTSTVNPL

SEQ ID NO: 87967 - protein, 9 aa, Homo sapiens
  Table A; Target 87967; HLA-B*39:01; TFDP3; ENSG00000183434; CTA
VHTSTVNPL

SEQ ID NO: 87968 - protein, 9 aa, Homo sapiens
  Table A; Target 87968; HLA-C*07:04; TFDP3; ENSG00000183434; CTA
VHTSTVNPL

SEQ ID NO: 87969 - protein, 10 aa, Homo sapiens
  Table A; Target 87969; HLA-A*03:01; TFDP3; ENSG00000183434; CTA
VLMDENQTSR

SEQ ID NO: 87970 - protein, 10 aa, Homo sapiens
  Table A; Target 87970; HLA-A*03:02; TFDP3; ENSG00000183434; CTA
VLMDENQTSR

SEQ ID NO: 87971 - protein, 10 aa, Homo sapiens
  Table A; Target 87971; HLA-A*11:01; TFDP3; ENSG00000183434; CTA
VLMDENQTSR

SEQ ID NO: 87972 - protein, 10 aa, Homo sapiens
  Table A; Target 87972; HLA-A*68:01; TFDP3; ENSG00000183434; CTA
VLMDENQTSR

SEQ ID NO: 87973 - protein, 10 aa, Homo sapiens
  Table A; Target 87973; HLA-C*07:06; TFDP3; ENSG00000183434; CTA
VLMDENQTSR

SEQ ID NO: 87974 - protein, 9 aa, Homo sapiens
  Table A; Target 87974; HLA-A*23:01; TFDP3; ENSG00000183434; CTA
VNIDQQVVI

SEQ ID NO: 87975 - protein, 9 aa, Homo sapiens
  Table A; Target 87975; HLA-B*13:02; TFDP3; ENSG00000183434; CTA
VNIDQQVVI

SEQ ID NO: 87976 - protein, 8 aa, Homo sapiens
  Table A; Target 87976; HLA-C*01:02; TFDP3; ENSG00000183434; CTA
VNPLGKQL

SEQ ID NO: 87977 - protein, 8 aa, Homo sapiens
  Table A; Target 87977; HLA-B*54:01; TFDP3; ENSG00000183434; CTA
VPFIIISS

SEQ ID NO: 87978 - protein, 8 aa, Homo sapiens
  Table A; Target 87978; HLA-B*56:01; TFDP3; ENSG00000183434; CTA
VPFIIISS

SEQ ID NO: 87979 - protein, 9 aa, Homo sapiens
  Table A; Target 87979; HLA-B*54:01; TFDP3; ENSG00000183434; CTA
VPFIIISSS

SEQ ID NO: 87980 - protein, 9 aa, Homo sapiens
  Table A; Target 87980; HLA-B*56:01; TFDP3; ENSG00000183434; CTA
VPFIIISSS

SEQ ID NO: 87981 - protein, 9 aa, Homo sapiens
  Table A; Target 87981; HLA-B*51:01; TFDP3; ENSG00000183434; CTA
VPKALEPYV

SEQ ID NO: 87982 - protein, 9 aa, Homo sapiens
  Table A; Target 87982; HLA-B*54:01; TFDP3; ENSG00000183434; CTA
VPKALEPYV

SEQ ID NO: 87983 - protein, 9 aa, Homo sapiens
  Table A; Target 87983; HLA-B*55:01; TFDP3; ENSG00000183434; CTA
VPKALEPYV

SEQ ID NO: 87984 - protein, 9 aa, Homo sapiens
  Table A; Target 87984; HLA-B*56:01; TFDP3; ENSG00000183434; CTA
VPKALEPYV

SEQ ID NO: 87985 - protein, 11 aa, Homo sapiens
  Table A; Target 87985; HLA-A*03:02; TFDP3; ENSG00000183434; CTA
VSLTEANEELK

SEQ ID NO: 87986 - protein, 11 aa, Homo sapiens
  Table A; Target 87986; HLA-A*11:01; TFDP3; ENSG00000183434; CTA
VSLTEANEELK

SEQ ID NO: 87987 - protein, 11 aa, Homo sapiens
  Table A; Target 87987; HLA-B*27:02; TFDP3; ENSG00000183434; CTA
VSLTEANEELK

SEQ ID NO: 87988 - protein, 9 aa, Homo sapiens
  Table A; Target 87988; HLA-A*01:01; TFDP3; ENSG00000183434; CTA
VTEMAQGTF

SEQ ID NO: 87989 - protein, 9 aa, Homo sapiens
  Table A; Target 87989; HLA-C*05:01; TFDP3; ENSG00000183434; CTA
VTEMAQGTF

SEQ ID NO: 87990 - protein, 8 aa, Homo sapiens
  Table A; Target 87990; HLA-A*03:01; TFDP3; ENSG00000183434; CTA
VVGELVAK

SEQ ID NO: 87991 - protein, 8 aa, Homo sapiens
  Table A; Target 87991; HLA-A*03:02; TFDP3; ENSG00000183434; CTA
VVGELVAK

SEQ ID NO: 87992 - protein, 8 aa, Homo sapiens
  Table A; Target 87992; HLA-A*11:01; TFDP3; ENSG00000183434; CTA
VVGELVAK

SEQ ID NO: 87993 - protein, 8 aa, Homo sapiens
  Table A; Target 87993; HLA-B*27:02; TFDP3; ENSG00000183434; CTA
VVGELVAK

SEQ ID NO: 87994 - protein, 9 aa, Homo sapiens
  Table A; Target 87994; HLA-A*02:07; TFDP3; ENSG00000183434; CTA
VVGELVAKF

SEQ ID NO: 87995 - protein, 9 aa, Homo sapiens
  Table A; Target 87995; HLA-A*03:01; TFDP3; ENSG00000183434; CTA
VVGELVAKF

SEQ ID NO: 87996 - protein, 9 aa, Homo sapiens
  Table A; Target 87996; HLA-A*03:02; TFDP3; ENSG00000183434; CTA
VVGELVAKF

SEQ ID NO: 87997 - protein, 9 aa, Homo sapiens
  Table A; Target 87997; HLA-A*11:01; TFDP3; ENSG00000183434; CTA
VVGELVAKF

SEQ ID NO: 87998 - protein, 9 aa, Homo sapiens
  Table A; Target 87998; HLA-A*23:01; TFDP3; ENSG00000183434; CTA
VVGELVAKF

SEQ ID NO: 87999 - protein, 9 aa, Homo sapiens
  Table A; Target 87999; HLA-A*24:02; TFDP3; ENSG00000183434; CTA
VVGELVAKF

SEQ ID NO: 88000 - protein, 9 aa, Homo sapiens
  Table A; Target 88000; HLA-A*25:01; TFDP3; ENSG00000183434; CTA
VVGELVAKF

SEQ ID NO: 88001 - protein, 9 aa, Homo sapiens
  Table A; Target 88001; HLA-A*26:01; TFDP3; ENSG00000183434; CTA
VVGELVAKF

SEQ ID NO: 88002 - protein, 9 aa, Homo sapiens
  Table A; Target 88002; HLA-A*29:02; TFDP3; ENSG00000183434; CTA
VVGELVAKF

SEQ ID NO: 88003 - protein, 9 aa, Homo sapiens
  Table A; Target 88003; HLA-A*30:02; TFDP3; ENSG00000183434; CTA
VVGELVAKF

SEQ ID NO: 88004 - protein, 9 aa, Homo sapiens
  Table A; Target 88004; HLA-A*31:01; TFDP3; ENSG00000183434; CTA
VVGELVAKF

SEQ ID NO: 88005 - protein, 9 aa, Homo sapiens
  Table A; Target 88005; HLA-A*32:01; TFDP3; ENSG00000183434; CTA
VVGELVAKF

SEQ ID NO: 88006 - protein, 9 aa, Homo sapiens
  Table A; Target 88006; HLA-A*33:01; TFDP3; ENSG00000183434; CTA
VVGELVAKF

SEQ ID NO: 88007 - protein, 9 aa, Homo sapiens
  Table A; Target 88007; HLA-A*33:03; TFDP3; ENSG00000183434; CTA
VVGELVAKF

SEQ ID NO: 88008 - protein, 9 aa, Homo sapiens
  Table A; Target 88008; HLA-A*68:01; TFDP3; ENSG00000183434; CTA
VVGELVAKF

SEQ ID NO: 88009 - protein, 9 aa, Homo sapiens
  Table A; Target 88009; HLA-B*15:01; TFDP3; ENSG00000183434; CTA
VVGELVAKF

SEQ ID NO: 88010 - protein, 9 aa, Homo sapiens
  Table A; Target 88010; HLA-B*15:03; TFDP3; ENSG00000183434; CTA
VVGELVAKF

SEQ ID NO: 88011 - protein, 9 aa, Homo sapiens
  Table A; Target 88011; HLA-B*18:01; TFDP3; ENSG00000183434; CTA
VVGELVAKF

SEQ ID NO: 88012 - protein, 9 aa, Homo sapiens
  Table A; Target 88012; HLA-B*27:02; TFDP3; ENSG00000183434; CTA
VVGELVAKF

SEQ ID NO: 88013 - protein, 9 aa, Homo sapiens
  Table A; Target 88013; HLA-B*35:01; TFDP3; ENSG00000183434; CTA
VVGELVAKF

SEQ ID NO: 88014 - protein, 9 aa, Homo sapiens
  Table A; Target 88014; HLA-B*37:01; TFDP3; ENSG00000183434; CTA
VVGELVAKF

SEQ ID NO: 88015 - protein, 9 aa, Homo sapiens
  Table A; Target 88015; HLA-B*44:02; TFDP3; ENSG00000183434; CTA
VVGELVAKF

SEQ ID NO: 88016 - protein, 9 aa, Homo sapiens
  Table A; Target 88016; HLA-B*44:03; TFDP3; ENSG00000183434; CTA
VVGELVAKF

SEQ ID NO: 88017 - protein, 9 aa, Homo sapiens
  Table A; Target 88017; HLA-B*46:01; TFDP3; ENSG00000183434; CTA
VVGELVAKF

SEQ ID NO: 88018 - protein, 9 aa, Homo sapiens
  Table A; Target 88018; HLA-B*57:01; TFDP3; ENSG00000183434; CTA
VVGELVAKF

SEQ ID NO: 88019 - protein, 9 aa, Homo sapiens
  Table A; Target 88019; HLA-B*58:01; TFDP3; ENSG00000183434; CTA
VVGELVAKF

SEQ ID NO: 88020 - protein, 9 aa, Homo sapiens
  Table A; Target 88020; HLA-C*02:02; TFDP3; ENSG00000183434; CTA
VVGELVAKF

SEQ ID NO: 88021 - protein, 9 aa, Homo sapiens
  Table A; Target 88021; HLA-C*05:01; TFDP3; ENSG00000183434; CTA
VVGELVAKF

SEQ ID NO: 88022 - protein, 9 aa, Homo sapiens
  Table A; Target 88022; HLA-C*07:04; TFDP3; ENSG00000183434; CTA
VVGELVAKF

SEQ ID NO: 88023 - protein, 9 aa, Homo sapiens
  Table A; Target 88023; HLA-C*07:06; TFDP3; ENSG00000183434; CTA
VVGELVAKF

SEQ ID NO: 88024 - protein, 9 aa, Homo sapiens
  Table A; Target 88024; HLA-C*12:03; TFDP3; ENSG00000183434; CTA
VVGELVAKF

SEQ ID NO: 88025 - protein, 9 aa, Homo sapiens
  Table A; Target 88025; HLA-C*16:01; TFDP3; ENSG00000183434; CTA
VVGELVAKF

SEQ ID NO: 88026 - protein, 9 aa, Homo sapiens
  Table A; Target 88026; HLA-C*16:04; TFDP3; ENSG00000183434; CTA
VVGELVAKF

SEQ ID NO: 88027 - protein, 8 aa, Homo sapiens
  Table A; Target 88027; HLA-A*31:01; TFDP3; ENSG00000183434; CTA
VVIGMPQR

SEQ ID NO: 88028 - protein, 9 aa, Homo sapiens
  Table A; Target 88028; HLA-A*32:01; TFDP3; ENSG00000183434; CTA
VVIGMPQRP

SEQ ID NO: 88029 - protein, 9 aa, Homo sapiens
  Table A; Target 88029; HLA-C*06:02; TFDP3; ENSG00000183434; CTA
VVIGMPQRP

SEQ ID NO: 88030 - protein, 11 aa, Homo sapiens
  Table A; Target 88030; HLA-B*54:01; TFDP3; ENSG00000183434; CTA
VVIGMPQRPAA

SEQ ID NO: 88031 - protein, 8 aa, Homo sapiens
  Table A; Target 88031; HLA-A*30:01; TFDP3; ENSG00000183434; CTA
YDALNVLM

SEQ ID NO: 88032 - protein, 8 aa, Homo sapiens
  Table A; Target 88032; HLA-B*37:01; TFDP3; ENSG00000183434; CTA
YDALNVLM

SEQ ID NO: 88033 - protein, 8 aa, Homo sapiens
  Table A; Target 88033; HLA-C*07:04; TFDP3; ENSG00000183434; CTA
YDALNVLM

SEQ ID NO: 88034 - protein, 9 aa, Homo sapiens
  Table A; Target 88034; HLA-A*01:01; TFDP3; ENSG00000183434; CTA
YVEEQVSQR

SEQ ID NO: 88035 - protein, 9 aa, Homo sapiens
  Table A; Target 88035; HLA-A*03:02; TFDP3; ENSG00000183434; CTA
YVEEQVSQR

SEQ ID NO: 88036 - protein, 9 aa, Homo sapiens
  Table A; Target 88036; HLA-A*11:01; TFDP3; ENSG00000183434; CTA
YVEEQVSQR

SEQ ID NO: 88037 - protein, 9 aa, Homo sapiens
  Table A; Target 88037; HLA-A*26:01; TFDP3; ENSG00000183434; CTA
YVEEQVSQR

SEQ ID NO: 88038 - protein, 9 aa, Homo sapiens
  Table A; Target 88038; HLA-A*31:01; TFDP3; ENSG00000183434; CTA
YVEEQVSQR

SEQ ID NO: 88039 - protein, 9 aa, Homo sapiens
  Table A; Target 88039; HLA-A*33:01; TFDP3; ENSG00000183434; CTA
YVEEQVSQR

SEQ ID NO: 88040 - protein, 9 aa, Homo sapiens
  Table A; Target 88040; HLA-A*33:03; TFDP3; ENSG00000183434; CTA
YVEEQVSQR

SEQ ID NO: 88041 - protein, 9 aa, Homo sapiens
  Table A; Target 88041; HLA-A*68:01; TFDP3; ENSG00000183434; CTA
YVEEQVSQR

SEQ ID NO: 88042 - protein, 9 aa, Homo sapiens
  Table A; Target 88042; HLA-C*05:01; TFDP3; ENSG00000183434; CTA
YVEEQVSQR

SEQ ID NO: 88043 - protein, 9 aa, Homo sapiens
  Table A; Target 88043; HLA-C*07:06; TFDP3; ENSG00000183434; CTA
YVEEQVSQR

SEQ ID NO: 88044 - protein, 11 aa, Homo sapiens
  Table A; Target 88044; HLA-B*27:05; TFDP3; ENSG00000183434; CTA
YVEEQVSQRPL

SEQ ID NO: 88045 - protein, 11 aa, Homo sapiens
  Table A; Target 88045; HLA-C*01:02; TFDP3; ENSG00000183434; CTA
YVEEQVSQRPL

SEQ ID NO: 88046 - protein, 11 aa, Homo sapiens
  Table A; Target 88046; HLA-C*03:03; TFDP3; ENSG00000183434; CTA
YVEEQVSQRPL

SEQ ID NO: 88047 - protein, 11 aa, Homo sapiens
  Table A; Target 88047; HLA-C*03:04; TFDP3; ENSG00000183434; CTA
YVEEQVSQRPL

SEQ ID NO: 88048 - protein, 11 aa, Homo sapiens
  Table A; Target 88048; HLA-C*07:02; TFDP3; ENSG00000183434; CTA
YVEEQVSQRPL

SEQ ID NO: 88049 - protein, 10 aa, Homo sapiens
  Table A; Target 88049; HLA-A*25:01; TFDP3; ENSG00000183434; CTA
YVTEMAQGTF

SEQ ID NO: 88050 - protein, 10 aa, Homo sapiens
  Table A; Target 88050; HLA-A*26:01; TFDP3; ENSG00000183434; CTA
YVTEMAQGTF

SEQ ID NO: 88051 - protein, 9 aa, Homo sapiens
  Table A; Target 88051; HLA-B*07:02; TRIM51; ENSG00000124900; TAA
AAEERREEL

SEQ ID NO: 88052 - protein, 9 aa, Homo sapiens
  Table A; Target 88052; HLA-C*05:01; TRIM51; ENSG00000124900; TAA
AAEERREEL

SEQ ID NO: 88053 - protein, 9 aa, Homo sapiens
  Table A; Target 88053; HLA-C*07:02; TRIM51; ENSG00000124900; TAA
AAEERREEL

SEQ ID NO: 88054 - protein, 9 aa, Homo sapiens
  Table A; Target 88054; HLA-C*16:01; TRIM51; ENSG00000124900; TAA
AAEERREEL

SEQ ID NO: 88055 - protein, 9 aa, Homo sapiens
  Table A; Target 88055; HLA-A*25:01; TRIM51; ENSG00000124900; TAA
ADVELLQAF

SEQ ID NO: 88056 - protein, 9 aa, Homo sapiens
  Table A; Target 88056; HLA-A*30:01; TRIM51; ENSG00000124900; TAA
ADVELLQAF

SEQ ID NO: 88057 - protein, 9 aa, Homo sapiens
  Table A; Target 88057; HLA-B*15:03; TRIM51; ENSG00000124900; TAA
ADVELLQAF

SEQ ID NO: 88058 - protein, 9 aa, Homo sapiens
  Table A; Target 88058; HLA-B*18:01; TRIM51; ENSG00000124900; TAA
ADVELLQAF

SEQ ID NO: 88059 - protein, 9 aa, Homo sapiens
  Table A; Target 88059; HLA-B*27:02; TRIM51; ENSG00000124900; TAA
ADVELLQAF

SEQ ID NO: 88060 - protein, 9 aa, Homo sapiens
  Table A; Target 88060; HLA-B*37:01; TRIM51; ENSG00000124900; TAA
ADVELLQAF

SEQ ID NO: 88061 - protein, 9 aa, Homo sapiens
  Table A; Target 88061; HLA-B*40:02; TRIM51; ENSG00000124900; TAA
ADVELLQAF

SEQ ID NO: 88062 - protein, 9 aa, Homo sapiens
  Table A; Target 88062; HLA-B*44:02; TRIM51; ENSG00000124900; TAA
ADVELLQAF

SEQ ID NO: 88063 - protein, 9 aa, Homo sapiens
  Table A; Target 88063; HLA-B*44:03; TRIM51; ENSG00000124900; TAA
ADVELLQAF

SEQ ID NO: 88064 - protein, 9 aa, Homo sapiens
  Table A; Target 88064; HLA-C*16:04; TRIM51; ENSG00000124900; TAA
ADVELLQAF

SEQ ID NO: 88065 - protein, 9 aa, Homo sapiens
  Table A; Target 88065; HLA-B*37:01; TRIM51; ENSG00000124900; TAA
AEERREELL

SEQ ID NO: 88066 - protein, 9 aa, Homo sapiens
  Table A; Target 88066; HLA-B*40:01; TRIM51; ENSG00000124900; TAA
AEERREELL

SEQ ID NO: 88067 - protein, 9 aa, Homo sapiens
  Table A; Target 88067; HLA-B*40:02; TRIM51; ENSG00000124900; TAA
AEERREELL

SEQ ID NO: 88068 - protein, 9 aa, Homo sapiens
  Table A; Target 88068; HLA-B*44:02; TRIM51; ENSG00000124900; TAA
AEERREELL

SEQ ID NO: 88069 - protein, 9 aa, Homo sapiens
  Table A; Target 88069; HLA-B*44:03; TRIM51; ENSG00000124900; TAA
AEERREELL

SEQ ID NO: 88070 - protein, 8 aa, Homo sapiens
  Table A; Target 88070; HLA-B*37:01; TRIM51; ENSG00000124900; TAA
AEYQKMPA

SEQ ID NO: 88071 - protein, 9 aa, Homo sapiens
  Table A; Target 88071; HLA-A*25:01; TRIM51; ENSG00000124900; TAA
AEYQKMPAF

SEQ ID NO: 88072 - protein, 9 aa, Homo sapiens
  Table A; Target 88072; HLA-A*30:01; TRIM51; ENSG00000124900; TAA
AEYQKMPAF

SEQ ID NO: 88073 - protein, 9 aa, Homo sapiens
  Table A; Target 88073; HLA-A*32:01; TRIM51; ENSG00000124900; TAA
AEYQKMPAF

SEQ ID NO: 88074 - protein, 9 aa, Homo sapiens
  Table A; Target 88074; HLA-B*15:03; TRIM51; ENSG00000124900; TAA
AEYQKMPAF

SEQ ID NO: 88075 - protein, 9 aa, Homo sapiens
  Table A; Target 88075; HLA-B*18:01; TRIM51; ENSG00000124900; TAA
AEYQKMPAF

SEQ ID NO: 88076 - protein, 9 aa, Homo sapiens
  Table A; Target 88076; HLA-B*27:02; TRIM51; ENSG00000124900; TAA
AEYQKMPAF

SEQ ID NO: 88077 - protein, 9 aa, Homo sapiens
  Table A; Target 88077; HLA-B*37:01; TRIM51; ENSG00000124900; TAA
AEYQKMPAF

SEQ ID NO: 88078 - protein, 9 aa, Homo sapiens
  Table A; Target 88078; HLA-B*40:01; TRIM51; ENSG00000124900; TAA
AEYQKMPAF

SEQ ID NO: 88079 - protein, 9 aa, Homo sapiens
  Table A; Target 88079; HLA-B*40:02; TRIM51; ENSG00000124900; TAA
AEYQKMPAF

SEQ ID NO: 88080 - protein, 9 aa, Homo sapiens
  Table A; Target 88080; HLA-B*44:02; TRIM51; ENSG00000124900; TAA
AEYQKMPAF

SEQ ID NO: 88081 - protein, 9 aa, Homo sapiens
  Table A; Target 88081; HLA-B*44:03; TRIM51; ENSG00000124900; TAA
AEYQKMPAF

SEQ ID NO: 88082 - protein, 9 aa, Homo sapiens
  Table A; Target 88082; HLA-B*46:01; TRIM51; ENSG00000124900; TAA
AEYQKMPAF

SEQ ID NO: 88083 - protein, 9 aa, Homo sapiens
  Table A; Target 88083; HLA-B*49:01; TRIM51; ENSG00000124900; TAA
AEYQKMPAF

SEQ ID NO: 88084 - protein, 9 aa, Homo sapiens
  Table A; Target 88084; HLA-C*02:02; TRIM51; ENSG00000124900; TAA
AEYQKMPAF

SEQ ID NO: 88085 - protein, 9 aa, Homo sapiens
  Table A; Target 88085; HLA-C*16:04; TRIM51; ENSG00000124900; TAA
AEYQKMPAF

SEQ ID NO: 88086 - protein, 10 aa, Homo sapiens
  Table A; Target 88086; HLA-A*30:01; TRIM51; ENSG00000124900; TAA
AEYQKMPAFL

SEQ ID NO: 88087 - protein, 10 aa, Homo sapiens
  Table A; Target 88087; HLA-B*40:02; TRIM51; ENSG00000124900; TAA
AEYQKMPAFL

SEQ ID NO: 88088 - protein, 10 aa, Homo sapiens
  Table A; Target 88088; HLA-B*44:02; TRIM51; ENSG00000124900; TAA
AEYQKMPAFL

SEQ ID NO: 88089 - protein, 10 aa, Homo sapiens
  Table A; Target 88089; HLA-B*44:03; TRIM51; ENSG00000124900; TAA
AEYQKMPAFL

SEQ ID NO: 88090 - protein, 10 aa, Homo sapiens
  Table A; Target 88090; HLA-B*49:01; TRIM51; ENSG00000124900; TAA
AEYQKMPAFL

SEQ ID NO: 88091 - protein, 8 aa, Homo sapiens
  Table A; Target 88091; HLA-A*31:01; TRIM51; ENSG00000124900; TAA
AFGDILHR

SEQ ID NO: 88092 - protein, 8 aa, Homo sapiens
  Table A; Target 88092; HLA-A*33:03; TRIM51; ENSG00000124900; TAA
AFGDILHR

SEQ ID NO: 88093 - protein, 9 aa, Homo sapiens
  Table A; Target 88093; HLA-A*24:02; TRIM51; ENSG00000124900; TAA
AFGDILHRY

SEQ ID NO: 88094 - protein, 9 aa, Homo sapiens
  Table A; Target 88094; HLA-A*30:02; TRIM51; ENSG00000124900; TAA
AFGDILHRY

SEQ ID NO: 88095 - protein, 9 aa, Homo sapiens
  Table A; Target 88095; HLA-B*57:01; TRIM51; ENSG00000124900; TAA
AFGDILHRY

SEQ ID NO: 88096 - protein, 9 aa, Homo sapiens
  Table A; Target 88096; HLA-C*16:01; TRIM51; ENSG00000124900; TAA
AFGDILHRY

SEQ ID NO: 88097 - protein, 9 aa, Homo sapiens
  Table A; Target 88097; HLA-A*23:01; TRIM51; ENSG00000124900; TAA
AFIARKASL

SEQ ID NO: 88098 - protein, 9 aa, Homo sapiens
  Table A; Target 88098; HLA-A*24:02; TRIM51; ENSG00000124900; TAA
AFIARKASL

SEQ ID NO: 88099 - protein, 9 aa, Homo sapiens
  Table A; Target 88099; HLA-B*08:01; TRIM51; ENSG00000124900; TAA
AFIARKASL

SEQ ID NO: 88100 - protein, 9 aa, Homo sapiens
  Table A; Target 88100; HLA-B*37:01; TRIM51; ENSG00000124900; TAA
AFIARKASL

SEQ ID NO: 88101 - protein, 9 aa, Homo sapiens
  Table A; Target 88101; HLA-B*46:01; TRIM51; ENSG00000124900; TAA
AFIARKASL

SEQ ID NO: 88102 - protein, 9 aa, Homo sapiens
  Table A; Target 88102; HLA-C*01:02; TRIM51; ENSG00000124900; TAA
AFIARKASL

SEQ ID NO: 88103 - protein, 9 aa, Homo sapiens
  Table A; Target 88103; HLA-C*07:02; TRIM51; ENSG00000124900; TAA
AFIARKASL

SEQ ID NO: 88104 - protein, 9 aa, Homo sapiens
  Table A; Target 88104; HLA-C*14:02; TRIM51; ENSG00000124900; TAA
AFIARKASL

SEQ ID NO: 88105 - protein, 9 aa, Homo sapiens
  Table A; Target 88105; HLA-C*16:01; TRIM51; ENSG00000124900; TAA
AFIARKASL

SEQ ID NO: 88106 - protein, 9 aa, Homo sapiens
  Table A; Target 88106; HLA-A*24:02; TRIM51; ENSG00000124900; TAA
AFTSGKYYW

SEQ ID NO: 88107 - protein, 11 aa, Homo sapiens
  Table A; Target 88107; HLA-C*07:02; TRIM51; ENSG00000124900; TAA
AGPITGLLDSL

SEQ ID NO: 88108 - protein, 9 aa, Homo sapiens
  Table A; Target 88108; HLA-A*26:01; TRIM51; ENSG00000124900; TAA
AQAFTSGKY

SEQ ID NO: 88109 - protein, 9 aa, Homo sapiens
  Table A; Target 88109; HLA-A*29:02; TRIM51; ENSG00000124900; TAA
AQAFTSGKY

SEQ ID NO: 88110 - protein, 9 aa, Homo sapiens
  Table A; Target 88110; HLA-A*30:02; TRIM51; ENSG00000124900; TAA
AQAFTSGKY

SEQ ID NO: 88111 - protein, 9 aa, Homo sapiens
  Table A; Target 88111; HLA-A*32:01; TRIM51; ENSG00000124900; TAA
AQAFTSGKY

SEQ ID NO: 88112 - protein, 9 aa, Homo sapiens
  Table A; Target 88112; HLA-B*13:02; TRIM51; ENSG00000124900; TAA
AQAFTSGKY

SEQ ID NO: 88113 - protein, 9 aa, Homo sapiens
  Table A; Target 88113; HLA-B*15:03; TRIM51; ENSG00000124900; TAA
AQAFTSGKY

SEQ ID NO: 88114 - protein, 9 aa, Homo sapiens
  Table A; Target 88114; HLA-B*27:02; TRIM51; ENSG00000124900; TAA
AQAFTSGKY

SEQ ID NO: 88115 - protein, 9 aa, Homo sapiens
  Table A; Target 88115; HLA-B*27:05; TRIM51; ENSG00000124900; TAA
AQAFTSGKY

SEQ ID NO: 88116 - protein, 9 aa, Homo sapiens
  Table A; Target 88116; HLA-B*39:01; TRIM51; ENSG00000124900; TAA
AQAFTSGKY

SEQ ID NO: 88117 - protein, 9 aa, Homo sapiens
  Table A; Target 88117; HLA-B*44:03; TRIM51; ENSG00000124900; TAA
AQAFTSGKY

SEQ ID NO: 88118 - protein, 9 aa, Homo sapiens
  Table A; Target 88118; HLA-B*46:01; TRIM51; ENSG00000124900; TAA
AQAFTSGKY

SEQ ID NO: 88119 - protein, 9 aa, Homo sapiens
  Table A; Target 88119; HLA-B*58:01; TRIM51; ENSG00000124900; TAA
AQAFTSGKY

SEQ ID NO: 88120 - protein, 9 aa, Homo sapiens
  Table A; Target 88120; HLA-C*02:02; TRIM51; ENSG00000124900; TAA
AQAFTSGKY

SEQ ID NO: 88121 - protein, 9 aa, Homo sapiens
  Table A; Target 88121; HLA-C*07:01; TRIM51; ENSG00000124900; TAA
AQAFTSGKY

SEQ ID NO: 88122 - protein, 9 aa, Homo sapiens
  Table A; Target 88122; HLA-C*07:04; TRIM51; ENSG00000124900; TAA
AQAFTSGKY

SEQ ID NO: 88123 - protein, 9 aa, Homo sapiens
  Table A; Target 88123; HLA-C*16:01; TRIM51; ENSG00000124900; TAA
AQAFTSGKY

SEQ ID NO: 88124 - protein, 9 aa, Homo sapiens
  Table A; Target 88124; HLA-C*16:02; TRIM51; ENSG00000124900; TAA
AQAFTSGKY

SEQ ID NO: 88125 - protein, 9 aa, Homo sapiens
  Table A; Target 88125; HLA-C*16:04; TRIM51; ENSG00000124900; TAA
AQAFTSGKY

SEQ ID NO: 88126 - protein, 10 aa, Homo sapiens
  Table A; Target 88126; HLA-A*30:02; TRIM51; ENSG00000124900; TAA
AQAFTSGKYY

SEQ ID NO: 88127 - protein, 10 aa, Homo sapiens
  Table A; Target 88127; HLA-B*15:01; TRIM51; ENSG00000124900; TAA
AQAFTSGKYY

SEQ ID NO: 88128 - protein, 10 aa, Homo sapiens
  Table A; Target 88128; HLA-B*15:03; TRIM51; ENSG00000124900; TAA
AQAFTSGKYY

SEQ ID NO: 88129 - protein, 10 aa, Homo sapiens
  Table A; Target 88129; HLA-B*44:02; TRIM51; ENSG00000124900; TAA
AQAFTSGKYY

SEQ ID NO: 88130 - protein, 10 aa, Homo sapiens
  Table A; Target 88130; HLA-B*44:03; TRIM51; ENSG00000124900; TAA
AQAFTSGKYY

SEQ ID NO: 88131 - protein, 10 aa, Homo sapiens
  Table A; Target 88131; HLA-C*16:04; TRIM51; ENSG00000124900; TAA
AQAFTSGKYY

SEQ ID NO: 88132 - protein, 11 aa, Homo sapiens
  Table A; Target 88132; HLA-B*44:02; TRIM51; ENSG00000124900; TAA
AQAFTSGKYYW

SEQ ID NO: 88133 - protein, 9 aa, Homo sapiens
  Table A; Target 88133; HLA-B*27:05; TRIM51; ENSG00000124900; TAA
ARMEHSREL

SEQ ID NO: 88134 - protein, 9 aa, Homo sapiens
  Table A; Target 88134; HLA-B*37:01; TRIM51; ENSG00000124900; TAA
ARMEHSREL

SEQ ID NO: 88135 - protein, 9 aa, Homo sapiens
  Table A; Target 88135; HLA-C*06:02; TRIM51; ENSG00000124900; TAA
ARMEHSREL

SEQ ID NO: 88136 - protein, 9 aa, Homo sapiens
  Table A; Target 88136; HLA-C*16:04; TRIM51; ENSG00000124900; TAA
ARMEHSREL

SEQ ID NO: 88137 - protein, 10 aa, Homo sapiens
  Table A; Target 88137; HLA-A*03:01; TRIM51; ENSG00000124900; TAA
AVLAQCSECK

SEQ ID NO: 88138 - protein, 10 aa, Homo sapiens
  Table A; Target 88138; HLA-A*03:02; TRIM51; ENSG00000124900; TAA
AVLAQCSECK

SEQ ID NO: 88139 - protein, 10 aa, Homo sapiens
  Table A; Target 88139; HLA-A*11:01; TRIM51; ENSG00000124900; TAA
AVLAQCSECK

SEQ ID NO: 88140 - protein, 8 aa, Homo sapiens
  Table A; Target 88140; HLA-B*18:01; TRIM51; ENSG00000124900; TAA
CEGRTVSF

SEQ ID NO: 88141 - protein, 8 aa, Homo sapiens
  Table A; Target 88141; HLA-B*37:01; TRIM51; ENSG00000124900; TAA
CEGRTVSF

SEQ ID NO: 88142 - protein, 9 aa, Homo sapiens
  Table A; Target 88142; HLA-B*49:01; TRIM51; ENSG00000124900; TAA
CEGRTVSFV

SEQ ID NO: 88143 - protein, 9 aa, Homo sapiens
  Table A; Target 88143; HLA-A*30:01; TRIM51; ENSG00000124900; TAA
CENLRNLNM

SEQ ID NO: 88144 - protein, 9 aa, Homo sapiens
  Table A; Target 88144; HLA-B*37:01; TRIM51; ENSG00000124900; TAA
CENLRNLNM

SEQ ID NO: 88145 - protein, 9 aa, Homo sapiens
  Table A; Target 88145; HLA-B*44:03; TRIM51; ENSG00000124900; TAA
CENLRNLNM

SEQ ID NO: 88146 - protein, 9 aa, Homo sapiens
  Table A; Target 88146; HLA-B*49:01; TRIM51; ENSG00000124900; TAA
CENLRNLNM

SEQ ID NO: 88147 - protein, 9 aa, Homo sapiens
  Table A; Target 88147; HLA-C*16:04; TRIM51; ENSG00000124900; TAA
CENLRNLNM

SEQ ID NO: 88148 - protein, 8 aa, Homo sapiens
  Table A; Target 88148; HLA-B*18:01; TRIM51; ENSG00000124900; TAA
CEVDKSLL

SEQ ID NO: 88149 - protein, 8 aa, Homo sapiens
  Table A; Target 88149; HLA-B*37:01; TRIM51; ENSG00000124900; TAA
CEVDKSLL

SEQ ID NO: 88150 - protein, 8 aa, Homo sapiens
  Table A; Target 88150; HLA-B*40:01; TRIM51; ENSG00000124900; TAA
CEVDKSLL

SEQ ID NO: 88151 - protein, 8 aa, Homo sapiens
  Table A; Target 88151; HLA-B*49:01; TRIM51; ENSG00000124900; TAA
CEVDKSLL

SEQ ID NO: 88152 - protein, 9 aa, Homo sapiens
  Table A; Target 88152; HLA-B*49:01; TRIM51; ENSG00000124900; TAA
CEVDKSLLC

SEQ ID NO: 88153 - protein, 9 aa, Homo sapiens
  Table A; Target 88153; HLA-B*38:01; TRIM51; ENSG00000124900; TAA
CHKADVELL

SEQ ID NO: 88154 - protein, 10 aa, Homo sapiens
  Table A; Target 88154; HLA-A*31:01; TRIM51; ENSG00000124900; TAA
CLKNMAFIAR

SEQ ID NO: 88155 - protein, 9 aa, Homo sapiens
  Table A; Target 88155; HLA-B*08:01; TRIM51; ENSG00000124900; TAA
DCEGRTVSF

SEQ ID NO: 88156 - protein, 9 aa, Homo sapiens
  Table A; Target 88156; HLA-C*07:01; TRIM51; ENSG00000124900; TAA
DCEGRTVSF

SEQ ID NO: 88157 - protein, 8 aa, Homo sapiens
  Table A; Target 88157; HLA-A*33:01; TRIM51; ENSG00000124900; TAA
DFTLQPER

SEQ ID NO: 88158 - protein, 9 aa, Homo sapiens
  Table A; Target 88158; HLA-B*08:01; TRIM51; ENSG00000124900; TAA
DICLKNMAF

SEQ ID NO: 88159 - protein, 10 aa, Homo sapiens
  Table A; Target 88159; HLA-A*33:01; TRIM51; ENSG00000124900; TAA
DIFQQLNESK

SEQ ID NO: 88160 - protein, 10 aa, Homo sapiens
  Table A; Target 88160; HLA-A*33:03; TRIM51; ENSG00000124900; TAA
DIFQQLNESK

SEQ ID NO: 88161 - protein, 10 aa, Homo sapiens
  Table A; Target 88161; HLA-A*68:01; TRIM51; ENSG00000124900; TAA
DIFQQLNESK

SEQ ID NO: 88162 - protein, 10 aa, Homo sapiens
  Table A; Target 88162; HLA-B*27:02; TRIM51; ENSG00000124900; TAA
DIFQQLNESK

SEQ ID NO: 88163 - protein, 10 aa, Homo sapiens
  Table A; Target 88163; HLA-C*07:06; TRIM51; ENSG00000124900; TAA
DIFQQLNESK

SEQ ID NO: 88164 - protein, 9 aa, Homo sapiens
  Table A; Target 88164; HLA-B*08:01; TRIM51; ENSG00000124900; TAA
DILHRYESL

SEQ ID NO: 88165 - protein, 11 aa, Homo sapiens
  Table A; Target 88165; HLA-A*23:01; TRIM51; ENSG00000124900; TAA
DPVTIDCGHSF

SEQ ID NO: 88166 - protein, 11 aa, Homo sapiens
  Table A; Target 88166; HLA-A*25:01; TRIM51; ENSG00000124900; TAA
DPVTIDCGHSF

SEQ ID NO: 88167 - protein, 11 aa, Homo sapiens
  Table A; Target 88167; HLA-B*35:01; TRIM51; ENSG00000124900; TAA
DPVTIDCGHSF

SEQ ID NO: 88168 - protein, 9 aa, Homo sapiens
  Table A; Target 88168; HLA-A*68:02; TRIM51; ENSG00000124900; TAA
DQSSLIYTI

SEQ ID NO: 88169 - protein, 9 aa, Homo sapiens
  Table A; Target 88169; HLA-B*13:02; TRIM51; ENSG00000124900; TAA
DQSSLIYTI

SEQ ID NO: 88170 - protein, 9 aa, Homo sapiens
  Table A; Target 88170; HLA-B*38:01; TRIM51; ENSG00000124900; TAA
DQSSLIYTI

SEQ ID NO: 88171 - protein, 9 aa, Homo sapiens
  Table A; Target 88171; HLA-B*39:01; TRIM51; ENSG00000124900; TAA
DQSSLIYTI

SEQ ID NO: 88172 - protein, 8 aa, Homo sapiens
  Table A; Target 88172; HLA-C*05:01; TRIM51; ENSG00000124900; TAA
DVDQSSLI

SEQ ID NO: 88173 - protein, 9 aa, Homo sapiens
  Table A; Target 88173; HLA-A*01:01; TRIM51; ENSG00000124900; TAA
DVDQSSLIY

SEQ ID NO: 88174 - protein, 9 aa, Homo sapiens
  Table A; Target 88174; HLA-A*25:01; TRIM51; ENSG00000124900; TAA
DVDQSSLIY

SEQ ID NO: 88175 - protein, 9 aa, Homo sapiens
  Table A; Target 88175; HLA-A*26:01; TRIM51; ENSG00000124900; TAA
DVDQSSLIY

SEQ ID NO: 88176 - protein, 9 aa, Homo sapiens
  Table A; Target 88176; HLA-A*29:02; TRIM51; ENSG00000124900; TAA
DVDQSSLIY

SEQ ID NO: 88177 - protein, 9 aa, Homo sapiens
  Table A; Target 88177; HLA-B*18:01; TRIM51; ENSG00000124900; TAA
DVDQSSLIY

SEQ ID NO: 88178 - protein, 9 aa, Homo sapiens
  Table A; Target 88178; HLA-B*35:01; TRIM51; ENSG00000124900; TAA
DVDQSSLIY

SEQ ID NO: 88179 - protein, 9 aa, Homo sapiens
  Table A; Target 88179; HLA-B*55:01; TRIM51; ENSG00000124900; TAA
DVDQSSLIY

SEQ ID NO: 88180 - protein, 9 aa, Homo sapiens
  Table A; Target 88180; HLA-C*03:03; TRIM51; ENSG00000124900; TAA
DVDQSSLIY

SEQ ID NO: 88181 - protein, 11 aa, Homo sapiens
  Table A; Target 88181; HLA-B*38:01; TRIM51; ENSG00000124900; TAA
DVDQSSLIYTI

SEQ ID NO: 88182 - protein, 8 aa, Homo sapiens
  Table A; Target 88182; HLA-B*18:01; TRIM51; ENSG00000124900; TAA
DVELLQAF

SEQ ID NO: 88183 - protein, 9 aa, Homo sapiens
  Table A; Target 88183; HLA-B*54:01; TRIM51; ENSG00000124900; TAA
DYVSLRIEA

SEQ ID NO: 88184 - protein, 9 aa, Homo sapiens
  Table A; Target 88184; HLA-A*33:01; TRIM51; ENSG00000124900; TAA
EAIRAEYQK

SEQ ID NO: 88185 - protein, 9 aa, Homo sapiens
  Table A; Target 88185; HLA-A*33:03; TRIM51; ENSG00000124900; TAA
EAIRAEYQK

SEQ ID NO: 88186 - protein, 9 aa, Homo sapiens
  Table A; Target 88186; HLA-A*68:01; TRIM51; ENSG00000124900; TAA
EAIRAEYQK

SEQ ID NO: 88187 - protein, 9 aa, Homo sapiens
  Table A; Target 88187; HLA-C*07:06; TRIM51; ENSG00000124900; TAA
EAIRAEYQK

SEQ ID NO: 88188 - protein, 10 aa, Homo sapiens
  Table A; Target 88188; HLA-A*25:01; TRIM51; ENSG00000124900; TAA
EAIRAEYQKM

SEQ ID NO: 88189 - protein, 10 aa, Homo sapiens
  Table A; Target 88189; HLA-A*26:01; TRIM51; ENSG00000124900; TAA
EAIRAEYQKM

SEQ ID NO: 88190 - protein, 9 aa, Homo sapiens
  Table A; Target 88190; HLA-A*33:03; TRIM51; ENSG00000124900; TAA
ECKKTTRQR

SEQ ID NO: 88191 - protein, 11 aa, Homo sapiens
  Table A; Target 88191; HLA-B*27:02; TRIM51; ENSG00000124900; TAA
EDIFQQLNESK

SEQ ID NO: 88192 - protein, 10 aa, Homo sapiens
  Table A; Target 88192; HLA-B*40:02; TRIM51; ENSG00000124900; TAA
EELLKKMQSL

SEQ ID NO: 88193 - protein, 11 aa, Homo sapiens
  Table A; Target 88193; HLA-B*44:02; TRIM51; ENSG00000124900; TAA
EELLKKMQSLW

SEQ ID NO: 88194 - protein, 9 aa, Homo sapiens
  Table A; Target 88194; HLA-B*44:02; TRIM51; ENSG00000124900; TAA
EEQHHLERL

SEQ ID NO: 88195 - protein, 9 aa, Homo sapiens
  Table A; Target 88195; HLA-B*44:03; TRIM51; ENSG00000124900; TAA
EEQHHLERL

SEQ ID NO: 88196 - protein, 9 aa, Homo sapiens
  Table A; Target 88196; HLA-A*33:03; TRIM51; ENSG00000124900; TAA
EGEDIFQQL

SEQ ID NO: 88197 - protein, 9 aa, Homo sapiens
  Table A; Target 88197; HLA-A*68:01; TRIM51; ENSG00000124900; TAA
EGEDIFQQL

SEQ ID NO: 88198 - protein, 9 aa, Homo sapiens
  Table A; Target 88198; HLA-A*68:02; TRIM51; ENSG00000124900; TAA
EGEDIFQQL

SEQ ID NO: 88199 - protein, 9 aa, Homo sapiens
  Table A; Target 88199; HLA-B*27:05; TRIM51; ENSG00000124900; TAA
EGEDIFQQL

SEQ ID NO: 88200 - protein, 9 aa, Homo sapiens
  Table A; Target 88200; HLA-B*35:03; TRIM51; ENSG00000124900; TAA
EGEDIFQQL

SEQ ID NO: 88201 - protein, 9 aa, Homo sapiens
  Table A; Target 88201; HLA-B*38:01; TRIM51; ENSG00000124900; TAA
EGEDIFQQL

SEQ ID NO: 88202 - protein, 9 aa, Homo sapiens
  Table A; Target 88202; HLA-B*39:01; TRIM51; ENSG00000124900; TAA
EGEDIFQQL

SEQ ID NO: 88203 - protein, 9 aa, Homo sapiens
  Table A; Target 88203; HLA-C*05:01; TRIM51; ENSG00000124900; TAA
EGEDIFQQL

SEQ ID NO: 88204 - protein, 8 aa, Homo sapiens
  Table A; Target 88204; HLA-B*51:01; TRIM51; ENSG00000124900; TAA
EGRTVSFV

SEQ ID NO: 88205 - protein, 9 aa, Homo sapiens
  Table A; Target 88205; HLA-A*25:01; TRIM51; ENSG00000124900; TAA
ELLKKMQSL

SEQ ID NO: 88206 - protein, 10 aa, Homo sapiens
  Table A; Target 88206; HLA-A*25:01; TRIM51; ENSG00000124900; TAA
ELSAGPITGL

SEQ ID NO: 88207 - protein, 10 aa, Homo sapiens
  Table A; Target 88207; HLA-A*26:01; TRIM51; ENSG00000124900; TAA
ELSAGPITGL

SEQ ID NO: 88208 - protein, 9 aa, Homo sapiens
  Table A; Target 88208; HLA-B*35:03; TRIM51; ENSG00000124900; TAA
EPVNPELSA

SEQ ID NO: 88209 - protein, 9 aa, Homo sapiens
  Table A; Target 88209; HLA-B*54:01; TRIM51; ENSG00000124900; TAA
EPVNPELSA

SEQ ID NO: 88210 - protein, 9 aa, Homo sapiens
  Table A; Target 88210; HLA-B*55:01; TRIM51; ENSG00000124900; TAA
EPVNPELSA

SEQ ID NO: 88211 - protein, 9 aa, Homo sapiens
  Table A; Target 88211; HLA-B*56:01; TRIM51; ENSG00000124900; TAA
EPVNPELSA

SEQ ID NO: 88212 - protein, 9 aa, Homo sapiens
  Table A; Target 88212; HLA-A*68:02; TRIM51; ENSG00000124900; TAA
ERANSHIFL

SEQ ID NO: 88213 - protein, 10 aa, Homo sapiens
  Table A; Target 88213; HLA-A*33:03; TRIM51; ENSG00000124900; TAA
ESKARMEHSR

SEQ ID NO: 88214 - protein, 9 aa, Homo sapiens
  Table A; Target 88214; HLA-A*01:01; TRIM51; ENSG00000124900; TAA
EVDKSLLCL

SEQ ID NO: 88215 - protein, 8 aa, Homo sapiens
  Table A; Target 88215; HLA-A*25:01; TRIM51; ENSG00000124900; TAA
EVHMGDSW

SEQ ID NO: 88216 - protein, 10 aa, Homo sapiens
  Table A; Target 88216; HLA-A*25:01; TRIM51; ENSG00000124900; TAA
EVHMGDSWNW

SEQ ID NO: 88217 - protein, 8 aa, Homo sapiens
  Table A; Target 88217; HLA-A*23:01; TRIM51; ENSG00000124900; TAA
EYQKMPAF

SEQ ID NO: 88218 - protein, 8 aa, Homo sapiens
  Table A; Target 88218; HLA-A*24:02; TRIM51; ENSG00000124900; TAA
EYQKMPAF

SEQ ID NO: 88219 - protein, 9 aa, Homo sapiens
  Table A; Target 88219; HLA-A*23:01; TRIM51; ENSG00000124900; TAA
EYQKMPAFL

SEQ ID NO: 88220 - protein, 9 aa, Homo sapiens
  Table A; Target 88220; HLA-A*24:02; TRIM51; ENSG00000124900; TAA
EYQKMPAFL

SEQ ID NO: 88221 - protein, 9 aa, Homo sapiens
  Table A; Target 88221; HLA-A*33:03; TRIM51; ENSG00000124900; TAA
EYQKMPAFL

SEQ ID NO: 88222 - protein, 9 aa, Homo sapiens
  Table A; Target 88222; HLA-C*05:01; TRIM51; ENSG00000124900; TAA
FCEVDKSLL

SEQ ID NO: 88223 - protein, 8 aa, Homo sapiens
  Table A; Target 88223; HLA-A*01:01; TRIM51; ENSG00000124900; TAA
FGDILHRY

SEQ ID NO: 88224 - protein, 8 aa, Homo sapiens
  Table A; Target 88224; HLA-B*08:01; TRIM51; ENSG00000124900; TAA
FIARKASL

SEQ ID NO: 88225 - protein, 9 aa, Homo sapiens
  Table A; Target 88225; HLA-A*02:01; TRIM51; ENSG00000124900; TAA
FLDCEGRTV

SEQ ID NO: 88226 - protein, 9 aa, Homo sapiens
  Table A; Target 88226; HLA-A*02:03; TRIM51; ENSG00000124900; TAA
FLDCEGRTV

SEQ ID NO: 88227 - protein, 9 aa, Homo sapiens
  Table A; Target 88227; HLA-A*02:07; TRIM51; ENSG00000124900; TAA
FLDCEGRTV

SEQ ID NO: 88228 - protein, 9 aa, Homo sapiens
  Table A; Target 88228; HLA-B*51:01; TRIM51; ENSG00000124900; TAA
FLDCEGRTV

SEQ ID NO: 88229 - protein, 9 aa, Homo sapiens
  Table A; Target 88229; HLA-B*55:01; TRIM51; ENSG00000124900; TAA
FLDCEGRTV

SEQ ID NO: 88230 - protein, 9 aa, Homo sapiens
  Table A; Target 88230; HLA-C*03:03; TRIM51; ENSG00000124900; TAA
FLDCEGRTV

SEQ ID NO: 88231 - protein, 9 aa, Homo sapiens
  Table A; Target 88231; HLA-C*03:04; TRIM51; ENSG00000124900; TAA
FLDCEGRTV

SEQ ID NO: 88232 - protein, 11 aa, Homo sapiens
  Table A; Target 88232; HLA-A*01:01; TRIM51; ENSG00000124900; TAA
FLDCEGRTVSF

SEQ ID NO: 88233 - protein, 11 aa, Homo sapiens
  Table A; Target 88233; HLA-A*02:07; TRIM51; ENSG00000124900; TAA
FLDCEGRTVSF

SEQ ID NO: 88234 - protein, 9 aa, Homo sapiens
  Table A; Target 88234; HLA-A*01:01; TRIM51; ENSG00000124900; TAA
FLDPVTIDC

SEQ ID NO: 88235 - protein, 9 aa, Homo sapiens
  Table A; Target 88235; HLA-A*02:04; TRIM51; ENSG00000124900; TAA
FLDPVTIDC

SEQ ID NO: 88236 - protein, 9 aa, Homo sapiens
  Table A; Target 88236; HLA-A*02:07; TRIM51; ENSG00000124900; TAA
FLDPVTIDC

SEQ ID NO: 88237 - protein, 9 aa, Homo sapiens
  Table A; Target 88237; HLA-B*35:03; TRIM51; ENSG00000124900; TAA
FLDPVTIDC

SEQ ID NO: 88238 - protein, 9 aa, Homo sapiens
  Table A; Target 88238; HLA-B*55:01; TRIM51; ENSG00000124900; TAA
FLDPVTIDC

SEQ ID NO: 88239 - protein, 9 aa, Homo sapiens
  Table A; Target 88239; HLA-C*03:03; TRIM51; ENSG00000124900; TAA
FLDPVTIDC

SEQ ID NO: 88240 - protein, 9 aa, Homo sapiens
  Table A; Target 88240; HLA-C*03:04; TRIM51; ENSG00000124900; TAA
FLDPVTIDC

SEQ ID NO: 88241 - protein, 9 aa, Homo sapiens
  Table A; Target 88241; HLA-C*04:01; TRIM51; ENSG00000124900; TAA
FLDPVTIDC

SEQ ID NO: 88242 - protein, 9 aa, Homo sapiens
  Table A; Target 88242; HLA-C*05:01; TRIM51; ENSG00000124900; TAA
FLDPVTIDC

SEQ ID NO: 88243 - protein, 9 aa, Homo sapiens
  Table A; Target 88243; HLA-C*07:04; TRIM51; ENSG00000124900; TAA
FLDPVTIDC

SEQ ID NO: 88244 - protein, 10 aa, Homo sapiens
  Table A; Target 88244; HLA-A*01:01; TRIM51; ENSG00000124900; TAA
FLDPVTIDCG

SEQ ID NO: 88245 - protein, 10 aa, Homo sapiens
  Table A; Target 88245; HLA-A*02:01; TRIM51; ENSG00000124900; TAA
FLDPVTIDCG

SEQ ID NO: 88246 - protein, 10 aa, Homo sapiens
  Table A; Target 88246; HLA-A*02:07; TRIM51; ENSG00000124900; TAA
FLDPVTIDCG

SEQ ID NO: 88247 - protein, 10 aa, Homo sapiens
  Table A; Target 88247; HLA-C*04:01; TRIM51; ENSG00000124900; TAA
FLDPVTIDCG

SEQ ID NO: 88248 - protein, 10 aa, Homo sapiens
  Table A; Target 88248; HLA-A*02:01; TRIM51; ENSG00000124900; TAA
FLHEEEQHHL

SEQ ID NO: 88249 - protein, 10 aa, Homo sapiens
  Table A; Target 88249; HLA-A*02:03; TRIM51; ENSG00000124900; TAA
FLHEEEQHHL

SEQ ID NO: 88250 - protein, 10 aa, Homo sapiens
  Table A; Target 88250; HLA-A*02:04; TRIM51; ENSG00000124900; TAA
FLHEEEQHHL

SEQ ID NO: 88251 - protein, 10 aa, Homo sapiens
  Table A; Target 88251; HLA-A*02:07; TRIM51; ENSG00000124900; TAA
FLHEEEQHHL

SEQ ID NO: 88252 - protein, 11 aa, Homo sapiens
  Table A; Target 88252; HLA-A*02:01; TRIM51; ENSG00000124900; TAA
FLSSEEQICGM

SEQ ID NO: 88253 - protein, 11 aa, Homo sapiens
  Table A; Target 88253; HLA-A*02:04; TRIM51; ENSG00000124900; TAA
FLSSEEQICGM

SEQ ID NO: 88254 - protein, 9 aa, Homo sapiens
  Table A; Target 88254; HLA-B*46:01; TRIM51; ENSG00000124900; TAA
FLVWGAQAF

SEQ ID NO: 88255 - protein, 9 aa, Homo sapiens
  Table A; Target 88255; HLA-A*02:07; TRIM51; ENSG00000124900; TAA
FSPPLRPIF

SEQ ID NO: 88256 - protein, 9 aa, Homo sapiens
  Table A; Target 88256; HLA-A*24:02; TRIM51; ENSG00000124900; TAA
FSPPLRPIF

SEQ ID NO: 88257 - protein, 9 aa, Homo sapiens
  Table A; Target 88257; HLA-A*29:02; TRIM51; ENSG00000124900; TAA
FSPPLRPIF

SEQ ID NO: 88258 - protein, 9 aa, Homo sapiens
  Table A; Target 88258; HLA-B*57:01; TRIM51; ENSG00000124900; TAA
FSPPLRPIF

SEQ ID NO: 88259 - protein, 9 aa, Homo sapiens
  Table A; Target 88259; HLA-C*02:02; TRIM51; ENSG00000124900; TAA
FSPPLRPIF

SEQ ID NO: 88260 - protein, 9 aa, Homo sapiens
  Table A; Target 88260; HLA-C*16:01; TRIM51; ENSG00000124900; TAA
FSPPLRPIF

SEQ ID NO: 88261 - protein, 8 aa, Homo sapiens
  Table A; Target 88261; HLA-A*01:01; TRIM51; ENSG00000124900; TAA
FTTSPLVV

SEQ ID NO: 88262 - protein, 8 aa, Homo sapiens
  Table A; Target 88262; HLA-C*02:02; TRIM51; ENSG00000124900; TAA
FTTSPLVV

SEQ ID NO: 88263 - protein, 8 aa, Homo sapiens
  Table A; Target 88263; HLA-C*03:03; TRIM51; ENSG00000124900; TAA
FTTSPLVV

SEQ ID NO: 88264 - protein, 8 aa, Homo sapiens
  Table A; Target 88264; HLA-C*03:04; TRIM51; ENSG00000124900; TAA
FTTSPLVV

SEQ ID NO: 88265 - protein, 8 aa, Homo sapiens
  Table A; Target 88265; HLA-C*12:03; TRIM51; ENSG00000124900; TAA
FTTSPLVV

SEQ ID NO: 88266 - protein, 10 aa, Homo sapiens
  Table A; Target 88266; HLA-A*01:01; TRIM51; ENSG00000124900; TAA
FTTSPLVVQY

SEQ ID NO: 88267 - protein, 10 aa, Homo sapiens
  Table A; Target 88267; HLA-A*25:01; TRIM51; ENSG00000124900; TAA
FTTSPLVVQY

SEQ ID NO: 88268 - protein, 10 aa, Homo sapiens
  Table A; Target 88268; HLA-A*26:01; TRIM51; ENSG00000124900; TAA
FTTSPLVVQY

SEQ ID NO: 88269 - protein, 10 aa, Homo sapiens
  Table A; Target 88269; HLA-A*29:02; TRIM51; ENSG00000124900; TAA
FTTSPLVVQY

SEQ ID NO: 88270 - protein, 10 aa, Homo sapiens
  Table A; Target 88270; HLA-A*30:02; TRIM51; ENSG00000124900; TAA
FTTSPLVVQY

SEQ ID NO: 88271 - protein, 10 aa, Homo sapiens
  Table A; Target 88271; HLA-A*33:01; TRIM51; ENSG00000124900; TAA
FTTSPLVVQY

SEQ ID NO: 88272 - protein, 10 aa, Homo sapiens
  Table A; Target 88272; HLA-A*33:03; TRIM51; ENSG00000124900; TAA
FTTSPLVVQY

SEQ ID NO: 88273 - protein, 10 aa, Homo sapiens
  Table A; Target 88273; HLA-A*68:01; TRIM51; ENSG00000124900; TAA
FTTSPLVVQY

SEQ ID NO: 88274 - protein, 10 aa, Homo sapiens
  Table A; Target 88274; HLA-A*68:02; TRIM51; ENSG00000124900; TAA
FTTSPLVVQY

SEQ ID NO: 88275 - protein, 10 aa, Homo sapiens
  Table A; Target 88275; HLA-B*27:02; TRIM51; ENSG00000124900; TAA
FTTSPLVVQY

SEQ ID NO: 88276 - protein, 10 aa, Homo sapiens
  Table A; Target 88276; HLA-C*02:02; TRIM51; ENSG00000124900; TAA
FTTSPLVVQY

SEQ ID NO: 88277 - protein, 10 aa, Homo sapiens
  Table A; Target 88277; HLA-C*07:06; TRIM51; ENSG00000124900; TAA
FTTSPLVVQY

SEQ ID NO: 88278 - protein, 10 aa, Homo sapiens
  Table A; Target 88278; HLA-C*12:03; TRIM51; ENSG00000124900; TAA
FTTSPLVVQY

SEQ ID NO: 88279 - protein, 10 aa, Homo sapiens
  Table A; Target 88279; HLA-C*16:01; TRIM51; ENSG00000124900; TAA
FTTSPLVVQY

SEQ ID NO: 88280 - protein, 10 aa, Homo sapiens
  Table A; Target 88280; HLA-C*16:02; TRIM51; ENSG00000124900; TAA
FTTSPLVVQY

SEQ ID NO: 88281 - protein, 11 aa, Homo sapiens
  Table A; Target 88281; HLA-A*68:02; TRIM51; ENSG00000124900; TAA
FTTSPLVVQYV

SEQ ID NO: 88282 - protein, 9 aa, Homo sapiens
  Table A; Target 88282; HLA-A*01:01; TRIM51; ENSG00000124900; TAA
FVDVDQSSL

SEQ ID NO: 88283 - protein, 9 aa, Homo sapiens
  Table A; Target 88283; HLA-A*02:07; TRIM51; ENSG00000124900; TAA
FVDVDQSSL

SEQ ID NO: 88284 - protein, 9 aa, Homo sapiens
  Table A; Target 88284; HLA-A*32:01; TRIM51; ENSG00000124900; TAA
FVDVDQSSL

SEQ ID NO: 88285 - protein, 9 aa, Homo sapiens
  Table A; Target 88285; HLA-B*27:05; TRIM51; ENSG00000124900; TAA
FVDVDQSSL

SEQ ID NO: 88286 - protein, 9 aa, Homo sapiens
  Table A; Target 88286; HLA-B*35:01; TRIM51; ENSG00000124900; TAA
FVDVDQSSL

SEQ ID NO: 88287 - protein, 9 aa, Homo sapiens
  Table A; Target 88287; HLA-B*35:03; TRIM51; ENSG00000124900; TAA
FVDVDQSSL

SEQ ID NO: 88288 - protein, 9 aa, Homo sapiens
  Table A; Target 88288; HLA-B*38:01; TRIM51; ENSG00000124900; TAA
FVDVDQSSL

SEQ ID NO: 88289 - protein, 9 aa, Homo sapiens
  Table A; Target 88289; HLA-B*39:01; TRIM51; ENSG00000124900; TAA
FVDVDQSSL

SEQ ID NO: 88290 - protein, 9 aa, Homo sapiens
  Table A; Target 88290; HLA-B*40:01; TRIM51; ENSG00000124900; TAA
FVDVDQSSL

SEQ ID NO: 88291 - protein, 9 aa, Homo sapiens
  Table A; Target 88291; HLA-B*55:01; TRIM51; ENSG00000124900; TAA
FVDVDQSSL

SEQ ID NO: 88292 - protein, 9 aa, Homo sapiens
  Table A; Target 88292; HLA-C*01:02; TRIM51; ENSG00000124900; TAA
FVDVDQSSL

SEQ ID NO: 88293 - protein, 9 aa, Homo sapiens
  Table A; Target 88293; HLA-C*03:03; TRIM51; ENSG00000124900; TAA
FVDVDQSSL

SEQ ID NO: 88294 - protein, 9 aa, Homo sapiens
  Table A; Target 88294; HLA-C*03:04; TRIM51; ENSG00000124900; TAA
FVDVDQSSL

SEQ ID NO: 88295 - protein, 9 aa, Homo sapiens
  Table A; Target 88295; HLA-C*04:01; TRIM51; ENSG00000124900; TAA
FVDVDQSSL

SEQ ID NO: 88296 - protein, 9 aa, Homo sapiens
  Table A; Target 88296; HLA-C*05:01; TRIM51; ENSG00000124900; TAA
FVDVDQSSL

SEQ ID NO: 88297 - protein, 9 aa, Homo sapiens
  Table A; Target 88297; HLA-C*07:04; TRIM51; ENSG00000124900; TAA
FVDVDQSSL

SEQ ID NO: 88298 - protein, 10 aa, Homo sapiens
  Table A; Target 88298; HLA-A*01:01; TRIM51; ENSG00000124900; TAA
FVDVDQSSLI

SEQ ID NO: 88299 - protein, 10 aa, Homo sapiens
  Table A; Target 88299; HLA-C*05:01; TRIM51; ENSG00000124900; TAA
FVDVDQSSLI

SEQ ID NO: 88300 - protein, 11 aa, Homo sapiens
  Table A; Target 88300; HLA-A*01:01; TRIM51; ENSG00000124900; TAA
FVDVDQSSLIY

SEQ ID NO: 88301 - protein, 11 aa, Homo sapiens
  Table A; Target 88301; HLA-A*29:02; TRIM51; ENSG00000124900; TAA
FVDVDQSSLIY

SEQ ID NO: 88302 - protein, 9 aa, Homo sapiens
  Table A; Target 88302; HLA-A*03:02; TRIM51; ENSG00000124900; TAA
GAQAFTSGK

SEQ ID NO: 88303 - protein, 9 aa, Homo sapiens
  Table A; Target 88303; HLA-A*11:01; TRIM51; ENSG00000124900; TAA
GAQAFTSGK

SEQ ID NO: 88304 - protein, 10 aa, Homo sapiens
  Table A; Target 88304; HLA-A*26:01; TRIM51; ENSG00000124900; TAA
GAQAFTSGKY

SEQ ID NO: 88305 - protein, 10 aa, Homo sapiens
  Table A; Target 88305; HLA-A*29:02; TRIM51; ENSG00000124900; TAA
GAQAFTSGKY

SEQ ID NO: 88306 - protein, 10 aa, Homo sapiens
  Table A; Target 88306; HLA-A*30:02; TRIM51; ENSG00000124900; TAA
GAQAFTSGKY

SEQ ID NO: 88307 - protein, 10 aa, Homo sapiens
  Table A; Target 88307; HLA-B*15:01; TRIM51; ENSG00000124900; TAA
GAQAFTSGKY

SEQ ID NO: 88308 - protein, 10 aa, Homo sapiens
  Table A; Target 88308; HLA-B*15:03; TRIM51; ENSG00000124900; TAA
GAQAFTSGKY

SEQ ID NO: 88309 - protein, 10 aa, Homo sapiens
  Table A; Target 88309; HLA-B*39:01; TRIM51; ENSG00000124900; TAA
GAQAFTSGKY

SEQ ID NO: 88310 - protein, 10 aa, Homo sapiens
  Table A; Target 88310; HLA-B*46:01; TRIM51; ENSG00000124900; TAA
GAQAFTSGKY

SEQ ID NO: 88311 - protein, 10 aa, Homo sapiens
  Table A; Target 88311; HLA-B*58:01; TRIM51; ENSG00000124900; TAA
GAQAFTSGKY

SEQ ID NO: 88312 - protein, 10 aa, Homo sapiens
  Table A; Target 88312; HLA-C*02:02; TRIM51; ENSG00000124900; TAA
GAQAFTSGKY

SEQ ID NO: 88313 - protein, 10 aa, Homo sapiens
  Table A; Target 88313; HLA-C*16:02; TRIM51; ENSG00000124900; TAA
GAQAFTSGKY

SEQ ID NO: 88314 - protein, 10 aa, Homo sapiens
  Table A; Target 88314; HLA-C*16:04; TRIM51; ENSG00000124900; TAA
GAQAFTSGKY

SEQ ID NO: 88315 - protein, 11 aa, Homo sapiens
  Table A; Target 88315; HLA-A*30:02; TRIM51; ENSG00000124900; TAA
GAQAFTSGKYY

SEQ ID NO: 88316 - protein, 8 aa, Homo sapiens
  Table A; Target 88316; HLA-B*37:01; TRIM51; ENSG00000124900; TAA
GDLRSMNV

SEQ ID NO: 88317 - protein, 8 aa, Homo sapiens
  Table A; Target 88317; HLA-B*40:02; TRIM51; ENSG00000124900; TAA
GDLRSMNV

SEQ ID NO: 88318 - protein, 8 aa, Homo sapiens
  Table A; Target 88318; HLA-A*30:01; TRIM51; ENSG00000124900; TAA
GEDIFQQL

SEQ ID NO: 88319 - protein, 8 aa, Homo sapiens
  Table A; Target 88319; HLA-B*18:01; TRIM51; ENSG00000124900; TAA
GEDIFQQL

SEQ ID NO: 88320 - protein, 8 aa, Homo sapiens
  Table A; Target 88320; HLA-B*37:01; TRIM51; ENSG00000124900; TAA
GEDIFQQL

SEQ ID NO: 88321 - protein, 8 aa, Homo sapiens
  Table A; Target 88321; HLA-B*40:01; TRIM51; ENSG00000124900; TAA
GEDIFQQL

SEQ ID NO: 88322 - protein, 8 aa, Homo sapiens
  Table A; Target 88322; HLA-B*40:02; TRIM51; ENSG00000124900; TAA
GEDIFQQL

SEQ ID NO: 88323 - protein, 8 aa, Homo sapiens
  Table A; Target 88323; HLA-B*49:01; TRIM51; ENSG00000124900; TAA
GEDIFQQL

SEQ ID NO: 88324 - protein, 8 aa, Homo sapiens
  Table A; Target 88324; HLA-A*31:01; TRIM51; ENSG00000124900; TAA
GILQVFQR

SEQ ID NO: 88325 - protein, 9 aa, Homo sapiens
  Table A; Target 88325; HLA-A*02:04; TRIM51; ENSG00000124900; TAA
GLLDSLSGF

SEQ ID NO: 88326 - protein, 9 aa, Homo sapiens
  Table A; Target 88326; HLA-B*15:01; TRIM51; ENSG00000124900; TAA
GLLDSLSGF

SEQ ID NO: 88327 - protein, 9 aa, Homo sapiens
  Table A; Target 88327; HLA-B*46:01; TRIM51; ENSG00000124900; TAA
GLLDSLSGF

SEQ ID NO: 88328 - protein, 11 aa, Homo sapiens
  Table A; Target 88328; HLA-A*02:04; TRIM51; ENSG00000124900; TAA
GLLDSLSGFRV

SEQ ID NO: 88329 - protein, 9 aa, Homo sapiens
  Table A; Target 88329; HLA-A*02:01; TRIM51; ENSG00000124900; TAA
GMYEDLKQM

SEQ ID NO: 88330 - protein, 9 aa, Homo sapiens
  Table A; Target 88330; HLA-A*02:03; TRIM51; ENSG00000124900; TAA
GMYEDLKQM

SEQ ID NO: 88331 - protein, 9 aa, Homo sapiens
  Table A; Target 88331; HLA-A*02:07; TRIM51; ENSG00000124900; TAA
GMYEDLKQM

SEQ ID NO: 88332 - protein, 9 aa, Homo sapiens
  Table A; Target 88332; HLA-B*13:02; TRIM51; ENSG00000124900; TAA
GMYEDLKQM

SEQ ID NO: 88333 - protein, 9 aa, Homo sapiens
  Table A; Target 88333; HLA-B*15:01; TRIM51; ENSG00000124900; TAA
GMYEDLKQM

SEQ ID NO: 88334 - protein, 9 aa, Homo sapiens
  Table A; Target 88334; HLA-B*15:03; TRIM51; ENSG00000124900; TAA
GMYEDLKQM

SEQ ID NO: 88335 - protein, 9 aa, Homo sapiens
  Table A; Target 88335; HLA-B*40:01; TRIM51; ENSG00000124900; TAA
GMYEDLKQM

SEQ ID NO: 88336 - protein, 9 aa, Homo sapiens
  Table A; Target 88336; HLA-B*46:01; TRIM51; ENSG00000124900; TAA
GMYEDLKQM

SEQ ID NO: 88337 - protein, 9 aa, Homo sapiens
  Table A; Target 88337; HLA-B*55:01; TRIM51; ENSG00000124900; TAA
GMYEDLKQM

SEQ ID NO: 88338 - protein, 9 aa, Homo sapiens
  Table A; Target 88338; HLA-C*02:02; TRIM51; ENSG00000124900; TAA
GMYEDLKQM

SEQ ID NO: 88339 - protein, 9 aa, Homo sapiens
  Table A; Target 88339; HLA-C*12:03; TRIM51; ENSG00000124900; TAA
GMYEDLKQM

SEQ ID NO: 88340 - protein, 9 aa, Homo sapiens
  Table A; Target 88340; HLA-C*16:02; TRIM51; ENSG00000124900; TAA
GMYEDLKQM

SEQ ID NO: 88341 - protein, 10 aa, Homo sapiens
  Table A; Target 88341; HLA-A*02:01; TRIM51; ENSG00000124900; TAA
GMYEDLKQMC

SEQ ID NO: 88342 - protein, 10 aa, Homo sapiens
  Table A; Target 88342; HLA-B*07:02; TRIM51; ENSG00000124900; TAA
GPITGLLDSL

SEQ ID NO: 88343 - protein, 10 aa, Homo sapiens
  Table A; Target 88343; HLA-B*35:01; TRIM51; ENSG00000124900; TAA
GPITGLLDSL

SEQ ID NO: 88344 - protein, 10 aa, Homo sapiens
  Table A; Target 88344; HLA-B*35:03; TRIM51; ENSG00000124900; TAA
GPITGLLDSL

SEQ ID NO: 88345 - protein, 10 aa, Homo sapiens
  Table A; Target 88345; HLA-B*40:01; TRIM51; ENSG00000124900; TAA
GPITGLLDSL

SEQ ID NO: 88346 - protein, 10 aa, Homo sapiens
  Table A; Target 88346; HLA-B*55:01; TRIM51; ENSG00000124900; TAA
GPITGLLDSL

SEQ ID NO: 88347 - protein, 10 aa, Homo sapiens
  Table A; Target 88347; HLA-B*56:01; TRIM51; ENSG00000124900; TAA
GPITGLLDSL

SEQ ID NO: 88348 - protein, 10 aa, Homo sapiens
  Table A; Target 88348; HLA-C*07:02; TRIM51; ENSG00000124900; TAA
GPITGLLDSL

SEQ ID NO: 88349 - protein, 9 aa, Homo sapiens
  Table A; Target 88349; HLA-C*16:04; TRIM51; ENSG00000124900; TAA
GRTVSFVDV

SEQ ID NO: 88350 - protein, 8 aa, Homo sapiens
  Table A; Target 88350; HLA-A*30:01; TRIM51; ENSG00000124900; TAA
HEEEQHHL

SEQ ID NO: 88351 - protein, 8 aa, Homo sapiens
  Table A; Target 88351; HLA-B*37:01; TRIM51; ENSG00000124900; TAA
HEEEQHHL

SEQ ID NO: 88352 - protein, 8 aa, Homo sapiens
  Table A; Target 88352; HLA-B*40:01; TRIM51; ENSG00000124900; TAA
HEEEQHHL

SEQ ID NO: 88353 - protein, 8 aa, Homo sapiens
  Table A; Target 88353; HLA-A*32:01; TRIM51; ENSG00000124900; TAA
IEAIRAEY

SEQ ID NO: 88354 - protein, 8 aa, Homo sapiens
  Table A; Target 88354; HLA-B*15:01; TRIM51; ENSG00000124900; TAA
IEAIRAEY

SEQ ID NO: 88355 - protein, 8 aa, Homo sapiens
  Table A; Target 88355; HLA-B*15:03; TRIM51; ENSG00000124900; TAA
IEAIRAEY

SEQ ID NO: 88356 - protein, 8 aa, Homo sapiens
  Table A; Target 88356; HLA-B*18:01; TRIM51; ENSG00000124900; TAA
IEAIRAEY

SEQ ID NO: 88357 - protein, 8 aa, Homo sapiens
  Table A; Target 88357; HLA-B*37:01; TRIM51; ENSG00000124900; TAA
IEAIRAEY

SEQ ID NO: 88358 - protein, 8 aa, Homo sapiens
  Table A; Target 88358; HLA-B*44:02; TRIM51; ENSG00000124900; TAA
IEAIRAEY

SEQ ID NO: 88359 - protein, 8 aa, Homo sapiens
  Table A; Target 88359; HLA-B*44:03; TRIM51; ENSG00000124900; TAA
IEAIRAEY

SEQ ID NO: 88360 - protein, 8 aa, Homo sapiens
  Table A; Target 88360; HLA-C*02:02; TRIM51; ENSG00000124900; TAA
IEAIRAEY

SEQ ID NO: 88361 - protein, 8 aa, Homo sapiens
  Table A; Target 88361; HLA-C*07:01; TRIM51; ENSG00000124900; TAA
IEAIRAEY

SEQ ID NO: 88362 - protein, 8 aa, Homo sapiens
  Table A; Target 88362; HLA-C*16:01; TRIM51; ENSG00000124900; TAA
IEAIRAEY

SEQ ID NO: 88363 - protein, 8 aa, Homo sapiens
  Table A; Target 88363; HLA-C*16:02; TRIM51; ENSG00000124900; TAA
IEAIRAEY

SEQ ID NO: 88364 - protein, 8 aa, Homo sapiens
  Table A; Target 88364; HLA-C*16:04; TRIM51; ENSG00000124900; TAA
IEAIRAEY

SEQ ID NO: 88365 - protein, 8 aa, Homo sapiens
  Table A; Target 88365; HLA-B*18:01; TRIM51; ENSG00000124900; TAA
IEWAAEER

SEQ ID NO: 88366 - protein, 9 aa, Homo sapiens
  Table A; Target 88366; HLA-C*14:02; TRIM51; ENSG00000124900; TAA
IFQQLNESK

SEQ ID NO: 88367 - protein, 9 aa, Homo sapiens
  Table A; Target 88367; HLA-A*02:04; TRIM51; ENSG00000124900; TAA
ILQVFQRAL

SEQ ID NO: 88368 - protein, 9 aa, Homo sapiens
  Table A; Target 88368; HLA-A*23:01; TRIM51; ENSG00000124900; TAA
IYTIPNCSF

SEQ ID NO: 88369 - protein, 9 aa, Homo sapiens
  Table A; Target 88369; HLA-A*29:02; TRIM51; ENSG00000124900; TAA
IYTIPNCSF

SEQ ID NO: 88370 - protein, 9 aa, Homo sapiens
  Table A; Target 88370; HLA-A*32:01; TRIM51; ENSG00000124900; TAA
IYTIPNCSF

SEQ ID NO: 88371 - protein, 9 aa, Homo sapiens
  Table A; Target 88371; HLA-C*04:01; TRIM51; ENSG00000124900; TAA
IYTIPNCSF

SEQ ID NO: 88372 - protein, 9 aa, Homo sapiens
  Table A; Target 88372; HLA-C*14:02; TRIM51; ENSG00000124900; TAA
IYTIPNCSF

SEQ ID NO: 88373 - protein, 9 aa, Homo sapiens
  Table A; Target 88373; HLA-C*06:02; TRIM51; ENSG00000124900; TAA
KACENLRNL

SEQ ID NO: 88374 - protein, 9 aa, Homo sapiens
  Table A; Target 88374; HLA-C*16:01; TRIM51; ENSG00000124900; TAA
KACENLRNL

SEQ ID NO: 88375 - protein, 9 aa, Homo sapiens
  Table A; Target 88375; HLA-C*16:02; TRIM51; ENSG00000124900; TAA
KACENLRNL

SEQ ID NO: 88376 - protein, 10 aa, Homo sapiens
  Table A; Target 88376; HLA-B*57:01; TRIM51; ENSG00000124900; TAA
KADVELLQAF

SEQ ID NO: 88377 - protein, 8 aa, Homo sapiens
  Table A; Target 88377; HLA-C*16:01; TRIM51; ENSG00000124900; TAA
KASLRQFL

SEQ ID NO: 88378 - protein, 8 aa, Homo sapiens
  Table A; Target 88378; HLA-B*37:01; TRIM51; ENSG00000124900; TAA
KDYVSLRI

SEQ ID NO: 88379 - protein, 8 aa, Homo sapiens
  Table A; Target 88379; HLA-B*37:01; TRIM51; ENSG00000124900; TAA
KEDTHCSL

SEQ ID NO: 88380 - protein, 8 aa, Homo sapiens
  Table A; Target 88380; HLA-B*40:01; TRIM51; ENSG00000124900; TAA
KEDTHCSL

SEQ ID NO: 88381 - protein, 9 aa, Homo sapiens
  Table A; Target 88381; HLA-B*37:01; TRIM51; ENSG00000124900; TAA
KEDTHCSLF

SEQ ID NO: 88382 - protein, 10 aa, Homo sapiens
  Table A; Target 88382; HLA-B*27:02; TRIM51; ENSG00000124900; TAA
KEGEDIFQQL

SEQ ID NO: 88383 - protein, 10 aa, Homo sapiens
  Table A; Target 88383; HLA-B*37:01; TRIM51; ENSG00000124900; TAA
KEGEDIFQQL

SEQ ID NO: 88384 - protein, 10 aa, Homo sapiens
  Table A; Target 88384; HLA-B*40:02; TRIM51; ENSG00000124900; TAA
KEGEDIFQQL

SEQ ID NO: 88385 - protein, 10 aa, Homo sapiens
  Table A; Target 88385; HLA-B*44:02; TRIM51; ENSG00000124900; TAA
KEGEDIFQQL

SEQ ID NO: 88386 - protein, 10 aa, Homo sapiens
  Table A; Target 88386; HLA-B*44:03; TRIM51; ENSG00000124900; TAA
KEGEDIFQQL

SEQ ID NO: 88387 - protein, 10 aa, Homo sapiens
  Table A; Target 88387; HLA-B*49:01; TRIM51; ENSG00000124900; TAA
KEGEDIFQQL

SEQ ID NO: 88388 - protein, 10 aa, Homo sapiens
  Table A; Target 88388; HLA-C*16:04; TRIM51; ENSG00000124900; TAA
KEGEDIFQQL

SEQ ID NO: 88389 - protein, 8 aa, Homo sapiens
  Table A; Target 88389; HLA-C*05:01; TRIM51; ENSG00000124900; TAA
KIDGEEGL

SEQ ID NO: 88390 - protein, 9 aa, Homo sapiens
  Table A; Target 88390; HLA-C*05:01; TRIM51; ENSG00000124900; TAA
KIDGEEGLF

SEQ ID NO: 88391 - protein, 10 aa, Homo sapiens
  Table A; Target 88391; HLA-A*02:07; TRIM51; ENSG00000124900; TAA
KIDGEEGLFL

SEQ ID NO: 88392 - protein, 11 aa, Homo sapiens
  Table A; Target 88392; HLA-A*02:07; TRIM51; ENSG00000124900; TAA
KIDGEEGLFLL

SEQ ID NO: 88393 - protein, 10 aa, Homo sapiens
  Table A; Target 88393; HLA-B*37:01; TRIM51; ENSG00000124900; TAA
LDCEGRTVSF

SEQ ID NO: 88394 - protein, 11 aa, Homo sapiens
  Table A; Target 88394; HLA-A*29:02; TRIM51; ENSG00000124900; TAA
LFTTSPLVVQY

SEQ ID NO: 88395 - protein, 9 aa, Homo sapiens
  Table A; Target 88395; HLA-B*38:01; TRIM51; ENSG00000124900; TAA
LHEEEQHHL

SEQ ID NO: 88396 - protein, 8 aa, Homo sapiens
  Table A; Target 88396; HLA-A*01:01; TRIM51; ENSG00000124900; TAA
LLDSLSGF

SEQ ID NO: 88397 - protein, 8 aa, Homo sapiens
  Table A; Target 88397; HLA-C*05:01; TRIM51; ENSG00000124900; TAA
LLDSLSGF

SEQ ID NO: 88398 - protein, 10 aa, Homo sapiens
  Table A; Target 88398; HLA-A*02:01; TRIM51; ENSG00000124900; TAA
LLDSLSGFRV

SEQ ID NO: 88399 - protein, 10 aa, Homo sapiens
  Table A; Target 88399; HLA-A*02:04; TRIM51; ENSG00000124900; TAA
LLDSLSGFRV

SEQ ID NO: 88400 - protein, 10 aa, Homo sapiens
  Table A; Target 88400; HLA-A*02:07; TRIM51; ENSG00000124900; TAA
LLDSLSGFRV

SEQ ID NO: 88401 - protein, 8 aa, Homo sapiens
  Table A; Target 88401; HLA-B*08:01; TRIM51; ENSG00000124900; TAA
LLKKMQSL

SEQ ID NO: 88402 - protein, 9 aa, Homo sapiens
  Table A; Target 88402; HLA-A*02:01; TRIM51; ENSG00000124900; TAA
LLLQVSEPV

SEQ ID NO: 88403 - protein, 11 aa, Homo sapiens
  Table A; Target 88403; HLA-A*01:01; TRIM51; ENSG00000124900; TAA
LQAFGDILHRY

SEQ ID NO: 88404 - protein, 11 aa, Homo sapiens
  Table A; Target 88404; HLA-A*30:02; TRIM51; ENSG00000124900; TAA
LQAFGDILHRY

SEQ ID NO: 88405 - protein, 9 aa, Homo sapiens
  Table A; Target 88405; HLA-B*27:05; TRIM51; ENSG00000124900; TAA
LQVSEPVNP

SEQ ID NO: 88406 - protein, 11 aa, Homo sapiens
  Table A; Target 88406; HLA-A*02:04; TRIM51; ENSG00000124900; TAA
LQVSEPVNPEL

SEQ ID NO: 88407 - protein, 11 aa, Homo sapiens
  Table A; Target 88407; HLA-A*30:01; TRIM51; ENSG00000124900; TAA
LQVSEPVNPEL

SEQ ID NO: 88408 - protein, 11 aa, Homo sapiens
  Table A; Target 88408; HLA-B*27:05; TRIM51; ENSG00000124900; TAA
LQVSEPVNPEL

SEQ ID NO: 88409 - protein, 11 aa, Homo sapiens
  Table A; Target 88409; HLA-B*38:01; TRIM51; ENSG00000124900; TAA
LQVSEPVNPEL

SEQ ID NO: 88410 - protein, 10 aa, Homo sapiens
  Table A; Target 88410; HLA-C*16:04; TRIM51; ENSG00000124900; TAA
LRIEAIRAEY

SEQ ID NO: 88411 - protein, 9 aa, Homo sapiens
  Table A; Target 88411; HLA-B*58:01; TRIM51; ENSG00000124900; TAA
LSAGPITGL

SEQ ID NO: 88412 - protein, 9 aa, Homo sapiens
  Table A; Target 88412; HLA-C*02:02; TRIM51; ENSG00000124900; TAA
LSAGPITGL

SEQ ID NO: 88413 - protein, 9 aa, Homo sapiens
  Table A; Target 88413; HLA-C*03:03; TRIM51; ENSG00000124900; TAA
LSAGPITGL

SEQ ID NO: 88414 - protein, 9 aa, Homo sapiens
  Table A; Target 88414; HLA-C*03:04; TRIM51; ENSG00000124900; TAA
LSAGPITGL

SEQ ID NO: 88415 - protein, 9 aa, Homo sapiens
  Table A; Target 88415; HLA-C*05:01; TRIM51; ENSG00000124900; TAA
LSAGPITGL

SEQ ID NO: 88416 - protein, 9 aa, Homo sapiens
  Table A; Target 88416; HLA-C*16:01; TRIM51; ENSG00000124900; TAA
LSAGPITGL

SEQ ID NO: 88417 - protein, 9 aa, Homo sapiens
  Table A; Target 88417; HLA-A*01:01; TRIM51; ENSG00000124900; TAA
LTCPICMNY

SEQ ID NO: 88418 - protein, 9 aa, Homo sapiens
  Table A; Target 88418; HLA-A*29:02; TRIM51; ENSG00000124900; TAA
LTCPICMNY

SEQ ID NO: 88419 - protein, 9 aa, Homo sapiens
  Table A; Target 88419; HLA-A*30:02; TRIM51; ENSG00000124900; TAA
LTCPICMNY

SEQ ID NO: 88420 - protein, 9 aa, Homo sapiens
  Table A; Target 88420; HLA-B*57:01; TRIM51; ENSG00000124900; TAA
LTCPICMNY

SEQ ID NO: 88421 - protein, 9 aa, Homo sapiens
  Table A; Target 88421; HLA-C*07:01; TRIM51; ENSG00000124900; TAA
LTCPICMNY

SEQ ID NO: 88422 - protein, 9 aa, Homo sapiens
  Table A; Target 88422; HLA-C*12:03; TRIM51; ENSG00000124900; TAA
LTCPICMNY

SEQ ID NO: 88423 - protein, 11 aa, Homo sapiens
  Table A; Target 88423; HLA-A*24:02; TRIM51; ENSG00000124900; TAA
LYLNWQDTAVL

SEQ ID NO: 88424 - protein, 8 aa, Homo sapiens
  Table A; Target 88424; HLA-B*54:01; TRIM51; ENSG00000124900; TAA
MAFIARKA

SEQ ID NO: 88425 - protein, 8 aa, Homo sapiens
  Table A; Target 88425; HLA-C*06:02; TRIM51; ENSG00000124900; TAA
MAFIARKA

SEQ ID NO: 88426 - protein, 10 aa, Homo sapiens
  Table A; Target 88426; HLA-B*08:01; TRIM51; ENSG00000124900; TAA
MAFIARKASL

SEQ ID NO: 88427 - protein, 10 aa, Homo sapiens
  Table A; Target 88427; HLA-B*54:01; TRIM51; ENSG00000124900; TAA
MAFIARKASL

SEQ ID NO: 88428 - protein, 8 aa, Homo sapiens
  Table A; Target 88428; HLA-B*37:01; TRIM51; ENSG00000124900; TAA
MEHSRELL

SEQ ID NO: 88429 - protein, 8 aa, Homo sapiens
  Table A; Target 88429; HLA-B*40:02; TRIM51; ENSG00000124900; TAA
MEHSRELL

SEQ ID NO: 88430 - protein, 9 aa, Homo sapiens
  Table A; Target 88430; HLA-B*44:02; TRIM51; ENSG00000124900; TAA
METTRTRCW

SEQ ID NO: 88431 - protein, 9 aa, Homo sapiens
  Table A; Target 88431; HLA-B*44:03; TRIM51; ENSG00000124900; TAA
METTRTRCW

SEQ ID NO: 88432 - protein, 10 aa, Homo sapiens
  Table A; Target 88432; HLA-C*04:01; TRIM51; ENSG00000124900; TAA
MFCEVDKSLL

SEQ ID NO: 88433 - protein, 9 aa, Homo sapiens
  Table A; Target 88433; HLA-A*23:01; TRIM51; ENSG00000124900; TAA
MNSGILQVF

SEQ ID NO: 88434 - protein, 9 aa, Homo sapiens
  Table A; Target 88434; HLA-A*29:02; TRIM51; ENSG00000124900; TAA
MNSGILQVF

SEQ ID NO: 88435 - protein, 11 aa, Homo sapiens
  Table A; Target 88435; HLA-A*33:03; TRIM51; ENSG00000124900; TAA
MNSGILQVFQR

SEQ ID NO: 88436 - protein, 11 aa, Homo sapiens
  Table A; Target 88436; HLA-A*68:01; TRIM51; ENSG00000124900; TAA
MNSGILQVFQR

SEQ ID NO: 88437 - protein, 8 aa, Homo sapiens
  Table A; Target 88437; HLA-C*04:01; TRIM51; ENSG00000124900; TAA
MYEDLKQM

SEQ ID NO: 88438 - protein, 9 aa, Homo sapiens
  Table A; Target 88438; HLA-A*03:02; TRIM51; ENSG00000124900; TAA
NLNTDICLK

SEQ ID NO: 88439 - protein, 9 aa, Homo sapiens
  Table A; Target 88439; HLA-A*11:01; TRIM51; ENSG00000124900; TAA
NLNTDICLK

SEQ ID NO: 88440 - protein, 9 aa, Homo sapiens
  Table A; Target 88440; HLA-A*33:01; TRIM51; ENSG00000124900; TAA
NLNTDICLK

SEQ ID NO: 88441 - protein, 9 aa, Homo sapiens
  Table A; Target 88441; HLA-B*27:02; TRIM51; ENSG00000124900; TAA
NLNTDICLK

SEQ ID NO: 88442 - protein, 11 aa, Homo sapiens
  Table A; Target 88442; HLA-A*33:01; TRIM51; ENSG00000124900; TAA
NLRNLNMETTR

SEQ ID NO: 88443 - protein, 10 aa, Homo sapiens
  Table A; Target 88443; HLA-A*68:01; TRIM51; ENSG00000124900; TAA
NSGILQVFQR

SEQ ID NO: 88444 - protein, 9 aa, Homo sapiens
  Table A; Target 88444; HLA-C*04:01; TRIM51; ENSG00000124900; TAA
NTDICLKNM

SEQ ID NO: 88445 - protein, 8 aa, Homo sapiens
  Table A; Target 88445; HLA-C*14:02; TRIM51; ENSG00000124900; TAA
NWQDTAVL

SEQ ID NO: 88446 - protein, 9 aa, Homo sapiens
  Table A; Target 88446; HLA-A*23:01; TRIM51; ENSG00000124900; TAA
NYFLDPVTI

SEQ ID NO: 88447 - protein, 9 aa, Homo sapiens
  Table A; Target 88447; HLA-A*33:03; TRIM51; ENSG00000124900; TAA
NYFLDPVTI

SEQ ID NO: 88448 - protein, 9 aa, Homo sapiens
  Table A; Target 88448; HLA-B*15:03; TRIM51; ENSG00000124900; TAA
NYFLDPVTI

SEQ ID NO: 88449 - protein, 9 aa, Homo sapiens
  Table A; Target 88449; HLA-B*27:02; TRIM51; ENSG00000124900; TAA
NYFLDPVTI

SEQ ID NO: 88450 - protein, 9 aa, Homo sapiens
  Table A; Target 88450; HLA-B*35:01; TRIM51; ENSG00000124900; TAA
NYFLDPVTI

SEQ ID NO: 88451 - protein, 9 aa, Homo sapiens
  Table A; Target 88451; HLA-B*35:03; TRIM51; ENSG00000124900; TAA
NYFLDPVTI

SEQ ID NO: 88452 - protein, 9 aa, Homo sapiens
  Table A; Target 88452; HLA-B*38:01; TRIM51; ENSG00000124900; TAA
NYFLDPVTI

SEQ ID NO: 88453 - protein, 9 aa, Homo sapiens
  Table A; Target 88453; HLA-B*39:01; TRIM51; ENSG00000124900; TAA
NYFLDPVTI

SEQ ID NO: 88454 - protein, 9 aa, Homo sapiens
  Table A; Target 88454; HLA-B*51:01; TRIM51; ENSG00000124900; TAA
NYFLDPVTI

SEQ ID NO: 88455 - protein, 9 aa, Homo sapiens
  Table A; Target 88455; HLA-C*01:02; TRIM51; ENSG00000124900; TAA
NYFLDPVTI

SEQ ID NO: 88456 - protein, 9 aa, Homo sapiens
  Table A; Target 88456; HLA-C*04:01; TRIM51; ENSG00000124900; TAA
NYFLDPVTI

SEQ ID NO: 88457 - protein, 9 aa, Homo sapiens
  Table A; Target 88457; HLA-C*06:02; TRIM51; ENSG00000124900; TAA
NYFLDPVTI

SEQ ID NO: 88458 - protein, 9 aa, Homo sapiens
  Table A; Target 88458; HLA-C*07:04; TRIM51; ENSG00000124900; TAA
NYFLDPVTI

SEQ ID NO: 88459 - protein, 9 aa, Homo sapiens
  Table A; Target 88459; HLA-C*12:03; TRIM51; ENSG00000124900; TAA
NYFLDPVTI

SEQ ID NO: 88460 - protein, 9 aa, Homo sapiens
  Table A; Target 88460; HLA-C*14:02; TRIM51; ENSG00000124900; TAA
NYFLDPVTI

SEQ ID NO: 88461 - protein, 9 aa, Homo sapiens
  Table A; Target 88461; HLA-C*16:02; TRIM51; ENSG00000124900; TAA
NYFLDPVTI

SEQ ID NO: 88462 - protein, 9 aa, Homo sapiens
  Table A; Target 88462; HLA-C*07:02; TRIM51; ENSG00000124900; TAA
PITGLLDSL

SEQ ID NO: 88463 - protein, 9 aa, Homo sapiens
  Table A; Target 88463; HLA-B*07:02; TRIM51; ENSG00000124900; TAA
PRPTSTVGL

SEQ ID NO: 88464 - protein, 9 aa, Homo sapiens
  Table A; Target 88464; HLA-C*07:01; TRIM51; ENSG00000124900; TAA
PRPTSTVGL

SEQ ID NO: 88465 - protein, 9 aa, Homo sapiens
  Table A; Target 88465; HLA-C*07:02; TRIM51; ENSG00000124900; TAA
PRPTSTVGL

SEQ ID NO: 88466 - protein, 9 aa, Homo sapiens
  Table A; Target 88466; HLA-A*03:01; TRIM51; ENSG00000124900; TAA
QAFGDILHR

SEQ ID NO: 88467 - protein, 9 aa, Homo sapiens
  Table A; Target 88467; HLA-A*11:01; TRIM51; ENSG00000124900; TAA
QAFGDILHR

SEQ ID NO: 88468 - protein, 9 aa, Homo sapiens
  Table A; Target 88468; HLA-A*31:01; TRIM51; ENSG00000124900; TAA
QAFGDILHR

SEQ ID NO: 88469 - protein, 9 aa, Homo sapiens
  Table A; Target 88469; HLA-A*33:01; TRIM51; ENSG00000124900; TAA
QAFGDILHR

SEQ ID NO: 88470 - protein, 9 aa, Homo sapiens
  Table A; Target 88470; HLA-A*33:03; TRIM51; ENSG00000124900; TAA
QAFGDILHR

SEQ ID NO: 88471 - protein, 9 aa, Homo sapiens
  Table A; Target 88471; HLA-A*68:01; TRIM51; ENSG00000124900; TAA
QAFGDILHR

SEQ ID NO: 88472 - protein, 9 aa, Homo sapiens
  Table A; Target 88472; HLA-A*68:02; TRIM51; ENSG00000124900; TAA
QAFGDILHR

SEQ ID NO: 88473 - protein, 9 aa, Homo sapiens
  Table A; Target 88473; HLA-B*27:02; TRIM51; ENSG00000124900; TAA
QAFGDILHR

SEQ ID NO: 88474 - protein, 9 aa, Homo sapiens
  Table A; Target 88474; HLA-B*57:01; TRIM51; ENSG00000124900; TAA
QAFGDILHR

SEQ ID NO: 88475 - protein, 9 aa, Homo sapiens
  Table A; Target 88475; HLA-C*07:06; TRIM51; ENSG00000124900; TAA
QAFGDILHR

SEQ ID NO: 88476 - protein, 10 aa, Homo sapiens
  Table A; Target 88476; HLA-A*01:01; TRIM51; ENSG00000124900; TAA
QAFGDILHRY

SEQ ID NO: 88477 - protein, 10 aa, Homo sapiens
  Table A; Target 88477; HLA-A*26:01; TRIM51; ENSG00000124900; TAA
QAFGDILHRY

SEQ ID NO: 88478 - protein, 10 aa, Homo sapiens
  Table A; Target 88478; HLA-A*29:02; TRIM51; ENSG00000124900; TAA
QAFGDILHRY

SEQ ID NO: 88479 - protein, 10 aa, Homo sapiens
  Table A; Target 88479; HLA-A*30:02; TRIM51; ENSG00000124900; TAA
QAFGDILHRY

SEQ ID NO: 88480 - protein, 10 aa, Homo sapiens
  Table A; Target 88480; HLA-A*68:02; TRIM51; ENSG00000124900; TAA
QAFGDILHRY

SEQ ID NO: 88481 - protein, 10 aa, Homo sapiens
  Table A; Target 88481; HLA-B*35:01; TRIM51; ENSG00000124900; TAA
QAFGDILHRY

SEQ ID NO: 88482 - protein, 10 aa, Homo sapiens
  Table A; Target 88482; HLA-B*44:02; TRIM51; ENSG00000124900; TAA
QAFGDILHRY

SEQ ID NO: 88483 - protein, 10 aa, Homo sapiens
  Table A; Target 88483; HLA-B*44:03; TRIM51; ENSG00000124900; TAA
QAFGDILHRY

SEQ ID NO: 88484 - protein, 10 aa, Homo sapiens
  Table A; Target 88484; HLA-B*57:01; TRIM51; ENSG00000124900; TAA
QAFGDILHRY

SEQ ID NO: 88485 - protein, 10 aa, Homo sapiens
  Table A; Target 88485; HLA-C*02:02; TRIM51; ENSG00000124900; TAA
QAFGDILHRY

SEQ ID NO: 88486 - protein, 8 aa, Homo sapiens
  Table A; Target 88486; HLA-A*30:02; TRIM51; ENSG00000124900; TAA
QAFTSGKY

SEQ ID NO: 88487 - protein, 8 aa, Homo sapiens
  Table A; Target 88487; HLA-B*15:01; TRIM51; ENSG00000124900; TAA
QAFTSGKY

SEQ ID NO: 88488 - protein, 8 aa, Homo sapiens
  Table A; Target 88488; HLA-B*15:03; TRIM51; ENSG00000124900; TAA
QAFTSGKY

SEQ ID NO: 88489 - protein, 8 aa, Homo sapiens
  Table A; Target 88489; HLA-B*35:01; TRIM51; ENSG00000124900; TAA
QAFTSGKY

SEQ ID NO: 88490 - protein, 8 aa, Homo sapiens
  Table A; Target 88490; HLA-B*46:01; TRIM51; ENSG00000124900; TAA
QAFTSGKY

SEQ ID NO: 88491 - protein, 8 aa, Homo sapiens
  Table A; Target 88491; HLA-B*58:01; TRIM51; ENSG00000124900; TAA
QAFTSGKY

SEQ ID NO: 88492 - protein, 8 aa, Homo sapiens
  Table A; Target 88492; HLA-C*02:02; TRIM51; ENSG00000124900; TAA
QAFTSGKY

SEQ ID NO: 88493 - protein, 8 aa, Homo sapiens
  Table A; Target 88493; HLA-C*07:01; TRIM51; ENSG00000124900; TAA
QAFTSGKY

SEQ ID NO: 88494 - protein, 8 aa, Homo sapiens
  Table A; Target 88494; HLA-C*12:03; TRIM51; ENSG00000124900; TAA
QAFTSGKY

SEQ ID NO: 88495 - protein, 8 aa, Homo sapiens
  Table A; Target 88495; HLA-C*16:01; TRIM51; ENSG00000124900; TAA
QAFTSGKY

SEQ ID NO: 88496 - protein, 8 aa, Homo sapiens
  Table A; Target 88496; HLA-C*16:02; TRIM51; ENSG00000124900; TAA
QAFTSGKY

SEQ ID NO: 88497 - protein, 9 aa, Homo sapiens
  Table A; Target 88497; HLA-A*26:01; TRIM51; ENSG00000124900; TAA
QAFTSGKYY

SEQ ID NO: 88498 - protein, 9 aa, Homo sapiens
  Table A; Target 88498; HLA-A*29:02; TRIM51; ENSG00000124900; TAA
QAFTSGKYY

SEQ ID NO: 88499 - protein, 9 aa, Homo sapiens
  Table A; Target 88499; HLA-A*30:02; TRIM51; ENSG00000124900; TAA
QAFTSGKYY

SEQ ID NO: 88500 - protein, 9 aa, Homo sapiens
  Table A; Target 88500; HLA-B*15:03; TRIM51; ENSG00000124900; TAA
QAFTSGKYY

SEQ ID NO: 88501 - protein, 9 aa, Homo sapiens
  Table A; Target 88501; HLA-B*35:01; TRIM51; ENSG00000124900; TAA
QAFTSGKYY

SEQ ID NO: 88502 - protein, 9 aa, Homo sapiens
  Table A; Target 88502; HLA-B*46:01; TRIM51; ENSG00000124900; TAA
QAFTSGKYY

SEQ ID NO: 88503 - protein, 9 aa, Homo sapiens
  Table A; Target 88503; HLA-C*02:02; TRIM51; ENSG00000124900; TAA
QAFTSGKYY

SEQ ID NO: 88504 - protein, 9 aa, Homo sapiens
  Table A; Target 88504; HLA-C*12:03; TRIM51; ENSG00000124900; TAA
QAFTSGKYY

SEQ ID NO: 88505 - protein, 9 aa, Homo sapiens
  Table A; Target 88505; HLA-C*16:01; TRIM51; ENSG00000124900; TAA
QAFTSGKYY

SEQ ID NO: 88506 - protein, 9 aa, Homo sapiens
  Table A; Target 88506; HLA-C*16:02; TRIM51; ENSG00000124900; TAA
QAFTSGKYY

SEQ ID NO: 88507 - protein, 9 aa, Homo sapiens
  Table A; Target 88507; HLA-C*16:04; TRIM51; ENSG00000124900; TAA
QAFTSGKYY

SEQ ID NO: 88508 - protein, 10 aa, Homo sapiens
  Table A; Target 88508; HLA-B*57:01; TRIM51; ENSG00000124900; TAA
QAFTSGKYYW

SEQ ID NO: 88509 - protein, 9 aa, Homo sapiens
  Table A; Target 88509; HLA-A*30:01; TRIM51; ENSG00000124900; TAA
QDTAVLAQC

SEQ ID NO: 88510 - protein, 9 aa, Homo sapiens
  Table A; Target 88510; HLA-C*16:02; TRIM51; ENSG00000124900; TAA
QDTAVLAQC

SEQ ID NO: 88511 - protein, 8 aa, Homo sapiens
  Table A; Target 88511; HLA-B*37:01; TRIM51; ENSG00000124900; TAA
QSSLIYTI

SEQ ID NO: 88512 - protein, 9 aa, Homo sapiens
  Table A; Target 88512; HLA-B*08:01; TRIM51; ENSG00000124900; TAA
QVFQRALTC

SEQ ID NO: 88513 - protein, 10 aa, Homo sapiens
  Table A; Target 88513; HLA-A*02:01; TRIM51; ENSG00000124900; TAA
QVSEPVNPEL

SEQ ID NO: 88514 - protein, 10 aa, Homo sapiens
  Table A; Target 88514; HLA-A*02:04; TRIM51; ENSG00000124900; TAA
QVSEPVNPEL

SEQ ID NO: 88515 - protein, 10 aa, Homo sapiens
  Table A; Target 88515; HLA-A*02:07; TRIM51; ENSG00000124900; TAA
QVSEPVNPEL

SEQ ID NO: 88516 - protein, 10 aa, Homo sapiens
  Table A; Target 88516; HLA-A*03:02; TRIM51; ENSG00000124900; TAA
QVSEPVNPEL

SEQ ID NO: 88517 - protein, 10 aa, Homo sapiens
  Table A; Target 88517; HLA-A*11:01; TRIM51; ENSG00000124900; TAA
QVSEPVNPEL

SEQ ID NO: 88518 - protein, 10 aa, Homo sapiens
  Table A; Target 88518; HLA-A*23:01; TRIM51; ENSG00000124900; TAA
QVSEPVNPEL

SEQ ID NO: 88519 - protein, 10 aa, Homo sapiens
  Table A; Target 88519; HLA-A*25:01; TRIM51; ENSG00000124900; TAA
QVSEPVNPEL

SEQ ID NO: 88520 - protein, 10 aa, Homo sapiens
  Table A; Target 88520; HLA-A*26:01; TRIM51; ENSG00000124900; TAA
QVSEPVNPEL

SEQ ID NO: 88521 - protein, 10 aa, Homo sapiens
  Table A; Target 88521; HLA-A*30:01; TRIM51; ENSG00000124900; TAA
QVSEPVNPEL

SEQ ID NO: 88522 - protein, 10 aa, Homo sapiens
  Table A; Target 88522; HLA-A*68:01; TRIM51; ENSG00000124900; TAA
QVSEPVNPEL

SEQ ID NO: 88523 - protein, 10 aa, Homo sapiens
  Table A; Target 88523; HLA-A*68:02; TRIM51; ENSG00000124900; TAA
QVSEPVNPEL

SEQ ID NO: 88524 - protein, 10 aa, Homo sapiens
  Table A; Target 88524; HLA-B*07:02; TRIM51; ENSG00000124900; TAA
QVSEPVNPEL

SEQ ID NO: 88525 - protein, 10 aa, Homo sapiens
  Table A; Target 88525; HLA-B*13:02; TRIM51; ENSG00000124900; TAA
QVSEPVNPEL

SEQ ID NO: 88526 - protein, 10 aa, Homo sapiens
  Table A; Target 88526; HLA-B*27:02; TRIM51; ENSG00000124900; TAA
QVSEPVNPEL

SEQ ID NO: 88527 - protein, 10 aa, Homo sapiens
  Table A; Target 88527; HLA-B*27:05; TRIM51; ENSG00000124900; TAA
QVSEPVNPEL

SEQ ID NO: 88528 - protein, 10 aa, Homo sapiens
  Table A; Target 88528; HLA-B*35:01; TRIM51; ENSG00000124900; TAA
QVSEPVNPEL

SEQ ID NO: 88529 - protein, 10 aa, Homo sapiens
  Table A; Target 88529; HLA-B*35:03; TRIM51; ENSG00000124900; TAA
QVSEPVNPEL

SEQ ID NO: 88530 - protein, 10 aa, Homo sapiens
  Table A; Target 88530; HLA-B*38:01; TRIM51; ENSG00000124900; TAA
QVSEPVNPEL

SEQ ID NO: 88531 - protein, 10 aa, Homo sapiens
  Table A; Target 88531; HLA-B*39:01; TRIM51; ENSG00000124900; TAA
QVSEPVNPEL

SEQ ID NO: 88532 - protein, 10 aa, Homo sapiens
  Table A; Target 88532; HLA-B*40:01; TRIM51; ENSG00000124900; TAA
QVSEPVNPEL

SEQ ID NO: 88533 - protein, 10 aa, Homo sapiens
  Table A; Target 88533; HLA-B*58:01; TRIM51; ENSG00000124900; TAA
QVSEPVNPEL

SEQ ID NO: 88534 - protein, 10 aa, Homo sapiens
  Table A; Target 88534; HLA-C*01:02; TRIM51; ENSG00000124900; TAA
QVSEPVNPEL

SEQ ID NO: 88535 - protein, 10 aa, Homo sapiens
  Table A; Target 88535; HLA-C*02:02; TRIM51; ENSG00000124900; TAA
QVSEPVNPEL

SEQ ID NO: 88536 - protein, 10 aa, Homo sapiens
  Table A; Target 88536; HLA-C*03:03; TRIM51; ENSG00000124900; TAA
QVSEPVNPEL

SEQ ID NO: 88537 - protein, 10 aa, Homo sapiens
  Table A; Target 88537; HLA-C*03:04; TRIM51; ENSG00000124900; TAA
QVSEPVNPEL

SEQ ID NO: 88538 - protein, 10 aa, Homo sapiens
  Table A; Target 88538; HLA-C*05:01; TRIM51; ENSG00000124900; TAA
QVSEPVNPEL

SEQ ID NO: 88539 - protein, 10 aa, Homo sapiens
  Table A; Target 88539; HLA-C*06:02; TRIM51; ENSG00000124900; TAA
QVSEPVNPEL

SEQ ID NO: 88540 - protein, 10 aa, Homo sapiens
  Table A; Target 88540; HLA-C*07:02; TRIM51; ENSG00000124900; TAA
QVSEPVNPEL

SEQ ID NO: 88541 - protein, 10 aa, Homo sapiens
  Table A; Target 88541; HLA-C*07:06; TRIM51; ENSG00000124900; TAA
QVSEPVNPEL

SEQ ID NO: 88542 - protein, 10 aa, Homo sapiens
  Table A; Target 88542; HLA-C*16:01; TRIM51; ENSG00000124900; TAA
QVSEPVNPEL

SEQ ID NO: 88543 - protein, 10 aa, Homo sapiens
  Table A; Target 88543; HLA-C*16:02; TRIM51; ENSG00000124900; TAA
QVSEPVNPEL

SEQ ID NO: 88544 - protein, 10 aa, Homo sapiens
  Table A; Target 88544; HLA-C*16:04; TRIM51; ENSG00000124900; TAA
QVSEPVNPEL

SEQ ID NO: 88545 - protein, 10 aa, Homo sapiens
  Table A; Target 88545; HLA-A*24:02; TRIM51; ENSG00000124900; TAA
QYVPRPTSTV

SEQ ID NO: 88546 - protein, 9 aa, Homo sapiens
  Table A; Target 88546; HLA-A*01:01; TRIM51; ENSG00000124900; TAA
RIEAIRAEY

SEQ ID NO: 88547 - protein, 9 aa, Homo sapiens
  Table A; Target 88547; HLA-A*03:01; TRIM51; ENSG00000124900; TAA
RIEAIRAEY

SEQ ID NO: 88548 - protein, 9 aa, Homo sapiens
  Table A; Target 88548; HLA-A*29:02; TRIM51; ENSG00000124900; TAA
RIEAIRAEY

SEQ ID NO: 88549 - protein, 9 aa, Homo sapiens
  Table A; Target 88549; HLA-A*30:02; TRIM51; ENSG00000124900; TAA
RIEAIRAEY

SEQ ID NO: 88550 - protein, 9 aa, Homo sapiens
  Table A; Target 88550; HLA-A*32:01; TRIM51; ENSG00000124900; TAA
RIEAIRAEY

SEQ ID NO: 88551 - protein, 9 aa, Homo sapiens
  Table A; Target 88551; HLA-B*15:01; TRIM51; ENSG00000124900; TAA
RIEAIRAEY

SEQ ID NO: 88552 - protein, 9 aa, Homo sapiens
  Table A; Target 88552; HLA-B*15:03; TRIM51; ENSG00000124900; TAA
RIEAIRAEY

SEQ ID NO: 88553 - protein, 9 aa, Homo sapiens
  Table A; Target 88553; HLA-B*44:02; TRIM51; ENSG00000124900; TAA
RIEAIRAEY

SEQ ID NO: 88554 - protein, 9 aa, Homo sapiens
  Table A; Target 88554; HLA-B*44:03; TRIM51; ENSG00000124900; TAA
RIEAIRAEY

SEQ ID NO: 88555 - protein, 9 aa, Homo sapiens
  Table A; Target 88555; HLA-B*46:01; TRIM51; ENSG00000124900; TAA
RIEAIRAEY

SEQ ID NO: 88556 - protein, 9 aa, Homo sapiens
  Table A; Target 88556; HLA-B*57:01; TRIM51; ENSG00000124900; TAA
RIEAIRAEY

SEQ ID NO: 88557 - protein, 9 aa, Homo sapiens
  Table A; Target 88557; HLA-B*58:01; TRIM51; ENSG00000124900; TAA
RIEAIRAEY

SEQ ID NO: 88558 - protein, 9 aa, Homo sapiens
  Table A; Target 88558; HLA-C*07:04; TRIM51; ENSG00000124900; TAA
RIEAIRAEY

SEQ ID NO: 88559 - protein, 9 aa, Homo sapiens
  Table A; Target 88559; HLA-C*16:01; TRIM51; ENSG00000124900; TAA
RIEAIRAEY

SEQ ID NO: 88560 - protein, 9 aa, Homo sapiens
  Table A; Target 88560; HLA-C*16:02; TRIM51; ENSG00000124900; TAA
RIEAIRAEY

SEQ ID NO: 88561 - protein, 9 aa, Homo sapiens
  Table A; Target 88561; HLA-C*16:04; TRIM51; ENSG00000124900; TAA
RIEAIRAEY

SEQ ID NO: 88562 - protein, 9 aa, Homo sapiens
  Table A; Target 88562; HLA-A*31:01; TRIM51; ENSG00000124900; TAA
RNLNMETTR

SEQ ID NO: 88563 - protein, 9 aa, Homo sapiens
  Table A; Target 88563; HLA-A*33:03; TRIM51; ENSG00000124900; TAA
RNLNMETTR

SEQ ID NO: 88564 - protein, 8 aa, Homo sapiens
  Table A; Target 88564; HLA-B*07:02; TRIM51; ENSG00000124900; TAA
RPTSTVGL

SEQ ID NO: 88565 - protein, 8 aa, Homo sapiens
  Table A; Target 88565; HLA-C*07:02; TRIM51; ENSG00000124900; TAA
RPTSTVGL

SEQ ID NO: 88566 - protein, 9 aa, Homo sapiens
  Table A; Target 88566; HLA-B*07:02; TRIM51; ENSG00000124900; TAA
RPTSTVGLF

SEQ ID NO: 88567 - protein, 10 aa, Homo sapiens
  Table A; Target 88567; HLA-B*07:02; TRIM51; ENSG00000124900; TAA
RPTSTVGLFL

SEQ ID NO: 88568 - protein, 10 aa, Homo sapiens
  Table A; Target 88568; HLA-A*30:01; TRIM51; ENSG00000124900; TAA
RQFLSSEEQI

SEQ ID NO: 88569 - protein, 10 aa, Homo sapiens
  Table A; Target 88569; HLA-B*13:02; TRIM51; ENSG00000124900; TAA
RQFLSSEEQI

SEQ ID NO: 88570 - protein, 10 aa, Homo sapiens
  Table A; Target 88570; HLA-B*38:01; TRIM51; ENSG00000124900; TAA
RQFLSSEEQI

SEQ ID NO: 88571 - protein, 10 aa, Homo sapiens
  Table A; Target 88571; HLA-A*31:01; TRIM51; ENSG00000124900; TAA
RVDFTLQPER

SEQ ID NO: 88572 - protein, 9 aa, Homo sapiens
  Table A; Target 88572; HLA-A*23:01; TRIM51; ENSG00000124900; TAA
SAGPITGLL

SEQ ID NO: 88573 - protein, 9 aa, Homo sapiens
  Table A; Target 88573; HLA-A*25:01; TRIM51; ENSG00000124900; TAA
SAGPITGLL

SEQ ID NO: 88574 - protein, 9 aa, Homo sapiens
  Table A; Target 88574; HLA-A*26:01; TRIM51; ENSG00000124900; TAA
SAGPITGLL

SEQ ID NO: 88575 - protein, 9 aa, Homo sapiens
  Table A; Target 88575; HLA-A*30:02; TRIM51; ENSG00000124900; TAA
SAGPITGLL

SEQ ID NO: 88576 - protein, 9 aa, Homo sapiens
  Table A; Target 88576; HLA-A*68:02; TRIM51; ENSG00000124900; TAA
SAGPITGLL

SEQ ID NO: 88577 - protein, 9 aa, Homo sapiens
  Table A; Target 88577; HLA-B*27:05; TRIM51; ENSG00000124900; TAA
SAGPITGLL

SEQ ID NO: 88578 - protein, 9 aa, Homo sapiens
  Table A; Target 88578; HLA-B*35:01; TRIM51; ENSG00000124900; TAA
SAGPITGLL

SEQ ID NO: 88579 - protein, 9 aa, Homo sapiens
  Table A; Target 88579; HLA-B*35:03; TRIM51; ENSG00000124900; TAA
SAGPITGLL

SEQ ID NO: 88580 - protein, 9 aa, Homo sapiens
  Table A; Target 88580; HLA-B*38:01; TRIM51; ENSG00000124900; TAA
SAGPITGLL

SEQ ID NO: 88581 - protein, 9 aa, Homo sapiens
  Table A; Target 88581; HLA-B*40:01; TRIM51; ENSG00000124900; TAA
SAGPITGLL

SEQ ID NO: 88582 - protein, 9 aa, Homo sapiens
  Table A; Target 88582; HLA-B*46:01; TRIM51; ENSG00000124900; TAA
SAGPITGLL

SEQ ID NO: 88583 - protein, 9 aa, Homo sapiens
  Table A; Target 88583; HLA-B*57:01; TRIM51; ENSG00000124900; TAA
SAGPITGLL

SEQ ID NO: 88584 - protein, 9 aa, Homo sapiens
  Table A; Target 88584; HLA-B*58:01; TRIM51; ENSG00000124900; TAA
SAGPITGLL

SEQ ID NO: 88585 - protein, 9 aa, Homo sapiens
  Table A; Target 88585; HLA-C*02:02; TRIM51; ENSG00000124900; TAA
SAGPITGLL

SEQ ID NO: 88586 - protein, 9 aa, Homo sapiens
  Table A; Target 88586; HLA-C*03:03; TRIM51; ENSG00000124900; TAA
SAGPITGLL

SEQ ID NO: 88587 - protein, 9 aa, Homo sapiens
  Table A; Target 88587; HLA-C*03:04; TRIM51; ENSG00000124900; TAA
SAGPITGLL

SEQ ID NO: 88588 - protein, 9 aa, Homo sapiens
  Table A; Target 88588; HLA-C*05:01; TRIM51; ENSG00000124900; TAA
SAGPITGLL

SEQ ID NO: 88589 - protein, 9 aa, Homo sapiens
  Table A; Target 88589; HLA-C*07:06; TRIM51; ENSG00000124900; TAA
SAGPITGLL

SEQ ID NO: 88590 - protein, 9 aa, Homo sapiens
  Table A; Target 88590; HLA-C*12:03; TRIM51; ENSG00000124900; TAA
SAGPITGLL

SEQ ID NO: 88591 - protein, 9 aa, Homo sapiens
  Table A; Target 88591; HLA-C*16:02; TRIM51; ENSG00000124900; TAA
SAGPITGLL

SEQ ID NO: 88592 - protein, 9 aa, Homo sapiens
  Table A; Target 88592; HLA-C*16:04; TRIM51; ENSG00000124900; TAA
SAGPITGLL

SEQ ID NO: 88593 - protein, 8 aa, Homo sapiens
  Table A; Target 88593; HLA-B*18:01; TRIM51; ENSG00000124900; TAA
SEEQICGM

SEQ ID NO: 88594 - protein, 8 aa, Homo sapiens
  Table A; Target 88594; HLA-B*37:01; TRIM51; ENSG00000124900; TAA
SEEQICGM

SEQ ID NO: 88595 - protein, 8 aa, Homo sapiens
  Table A; Target 88595; HLA-A*30:01; TRIM51; ENSG00000124900; TAA
SEPVNPEL

SEQ ID NO: 88596 - protein, 8 aa, Homo sapiens
  Table A; Target 88596; HLA-B*18:01; TRIM51; ENSG00000124900; TAA
SEPVNPEL

SEQ ID NO: 88597 - protein, 8 aa, Homo sapiens
  Table A; Target 88597; HLA-B*37:01; TRIM51; ENSG00000124900; TAA
SEPVNPEL

SEQ ID NO: 88598 - protein, 8 aa, Homo sapiens
  Table A; Target 88598; HLA-B*40:01; TRIM51; ENSG00000124900; TAA
SEPVNPEL

SEQ ID NO: 88599 - protein, 8 aa, Homo sapiens
  Table A; Target 88599; HLA-B*40:02; TRIM51; ENSG00000124900; TAA
SEPVNPEL

SEQ ID NO: 88600 - protein, 8 aa, Homo sapiens
  Table A; Target 88600; HLA-B*44:03; TRIM51; ENSG00000124900; TAA
SEPVNPEL

SEQ ID NO: 88601 - protein, 8 aa, Homo sapiens
  Table A; Target 88601; HLA-B*49:01; TRIM51; ENSG00000124900; TAA
SEPVNPEL

SEQ ID NO: 88602 - protein, 8 aa, Homo sapiens
  Table A; Target 88602; HLA-C*01:02; TRIM51; ENSG00000124900; TAA
SEPVNPEL

SEQ ID NO: 88603 - protein, 8 aa, Homo sapiens
  Table A; Target 88603; HLA-C*16:01; TRIM51; ENSG00000124900; TAA
SEPVNPEL

SEQ ID NO: 88604 - protein, 10 aa, Homo sapiens
  Table A; Target 88604; HLA-A*23:01; TRIM51; ENSG00000124900; TAA
SFSPPLRPIF

SEQ ID NO: 88605 - protein, 10 aa, Homo sapiens
  Table A; Target 88605; HLA-A*24:02; TRIM51; ENSG00000124900; TAA
SFSPPLRPIF

SEQ ID NO: 88606 - protein, 10 aa, Homo sapiens
  Table A; Target 88606; HLA-A*29:02; TRIM51; ENSG00000124900; TAA
SFSPPLRPIF

SEQ ID NO: 88607 - protein, 10 aa, Homo sapiens
  Table A; Target 88607; HLA-A*23:01; TRIM51; ENSG00000124900; TAA
SFVDVDQSSL

SEQ ID NO: 88608 - protein, 10 aa, Homo sapiens
  Table A; Target 88608; HLA-C*14:02; TRIM51; ENSG00000124900; TAA
SFVDVDQSSL

SEQ ID NO: 88609 - protein, 11 aa, Homo sapiens
  Table A; Target 88609; HLA-A*23:01; TRIM51; ENSG00000124900; TAA
SFVDVDQSSLI

SEQ ID NO: 88610 - protein, 9 aa, Homo sapiens
  Table A; Target 88610; HLA-A*02:04; TRIM51; ENSG00000124900; TAA
SGFRVDFTL

SEQ ID NO: 88611 - protein, 9 aa, Homo sapiens
  Table A; Target 88611; HLA-B*35:03; TRIM51; ENSG00000124900; TAA
SGFRVDFTL

SEQ ID NO: 88612 - protein, 9 aa, Homo sapiens
  Table A; Target 88612; HLA-A*11:01; TRIM51; ENSG00000124900; TAA
SGILQVFQR

SEQ ID NO: 88613 - protein, 9 aa, Homo sapiens
  Table A; Target 88613; HLA-A*31:01; TRIM51; ENSG00000124900; TAA
SGILQVFQR

SEQ ID NO: 88614 - protein, 9 aa, Homo sapiens
  Table A; Target 88614; HLA-A*33:01; TRIM51; ENSG00000124900; TAA
SGILQVFQR

SEQ ID NO: 88615 - protein, 9 aa, Homo sapiens
  Table A; Target 88615; HLA-A*33:03; TRIM51; ENSG00000124900; TAA
SGILQVFQR

SEQ ID NO: 88616 - protein, 9 aa, Homo sapiens
  Table A; Target 88616; HLA-A*68:01; TRIM51; ENSG00000124900; TAA
SGILQVFQR

SEQ ID NO: 88617 - protein, 9 aa, Homo sapiens
  Table A; Target 88617; HLA-C*07:06; TRIM51; ENSG00000124900; TAA
SGILQVFQR

SEQ ID NO: 88618 - protein, 8 aa, Homo sapiens
  Table A; Target 88618; HLA-B*37:01; TRIM51; ENSG00000124900; TAA
SLFTTSPL

SEQ ID NO: 88619 - protein, 9 aa, Homo sapiens
  Table A; Target 88619; HLA-A*02:01; TRIM51; ENSG00000124900; TAA
SLFTTSPLV

SEQ ID NO: 88620 - protein, 9 aa, Homo sapiens
  Table A; Target 88620; HLA-A*02:03; TRIM51; ENSG00000124900; TAA
SLFTTSPLV

SEQ ID NO: 88621 - protein, 9 aa, Homo sapiens
  Table A; Target 88621; HLA-A*02:04; TRIM51; ENSG00000124900; TAA
SLFTTSPLV

SEQ ID NO: 88622 - protein, 9 aa, Homo sapiens
  Table A; Target 88622; HLA-A*02:07; TRIM51; ENSG00000124900; TAA
SLFTTSPLV

SEQ ID NO: 88623 - protein, 9 aa, Homo sapiens
  Table A; Target 88623; HLA-B*13:02; TRIM51; ENSG00000124900; TAA
SLFTTSPLV

SEQ ID NO: 88624 - protein, 9 aa, Homo sapiens
  Table A; Target 88624; HLA-B*55:01; TRIM51; ENSG00000124900; TAA
SLFTTSPLV

SEQ ID NO: 88625 - protein, 9 aa, Homo sapiens
  Table A; Target 88625; HLA-C*02:02; TRIM51; ENSG00000124900; TAA
SLFTTSPLV

SEQ ID NO: 88626 - protein, 10 aa, Homo sapiens
  Table A; Target 88626; HLA-A*02:01; TRIM51; ENSG00000124900; TAA
SLFTTSPLVV

SEQ ID NO: 88627 - protein, 10 aa, Homo sapiens
  Table A; Target 88627; HLA-A*02:03; TRIM51; ENSG00000124900; TAA
SLFTTSPLVV

SEQ ID NO: 88628 - protein, 10 aa, Homo sapiens
  Table A; Target 88628; HLA-A*02:04; TRIM51; ENSG00000124900; TAA
SLFTTSPLVV

SEQ ID NO: 88629 - protein, 10 aa, Homo sapiens
  Table A; Target 88629; HLA-A*02:07; TRIM51; ENSG00000124900; TAA
SLFTTSPLVV

SEQ ID NO: 88630 - protein, 10 aa, Homo sapiens
  Table A; Target 88630; HLA-A*30:01; TRIM51; ENSG00000124900; TAA
SLFTTSPLVV

SEQ ID NO: 88631 - protein, 10 aa, Homo sapiens
  Table A; Target 88631; HLA-A*68:02; TRIM51; ENSG00000124900; TAA
SLFTTSPLVV

SEQ ID NO: 88632 - protein, 10 aa, Homo sapiens
  Table A; Target 88632; HLA-B*13:02; TRIM51; ENSG00000124900; TAA
SLFTTSPLVV

SEQ ID NO: 88633 - protein, 10 aa, Homo sapiens
  Table A; Target 88633; HLA-B*55:01; TRIM51; ENSG00000124900; TAA
SLFTTSPLVV

SEQ ID NO: 88634 - protein, 10 aa, Homo sapiens
  Table A; Target 88634; HLA-C*06:02; TRIM51; ENSG00000124900; TAA
SLFTTSPLVV

SEQ ID NO: 88635 - protein, 10 aa, Homo sapiens
  Table A; Target 88635; HLA-C*12:03; TRIM51; ENSG00000124900; TAA
SLFTTSPLVV

SEQ ID NO: 88636 - protein, 9 aa, Homo sapiens
  Table A; Target 88636; HLA-A*02:01; TRIM51; ENSG00000124900; TAA
SLIYTIPNC

SEQ ID NO: 88637 - protein, 9 aa, Homo sapiens
  Table A; Target 88637; HLA-A*02:03; TRIM51; ENSG00000124900; TAA
SLIYTIPNC

SEQ ID NO: 88638 - protein, 9 aa, Homo sapiens
  Table A; Target 88638; HLA-A*02:04; TRIM51; ENSG00000124900; TAA
SLIYTIPNC

SEQ ID NO: 88639 - protein, 9 aa, Homo sapiens
  Table A; Target 88639; HLA-B*55:01; TRIM51; ENSG00000124900; TAA
SLIYTIPNC

SEQ ID NO: 88640 - protein, 11 aa, Homo sapiens
  Table A; Target 88640; HLA-A*30:02; TRIM51; ENSG00000124900; TAA
SLRIEAIRAEY

SEQ ID NO: 88641 - protein, 9 aa, Homo sapiens
  Table A; Target 88641; HLA-A*32:01; TRIM51; ENSG00000124900; TAA
SLSGFRVDF

SEQ ID NO: 88642 - protein, 9 aa, Homo sapiens
  Table A; Target 88642; HLA-C*16:01; TRIM51; ENSG00000124900; TAA
SLSGFRVDF

SEQ ID NO: 88643 - protein, 11 aa, Homo sapiens
  Table A; Target 88643; HLA-A*02:01; TRIM51; ENSG00000124900; TAA
SLSGFRVDFTL

SEQ ID NO: 88644 - protein, 11 aa, Homo sapiens
  Table A; Target 88644; HLA-A*02:04; TRIM51; ENSG00000124900; TAA
SLSGFRVDFTL

SEQ ID NO: 88645 - protein, 8 aa, Homo sapiens
  Table A; Target 88645; HLA-B*51:01; TRIM51; ENSG00000124900; TAA
SPLVVQYV

SEQ ID NO: 88646 - protein, 8 aa, Homo sapiens
  Table A; Target 88646; HLA-B*56:01; TRIM51; ENSG00000124900; TAA
SPLVVQYV

SEQ ID NO: 88647 - protein, 9 aa, Homo sapiens
  Table A; Target 88647; HLA-B*54:01; TRIM51; ENSG00000124900; TAA
SPLVVQYVP

SEQ ID NO: 88648 - protein, 8 aa, Homo sapiens
  Table A; Target 88648; HLA-B*07:02; TRIM51; ENSG00000124900; TAA
SPPLRPIF

SEQ ID NO: 88649 - protein, 8 aa, Homo sapiens
  Table A; Target 88649; HLA-B*08:01; TRIM51; ENSG00000124900; TAA
SPPLRPIF

SEQ ID NO: 88650 - protein, 8 aa, Homo sapiens
  Table A; Target 88650; HLA-B*37:01; TRIM51; ENSG00000124900; TAA
TDICLKNM

SEQ ID NO: 88651 - protein, 8 aa, Homo sapiens
  Table A; Target 88651; HLA-C*05:01; TRIM51; ENSG00000124900; TAA
TIDCGHSF

SEQ ID NO: 88652 - protein, 8 aa, Homo sapiens
  Table A; Target 88652; HLA-B*15:01; TRIM51; ENSG00000124900; TAA
TSPLVVQY

SEQ ID NO: 88653 - protein, 8 aa, Homo sapiens
  Table A; Target 88653; HLA-B*18:01; TRIM51; ENSG00000124900; TAA
TSPLVVQY

SEQ ID NO: 88654 - protein, 9 aa, Homo sapiens
  Table A; Target 88654; HLA-A*02:07; TRIM51; ENSG00000124900; TAA
TSPLVVQYV

SEQ ID NO: 88655 - protein, 9 aa, Homo sapiens
  Table A; Target 88655; HLA-A*68:02; TRIM51; ENSG00000124900; TAA
TSPLVVQYV

SEQ ID NO: 88656 - protein, 9 aa, Homo sapiens
  Table A; Target 88656; HLA-A*01:01; TRIM51; ENSG00000124900; TAA
TTSPLVVQY

SEQ ID NO: 88657 - protein, 9 aa, Homo sapiens
  Table A; Target 88657; HLA-A*03:01; TRIM51; ENSG00000124900; TAA
TTSPLVVQY

SEQ ID NO: 88658 - protein, 9 aa, Homo sapiens
  Table A; Target 88658; HLA-A*03:02; TRIM51; ENSG00000124900; TAA
TTSPLVVQY

SEQ ID NO: 88659 - protein, 9 aa, Homo sapiens
  Table A; Target 88659; HLA-A*11:01; TRIM51; ENSG00000124900; TAA
TTSPLVVQY

SEQ ID NO: 88660 - protein, 9 aa, Homo sapiens
  Table A; Target 88660; HLA-A*23:01; TRIM51; ENSG00000124900; TAA
TTSPLVVQY

SEQ ID NO: 88661 - protein, 9 aa, Homo sapiens
  Table A; Target 88661; HLA-A*25:01; TRIM51; ENSG00000124900; TAA
TTSPLVVQY

SEQ ID NO: 88662 - protein, 9 aa, Homo sapiens
  Table A; Target 88662; HLA-A*26:01; TRIM51; ENSG00000124900; TAA
TTSPLVVQY

SEQ ID NO: 88663 - protein, 9 aa, Homo sapiens
  Table A; Target 88663; HLA-A*30:02; TRIM51; ENSG00000124900; TAA
TTSPLVVQY

SEQ ID NO: 88664 - protein, 9 aa, Homo sapiens
  Table A; Target 88664; HLA-A*31:01; TRIM51; ENSG00000124900; TAA
TTSPLVVQY

SEQ ID NO: 88665 - protein, 9 aa, Homo sapiens
  Table A; Target 88665; HLA-A*32:01; TRIM51; ENSG00000124900; TAA
TTSPLVVQY

SEQ ID NO: 88666 - protein, 9 aa, Homo sapiens
  Table A; Target 88666; HLA-A*33:01; TRIM51; ENSG00000124900; TAA
TTSPLVVQY

SEQ ID NO: 88667 - protein, 9 aa, Homo sapiens
  Table A; Target 88667; HLA-A*33:03; TRIM51; ENSG00000124900; TAA
TTSPLVVQY

SEQ ID NO: 88668 - protein, 9 aa, Homo sapiens
  Table A; Target 88668; HLA-A*68:01; TRIM51; ENSG00000124900; TAA
TTSPLVVQY

SEQ ID NO: 88669 - protein, 9 aa, Homo sapiens
  Table A; Target 88669; HLA-A*68:02; TRIM51; ENSG00000124900; TAA
TTSPLVVQY

SEQ ID NO: 88670 - protein, 9 aa, Homo sapiens
  Table A; Target 88670; HLA-B*15:01; TRIM51; ENSG00000124900; TAA
TTSPLVVQY

SEQ ID NO: 88671 - protein, 9 aa, Homo sapiens
  Table A; Target 88671; HLA-B*15:03; TRIM51; ENSG00000124900; TAA
TTSPLVVQY

SEQ ID NO: 88672 - protein, 9 aa, Homo sapiens
  Table A; Target 88672; HLA-B*18:01; TRIM51; ENSG00000124900; TAA
TTSPLVVQY

SEQ ID NO: 88673 - protein, 9 aa, Homo sapiens
  Table A; Target 88673; HLA-B*27:02; TRIM51; ENSG00000124900; TAA
TTSPLVVQY

SEQ ID NO: 88674 - protein, 9 aa, Homo sapiens
  Table A; Target 88674; HLA-B*27:05; TRIM51; ENSG00000124900; TAA
TTSPLVVQY

SEQ ID NO: 88675 - protein, 9 aa, Homo sapiens
  Table A; Target 88675; HLA-B*35:01; TRIM51; ENSG00000124900; TAA
TTSPLVVQY

SEQ ID NO: 88676 - protein, 9 aa, Homo sapiens
  Table A; Target 88676; HLA-B*44:02; TRIM51; ENSG00000124900; TAA
TTSPLVVQY

SEQ ID NO: 88677 - protein, 9 aa, Homo sapiens
  Table A; Target 88677; HLA-B*44:03; TRIM51; ENSG00000124900; TAA
TTSPLVVQY

SEQ ID NO: 88678 - protein, 9 aa, Homo sapiens
  Table A; Target 88678; HLA-B*46:01; TRIM51; ENSG00000124900; TAA
TTSPLVVQY

SEQ ID NO: 88679 - protein, 9 aa, Homo sapiens
  Table A; Target 88679; HLA-B*57:01; TRIM51; ENSG00000124900; TAA
TTSPLVVQY

SEQ ID NO: 88680 - protein, 9 aa, Homo sapiens
  Table A; Target 88680; HLA-B*58:01; TRIM51; ENSG00000124900; TAA
TTSPLVVQY

SEQ ID NO: 88681 - protein, 9 aa, Homo sapiens
  Table A; Target 88681; HLA-C*01:02; TRIM51; ENSG00000124900; TAA
TTSPLVVQY

SEQ ID NO: 88682 - protein, 9 aa, Homo sapiens
  Table A; Target 88682; HLA-C*02:02; TRIM51; ENSG00000124900; TAA
TTSPLVVQY

SEQ ID NO: 88683 - protein, 9 aa, Homo sapiens
  Table A; Target 88683; HLA-C*04:01; TRIM51; ENSG00000124900; TAA
TTSPLVVQY

SEQ ID NO: 88684 - protein, 9 aa, Homo sapiens
  Table A; Target 88684; HLA-C*07:04; TRIM51; ENSG00000124900; TAA
TTSPLVVQY

SEQ ID NO: 88685 - protein, 9 aa, Homo sapiens
  Table A; Target 88685; HLA-C*07:06; TRIM51; ENSG00000124900; TAA
TTSPLVVQY

SEQ ID NO: 88686 - protein, 9 aa, Homo sapiens
  Table A; Target 88686; HLA-C*12:03; TRIM51; ENSG00000124900; TAA
TTSPLVVQY

SEQ ID NO: 88687 - protein, 9 aa, Homo sapiens
  Table A; Target 88687; HLA-C*16:01; TRIM51; ENSG00000124900; TAA
TTSPLVVQY

SEQ ID NO: 88688 - protein, 9 aa, Homo sapiens
  Table A; Target 88688; HLA-C*16:02; TRIM51; ENSG00000124900; TAA
TTSPLVVQY

SEQ ID NO: 88689 - protein, 9 aa, Homo sapiens
  Table A; Target 88689; HLA-C*16:04; TRIM51; ENSG00000124900; TAA
TTSPLVVQY

SEQ ID NO: 88690 - protein, 10 aa, Homo sapiens
  Table A; Target 88690; HLA-A*68:01; TRIM51; ENSG00000124900; TAA
TTSPLVVQYV

SEQ ID NO: 88691 - protein, 10 aa, Homo sapiens
  Table A; Target 88691; HLA-A*68:02; TRIM51; ENSG00000124900; TAA
TTSPLVVQYV

SEQ ID NO: 88692 - protein, 9 aa, Homo sapiens
  Table A; Target 88692; HLA-A*68:01; TRIM51; ENSG00000124900; TAA
VDFTLQPER

SEQ ID NO: 88693 - protein, 9 aa, Homo sapiens
  Table A; Target 88693; HLA-B*27:02; TRIM51; ENSG00000124900; TAA
VDFTLQPER

SEQ ID NO: 88694 - protein, 9 aa, Homo sapiens
  Table A; Target 88694; HLA-B*57:01; TRIM51; ENSG00000124900; TAA
VDFTLQPER

SEQ ID NO: 88695 - protein, 8 aa, Homo sapiens
  Table A; Target 88695; HLA-A*30:01; TRIM51; ENSG00000124900; TAA
VDVDQSSL

SEQ ID NO: 88696 - protein, 8 aa, Homo sapiens
  Table A; Target 88696; HLA-B*37:01; TRIM51; ENSG00000124900; TAA
VDVDQSSL

SEQ ID NO: 88697 - protein, 9 aa, Homo sapiens
  Table A; Target 88697; HLA-B*49:01; TRIM51; ENSG00000124900; TAA
VDVDQSSLI

SEQ ID NO: 88698 - protein, 10 aa, Homo sapiens
  Table A; Target 88698; HLA-A*29:02; TRIM51; ENSG00000124900; TAA
VDVDQSSLIY

SEQ ID NO: 88699 - protein, 10 aa, Homo sapiens
  Table A; Target 88699; HLA-B*15:03; TRIM51; ENSG00000124900; TAA
VDVDQSSLIY

SEQ ID NO: 88700 - protein, 10 aa, Homo sapiens
  Table A; Target 88700; HLA-B*27:02; TRIM51; ENSG00000124900; TAA
VDVDQSSLIY

SEQ ID NO: 88701 - protein, 10 aa, Homo sapiens
  Table A; Target 88701; HLA-C*04:01; TRIM51; ENSG00000124900; TAA
VDVDQSSLIY

SEQ ID NO: 88702 - protein, 10 aa, Homo sapiens
  Table A; Target 88702; HLA-C*06:02; TRIM51; ENSG00000124900; TAA
VDVDQSSLIY

SEQ ID NO: 88703 - protein, 10 aa, Homo sapiens
  Table A; Target 88703; HLA-C*07:01; TRIM51; ENSG00000124900; TAA
VDVDQSSLIY

SEQ ID NO: 88704 - protein, 10 aa, Homo sapiens
  Table A; Target 88704; HLA-C*07:04; TRIM51; ENSG00000124900; TAA
VDVDQSSLIY

SEQ ID NO: 88705 - protein, 10 aa, Homo sapiens
  Table A; Target 88705; HLA-C*12:03; TRIM51; ENSG00000124900; TAA
VDVDQSSLIY

SEQ ID NO: 88706 - protein, 11 aa, Homo sapiens
  Table A; Target 88706; HLA-B*40:01; TRIM51; ENSG00000124900; TAA
VELLQAFGDIL

SEQ ID NO: 88707 - protein, 9 aa, Homo sapiens
  Table A; Target 88707; HLA-B*38:01; TRIM51; ENSG00000124900; TAA
VHMGDSWNW

SEQ ID NO: 88708 - protein, 9 aa, Homo sapiens
  Table A; Target 88708; HLA-B*15:03; TRIM51; ENSG00000124900; TAA
VKEDTHCSL

SEQ ID NO: 88709 - protein, 9 aa, Homo sapiens
  Table A; Target 88709; HLA-A*03:02; TRIM51; ENSG00000124900; TAA
VLAQCSECK

SEQ ID NO: 88710 - protein, 8 aa, Homo sapiens
  Table A; Target 88710; HLA-B*07:02; TRIM51; ENSG00000124900; TAA
VPRPTSTV

SEQ ID NO: 88711 - protein, 8 aa, Homo sapiens
  Table A; Target 88711; HLA-B*08:01; TRIM51; ENSG00000124900; TAA
VPRPTSTV

SEQ ID NO: 88712 - protein, 8 aa, Homo sapiens
  Table A; Target 88712; HLA-B*54:01; TRIM51; ENSG00000124900; TAA
VPRPTSTV

SEQ ID NO: 88713 - protein, 8 aa, Homo sapiens
  Table A; Target 88713; HLA-B*55:01; TRIM51; ENSG00000124900; TAA
VPRPTSTV

SEQ ID NO: 88714 - protein, 8 aa, Homo sapiens
  Table A; Target 88714; HLA-B*56:01; TRIM51; ENSG00000124900; TAA
VPRPTSTV

SEQ ID NO: 88715 - protein, 8 aa, Homo sapiens
  Table A; Target 88715; HLA-C*07:02; TRIM51; ENSG00000124900; TAA
VPRPTSTV

SEQ ID NO: 88716 - protein, 9 aa, Homo sapiens
  Table A; Target 88716; HLA-B*07:02; TRIM51; ENSG00000124900; TAA
VPRPTSTVG

SEQ ID NO: 88717 - protein, 9 aa, Homo sapiens
  Table A; Target 88717; HLA-B*56:01; TRIM51; ENSG00000124900; TAA
VPRPTSTVG

SEQ ID NO: 88718 - protein, 9 aa, Homo sapiens
  Table A; Target 88718; HLA-C*07:02; TRIM51; ENSG00000124900; TAA
VPRPTSTVG

SEQ ID NO: 88719 - protein, 10 aa, Homo sapiens
  Table A; Target 88719; HLA-B*51:01; TRIM51; ENSG00000124900; TAA
VPRPTSTVGL

SEQ ID NO: 88720 - protein, 10 aa, Homo sapiens
  Table A; Target 88720; HLA-B*56:01; TRIM51; ENSG00000124900; TAA
VPRPTSTVGL

SEQ ID NO: 88721 - protein, 11 aa, Homo sapiens
  Table A; Target 88721; HLA-B*07:02; TRIM51; ENSG00000124900; TAA
VPRPTSTVGLF

SEQ ID NO: 88722 - protein, 11 aa, Homo sapiens
  Table A; Target 88722; HLA-B*57:01; TRIM51; ENSG00000124900; TAA
VPRPTSTVGLF

SEQ ID NO: 88723 - protein, 11 aa, Homo sapiens
  Table A; Target 88723; HLA-C*07:02; TRIM51; ENSG00000124900; TAA
VPRPTSTVGLF

SEQ ID NO: 88724 - protein, 10 aa, Homo sapiens
  Table A; Target 88724; HLA-A*02:03; TRIM51; ENSG00000124900; TAA
VQYVPRPTST

SEQ ID NO: 88725 - protein, 11 aa, Homo sapiens
  Table A; Target 88725; HLA-A*02:03; TRIM51; ENSG00000124900; TAA
VQYVPRPTSTV

SEQ ID NO: 88726 - protein, 9 aa, Homo sapiens
  Table A; Target 88726; HLA-A*01:01; TRIM51; ENSG00000124900; TAA
VSEPVNPEL

SEQ ID NO: 88727 - protein, 9 aa, Homo sapiens
  Table A; Target 88727; HLA-A*02:01; TRIM51; ENSG00000124900; TAA
VSEPVNPEL

SEQ ID NO: 88728 - protein, 9 aa, Homo sapiens
  Table A; Target 88728; HLA-A*02:07; TRIM51; ENSG00000124900; TAA
VSEPVNPEL

SEQ ID NO: 88729 - protein, 9 aa, Homo sapiens
  Table A; Target 88729; HLA-A*23:01; TRIM51; ENSG00000124900; TAA
VSEPVNPEL

SEQ ID NO: 88730 - protein, 9 aa, Homo sapiens
  Table A; Target 88730; HLA-A*24:02; TRIM51; ENSG00000124900; TAA
VSEPVNPEL

SEQ ID NO: 88731 - protein, 9 aa, Homo sapiens
  Table A; Target 88731; HLA-A*30:01; TRIM51; ENSG00000124900; TAA
VSEPVNPEL

SEQ ID NO: 88732 - protein, 9 aa, Homo sapiens
  Table A; Target 88732; HLA-A*32:01; TRIM51; ENSG00000124900; TAA
VSEPVNPEL

SEQ ID NO: 88733 - protein, 9 aa, Homo sapiens
  Table A; Target 88733; HLA-A*68:02; TRIM51; ENSG00000124900; TAA
VSEPVNPEL

SEQ ID NO: 88734 - protein, 9 aa, Homo sapiens
  Table A; Target 88734; HLA-B*13:02; TRIM51; ENSG00000124900; TAA
VSEPVNPEL

SEQ ID NO: 88735 - protein, 9 aa, Homo sapiens
  Table A; Target 88735; HLA-B*27:02; TRIM51; ENSG00000124900; TAA
VSEPVNPEL

SEQ ID NO: 88736 - protein, 9 aa, Homo sapiens
  Table A; Target 88736; HLA-B*27:05; TRIM51; ENSG00000124900; TAA
VSEPVNPEL

SEQ ID NO: 88737 - protein, 9 aa, Homo sapiens
  Table A; Target 88737; HLA-B*35:01; TRIM51; ENSG00000124900; TAA
VSEPVNPEL

SEQ ID NO: 88738 - protein, 9 aa, Homo sapiens
  Table A; Target 88738; HLA-B*35:03; TRIM51; ENSG00000124900; TAA
VSEPVNPEL

SEQ ID NO: 88739 - protein, 9 aa, Homo sapiens
  Table A; Target 88739; HLA-B*38:01; TRIM51; ENSG00000124900; TAA
VSEPVNPEL

SEQ ID NO: 88740 - protein, 9 aa, Homo sapiens
  Table A; Target 88740; HLA-B*39:01; TRIM51; ENSG00000124900; TAA
VSEPVNPEL

SEQ ID NO: 88741 - protein, 9 aa, Homo sapiens
  Table A; Target 88741; HLA-B*40:01; TRIM51; ENSG00000124900; TAA
VSEPVNPEL

SEQ ID NO: 88742 - protein, 9 aa, Homo sapiens
  Table A; Target 88742; HLA-B*40:02; TRIM51; ENSG00000124900; TAA
VSEPVNPEL

SEQ ID NO: 88743 - protein, 9 aa, Homo sapiens
  Table A; Target 88743; HLA-B*46:01; TRIM51; ENSG00000124900; TAA
VSEPVNPEL

SEQ ID NO: 88744 - protein, 9 aa, Homo sapiens
  Table A; Target 88744; HLA-B*55:01; TRIM51; ENSG00000124900; TAA
VSEPVNPEL

SEQ ID NO: 88745 - protein, 9 aa, Homo sapiens
  Table A; Target 88745; HLA-B*57:01; TRIM51; ENSG00000124900; TAA
VSEPVNPEL

SEQ ID NO: 88746 - protein, 9 aa, Homo sapiens
  Table A; Target 88746; HLA-B*58:01; TRIM51; ENSG00000124900; TAA
VSEPVNPEL

SEQ ID NO: 88747 - protein, 9 aa, Homo sapiens
  Table A; Target 88747; HLA-C*01:02; TRIM51; ENSG00000124900; TAA
VSEPVNPEL

SEQ ID NO: 88748 - protein, 9 aa, Homo sapiens
  Table A; Target 88748; HLA-C*02:02; TRIM51; ENSG00000124900; TAA
VSEPVNPEL

SEQ ID NO: 88749 - protein, 9 aa, Homo sapiens
  Table A; Target 88749; HLA-C*03:03; TRIM51; ENSG00000124900; TAA
VSEPVNPEL

SEQ ID NO: 88750 - protein, 9 aa, Homo sapiens
  Table A; Target 88750; HLA-C*04:01; TRIM51; ENSG00000124900; TAA
VSEPVNPEL

SEQ ID NO: 88751 - protein, 9 aa, Homo sapiens
  Table A; Target 88751; HLA-C*05:01; TRIM51; ENSG00000124900; TAA
VSEPVNPEL

SEQ ID NO: 88752 - protein, 9 aa, Homo sapiens
  Table A; Target 88752; HLA-C*06:02; TRIM51; ENSG00000124900; TAA
VSEPVNPEL

SEQ ID NO: 88753 - protein, 9 aa, Homo sapiens
  Table A; Target 88753; HLA-C*07:02; TRIM51; ENSG00000124900; TAA
VSEPVNPEL

SEQ ID NO: 88754 - protein, 9 aa, Homo sapiens
  Table A; Target 88754; HLA-C*07:04; TRIM51; ENSG00000124900; TAA
VSEPVNPEL

SEQ ID NO: 88755 - protein, 9 aa, Homo sapiens
  Table A; Target 88755; HLA-C*12:03; TRIM51; ENSG00000124900; TAA
VSEPVNPEL

SEQ ID NO: 88756 - protein, 9 aa, Homo sapiens
  Table A; Target 88756; HLA-C*16:01; TRIM51; ENSG00000124900; TAA
VSEPVNPEL

SEQ ID NO: 88757 - protein, 9 aa, Homo sapiens
  Table A; Target 88757; HLA-C*16:02; TRIM51; ENSG00000124900; TAA
VSEPVNPEL

SEQ ID NO: 88758 - protein, 9 aa, Homo sapiens
  Table A; Target 88758; HLA-C*16:04; TRIM51; ENSG00000124900; TAA
VSEPVNPEL

SEQ ID NO: 88759 - protein, 8 aa, Homo sapiens
  Table A; Target 88759; HLA-B*40:02; TRIM51; ENSG00000124900; TAA
VSLRIEAI

SEQ ID NO: 88760 - protein, 8 aa, Homo sapiens
  Table A; Target 88760; HLA-B*58:01; TRIM51; ENSG00000124900; TAA
VSLRIEAI

SEQ ID NO: 88761 - protein, 9 aa, Homo sapiens
  Table A; Target 88761; HLA-A*31:01; TRIM51; ENSG00000124900; TAA
VSLRIEAIR

SEQ ID NO: 88762 - protein, 9 aa, Homo sapiens
  Table A; Target 88762; HLA-B*57:01; TRIM51; ENSG00000124900; TAA
VSLRIEAIR

SEQ ID NO: 88763 - protein, 9 aa, Homo sapiens
  Table A; Target 88763; HLA-A*23:01; TRIM51; ENSG00000124900; TAA
VTIDCGHSF

SEQ ID NO: 88764 - protein, 9 aa, Homo sapiens
  Table A; Target 88764; HLA-A*24:02; TRIM51; ENSG00000124900; TAA
VTIDCGHSF

SEQ ID NO: 88765 - protein, 9 aa, Homo sapiens
  Table A; Target 88765; HLA-A*25:01; TRIM51; ENSG00000124900; TAA
VTIDCGHSF

SEQ ID NO: 88766 - protein, 9 aa, Homo sapiens
  Table A; Target 88766; HLA-A*26:01; TRIM51; ENSG00000124900; TAA
VTIDCGHSF

SEQ ID NO: 88767 - protein, 9 aa, Homo sapiens
  Table A; Target 88767; HLA-A*32:01; TRIM51; ENSG00000124900; TAA
VTIDCGHSF

SEQ ID NO: 88768 - protein, 9 aa, Homo sapiens
  Table A; Target 88768; HLA-B*15:01; TRIM51; ENSG00000124900; TAA
VTIDCGHSF

SEQ ID NO: 88769 - protein, 9 aa, Homo sapiens
  Table A; Target 88769; HLA-B*15:03; TRIM51; ENSG00000124900; TAA
VTIDCGHSF

SEQ ID NO: 88770 - protein, 9 aa, Homo sapiens
  Table A; Target 88770; HLA-B*46:01; TRIM51; ENSG00000124900; TAA
VTIDCGHSF

SEQ ID NO: 88771 - protein, 9 aa, Homo sapiens
  Table A; Target 88771; HLA-B*57:01; TRIM51; ENSG00000124900; TAA
VTIDCGHSF

SEQ ID NO: 88772 - protein, 9 aa, Homo sapiens
  Table A; Target 88772; HLA-B*58:01; TRIM51; ENSG00000124900; TAA
VTIDCGHSF

SEQ ID NO: 88773 - protein, 9 aa, Homo sapiens
  Table A; Target 88773; HLA-C*01:02; TRIM51; ENSG00000124900; TAA
VTIDCGHSF

SEQ ID NO: 88774 - protein, 9 aa, Homo sapiens
  Table A; Target 88774; HLA-C*02:02; TRIM51; ENSG00000124900; TAA
VTIDCGHSF

SEQ ID NO: 88775 - protein, 9 aa, Homo sapiens
  Table A; Target 88775; HLA-C*03:03; TRIM51; ENSG00000124900; TAA
VTIDCGHSF

SEQ ID NO: 88776 - protein, 9 aa, Homo sapiens
  Table A; Target 88776; HLA-C*03:04; TRIM51; ENSG00000124900; TAA
VTIDCGHSF

SEQ ID NO: 88777 - protein, 9 aa, Homo sapiens
  Table A; Target 88777; HLA-C*14:02; TRIM51; ENSG00000124900; TAA
VTIDCGHSF

SEQ ID NO: 88778 - protein, 9 aa, Homo sapiens
  Table A; Target 88778; HLA-C*16:01; TRIM51; ENSG00000124900; TAA
VTIDCGHSF

SEQ ID NO: 88779 - protein, 9 aa, Homo sapiens
  Table A; Target 88779; HLA-C*16:04; TRIM51; ENSG00000124900; TAA
VTIDCGHSF

SEQ ID NO: 88780 - protein, 9 aa, Homo sapiens
  Table A; Target 88780; HLA-A*29:02; TRIM51; ENSG00000124900; TAA
WAFGVCNNY

SEQ ID NO: 88781 - protein, 9 aa, Homo sapiens
  Table A; Target 88781; HLA-B*44:02; TRIM51; ENSG00000124900; TAA
WEVHMGDSW

SEQ ID NO: 88782 - protein, 9 aa, Homo sapiens
  Table A; Target 88782; HLA-B*44:03; TRIM51; ENSG00000124900; TAA
WEVHMGDSW

SEQ ID NO: 88783 - protein, 8 aa, Homo sapiens
  Table A; Target 88783; HLA-B*49:01; TRIM51; ENSG00000124900; TAA
YEDLKQMC

SEQ ID NO: 88784 - protein, 8 aa, Homo sapiens
  Table A; Target 88784; HLA-A*30:01; TRIM51; ENSG00000124900; TAA
YESLLLQV

SEQ ID NO: 88785 - protein, 8 aa, Homo sapiens
  Table A; Target 88785; HLA-B*18:01; TRIM51; ENSG00000124900; TAA
YESLLLQV

SEQ ID NO: 88786 - protein, 8 aa, Homo sapiens
  Table A; Target 88786; HLA-B*37:01; TRIM51; ENSG00000124900; TAA
YESLLLQV

SEQ ID NO: 88787 - protein, 8 aa, Homo sapiens
  Table A; Target 88787; HLA-B*49:01; TRIM51; ENSG00000124900; TAA
YESLLLQV

SEQ ID NO: 88788 - protein, 9 aa, Homo sapiens
  Table A; Target 88788; HLA-B*49:01; TRIM51; ENSG00000124900; TAA
YESLLLQVS

SEQ ID NO: 88789 - protein, 8 aa, Homo sapiens
  Table A; Target 88789; HLA-A*23:01; TRIM51; ENSG00000124900; TAA
YFLDPVTI

SEQ ID NO: 88790 - protein, 8 aa, Homo sapiens
  Table A; Target 88790; HLA-A*24:02; TRIM51; ENSG00000124900; TAA
YFLDPVTI

SEQ ID NO: 88791 - protein, 8 aa, Homo sapiens
  Table A; Target 88791; HLA-B*51:01; TRIM51; ENSG00000124900; TAA
YFLDPVTI

SEQ ID NO: 88792 - protein, 8 aa, Homo sapiens
  Table A; Target 88792; HLA-C*04:01; TRIM51; ENSG00000124900; TAA
YFLDPVTI

SEQ ID NO: 88793 - protein, 9 aa, Homo sapiens
  Table A; Target 88793; HLA-A*02:01; TRIM51; ENSG00000124900; TAA
YLNWQDTAV

SEQ ID NO: 88794 - protein, 9 aa, Homo sapiens
  Table A; Target 88794; HLA-A*02:03; TRIM51; ENSG00000124900; TAA
YLNWQDTAV

SEQ ID NO: 88795 - protein, 9 aa, Homo sapiens
  Table A; Target 88795; HLA-A*02:04; TRIM51; ENSG00000124900; TAA
YLNWQDTAV

SEQ ID NO: 88796 - protein, 9 aa, Homo sapiens
  Table A; Target 88796; HLA-A*02:07; TRIM51; ENSG00000124900; TAA
YLNWQDTAV

SEQ ID NO: 88797 - protein, 9 aa, Homo sapiens
  Table A; Target 88797; HLA-B*13:02; TRIM51; ENSG00000124900; TAA
YLNWQDTAV

SEQ ID NO: 88798 - protein, 9 aa, Homo sapiens
  Table A; Target 88798; HLA-B*55:01; TRIM51; ENSG00000124900; TAA
YLNWQDTAV

SEQ ID NO: 88799 - protein, 9 aa, Homo sapiens
  Table A; Target 88799; HLA-A*02:01; TRIM51; ENSG00000124900; TAA
YVPRPTSTV

SEQ ID NO: 88800 - protein, 9 aa, Homo sapiens
  Table A; Target 88800; HLA-A*02:03; TRIM51; ENSG00000124900; TAA
YVPRPTSTV

SEQ ID NO: 88801 - protein, 9 aa, Homo sapiens
  Table A; Target 88801; HLA-A*02:04; TRIM51; ENSG00000124900; TAA
YVPRPTSTV

SEQ ID NO: 88802 - protein, 9 aa, Homo sapiens
  Table A; Target 88802; HLA-A*02:07; TRIM51; ENSG00000124900; TAA
YVPRPTSTV

SEQ ID NO: 88803 - protein, 9 aa, Homo sapiens
  Table A; Target 88803; HLA-A*24:02; TRIM51; ENSG00000124900; TAA
YVPRPTSTV

SEQ ID NO: 88804 - protein, 9 aa, Homo sapiens
  Table A; Target 88804; HLA-A*25:01; TRIM51; ENSG00000124900; TAA
YVPRPTSTV

SEQ ID NO: 88805 - protein, 9 aa, Homo sapiens
  Table A; Target 88805; HLA-A*26:01; TRIM51; ENSG00000124900; TAA
YVPRPTSTV

SEQ ID NO: 88806 - protein, 9 aa, Homo sapiens
  Table A; Target 88806; HLA-A*32:01; TRIM51; ENSG00000124900; TAA
YVPRPTSTV

SEQ ID NO: 88807 - protein, 9 aa, Homo sapiens
  Table A; Target 88807; HLA-A*68:02; TRIM51; ENSG00000124900; TAA
YVPRPTSTV

SEQ ID NO: 88808 - protein, 9 aa, Homo sapiens
  Table A; Target 88808; HLA-B*13:02; TRIM51; ENSG00000124900; TAA
YVPRPTSTV

SEQ ID NO: 88809 - protein, 9 aa, Homo sapiens
  Table A; Target 88809; HLA-B*46:01; TRIM51; ENSG00000124900; TAA
YVPRPTSTV

SEQ ID NO: 88810 - protein, 9 aa, Homo sapiens
  Table A; Target 88810; HLA-B*51:01; TRIM51; ENSG00000124900; TAA
YVPRPTSTV

SEQ ID NO: 88811 - protein, 9 aa, Homo sapiens
  Table A; Target 88811; HLA-B*54:01; TRIM51; ENSG00000124900; TAA
YVPRPTSTV

SEQ ID NO: 88812 - protein, 9 aa, Homo sapiens
  Table A; Target 88812; HLA-C*01:02; TRIM51; ENSG00000124900; TAA
YVPRPTSTV

SEQ ID NO: 88813 - protein, 9 aa, Homo sapiens
  Table A; Target 88813; HLA-C*02:02; TRIM51; ENSG00000124900; TAA
YVPRPTSTV

SEQ ID NO: 88814 - protein, 9 aa, Homo sapiens
  Table A; Target 88814; HLA-C*03:04; TRIM51; ENSG00000124900; TAA
YVPRPTSTV

SEQ ID NO: 88815 - protein, 9 aa, Homo sapiens
  Table A; Target 88815; HLA-C*05:01; TRIM51; ENSG00000124900; TAA
YVPRPTSTV

SEQ ID NO: 88816 - protein, 11 aa, Homo sapiens
  Table A; Target 88816; HLA-A*02:07; TRIM51; ENSG00000124900; TAA
YVPRPTSTVGL

SEQ ID NO: 88817 - protein, 11 aa, Homo sapiens
  Table A; Target 88817; HLA-C*01:02; TRIM51; ENSG00000124900; TAA
YVPRPTSTVGL

SEQ ID NO: 88818 - protein, 8 aa, Homo sapiens
  Table A; Target 88818; HLA-B*54:01; TRIM51; ENSG00000124900; TAA
YVSLRIEA

SEQ ID NO: 88819 - protein, 9 aa, Homo sapiens
  Table A; Target 88819; HLA-A*02:01; TRIM51; ENSG00000124900; TAA
YVSLRIEAI

SEQ ID NO: 88820 - protein, 9 aa, Homo sapiens
  Table A; Target 88820; HLA-A*02:03; TRIM51; ENSG00000124900; TAA
YVSLRIEAI

SEQ ID NO: 88821 - protein, 9 aa, Homo sapiens
  Table A; Target 88821; HLA-A*02:04; TRIM51; ENSG00000124900; TAA
YVSLRIEAI

SEQ ID NO: 88822 - protein, 9 aa, Homo sapiens
  Table A; Target 88822; HLA-A*02:07; TRIM51; ENSG00000124900; TAA
YVSLRIEAI

SEQ ID NO: 88823 - protein, 9 aa, Homo sapiens
  Table A; Target 88823; HLA-A*25:01; TRIM51; ENSG00000124900; TAA
YVSLRIEAI

SEQ ID NO: 88824 - protein, 9 aa, Homo sapiens
  Table A; Target 88824; HLA-A*30:01; TRIM51; ENSG00000124900; TAA
YVSLRIEAI

SEQ ID NO: 88825 - protein, 9 aa, Homo sapiens
  Table A; Target 88825; HLA-A*68:02; TRIM51; ENSG00000124900; TAA
YVSLRIEAI

SEQ ID NO: 88826 - protein, 9 aa, Homo sapiens
  Table A; Target 88826; HLA-B*08:01; TRIM51; ENSG00000124900; TAA
YVSLRIEAI

SEQ ID NO: 88827 - protein, 9 aa, Homo sapiens
  Table A; Target 88827; HLA-B*13:02; TRIM51; ENSG00000124900; TAA
YVSLRIEAI

SEQ ID NO: 88828 - protein, 9 aa, Homo sapiens
  Table A; Target 88828; HLA-B*37:01; TRIM51; ENSG00000124900; TAA
YVSLRIEAI

SEQ ID NO: 88829 - protein, 9 aa, Homo sapiens
  Table A; Target 88829; HLA-B*54:01; TRIM51; ENSG00000124900; TAA
YVSLRIEAI

SEQ ID NO: 88830 - protein, 11 aa, Homo sapiens
  Table A; Target 88830; HLA-A*24:02; TRIM51; ENSG00000124900; TAA
YYWEVHMGDSW

SEQ ID NO: 88831 - protein, 8 aa, Homo sapiens
  Table A; Target 88831; HLA-B*58:01; TRPM1; ENSG00000134160; TAA
AAMTTGAW

SEQ ID NO: 88832 - protein, 9 aa, Homo sapiens
  Table A; Target 88832; HLA-B*44:02; TRPM1; ENSG00000134160; TAA
ADGYSLYRY

SEQ ID NO: 88833 - protein, 9 aa, Homo sapiens
  Table A; Target 88833; HLA-B*37:01; TRPM1; ENSG00000134160; TAA
ADMQDEHHV

SEQ ID NO: 88834 - protein, 9 aa, Homo sapiens
  Table A; Target 88834; HLA-A*30:02; TRPM1; ENSG00000134160; TAA
ADNGTLGKY

SEQ ID NO: 88835 - protein, 9 aa, Homo sapiens
  Table A; Target 88835; HLA-B*15:03; TRPM1; ENSG00000134160; TAA
ADNGTLGKY

SEQ ID NO: 88836 - protein, 9 aa, Homo sapiens
  Table A; Target 88836; HLA-B*44:02; TRPM1; ENSG00000134160; TAA
ADNGTLGKY

SEQ ID NO: 88837 - protein, 9 aa, Homo sapiens
  Table A; Target 88837; HLA-B*44:03; TRPM1; ENSG00000134160; TAA
ADNGTLGKY

SEQ ID NO: 88838 - protein, 9 aa, Homo sapiens
  Table A; Target 88838; HLA-C*16:04; TRPM1; ENSG00000134160; TAA
ADNGTLGKY

SEQ ID NO: 88839 - protein, 9 aa, Homo sapiens
  Table A; Target 88839; HLA-A*30:01; TRPM1; ENSG00000134160; TAA
ADQIDLYAM

SEQ ID NO: 88840 - protein, 9 aa, Homo sapiens
  Table A; Target 88840; HLA-B*37:01; TRPM1; ENSG00000134160; TAA
ADQIDLYAM

SEQ ID NO: 88841 - protein, 10 aa, Homo sapiens
  Table A; Target 88841; HLA-B*44:02; TRPM1; ENSG00000134160; TAA
AEAIPRIPRL

SEQ ID NO: 88842 - protein, 10 aa, Homo sapiens
  Table A; Target 88842; HLA-A*30:01; TRPM1; ENSG00000134160; TAA
AEHKEQFADM

SEQ ID NO: 88843 - protein, 10 aa, Homo sapiens
  Table A; Target 88843; HLA-B*40:01; TRPM1; ENSG00000134160; TAA
AEHKEQFADM

SEQ ID NO: 88844 - protein, 10 aa, Homo sapiens
  Table A; Target 88844; HLA-B*44:03; TRPM1; ENSG00000134160; TAA
AEHKEQFADM

SEQ ID NO: 88845 - protein, 8 aa, Homo sapiens
  Table A; Target 88845; HLA-C*16:01; TRPM1; ENSG00000134160; TAA
AGIDRSDL

SEQ ID NO: 88846 - protein, 9 aa, Homo sapiens
  Table A; Target 88846; HLA-B*49:01; TRPM1; ENSG00000134160; TAA
AGIDRSDLI

SEQ ID NO: 88847 - protein, 9 aa, Homo sapiens
  Table A; Target 88847; HLA-C*16:02; TRPM1; ENSG00000134160; TAA
AGIDRSDLI

SEQ ID NO: 88848 - protein, 9 aa, Homo sapiens
  Table A; Target 88848; HLA-B*38:01; TRPM1; ENSG00000134160; TAA
AHESSESDL

SEQ ID NO: 88849 - protein, 9 aa, Homo sapiens
  Table A; Target 88849; HLA-B*39:01; TRPM1; ENSG00000134160; TAA
AHESSESDL

SEQ ID NO: 88850 - protein, 10 aa, Homo sapiens
  Table A; Target 88850; HLA-A*29:02; TRPM1; ENSG00000134160; TAA
AILRLQNQPY

SEQ ID NO: 88851 - protein, 10 aa, Homo sapiens
  Table A; Target 88851; HLA-A*30:02; TRPM1; ENSG00000134160; TAA
AILRLQNQPY

SEQ ID NO: 88852 - protein, 8 aa, Homo sapiens
  Table A; Target 88852; HLA-A*11:01; TRPM1; ENSG00000134160; TAA
AILTALLK

SEQ ID NO: 88853 - protein, 9 aa, Homo sapiens
  Table A; Target 88853; HLA-B*15:03; TRPM1; ENSG00000134160; TAA
AKALVACKL

SEQ ID NO: 88854 - protein, 10 aa, Homo sapiens
  Table A; Target 88854; HLA-B*15:03; TRPM1; ENSG00000134160; TAA
AKALVACKLY

SEQ ID NO: 88855 - protein, 9 aa, Homo sapiens
  Table A; Target 88855; HLA-A*01:01; TRPM1; ENSG00000134160; TAA
ALELLDQSY

SEQ ID NO: 88856 - protein, 9 aa, Homo sapiens
  Table A; Target 88856; HLA-B*15:01; TRPM1; ENSG00000134160; TAA
ALELLDQSY

SEQ ID NO: 88857 - protein, 10 aa, Homo sapiens
  Table A; Target 88857; HLA-A*03:02; TRPM1; ENSG00000134160; TAA
ALELLDQSYK

SEQ ID NO: 88858 - protein, 10 aa, Homo sapiens
  Table A; Target 88858; HLA-A*11:01; TRPM1; ENSG00000134160; TAA
ALELLDQSYK

SEQ ID NO: 88859 - protein, 10 aa, Homo sapiens
  Table A; Target 88859; HLA-B*27:02; TRPM1; ENSG00000134160; TAA
ALELLDQSYK

SEQ ID NO: 88860 - protein, 10 aa, Homo sapiens
  Table A; Target 88860; HLA-A*02:01; TRPM1; ENSG00000134160; TAA
ALLKGTNVSA

SEQ ID NO: 88861 - protein, 10 aa, Homo sapiens
  Table A; Target 88861; HLA-B*55:01; TRPM1; ENSG00000134160; TAA
ALLKGTNVSA

SEQ ID NO: 88862 - protein, 9 aa, Homo sapiens
  Table A; Target 88862; HLA-A*03:01; TRPM1; ENSG00000134160; TAA
ALVACKLYK

SEQ ID NO: 88863 - protein, 9 aa, Homo sapiens
  Table A; Target 88863; HLA-B*15:03; TRPM1; ENSG00000134160; TAA
ALVLDRVDF

SEQ ID NO: 88864 - protein, 9 aa, Homo sapiens
  Table A; Target 88864; HLA-A*02:03; TRPM1; ENSG00000134160; TAA
AMKLLTYEL

SEQ ID NO: 88865 - protein, 9 aa, Homo sapiens
  Table A; Target 88865; HLA-A*02:04; TRPM1; ENSG00000134160; TAA
AMKLLTYEL

SEQ ID NO: 88866 - protein, 9 aa, Homo sapiens
  Table A; Target 88866; HLA-B*08:01; TRPM1; ENSG00000134160; TAA
AMKLLTYEL

SEQ ID NO: 88867 - protein, 10 aa, Homo sapiens
  Table A; Target 88867; HLA-B*27:02; TRPM1; ENSG00000134160; TAA
AMLDALVLDR

SEQ ID NO: 88868 - protein, 11 aa, Homo sapiens
  Table A; Target 88868; HLA-A*02:01; TRPM1; ENSG00000134160; TAA
AMLDALVLDRV

SEQ ID NO: 88869 - protein, 11 aa, Homo sapiens
  Table A; Target 88869; HLA-A*02:04; TRPM1; ENSG00000134160; TAA
AMLDALVLDRV

SEQ ID NO: 88870 - protein, 9 aa, Homo sapiens
  Table A; Target 88870; HLA-A*24:02; TRPM1; ENSG00000134160; TAA
AMTTGAWIF

SEQ ID NO: 88871 - protein, 8 aa, Homo sapiens
  Table A; Target 88871; HLA-A*32:01; TRPM1; ENSG00000134160; TAA
AMYIRVSY

SEQ ID NO: 88872 - protein, 8 aa, Homo sapiens
  Table A; Target 88872; HLA-B*08:01; TRPM1; ENSG00000134160; TAA
AMYIRVSY

SEQ ID NO: 88873 - protein, 8 aa, Homo sapiens
  Table A; Target 88873; HLA-B*15:01; TRPM1; ENSG00000134160; TAA
AMYIRVSY

SEQ ID NO: 88874 - protein, 8 aa, Homo sapiens
  Table A; Target 88874; HLA-B*15:03; TRPM1; ENSG00000134160; TAA
AMYIRVSY

SEQ ID NO: 88875 - protein, 8 aa, Homo sapiens
  Table A; Target 88875; HLA-C*16:01; TRPM1; ENSG00000134160; TAA
AMYIRVSY

SEQ ID NO: 88876 - protein, 9 aa, Homo sapiens
  Table A; Target 88876; HLA-B*07:02; TRPM1; ENSG00000134160; TAA
APDQLSLAL

SEQ ID NO: 88877 - protein, 9 aa, Homo sapiens
  Table A; Target 88877; HLA-B*35:01; TRPM1; ENSG00000134160; TAA
APDQLSLAL

SEQ ID NO: 88878 - protein, 9 aa, Homo sapiens
  Table A; Target 88878; HLA-B*35:03; TRPM1; ENSG00000134160; TAA
APDQLSLAL

SEQ ID NO: 88879 - protein, 9 aa, Homo sapiens
  Table A; Target 88879; HLA-B*55:01; TRPM1; ENSG00000134160; TAA
APDQLSLAL

SEQ ID NO: 88880 - protein, 9 aa, Homo sapiens
  Table A; Target 88880; HLA-C*07:02; TRPM1; ENSG00000134160; TAA
APDQLSLAL

SEQ ID NO: 88881 - protein, 10 aa, Homo sapiens
  Table A; Target 88881; HLA-B*56:01; TRPM1; ENSG00000134160; TAA
APDQLSLALA

SEQ ID NO: 88882 - protein, 9 aa, Homo sapiens
  Table A; Target 88882; HLA-A*29:02; TRPM1; ENSG00000134160; TAA
APIVKFWFY

SEQ ID NO: 88883 - protein, 9 aa, Homo sapiens
  Table A; Target 88883; HLA-A*31:01; TRPM1; ENSG00000134160; TAA
AQLEELSNR

SEQ ID NO: 88884 - protein, 10 aa, Homo sapiens
  Table A; Target 88884; HLA-B*15:01; TRPM1; ENSG00000134160; TAA
AQLEELSNRM

SEQ ID NO: 88885 - protein, 10 aa, Homo sapiens
  Table A; Target 88885; HLA-B*27:05; TRPM1; ENSG00000134160; TAA
AQLEELSNRM

SEQ ID NO: 88886 - protein, 10 aa, Homo sapiens
  Table A; Target 88886; HLA-B*38:01; TRPM1; ENSG00000134160; TAA
AQLEELSNRM

SEQ ID NO: 88887 - protein, 9 aa, Homo sapiens
  Table A; Target 88887; HLA-A*02:04; TRPM1; ENSG00000134160; TAA
AQSHQLFAI

SEQ ID NO: 88888 - protein, 9 aa, Homo sapiens
  Table A; Target 88888; HLA-B*13:02; TRPM1; ENSG00000134160; TAA
AQSHQLFAI

SEQ ID NO: 88889 - protein, 10 aa, Homo sapiens
  Table A; Target 88889; HLA-A*01:01; TRPM1; ENSG00000134160; TAA
ASDILSFAHK

SEQ ID NO: 88890 - protein, 10 aa, Homo sapiens
  Table A; Target 88890; HLA-A*03:01; TRPM1; ENSG00000134160; TAA
ASDILSFAHK

SEQ ID NO: 88891 - protein, 10 aa, Homo sapiens
  Table A; Target 88891; HLA-A*03:02; TRPM1; ENSG00000134160; TAA
ASDILSFAHK

SEQ ID NO: 88892 - protein, 10 aa, Homo sapiens
  Table A; Target 88892; HLA-A*11:01; TRPM1; ENSG00000134160; TAA
ASDILSFAHK

SEQ ID NO: 88893 - protein, 11 aa, Homo sapiens
  Table A; Target 88893; HLA-A*01:01; TRPM1; ENSG00000134160; TAA
ASDILSFAHKY

SEQ ID NO: 88894 - protein, 11 aa, Homo sapiens
  Table A; Target 88894; HLA-A*30:02; TRPM1; ENSG00000134160; TAA
ASDILSFAHKY

SEQ ID NO: 88895 - protein, 9 aa, Homo sapiens
  Table A; Target 88895; HLA-A*30:02; TRPM1; ENSG00000134160; TAA
ASSECEATY

SEQ ID NO: 88896 - protein, 9 aa, Homo sapiens
  Table A; Target 88896; HLA-A*32:01; TRPM1; ENSG00000134160; TAA
ASSECEATY

SEQ ID NO: 88897 - protein, 9 aa, Homo sapiens
  Table A; Target 88897; HLA-B*15:01; TRPM1; ENSG00000134160; TAA
ASSECEATY

SEQ ID NO: 88898 - protein, 9 aa, Homo sapiens
  Table A; Target 88898; HLA-B*58:01; TRPM1; ENSG00000134160; TAA
ASSECEATY

SEQ ID NO: 88899 - protein, 9 aa, Homo sapiens
  Table A; Target 88899; HLA-C*16:01; TRPM1; ENSG00000134160; TAA
ASSECEATY

SEQ ID NO: 88900 - protein, 9 aa, Homo sapiens
  Table A; Target 88900; HLA-C*16:02; TRPM1; ENSG00000134160; TAA
ASSECEATY

SEQ ID NO: 88901 - protein, 9 aa, Homo sapiens
  Table A; Target 88901; HLA-B*13:02; TRPM1; ENSG00000134160; TAA
ASSVSSLVI

SEQ ID NO: 88902 - protein, 8 aa, Homo sapiens
  Table A; Target 88902; HLA-C*01:02; TRPM1; ENSG00000134160; TAA
ATPDGSHL

SEQ ID NO: 88903 - protein, 10 aa, Homo sapiens
  Table A; Target 88903; HLA-A*26:01; TRPM1; ENSG00000134160; TAA
ATPDGSHLAV

SEQ ID NO: 88904 - protein, 10 aa, Homo sapiens
  Table A; Target 88904; HLA-C*01:02; TRPM1; ENSG00000134160; TAA
ATPDGSHLAV

SEQ ID NO: 88905 - protein, 10 aa, Homo sapiens
  Table A; Target 88905; HLA-A*02:04; TRPM1; ENSG00000134160; TAA
AVFNNTFFEV

SEQ ID NO: 88906 - protein, 10 aa, Homo sapiens
  Table A; Target 88906; HLA-A*02:07; TRPM1; ENSG00000134160; TAA
AVFNNTFFEV

SEQ ID NO: 88907 - protein, 10 aa, Homo sapiens
  Table A; Target 88907; HLA-A*68:02; TRPM1; ENSG00000134160; TAA
AVFNNTFFEV

SEQ ID NO: 88908 - protein, 11 aa, Homo sapiens
  Table A; Target 88908; HLA-A*03:01; TRPM1; ENSG00000134160; TAA
AVFNNTFFEVK

SEQ ID NO: 88909 - protein, 11 aa, Homo sapiens
  Table A; Target 88909; HLA-A*03:02; TRPM1; ENSG00000134160; TAA
AVFNNTFFEVK

SEQ ID NO: 88910 - protein, 11 aa, Homo sapiens
  Table A; Target 88910; HLA-A*11:01; TRPM1; ENSG00000134160; TAA
AVFNNTFFEVK

SEQ ID NO: 88911 - protein, 10 aa, Homo sapiens
  Table A; Target 88911; HLA-A*03:02; TRPM1; ENSG00000134160; TAA
AVQAEHKEQF

SEQ ID NO: 88912 - protein, 10 aa, Homo sapiens
  Table A; Target 88912; HLA-A*30:02; TRPM1; ENSG00000134160; TAA
AVQAEHKEQF

SEQ ID NO: 88913 - protein, 10 aa, Homo sapiens
  Table A; Target 88913; HLA-A*32:01; TRPM1; ENSG00000134160; TAA
AVQAEHKEQF

SEQ ID NO: 88914 - protein, 10 aa, Homo sapiens
  Table A; Target 88914; HLA-B*15:01; TRPM1; ENSG00000134160; TAA
AVQAEHKEQF

SEQ ID NO: 88915 - protein, 11 aa, Homo sapiens
  Table A; Target 88915; HLA-A*30:01; TRPM1; ENSG00000134160; TAA
CEEGGIINESL

SEQ ID NO: 88916 - protein, 11 aa, Homo sapiens
  Table A; Target 88916; HLA-B*40:01; TRPM1; ENSG00000134160; TAA
CEEGGIINESL

SEQ ID NO: 88917 - protein, 9 aa, Homo sapiens
  Table A; Target 88917; HLA-B*49:01; TRPM1; ENSG00000134160; TAA
CEFYNAPIV

SEQ ID NO: 88918 - protein, 9 aa, Homo sapiens
  Table A; Target 88918; HLA-A*03:01; TRPM1; ENSG00000134160; TAA
CLKLAVAAK

SEQ ID NO: 88919 - protein, 9 aa, Homo sapiens
  Table A; Target 88919; HLA-A*03:02; TRPM1; ENSG00000134160; TAA
CVQEHFREK

SEQ ID NO: 88920 - protein, 9 aa, Homo sapiens
  Table A; Target 88920; HLA-A*11:01; TRPM1; ENSG00000134160; TAA
CVQEHFREK

SEQ ID NO: 88921 - protein, 9 aa, Homo sapiens
  Table A; Target 88921; HLA-A*23:01; TRPM1; ENSG00000134160; TAA
CYLLVANIL

SEQ ID NO: 88922 - protein, 9 aa, Homo sapiens
  Table A; Target 88922; HLA-A*24:02; TRPM1; ENSG00000134160; TAA
CYLLVANIL

SEQ ID NO: 88923 - protein, 9 aa, Homo sapiens
  Table A; Target 88923; HLA-A*33:01; TRPM1; ENSG00000134160; TAA
DALKDHSSK

SEQ ID NO: 88924 - protein, 9 aa, Homo sapiens
  Table A; Target 88924; HLA-B*51:01; TRPM1; ENSG00000134160; TAA
DALKDHSSK

SEQ ID NO: 88925 - protein, 11 aa, Homo sapiens
  Table A; Target 88925; HLA-A*33:01; TRPM1; ENSG00000134160; TAA
DALKDHSSKSR

SEQ ID NO: 88926 - protein, 8 aa, Homo sapiens
  Table A; Target 88926; HLA-B*51:01; TRPM1; ENSG00000134160; TAA
DALVLDRV

SEQ ID NO: 88927 - protein, 9 aa, Homo sapiens
  Table A; Target 88927; HLA-A*33:01; TRPM1; ENSG00000134160; TAA
DANADAGSR

SEQ ID NO: 88928 - protein, 9 aa, Homo sapiens
  Table A; Target 88928; HLA-A*33:03; TRPM1; ENSG00000134160; TAA
DANADAGSR

SEQ ID NO: 88929 - protein, 9 aa, Homo sapiens
  Table A; Target 88929; HLA-A*68:01; TRPM1; ENSG00000134160; TAA
DANADAGSR

SEQ ID NO: 88930 - protein, 9 aa, Homo sapiens
  Table A; Target 88930; HLA-C*07:06; TRPM1; ENSG00000134160; TAA
DANADAGSR

SEQ ID NO: 88931 - protein, 9 aa, Homo sapiens
  Table A; Target 88931; HLA-A*33:01; TRPM1; ENSG00000134160; TAA
DDFSYQTSK

SEQ ID NO: 88932 - protein, 9 aa, Homo sapiens
  Table A; Target 88932; HLA-B*18:01; TRPM1; ENSG00000134160; TAA
DDFSYQTSK

SEQ ID NO: 88933 - protein, 9 aa, Homo sapiens
  Table A; Target 88933; HLA-B*27:02; TRPM1; ENSG00000134160; TAA
DDFSYQTSK

SEQ ID NO: 88934 - protein, 8 aa, Homo sapiens
  Table A; Target 88934; HLA-B*18:01; TRPM1; ENSG00000134160; TAA
DDPAVSRF

SEQ ID NO: 88935 - protein, 8 aa, Homo sapiens
  Table A; Target 88935; HLA-B*18:01; TRPM1; ENSG00000134160; TAA
DEHHVAEA

SEQ ID NO: 88936 - protein, 9 aa, Homo sapiens
  Table A; Target 88936; HLA-B*18:01; TRPM1; ENSG00000134160; TAA
DEHHVAEAI

SEQ ID NO: 88937 - protein, 11 aa, Homo sapiens
  Table A; Target 88937; HLA-A*33:01; TRPM1; ENSG00000134160; TAA
DEHHVAEAIPR

SEQ ID NO: 88938 - protein, 8 aa, Homo sapiens
  Table A; Target 88938; HLA-B*18:01; TRPM1; ENSG00000134160; TAA
DEQIAMKL

SEQ ID NO: 88939 - protein, 8 aa, Homo sapiens
  Table A; Target 88939; HLA-B*40:02; TRPM1; ENSG00000134160; TAA
DEQIAMKL

SEQ ID NO: 88940 - protein, 9 aa, Homo sapiens
  Table A; Target 88940; HLA-B*18:01; TRPM1; ENSG00000134160; TAA
DEQIAMKLL

SEQ ID NO: 88941 - protein, 9 aa, Homo sapiens
  Table A; Target 88941; HLA-B*40:02; TRPM1; ENSG00000134160; TAA
DEQIAMKLL

SEQ ID NO: 88942 - protein, 9 aa, Homo sapiens
  Table A; Target 88942; HLA-B*44:02; TRPM1; ENSG00000134160; TAA
DEQIAMKLL

SEQ ID NO: 88943 - protein, 9 aa, Homo sapiens
  Table A; Target 88943; HLA-B*44:03; TRPM1; ENSG00000134160; TAA
DEQIAMKLL

SEQ ID NO: 88944 - protein, 11 aa, Homo sapiens
  Table A; Target 88944; HLA-B*18:01; TRPM1; ENSG00000134160; TAA
DEQIAMKLLTY

SEQ ID NO: 88945 - protein, 11 aa, Homo sapiens
  Table A; Target 88945; HLA-B*44:02; TRPM1; ENSG00000134160; TAA
DEQIAMKLLTY

SEQ ID NO: 88946 - protein, 10 aa, Homo sapiens
  Table A; Target 88946; HLA-A*33:01; TRPM1; ENSG00000134160; TAA
DERIRVTSER

SEQ ID NO: 88947 - protein, 8 aa, Homo sapiens
  Table A; Target 88947; HLA-B*08:01; TRPM1; ENSG00000134160; TAA
DGYSLYRY

SEQ ID NO: 88948 - protein, 8 aa, Homo sapiens
  Table A; Target 88948; HLA-B*18:01; TRPM1; ENSG00000134160; TAA
DGYSLYRY

SEQ ID NO: 88949 - protein, 8 aa, Homo sapiens
  Table A; Target 88949; HLA-B*51:01; TRPM1; ENSG00000134160; TAA
DGYSLYRY

SEQ ID NO: 88950 - protein, 9 aa, Homo sapiens
  Table A; Target 88950; HLA-A*68:02; TRPM1; ENSG00000134160; TAA
DIARSQIFV

SEQ ID NO: 88951 - protein, 10 aa, Homo sapiens
  Table A; Target 88951; HLA-A*25:01; TRPM1; ENSG00000134160; TAA
DIARSQIFVF

SEQ ID NO: 88952 - protein, 9 aa, Homo sapiens
  Table A; Target 88952; HLA-B*35:03; TRPM1; ENSG00000134160; TAA
DIDVDDPAV

SEQ ID NO: 88953 - protein, 9 aa, Homo sapiens
  Table A; Target 88953; HLA-C*05:01; TRPM1; ENSG00000134160; TAA
DIDVDDPAV

SEQ ID NO: 88954 - protein, 11 aa, Homo sapiens
  Table A; Target 88954; HLA-A*33:01; TRPM1; ENSG00000134160; TAA
DIDVDDPAVSR

SEQ ID NO: 88955 - protein, 11 aa, Homo sapiens
  Table A; Target 88955; HLA-A*68:01; TRPM1; ENSG00000134160; TAA
DIDVDDPAVSR

SEQ ID NO: 88956 - protein, 8 aa, Homo sapiens
  Table A; Target 88956; HLA-A*25:01; TRPM1; ENSG00000134160; TAA
DIFGVNKY

SEQ ID NO: 88957 - protein, 8 aa, Homo sapiens
  Table A; Target 88957; HLA-A*26:01; TRPM1; ENSG00000134160; TAA
DIFGVNKY

SEQ ID NO: 88958 - protein, 8 aa, Homo sapiens
  Table A; Target 88958; HLA-B*18:01; TRPM1; ENSG00000134160; TAA
DIFGVNKY

SEQ ID NO: 88959 - protein, 8 aa, Homo sapiens
  Table A; Target 88959; HLA-B*35:01; TRPM1; ENSG00000134160; TAA
DIFGVNKY

SEQ ID NO: 88960 - protein, 8 aa, Homo sapiens
  Table A; Target 88960; HLA-A*01:01; TRPM1; ENSG00000134160; TAA
DIGLVLEY

SEQ ID NO: 88961 - protein, 8 aa, Homo sapiens
  Table A; Target 88961; HLA-A*26:01; TRPM1; ENSG00000134160; TAA
DIGLVLEY

SEQ ID NO: 88962 - protein, 8 aa, Homo sapiens
  Table A; Target 88962; HLA-B*18:01; TRPM1; ENSG00000134160; TAA
DIGLVLEY

SEQ ID NO: 88963 - protein, 8 aa, Homo sapiens
  Table A; Target 88963; HLA-B*35:01; TRPM1; ENSG00000134160; TAA
DIGLVLEY

SEQ ID NO: 88964 - protein, 8 aa, Homo sapiens
  Table A; Target 88964; HLA-C*07:01; TRPM1; ENSG00000134160; TAA
DIGLVLEY

SEQ ID NO: 88965 - protein, 8 aa, Homo sapiens
  Table A; Target 88965; HLA-A*33:01; TRPM1; ENSG00000134160; TAA
DILSFAHK

SEQ ID NO: 88966 - protein, 9 aa, Homo sapiens
  Table A; Target 88966; HLA-A*25:01; TRPM1; ENSG00000134160; TAA
DILSFAHKY

SEQ ID NO: 88967 - protein, 9 aa, Homo sapiens
  Table A; Target 88967; HLA-A*26:01; TRPM1; ENSG00000134160; TAA
DILSFAHKY

SEQ ID NO: 88968 - protein, 9 aa, Homo sapiens
  Table A; Target 88968; HLA-A*29:02; TRPM1; ENSG00000134160; TAA
DILSFAHKY

SEQ ID NO: 88969 - protein, 9 aa, Homo sapiens
  Table A; Target 88969; HLA-A*30:02; TRPM1; ENSG00000134160; TAA
DILSFAHKY

SEQ ID NO: 88970 - protein, 9 aa, Homo sapiens
  Table A; Target 88970; HLA-A*33:01; TRPM1; ENSG00000134160; TAA
DILSFAHKY

SEQ ID NO: 88971 - protein, 9 aa, Homo sapiens
  Table A; Target 88971; HLA-B*18:01; TRPM1; ENSG00000134160; TAA
DILSFAHKY

SEQ ID NO: 88972 - protein, 9 aa, Homo sapiens
  Table A; Target 88972; HLA-B*35:01; TRPM1; ENSG00000134160; TAA
DILSFAHKY

SEQ ID NO: 88973 - protein, 9 aa, Homo sapiens
  Table A; Target 88973; HLA-B*44:02; TRPM1; ENSG00000134160; TAA
DILSFAHKY

SEQ ID NO: 88974 - protein, 9 aa, Homo sapiens
  Table A; Target 88974; HLA-B*44:03; TRPM1; ENSG00000134160; TAA
DILSFAHKY

SEQ ID NO: 88975 - protein, 9 aa, Homo sapiens
  Table A; Target 88975; HLA-A*25:01; TRPM1; ENSG00000134160; TAA
DIPYIVSEA

SEQ ID NO: 88976 - protein, 9 aa, Homo sapiens
  Table A; Target 88976; HLA-A*26:01; TRPM1; ENSG00000134160; TAA
DIPYIVSEA

SEQ ID NO: 88977 - protein, 9 aa, Homo sapiens
  Table A; Target 88977; HLA-A*68:02; TRPM1; ENSG00000134160; TAA
DIPYIVSEA

SEQ ID NO: 88978 - protein, 11 aa, Homo sapiens
  Table A; Target 88978; HLA-A*68:02; TRPM1; ENSG00000134160; TAA
DIPYIVSEAAV

SEQ ID NO: 88979 - protein, 10 aa, Homo sapiens
  Table A; Target 88979; HLA-B*38:01; TRPM1; ENSG00000134160; TAA
DKSDVQNTQL

SEQ ID NO: 88980 - protein, 8 aa, Homo sapiens
  Table A; Target 88980; HLA-A*25:01; TRPM1; ENSG00000134160; TAA
DLVAISTF

SEQ ID NO: 88981 - protein, 8 aa, Homo sapiens
  Table A; Target 88981; HLA-A*26:01; TRPM1; ENSG00000134160; TAA
DLVAISTF

SEQ ID NO: 88982 - protein, 8 aa, Homo sapiens
  Table A; Target 88982; HLA-B*08:01; TRPM1; ENSG00000134160; TAA
DLVAISTF

SEQ ID NO: 88983 - protein, 8 aa, Homo sapiens
  Table A; Target 88983; HLA-B*18:01; TRPM1; ENSG00000134160; TAA
DLVAISTF

SEQ ID NO: 88984 - protein, 9 aa, Homo sapiens
  Table A; Target 88984; HLA-A*26:01; TRPM1; ENSG00000134160; TAA
DLVAISTFM

SEQ ID NO: 88985 - protein, 9 aa, Homo sapiens
  Table A; Target 88985; HLA-A*33:01; TRPM1; ENSG00000134160; TAA
DLVGKDVTR

SEQ ID NO: 88986 - protein, 9 aa, Homo sapiens
  Table A; Target 88986; HLA-A*33:03; TRPM1; ENSG00000134160; TAA
DLVGKDVTR

SEQ ID NO: 88987 - protein, 9 aa, Homo sapiens
  Table A; Target 88987; HLA-A*68:01; TRPM1; ENSG00000134160; TAA
DLVGKDVTR

SEQ ID NO: 88988 - protein, 9 aa, Homo sapiens
  Table A; Target 88988; HLA-C*07:06; TRPM1; ENSG00000134160; TAA
DLVGKDVTR

SEQ ID NO: 88989 - protein, 11 aa, Homo sapiens
  Table A; Target 88989; HLA-A*25:01; TRPM1; ENSG00000134160; TAA
DLVGKDVTRVY

SEQ ID NO: 88990 - protein, 11 aa, Homo sapiens
  Table A; Target 88990; HLA-A*26:01; TRPM1; ENSG00000134160; TAA
DLVGKDVTRVY

SEQ ID NO: 88991 - protein, 8 aa, Homo sapiens
  Table A; Target 88991; HLA-B*51:01; TRPM1; ENSG00000134160; TAA
DMLYFVVI

SEQ ID NO: 88992 - protein, 9 aa, Homo sapiens
  Table A; Target 88992; HLA-A*33:01; TRPM1; ENSG00000134160; TAA
DMQDEHHVA

SEQ ID NO: 88993 - protein, 10 aa, Homo sapiens
  Table A; Target 88993; HLA-A*33:01; TRPM1; ENSG00000134160; TAA
DNNSKDFGQL

SEQ ID NO: 88994 - protein, 9 aa, Homo sapiens
  Table A; Target 88994; HLA-B*35:01; TRPM1; ENSG00000134160; TAA
DPAVSRFQY

SEQ ID NO: 88995 - protein, 8 aa, Homo sapiens
  Table A; Target 88995; HLA-B*18:01; TRPM1; ENSG00000134160; TAA
DQIDLYAM

SEQ ID NO: 88996 - protein, 8 aa, Homo sapiens
  Table A; Target 88996; HLA-B*39:01; TRPM1; ENSG00000134160; TAA
DQIDLYAM

SEQ ID NO: 88997 - protein, 10 aa, Homo sapiens
  Table A; Target 88997; HLA-B*38:01; TRPM1; ENSG00000134160; TAA
DQIDLYAMEI

SEQ ID NO: 88998 - protein, 9 aa, Homo sapiens
  Table A; Target 88998; HLA-A*25:01; TRPM1; ENSG00000134160; TAA
DQLSLALAW

SEQ ID NO: 88999 - protein, 9 aa, Homo sapiens
  Table A; Target 88999; HLA-B*44:02; TRPM1; ENSG00000134160; TAA
DQLSLALAW

SEQ ID NO: 89000 - protein, 9 aa, Homo sapiens
  Table A; Target 89000; HLA-B*38:01; TRPM1; ENSG00000134160; TAA
DQTLGFPSL

SEQ ID NO: 89001 - protein, 9 aa, Homo sapiens
  Table A; Target 89001; HLA-B*39:01; TRPM1; ENSG00000134160; TAA
DQTLGFPSL

SEQ ID NO: 89002 - protein, 9 aa, Homo sapiens
  Table A; Target 89002; HLA-B*38:01; TRPM1; ENSG00000134160; TAA
DRNGMENLL

SEQ ID NO: 89003 - protein, 9 aa, Homo sapiens
  Table A; Target 89003; HLA-B*39:01; TRPM1; ENSG00000134160; TAA
DRNGMENLL

SEQ ID NO: 89004 - protein, 9 aa, Homo sapiens
  Table A; Target 89004; HLA-A*33:01; TRPM1; ENSG00000134160; TAA
DRSDLIQAR

SEQ ID NO: 89005 - protein, 9 aa, Homo sapiens
  Table A; Target 89005; HLA-A*68:01; TRPM1; ENSG00000134160; TAA
DRSDLIQAR

SEQ ID NO: 89006 - protein, 9 aa, Homo sapiens
  Table A; Target 89006; HLA-B*27:02; TRPM1; ENSG00000134160; TAA
DRSDLIQAR

SEQ ID NO: 89007 - protein, 9 aa, Homo sapiens
  Table A; Target 89007; HLA-B*27:05; TRPM1; ENSG00000134160; TAA
DRSDLIQAR

SEQ ID NO: 89008 - protein, 8 aa, Homo sapiens
  Table A; Target 89008; HLA-B*51:01; TRPM1; ENSG00000134160; TAA
DSLLHLMV

SEQ ID NO: 89009 - protein, 8 aa, Homo sapiens
  Table A; Target 89009; HLA-A*25:01; TRPM1; ENSG00000134160; TAA
DSYGVLEF

SEQ ID NO: 89010 - protein, 8 aa, Homo sapiens
  Table A; Target 89010; HLA-A*33:01; TRPM1; ENSG00000134160; TAA
DSYGVLEF

SEQ ID NO: 89011 - protein, 8 aa, Homo sapiens
  Table A; Target 89011; HLA-B*18:01; TRPM1; ENSG00000134160; TAA
DSYGVLEF

SEQ ID NO: 89012 - protein, 8 aa, Homo sapiens
  Table A; Target 89012; HLA-B*51:01; TRPM1; ENSG00000134160; TAA
DSYGVLEF

SEQ ID NO: 89013 - protein, 9 aa, Homo sapiens
  Table A; Target 89013; HLA-A*26:01; TRPM1; ENSG00000134160; TAA
DTKPDSLLH

SEQ ID NO: 89014 - protein, 9 aa, Homo sapiens
  Table A; Target 89014; HLA-A*33:01; TRPM1; ENSG00000134160; TAA
DTKPDSLLH

SEQ ID NO: 89015 - protein, 10 aa, Homo sapiens
  Table A; Target 89015; HLA-A*25:01; TRPM1; ENSG00000134160; TAA
DTKPDSLLHL

SEQ ID NO: 89016 - protein, 11 aa, Homo sapiens
  Table A; Target 89016; HLA-A*33:01; TRPM1; ENSG00000134160; TAA
DTKPDSLLHLM

SEQ ID NO: 89017 - protein, 9 aa, Homo sapiens
  Table A; Target 89017; HLA-A*11:01; TRPM1; ENSG00000134160; TAA
DVDDPAVSR

SEQ ID NO: 89018 - protein, 9 aa, Homo sapiens
  Table A; Target 89018; HLA-A*33:01; TRPM1; ENSG00000134160; TAA
DVDDPAVSR

SEQ ID NO: 89019 - protein, 9 aa, Homo sapiens
  Table A; Target 89019; HLA-A*33:03; TRPM1; ENSG00000134160; TAA
DVDDPAVSR

SEQ ID NO: 89020 - protein, 9 aa, Homo sapiens
  Table A; Target 89020; HLA-A*68:01; TRPM1; ENSG00000134160; TAA
DVDDPAVSR

SEQ ID NO: 89021 - protein, 9 aa, Homo sapiens
  Table A; Target 89021; HLA-C*05:01; TRPM1; ENSG00000134160; TAA
DVDDPAVSR

SEQ ID NO: 89022 - protein, 9 aa, Homo sapiens
  Table A; Target 89022; HLA-C*07:06; TRPM1; ENSG00000134160; TAA
DVDDPAVSR

SEQ ID NO: 89023 - protein, 10 aa, Homo sapiens
  Table A; Target 89023; HLA-A*01:01; TRPM1; ENSG00000134160; TAA
DVDDPAVSRF

SEQ ID NO: 89024 - protein, 10 aa, Homo sapiens
  Table A; Target 89024; HLA-A*02:07; TRPM1; ENSG00000134160; TAA
DVDDPAVSRF

SEQ ID NO: 89025 - protein, 10 aa, Homo sapiens
  Table A; Target 89025; HLA-A*25:01; TRPM1; ENSG00000134160; TAA
DVDDPAVSRF

SEQ ID NO: 89026 - protein, 10 aa, Homo sapiens
  Table A; Target 89026; HLA-A*26:01; TRPM1; ENSG00000134160; TAA
DVDDPAVSRF

SEQ ID NO: 89027 - protein, 10 aa, Homo sapiens
  Table A; Target 89027; HLA-A*33:01; TRPM1; ENSG00000134160; TAA
DVDDPAVSRF

SEQ ID NO: 89028 - protein, 10 aa, Homo sapiens
  Table A; Target 89028; HLA-A*68:01; TRPM1; ENSG00000134160; TAA
DVDDPAVSRF

SEQ ID NO: 89029 - protein, 10 aa, Homo sapiens
  Table A; Target 89029; HLA-B*38:01; TRPM1; ENSG00000134160; TAA
DVDDPAVSRF

SEQ ID NO: 89030 - protein, 10 aa, Homo sapiens
  Table A; Target 89030; HLA-C*05:01; TRPM1; ENSG00000134160; TAA
DVDDPAVSRF

SEQ ID NO: 89031 - protein, 10 aa, Homo sapiens
  Table A; Target 89031; HLA-C*07:06; TRPM1; ENSG00000134160; TAA
DVDDPAVSRF

SEQ ID NO: 89032 - protein, 9 aa, Homo sapiens
  Table A; Target 89032; HLA-B*13:02; TRPM1; ENSG00000134160; TAA
DVQNTQLTV

SEQ ID NO: 89033 - protein, 9 aa, Homo sapiens
  Table A; Target 89033; HLA-B*51:01; TRPM1; ENSG00000134160; TAA
DVQNTQLTV

SEQ ID NO: 89034 - protein, 9 aa, Homo sapiens
  Table A; Target 89034; HLA-A*25:01; TRPM1; ENSG00000134160; TAA
DVTRVYQTM

SEQ ID NO: 89035 - protein, 9 aa, Homo sapiens
  Table A; Target 89035; HLA-A*26:01; TRPM1; ENSG00000134160; TAA
DVTRVYQTM

SEQ ID NO: 89036 - protein, 9 aa, Homo sapiens
  Table A; Target 89036; HLA-A*33:01; TRPM1; ENSG00000134160; TAA
DVTRVYQTM

SEQ ID NO: 89037 - protein, 9 aa, Homo sapiens
  Table A; Target 89037; HLA-A*33:03; TRPM1; ENSG00000134160; TAA
DVTRVYQTM

SEQ ID NO: 89038 - protein, 9 aa, Homo sapiens
  Table A; Target 89038; HLA-A*68:01; TRPM1; ENSG00000134160; TAA
DVTRVYQTM

SEQ ID NO: 89039 - protein, 9 aa, Homo sapiens
  Table A; Target 89039; HLA-A*68:02; TRPM1; ENSG00000134160; TAA
DVTRVYQTM

SEQ ID NO: 89040 - protein, 9 aa, Homo sapiens
  Table A; Target 89040; HLA-B*18:01; TRPM1; ENSG00000134160; TAA
DVTRVYQTM

SEQ ID NO: 89041 - protein, 9 aa, Homo sapiens
  Table A; Target 89041; HLA-B*35:01; TRPM1; ENSG00000134160; TAA
DVTRVYQTM

SEQ ID NO: 89042 - protein, 9 aa, Homo sapiens
  Table A; Target 89042; HLA-B*35:03; TRPM1; ENSG00000134160; TAA
DVTRVYQTM

SEQ ID NO: 89043 - protein, 9 aa, Homo sapiens
  Table A; Target 89043; HLA-B*51:01; TRPM1; ENSG00000134160; TAA
DVTRVYQTM

SEQ ID NO: 89044 - protein, 9 aa, Homo sapiens
  Table A; Target 89044; HLA-C*07:06; TRPM1; ENSG00000134160; TAA
DVTRVYQTM

SEQ ID NO: 89045 - protein, 9 aa, Homo sapiens
  Table A; Target 89045; HLA-A*33:03; TRPM1; ENSG00000134160; TAA
EAAVQAEHK

SEQ ID NO: 89046 - protein, 9 aa, Homo sapiens
  Table A; Target 89046; HLA-A*68:01; TRPM1; ENSG00000134160; TAA
EAAVQAEHK

SEQ ID NO: 89047 - protein, 9 aa, Homo sapiens
  Table A; Target 89047; HLA-C*07:06; TRPM1; ENSG00000134160; TAA
EAAVQAEHK

SEQ ID NO: 89048 - protein, 9 aa, Homo sapiens
  Table A; Target 89048; HLA-A*02:04; TRPM1; ENSG00000134160; TAA
EAIPRIPRL

SEQ ID NO: 89049 - protein, 9 aa, Homo sapiens
  Table A; Target 89049; HLA-A*02:07; TRPM1; ENSG00000134160; TAA
EAIPRIPRL

SEQ ID NO: 89050 - protein, 9 aa, Homo sapiens
  Table A; Target 89050; HLA-A*23:01; TRPM1; ENSG00000134160; TAA
EAIPRIPRL

SEQ ID NO: 89051 - protein, 9 aa, Homo sapiens
  Table A; Target 89051; HLA-A*24:02; TRPM1; ENSG00000134160; TAA
EAIPRIPRL

SEQ ID NO: 89052 - protein, 9 aa, Homo sapiens
  Table A; Target 89052; HLA-A*25:01; TRPM1; ENSG00000134160; TAA
EAIPRIPRL

SEQ ID NO: 89053 - protein, 9 aa, Homo sapiens
  Table A; Target 89053; HLA-A*26:01; TRPM1; ENSG00000134160; TAA
EAIPRIPRL

SEQ ID NO: 89054 - protein, 9 aa, Homo sapiens
  Table A; Target 89054; HLA-A*33:03; TRPM1; ENSG00000134160; TAA
EAIPRIPRL

SEQ ID NO: 89055 - protein, 9 aa, Homo sapiens
  Table A; Target 89055; HLA-A*68:01; TRPM1; ENSG00000134160; TAA
EAIPRIPRL

SEQ ID NO: 89056 - protein, 9 aa, Homo sapiens
  Table A; Target 89056; HLA-A*68:02; TRPM1; ENSG00000134160; TAA
EAIPRIPRL

SEQ ID NO: 89057 - protein, 9 aa, Homo sapiens
  Table A; Target 89057; HLA-B*08:01; TRPM1; ENSG00000134160; TAA
EAIPRIPRL

SEQ ID NO: 89058 - protein, 9 aa, Homo sapiens
  Table A; Target 89058; HLA-B*35:03; TRPM1; ENSG00000134160; TAA
EAIPRIPRL

SEQ ID NO: 89059 - protein, 9 aa, Homo sapiens
  Table A; Target 89059; HLA-B*51:01; TRPM1; ENSG00000134160; TAA
EAIPRIPRL

SEQ ID NO: 89060 - protein, 9 aa, Homo sapiens
  Table A; Target 89060; HLA-B*57:01; TRPM1; ENSG00000134160; TAA
EAIPRIPRL

SEQ ID NO: 89061 - protein, 9 aa, Homo sapiens
  Table A; Target 89061; HLA-B*58:01; TRPM1; ENSG00000134160; TAA
EAIPRIPRL

SEQ ID NO: 89062 - protein, 9 aa, Homo sapiens
  Table A; Target 89062; HLA-C*12:03; TRPM1; ENSG00000134160; TAA
EAIPRIPRL

SEQ ID NO: 89063 - protein, 9 aa, Homo sapiens
  Table A; Target 89063; HLA-A*33:03; TRPM1; ENSG00000134160; TAA
ECEATYLLR

SEQ ID NO: 89064 - protein, 8 aa, Homo sapiens
  Table A; Target 89064; HLA-B*08:01; TRPM1; ENSG00000134160; TAA
ECMKKKEL

SEQ ID NO: 89065 - protein, 10 aa, Homo sapiens
  Table A; Target 89065; HLA-A*33:01; TRPM1; ENSG00000134160; TAA
EDLVGKDVTR

SEQ ID NO: 89066 - protein, 10 aa, Homo sapiens
  Table A; Target 89066; HLA-A*33:03; TRPM1; ENSG00000134160; TAA
EDLVGKDVTR

SEQ ID NO: 89067 - protein, 10 aa, Homo sapiens
  Table A; Target 89067; HLA-A*68:01; TRPM1; ENSG00000134160; TAA
EDLVGKDVTR

SEQ ID NO: 89068 - protein, 9 aa, Homo sapiens
  Table A; Target 89068; HLA-B*44:02; TRPM1; ENSG00000134160; TAA
EEETDPRKI

SEQ ID NO: 89069 - protein, 9 aa, Homo sapiens
  Table A; Target 89069; HLA-B*44:03; TRPM1; ENSG00000134160; TAA
EEETDPRKI

SEQ ID NO: 89070 - protein, 11 aa, Homo sapiens
  Table A; Target 89070; HLA-B*40:01; TRPM1; ENSG00000134160; TAA
EEETDPRKIEL

SEQ ID NO: 89071 - protein, 10 aa, Homo sapiens
  Table A; Target 89071; HLA-A*30:01; TRPM1; ENSG00000134160; TAA
EEGGIINESL

SEQ ID NO: 89072 - protein, 10 aa, Homo sapiens
  Table A; Target 89072; HLA-B*18:01; TRPM1; ENSG00000134160; TAA
EEGGIINESL

SEQ ID NO: 89073 - protein, 10 aa, Homo sapiens
  Table A; Target 89073; HLA-B*40:01; TRPM1; ENSG00000134160; TAA
EEGGIINESL

SEQ ID NO: 89074 - protein, 10 aa, Homo sapiens
  Table A; Target 89074; HLA-B*40:02; TRPM1; ENSG00000134160; TAA
EEGGIINESL

SEQ ID NO: 89075 - protein, 10 aa, Homo sapiens
  Table A; Target 89075; HLA-B*44:02; TRPM1; ENSG00000134160; TAA
EEGGIINESL

SEQ ID NO: 89076 - protein, 10 aa, Homo sapiens
  Table A; Target 89076; HLA-B*44:03; TRPM1; ENSG00000134160; TAA
EEGGIINESL

SEQ ID NO: 89077 - protein, 9 aa, Homo sapiens
  Table A; Target 89077; HLA-A*23:01; TRPM1; ENSG00000134160; TAA
EEINERETF

SEQ ID NO: 89078 - protein, 9 aa, Homo sapiens
  Table A; Target 89078; HLA-A*25:01; TRPM1; ENSG00000134160; TAA
EEINERETF

SEQ ID NO: 89079 - protein, 9 aa, Homo sapiens
  Table A; Target 89079; HLA-A*26:01; TRPM1; ENSG00000134160; TAA
EEINERETF

SEQ ID NO: 89080 - protein, 9 aa, Homo sapiens
  Table A; Target 89080; HLA-A*30:01; TRPM1; ENSG00000134160; TAA
EEINERETF

SEQ ID NO: 89081 - protein, 9 aa, Homo sapiens
  Table A; Target 89081; HLA-B*15:03; TRPM1; ENSG00000134160; TAA
EEINERETF

SEQ ID NO: 89082 - protein, 9 aa, Homo sapiens
  Table A; Target 89082; HLA-B*18:01; TRPM1; ENSG00000134160; TAA
EEINERETF

SEQ ID NO: 89083 - protein, 9 aa, Homo sapiens
  Table A; Target 89083; HLA-B*27:02; TRPM1; ENSG00000134160; TAA
EEINERETF

SEQ ID NO: 89084 - protein, 9 aa, Homo sapiens
  Table A; Target 89084; HLA-B*37:01; TRPM1; ENSG00000134160; TAA
EEINERETF

SEQ ID NO: 89085 - protein, 9 aa, Homo sapiens
  Table A; Target 89085; HLA-B*38:01; TRPM1; ENSG00000134160; TAA
EEINERETF

SEQ ID NO: 89086 - protein, 9 aa, Homo sapiens
  Table A; Target 89086; HLA-B*39:01; TRPM1; ENSG00000134160; TAA
EEINERETF

SEQ ID NO: 89087 - protein, 9 aa, Homo sapiens
  Table A; Target 89087; HLA-B*40:01; TRPM1; ENSG00000134160; TAA
EEINERETF

SEQ ID NO: 89088 - protein, 9 aa, Homo sapiens
  Table A; Target 89088; HLA-B*40:02; TRPM1; ENSG00000134160; TAA
EEINERETF

SEQ ID NO: 89089 - protein, 9 aa, Homo sapiens
  Table A; Target 89089; HLA-B*44:02; TRPM1; ENSG00000134160; TAA
EEINERETF

SEQ ID NO: 89090 - protein, 9 aa, Homo sapiens
  Table A; Target 89090; HLA-B*44:03; TRPM1; ENSG00000134160; TAA
EEINERETF

SEQ ID NO: 89091 - protein, 9 aa, Homo sapiens
  Table A; Target 89091; HLA-C*16:01; TRPM1; ENSG00000134160; TAA
EEINERETF

SEQ ID NO: 89092 - protein, 9 aa, Homo sapiens
  Table A; Target 89092; HLA-C*16:04; TRPM1; ENSG00000134160; TAA
EEINERETF

SEQ ID NO: 89093 - protein, 10 aa, Homo sapiens
  Table A; Target 89093; HLA-A*30:01; TRPM1; ENSG00000134160; TAA
EEINERETFM

SEQ ID NO: 89094 - protein, 10 aa, Homo sapiens
  Table A; Target 89094; HLA-B*40:01; TRPM1; ENSG00000134160; TAA
EEINERETFM

SEQ ID NO: 89095 - protein, 10 aa, Homo sapiens
  Table A; Target 89095; HLA-B*40:02; TRPM1; ENSG00000134160; TAA
EEINERETFM

SEQ ID NO: 89096 - protein, 10 aa, Homo sapiens
  Table A; Target 89096; HLA-B*44:02; TRPM1; ENSG00000134160; TAA
EEINERETFM

SEQ ID NO: 89097 - protein, 10 aa, Homo sapiens
  Table A; Target 89097; HLA-B*44:03; TRPM1; ENSG00000134160; TAA
EEINERETFM

SEQ ID NO: 89098 - protein, 10 aa, Homo sapiens
  Table A; Target 89098; HLA-B*49:01; TRPM1; ENSG00000134160; TAA
EEINERETFM

SEQ ID NO: 89099 - protein, 10 aa, Homo sapiens
  Table A; Target 89099; HLA-C*16:04; TRPM1; ENSG00000134160; TAA
EEINERETFM

SEQ ID NO: 89100 - protein, 9 aa, Homo sapiens
  Table A; Target 89100; HLA-B*40:01; TRPM1; ENSG00000134160; TAA
EEKDVKTHL

SEQ ID NO: 89101 - protein, 9 aa, Homo sapiens
  Table A; Target 89101; HLA-B*40:02; TRPM1; ENSG00000134160; TAA
EEKDVKTHL

SEQ ID NO: 89102 - protein, 9 aa, Homo sapiens
  Table A; Target 89102; HLA-B*44:02; TRPM1; ENSG00000134160; TAA
EEKDVKTHL

SEQ ID NO: 89103 - protein, 9 aa, Homo sapiens
  Table A; Target 89103; HLA-B*44:03; TRPM1; ENSG00000134160; TAA
EEKDVKTHL

SEQ ID NO: 89104 - protein, 9 aa, Homo sapiens
  Table A; Target 89104; HLA-B*44:02; TRPM1; ENSG00000134160; TAA
EELKRLHEF

SEQ ID NO: 89105 - protein, 9 aa, Homo sapiens
  Table A; Target 89105; HLA-B*44:03; TRPM1; ENSG00000134160; TAA
EELKRLHEF

SEQ ID NO: 89106 - protein, 10 aa, Homo sapiens
  Table A; Target 89106; HLA-A*30:01; TRPM1; ENSG00000134160; TAA
EELLFEDTSL

SEQ ID NO: 89107 - protein, 10 aa, Homo sapiens
  Table A; Target 89107; HLA-B*18:01; TRPM1; ENSG00000134160; TAA
EELLFEDTSL

SEQ ID NO: 89108 - protein, 10 aa, Homo sapiens
  Table A; Target 89108; HLA-B*40:01; TRPM1; ENSG00000134160; TAA
EELLFEDTSL

SEQ ID NO: 89109 - protein, 10 aa, Homo sapiens
  Table A; Target 89109; HLA-B*40:02; TRPM1; ENSG00000134160; TAA
EELLFEDTSL

SEQ ID NO: 89110 - protein, 10 aa, Homo sapiens
  Table A; Target 89110; HLA-B*40:02; TRPM1; ENSG00000134160; TAA
EELSNRMVNA

SEQ ID NO: 89111 - protein, 10 aa, Homo sapiens
  Table A; Target 89111; HLA-B*49:01; TRPM1; ENSG00000134160; TAA
EELSNRMVNA

SEQ ID NO: 89112 - protein, 11 aa, Homo sapiens
  Table A; Target 89112; HLA-A*30:01; TRPM1; ENSG00000134160; TAA
EELSNRMVNAL

SEQ ID NO: 89113 - protein, 11 aa, Homo sapiens
  Table A; Target 89113; HLA-B*18:01; TRPM1; ENSG00000134160; TAA
EELSNRMVNAL

SEQ ID NO: 89114 - protein, 11 aa, Homo sapiens
  Table A; Target 89114; HLA-B*40:01; TRPM1; ENSG00000134160; TAA
EELSNRMVNAL

SEQ ID NO: 89115 - protein, 11 aa, Homo sapiens
  Table A; Target 89115; HLA-B*40:02; TRPM1; ENSG00000134160; TAA
EELSNRMVNAL

SEQ ID NO: 89116 - protein, 11 aa, Homo sapiens
  Table A; Target 89116; HLA-B*44:02; TRPM1; ENSG00000134160; TAA
EELSNRMVNAL

SEQ ID NO: 89117 - protein, 11 aa, Homo sapiens
  Table A; Target 89117; HLA-B*44:03; TRPM1; ENSG00000134160; TAA
EELSNRMVNAL

SEQ ID NO: 89118 - protein, 8 aa, Homo sapiens
  Table A; Target 89118; HLA-B*18:01; TRPM1; ENSG00000134160; TAA
EEPPIPVV

SEQ ID NO: 89119 - protein, 8 aa, Homo sapiens
  Table A; Target 89119; HLA-B*49:01; TRPM1; ENSG00000134160; TAA
EEPPIPVV

SEQ ID NO: 89120 - protein, 9 aa, Homo sapiens
  Table A; Target 89120; HLA-A*30:01; TRPM1; ENSG00000134160; TAA
EEPPIPVVI

SEQ ID NO: 89121 - protein, 9 aa, Homo sapiens
  Table A; Target 89121; HLA-A*68:02; TRPM1; ENSG00000134160; TAA
EEPPIPVVI

SEQ ID NO: 89122 - protein, 9 aa, Homo sapiens
  Table A; Target 89122; HLA-B*13:02; TRPM1; ENSG00000134160; TAA
EEPPIPVVI

SEQ ID NO: 89123 - protein, 9 aa, Homo sapiens
  Table A; Target 89123; HLA-B*18:01; TRPM1; ENSG00000134160; TAA
EEPPIPVVI

SEQ ID NO: 89124 - protein, 9 aa, Homo sapiens
  Table A; Target 89124; HLA-B*37:01; TRPM1; ENSG00000134160; TAA
EEPPIPVVI

SEQ ID NO: 89125 - protein, 9 aa, Homo sapiens
  Table A; Target 89125; HLA-B*38:01; TRPM1; ENSG00000134160; TAA
EEPPIPVVI

SEQ ID NO: 89126 - protein, 9 aa, Homo sapiens
  Table A; Target 89126; HLA-B*39:01; TRPM1; ENSG00000134160; TAA
EEPPIPVVI

SEQ ID NO: 89127 - protein, 9 aa, Homo sapiens
  Table A; Target 89127; HLA-B*40:01; TRPM1; ENSG00000134160; TAA
EEPPIPVVI

SEQ ID NO: 89128 - protein, 9 aa, Homo sapiens
  Table A; Target 89128; HLA-B*44:02; TRPM1; ENSG00000134160; TAA
EEPPIPVVI

SEQ ID NO: 89129 - protein, 9 aa, Homo sapiens
  Table A; Target 89129; HLA-B*44:03; TRPM1; ENSG00000134160; TAA
EEPPIPVVI

SEQ ID NO: 89130 - protein, 9 aa, Homo sapiens
  Table A; Target 89130; HLA-B*49:01; TRPM1; ENSG00000134160; TAA
EEPPIPVVI

SEQ ID NO: 89131 - protein, 9 aa, Homo sapiens
  Table A; Target 89131; HLA-C*02:02; TRPM1; ENSG00000134160; TAA
EEPPIPVVI

SEQ ID NO: 89132 - protein, 9 aa, Homo sapiens
  Table A; Target 89132; HLA-C*12:03; TRPM1; ENSG00000134160; TAA
EEPPIPVVI

SEQ ID NO: 89133 - protein, 9 aa, Homo sapiens
  Table A; Target 89133; HLA-C*16:04; TRPM1; ENSG00000134160; TAA
EEPPIPVVI

SEQ ID NO: 89134 - protein, 9 aa, Homo sapiens
  Table A; Target 89134; HLA-B*18:01; TRPM1; ENSG00000134160; TAA
EEQCVQEHF

SEQ ID NO: 89135 - protein, 9 aa, Homo sapiens
  Table A; Target 89135; HLA-B*27:02; TRPM1; ENSG00000134160; TAA
EEQCVQEHF

SEQ ID NO: 89136 - protein, 9 aa, Homo sapiens
  Table A; Target 89136; HLA-B*44:02; TRPM1; ENSG00000134160; TAA
EEQCVQEHF

SEQ ID NO: 89137 - protein, 9 aa, Homo sapiens
  Table A; Target 89137; HLA-B*44:03; TRPM1; ENSG00000134160; TAA
EEQCVQEHF

SEQ ID NO: 89138 - protein, 9 aa, Homo sapiens
  Table A; Target 89138; HLA-C*16:04; TRPM1; ENSG00000134160; TAA
EEQCVQEHF

SEQ ID NO: 89139 - protein, 9 aa, Homo sapiens
  Table A; Target 89139; HLA-B*44:02; TRPM1; ENSG00000134160; TAA
EESKLGPDI

SEQ ID NO: 89140 - protein, 9 aa, Homo sapiens
  Table A; Target 89140; HLA-B*44:03; TRPM1; ENSG00000134160; TAA
EESKLGPDI

SEQ ID NO: 89141 - protein, 9 aa, Homo sapiens
  Table A; Target 89141; HLA-B*49:01; TRPM1; ENSG00000134160; TAA
EESKLGPDI

SEQ ID NO: 89142 - protein, 11 aa, Homo sapiens
  Table A; Target 89142; HLA-B*44:02; TRPM1; ENSG00000134160; TAA
EESKLGPDIGI

SEQ ID NO: 89143 - protein, 11 aa, Homo sapiens
  Table A; Target 89143; HLA-B*44:03; TRPM1; ENSG00000134160; TAA
EESKLGPDIGI

SEQ ID NO: 89144 - protein, 8 aa, Homo sapiens
  Table A; Target 89144; HLA-B*18:01; TRPM1; ENSG00000134160; TAA
EESMAKAL

SEQ ID NO: 89145 - protein, 8 aa, Homo sapiens
  Table A; Target 89145; HLA-B*37:01; TRPM1; ENSG00000134160; TAA
EESMAKAL

SEQ ID NO: 89146 - protein, 8 aa, Homo sapiens
  Table A; Target 89146; HLA-B*40:01; TRPM1; ENSG00000134160; TAA
EESMAKAL

SEQ ID NO: 89147 - protein, 8 aa, Homo sapiens
  Table A; Target 89147; HLA-B*44:02; TRPM1; ENSG00000134160; TAA
EESMAKAL

SEQ ID NO: 89148 - protein, 8 aa, Homo sapiens
  Table A; Target 89148; HLA-B*44:03; TRPM1; ENSG00000134160; TAA
EESMAKAL

SEQ ID NO: 89149 - protein, 9 aa, Homo sapiens
  Table A; Target 89149; HLA-B*44:02; TRPM1; ENSG00000134160; TAA
EESMAKALV

SEQ ID NO: 89150 - protein, 9 aa, Homo sapiens
  Table A; Target 89150; HLA-B*44:03; TRPM1; ENSG00000134160; TAA
EESMAKALV

SEQ ID NO: 89151 - protein, 9 aa, Homo sapiens
  Table A; Target 89151; HLA-B*49:01; TRPM1; ENSG00000134160; TAA
EESMAKALV

SEQ ID NO: 89152 - protein, 8 aa, Homo sapiens
  Table A; Target 89152; HLA-B*44:03; TRPM1; ENSG00000134160; TAA
EETDPRKI

SEQ ID NO: 89153 - protein, 10 aa, Homo sapiens
  Table A; Target 89153; HLA-B*40:01; TRPM1; ENSG00000134160; TAA
EETDPRKIEL

SEQ ID NO: 89154 - protein, 10 aa, Homo sapiens
  Table A; Target 89154; HLA-B*44:02; TRPM1; ENSG00000134160; TAA
EETDPRKIEL

SEQ ID NO: 89155 - protein, 10 aa, Homo sapiens
  Table A; Target 89155; HLA-B*44:03; TRPM1; ENSG00000134160; TAA
EETDPRKIEL

SEQ ID NO: 89156 - protein, 8 aa, Homo sapiens
  Table A; Target 89156; HLA-A*30:01; TRPM1; ENSG00000134160; TAA
EETISPSL

SEQ ID NO: 89157 - protein, 8 aa, Homo sapiens
  Table A; Target 89157; HLA-B*18:01; TRPM1; ENSG00000134160; TAA
EETISPSL

SEQ ID NO: 89158 - protein, 8 aa, Homo sapiens
  Table A; Target 89158; HLA-B*37:01; TRPM1; ENSG00000134160; TAA
EETISPSL

SEQ ID NO: 89159 - protein, 8 aa, Homo sapiens
  Table A; Target 89159; HLA-B*40:01; TRPM1; ENSG00000134160; TAA
EETISPSL

SEQ ID NO: 89160 - protein, 8 aa, Homo sapiens
  Table A; Target 89160; HLA-B*40:02; TRPM1; ENSG00000134160; TAA
EETISPSL

SEQ ID NO: 89161 - protein, 8 aa, Homo sapiens
  Table A; Target 89161; HLA-B*44:02; TRPM1; ENSG00000134160; TAA
EETISPSL

SEQ ID NO: 89162 - protein, 8 aa, Homo sapiens
  Table A; Target 89162; HLA-B*44:03; TRPM1; ENSG00000134160; TAA
EETISPSL

SEQ ID NO: 89163 - protein, 8 aa, Homo sapiens
  Table A; Target 89163; HLA-B*49:01; TRPM1; ENSG00000134160; TAA
EETISPSL

SEQ ID NO: 89164 - protein, 8 aa, Homo sapiens
  Table A; Target 89164; HLA-B*18:01; TRPM1; ENSG00000134160; TAA
EETKITRY

SEQ ID NO: 89165 - protein, 8 aa, Homo sapiens
  Table A; Target 89165; HLA-B*44:02; TRPM1; ENSG00000134160; TAA
EETKITRY

SEQ ID NO: 89166 - protein, 8 aa, Homo sapiens
  Table A; Target 89166; HLA-B*44:03; TRPM1; ENSG00000134160; TAA
EETKITRY

SEQ ID NO: 89167 - protein, 9 aa, Homo sapiens
  Table A; Target 89167; HLA-B*44:02; TRPM1; ENSG00000134160; TAA
EETKITRYF

SEQ ID NO: 89168 - protein, 9 aa, Homo sapiens
  Table A; Target 89168; HLA-B*44:03; TRPM1; ENSG00000134160; TAA
EETKITRYF

SEQ ID NO: 89169 - protein, 10 aa, Homo sapiens
  Table A; Target 89169; HLA-A*33:01; TRPM1; ENSG00000134160; TAA
EFQGGGYSNK

SEQ ID NO: 89170 - protein, 10 aa, Homo sapiens
  Table A; Target 89170; HLA-A*33:03; TRPM1; ENSG00000134160; TAA
EFQGGGYSNK

SEQ ID NO: 89171 - protein, 8 aa, Homo sapiens
  Table A; Target 89171; HLA-B*51:01; TRPM1; ENSG00000134160; TAA
EFYNAPIV

SEQ ID NO: 89172 - protein, 9 aa, Homo sapiens
  Table A; Target 89172; HLA-A*33:01; TRPM1; ENSG00000134160; TAA
EFYNAPIVK

SEQ ID NO: 89173 - protein, 9 aa, Homo sapiens
  Table A; Target 89173; HLA-A*33:03; TRPM1; ENSG00000134160; TAA
EFYNAPIVK

SEQ ID NO: 89174 - protein, 10 aa, Homo sapiens
  Table A; Target 89174; HLA-A*23:01; TRPM1; ENSG00000134160; TAA
EFYNAPIVKF

SEQ ID NO: 89175 - protein, 10 aa, Homo sapiens
  Table A; Target 89175; HLA-A*33:03; TRPM1; ENSG00000134160; TAA
EFYNAPIVKF

SEQ ID NO: 89176 - protein, 9 aa, Homo sapiens
  Table A; Target 89176; HLA-B*39:01; TRPM1; ENSG00000134160; TAA
EGGPNVVSI

SEQ ID NO: 89177 - protein, 9 aa, Homo sapiens
  Table A; Target 89177; HLA-B*51:01; TRPM1; ENSG00000134160; TAA
EGGPNVVSI

SEQ ID NO: 89178 - protein, 9 aa, Homo sapiens
  Table A; Target 89178; HLA-A*26:01; TRPM1; ENSG00000134160; TAA
EINERETFM

SEQ ID NO: 89179 - protein, 9 aa, Homo sapiens
  Table A; Target 89179; HLA-B*08:01; TRPM1; ENSG00000134160; TAA
EINERETFM

SEQ ID NO: 89180 - protein, 9 aa, Homo sapiens
  Table A; Target 89180; HLA-B*35:03; TRPM1; ENSG00000134160; TAA
ELLFEDTSL

SEQ ID NO: 89181 - protein, 9 aa, Homo sapiens
  Table A; Target 89181; HLA-A*02:04; TRPM1; ENSG00000134160; TAA
ELLNWVNAL

SEQ ID NO: 89182 - protein, 9 aa, Homo sapiens
  Table A; Target 89182; HLA-A*02:03; TRPM1; ENSG00000134160; TAA
ELPKLLISV

SEQ ID NO: 89183 - protein, 9 aa, Homo sapiens
  Table A; Target 89183; HLA-A*02:04; TRPM1; ENSG00000134160; TAA
ELPKLLISV

SEQ ID NO: 89184 - protein, 9 aa, Homo sapiens
  Table A; Target 89184; HLA-A*02:07; TRPM1; ENSG00000134160; TAA
ELPKLLISV

SEQ ID NO: 89185 - protein, 9 aa, Homo sapiens
  Table A; Target 89185; HLA-A*68:02; TRPM1; ENSG00000134160; TAA
ELPKLLISV

SEQ ID NO: 89186 - protein, 9 aa, Homo sapiens
  Table A; Target 89186; HLA-B*08:01; TRPM1; ENSG00000134160; TAA
ELPKLLISV

SEQ ID NO: 89187 - protein, 10 aa, Homo sapiens
  Table A; Target 89187; HLA-A*25:01; TRPM1; ENSG00000134160; TAA
ELSNRMVNAL

SEQ ID NO: 89188 - protein, 8 aa, Homo sapiens
  Table A; Target 89188; HLA-B*08:01; TRPM1; ENSG00000134160; TAA
EMAILTAL

SEQ ID NO: 89189 - protein, 9 aa, Homo sapiens
  Table A; Target 89189; HLA-A*68:02; TRPM1; ENSG00000134160; TAA
EMAILTALL

SEQ ID NO: 89190 - protein, 9 aa, Homo sapiens
  Table A; Target 89190; HLA-A*02:03; TRPM1; ENSG00000134160; TAA
EMQPKLKQV

SEQ ID NO: 89191 - protein, 9 aa, Homo sapiens
  Table A; Target 89191; HLA-B*08:01; TRPM1; ENSG00000134160; TAA
EMQPKLKQV

SEQ ID NO: 89192 - protein, 9 aa, Homo sapiens
  Table A; Target 89192; HLA-A*33:01; TRPM1; ENSG00000134160; TAA
ENKEDLVGK

SEQ ID NO: 89193 - protein, 9 aa, Homo sapiens
  Table A; Target 89193; HLA-A*33:03; TRPM1; ENSG00000134160; TAA
ENKEDLVGK

SEQ ID NO: 89194 - protein, 8 aa, Homo sapiens
  Table A; Target 89194; HLA-A*33:03; TRPM1; ENSG00000134160; TAA
ENLAGIDR

SEQ ID NO: 89195 - protein, 8 aa, Homo sapiens
  Table A; Target 89195; HLA-B*51:01; TRPM1; ENSG00000134160; TAA
EPPIPVVI

SEQ ID NO: 89196 - protein, 8 aa, Homo sapiens
  Table A; Target 89196; HLA-B*39:01; TRPM1; ENSG00000134160; TAA
EQAMLDAL

SEQ ID NO: 89197 - protein, 9 aa, Homo sapiens
  Table A; Target 89197; HLA-B*13:02; TRPM1; ENSG00000134160; TAA
EQAMLDALV

SEQ ID NO: 89198 - protein, 10 aa, Homo sapiens
  Table A; Target 89198; HLA-A*25:01; TRPM1; ENSG00000134160; TAA
EQIAMKLLTY

SEQ ID NO: 89199 - protein, 10 aa, Homo sapiens
  Table A; Target 89199; HLA-A*26:01; TRPM1; ENSG00000134160; TAA
EQIAMKLLTY

SEQ ID NO: 89200 - protein, 10 aa, Homo sapiens
  Table A; Target 89200; HLA-A*30:02; TRPM1; ENSG00000134160; TAA
EQIAMKLLTY

SEQ ID NO: 89201 - protein, 10 aa, Homo sapiens
  Table A; Target 89201; HLA-B*15:01; TRPM1; ENSG00000134160; TAA
EQIAMKLLTY

SEQ ID NO: 89202 - protein, 10 aa, Homo sapiens
  Table A; Target 89202; HLA-B*15:03; TRPM1; ENSG00000134160; TAA
EQIAMKLLTY

SEQ ID NO: 89203 - protein, 10 aa, Homo sapiens
  Table A; Target 89203; HLA-B*18:01; TRPM1; ENSG00000134160; TAA
EQIAMKLLTY

SEQ ID NO: 89204 - protein, 10 aa, Homo sapiens
  Table A; Target 89204; HLA-B*44:02; TRPM1; ENSG00000134160; TAA
EQIAMKLLTY

SEQ ID NO: 89205 - protein, 10 aa, Homo sapiens
  Table A; Target 89205; HLA-B*44:03; TRPM1; ENSG00000134160; TAA
EQIAMKLLTY

SEQ ID NO: 89206 - protein, 10 aa, Homo sapiens
  Table A; Target 89206; HLA-C*16:04; TRPM1; ENSG00000134160; TAA
EQIAMKLLTY

SEQ ID NO: 89207 - protein, 9 aa, Homo sapiens
  Table A; Target 89207; HLA-A*33:03; TRPM1; ENSG00000134160; TAA
EQLLVTIQK

SEQ ID NO: 89208 - protein, 9 aa, Homo sapiens
  Table A; Target 89208; HLA-C*07:06; TRPM1; ENSG00000134160; TAA
EQLLVTIQK

SEQ ID NO: 89209 - protein, 11 aa, Homo sapiens
  Table A; Target 89209; HLA-B*44:02; TRPM1; ENSG00000134160; TAA
EQLLVTIQKTF

SEQ ID NO: 89210 - protein, 11 aa, Homo sapiens
  Table A; Target 89210; HLA-B*44:03; TRPM1; ENSG00000134160; TAA
EQLLVTIQKTF

SEQ ID NO: 89211 - protein, 10 aa, Homo sapiens
  Table A; Target 89211; HLA-B*38:01; TRPM1; ENSG00000134160; TAA
EQQSSSDERI

SEQ ID NO: 89212 - protein, 8 aa, Homo sapiens
  Table A; Target 89212; HLA-C*05:01; TRPM1; ENSG00000134160; TAA
ESDLVDDI

SEQ ID NO: 89213 - protein, 8 aa, Homo sapiens
  Table A; Target 89213; HLA-B*08:01; TRPM1; ENSG00000134160; TAA
ESMAKALV

SEQ ID NO: 89214 - protein, 9 aa, Homo sapiens
  Table A; Target 89214; HLA-B*54:01; TRPM1; ENSG00000134160; TAA
ESMAKALVA

SEQ ID NO: 89215 - protein, 9 aa, Homo sapiens
  Table A; Target 89215; HLA-A*01:01; TRPM1; ENSG00000134160; TAA
ETDPRKIEL

SEQ ID NO: 89216 - protein, 9 aa, Homo sapiens
  Table A; Target 89216; HLA-A*25:01; TRPM1; ENSG00000134160; TAA
ETDPRKIEL

SEQ ID NO: 89217 - protein, 9 aa, Homo sapiens
  Table A; Target 89217; HLA-A*68:01; TRPM1; ENSG00000134160; TAA
ETDPRKIEL

SEQ ID NO: 89218 - protein, 9 aa, Homo sapiens
  Table A; Target 89218; HLA-C*05:01; TRPM1; ENSG00000134160; TAA
ETDPRKIEL

SEQ ID NO: 89219 - protein, 9 aa, Homo sapiens
  Table A; Target 89219; HLA-C*16:01; TRPM1; ENSG00000134160; TAA
ETDPRKIEL

SEQ ID NO: 89220 - protein, 8 aa, Homo sapiens
  Table A; Target 89220; HLA-B*08:01; TRPM1; ENSG00000134160; TAA
ETFMKTSL

SEQ ID NO: 89221 - protein, 11 aa, Homo sapiens
  Table A; Target 89221; HLA-A*26:01; TRPM1; ENSG00000134160; TAA
ETFMKTSLQTV

SEQ ID NO: 89222 - protein, 11 aa, Homo sapiens
  Table A; Target 89222; HLA-A*68:02; TRPM1; ENSG00000134160; TAA
ETFMKTSLQTV

SEQ ID NO: 89223 - protein, 9 aa, Homo sapiens
  Table A; Target 89223; HLA-A*25:01; TRPM1; ENSG00000134160; TAA
ETINACKTM

SEQ ID NO: 89224 - protein, 9 aa, Homo sapiens
  Table A; Target 89224; HLA-A*26:01; TRPM1; ENSG00000134160; TAA
ETINACKTM

SEQ ID NO: 89225 - protein, 10 aa, Homo sapiens
  Table A; Target 89225; HLA-A*68:01; TRPM1; ENSG00000134160; TAA
ETINACKTMK

SEQ ID NO: 89226 - protein, 9 aa, Homo sapiens
  Table A; Target 89226; HLA-A*03:01; TRPM1; ENSG00000134160; TAA
ETISPSLNK

SEQ ID NO: 89227 - protein, 9 aa, Homo sapiens
  Table A; Target 89227; HLA-A*03:02; TRPM1; ENSG00000134160; TAA
ETISPSLNK

SEQ ID NO: 89228 - protein, 9 aa, Homo sapiens
  Table A; Target 89228; HLA-A*11:01; TRPM1; ENSG00000134160; TAA
ETISPSLNK

SEQ ID NO: 89229 - protein, 9 aa, Homo sapiens
  Table A; Target 89229; HLA-A*26:01; TRPM1; ENSG00000134160; TAA
ETISPSLNK

SEQ ID NO: 89230 - protein, 9 aa, Homo sapiens
  Table A; Target 89230; HLA-A*33:01; TRPM1; ENSG00000134160; TAA
ETISPSLNK

SEQ ID NO: 89231 - protein, 9 aa, Homo sapiens
  Table A; Target 89231; HLA-A*33:03; TRPM1; ENSG00000134160; TAA
ETISPSLNK

SEQ ID NO: 89232 - protein, 9 aa, Homo sapiens
  Table A; Target 89232; HLA-A*68:01; TRPM1; ENSG00000134160; TAA
ETISPSLNK

SEQ ID NO: 89233 - protein, 9 aa, Homo sapiens
  Table A; Target 89233; HLA-C*07:06; TRPM1; ENSG00000134160; TAA
ETISPSLNK

SEQ ID NO: 89234 - protein, 10 aa, Homo sapiens
  Table A; Target 89234; HLA-A*26:01; TRPM1; ENSG00000134160; TAA
ETISPSLNKT

SEQ ID NO: 89235 - protein, 10 aa, Homo sapiens
  Table A; Target 89235; HLA-A*68:01; TRPM1; ENSG00000134160; TAA
ETISPSLNKT

SEQ ID NO: 89236 - protein, 11 aa, Homo sapiens
  Table A; Target 89236; HLA-A*03:02; TRPM1; ENSG00000134160; TAA
ETQPEKWSVAK

SEQ ID NO: 89237 - protein, 11 aa, Homo sapiens
  Table A; Target 89237; HLA-A*33:03; TRPM1; ENSG00000134160; TAA
ETQPEKWSVAK

SEQ ID NO: 89238 - protein, 9 aa, Homo sapiens
  Table A; Target 89238; HLA-A*25:01; TRPM1; ENSG00000134160; TAA
ETTNIEGTI

SEQ ID NO: 89239 - protein, 9 aa, Homo sapiens
  Table A; Target 89239; HLA-A*26:01; TRPM1; ENSG00000134160; TAA
ETTNIEGTI

SEQ ID NO: 89240 - protein, 9 aa, Homo sapiens
  Table A; Target 89240; HLA-A*68:02; TRPM1; ENSG00000134160; TAA
ETTNIEGTI

SEQ ID NO: 89241 - protein, 11 aa, Homo sapiens
  Table A; Target 89241; HLA-A*01:01; TRPM1; ENSG00000134160; TAA
ETTNIEGTISY

SEQ ID NO: 89242 - protein, 11 aa, Homo sapiens
  Table A; Target 89242; HLA-A*25:01; TRPM1; ENSG00000134160; TAA
ETTNIEGTISY

SEQ ID NO: 89243 - protein, 11 aa, Homo sapiens
  Table A; Target 89243; HLA-A*26:01; TRPM1; ENSG00000134160; TAA
ETTNIEGTISY

SEQ ID NO: 89244 - protein, 11 aa, Homo sapiens
  Table A; Target 89244; HLA-A*68:01; TRPM1; ENSG00000134160; TAA
ETTNIEGTISY

SEQ ID NO: 89245 - protein, 9 aa, Homo sapiens
  Table A; Target 89245; HLA-A*68:01; TRPM1; ENSG00000134160; TAA
EVEEETDPR

SEQ ID NO: 89246 - protein, 9 aa, Homo sapiens
  Table A; Target 89246; HLA-A*26:01; TRPM1; ENSG00000134160; TAA
EVFADQIDL

SEQ ID NO: 89247 - protein, 9 aa, Homo sapiens
  Table A; Target 89247; HLA-A*68:01; TRPM1; ENSG00000134160; TAA
EVFADQIDL

SEQ ID NO: 89248 - protein, 9 aa, Homo sapiens
  Table A; Target 89248; HLA-A*68:02; TRPM1; ENSG00000134160; TAA
EVFADQIDL

SEQ ID NO: 89249 - protein, 9 aa, Homo sapiens
  Table A; Target 89249; HLA-B*35:03; TRPM1; ENSG00000134160; TAA
EVFADQIDL

SEQ ID NO: 89250 - protein, 10 aa, Homo sapiens
  Table A; Target 89250; HLA-A*01:01; TRPM1; ENSG00000134160; TAA
EVFADQIDLY

SEQ ID NO: 89251 - protein, 10 aa, Homo sapiens
  Table A; Target 89251; HLA-A*25:01; TRPM1; ENSG00000134160; TAA
EVFADQIDLY

SEQ ID NO: 89252 - protein, 10 aa, Homo sapiens
  Table A; Target 89252; HLA-A*26:01; TRPM1; ENSG00000134160; TAA
EVFADQIDLY

SEQ ID NO: 89253 - protein, 10 aa, Homo sapiens
  Table A; Target 89253; HLA-A*29:02; TRPM1; ENSG00000134160; TAA
EVFADQIDLY

SEQ ID NO: 89254 - protein, 10 aa, Homo sapiens
  Table A; Target 89254; HLA-A*68:01; TRPM1; ENSG00000134160; TAA
EVFADQIDLY

SEQ ID NO: 89255 - protein, 10 aa, Homo sapiens
  Table A; Target 89255; HLA-B*35:01; TRPM1; ENSG00000134160; TAA
EVFADQIDLY

SEQ ID NO: 89256 - protein, 11 aa, Homo sapiens
  Table A; Target 89256; HLA-A*68:02; TRPM1; ENSG00000134160; TAA
EVFADQIDLYA

SEQ ID NO: 89257 - protein, 9 aa, Homo sapiens
  Table A; Target 89257; HLA-A*25:01; TRPM1; ENSG00000134160; TAA
EVKSISNQV

SEQ ID NO: 89258 - protein, 9 aa, Homo sapiens
  Table A; Target 89258; HLA-A*26:01; TRPM1; ENSG00000134160; TAA
EVKSISNQV

SEQ ID NO: 89259 - protein, 9 aa, Homo sapiens
  Table A; Target 89259; HLA-A*33:03; TRPM1; ENSG00000134160; TAA
EVKSISNQV

SEQ ID NO: 89260 - protein, 9 aa, Homo sapiens
  Table A; Target 89260; HLA-A*68:02; TRPM1; ENSG00000134160; TAA
EVKSISNQV

SEQ ID NO: 89261 - protein, 10 aa, Homo sapiens
  Table A; Target 89261; HLA-A*25:01; TRPM1; ENSG00000134160; TAA
EVKSISNQVW

SEQ ID NO: 89262 - protein, 10 aa, Homo sapiens
  Table A; Target 89262; HLA-A*26:01; TRPM1; ENSG00000134160; TAA
EVKSISNQVW

SEQ ID NO: 89263 - protein, 10 aa, Homo sapiens
  Table A; Target 89263; HLA-A*33:03; TRPM1; ENSG00000134160; TAA
EVKSISNQVW

SEQ ID NO: 89264 - protein, 10 aa, Homo sapiens
  Table A; Target 89264; HLA-B*44:02; TRPM1; ENSG00000134160; TAA
EVKSISNQVW

SEQ ID NO: 89265 - protein, 10 aa, Homo sapiens
  Table A; Target 89265; HLA-B*57:01; TRPM1; ENSG00000134160; TAA
EVKSISNQVW

SEQ ID NO: 89266 - protein, 11 aa, Homo sapiens
  Table A; Target 89266; HLA-A*33:03; TRPM1; ENSG00000134160; TAA
EVKSISNQVWK

SEQ ID NO: 89267 - protein, 8 aa, Homo sapiens
  Table A; Target 89267; HLA-C*14:02; TRPM1; ENSG00000134160; TAA
EYLMGGAY

SEQ ID NO: 89268 - protein, 9 aa, Homo sapiens
  Table A; Target 89268; HLA-A*33:01; TRPM1; ENSG00000134160; TAA
EYLMGGAYR

SEQ ID NO: 89269 - protein, 9 aa, Homo sapiens
  Table A; Target 89269; HLA-A*33:03; TRPM1; ENSG00000134160; TAA
EYLMGGAYR

SEQ ID NO: 89270 - protein, 10 aa, Homo sapiens
  Table A; Target 89270; HLA-A*24:02; TRPM1; ENSG00000134160; TAA
EYSSITDQQL

SEQ ID NO: 89271 - protein, 10 aa, Homo sapiens
  Table A; Target 89271; HLA-A*33:03; TRPM1; ENSG00000134160; TAA
EYSSITDQQL

SEQ ID NO: 89272 - protein, 8 aa, Homo sapiens
  Table A; Target 89272; HLA-A*01:01; TRPM1; ENSG00000134160; TAA
FADQIDLY

SEQ ID NO: 89273 - protein, 8 aa, Homo sapiens
  Table A; Target 89273; HLA-B*35:01; TRPM1; ENSG00000134160; TAA
FADQIDLY

SEQ ID NO: 89274 - protein, 8 aa, Homo sapiens
  Table A; Target 89274; HLA-B*55:01; TRPM1; ENSG00000134160; TAA
FADQIDLY

SEQ ID NO: 89275 - protein, 8 aa, Homo sapiens
  Table A; Target 89275; HLA-C*05:01; TRPM1; ENSG00000134160; TAA
FADQIDLY

SEQ ID NO: 89276 - protein, 10 aa, Homo sapiens
  Table A; Target 89276; HLA-B*35:01; TRPM1; ENSG00000134160; TAA
FADQIDLYAM

SEQ ID NO: 89277 - protein, 10 aa, Homo sapiens
  Table A; Target 89277; HLA-B*35:03; TRPM1; ENSG00000134160; TAA
FADQIDLYAM

SEQ ID NO: 89278 - protein, 10 aa, Homo sapiens
  Table A; Target 89278; HLA-C*05:01; TRPM1; ENSG00000134160; TAA
FADQIDLYAM

SEQ ID NO: 89279 - protein, 8 aa, Homo sapiens
  Table A; Target 89279; HLA-B*46:01; TRPM1; ENSG00000134160; TAA
FAIIMECM

SEQ ID NO: 89280 - protein, 8 aa, Homo sapiens
  Table A; Target 89280; HLA-B*51:01; TRPM1; ENSG00000134160; TAA
FAIIMECM

SEQ ID NO: 89281 - protein, 10 aa, Homo sapiens
  Table A; Target 89281; HLA-B*49:01; TRPM1; ENSG00000134160; TAA
FEMQPKLKQV

SEQ ID NO: 89282 - protein, 11 aa, Homo sapiens
  Table A; Target 89282; HLA-B*44:02; TRPM1; ENSG00000134160; TAA
FEMQPKLKQVF

SEQ ID NO: 89283 - protein, 10 aa, Homo sapiens
  Table A; Target 89283; HLA-A*30:01; TRPM1; ENSG00000134160; TAA
FEVKSISNQV

SEQ ID NO: 89284 - protein, 10 aa, Homo sapiens
  Table A; Target 89284; HLA-B*49:01; TRPM1; ENSG00000134160; TAA
FEVKSISNQV

SEQ ID NO: 89285 - protein, 11 aa, Homo sapiens
  Table A; Target 89285; HLA-B*44:02; TRPM1; ENSG00000134160; TAA
FEVKSISNQVW

SEQ ID NO: 89286 - protein, 11 aa, Homo sapiens
  Table A; Target 89286; HLA-B*44:03; TRPM1; ENSG00000134160; TAA
FEVKSISNQVW

SEQ ID NO: 89287 - protein, 11 aa, Homo sapiens
  Table A; Target 89287; HLA-B*57:01; TRPM1; ENSG00000134160; TAA
FEVKSISNQVW

SEQ ID NO: 89288 - protein, 11 aa, Homo sapiens
  Table A; Target 89288; HLA-C*16:04; TRPM1; ENSG00000134160; TAA
FEVKSISNQVW

SEQ ID NO: 89289 - protein, 9 aa, Homo sapiens
  Table A; Target 89289; HLA-B*08:01; TRPM1; ENSG00000134160; TAA
FGPKRPKAL

SEQ ID NO: 89290 - protein, 8 aa, Homo sapiens
  Table A; Target 89290; HLA-C*03:03; TRPM1; ENSG00000134160; TAA
FGQLALEL

SEQ ID NO: 89291 - protein, 8 aa, Homo sapiens
  Table A; Target 89291; HLA-C*03:04; TRPM1; ENSG00000134160; TAA
FGQLALEL

SEQ ID NO: 89292 - protein, 8 aa, Homo sapiens
  Table A; Target 89292; HLA-C*14:02; TRPM1; ENSG00000134160; TAA
FGQLALEL

SEQ ID NO: 89293 - protein, 8 aa, Homo sapiens
  Table A; Target 89293; HLA-B*08:01; TRPM1; ENSG00000134160; TAA
FGVARQAI

SEQ ID NO: 89294 - protein, 9 aa, Homo sapiens
  Table A; Target 89294; HLA-B*08:01; TRPM1; ENSG00000134160; TAA
FGVARQAIL

SEQ ID NO: 89295 - protein, 9 aa, Homo sapiens
  Table A; Target 89295; HLA-B*46:01; TRPM1; ENSG00000134160; TAA
FGVARQAIL

SEQ ID NO: 89296 - protein, 9 aa, Homo sapiens
  Table A; Target 89296; HLA-C*02:02; TRPM1; ENSG00000134160; TAA
FGVARQAIL

SEQ ID NO: 89297 - protein, 9 aa, Homo sapiens
  Table A; Target 89297; HLA-C*03:03; TRPM1; ENSG00000134160; TAA
FGVARQAIL

SEQ ID NO: 89298 - protein, 9 aa, Homo sapiens
  Table A; Target 89298; HLA-C*03:04; TRPM1; ENSG00000134160; TAA
FGVARQAIL

SEQ ID NO: 89299 - protein, 9 aa, Homo sapiens
  Table A; Target 89299; HLA-C*12:03; TRPM1; ENSG00000134160; TAA
FGVARQAIL

SEQ ID NO: 89300 - protein, 9 aa, Homo sapiens
  Table A; Target 89300; HLA-C*16:01; TRPM1; ENSG00000134160; TAA
FGVARQAIL

SEQ ID NO: 89301 - protein, 9 aa, Homo sapiens
  Table A; Target 89301; HLA-B*27:05; TRPM1; ENSG00000134160; TAA
FILADNGTL

SEQ ID NO: 89302 - protein, 9 aa, Homo sapiens
  Table A; Target 89302; HLA-B*35:03; TRPM1; ENSG00000134160; TAA
FILADNGTL

SEQ ID NO: 89303 - protein, 9 aa, Homo sapiens
  Table A; Target 89303; HLA-B*39:01; TRPM1; ENSG00000134160; TAA
FILADNGTL

SEQ ID NO: 89304 - protein, 9 aa, Homo sapiens
  Table A; Target 89304; HLA-C*03:03; TRPM1; ENSG00000134160; TAA
FILADNGTL

SEQ ID NO: 89305 - protein, 9 aa, Homo sapiens
  Table A; Target 89305; HLA-C*03:04; TRPM1; ENSG00000134160; TAA
FILADNGTL

SEQ ID NO: 89306 - protein, 9 aa, Homo sapiens
  Table A; Target 89306; HLA-C*05:01; TRPM1; ENSG00000134160; TAA
FILADNGTL

SEQ ID NO: 89307 - protein, 9 aa, Homo sapiens
  Table A; Target 89307; HLA-C*14:02; TRPM1; ENSG00000134160; TAA
FILADNGTL

SEQ ID NO: 89308 - protein, 10 aa, Homo sapiens
  Table A; Target 89308; HLA-A*02:01; TRPM1; ENSG00000134160; TAA
FLSDEELKRL

SEQ ID NO: 89309 - protein, 10 aa, Homo sapiens
  Table A; Target 89309; HLA-A*02:03; TRPM1; ENSG00000134160; TAA
FLSDEELKRL

SEQ ID NO: 89310 - protein, 10 aa, Homo sapiens
  Table A; Target 89310; HLA-A*02:04; TRPM1; ENSG00000134160; TAA
FLSDEELKRL

SEQ ID NO: 89311 - protein, 10 aa, Homo sapiens
  Table A; Target 89311; HLA-A*02:03; TRPM1; ENSG00000134160; TAA
FLTIPRLEEL

SEQ ID NO: 89312 - protein, 10 aa, Homo sapiens
  Table A; Target 89312; HLA-A*02:04; TRPM1; ENSG00000134160; TAA
FLTIPRLEEL

SEQ ID NO: 89313 - protein, 11 aa, Homo sapiens
  Table A; Target 89313; HLA-A*01:01; TRPM1; ENSG00000134160; TAA
FLTIPRLEELY

SEQ ID NO: 89314 - protein, 11 aa, Homo sapiens
  Table A; Target 89314; HLA-A*29:02; TRPM1; ENSG00000134160; TAA
FLTIPRLEELY

SEQ ID NO: 89315 - protein, 10 aa, Homo sapiens
  Table A; Target 89315; HLA-A*02:01; TRPM1; ENSG00000134160; TAA
FLWQRGEESM

SEQ ID NO: 89316 - protein, 9 aa, Homo sapiens
  Table A; Target 89316; HLA-A*02:01; TRPM1; ENSG00000134160; TAA
FMIGAILRL

SEQ ID NO: 89317 - protein, 9 aa, Homo sapiens
  Table A; Target 89317; HLA-A*02:03; TRPM1; ENSG00000134160; TAA
FMIGAILRL

SEQ ID NO: 89318 - protein, 9 aa, Homo sapiens
  Table A; Target 89318; HLA-A*02:04; TRPM1; ENSG00000134160; TAA
FMIGAILRL

SEQ ID NO: 89319 - protein, 9 aa, Homo sapiens
  Table A; Target 89319; HLA-A*02:07; TRPM1; ENSG00000134160; TAA
FMIGAILRL

SEQ ID NO: 89320 - protein, 9 aa, Homo sapiens
  Table A; Target 89320; HLA-A*23:01; TRPM1; ENSG00000134160; TAA
FMIGAILRL

SEQ ID NO: 89321 - protein, 9 aa, Homo sapiens
  Table A; Target 89321; HLA-A*29:02; TRPM1; ENSG00000134160; TAA
FMIGAILRL

SEQ ID NO: 89322 - protein, 9 aa, Homo sapiens
  Table A; Target 89322; HLA-C*02:02; TRPM1; ENSG00000134160; TAA
FMIGAILRL

SEQ ID NO: 89323 - protein, 9 aa, Homo sapiens
  Table A; Target 89323; HLA-A*02:01; TRPM1; ENSG00000134160; TAA
FMKTSLQTV

SEQ ID NO: 89324 - protein, 9 aa, Homo sapiens
  Table A; Target 89324; HLA-A*02:03; TRPM1; ENSG00000134160; TAA
FMKTSLQTV

SEQ ID NO: 89325 - protein, 9 aa, Homo sapiens
  Table A; Target 89325; HLA-B*08:01; TRPM1; ENSG00000134160; TAA
FMKTSLQTV

SEQ ID NO: 89326 - protein, 9 aa, Homo sapiens
  Table A; Target 89326; HLA-B*46:01; TRPM1; ENSG00000134160; TAA
FMKTSLQTV

SEQ ID NO: 89327 - protein, 9 aa, Homo sapiens
  Table A; Target 89327; HLA-B*55:01; TRPM1; ENSG00000134160; TAA
FMKTSLQTV

SEQ ID NO: 89328 - protein, 8 aa, Homo sapiens
  Table A; Target 89328; HLA-B*35:03; TRPM1; ENSG00000134160; TAA
FPDETINA

SEQ ID NO: 89329 - protein, 8 aa, Homo sapiens
  Table A; Target 89329; HLA-B*54:01; TRPM1; ENSG00000134160; TAA
FPDETINA

SEQ ID NO: 89330 - protein, 8 aa, Homo sapiens
  Table A; Target 89330; HLA-B*55:01; TRPM1; ENSG00000134160; TAA
FPDETINA

SEQ ID NO: 89331 - protein, 8 aa, Homo sapiens
  Table A; Target 89331; HLA-B*56:01; TRPM1; ENSG00000134160; TAA
FPDETINA

SEQ ID NO: 89332 - protein, 8 aa, Homo sapiens
  Table A; Target 89332; HLA-C*05:01; TRPM1; ENSG00000134160; TAA
FPDETINA

SEQ ID NO: 89333 - protein, 9 aa, Homo sapiens
  Table A; Target 89333; HLA-B*07:02; TRPM1; ENSG00000134160; TAA
FPDETINAC

SEQ ID NO: 89334 - protein, 9 aa, Homo sapiens
  Table A; Target 89334; HLA-B*35:01; TRPM1; ENSG00000134160; TAA
FPDETINAC

SEQ ID NO: 89335 - protein, 9 aa, Homo sapiens
  Table A; Target 89335; HLA-B*35:03; TRPM1; ENSG00000134160; TAA
FPDETINAC

SEQ ID NO: 89336 - protein, 9 aa, Homo sapiens
  Table A; Target 89336; HLA-B*39:01; TRPM1; ENSG00000134160; TAA
FPDETINAC

SEQ ID NO: 89337 - protein, 9 aa, Homo sapiens
  Table A; Target 89337; HLA-B*54:01; TRPM1; ENSG00000134160; TAA
FPDETINAC

SEQ ID NO: 89338 - protein, 9 aa, Homo sapiens
  Table A; Target 89338; HLA-B*55:01; TRPM1; ENSG00000134160; TAA
FPDETINAC

SEQ ID NO: 89339 - protein, 9 aa, Homo sapiens
  Table A; Target 89339; HLA-B*56:01; TRPM1; ENSG00000134160; TAA
FPDETINAC

SEQ ID NO: 89340 - protein, 9 aa, Homo sapiens
  Table A; Target 89340; HLA-C*03:03; TRPM1; ENSG00000134160; TAA
FPDETINAC

SEQ ID NO: 89341 - protein, 9 aa, Homo sapiens
  Table A; Target 89341; HLA-C*05:01; TRPM1; ENSG00000134160; TAA
FPDETINAC

SEQ ID NO: 89342 - protein, 10 aa, Homo sapiens
  Table A; Target 89342; HLA-A*01:01; TRPM1; ENSG00000134160; TAA
FPDETINACK

SEQ ID NO: 89343 - protein, 10 aa, Homo sapiens
  Table A; Target 89343; HLA-B*27:02; TRPM1; ENSG00000134160; TAA
FPDETINACK

SEQ ID NO: 89344 - protein, 10 aa, Homo sapiens
  Table A; Target 89344; HLA-B*35:01; TRPM1; ENSG00000134160; TAA
FPDETINACK

SEQ ID NO: 89345 - protein, 10 aa, Homo sapiens
  Table A; Target 89345; HLA-B*35:03; TRPM1; ENSG00000134160; TAA
FPDETINACK

SEQ ID NO: 89346 - protein, 10 aa, Homo sapiens
  Table A; Target 89346; HLA-B*54:01; TRPM1; ENSG00000134160; TAA
FPDETINACK

SEQ ID NO: 89347 - protein, 10 aa, Homo sapiens
  Table A; Target 89347; HLA-B*55:01; TRPM1; ENSG00000134160; TAA
FPDETINACK

SEQ ID NO: 89348 - protein, 10 aa, Homo sapiens
  Table A; Target 89348; HLA-B*56:01; TRPM1; ENSG00000134160; TAA
FPDETINACK

SEQ ID NO: 89349 - protein, 9 aa, Homo sapiens
  Table A; Target 89349; HLA-B*07:02; TRPM1; ENSG00000134160; TAA
FPSLRSKSL

SEQ ID NO: 89350 - protein, 9 aa, Homo sapiens
  Table A; Target 89350; HLA-B*08:01; TRPM1; ENSG00000134160; TAA
FPSLRSKSL

SEQ ID NO: 89351 - protein, 9 aa, Homo sapiens
  Table A; Target 89351; HLA-C*07:02; TRPM1; ENSG00000134160; TAA
FPSLRSKSL

SEQ ID NO: 89352 - protein, 9 aa, Homo sapiens
  Table A; Target 89352; HLA-C*07:04; TRPM1; ENSG00000134160; TAA
FQGGGYSNK

SEQ ID NO: 89353 - protein, 8 aa, Homo sapiens
  Table A; Target 89353; HLA-A*02:04; TRPM1; ENSG00000134160; TAA
FQYPFHEL

SEQ ID NO: 89354 - protein, 8 aa, Homo sapiens
  Table A; Target 89354; HLA-A*30:01; TRPM1; ENSG00000134160; TAA
FQYPFHEL

SEQ ID NO: 89355 - protein, 8 aa, Homo sapiens
  Table A; Target 89355; HLA-B*13:02; TRPM1; ENSG00000134160; TAA
FQYPFHEL

SEQ ID NO: 89356 - protein, 8 aa, Homo sapiens
  Table A; Target 89356; HLA-B*15:03; TRPM1; ENSG00000134160; TAA
FQYPFHEL

SEQ ID NO: 89357 - protein, 8 aa, Homo sapiens
  Table A; Target 89357; HLA-B*37:01; TRPM1; ENSG00000134160; TAA
FQYPFHEL

SEQ ID NO: 89358 - protein, 8 aa, Homo sapiens
  Table A; Target 89358; HLA-C*02:02; TRPM1; ENSG00000134160; TAA
FQYPFHEL

SEQ ID NO: 89359 - protein, 8 aa, Homo sapiens
  Table A; Target 89359; HLA-C*03:03; TRPM1; ENSG00000134160; TAA
FQYPFHEL

SEQ ID NO: 89360 - protein, 8 aa, Homo sapiens
  Table A; Target 89360; HLA-C*03:04; TRPM1; ENSG00000134160; TAA
FQYPFHEL

SEQ ID NO: 89361 - protein, 9 aa, Homo sapiens
  Table A; Target 89361; HLA-B*15:03; TRPM1; ENSG00000134160; TAA
FQYPFHELM

SEQ ID NO: 89362 - protein, 9 aa, Homo sapiens
  Table A; Target 89362; HLA-C*02:02; TRPM1; ENSG00000134160; TAA
FQYPFHELM

SEQ ID NO: 89363 - protein, 10 aa, Homo sapiens
  Table A; Target 89363; HLA-A*02:03; TRPM1; ENSG00000134160; TAA
FQYPFHELMV

SEQ ID NO: 89364 - protein, 9 aa, Homo sapiens
  Table A; Target 89364; HLA-A*02:03; TRPM1; ENSG00000134160; TAA
FTGGVSTGV

SEQ ID NO: 89365 - protein, 9 aa, Homo sapiens
  Table A; Target 89365; HLA-A*26:01; TRPM1; ENSG00000134160; TAA
FTGGVSTGV

SEQ ID NO: 89366 - protein, 9 aa, Homo sapiens
  Table A; Target 89366; HLA-A*68:02; TRPM1; ENSG00000134160; TAA
FTGGVSTGV

SEQ ID NO: 89367 - protein, 9 aa, Homo sapiens
  Table A; Target 89367; HLA-B*13:02; TRPM1; ENSG00000134160; TAA
FTGGVSTGV

SEQ ID NO: 89368 - protein, 9 aa, Homo sapiens
  Table A; Target 89368; HLA-A*02:04; TRPM1; ENSG00000134160; TAA
FTNQHIPPL

SEQ ID NO: 89369 - protein, 9 aa, Homo sapiens
  Table A; Target 89369; HLA-A*25:01; TRPM1; ENSG00000134160; TAA
FTNQHIPPL

SEQ ID NO: 89370 - protein, 9 aa, Homo sapiens
  Table A; Target 89370; HLA-A*26:01; TRPM1; ENSG00000134160; TAA
FTNQHIPPL

SEQ ID NO: 89371 - protein, 9 aa, Homo sapiens
  Table A; Target 89371; HLA-A*68:02; TRPM1; ENSG00000134160; TAA
FTNQHIPPL

SEQ ID NO: 89372 - protein, 9 aa, Homo sapiens
  Table A; Target 89372; HLA-B*46:01; TRPM1; ENSG00000134160; TAA
FTNQHIPPL

SEQ ID NO: 89373 - protein, 9 aa, Homo sapiens
  Table A; Target 89373; HLA-C*03:03; TRPM1; ENSG00000134160; TAA
FTNQHIPPL

SEQ ID NO: 89374 - protein, 9 aa, Homo sapiens
  Table A; Target 89374; HLA-C*03:04; TRPM1; ENSG00000134160; TAA
FTNQHIPPL

SEQ ID NO: 89375 - protein, 9 aa, Homo sapiens
  Table A; Target 89375; HLA-C*07:04; TRPM1; ENSG00000134160; TAA
FTNQHIPPL

SEQ ID NO: 89376 - protein, 9 aa, Homo sapiens
  Table A; Target 89376; HLA-C*16:01; TRPM1; ENSG00000134160; TAA
FTNQHIPPL

SEQ ID NO: 89377 - protein, 9 aa, Homo sapiens
  Table A; Target 89377; HLA-A*29:02; TRPM1; ENSG00000134160; TAA
FYMPYWMIY

SEQ ID NO: 89378 - protein, 9 aa, Homo sapiens
  Table A; Target 89378; HLA-A*23:01; TRPM1; ENSG00000134160; TAA
FYNAPIVKF

SEQ ID NO: 89379 - protein, 9 aa, Homo sapiens
  Table A; Target 89379; HLA-A*24:02; TRPM1; ENSG00000134160; TAA
FYNAPIVKF

SEQ ID NO: 89380 - protein, 9 aa, Homo sapiens
  Table A; Target 89380; HLA-A*29:02; TRPM1; ENSG00000134160; TAA
FYNAPIVKF

SEQ ID NO: 89381 - protein, 9 aa, Homo sapiens
  Table A; Target 89381; HLA-A*29:02; TRPM1; ENSG00000134160; TAA
FYTISYLGY

SEQ ID NO: 89382 - protein, 11 aa, Homo sapiens
  Table A; Target 89382; HLA-A*30:01; TRPM1; ENSG00000134160; TAA
GEELLFEDTSL

SEQ ID NO: 89383 - protein, 11 aa, Homo sapiens
  Table A; Target 89383; HLA-B*40:01; TRPM1; ENSG00000134160; TAA
GEELLFEDTSL

SEQ ID NO: 89384 - protein, 9 aa, Homo sapiens
  Table A; Target 89384; HLA-A*30:01; TRPM1; ENSG00000134160; TAA
GEESMAKAL

SEQ ID NO: 89385 - protein, 9 aa, Homo sapiens
  Table A; Target 89385; HLA-B*18:01; TRPM1; ENSG00000134160; TAA
GEESMAKAL

SEQ ID NO: 89386 - protein, 9 aa, Homo sapiens
  Table A; Target 89386; HLA-B*40:01; TRPM1; ENSG00000134160; TAA
GEESMAKAL

SEQ ID NO: 89387 - protein, 9 aa, Homo sapiens
  Table A; Target 89387; HLA-B*40:02; TRPM1; ENSG00000134160; TAA
GEESMAKAL

SEQ ID NO: 89388 - protein, 9 aa, Homo sapiens
  Table A; Target 89388; HLA-B*44:02; TRPM1; ENSG00000134160; TAA
GEESMAKAL

SEQ ID NO: 89389 - protein, 9 aa, Homo sapiens
  Table A; Target 89389; HLA-B*44:03; TRPM1; ENSG00000134160; TAA
GEESMAKAL

SEQ ID NO: 89390 - protein, 9 aa, Homo sapiens
  Table A; Target 89390; HLA-B*49:01; TRPM1; ENSG00000134160; TAA
GEESMAKAL

SEQ ID NO: 89391 - protein, 10 aa, Homo sapiens
  Table A; Target 89391; HLA-B*40:01; TRPM1; ENSG00000134160; TAA
GEESMAKALV

SEQ ID NO: 89392 - protein, 10 aa, Homo sapiens
  Table A; Target 89392; HLA-B*49:01; TRPM1; ENSG00000134160; TAA
GEESMAKALV

SEQ ID NO: 89393 - protein, 11 aa, Homo sapiens
  Table A; Target 89393; HLA-A*30:01; TRPM1; ENSG00000134160; TAA
GEESMAKALVA

SEQ ID NO: 89394 - protein, 11 aa, Homo sapiens
  Table A; Target 89394; HLA-B*40:01; TRPM1; ENSG00000134160; TAA
GEESMAKALVA

SEQ ID NO: 89395 - protein, 11 aa, Homo sapiens
  Table A; Target 89395; HLA-B*49:01; TRPM1; ENSG00000134160; TAA
GEESMAKALVA

SEQ ID NO: 89396 - protein, 10 aa, Homo sapiens
  Table A; Target 89396; HLA-B*27:02; TRPM1; ENSG00000134160; TAA
GENLYDEEGK

SEQ ID NO: 89397 - protein, 8 aa, Homo sapiens
  Table A; Target 89397; HLA-A*30:01; TRPM1; ENSG00000134160; TAA
GEVFADQI

SEQ ID NO: 89398 - protein, 8 aa, Homo sapiens
  Table A; Target 89398; HLA-B*40:01; TRPM1; ENSG00000134160; TAA
GEVFADQI

SEQ ID NO: 89399 - protein, 8 aa, Homo sapiens
  Table A; Target 89399; HLA-B*49:01; TRPM1; ENSG00000134160; TAA
GEVFADQI

SEQ ID NO: 89400 - protein, 10 aa, Homo sapiens
  Table A; Target 89400; HLA-A*30:01; TRPM1; ENSG00000134160; TAA
GEVFADQIDL

SEQ ID NO: 89401 - protein, 10 aa, Homo sapiens
  Table A; Target 89401; HLA-B*40:01; TRPM1; ENSG00000134160; TAA
GEVFADQIDL

SEQ ID NO: 89402 - protein, 11 aa, Homo sapiens
  Table A; Target 89402; HLA-B*44:02; TRPM1; ENSG00000134160; TAA
GEVFADQIDLY

SEQ ID NO: 89403 - protein, 11 aa, Homo sapiens
  Table A; Target 89403; HLA-B*44:03; TRPM1; ENSG00000134160; TAA
GEVFADQIDLY

SEQ ID NO: 89404 - protein, 9 aa, Homo sapiens
  Table A; Target 89404; HLA-B*15:01; TRPM1; ENSG00000134160; TAA
GGVNQDVEY

SEQ ID NO: 89405 - protein, 9 aa, Homo sapiens
  Table A; Target 89405; HLA-B*15:03; TRPM1; ENSG00000134160; TAA
GGVNQDVEY

SEQ ID NO: 89406 - protein, 9 aa, Homo sapiens
  Table A; Target 89406; HLA-B*35:01; TRPM1; ENSG00000134160; TAA
GGVNQDVEY

SEQ ID NO: 89407 - protein, 9 aa, Homo sapiens
  Table A; Target 89407; HLA-B*46:01; TRPM1; ENSG00000134160; TAA
GGVNQDVEY

SEQ ID NO: 89408 - protein, 9 aa, Homo sapiens
  Table A; Target 89408; HLA-A*30:02; TRPM1; ENSG00000134160; TAA
GGYSNKAMY

SEQ ID NO: 89409 - protein, 9 aa, Homo sapiens
  Table A; Target 89409; HLA-B*15:01; TRPM1; ENSG00000134160; TAA
GGYSNKAMY

SEQ ID NO: 89410 - protein, 9 aa, Homo sapiens
  Table A; Target 89410; HLA-B*15:03; TRPM1; ENSG00000134160; TAA
GGYSNKAMY

SEQ ID NO: 89411 - protein, 9 aa, Homo sapiens
  Table A; Target 89411; HLA-B*46:01; TRPM1; ENSG00000134160; TAA
GGYSNKAMY

SEQ ID NO: 89412 - protein, 9 aa, Homo sapiens
  Table A; Target 89412; HLA-C*02:02; TRPM1; ENSG00000134160; TAA
GGYSNKAMY

SEQ ID NO: 89413 - protein, 9 aa, Homo sapiens
  Table A; Target 89413; HLA-B*27:05; TRPM1; ENSG00000134160; TAA
GHASSVSSL

SEQ ID NO: 89414 - protein, 9 aa, Homo sapiens
  Table A; Target 89414; HLA-B*38:01; TRPM1; ENSG00000134160; TAA
GHASSVSSL

SEQ ID NO: 89415 - protein, 9 aa, Homo sapiens
  Table A; Target 89415; HLA-B*39:01; TRPM1; ENSG00000134160; TAA
GHASSVSSL

SEQ ID NO: 89416 - protein, 11 aa, Homo sapiens
  Table A; Target 89416; HLA-B*38:01; TRPM1; ENSG00000134160; TAA
GHASSVSSLVI

SEQ ID NO: 89417 - protein, 11 aa, Homo sapiens
  Table A; Target 89417; HLA-A*03:02; TRPM1; ENSG00000134160; TAA
GIAPWGIVENK

SEQ ID NO: 89418 - protein, 11 aa, Homo sapiens
  Table A; Target 89418; HLA-A*31:01; TRPM1; ENSG00000134160; TAA
GIDRSDLIQAR

SEQ ID NO: 89419 - protein, 11 aa, Homo sapiens
  Table A; Target 89419; HLA-A*02:04; TRPM1; ENSG00000134160; TAA
GILLPPTILFL

SEQ ID NO: 89420 - protein, 8 aa, Homo sapiens
  Table A; Target 89420; HLA-B*15:03; TRPM1; ENSG00000134160; TAA
GKDVTRVY

SEQ ID NO: 89421 - protein, 8 aa, Homo sapiens
  Table A; Target 89421; HLA-C*04:01; TRPM1; ENSG00000134160; TAA
GKKKKKKK

SEQ ID NO: 89422 - protein, 9 aa, Homo sapiens
  Table A; Target 89422; HLA-B*15:03; TRPM1; ENSG00000134160; TAA
GKYGAEVKL

SEQ ID NO: 89423 - protein, 10 aa, Homo sapiens
  Table A; Target 89423; HLA-A*03:01; TRPM1; ENSG00000134160; TAA
GLQNFEMQPK

SEQ ID NO: 89424 - protein, 10 aa, Homo sapiens
  Table A; Target 89424; HLA-A*03:02; TRPM1; ENSG00000134160; TAA
GLQNFEMQPK

SEQ ID NO: 89425 - protein, 10 aa, Homo sapiens
  Table A; Target 89425; HLA-A*11:01; TRPM1; ENSG00000134160; TAA
GLQNFEMQPK

SEQ ID NO: 89426 - protein, 11 aa, Homo sapiens
  Table A; Target 89426; HLA-A*02:04; TRPM1; ENSG00000134160; TAA
GLQNFEMQPKL

SEQ ID NO: 89427 - protein, 11 aa, Homo sapiens
  Table A; Target 89427; HLA-A*02:03; TRPM1; ENSG00000134160; TAA
GLVVEGGPNVV

SEQ ID NO: 89428 - protein, 9 aa, Homo sapiens
  Table A; Target 89428; HLA-B*55:01; TRPM1; ENSG00000134160; TAA
GMTAEEKKV

SEQ ID NO: 89429 - protein, 10 aa, Homo sapiens
  Table A; Target 89429; HLA-B*07:02; TRPM1; ENSG00000134160; TAA
GPHWPPLGSL

SEQ ID NO: 89430 - protein, 9 aa, Homo sapiens
  Table A; Target 89430; HLA-B*07:02; TRPM1; ENSG00000134160; TAA
GPNVVSIVL

SEQ ID NO: 89431 - protein, 9 aa, Homo sapiens
  Table A; Target 89431; HLA-B*35:01; TRPM1; ENSG00000134160; TAA
GPNVVSIVL

SEQ ID NO: 89432 - protein, 9 aa, Homo sapiens
  Table A; Target 89432; HLA-B*35:03; TRPM1; ENSG00000134160; TAA
GPNVVSIVL

SEQ ID NO: 89433 - protein, 9 aa, Homo sapiens
  Table A; Target 89433; HLA-B*56:01; TRPM1; ENSG00000134160; TAA
GPNVVSIVL

SEQ ID NO: 89434 - protein, 9 aa, Homo sapiens
  Table A; Target 89434; HLA-C*07:02; TRPM1; ENSG00000134160; TAA
GPNVVSIVL

SEQ ID NO: 89435 - protein, 11 aa, Homo sapiens
  Table A; Target 89435; HLA-A*29:02; TRPM1; ENSG00000134160; TAA
GPNVVSIVLEY

SEQ ID NO: 89436 - protein, 11 aa, Homo sapiens
  Table A; Target 89436; HLA-A*30:02; TRPM1; ENSG00000134160; TAA
GPNVVSIVLEY

SEQ ID NO: 89437 - protein, 11 aa, Homo sapiens
  Table A; Target 89437; HLA-B*35:01; TRPM1; ENSG00000134160; TAA
GPNVVSIVLEY

SEQ ID NO: 89438 - protein, 8 aa, Homo sapiens
  Table A; Target 89438; HLA-B*13:02; TRPM1; ENSG00000134160; TAA
GQFTNQHI

SEQ ID NO: 89439 - protein, 9 aa, Homo sapiens
  Table A; Target 89439; HLA-B*13:02; TRPM1; ENSG00000134160; TAA
GQGVPLVGL

SEQ ID NO: 89440 - protein, 9 aa, Homo sapiens
  Table A; Target 89440; HLA-B*15:01; TRPM1; ENSG00000134160; TAA
GQGVPLVGL

SEQ ID NO: 89441 - protein, 9 aa, Homo sapiens
  Table A; Target 89441; HLA-B*15:03; TRPM1; ENSG00000134160; TAA
GQGVPLVGL

SEQ ID NO: 89442 - protein, 9 aa, Homo sapiens
  Table A; Target 89442; HLA-B*27:05; TRPM1; ENSG00000134160; TAA
GQGVPLVGL

SEQ ID NO: 89443 - protein, 9 aa, Homo sapiens
  Table A; Target 89443; HLA-B*39:01; TRPM1; ENSG00000134160; TAA
GQGVPLVGL

SEQ ID NO: 89444 - protein, 11 aa, Homo sapiens
  Table A; Target 89444; HLA-B*13:02; TRPM1; ENSG00000134160; TAA
GQGVPLVGLVV

SEQ ID NO: 89445 - protein, 9 aa, Homo sapiens
  Table A; Target 89445; HLA-A*30:01; TRPM1; ENSG00000134160; TAA
GQQDIEMAI

SEQ ID NO: 89446 - protein, 9 aa, Homo sapiens
  Table A; Target 89446; HLA-B*13:02; TRPM1; ENSG00000134160; TAA
GQQDIEMAI

SEQ ID NO: 89447 - protein, 9 aa, Homo sapiens
  Table A; Target 89447; HLA-B*27:05; TRPM1; ENSG00000134160; TAA
GQQDIEMAI

SEQ ID NO: 89448 - protein, 9 aa, Homo sapiens
  Table A; Target 89448; HLA-B*39:01; TRPM1; ENSG00000134160; TAA
GQQDIEMAI

SEQ ID NO: 89449 - protein, 9 aa, Homo sapiens
  Table A; Target 89449; HLA-C*06:02; TRPM1; ENSG00000134160; TAA
GQQDIEMAI

SEQ ID NO: 89450 - protein, 9 aa, Homo sapiens
  Table A; Target 89450; HLA-B*27:02; TRPM1; ENSG00000134160; TAA
GRASDILSF

SEQ ID NO: 89451 - protein, 9 aa, Homo sapiens
  Table A; Target 89451; HLA-B*27:05; TRPM1; ENSG00000134160; TAA
GRASDILSF

SEQ ID NO: 89452 - protein, 9 aa, Homo sapiens
  Table A; Target 89452; HLA-B*38:01; TRPM1; ENSG00000134160; TAA
GRASDILSF

SEQ ID NO: 89453 - protein, 9 aa, Homo sapiens
  Table A; Target 89453; HLA-C*16:04; TRPM1; ENSG00000134160; TAA
GRASDILSF

SEQ ID NO: 89454 - protein, 10 aa, Homo sapiens
  Table A; Target 89454; HLA-A*03:02; TRPM1; ENSG00000134160; TAA
GSLAPPTDSK

SEQ ID NO: 89455 - protein, 10 aa, Homo sapiens
  Table A; Target 89455; HLA-A*11:01; TRPM1; ENSG00000134160; TAA
GSLAPPTDSK

SEQ ID NO: 89456 - protein, 11 aa, Homo sapiens
  Table A; Target 89456; HLA-A*11:01; TRPM1; ENSG00000134160; TAA
GTISYPLEETK

SEQ ID NO: 89457 - protein, 11 aa, Homo sapiens
  Table A; Target 89457; HLA-B*27:02; TRPM1; ENSG00000134160; TAA
GTISYPLEETK

SEQ ID NO: 89458 - protein, 11 aa, Homo sapiens
  Table A; Target 89458; HLA-A*03:02; TRPM1; ENSG00000134160; TAA
GTLGKYGAEVK

SEQ ID NO: 89459 - protein, 11 aa, Homo sapiens
  Table A; Target 89459; HLA-A*11:01; TRPM1; ENSG00000134160; TAA
GTLGKYGAEVK

SEQ ID NO: 89460 - protein, 10 aa, Homo sapiens
  Table A; Target 89460; HLA-B*39:01; TRPM1; ENSG00000134160; TAA
GTNVSAPDQL

SEQ ID NO: 89461 - protein, 9 aa, Homo sapiens
  Table A; Target 89461; HLA-A*03:01; TRPM1; ENSG00000134160; TAA
GVARQAILH

SEQ ID NO: 89462 - protein, 9 aa, Homo sapiens
  Table A; Target 89462; HLA-A*03:02; TRPM1; ENSG00000134160; TAA
GVARQAILH

SEQ ID NO: 89463 - protein, 10 aa, Homo sapiens
  Table A; Target 89463; HLA-A*25:01; TRPM1; ENSG00000134160; TAA
GVISHVGDAL

SEQ ID NO: 89464 - protein, 10 aa, Homo sapiens
  Table A; Target 89464; HLA-A*26:01; TRPM1; ENSG00000134160; TAA
GVISHVGDAL

SEQ ID NO: 89465 - protein, 10 aa, Homo sapiens
  Table A; Target 89465; HLA-A*30:01; TRPM1; ENSG00000134160; TAA
GVISHVGDAL

SEQ ID NO: 89466 - protein, 10 aa, Homo sapiens
  Table A; Target 89466; HLA-B*07:02; TRPM1; ENSG00000134160; TAA
GVISHVGDAL

SEQ ID NO: 89467 - protein, 10 aa, Homo sapiens
  Table A; Target 89467; HLA-B*15:01; TRPM1; ENSG00000134160; TAA
GVISHVGDAL

SEQ ID NO: 89468 - protein, 10 aa, Homo sapiens
  Table A; Target 89468; HLA-B*27:05; TRPM1; ENSG00000134160; TAA
GVISHVGDAL

SEQ ID NO: 89469 - protein, 10 aa, Homo sapiens
  Table A; Target 89469; HLA-B*40:01; TRPM1; ENSG00000134160; TAA
GVISHVGDAL

SEQ ID NO: 89470 - protein, 11 aa, Homo sapiens
  Table A; Target 89470; HLA-A*03:02; TRPM1; ENSG00000134160; TAA
GVISHVGDALK

SEQ ID NO: 89471 - protein, 11 aa, Homo sapiens
  Table A; Target 89471; HLA-A*11:01; TRPM1; ENSG00000134160; TAA
GVISHVGDALK

SEQ ID NO: 89472 - protein, 10 aa, Homo sapiens
  Table A; Target 89472; HLA-A*25:01; TRPM1; ENSG00000134160; TAA
GVLEFQGGGY

SEQ ID NO: 89473 - protein, 10 aa, Homo sapiens
  Table A; Target 89473; HLA-A*26:01; TRPM1; ENSG00000134160; TAA
GVLEFQGGGY

SEQ ID NO: 89474 - protein, 10 aa, Homo sapiens
  Table A; Target 89474; HLA-A*29:02; TRPM1; ENSG00000134160; TAA
GVLEFQGGGY

SEQ ID NO: 89475 - protein, 10 aa, Homo sapiens
  Table A; Target 89475; HLA-A*30:02; TRPM1; ENSG00000134160; TAA
GVLEFQGGGY

SEQ ID NO: 89476 - protein, 10 aa, Homo sapiens
  Table A; Target 89476; HLA-B*15:01; TRPM1; ENSG00000134160; TAA
GVLEFQGGGY

SEQ ID NO: 89477 - protein, 10 aa, Homo sapiens
  Table A; Target 89477; HLA-B*15:03; TRPM1; ENSG00000134160; TAA
GVLEFQGGGY

SEQ ID NO: 89478 - protein, 10 aa, Homo sapiens
  Table A; Target 89478; HLA-B*39:01; TRPM1; ENSG00000134160; TAA
GVLEFQGGGY

SEQ ID NO: 89479 - protein, 10 aa, Homo sapiens
  Table A; Target 89479; HLA-C*07:04; TRPM1; ENSG00000134160; TAA
GVLEFQGGGY

SEQ ID NO: 89480 - protein, 10 aa, Homo sapiens
  Table A; Target 89480; HLA-C*16:04; TRPM1; ENSG00000134160; TAA
GVLEFQGGGY

SEQ ID NO: 89481 - protein, 9 aa, Homo sapiens
  Table A; Target 89481; HLA-A*29:02; TRPM1; ENSG00000134160; TAA
GVNKYLGPY

SEQ ID NO: 89482 - protein, 9 aa, Homo sapiens
  Table A; Target 89482; HLA-A*30:02; TRPM1; ENSG00000134160; TAA
GVNKYLGPY

SEQ ID NO: 89483 - protein, 8 aa, Homo sapiens
  Table A; Target 89483; HLA-A*30:02; TRPM1; ENSG00000134160; TAA
GVNQDVEY

SEQ ID NO: 89484 - protein, 8 aa, Homo sapiens
  Table A; Target 89484; HLA-B*15:01; TRPM1; ENSG00000134160; TAA
GVNQDVEY

SEQ ID NO: 89485 - protein, 9 aa, Homo sapiens
  Table A; Target 89485; HLA-A*02:07; TRPM1; ENSG00000134160; TAA
GVPLVGLVV

SEQ ID NO: 89486 - protein, 9 aa, Homo sapiens
  Table A; Target 89486; HLA-B*13:02; TRPM1; ENSG00000134160; TAA
GVPLVGLVV

SEQ ID NO: 89487 - protein, 9 aa, Homo sapiens
  Table A; Target 89487; HLA-A*03:01; TRPM1; ENSG00000134160; TAA
GVSTGVISH

SEQ ID NO: 89488 - protein, 9 aa, Homo sapiens
  Table A; Target 89488; HLA-A*03:02; TRPM1; ENSG00000134160; TAA
GVSTGVISH

SEQ ID NO: 89489 - protein, 9 aa, Homo sapiens
  Table A; Target 89489; HLA-A*11:01; TRPM1; ENSG00000134160; TAA
GVSTGVISH

SEQ ID NO: 89490 - protein, 9 aa, Homo sapiens
  Table A; Target 89490; HLA-A*32:01; TRPM1; ENSG00000134160; TAA
GVSTGVISH

SEQ ID NO: 89491 - protein, 9 aa, Homo sapiens
  Table A; Target 89491; HLA-B*15:01; TRPM1; ENSG00000134160; TAA
GVSTGVISH

SEQ ID NO: 89492 - protein, 9 aa, Homo sapiens
  Table A; Target 89492; HLA-C*07:04; TRPM1; ENSG00000134160; TAA
GVSTGVISH

SEQ ID NO: 89493 - protein, 9 aa, Homo sapiens
  Table A; Target 89493; HLA-C*07:06; TRPM1; ENSG00000134160; TAA
GVSTGVISH

SEQ ID NO: 89494 - protein, 10 aa, Homo sapiens
  Table A; Target 89494; HLA-A*02:01; TRPM1; ENSG00000134160; TAA
GVSTGVISHV

SEQ ID NO: 89495 - protein, 10 aa, Homo sapiens
  Table A; Target 89495; HLA-A*02:03; TRPM1; ENSG00000134160; TAA
GVSTGVISHV

SEQ ID NO: 89496 - protein, 10 aa, Homo sapiens
  Table A; Target 89496; HLA-A*03:01; TRPM1; ENSG00000134160; TAA
GVSTGVISHV

SEQ ID NO: 89497 - protein, 10 aa, Homo sapiens
  Table A; Target 89497; HLA-A*26:01; TRPM1; ENSG00000134160; TAA
GVSTGVISHV

SEQ ID NO: 89498 - protein, 10 aa, Homo sapiens
  Table A; Target 89498; HLA-A*68:02; TRPM1; ENSG00000134160; TAA
GVSTGVISHV

SEQ ID NO: 89499 - protein, 10 aa, Homo sapiens
  Table A; Target 89499; HLA-B*13:02; TRPM1; ENSG00000134160; TAA
GVSTGVISHV

SEQ ID NO: 89500 - protein, 10 aa, Homo sapiens
  Table A; Target 89500; HLA-C*02:02; TRPM1; ENSG00000134160; TAA
GVSTGVISHV

SEQ ID NO: 89501 - protein, 10 aa, Homo sapiens
  Table A; Target 89501; HLA-C*16:02; TRPM1; ENSG00000134160; TAA
GVSTGVISHV

SEQ ID NO: 89502 - protein, 8 aa, Homo sapiens
  Table A; Target 89502; HLA-A*29:02; TRPM1; ENSG00000134160; TAA
GYLLLFNY

SEQ ID NO: 89503 - protein, 9 aa, Homo sapiens
  Table A; Target 89503; HLA-A*24:02; TRPM1; ENSG00000134160; TAA
GYSLYRYHF

SEQ ID NO: 89504 - protein, 9 aa, Homo sapiens
  Table A; Target 89504; HLA-A*24:02; TRPM1; ENSG00000134160; TAA
GYSNKAMYI

SEQ ID NO: 89505 - protein, 8 aa, Homo sapiens
  Table A; Target 89505; HLA-B*08:01; TRPM1; ENSG00000134160; TAA
HASSVSSL

SEQ ID NO: 89506 - protein, 8 aa, Homo sapiens
  Table A; Target 89506; HLA-B*35:01; TRPM1; ENSG00000134160; TAA
HASSVSSL

SEQ ID NO: 89507 - protein, 8 aa, Homo sapiens
  Table A; Target 89507; HLA-B*35:03; TRPM1; ENSG00000134160; TAA
HASSVSSL

SEQ ID NO: 89508 - protein, 8 aa, Homo sapiens
  Table A; Target 89508; HLA-B*37:01; TRPM1; ENSG00000134160; TAA
HASSVSSL

SEQ ID NO: 89509 - protein, 8 aa, Homo sapiens
  Table A; Target 89509; HLA-B*51:01; TRPM1; ENSG00000134160; TAA
HASSVSSL

SEQ ID NO: 89510 - protein, 8 aa, Homo sapiens
  Table A; Target 89510; HLA-C*01:02; TRPM1; ENSG00000134160; TAA
HASSVSSL

SEQ ID NO: 89511 - protein, 8 aa, Homo sapiens
  Table A; Target 89511; HLA-C*03:03; TRPM1; ENSG00000134160; TAA
HASSVSSL

SEQ ID NO: 89512 - protein, 8 aa, Homo sapiens
  Table A; Target 89512; HLA-C*03:04; TRPM1; ENSG00000134160; TAA
HASSVSSL

SEQ ID NO: 89513 - protein, 8 aa, Homo sapiens
  Table A; Target 89513; HLA-C*05:01; TRPM1; ENSG00000134160; TAA
HASSVSSL

SEQ ID NO: 89514 - protein, 8 aa, Homo sapiens
  Table A; Target 89514; HLA-C*12:03; TRPM1; ENSG00000134160; TAA
HASSVSSL

SEQ ID NO: 89515 - protein, 8 aa, Homo sapiens
  Table A; Target 89515; HLA-C*16:02; TRPM1; ENSG00000134160; TAA
HASSVSSL

SEQ ID NO: 89516 - protein, 9 aa, Homo sapiens
  Table A; Target 89516; HLA-A*68:01; TRPM1; ENSG00000134160; TAA
HASSVSSLV

SEQ ID NO: 89517 - protein, 9 aa, Homo sapiens
  Table A; Target 89517; HLA-A*68:02; TRPM1; ENSG00000134160; TAA
HASSVSSLV

SEQ ID NO: 89518 - protein, 9 aa, Homo sapiens
  Table A; Target 89518; HLA-B*13:02; TRPM1; ENSG00000134160; TAA
HASSVSSLV

SEQ ID NO: 89519 - protein, 9 aa, Homo sapiens
  Table A; Target 89519; HLA-B*39:01; TRPM1; ENSG00000134160; TAA
HASSVSSLV

SEQ ID NO: 89520 - protein, 9 aa, Homo sapiens
  Table A; Target 89520; HLA-B*51:01; TRPM1; ENSG00000134160; TAA
HASSVSSLV

SEQ ID NO: 89521 - protein, 9 aa, Homo sapiens
  Table A; Target 89521; HLA-C*02:02; TRPM1; ENSG00000134160; TAA
HASSVSSLV

SEQ ID NO: 89522 - protein, 9 aa, Homo sapiens
  Table A; Target 89522; HLA-C*03:03; TRPM1; ENSG00000134160; TAA
HASSVSSLV

SEQ ID NO: 89523 - protein, 9 aa, Homo sapiens
  Table A; Target 89523; HLA-C*03:04; TRPM1; ENSG00000134160; TAA
HASSVSSLV

SEQ ID NO: 89524 - protein, 9 aa, Homo sapiens
  Table A; Target 89524; HLA-C*05:01; TRPM1; ENSG00000134160; TAA
HASSVSSLV

SEQ ID NO: 89525 - protein, 9 aa, Homo sapiens
  Table A; Target 89525; HLA-C*07:06; TRPM1; ENSG00000134160; TAA
HASSVSSLV

SEQ ID NO: 89526 - protein, 9 aa, Homo sapiens
  Table A; Target 89526; HLA-C*12:03; TRPM1; ENSG00000134160; TAA
HASSVSSLV

SEQ ID NO: 89527 - protein, 9 aa, Homo sapiens
  Table A; Target 89527; HLA-C*16:01; TRPM1; ENSG00000134160; TAA
HASSVSSLV

SEQ ID NO: 89528 - protein, 9 aa, Homo sapiens
  Table A; Target 89528; HLA-C*16:02; TRPM1; ENSG00000134160; TAA
HASSVSSLV

SEQ ID NO: 89529 - protein, 9 aa, Homo sapiens
  Table A; Target 89529; HLA-C*16:04; TRPM1; ENSG00000134160; TAA
HASSVSSLV

SEQ ID NO: 89530 - protein, 10 aa, Homo sapiens
  Table A; Target 89530; HLA-B*38:01; TRPM1; ENSG00000134160; TAA
HASSVSSLVI

SEQ ID NO: 89531 - protein, 10 aa, Homo sapiens
  Table A; Target 89531; HLA-B*39:01; TRPM1; ENSG00000134160; TAA
HASSVSSLVI

SEQ ID NO: 89532 - protein, 9 aa, Homo sapiens
  Table A; Target 89532; HLA-B*40:01; TRPM1; ENSG00000134160; TAA
HDEQIAMKL

SEQ ID NO: 89533 - protein, 8 aa, Homo sapiens
  Table A; Target 89533; HLA-A*30:01; TRPM1; ENSG00000134160; TAA
HEFEEQCV

SEQ ID NO: 89534 - protein, 8 aa, Homo sapiens
  Table A; Target 89534; HLA-B*13:02; TRPM1; ENSG00000134160; TAA
HEFEEQCV

SEQ ID NO: 89535 - protein, 8 aa, Homo sapiens
  Table A; Target 89535; HLA-B*18:01; TRPM1; ENSG00000134160; TAA
HEFEEQCV

SEQ ID NO: 89536 - protein, 8 aa, Homo sapiens
  Table A; Target 89536; HLA-B*40:02; TRPM1; ENSG00000134160; TAA
HEFEEQCV

SEQ ID NO: 89537 - protein, 8 aa, Homo sapiens
  Table A; Target 89537; HLA-B*49:01; TRPM1; ENSG00000134160; TAA
HEFEEQCV

SEQ ID NO: 89538 - protein, 9 aa, Homo sapiens
  Table A; Target 89538; HLA-B*40:01; TRPM1; ENSG00000134160; TAA
HESSESDLV

SEQ ID NO: 89539 - protein, 9 aa, Homo sapiens
  Table A; Target 89539; HLA-B*49:01; TRPM1; ENSG00000134160; TAA
HESSESDLV

SEQ ID NO: 89540 - protein, 9 aa, Homo sapiens
  Table A; Target 89540; HLA-A*23:01; TRPM1; ENSG00000134160; TAA
HFNGEELLF

SEQ ID NO: 89541 - protein, 9 aa, Homo sapiens
  Table A; Target 89541; HLA-A*24:02; TRPM1; ENSG00000134160; TAA
HFNGEELLF

SEQ ID NO: 89542 - protein, 9 aa, Homo sapiens
  Table A; Target 89542; HLA-A*29:02; TRPM1; ENSG00000134160; TAA
HFNGEELLF

SEQ ID NO: 89543 - protein, 10 aa, Homo sapiens
  Table A; Target 89543; HLA-B*38:01; TRPM1; ENSG00000134160; TAA
HHVAEAIPRI

SEQ ID NO: 89544 - protein, 9 aa, Homo sapiens
  Table A; Target 89544; HLA-A*68:02; TRPM1; ENSG00000134160; TAA
HISLIDIGL

SEQ ID NO: 89545 - protein, 9 aa, Homo sapiens
  Table A; Target 89545; HLA-A*02:03; TRPM1; ENSG00000134160; TAA
HIYIIIMRL

SEQ ID NO: 89546 - protein, 9 aa, Homo sapiens
  Table A; Target 89546; HLA-A*02:04; TRPM1; ENSG00000134160; TAA
HIYIIIMRL

SEQ ID NO: 89547 - protein, 9 aa, Homo sapiens
  Table A; Target 89547; HLA-A*02:07; TRPM1; ENSG00000134160; TAA
HIYIIIMRL

SEQ ID NO: 89548 - protein, 9 aa, Homo sapiens
  Table A; Target 89548; HLA-A*68:02; TRPM1; ENSG00000134160; TAA
HIYIIIMRL

SEQ ID NO: 89549 - protein, 9 aa, Homo sapiens
  Table A; Target 89549; HLA-A*02:04; TRPM1; ENSG00000134160; TAA
HLMVKDWQL

SEQ ID NO: 89550 - protein, 8 aa, Homo sapiens
  Table A; Target 89550; HLA-B*08:01; TRPM1; ENSG00000134160; TAA
HPRNVKSI

SEQ ID NO: 89551 - protein, 8 aa, Homo sapiens
  Table A; Target 89551; HLA-B*51:01; TRPM1; ENSG00000134160; TAA
HPRNVKSI

SEQ ID NO: 89552 - protein, 8 aa, Homo sapiens
  Table A; Target 89552; HLA-B*13:02; TRPM1; ENSG00000134160; TAA
HSTDIPYI

SEQ ID NO: 89553 - protein, 8 aa, Homo sapiens
  Table A; Target 89553; HLA-B*51:01; TRPM1; ENSG00000134160; TAA
HSTDIPYI

SEQ ID NO: 89554 - protein, 9 aa, Homo sapiens
  Table A; Target 89554; HLA-A*68:02; TRPM1; ENSG00000134160; TAA
HSTDIPYIV

SEQ ID NO: 89555 - protein, 9 aa, Homo sapiens
  Table A; Target 89555; HLA-B*13:02; TRPM1; ENSG00000134160; TAA
HSTDIPYIV

SEQ ID NO: 89556 - protein, 9 aa, Homo sapiens
  Table A; Target 89556; HLA-B*35:03; TRPM1; ENSG00000134160; TAA
HSTDIPYIV

SEQ ID NO: 89557 - protein, 9 aa, Homo sapiens
  Table A; Target 89557; HLA-B*54:01; TRPM1; ENSG00000134160; TAA
HSTDIPYIV

SEQ ID NO: 89558 - protein, 9 aa, Homo sapiens
  Table A; Target 89558; HLA-C*02:02; TRPM1; ENSG00000134160; TAA
HSTDIPYIV

SEQ ID NO: 89559 - protein, 9 aa, Homo sapiens
  Table A; Target 89559; HLA-C*12:03; TRPM1; ENSG00000134160; TAA
HSTDIPYIV

SEQ ID NO: 89560 - protein, 10 aa, Homo sapiens
  Table A; Target 89560; HLA-A*01:01; TRPM1; ENSG00000134160; TAA
HTQSYPTDSY

SEQ ID NO: 89561 - protein, 10 aa, Homo sapiens
  Table A; Target 89561; HLA-A*25:01; TRPM1; ENSG00000134160; TAA
HTQSYPTDSY

SEQ ID NO: 89562 - protein, 10 aa, Homo sapiens
  Table A; Target 89562; HLA-A*26:01; TRPM1; ENSG00000134160; TAA
HTQSYPTDSY

SEQ ID NO: 89563 - protein, 10 aa, Homo sapiens
  Table A; Target 89563; HLA-A*30:02; TRPM1; ENSG00000134160; TAA
HTQSYPTDSY

SEQ ID NO: 89564 - protein, 10 aa, Homo sapiens
  Table A; Target 89564; HLA-A*32:01; TRPM1; ENSG00000134160; TAA
HTQSYPTDSY

SEQ ID NO: 89565 - protein, 10 aa, Homo sapiens
  Table A; Target 89565; HLA-B*15:01; TRPM1; ENSG00000134160; TAA
HTQSYPTDSY

SEQ ID NO: 89566 - protein, 10 aa, Homo sapiens
  Table A; Target 89566; HLA-B*39:01; TRPM1; ENSG00000134160; TAA
HTQSYPTDSY

SEQ ID NO: 89567 - protein, 10 aa, Homo sapiens
  Table A; Target 89567; HLA-C*07:01; TRPM1; ENSG00000134160; TAA
HTQSYPTDSY

SEQ ID NO: 89568 - protein, 8 aa, Homo sapiens
  Table A; Target 89568; HLA-A*68:01; TRPM1; ENSG00000134160; TAA
HVAEAIPR

SEQ ID NO: 89569 - protein, 8 aa, Homo sapiens
  Table A; Target 89569; HLA-C*07:06; TRPM1; ENSG00000134160; TAA
HVAEAIPR

SEQ ID NO: 89570 - protein, 9 aa, Homo sapiens
  Table A; Target 89570; HLA-A*02:01; TRPM1; ENSG00000134160; TAA
HVAEAIPRI

SEQ ID NO: 89571 - protein, 9 aa, Homo sapiens
  Table A; Target 89571; HLA-A*02:03; TRPM1; ENSG00000134160; TAA
HVAEAIPRI

SEQ ID NO: 89572 - protein, 9 aa, Homo sapiens
  Table A; Target 89572; HLA-A*02:04; TRPM1; ENSG00000134160; TAA
HVAEAIPRI

SEQ ID NO: 89573 - protein, 9 aa, Homo sapiens
  Table A; Target 89573; HLA-A*02:07; TRPM1; ENSG00000134160; TAA
HVAEAIPRI

SEQ ID NO: 89574 - protein, 9 aa, Homo sapiens
  Table A; Target 89574; HLA-A*25:01; TRPM1; ENSG00000134160; TAA
HVAEAIPRI

SEQ ID NO: 89575 - protein, 9 aa, Homo sapiens
  Table A; Target 89575; HLA-A*26:01; TRPM1; ENSG00000134160; TAA
HVAEAIPRI

SEQ ID NO: 89576 - protein, 9 aa, Homo sapiens
  Table A; Target 89576; HLA-A*68:02; TRPM1; ENSG00000134160; TAA
HVAEAIPRI

SEQ ID NO: 89577 - protein, 9 aa, Homo sapiens
  Table A; Target 89577; HLA-B*13:02; TRPM1; ENSG00000134160; TAA
HVAEAIPRI

SEQ ID NO: 89578 - protein, 9 aa, Homo sapiens
  Table A; Target 89578; HLA-B*35:03; TRPM1; ENSG00000134160; TAA
HVAEAIPRI

SEQ ID NO: 89579 - protein, 9 aa, Homo sapiens
  Table A; Target 89579; HLA-B*38:01; TRPM1; ENSG00000134160; TAA
HVAEAIPRI

SEQ ID NO: 89580 - protein, 9 aa, Homo sapiens
  Table A; Target 89580; HLA-B*51:01; TRPM1; ENSG00000134160; TAA
HVAEAIPRI

SEQ ID NO: 89581 - protein, 9 aa, Homo sapiens
  Table A; Target 89581; HLA-B*58:01; TRPM1; ENSG00000134160; TAA
HVAEAIPRI

SEQ ID NO: 89582 - protein, 9 aa, Homo sapiens
  Table A; Target 89582; HLA-C*02:02; TRPM1; ENSG00000134160; TAA
HVAEAIPRI

SEQ ID NO: 89583 - protein, 9 aa, Homo sapiens
  Table A; Target 89583; HLA-C*07:06; TRPM1; ENSG00000134160; TAA
HVAEAIPRI

SEQ ID NO: 89584 - protein, 11 aa, Homo sapiens
  Table A; Target 89584; HLA-A*31:01; TRPM1; ENSG00000134160; TAA
HVAEAIPRIPR

SEQ ID NO: 89585 - protein, 8 aa, Homo sapiens
  Table A; Target 89585; HLA-B*15:01; TRPM1; ENSG00000134160; TAA
IAMKLLTY

SEQ ID NO: 89586 - protein, 8 aa, Homo sapiens
  Table A; Target 89586; HLA-B*15:03; TRPM1; ENSG00000134160; TAA
IAMKLLTY

SEQ ID NO: 89587 - protein, 8 aa, Homo sapiens
  Table A; Target 89587; HLA-B*35:01; TRPM1; ENSG00000134160; TAA
IAMKLLTY

SEQ ID NO: 89588 - protein, 8 aa, Homo sapiens
  Table A; Target 89588; HLA-B*46:01; TRPM1; ENSG00000134160; TAA
IAMKLLTY

SEQ ID NO: 89589 - protein, 8 aa, Homo sapiens
  Table A; Target 89589; HLA-C*02:02; TRPM1; ENSG00000134160; TAA
IAMKLLTY

SEQ ID NO: 89590 - protein, 9 aa, Homo sapiens
  Table A; Target 89590; HLA-B*57:01; TRPM1; ENSG00000134160; TAA
IARSQIFVF

SEQ ID NO: 89591 - protein, 9 aa, Homo sapiens
  Table A; Target 89591; HLA-C*02:02; TRPM1; ENSG00000134160; TAA
IARSQIFVF

SEQ ID NO: 89592 - protein, 8 aa, Homo sapiens
  Table A; Target 89592; HLA-B*58:01; TRPM1; ENSG00000134160; TAA
IAVFNNTF

SEQ ID NO: 89593 - protein, 9 aa, Homo sapiens
  Table A; Target 89593; HLA-C*02:02; TRPM1; ENSG00000134160; TAA
IAVFNNTFF

SEQ ID NO: 89594 - protein, 9 aa, Homo sapiens
  Table A; Target 89594; HLA-A*26:01; TRPM1; ENSG00000134160; TAA
IDIGLVLEY

SEQ ID NO: 89595 - protein, 9 aa, Homo sapiens
  Table A; Target 89595; HLA-A*29:02; TRPM1; ENSG00000134160; TAA
IDIGLVLEY

SEQ ID NO: 89596 - protein, 9 aa, Homo sapiens
  Table A; Target 89596; HLA-B*18:01; TRPM1; ENSG00000134160; TAA
IDIGLVLEY

SEQ ID NO: 89597 - protein, 9 aa, Homo sapiens
  Table A; Target 89597; HLA-B*27:02; TRPM1; ENSG00000134160; TAA
IDIGLVLEY

SEQ ID NO: 89598 - protein, 9 aa, Homo sapiens
  Table A; Target 89598; HLA-B*35:01; TRPM1; ENSG00000134160; TAA
IDIGLVLEY

SEQ ID NO: 89599 - protein, 9 aa, Homo sapiens
  Table A; Target 89599; HLA-B*44:02; TRPM1; ENSG00000134160; TAA
IDIGLVLEY

SEQ ID NO: 89600 - protein, 9 aa, Homo sapiens
  Table A; Target 89600; HLA-B*44:03; TRPM1; ENSG00000134160; TAA
IDIGLVLEY

SEQ ID NO: 89601 - protein, 9 aa, Homo sapiens
  Table A; Target 89601; HLA-C*02:02; TRPM1; ENSG00000134160; TAA
IDIGLVLEY

SEQ ID NO: 89602 - protein, 9 aa, Homo sapiens
  Table A; Target 89602; HLA-C*12:03; TRPM1; ENSG00000134160; TAA
IDIGLVLEY

SEQ ID NO: 89603 - protein, 9 aa, Homo sapiens
  Table A; Target 89603; HLA-C*16:04; TRPM1; ENSG00000134160; TAA
IDIGLVLEY

SEQ ID NO: 89604 - protein, 8 aa, Homo sapiens
  Table A; Target 89604; HLA-B*40:02; TRPM1; ENSG00000134160; TAA
IDVDDPAV

SEQ ID NO: 89605 - protein, 10 aa, Homo sapiens
  Table A; Target 89605; HLA-A*33:01; TRPM1; ENSG00000134160; TAA
IDVDDPAVSR

SEQ ID NO: 89606 - protein, 10 aa, Homo sapiens
  Table A; Target 89606; HLA-A*33:03; TRPM1; ENSG00000134160; TAA
IDVDDPAVSR

SEQ ID NO: 89607 - protein, 10 aa, Homo sapiens
  Table A; Target 89607; HLA-A*68:01; TRPM1; ENSG00000134160; TAA
IDVDDPAVSR

SEQ ID NO: 89608 - protein, 10 aa, Homo sapiens
  Table A; Target 89608; HLA-B*27:02; TRPM1; ENSG00000134160; TAA
IDVDDPAVSR

SEQ ID NO: 89609 - protein, 10 aa, Homo sapiens
  Table A; Target 89609; HLA-C*07:06; TRPM1; ENSG00000134160; TAA
IDVDDPAVSR

SEQ ID NO: 89610 - protein, 9 aa, Homo sapiens
  Table A; Target 89610; HLA-A*30:01; TRPM1; ENSG00000134160; TAA
IEGTISYPL

SEQ ID NO: 89611 - protein, 9 aa, Homo sapiens
  Table A; Target 89611; HLA-B*18:01; TRPM1; ENSG00000134160; TAA
IEGTISYPL

SEQ ID NO: 89612 - protein, 9 aa, Homo sapiens
  Table A; Target 89612; HLA-B*40:01; TRPM1; ENSG00000134160; TAA
IEGTISYPL

SEQ ID NO: 89613 - protein, 8 aa, Homo sapiens
  Table A; Target 89613; HLA-B*18:01; TRPM1; ENSG00000134160; TAA
IEMAILTA

SEQ ID NO: 89614 - protein, 8 aa, Homo sapiens
  Table A; Target 89614; HLA-B*49:01; TRPM1; ENSG00000134160; TAA
IEMAILTA

SEQ ID NO: 89615 - protein, 9 aa, Homo sapiens
  Table A; Target 89615; HLA-A*23:01; TRPM1; ENSG00000134160; TAA
IEMAILTAL

SEQ ID NO: 89616 - protein, 9 aa, Homo sapiens
  Table A; Target 89616; HLA-A*30:01; TRPM1; ENSG00000134160; TAA
IEMAILTAL

SEQ ID NO: 89617 - protein, 9 aa, Homo sapiens
  Table A; Target 89617; HLA-B*15:01; TRPM1; ENSG00000134160; TAA
IEMAILTAL

SEQ ID NO: 89618 - protein, 9 aa, Homo sapiens
  Table A; Target 89618; HLA-B*15:03; TRPM1; ENSG00000134160; TAA
IEMAILTAL

SEQ ID NO: 89619 - protein, 9 aa, Homo sapiens
  Table A; Target 89619; HLA-B*18:01; TRPM1; ENSG00000134160; TAA
IEMAILTAL

SEQ ID NO: 89620 - protein, 9 aa, Homo sapiens
  Table A; Target 89620; HLA-B*37:01; TRPM1; ENSG00000134160; TAA
IEMAILTAL

SEQ ID NO: 89621 - protein, 9 aa, Homo sapiens
  Table A; Target 89621; HLA-B*40:01; TRPM1; ENSG00000134160; TAA
IEMAILTAL

SEQ ID NO: 89622 - protein, 9 aa, Homo sapiens
  Table A; Target 89622; HLA-B*40:02; TRPM1; ENSG00000134160; TAA
IEMAILTAL

SEQ ID NO: 89623 - protein, 9 aa, Homo sapiens
  Table A; Target 89623; HLA-B*44:02; TRPM1; ENSG00000134160; TAA
IEMAILTAL

SEQ ID NO: 89624 - protein, 9 aa, Homo sapiens
  Table A; Target 89624; HLA-B*44:03; TRPM1; ENSG00000134160; TAA
IEMAILTAL

SEQ ID NO: 89625 - protein, 9 aa, Homo sapiens
  Table A; Target 89625; HLA-B*46:01; TRPM1; ENSG00000134160; TAA
IEMAILTAL

SEQ ID NO: 89626 - protein, 9 aa, Homo sapiens
  Table A; Target 89626; HLA-B*49:01; TRPM1; ENSG00000134160; TAA
IEMAILTAL

SEQ ID NO: 89627 - protein, 9 aa, Homo sapiens
  Table A; Target 89627; HLA-C*02:02; TRPM1; ENSG00000134160; TAA
IEMAILTAL

SEQ ID NO: 89628 - protein, 9 aa, Homo sapiens
  Table A; Target 89628; HLA-C*03:03; TRPM1; ENSG00000134160; TAA
IEMAILTAL

SEQ ID NO: 89629 - protein, 9 aa, Homo sapiens
  Table A; Target 89629; HLA-C*03:04; TRPM1; ENSG00000134160; TAA
IEMAILTAL

SEQ ID NO: 89630 - protein, 9 aa, Homo sapiens
  Table A; Target 89630; HLA-C*14:02; TRPM1; ENSG00000134160; TAA
IEMAILTAL

SEQ ID NO: 89631 - protein, 9 aa, Homo sapiens
  Table A; Target 89631; HLA-C*16:04; TRPM1; ENSG00000134160; TAA
IEMAILTAL

SEQ ID NO: 89632 - protein, 10 aa, Homo sapiens
  Table A; Target 89632; HLA-B*44:02; TRPM1; ENSG00000134160; TAA
IEMAILTALL

SEQ ID NO: 89633 - protein, 10 aa, Homo sapiens
  Table A; Target 89633; HLA-B*49:01; TRPM1; ENSG00000134160; TAA
IEMAILTALL

SEQ ID NO: 89634 - protein, 9 aa, Homo sapiens
  Table A; Target 89634; HLA-B*18:01; TRPM1; ENSG00000134160; TAA
IENGVNMQH

SEQ ID NO: 89635 - protein, 9 aa, Homo sapiens
  Table A; Target 89635; HLA-B*44:03; TRPM1; ENSG00000134160; TAA
IENGVNMQH

SEQ ID NO: 89636 - protein, 9 aa, Homo sapiens
  Table A; Target 89636; HLA-B*49:01; TRPM1; ENSG00000134160; TAA
IENGVNMQH

SEQ ID NO: 89637 - protein, 9 aa, Homo sapiens
  Table A; Target 89637; HLA-C*16:04; TRPM1; ENSG00000134160; TAA
IENGVNMQH

SEQ ID NO: 89638 - protein, 10 aa, Homo sapiens
  Table A; Target 89638; HLA-A*23:01; TRPM1; ENSG00000134160; TAA
IENGVNMQHF

SEQ ID NO: 89639 - protein, 10 aa, Homo sapiens
  Table A; Target 89639; HLA-A*24:02; TRPM1; ENSG00000134160; TAA
IENGVNMQHF

SEQ ID NO: 89640 - protein, 10 aa, Homo sapiens
  Table A; Target 89640; HLA-A*30:01; TRPM1; ENSG00000134160; TAA
IENGVNMQHF

SEQ ID NO: 89641 - protein, 10 aa, Homo sapiens
  Table A; Target 89641; HLA-B*18:01; TRPM1; ENSG00000134160; TAA
IENGVNMQHF

SEQ ID NO: 89642 - protein, 10 aa, Homo sapiens
  Table A; Target 89642; HLA-B*27:02; TRPM1; ENSG00000134160; TAA
IENGVNMQHF

SEQ ID NO: 89643 - protein, 10 aa, Homo sapiens
  Table A; Target 89643; HLA-B*37:01; TRPM1; ENSG00000134160; TAA
IENGVNMQHF

SEQ ID NO: 89644 - protein, 10 aa, Homo sapiens
  Table A; Target 89644; HLA-B*40:01; TRPM1; ENSG00000134160; TAA
IENGVNMQHF

SEQ ID NO: 89645 - protein, 10 aa, Homo sapiens
  Table A; Target 89645; HLA-B*40:02; TRPM1; ENSG00000134160; TAA
IENGVNMQHF

SEQ ID NO: 89646 - protein, 10 aa, Homo sapiens
  Table A; Target 89646; HLA-B*44:02; TRPM1; ENSG00000134160; TAA
IENGVNMQHF

SEQ ID NO: 89647 - protein, 10 aa, Homo sapiens
  Table A; Target 89647; HLA-B*44:03; TRPM1; ENSG00000134160; TAA
IENGVNMQHF

SEQ ID NO: 89648 - protein, 10 aa, Homo sapiens
  Table A; Target 89648; HLA-B*49:01; TRPM1; ENSG00000134160; TAA
IENGVNMQHF

SEQ ID NO: 89649 - protein, 10 aa, Homo sapiens
  Table A; Target 89649; HLA-C*16:04; TRPM1; ENSG00000134160; TAA
IENGVNMQHF

SEQ ID NO: 89650 - protein, 9 aa, Homo sapiens
  Table A; Target 89650; HLA-A*02:04; TRPM1; ENSG00000134160; TAA
IIFWYIRVL

SEQ ID NO: 89651 - protein, 8 aa, Homo sapiens
  Table A; Target 89651; HLA-B*39:01; TRPM1; ENSG00000134160; TAA
ILADNGTL

SEQ ID NO: 89652 - protein, 10 aa, Homo sapiens
  Table A; Target 89652; HLA-A*03:01; TRPM1; ENSG00000134160; TAA
ILADNGTLGK

SEQ ID NO: 89653 - protein, 10 aa, Homo sapiens
  Table A; Target 89653; HLA-A*03:02; TRPM1; ENSG00000134160; TAA
ILADNGTLGK

SEQ ID NO: 89654 - protein, 10 aa, Homo sapiens
  Table A; Target 89654; HLA-A*11:01; TRPM1; ENSG00000134160; TAA
ILADNGTLGK

SEQ ID NO: 89655 - protein, 10 aa, Homo sapiens
  Table A; Target 89655; HLA-A*68:01; TRPM1; ENSG00000134160; TAA
ILADNGTLGK

SEQ ID NO: 89656 - protein, 11 aa, Homo sapiens
  Table A; Target 89656; HLA-A*01:01; TRPM1; ENSG00000134160; TAA
ILADNGTLGKY

SEQ ID NO: 89657 - protein, 11 aa, Homo sapiens
  Table A; Target 89657; HLA-A*03:01; TRPM1; ENSG00000134160; TAA
ILADNGTLGKY

SEQ ID NO: 89658 - protein, 11 aa, Homo sapiens
  Table A; Target 89658; HLA-A*25:01; TRPM1; ENSG00000134160; TAA
ILADNGTLGKY

SEQ ID NO: 89659 - protein, 11 aa, Homo sapiens
  Table A; Target 89659; HLA-A*26:01; TRPM1; ENSG00000134160; TAA
ILADNGTLGKY

SEQ ID NO: 89660 - protein, 11 aa, Homo sapiens
  Table A; Target 89660; HLA-A*29:02; TRPM1; ENSG00000134160; TAA
ILADNGTLGKY

SEQ ID NO: 89661 - protein, 11 aa, Homo sapiens
  Table A; Target 89661; HLA-A*30:02; TRPM1; ENSG00000134160; TAA
ILADNGTLGKY

SEQ ID NO: 89662 - protein, 11 aa, Homo sapiens
  Table A; Target 89662; HLA-A*32:01; TRPM1; ENSG00000134160; TAA
ILADNGTLGKY

SEQ ID NO: 89663 - protein, 11 aa, Homo sapiens
  Table A; Target 89663; HLA-B*15:01; TRPM1; ENSG00000134160; TAA
ILADNGTLGKY

SEQ ID NO: 89664 - protein, 11 aa, Homo sapiens
  Table A; Target 89664; HLA-B*15:03; TRPM1; ENSG00000134160; TAA
ILADNGTLGKY

SEQ ID NO: 89665 - protein, 11 aa, Homo sapiens
  Table A; Target 89665; HLA-B*46:01; TRPM1; ENSG00000134160; TAA
ILADNGTLGKY

SEQ ID NO: 89666 - protein, 11 aa, Homo sapiens
  Table A; Target 89666; HLA-B*58:01; TRPM1; ENSG00000134160; TAA
ILADNGTLGKY

SEQ ID NO: 89667 - protein, 11 aa, Homo sapiens
  Table A; Target 89667; HLA-C*02:02; TRPM1; ENSG00000134160; TAA
ILADNGTLGKY

SEQ ID NO: 89668 - protein, 11 aa, Homo sapiens
  Table A; Target 89668; HLA-C*07:04; TRPM1; ENSG00000134160; TAA
ILADNGTLGKY

SEQ ID NO: 89669 - protein, 11 aa, Homo sapiens
  Table A; Target 89669; HLA-C*16:02; TRPM1; ENSG00000134160; TAA
ILADNGTLGKY

SEQ ID NO: 89670 - protein, 9 aa, Homo sapiens
  Table A; Target 89670; HLA-A*29:02; TRPM1; ENSG00000134160; TAA
ILFLEFRTY

SEQ ID NO: 89671 - protein, 10 aa, Homo sapiens
  Table A; Target 89671; HLA-A*24:02; TRPM1; ENSG00000134160; TAA
ILHPEEKPSW

SEQ ID NO: 89672 - protein, 10 aa, Homo sapiens
  Table A; Target 89672; HLA-A*25:01; TRPM1; ENSG00000134160; TAA
ILHPEEKPSW

SEQ ID NO: 89673 - protein, 10 aa, Homo sapiens
  Table A; Target 89673; HLA-A*32:01; TRPM1; ENSG00000134160; TAA
ILHPEEKPSW

SEQ ID NO: 89674 - protein, 10 aa, Homo sapiens
  Table A; Target 89674; HLA-B*57:01; TRPM1; ENSG00000134160; TAA
ILHPEEKPSW

SEQ ID NO: 89675 - protein, 10 aa, Homo sapiens
  Table A; Target 89675; HLA-B*58:01; TRPM1; ENSG00000134160; TAA
ILHPEEKPSW

SEQ ID NO: 89676 - protein, 9 aa, Homo sapiens
  Table A; Target 89676; HLA-A*02:07; TRPM1; ENSG00000134160; TAA
ILLPPTILF

SEQ ID NO: 89677 - protein, 9 aa, Homo sapiens
  Table A; Target 89677; HLA-A*23:01; TRPM1; ENSG00000134160; TAA
ILLPPTILF

SEQ ID NO: 89678 - protein, 9 aa, Homo sapiens
  Table A; Target 89678; HLA-A*24:02; TRPM1; ENSG00000134160; TAA
ILLPPTILF

SEQ ID NO: 89679 - protein, 9 aa, Homo sapiens
  Table A; Target 89679; HLA-A*29:02; TRPM1; ENSG00000134160; TAA
ILLPPTILF

SEQ ID NO: 89680 - protein, 9 aa, Homo sapiens
  Table A; Target 89680; HLA-B*57:01; TRPM1; ENSG00000134160; TAA
ILLPPTILF

SEQ ID NO: 89681 - protein, 10 aa, Homo sapiens
  Table A; Target 89681; HLA-A*02:01; TRPM1; ENSG00000134160; TAA
ILLPPTILFL

SEQ ID NO: 89682 - protein, 10 aa, Homo sapiens
  Table A; Target 89682; HLA-A*02:04; TRPM1; ENSG00000134160; TAA
ILLPPTILFL

SEQ ID NO: 89683 - protein, 10 aa, Homo sapiens
  Table A; Target 89683; HLA-A*02:07; TRPM1; ENSG00000134160; TAA
ILLPPTILFL

SEQ ID NO: 89684 - protein, 9 aa, Homo sapiens
  Table A; Target 89684; HLA-A*02:01; TRPM1; ENSG00000134160; TAA
ILMSEPGKL

SEQ ID NO: 89685 - protein, 9 aa, Homo sapiens
  Table A; Target 89685; HLA-A*02:03; TRPM1; ENSG00000134160; TAA
ILMSEPGKL

SEQ ID NO: 89686 - protein, 9 aa, Homo sapiens
  Table A; Target 89686; HLA-A*02:04; TRPM1; ENSG00000134160; TAA
ILMSEPGKL

SEQ ID NO: 89687 - protein, 9 aa, Homo sapiens
  Table A; Target 89687; HLA-A*03:01; TRPM1; ENSG00000134160; TAA
ILMSEPGKL

SEQ ID NO: 89688 - protein, 9 aa, Homo sapiens
  Table A; Target 89688; HLA-C*14:02; TRPM1; ENSG00000134160; TAA
ILMSEPGKL

SEQ ID NO: 89689 - protein, 9 aa, Homo sapiens
  Table A; Target 89689; HLA-A*29:02; TRPM1; ENSG00000134160; TAA
ILRLQNQPY

SEQ ID NO: 89690 - protein, 9 aa, Homo sapiens
  Table A; Target 89690; HLA-A*30:02; TRPM1; ENSG00000134160; TAA
ILRLQNQPY

SEQ ID NO: 89691 - protein, 9 aa, Homo sapiens
  Table A; Target 89691; HLA-B*46:01; TRPM1; ENSG00000134160; TAA
ILRLQNQPY

SEQ ID NO: 89692 - protein, 9 aa, Homo sapiens
  Table A; Target 89692; HLA-A*02:04; TRPM1; ENSG00000134160; TAA
ILSHIYIII

SEQ ID NO: 89693 - protein, 9 aa, Homo sapiens
  Table A; Target 89693; HLA-A*23:01; TRPM1; ENSG00000134160; TAA
IMLVVLMSF

SEQ ID NO: 89694 - protein, 9 aa, Homo sapiens
  Table A; Target 89694; HLA-B*35:03; TRPM1; ENSG00000134160; TAA
INSADGYSL

SEQ ID NO: 89695 - protein, 9 aa, Homo sapiens
  Table A; Target 89695; HLA-B*38:01; TRPM1; ENSG00000134160; TAA
INSADGYSL

SEQ ID NO: 89696 - protein, 9 aa, Homo sapiens
  Table A; Target 89696; HLA-B*39:01; TRPM1; ENSG00000134160; TAA
INSADGYSL

SEQ ID NO: 89697 - protein, 9 aa, Homo sapiens
  Table A; Target 89697; HLA-C*03:04; TRPM1; ENSG00000134160; TAA
INSADGYSL

SEQ ID NO: 89698 - protein, 9 aa, Homo sapiens
  Table A; Target 89698; HLA-C*14:02; TRPM1; ENSG00000134160; TAA
INSADGYSL

SEQ ID NO: 89699 - protein, 10 aa, Homo sapiens
  Table A; Target 89699; HLA-A*01:01; TRPM1; ENSG00000134160; TAA
INSADGYSLY

SEQ ID NO: 89700 - protein, 10 aa, Homo sapiens
  Table A; Target 89700; HLA-A*29:02; TRPM1; ENSG00000134160; TAA
INSADGYSLY

SEQ ID NO: 89701 - protein, 10 aa, Homo sapiens
  Table A; Target 89701; HLA-A*25:01; TRPM1; ENSG00000134160; TAA
IPIGTKICEF

SEQ ID NO: 89702 - protein, 10 aa, Homo sapiens
  Table A; Target 89702; HLA-B*07:02; TRPM1; ENSG00000134160; TAA
IPIGTKICEF

SEQ ID NO: 89703 - protein, 10 aa, Homo sapiens
  Table A; Target 89703; HLA-B*35:01; TRPM1; ENSG00000134160; TAA
IPIGTKICEF

SEQ ID NO: 89704 - protein, 10 aa, Homo sapiens
  Table A; Target 89704; HLA-B*35:03; TRPM1; ENSG00000134160; TAA
IPIGTKICEF

SEQ ID NO: 89705 - protein, 10 aa, Homo sapiens
  Table A; Target 89705; HLA-B*55:01; TRPM1; ENSG00000134160; TAA
IPIGTKICEF

SEQ ID NO: 89706 - protein, 10 aa, Homo sapiens
  Table A; Target 89706; HLA-B*56:01; TRPM1; ENSG00000134160; TAA
IPIGTKICEF

SEQ ID NO: 89707 - protein, 9 aa, Homo sapiens
  Table A; Target 89707; HLA-B*51:01; TRPM1; ENSG00000134160; TAA
IPPLPSATP

SEQ ID NO: 89708 - protein, 9 aa, Homo sapiens
  Table A; Target 89708; HLA-B*54:01; TRPM1; ENSG00000134160; TAA
IPPLPSATP

SEQ ID NO: 89709 - protein, 9 aa, Homo sapiens
  Table A; Target 89709; HLA-B*56:01; TRPM1; ENSG00000134160; TAA
IPPLPSATP

SEQ ID NO: 89710 - protein, 9 aa, Homo sapiens
  Table A; Target 89710; HLA-B*07:02; TRPM1; ENSG00000134160; TAA
IPRIPRLSL

SEQ ID NO: 89711 - protein, 9 aa, Homo sapiens
  Table A; Target 89711; HLA-B*08:01; TRPM1; ENSG00000134160; TAA
IPRIPRLSL

SEQ ID NO: 89712 - protein, 9 aa, Homo sapiens
  Table A; Target 89712; HLA-C*07:02; TRPM1; ENSG00000134160; TAA
IPRIPRLSL

SEQ ID NO: 89713 - protein, 8 aa, Homo sapiens
  Table A; Target 89713; HLA-B*51:01; TRPM1; ENSG00000134160; TAA
IPRLSLTI

SEQ ID NO: 89714 - protein, 8 aa, Homo sapiens
  Table A; Target 89714; HLA-B*51:01; TRPM1; ENSG00000134160; TAA
IPYIVSEA

SEQ ID NO: 89715 - protein, 8 aa, Homo sapiens
  Table A; Target 89715; HLA-B*54:01; TRPM1; ENSG00000134160; TAA
IPYIVSEA

SEQ ID NO: 89716 - protein, 8 aa, Homo sapiens
  Table A; Target 89716; HLA-B*55:01; TRPM1; ENSG00000134160; TAA
IPYIVSEA

SEQ ID NO: 89717 - protein, 8 aa, Homo sapiens
  Table A; Target 89717; HLA-B*56:01; TRPM1; ENSG00000134160; TAA
IPYIVSEA

SEQ ID NO: 89718 - protein, 9 aa, Homo sapiens
  Table A; Target 89718; HLA-B*35:03; TRPM1; ENSG00000134160; TAA
IPYIVSEAA

SEQ ID NO: 89719 - protein, 9 aa, Homo sapiens
  Table A; Target 89719; HLA-B*51:01; TRPM1; ENSG00000134160; TAA
IPYIVSEAA

SEQ ID NO: 89720 - protein, 9 aa, Homo sapiens
  Table A; Target 89720; HLA-B*54:01; TRPM1; ENSG00000134160; TAA
IPYIVSEAA

SEQ ID NO: 89721 - protein, 9 aa, Homo sapiens
  Table A; Target 89721; HLA-B*55:01; TRPM1; ENSG00000134160; TAA
IPYIVSEAA

SEQ ID NO: 89722 - protein, 9 aa, Homo sapiens
  Table A; Target 89722; HLA-B*56:01; TRPM1; ENSG00000134160; TAA
IPYIVSEAA

SEQ ID NO: 89723 - protein, 10 aa, Homo sapiens
  Table A; Target 89723; HLA-B*51:01; TRPM1; ENSG00000134160; TAA
IPYIVSEAAV

SEQ ID NO: 89724 - protein, 10 aa, Homo sapiens
  Table A; Target 89724; HLA-B*54:01; TRPM1; ENSG00000134160; TAA
IPYIVSEAAV

SEQ ID NO: 89725 - protein, 10 aa, Homo sapiens
  Table A; Target 89725; HLA-B*56:01; TRPM1; ENSG00000134160; TAA
IPYIVSEAAV

SEQ ID NO: 89726 - protein, 9 aa, Homo sapiens
  Table A; Target 89726; HLA-A*31:01; TRPM1; ENSG00000134160; TAA
IQKTFNYNK

SEQ ID NO: 89727 - protein, 8 aa, Homo sapiens
  Table A; Target 89727; HLA-B*40:02; TRPM1; ENSG00000134160; TAA
ISHVGDAL

SEQ ID NO: 89728 - protein, 8 aa, Homo sapiens
  Table A; Target 89728; HLA-B*46:01; TRPM1; ENSG00000134160; TAA
ISHVGDAL

SEQ ID NO: 89729 - protein, 8 aa, Homo sapiens
  Table A; Target 89729; HLA-B*58:01; TRPM1; ENSG00000134160; TAA
ISHVGDAL

SEQ ID NO: 89730 - protein, 8 aa, Homo sapiens
  Table A; Target 89730; HLA-C*01:02; TRPM1; ENSG00000134160; TAA
ISHVGDAL

SEQ ID NO: 89731 - protein, 8 aa, Homo sapiens
  Table A; Target 89731; HLA-C*03:03; TRPM1; ENSG00000134160; TAA
ISHVGDAL

SEQ ID NO: 89732 - protein, 8 aa, Homo sapiens
  Table A; Target 89732; HLA-C*03:04; TRPM1; ENSG00000134160; TAA
ISHVGDAL

SEQ ID NO: 89733 - protein, 8 aa, Homo sapiens
  Table A; Target 89733; HLA-C*05:01; TRPM1; ENSG00000134160; TAA
ISHVGDAL

SEQ ID NO: 89734 - protein, 8 aa, Homo sapiens
  Table A; Target 89734; HLA-C*14:02; TRPM1; ENSG00000134160; TAA
ISHVGDAL

SEQ ID NO: 89735 - protein, 8 aa, Homo sapiens
  Table A; Target 89735; HLA-C*16:01; TRPM1; ENSG00000134160; TAA
ISHVGDAL

SEQ ID NO: 89736 - protein, 8 aa, Homo sapiens
  Table A; Target 89736; HLA-C*16:02; TRPM1; ENSG00000134160; TAA
ISHVGDAL

SEQ ID NO: 89737 - protein, 9 aa, Homo sapiens
  Table A; Target 89737; HLA-A*31:01; TRPM1; ENSG00000134160; TAA
ISLQKINTR

SEQ ID NO: 89738 - protein, 9 aa, Homo sapiens
  Table A; Target 89738; HLA-A*33:01; TRPM1; ENSG00000134160; TAA
ISLQKINTR

SEQ ID NO: 89739 - protein, 9 aa, Homo sapiens
  Table A; Target 89739; HLA-A*33:03; TRPM1; ENSG00000134160; TAA
ISLQKINTR

SEQ ID NO: 89740 - protein, 9 aa, Homo sapiens
  Table A; Target 89740; HLA-C*07:06; TRPM1; ENSG00000134160; TAA
ISLQKINTR

SEQ ID NO: 89741 - protein, 8 aa, Homo sapiens
  Table A; Target 89741; HLA-B*57:01; TRPM1; ENSG00000134160; TAA
ISNQVWKF

SEQ ID NO: 89742 - protein, 10 aa, Homo sapiens
  Table A; Target 89742; HLA-A*03:02; TRPM1; ENSG00000134160; TAA
ISQDLDNNSK

SEQ ID NO: 89743 - protein, 10 aa, Homo sapiens
  Table A; Target 89743; HLA-A*11:01; TRPM1; ENSG00000134160; TAA
ISQDLDNNSK

SEQ ID NO: 89744 - protein, 10 aa, Homo sapiens
  Table A; Target 89744; HLA-B*57:01; TRPM1; ENSG00000134160; TAA
ISVHGGLQNF

SEQ ID NO: 89745 - protein, 10 aa, Homo sapiens
  Table A; Target 89745; HLA-B*58:01; TRPM1; ENSG00000134160; TAA
ISVHGGLQNF

SEQ ID NO: 89746 - protein, 9 aa, Homo sapiens
  Table A; Target 89746; HLA-C*02:02; TRPM1; ENSG00000134160; TAA
ISYIVSLAL

SEQ ID NO: 89747 - protein, 9 aa, Homo sapiens
  Table A; Target 89747; HLA-C*03:03; TRPM1; ENSG00000134160; TAA
ISYIVSLAL

SEQ ID NO: 89748 - protein, 9 aa, Homo sapiens
  Table A; Target 89748; HLA-C*03:04; TRPM1; ENSG00000134160; TAA
ISYIVSLAL

SEQ ID NO: 89749 - protein, 10 aa, Homo sapiens
  Table A; Target 89749; HLA-B*58:01; TRPM1; ENSG00000134160; TAA
ISYPLEETKI

SEQ ID NO: 89750 - protein, 10 aa, Homo sapiens
  Table A; Target 89750; HLA-C*16:04; TRPM1; ENSG00000134160; TAA
ISYPLEETKI

SEQ ID NO: 89751 - protein, 10 aa, Homo sapiens
  Table A; Target 89751; HLA-A*01:01; TRPM1; ENSG00000134160; TAA
ITDLVAISTF

SEQ ID NO: 89752 - protein, 10 aa, Homo sapiens
  Table A; Target 89752; HLA-B*38:01; TRPM1; ENSG00000134160; TAA
ITDLVAISTF

SEQ ID NO: 89753 - protein, 10 aa, Homo sapiens
  Table A; Target 89753; HLA-C*04:01; TRPM1; ENSG00000134160; TAA
ITDLVAISTF

SEQ ID NO: 89754 - protein, 10 aa, Homo sapiens
  Table A; Target 89754; HLA-C*05:01; TRPM1; ENSG00000134160; TAA
ITDLVAISTF

SEQ ID NO: 89755 - protein, 10 aa, Homo sapiens
  Table A; Target 89755; HLA-A*01:01; TRPM1; ENSG00000134160; TAA
ITDQQLTTEW

SEQ ID NO: 89756 - protein, 10 aa, Homo sapiens
  Table A; Target 89756; HLA-A*25:01; TRPM1; ENSG00000134160; TAA
ITDQQLTTEW

SEQ ID NO: 89757 - protein, 10 aa, Homo sapiens
  Table A; Target 89757; HLA-A*32:01; TRPM1; ENSG00000134160; TAA
ITDQQLTTEW

SEQ ID NO: 89758 - protein, 10 aa, Homo sapiens
  Table A; Target 89758; HLA-B*57:01; TRPM1; ENSG00000134160; TAA
ITDQQLTTEW

SEQ ID NO: 89759 - protein, 10 aa, Homo sapiens
  Table A; Target 89759; HLA-B*58:01; TRPM1; ENSG00000134160; TAA
ITDQQLTTEW

SEQ ID NO: 89760 - protein, 10 aa, Homo sapiens
  Table A; Target 89760; HLA-C*05:01; TRPM1; ENSG00000134160; TAA
ITDQQLTTEW

SEQ ID NO: 89761 - protein, 10 aa, Homo sapiens
  Table A; Target 89761; HLA-C*16:04; TRPM1; ENSG00000134160; TAA
ITDQQLTTEW

SEQ ID NO: 89762 - protein, 9 aa, Homo sapiens
  Table A; Target 89762; HLA-A*01:01; TRPM1; ENSG00000134160; TAA
ITDRNGMEN

SEQ ID NO: 89763 - protein, 10 aa, Homo sapiens
  Table A; Target 89763; HLA-C*05:01; TRPM1; ENSG00000134160; TAA
ITDRNGMENL

SEQ ID NO: 89764 - protein, 11 aa, Homo sapiens
  Table A; Target 89764; HLA-A*01:01; TRPM1; ENSG00000134160; TAA
ITDRNGMENLL

SEQ ID NO: 89765 - protein, 9 aa, Homo sapiens
  Table A; Target 89765; HLA-C*05:01; TRPM1; ENSG00000134160; TAA
IVENKEDLV

SEQ ID NO: 89766 - protein, 11 aa, Homo sapiens
  Table A; Target 89766; HLA-A*03:02; TRPM1; ENSG00000134160; TAA
IVENKEDLVGK

SEQ ID NO: 89767 - protein, 11 aa, Homo sapiens
  Table A; Target 89767; HLA-A*11:01; TRPM1; ENSG00000134160; TAA
IVENKEDLVGK

SEQ ID NO: 89768 - protein, 11 aa, Homo sapiens
  Table A; Target 89768; HLA-B*27:02; TRPM1; ENSG00000134160; TAA
IVENKEDLVGK

SEQ ID NO: 89769 - protein, 9 aa, Homo sapiens
  Table A; Target 89769; HLA-A*02:01; TRPM1; ENSG00000134160; TAA
IVISYIVSL

SEQ ID NO: 89770 - protein, 9 aa, Homo sapiens
  Table A; Target 89770; HLA-A*02:03; TRPM1; ENSG00000134160; TAA
IVISYIVSL

SEQ ID NO: 89771 - protein, 9 aa, Homo sapiens
  Table A; Target 89771; HLA-A*02:04; TRPM1; ENSG00000134160; TAA
IVISYIVSL

SEQ ID NO: 89772 - protein, 9 aa, Homo sapiens
  Table A; Target 89772; HLA-A*02:07; TRPM1; ENSG00000134160; TAA
IVISYIVSL

SEQ ID NO: 89773 - protein, 9 aa, Homo sapiens
  Table A; Target 89773; HLA-A*03:01; TRPM1; ENSG00000134160; TAA
IVISYIVSL

SEQ ID NO: 89774 - protein, 9 aa, Homo sapiens
  Table A; Target 89774; HLA-A*11:01; TRPM1; ENSG00000134160; TAA
IVISYIVSL

SEQ ID NO: 89775 - protein, 9 aa, Homo sapiens
  Table A; Target 89775; HLA-A*23:01; TRPM1; ENSG00000134160; TAA
IVISYIVSL

SEQ ID NO: 89776 - protein, 9 aa, Homo sapiens
  Table A; Target 89776; HLA-A*24:02; TRPM1; ENSG00000134160; TAA
IVISYIVSL

SEQ ID NO: 89777 - protein, 9 aa, Homo sapiens
  Table A; Target 89777; HLA-A*25:01; TRPM1; ENSG00000134160; TAA
IVISYIVSL

SEQ ID NO: 89778 - protein, 9 aa, Homo sapiens
  Table A; Target 89778; HLA-A*26:01; TRPM1; ENSG00000134160; TAA
IVISYIVSL

SEQ ID NO: 89779 - protein, 9 aa, Homo sapiens
  Table A; Target 89779; HLA-A*30:01; TRPM1; ENSG00000134160; TAA
IVISYIVSL

SEQ ID NO: 89780 - protein, 9 aa, Homo sapiens
  Table A; Target 89780; HLA-A*31:01; TRPM1; ENSG00000134160; TAA
IVISYIVSL

SEQ ID NO: 89781 - protein, 9 aa, Homo sapiens
  Table A; Target 89781; HLA-A*32:01; TRPM1; ENSG00000134160; TAA
IVISYIVSL

SEQ ID NO: 89782 - protein, 9 aa, Homo sapiens
  Table A; Target 89782; HLA-A*68:01; TRPM1; ENSG00000134160; TAA
IVISYIVSL

SEQ ID NO: 89783 - protein, 9 aa, Homo sapiens
  Table A; Target 89783; HLA-A*68:02; TRPM1; ENSG00000134160; TAA
IVISYIVSL

SEQ ID NO: 89784 - protein, 9 aa, Homo sapiens
  Table A; Target 89784; HLA-B*07:02; TRPM1; ENSG00000134160; TAA
IVISYIVSL

SEQ ID NO: 89785 - protein, 9 aa, Homo sapiens
  Table A; Target 89785; HLA-B*13:02; TRPM1; ENSG00000134160; TAA
IVISYIVSL

SEQ ID NO: 89786 - protein, 9 aa, Homo sapiens
  Table A; Target 89786; HLA-B*15:01; TRPM1; ENSG00000134160; TAA
IVISYIVSL

SEQ ID NO: 89787 - protein, 9 aa, Homo sapiens
  Table A; Target 89787; HLA-B*35:01; TRPM1; ENSG00000134160; TAA
IVISYIVSL

SEQ ID NO: 89788 - protein, 9 aa, Homo sapiens
  Table A; Target 89788; HLA-B*35:03; TRPM1; ENSG00000134160; TAA
IVISYIVSL

SEQ ID NO: 89789 - protein, 9 aa, Homo sapiens
  Table A; Target 89789; HLA-B*40:01; TRPM1; ENSG00000134160; TAA
IVISYIVSL

SEQ ID NO: 89790 - protein, 9 aa, Homo sapiens
  Table A; Target 89790; HLA-B*46:01; TRPM1; ENSG00000134160; TAA
IVISYIVSL

SEQ ID NO: 89791 - protein, 9 aa, Homo sapiens
  Table A; Target 89791; HLA-B*55:01; TRPM1; ENSG00000134160; TAA
IVISYIVSL

SEQ ID NO: 89792 - protein, 9 aa, Homo sapiens
  Table A; Target 89792; HLA-B*57:01; TRPM1; ENSG00000134160; TAA
IVISYIVSL

SEQ ID NO: 89793 - protein, 9 aa, Homo sapiens
  Table A; Target 89793; HLA-B*58:01; TRPM1; ENSG00000134160; TAA
IVISYIVSL

SEQ ID NO: 89794 - protein, 9 aa, Homo sapiens
  Table A; Target 89794; HLA-C*01:02; TRPM1; ENSG00000134160; TAA
IVISYIVSL

SEQ ID NO: 89795 - protein, 9 aa, Homo sapiens
  Table A; Target 89795; HLA-C*02:02; TRPM1; ENSG00000134160; TAA
IVISYIVSL

SEQ ID NO: 89796 - protein, 9 aa, Homo sapiens
  Table A; Target 89796; HLA-C*03:03; TRPM1; ENSG00000134160; TAA
IVISYIVSL

SEQ ID NO: 89797 - protein, 9 aa, Homo sapiens
  Table A; Target 89797; HLA-C*03:04; TRPM1; ENSG00000134160; TAA
IVISYIVSL

SEQ ID NO: 89798 - protein, 9 aa, Homo sapiens
  Table A; Target 89798; HLA-C*07:04; TRPM1; ENSG00000134160; TAA
IVISYIVSL

SEQ ID NO: 89799 - protein, 9 aa, Homo sapiens
  Table A; Target 89799; HLA-C*12:03; TRPM1; ENSG00000134160; TAA
IVISYIVSL

SEQ ID NO: 89800 - protein, 9 aa, Homo sapiens
  Table A; Target 89800; HLA-C*14:02; TRPM1; ENSG00000134160; TAA
IVISYIVSL

SEQ ID NO: 89801 - protein, 9 aa, Homo sapiens
  Table A; Target 89801; HLA-C*16:02; TRPM1; ENSG00000134160; TAA
IVISYIVSL

SEQ ID NO: 89802 - protein, 9 aa, Homo sapiens
  Table A; Target 89802; HLA-C*16:04; TRPM1; ENSG00000134160; TAA
IVISYIVSL

SEQ ID NO: 89803 - protein, 10 aa, Homo sapiens
  Table A; Target 89803; HLA-A*03:01; TRPM1; ENSG00000134160; TAA
IVSGMTAEEK

SEQ ID NO: 89804 - protein, 10 aa, Homo sapiens
  Table A; Target 89804; HLA-A*03:02; TRPM1; ENSG00000134160; TAA
IVSGMTAEEK

SEQ ID NO: 89805 - protein, 10 aa, Homo sapiens
  Table A; Target 89805; HLA-A*11:01; TRPM1; ENSG00000134160; TAA
IVSGMTAEEK

SEQ ID NO: 89806 - protein, 10 aa, Homo sapiens
  Table A; Target 89806; HLA-B*27:02; TRPM1; ENSG00000134160; TAA
IVSGMTAEEK

SEQ ID NO: 89807 - protein, 11 aa, Homo sapiens
  Table A; Target 89807; HLA-A*03:02; TRPM1; ENSG00000134160; TAA
IVSGMTAEEKK

SEQ ID NO: 89808 - protein, 11 aa, Homo sapiens
  Table A; Target 89808; HLA-A*11:01; TRPM1; ENSG00000134160; TAA
IVSGMTAEEKK

SEQ ID NO: 89809 - protein, 8 aa, Homo sapiens
  Table A; Target 89809; HLA-B*27:02; TRPM1; ENSG00000134160; TAA
IVSLALEK

SEQ ID NO: 89810 - protein, 9 aa, Homo sapiens
  Table A; Target 89810; HLA-B*13:02; TRPM1; ENSG00000134160; TAA
IVSLALEKI

SEQ ID NO: 89811 - protein, 10 aa, Homo sapiens
  Table A; Target 89811; HLA-A*24:02; TRPM1; ENSG00000134160; TAA
IYGEVFADQI

SEQ ID NO: 89812 - protein, 8 aa, Homo sapiens
  Table A; Target 89812; HLA-A*23:01; TRPM1; ENSG00000134160; TAA
IYIIIMRL

SEQ ID NO: 89813 - protein, 8 aa, Homo sapiens
  Table A; Target 89813; HLA-A*24:02; TRPM1; ENSG00000134160; TAA
IYIIIMRL

SEQ ID NO: 89814 - protein, 9 aa, Homo sapiens
  Table A; Target 89814; HLA-A*25:01; TRPM1; ENSG00000134160; TAA
KAAMTTGAW

SEQ ID NO: 89815 - protein, 9 aa, Homo sapiens
  Table A; Target 89815; HLA-B*58:01; TRPM1; ENSG00000134160; TAA
KAAMTTGAW

SEQ ID NO: 89816 - protein, 8 aa, Homo sapiens
  Table A; Target 89816; HLA-B*08:01; TRPM1; ENSG00000134160; TAA
KALVACKL

SEQ ID NO: 89817 - protein, 9 aa, Homo sapiens
  Table A; Target 89817; HLA-B*57:01; TRPM1; ENSG00000134160; TAA
KALVACKLY

SEQ ID NO: 89818 - protein, 9 aa, Homo sapiens
  Table A; Target 89818; HLA-C*07:01; TRPM1; ENSG00000134160; TAA
KALVACKLY

SEQ ID NO: 89819 - protein, 9 aa, Homo sapiens
  Table A; Target 89819; HLA-A*29:02; TRPM1; ENSG00000134160; TAA
KAMYIRVSY

SEQ ID NO: 89820 - protein, 9 aa, Homo sapiens
  Table A; Target 89820; HLA-A*30:02; TRPM1; ENSG00000134160; TAA
KAMYIRVSY

SEQ ID NO: 89821 - protein, 9 aa, Homo sapiens
  Table A; Target 89821; HLA-A*31:01; TRPM1; ENSG00000134160; TAA
KAMYIRVSY

SEQ ID NO: 89822 - protein, 9 aa, Homo sapiens
  Table A; Target 89822; HLA-A*32:01; TRPM1; ENSG00000134160; TAA
KAMYIRVSY

SEQ ID NO: 89823 - protein, 9 aa, Homo sapiens
  Table A; Target 89823; HLA-B*46:01; TRPM1; ENSG00000134160; TAA
KAMYIRVSY

SEQ ID NO: 89824 - protein, 9 aa, Homo sapiens
  Table A; Target 89824; HLA-B*57:01; TRPM1; ENSG00000134160; TAA
KAMYIRVSY

SEQ ID NO: 89825 - protein, 9 aa, Homo sapiens
  Table A; Target 89825; HLA-B*58:01; TRPM1; ENSG00000134160; TAA
KAMYIRVSY

SEQ ID NO: 89826 - protein, 9 aa, Homo sapiens
  Table A; Target 89826; HLA-C*02:02; TRPM1; ENSG00000134160; TAA
KAMYIRVSY

SEQ ID NO: 89827 - protein, 9 aa, Homo sapiens
  Table A; Target 89827; HLA-C*16:01; TRPM1; ENSG00000134160; TAA
KAMYIRVSY

SEQ ID NO: 89828 - protein, 9 aa, Homo sapiens
  Table A; Target 89828; HLA-C*16:02; TRPM1; ENSG00000134160; TAA
KAMYIRVSY

SEQ ID NO: 89829 - protein, 9 aa, Homo sapiens
  Table A; Target 89829; HLA-C*16:04; TRPM1; ENSG00000134160; TAA
KAMYIRVSY

SEQ ID NO: 89830 - protein, 9 aa, Homo sapiens
  Table A; Target 89830; HLA-C*16:02; TRPM1; ENSG00000134160; TAA
KAQSHQLFA

SEQ ID NO: 89831 - protein, 9 aa, Homo sapiens
  Table A; Target 89831; HLA-C*16:02; TRPM1; ENSG00000134160; TAA
KATEKEKKP

SEQ ID NO: 89832 - protein, 8 aa, Homo sapiens
  Table A; Target 89832; HLA-B*37:01; TRPM1; ENSG00000134160; TAA
KDFGQLAL

SEQ ID NO: 89833 - protein, 8 aa, Homo sapiens
  Table A; Target 89833; HLA-B*37:01; TRPM1; ENSG00000134160; TAA
KDVKTHLV

SEQ ID NO: 89834 - protein, 9 aa, Homo sapiens
  Table A; Target 89834; HLA-B*37:01; TRPM1; ENSG00000134160; TAA
KDVTRVYQT

SEQ ID NO: 89835 - protein, 10 aa, Homo sapiens
  Table A; Target 89835; HLA-B*40:02; TRPM1; ENSG00000134160; TAA
KDVTRVYQTM

SEQ ID NO: 89836 - protein, 9 aa, Homo sapiens
  Table A; Target 89836; HLA-B*40:01; TRPM1; ENSG00000134160; TAA
KEDLVGKDV

SEQ ID NO: 89837 - protein, 9 aa, Homo sapiens
  Table A; Target 89837; HLA-B*44:02; TRPM1; ENSG00000134160; TAA
KEDLVGKDV

SEQ ID NO: 89838 - protein, 9 aa, Homo sapiens
  Table A; Target 89838; HLA-B*44:03; TRPM1; ENSG00000134160; TAA
KEDLVGKDV

SEQ ID NO: 89839 - protein, 9 aa, Homo sapiens
  Table A; Target 89839; HLA-B*49:01; TRPM1; ENSG00000134160; TAA
KEDLVGKDV

SEQ ID NO: 89840 - protein, 10 aa, Homo sapiens
  Table A; Target 89840; HLA-B*40:01; TRPM1; ENSG00000134160; TAA
KEDLVGKDVT

SEQ ID NO: 89841 - protein, 9 aa, Homo sapiens
  Table A; Target 89841; HLA-B*40:01; TRPM1; ENSG00000134160; TAA
KEEEIDIDV

SEQ ID NO: 89842 - protein, 9 aa, Homo sapiens
  Table A; Target 89842; HLA-B*49:01; TRPM1; ENSG00000134160; TAA
KEEEIDIDV

SEQ ID NO: 89843 - protein, 10 aa, Homo sapiens
  Table A; Target 89843; HLA-B*40:01; TRPM1; ENSG00000134160; TAA
KEEKDVKTHL

SEQ ID NO: 89844 - protein, 9 aa, Homo sapiens
  Table A; Target 89844; HLA-A*30:01; TRPM1; ENSG00000134160; TAA
KEETISPSL

SEQ ID NO: 89845 - protein, 9 aa, Homo sapiens
  Table A; Target 89845; HLA-B*18:01; TRPM1; ENSG00000134160; TAA
KEETISPSL

SEQ ID NO: 89846 - protein, 9 aa, Homo sapiens
  Table A; Target 89846; HLA-B*27:02; TRPM1; ENSG00000134160; TAA
KEETISPSL

SEQ ID NO: 89847 - protein, 9 aa, Homo sapiens
  Table A; Target 89847; HLA-B*37:01; TRPM1; ENSG00000134160; TAA
KEETISPSL

SEQ ID NO: 89848 - protein, 9 aa, Homo sapiens
  Table A; Target 89848; HLA-B*40:01; TRPM1; ENSG00000134160; TAA
KEETISPSL

SEQ ID NO: 89849 - protein, 9 aa, Homo sapiens
  Table A; Target 89849; HLA-B*40:02; TRPM1; ENSG00000134160; TAA
KEETISPSL

SEQ ID NO: 89850 - protein, 9 aa, Homo sapiens
  Table A; Target 89850; HLA-B*44:02; TRPM1; ENSG00000134160; TAA
KEETISPSL

SEQ ID NO: 89851 - protein, 9 aa, Homo sapiens
  Table A; Target 89851; HLA-B*44:03; TRPM1; ENSG00000134160; TAA
KEETISPSL

SEQ ID NO: 89852 - protein, 9 aa, Homo sapiens
  Table A; Target 89852; HLA-B*49:01; TRPM1; ENSG00000134160; TAA
KEETISPSL

SEQ ID NO: 89853 - protein, 9 aa, Homo sapiens
  Table A; Target 89853; HLA-C*16:04; TRPM1; ENSG00000134160; TAA
KEETISPSL

SEQ ID NO: 89854 - protein, 11 aa, Homo sapiens
  Table A; Target 89854; HLA-A*03:01; TRPM1; ENSG00000134160; TAA
KEETISPSLNK

SEQ ID NO: 89855 - protein, 11 aa, Homo sapiens
  Table A; Target 89855; HLA-A*03:02; TRPM1; ENSG00000134160; TAA
KEETISPSLNK

SEQ ID NO: 89856 - protein, 10 aa, Homo sapiens
  Table A; Target 89856; HLA-B*40:02; TRPM1; ENSG00000134160; TAA
KEKASTETEC

SEQ ID NO: 89857 - protein, 9 aa, Homo sapiens
  Table A; Target 89857; HLA-B*37:01; TRPM1; ENSG00000134160; TAA
KELVTVFRM

SEQ ID NO: 89858 - protein, 9 aa, Homo sapiens
  Table A; Target 89858; HLA-A*29:02; TRPM1; ENSG00000134160; TAA
KFWFYTISY

SEQ ID NO: 89859 - protein, 8 aa, Homo sapiens
  Table A; Target 89859; HLA-B*08:01; TRPM1; ENSG00000134160; TAA
KGLIKAAM

SEQ ID NO: 89860 - protein, 8 aa, Homo sapiens
  Table A; Target 89860; HLA-B*38:01; TRPM1; ENSG00000134160; TAA
KHDEQIAM

SEQ ID NO: 89861 - protein, 8 aa, Homo sapiens
  Table A; Target 89861; HLA-C*05:01; TRPM1; ENSG00000134160; TAA
KHDEQIAM

SEQ ID NO: 89862 - protein, 10 aa, Homo sapiens
  Table A; Target 89862; HLA-B*38:01; TRPM1; ENSG00000134160; TAA
KHDEQIAMKL

SEQ ID NO: 89863 - protein, 11 aa, Homo sapiens
  Table A; Target 89863; HLA-A*31:01; TRPM1; ENSG00000134160; TAA
KHISLQKINTR

SEQ ID NO: 89864 - protein, 8 aa, Homo sapiens
  Table A; Target 89864; HLA-B*15:03; TRPM1; ENSG00000134160; TAA
KKELVTVF

SEQ ID NO: 89865 - protein, 9 aa, Homo sapiens
  Table A; Target 89865; HLA-B*15:03; TRPM1; ENSG00000134160; TAA
KKKELVTVF

SEQ ID NO: 89866 - protein, 8 aa, Homo sapiens
  Table A; Target 89866; HLA-C*04:01; TRPM1; ENSG00000134160; TAA
KKKKKKKK

SEQ ID NO: 89867 - protein, 9 aa, Homo sapiens
  Table A; Target 89867; HLA-B*15:03; TRPM1; ENSG00000134160; TAA
KKSNLPPDY

SEQ ID NO: 89868 - protein, 9 aa, Homo sapiens
  Table A; Target 89868; HLA-A*02:01; TRPM1; ENSG00000134160; TAA
KLFLSDEEL

SEQ ID NO: 89869 - protein, 9 aa, Homo sapiens
  Table A; Target 89869; HLA-A*02:04; TRPM1; ENSG00000134160; TAA
KLFLSDEEL

SEQ ID NO: 89870 - protein, 9 aa, Homo sapiens
  Table A; Target 89870; HLA-B*40:01; TRPM1; ENSG00000134160; TAA
KLFLSDEEL

SEQ ID NO: 89871 - protein, 8 aa, Homo sapiens
  Table A; Target 89871; HLA-A*02:01; TRPM1; ENSG00000134160; TAA
KLGPDIGI

SEQ ID NO: 89872 - protein, 10 aa, Homo sapiens
  Table A; Target 89872; HLA-A*03:01; TRPM1; ENSG00000134160; TAA
KLGPDIGISK

SEQ ID NO: 89873 - protein, 10 aa, Homo sapiens
  Table A; Target 89873; HLA-A*03:02; TRPM1; ENSG00000134160; TAA
KLGPDIGISK

SEQ ID NO: 89874 - protein, 10 aa, Homo sapiens
  Table A; Target 89874; HLA-A*11:01; TRPM1; ENSG00000134160; TAA
KLGPDIGISK

SEQ ID NO: 89875 - protein, 10 aa, Homo sapiens
  Table A; Target 89875; HLA-A*31:01; TRPM1; ENSG00000134160; TAA
KLGPDIGISK

SEQ ID NO: 89876 - protein, 10 aa, Homo sapiens
  Table A; Target 89876; HLA-A*32:01; TRPM1; ENSG00000134160; TAA
KLGPDIGISK

SEQ ID NO: 89877 - protein, 10 aa, Homo sapiens
  Table A; Target 89877; HLA-B*27:02; TRPM1; ENSG00000134160; TAA
KLGPDIGISK

SEQ ID NO: 89878 - protein, 10 aa, Homo sapiens
  Table A; Target 89878; HLA-B*58:01; TRPM1; ENSG00000134160; TAA
KLGPDIGISK

SEQ ID NO: 89879 - protein, 10 aa, Homo sapiens
  Table A; Target 89879; HLA-C*01:02; TRPM1; ENSG00000134160; TAA
KLGPDIGISK

SEQ ID NO: 89880 - protein, 10 aa, Homo sapiens
  Table A; Target 89880; HLA-B*57:01; TRPM1; ENSG00000134160; TAA
KLLTYELKNW

SEQ ID NO: 89881 - protein, 9 aa, Homo sapiens
  Table A; Target 89881; HLA-A*31:01; TRPM1; ENSG00000134160; TAA
KMAVFLWQR

SEQ ID NO: 89882 - protein, 11 aa, Homo sapiens
  Table A; Target 89882; HLA-B*07:02; TRPM1; ENSG00000134160; TAA
KPDQTLGFPSL

SEQ ID NO: 89883 - protein, 11 aa, Homo sapiens
  Table A; Target 89883; HLA-B*35:03; TRPM1; ENSG00000134160; TAA
KPDQTLGFPSL

SEQ ID NO: 89884 - protein, 11 aa, Homo sapiens
  Table A; Target 89884; HLA-C*07:02; TRPM1; ENSG00000134160; TAA
KPDQTLGFPSL

SEQ ID NO: 89885 - protein, 10 aa, Homo sapiens
  Table A; Target 89885; HLA-A*03:01; TRPM1; ENSG00000134160; TAA
KQRSIPIGTK

SEQ ID NO: 89886 - protein, 10 aa, Homo sapiens
  Table A; Target 89886; HLA-A*25:01; TRPM1; ENSG00000134160; TAA
KQVETQPEKW

SEQ ID NO: 89887 - protein, 10 aa, Homo sapiens
  Table A; Target 89887; HLA-A*32:01; TRPM1; ENSG00000134160; TAA
KQVETQPEKW

SEQ ID NO: 89888 - protein, 10 aa, Homo sapiens
  Table A; Target 89888; HLA-B*44:02; TRPM1; ENSG00000134160; TAA
KQVETQPEKW

SEQ ID NO: 89889 - protein, 10 aa, Homo sapiens
  Table A; Target 89889; HLA-B*44:03; TRPM1; ENSG00000134160; TAA
KQVETQPEKW

SEQ ID NO: 89890 - protein, 10 aa, Homo sapiens
  Table A; Target 89890; HLA-B*57:01; TRPM1; ENSG00000134160; TAA
KQVETQPEKW

SEQ ID NO: 89891 - protein, 10 aa, Homo sapiens
  Table A; Target 89891; HLA-B*58:01; TRPM1; ENSG00000134160; TAA
KQVETQPEKW

SEQ ID NO: 89892 - protein, 10 aa, Homo sapiens
  Table A; Target 89892; HLA-C*16:04; TRPM1; ENSG00000134160; TAA
KQVETQPEKW

SEQ ID NO: 89893 - protein, 9 aa, Homo sapiens
  Table A; Target 89893; HLA-A*01:01; TRPM1; ENSG00000134160; TAA
KSDVQNTQL

SEQ ID NO: 89894 - protein, 9 aa, Homo sapiens
  Table A; Target 89894; HLA-A*02:07; TRPM1; ENSG00000134160; TAA
KSDVQNTQL

SEQ ID NO: 89895 - protein, 9 aa, Homo sapiens
  Table A; Target 89895; HLA-B*40:01; TRPM1; ENSG00000134160; TAA
KSDVQNTQL

SEQ ID NO: 89896 - protein, 9 aa, Homo sapiens
  Table A; Target 89896; HLA-B*58:01; TRPM1; ENSG00000134160; TAA
KSDVQNTQL

SEQ ID NO: 89897 - protein, 9 aa, Homo sapiens
  Table A; Target 89897; HLA-C*05:01; TRPM1; ENSG00000134160; TAA
KSDVQNTQL

SEQ ID NO: 89898 - protein, 8 aa, Homo sapiens
  Table A; Target 89898; HLA-B*57:01; TRPM1; ENSG00000134160; TAA
KSISNQVW

SEQ ID NO: 89899 - protein, 8 aa, Homo sapiens
  Table A; Target 89899; HLA-B*58:01; TRPM1; ENSG00000134160; TAA
KSISNQVW

SEQ ID NO: 89900 - protein, 10 aa, Homo sapiens
  Table A; Target 89900; HLA-B*57:01; TRPM1; ENSG00000134160; TAA
KSISNQVWKF

SEQ ID NO: 89901 - protein, 10 aa, Homo sapiens
  Table A; Target 89901; HLA-B*58:01; TRPM1; ENSG00000134160; TAA
KSISNQVWKF

SEQ ID NO: 89902 - protein, 8 aa, Homo sapiens
  Table A; Target 89902; HLA-A*30:02; TRPM1; ENSG00000134160; TAA
KSNLPPDY

SEQ ID NO: 89903 - protein, 9 aa, Homo sapiens
  Table A; Target 89903; HLA-A*31:01; TRPM1; ENSG00000134160; TAA
KSRSFVYSR

SEQ ID NO: 89904 - protein, 10 aa, Homo sapiens
  Table A; Target 89904; HLA-A*01:01; TRPM1; ENSG00000134160; TAA
KTDVIHGQDK

SEQ ID NO: 89905 - protein, 10 aa, Homo sapiens
  Table A; Target 89905; HLA-A*03:02; TRPM1; ENSG00000134160; TAA
KTDVIHGQDK

SEQ ID NO: 89906 - protein, 10 aa, Homo sapiens
  Table A; Target 89906; HLA-A*03:01; TRPM1; ENSG00000134160; TAA
KTMKSRSFVY

SEQ ID NO: 89907 - protein, 10 aa, Homo sapiens
  Table A; Target 89907; HLA-B*57:01; TRPM1; ENSG00000134160; TAA
KTMKSRSFVY

SEQ ID NO: 89908 - protein, 9 aa, Homo sapiens
  Table A; Target 89908; HLA-B*40:01; TRPM1; ENSG00000134160; TAA
KTSLQTVDL

SEQ ID NO: 89909 - protein, 9 aa, Homo sapiens
  Table A; Target 89909; HLA-A*31:01; TRPM1; ENSG00000134160; TAA
KYGAEVKLR

SEQ ID NO: 89910 - protein, 8 aa, Homo sapiens
  Table A; Target 89910; HLA-A*23:01; TRPM1; ENSG00000134160; TAA
KYLGPYVM

SEQ ID NO: 89911 - protein, 8 aa, Homo sapiens
  Table A; Target 89911; HLA-A*24:02; TRPM1; ENSG00000134160; TAA
KYLGPYVM

SEQ ID NO: 89912 - protein, 9 aa, Homo sapiens
  Table A; Target 89912; HLA-A*24:02; TRPM1; ENSG00000134160; TAA
KYLGPYVMM

SEQ ID NO: 89913 - protein, 10 aa, Homo sapiens
  Table A; Target 89913; HLA-A*23:01; TRPM1; ENSG00000134160; TAA
KYLGPYVMMI

SEQ ID NO: 89914 - protein, 10 aa, Homo sapiens
  Table A; Target 89914; HLA-A*24:02; TRPM1; ENSG00000134160; TAA
KYLGPYVMMI

SEQ ID NO: 89915 - protein, 8 aa, Homo sapiens
  Table A; Target 89915; HLA-C*05:01; TRPM1; ENSG00000134160; TAA
LADNGTLG

SEQ ID NO: 89916 - protein, 9 aa, Homo sapiens
  Table A; Target 89916; HLA-A*01:01; TRPM1; ENSG00000134160; TAA
LADNGTLGK

SEQ ID NO: 89917 - protein, 9 aa, Homo sapiens
  Table A; Target 89917; HLA-C*05:01; TRPM1; ENSG00000134160; TAA
LADNGTLGK

SEQ ID NO: 89918 - protein, 10 aa, Homo sapiens
  Table A; Target 89918; HLA-A*01:01; TRPM1; ENSG00000134160; TAA
LADNGTLGKY

SEQ ID NO: 89919 - protein, 10 aa, Homo sapiens
  Table A; Target 89919; HLA-A*26:01; TRPM1; ENSG00000134160; TAA
LADNGTLGKY

SEQ ID NO: 89920 - protein, 10 aa, Homo sapiens
  Table A; Target 89920; HLA-A*29:02; TRPM1; ENSG00000134160; TAA
LADNGTLGKY

SEQ ID NO: 89921 - protein, 10 aa, Homo sapiens
  Table A; Target 89921; HLA-A*30:02; TRPM1; ENSG00000134160; TAA
LADNGTLGKY

SEQ ID NO: 89922 - protein, 10 aa, Homo sapiens
  Table A; Target 89922; HLA-B*35:01; TRPM1; ENSG00000134160; TAA
LADNGTLGKY

SEQ ID NO: 89923 - protein, 10 aa, Homo sapiens
  Table A; Target 89923; HLA-B*46:01; TRPM1; ENSG00000134160; TAA
LADNGTLGKY

SEQ ID NO: 89924 - protein, 10 aa, Homo sapiens
  Table A; Target 89924; HLA-B*55:01; TRPM1; ENSG00000134160; TAA
LADNGTLGKY

SEQ ID NO: 89925 - protein, 10 aa, Homo sapiens
  Table A; Target 89925; HLA-C*05:01; TRPM1; ENSG00000134160; TAA
LADNGTLGKY

SEQ ID NO: 89926 - protein, 10 aa, Homo sapiens
  Table A; Target 89926; HLA-C*16:02; TRPM1; ENSG00000134160; TAA
LADNGTLGKY

SEQ ID NO: 89927 - protein, 9 aa, Homo sapiens
  Table A; Target 89927; HLA-B*51:01; TRPM1; ENSG00000134160; TAA
LALEKIREI

SEQ ID NO: 89928 - protein, 10 aa, Homo sapiens
  Table A; Target 89928; HLA-A*29:02; TRPM1; ENSG00000134160; TAA
LALELLDQSY

SEQ ID NO: 89929 - protein, 10 aa, Homo sapiens
  Table A; Target 89929; HLA-A*30:02; TRPM1; ENSG00000134160; TAA
LALELLDQSY

SEQ ID NO: 89930 - protein, 10 aa, Homo sapiens
  Table A; Target 89930; HLA-B*27:02; TRPM1; ENSG00000134160; TAA
LALELLDQSY

SEQ ID NO: 89931 - protein, 10 aa, Homo sapiens
  Table A; Target 89931; HLA-B*35:01; TRPM1; ENSG00000134160; TAA
LALELLDQSY

SEQ ID NO: 89932 - protein, 10 aa, Homo sapiens
  Table A; Target 89932; HLA-C*16:04; TRPM1; ENSG00000134160; TAA
LALELLDQSY

SEQ ID NO: 89933 - protein, 11 aa, Homo sapiens
  Table A; Target 89933; HLA-B*27:02; TRPM1; ENSG00000134160; TAA
LALELLDQSYK

SEQ ID NO: 89934 - protein, 10 aa, Homo sapiens
  Table A; Target 89934; HLA-B*27:02; TRPM1; ENSG00000134160; TAA
LAQLEELSNR

SEQ ID NO: 89935 - protein, 9 aa, Homo sapiens
  Table A; Target 89935; HLA-B*54:01; TRPM1; ENSG00000134160; TAA
LAWNRVDIA

SEQ ID NO: 89936 - protein, 8 aa, Homo sapiens
  Table A; Target 89936; HLA-B*27:02; TRPM1; ENSG00000134160; TAA
LDALVLDR

SEQ ID NO: 89937 - protein, 10 aa, Homo sapiens
  Table A; Target 89937; HLA-B*40:01; TRPM1; ENSG00000134160; TAA
LEEINERETF

SEQ ID NO: 89938 - protein, 10 aa, Homo sapiens
  Table A; Target 89938; HLA-B*44:02; TRPM1; ENSG00000134160; TAA
LEEINERETF

SEQ ID NO: 89939 - protein, 10 aa, Homo sapiens
  Table A; Target 89939; HLA-B*44:03; TRPM1; ENSG00000134160; TAA
LEEINERETF

SEQ ID NO: 89940 - protein, 8 aa, Homo sapiens
  Table A; Target 89940; HLA-B*18:01; TRPM1; ENSG00000134160; TAA
LEELSNRM

SEQ ID NO: 89941 - protein, 9 aa, Homo sapiens
  Table A; Target 89941; HLA-B*49:01; TRPM1; ENSG00000134160; TAA
LEELSNRMV

SEQ ID NO: 89942 - protein, 9 aa, Homo sapiens
  Table A; Target 89942; HLA-B*40:01; TRPM1; ENSG00000134160; TAA
LEELYNTRL

SEQ ID NO: 89943 - protein, 9 aa, Homo sapiens
  Table A; Target 89943; HLA-B*18:01; TRPM1; ENSG00000134160; TAA
LEETKITRY

SEQ ID NO: 89944 - protein, 9 aa, Homo sapiens
  Table A; Target 89944; HLA-B*44:02; TRPM1; ENSG00000134160; TAA
LEETKITRY

SEQ ID NO: 89945 - protein, 9 aa, Homo sapiens
  Table A; Target 89945; HLA-B*44:03; TRPM1; ENSG00000134160; TAA
LEETKITRY

SEQ ID NO: 89946 - protein, 8 aa, Homo sapiens
  Table A; Target 89946; HLA-B*18:01; TRPM1; ENSG00000134160; TAA
LEFQGGGY

SEQ ID NO: 89947 - protein, 8 aa, Homo sapiens
  Table A; Target 89947; HLA-B*39:01; TRPM1; ENSG00000134160; TAA
LEFQGGGY

SEQ ID NO: 89948 - protein, 8 aa, Homo sapiens
  Table A; Target 89948; HLA-B*44:03; TRPM1; ENSG00000134160; TAA
LEFQGGGY

SEQ ID NO: 89949 - protein, 8 aa, Homo sapiens
  Table A; Target 89949; HLA-C*16:04; TRPM1; ENSG00000134160; TAA
LEFQGGGY

SEQ ID NO: 89950 - protein, 10 aa, Homo sapiens
  Table A; Target 89950; HLA-A*30:01; TRPM1; ENSG00000134160; TAA
LEFQGGGYSN

SEQ ID NO: 89951 - protein, 10 aa, Homo sapiens
  Table A; Target 89951; HLA-B*18:01; TRPM1; ENSG00000134160; TAA
LEFQGGGYSN

SEQ ID NO: 89952 - protein, 10 aa, Homo sapiens
  Table A; Target 89952; HLA-B*27:05; TRPM1; ENSG00000134160; TAA
LEFQGGGYSN

SEQ ID NO: 89953 - protein, 10 aa, Homo sapiens
  Table A; Target 89953; HLA-B*40:01; TRPM1; ENSG00000134160; TAA
LEFQGGGYSN

SEQ ID NO: 89954 - protein, 10 aa, Homo sapiens
  Table A; Target 89954; HLA-B*40:02; TRPM1; ENSG00000134160; TAA
LEFQGGGYSN

SEQ ID NO: 89955 - protein, 10 aa, Homo sapiens
  Table A; Target 89955; HLA-B*49:01; TRPM1; ENSG00000134160; TAA
LEFQGGGYSN

SEQ ID NO: 89956 - protein, 11 aa, Homo sapiens
  Table A; Target 89956; HLA-B*27:05; TRPM1; ENSG00000134160; TAA
LEFQGGGYSNK

SEQ ID NO: 89957 - protein, 11 aa, Homo sapiens
  Table A; Target 89957; HLA-B*49:01; TRPM1; ENSG00000134160; TAA
LEFQGGGYSNK

SEQ ID NO: 89958 - protein, 8 aa, Homo sapiens
  Table A; Target 89958; HLA-B*18:01; TRPM1; ENSG00000134160; TAA
LELLDQSY

SEQ ID NO: 89959 - protein, 10 aa, Homo sapiens
  Table A; Target 89959; HLA-B*49:01; TRPM1; ENSG00000134160; TAA
LELPKLLISV

SEQ ID NO: 89960 - protein, 9 aa, Homo sapiens
  Table A; Target 89960; HLA-A*30:01; TRPM1; ENSG00000134160; TAA
LEQAMLDAL

SEQ ID NO: 89961 - protein, 9 aa, Homo sapiens
  Table A; Target 89961; HLA-B*18:01; TRPM1; ENSG00000134160; TAA
LEQAMLDAL

SEQ ID NO: 89962 - protein, 9 aa, Homo sapiens
  Table A; Target 89962; HLA-B*40:01; TRPM1; ENSG00000134160; TAA
LEQAMLDAL

SEQ ID NO: 89963 - protein, 9 aa, Homo sapiens
  Table A; Target 89963; HLA-B*40:02; TRPM1; ENSG00000134160; TAA
LEQAMLDAL

SEQ ID NO: 89964 - protein, 9 aa, Homo sapiens
  Table A; Target 89964; HLA-B*49:01; TRPM1; ENSG00000134160; TAA
LEQAMLDAL

SEQ ID NO: 89965 - protein, 9 aa, Homo sapiens
  Table A; Target 89965; HLA-B*18:01; TRPM1; ENSG00000134160; TAA
LEYLMGGAY

SEQ ID NO: 89966 - protein, 9 aa, Homo sapiens
  Table A; Target 89966; HLA-B*44:02; TRPM1; ENSG00000134160; TAA
LEYLMGGAY

SEQ ID NO: 89967 - protein, 9 aa, Homo sapiens
  Table A; Target 89967; HLA-B*44:03; TRPM1; ENSG00000134160; TAA
LEYLMGGAY

SEQ ID NO: 89968 - protein, 9 aa, Homo sapiens
  Table A; Target 89968; HLA-C*16:04; TRPM1; ENSG00000134160; TAA
LEYLMGGAY

SEQ ID NO: 89969 - protein, 9 aa, Homo sapiens
  Table A; Target 89969; HLA-A*03:01; TRPM1; ENSG00000134160; TAA
LGFPSLRSK

SEQ ID NO: 89970 - protein, 9 aa, Homo sapiens
  Table A; Target 89970; HLA-A*11:01; TRPM1; ENSG00000134160; TAA
LGFPSLRSK

SEQ ID NO: 89971 - protein, 8 aa, Homo sapiens
  Table A; Target 89971; HLA-B*46:01; TRPM1; ENSG00000134160; TAA
LGKYGAEV

SEQ ID NO: 89972 - protein, 9 aa, Homo sapiens
  Table A; Target 89972; HLA-A*11:01; TRPM1; ENSG00000134160; TAA
LGPDIGISK

SEQ ID NO: 89973 - protein, 9 aa, Homo sapiens
  Table A; Target 89973; HLA-C*01:02; TRPM1; ENSG00000134160; TAA
LGPPNTLHL

SEQ ID NO: 89974 - protein, 10 aa, Homo sapiens
  Table A; Target 89974; HLA-A*02:07; TRPM1; ENSG00000134160; TAA
LGPPNTLHLL

SEQ ID NO: 89975 - protein, 8 aa, Homo sapiens
  Table A; Target 89975; HLA-B*51:01; TRPM1; ENSG00000134160; TAA
LGPYVMMI

SEQ ID NO: 89976 - protein, 10 aa, Homo sapiens
  Table A; Target 89976; HLA-B*27:02; TRPM1; ENSG00000134160; TAA
LGPYVMMIGK

SEQ ID NO: 89977 - protein, 9 aa, Homo sapiens
  Table A; Target 89977; HLA-A*29:02; TRPM1; ENSG00000134160; TAA
LGYLLLFNY

SEQ ID NO: 89978 - protein, 9 aa, Homo sapiens
  Table A; Target 89978; HLA-B*38:01; TRPM1; ENSG00000134160; TAA
LHEFEEQCV

SEQ ID NO: 89979 - protein, 9 aa, Homo sapiens
  Table A; Target 89979; HLA-A*32:01; TRPM1; ENSG00000134160; TAA
LIAVFNNTF

SEQ ID NO: 89980 - protein, 9 aa, Homo sapiens
  Table A; Target 89980; HLA-B*15:01; TRPM1; ENSG00000134160; TAA
LIAVFNNTF

SEQ ID NO: 89981 - protein, 9 aa, Homo sapiens
  Table A; Target 89981; HLA-B*46:01; TRPM1; ENSG00000134160; TAA
LIAVFNNTF

SEQ ID NO: 89982 - protein, 9 aa, Homo sapiens
  Table A; Target 89982; HLA-B*58:01; TRPM1; ENSG00000134160; TAA
LIAVFNNTF

SEQ ID NO: 89983 - protein, 9 aa, Homo sapiens
  Table A; Target 89983; HLA-C*02:02; TRPM1; ENSG00000134160; TAA
LIAVFNNTF

SEQ ID NO: 89984 - protein, 8 aa, Homo sapiens
  Table A; Target 89984; HLA-C*05:01; TRPM1; ENSG00000134160; TAA
LIDIGLVL

SEQ ID NO: 89985 - protein, 10 aa, Homo sapiens
  Table A; Target 89985; HLA-A*01:01; TRPM1; ENSG00000134160; TAA
LIDIGLVLEY

SEQ ID NO: 89986 - protein, 10 aa, Homo sapiens
  Table A; Target 89986; HLA-A*29:02; TRPM1; ENSG00000134160; TAA
LIDIGLVLEY

SEQ ID NO: 89987 - protein, 8 aa, Homo sapiens
  Table A; Target 89987; HLA-C*05:01; TRPM1; ENSG00000134160; TAA
LIENGVNM

SEQ ID NO: 89988 - protein, 8 aa, Homo sapiens
  Table A; Target 89988; HLA-A*02:04; TRPM1; ENSG00000134160; TAA
LLFEDTSL

SEQ ID NO: 89989 - protein, 9 aa, Homo sapiens
  Table A; Target 89989; HLA-A*02:01; TRPM1; ENSG00000134160; TAA
LLFNYVILV

SEQ ID NO: 89990 - protein, 9 aa, Homo sapiens
  Table A; Target 89990; HLA-A*02:03; TRPM1; ENSG00000134160; TAA
LLFNYVILV

SEQ ID NO: 89991 - protein, 9 aa, Homo sapiens
  Table A; Target 89991; HLA-A*02:04; TRPM1; ENSG00000134160; TAA
LLFNYVILV

SEQ ID NO: 89992 - protein, 9 aa, Homo sapiens
  Table A; Target 89992; HLA-A*02:07; TRPM1; ENSG00000134160; TAA
LLFNYVILV

SEQ ID NO: 89993 - protein, 9 aa, Homo sapiens
  Table A; Target 89993; HLA-A*68:02; TRPM1; ENSG00000134160; TAA
LLFNYVILV

SEQ ID NO: 89994 - protein, 9 aa, Homo sapiens
  Table A; Target 89994; HLA-A*02:01; TRPM1; ENSG00000134160; TAA
LLIENGVNM

SEQ ID NO: 89995 - protein, 9 aa, Homo sapiens
  Table A; Target 89995; HLA-A*02:07; TRPM1; ENSG00000134160; TAA
LLIENGVNM

SEQ ID NO: 89996 - protein, 9 aa, Homo sapiens
  Table A; Target 89996; HLA-B*15:01; TRPM1; ENSG00000134160; TAA
LLIENGVNM

SEQ ID NO: 89997 - protein, 9 aa, Homo sapiens
  Table A; Target 89997; HLA-B*46:01; TRPM1; ENSG00000134160; TAA
LLIENGVNM

SEQ ID NO: 89998 - protein, 9 aa, Homo sapiens
  Table A; Target 89998; HLA-C*01:02; TRPM1; ENSG00000134160; TAA
LLIENGVNM

SEQ ID NO: 89999 - protein, 9 aa, Homo sapiens
  Table A; Target 89999; HLA-C*03:03; TRPM1; ENSG00000134160; TAA
LLIENGVNM

SEQ ID NO: 90000 - protein, 9 aa, Homo sapiens
  Table A; Target 90000; HLA-C*03:04; TRPM1; ENSG00000134160; TAA
LLIENGVNM

SEQ ID NO: 90001 - protein, 9 aa, Homo sapiens
  Table A; Target 90001; HLA-C*05:01; TRPM1; ENSG00000134160; TAA
LLIENGVNM

SEQ ID NO: 90002 - protein, 9 aa, Homo sapiens
  Table A; Target 90002; HLA-C*14:02; TRPM1; ENSG00000134160; TAA
LLIENGVNM

SEQ ID NO: 90003 - protein, 9 aa, Homo sapiens
  Table A; Target 90003; HLA-A*02:03; TRPM1; ENSG00000134160; TAA
LLKGTNVSA

SEQ ID NO: 90004 - protein, 9 aa, Homo sapiens
  Table A; Target 90004; HLA-A*32:01; TRPM1; ENSG00000134160; TAA
LLKGTNVSA

SEQ ID NO: 90005 - protein, 9 aa, Homo sapiens
  Table A; Target 90005; HLA-B*08:01; TRPM1; ENSG00000134160; TAA
LLKGTNVSA

SEQ ID NO: 90006 - protein, 9 aa, Homo sapiens
  Table A; Target 90006; HLA-B*46:01; TRPM1; ENSG00000134160; TAA
LLKGTNVSA

SEQ ID NO: 90007 - protein, 9 aa, Homo sapiens
  Table A; Target 90007; HLA-A*02:01; TRPM1; ENSG00000134160; TAA
LLPPTILFL

SEQ ID NO: 90008 - protein, 9 aa, Homo sapiens
  Table A; Target 90008; HLA-A*02:03; TRPM1; ENSG00000134160; TAA
LLPPTILFL

SEQ ID NO: 90009 - protein, 9 aa, Homo sapiens
  Table A; Target 90009; HLA-A*02:04; TRPM1; ENSG00000134160; TAA
LLPPTILFL

SEQ ID NO: 90010 - protein, 9 aa, Homo sapiens
  Table A; Target 90010; HLA-A*02:07; TRPM1; ENSG00000134160; TAA
LLPPTILFL

SEQ ID NO: 90011 - protein, 9 aa, Homo sapiens
  Table A; Target 90011; HLA-A*24:02; TRPM1; ENSG00000134160; TAA
LLPPTILFL

SEQ ID NO: 90012 - protein, 11 aa, Homo sapiens
  Table A; Target 90012; HLA-A*02:07; TRPM1; ENSG00000134160; TAA
LLPPTILFLEF

SEQ ID NO: 90013 - protein, 11 aa, Homo sapiens
  Table A; Target 90013; HLA-A*24:02; TRPM1; ENSG00000134160; TAA
LLPPTILFLEF

SEQ ID NO: 90014 - protein, 11 aa, Homo sapiens
  Table A; Target 90014; HLA-A*29:02; TRPM1; ENSG00000134160; TAA
LLPPTILFLEF

SEQ ID NO: 90015 - protein, 10 aa, Homo sapiens
  Table A; Target 90015; HLA-A*02:03; TRPM1; ENSG00000134160; TAA
LLRQSSINSA

SEQ ID NO: 90016 - protein, 10 aa, Homo sapiens
  Table A; Target 90016; HLA-A*02:04; TRPM1; ENSG00000134160; TAA
LLTDMWMGRL

SEQ ID NO: 90017 - protein, 9 aa, Homo sapiens
  Table A; Target 90017; HLA-A*02:01; TRPM1; ENSG00000134160; TAA
LLVANILLV

SEQ ID NO: 90018 - protein, 9 aa, Homo sapiens
  Table A; Target 90018; HLA-A*02:03; TRPM1; ENSG00000134160; TAA
LLVANILLV

SEQ ID NO: 90019 - protein, 9 aa, Homo sapiens
  Table A; Target 90019; HLA-A*02:04; TRPM1; ENSG00000134160; TAA
LLVANILLV

SEQ ID NO: 90020 - protein, 9 aa, Homo sapiens
  Table A; Target 90020; HLA-A*02:07; TRPM1; ENSG00000134160; TAA
LLVANILLV

SEQ ID NO: 90021 - protein, 9 aa, Homo sapiens
  Table A; Target 90021; HLA-B*13:02; TRPM1; ENSG00000134160; TAA
LLVANILLV

SEQ ID NO: 90022 - protein, 9 aa, Homo sapiens
  Table A; Target 90022; HLA-A*02:01; TRPM1; ENSG00000134160; TAA
LLVNLLIAV

SEQ ID NO: 90023 - protein, 9 aa, Homo sapiens
  Table A; Target 90023; HLA-A*02:03; TRPM1; ENSG00000134160; TAA
LLVNLLIAV

SEQ ID NO: 90024 - protein, 9 aa, Homo sapiens
  Table A; Target 90024; HLA-A*02:04; TRPM1; ENSG00000134160; TAA
LLVNLLIAV

SEQ ID NO: 90025 - protein, 9 aa, Homo sapiens
  Table A; Target 90025; HLA-A*02:07; TRPM1; ENSG00000134160; TAA
LLVNLLIAV

SEQ ID NO: 90026 - protein, 9 aa, Homo sapiens
  Table A; Target 90026; HLA-A*23:01; TRPM1; ENSG00000134160; TAA
LLVTIQKTF

SEQ ID NO: 90027 - protein, 9 aa, Homo sapiens
  Table A; Target 90027; HLA-B*57:01; TRPM1; ENSG00000134160; TAA
LLVTIQKTF

SEQ ID NO: 90028 - protein, 9 aa, Homo sapiens
  Table A; Target 90028; HLA-B*58:01; TRPM1; ENSG00000134160; TAA
LLVTIQKTF

SEQ ID NO: 90029 - protein, 11 aa, Homo sapiens
  Table A; Target 90029; HLA-A*29:02; TRPM1; ENSG00000134160; TAA
LLVTIQKTFNY

SEQ ID NO: 90030 - protein, 8 aa, Homo sapiens
  Table A; Target 90030; HLA-C*05:01; TRPM1; ENSG00000134160; TAA
LMSEPGKL

SEQ ID NO: 90031 - protein, 8 aa, Homo sapiens
  Table A; Target 90031; HLA-B*08:01; TRPM1; ENSG00000134160; TAA
LPKLLISV

SEQ ID NO: 90032 - protein, 8 aa, Homo sapiens
  Table A; Target 90032; HLA-B*51:01; TRPM1; ENSG00000134160; TAA
LPKLLISV

SEQ ID NO: 90033 - protein, 8 aa, Homo sapiens
  Table A; Target 90033; HLA-B*54:01; TRPM1; ENSG00000134160; TAA
LPKLLISV

SEQ ID NO: 90034 - protein, 8 aa, Homo sapiens
  Table A; Target 90034; HLA-B*56:01; TRPM1; ENSG00000134160; TAA
LPKLLISV

SEQ ID NO: 90035 - protein, 9 aa, Homo sapiens
  Table A; Target 90035; HLA-B*07:02; TRPM1; ENSG00000134160; TAA
LPPDYHISL

SEQ ID NO: 90036 - protein, 9 aa, Homo sapiens
  Table A; Target 90036; HLA-B*08:01; TRPM1; ENSG00000134160; TAA
LPPDYHISL

SEQ ID NO: 90037 - protein, 9 aa, Homo sapiens
  Table A; Target 90037; HLA-B*35:01; TRPM1; ENSG00000134160; TAA
LPPDYHISL

SEQ ID NO: 90038 - protein, 9 aa, Homo sapiens
  Table A; Target 90038; HLA-B*35:03; TRPM1; ENSG00000134160; TAA
LPPDYHISL

SEQ ID NO: 90039 - protein, 9 aa, Homo sapiens
  Table A; Target 90039; HLA-B*51:01; TRPM1; ENSG00000134160; TAA
LPPDYHISL

SEQ ID NO: 90040 - protein, 9 aa, Homo sapiens
  Table A; Target 90040; HLA-B*54:01; TRPM1; ENSG00000134160; TAA
LPPDYHISL

SEQ ID NO: 90041 - protein, 9 aa, Homo sapiens
  Table A; Target 90041; HLA-C*01:02; TRPM1; ENSG00000134160; TAA
LPPDYHISL

SEQ ID NO: 90042 - protein, 9 aa, Homo sapiens
  Table A; Target 90042; HLA-C*07:02; TRPM1; ENSG00000134160; TAA
LPPDYHISL

SEQ ID NO: 90043 - protein, 10 aa, Homo sapiens
  Table A; Target 90043; HLA-B*51:01; TRPM1; ENSG00000134160; TAA
LPPDYHISLI

SEQ ID NO: 90044 - protein, 8 aa, Homo sapiens
  Table A; Target 90044; HLA-B*51:01; TRPM1; ENSG00000134160; TAA
LPPTILFL

SEQ ID NO: 90045 - protein, 9 aa, Homo sapiens
  Table A; Target 90045; HLA-B*39:01; TRPM1; ENSG00000134160; TAA
LQEEPPIPV

SEQ ID NO: 90046 - protein, 9 aa, Homo sapiens
  Table A; Target 90046; HLA-C*05:01; TRPM1; ENSG00000134160; TAA
LQEEPPIPV

SEQ ID NO: 90047 - protein, 11 aa, Homo sapiens
  Table A; Target 90047; HLA-B*38:01; TRPM1; ENSG00000134160; TAA
LQEEPPIPVVI

SEQ ID NO: 90048 - protein, 8 aa, Homo sapiens
  Table A; Target 90048; HLA-B*08:01; TRPM1; ENSG00000134160; TAA
LQKINTRL

SEQ ID NO: 90049 - protein, 9 aa, Homo sapiens
  Table A; Target 90049; HLA-A*11:01; TRPM1; ENSG00000134160; TAA
LQNFEMQPK

SEQ ID NO: 90050 - protein, 9 aa, Homo sapiens
  Table A; Target 90050; HLA-B*27:02; TRPM1; ENSG00000134160; TAA
LQNFEMQPK

SEQ ID NO: 90051 - protein, 9 aa, Homo sapiens
  Table A; Target 90051; HLA-A*26:01; TRPM1; ENSG00000134160; TAA
LQNQPYMGY

SEQ ID NO: 90052 - protein, 9 aa, Homo sapiens
  Table A; Target 90052; HLA-A*29:02; TRPM1; ENSG00000134160; TAA
LQNQPYMGY

SEQ ID NO: 90053 - protein, 9 aa, Homo sapiens
  Table A; Target 90053; HLA-A*30:02; TRPM1; ENSG00000134160; TAA
LQNQPYMGY

SEQ ID NO: 90054 - protein, 9 aa, Homo sapiens
  Table A; Target 90054; HLA-A*32:01; TRPM1; ENSG00000134160; TAA
LQNQPYMGY

SEQ ID NO: 90055 - protein, 9 aa, Homo sapiens
  Table A; Target 90055; HLA-B*15:01; TRPM1; ENSG00000134160; TAA
LQNQPYMGY

SEQ ID NO: 90056 - protein, 9 aa, Homo sapiens
  Table A; Target 90056; HLA-B*15:03; TRPM1; ENSG00000134160; TAA
LQNQPYMGY

SEQ ID NO: 90057 - protein, 9 aa, Homo sapiens
  Table A; Target 90057; HLA-B*46:01; TRPM1; ENSG00000134160; TAA
LQNQPYMGY

SEQ ID NO: 90058 - protein, 9 aa, Homo sapiens
  Table A; Target 90058; HLA-C*07:04; TRPM1; ENSG00000134160; TAA
LQNQPYMGY

SEQ ID NO: 90059 - protein, 9 aa, Homo sapiens
  Table A; Target 90059; HLA-C*14:02; TRPM1; ENSG00000134160; TAA
LQNQPYMGY

SEQ ID NO: 90060 - protein, 9 aa, Homo sapiens
  Table A; Target 90060; HLA-C*16:01; TRPM1; ENSG00000134160; TAA
LQNQPYMGY

SEQ ID NO: 90061 - protein, 9 aa, Homo sapiens
  Table A; Target 90061; HLA-C*16:04; TRPM1; ENSG00000134160; TAA
LQNQPYMGY

SEQ ID NO: 90062 - protein, 9 aa, Homo sapiens
  Table A; Target 90062; HLA-B*27:05; TRPM1; ENSG00000134160; TAA
LRLAQLEEL

SEQ ID NO: 90063 - protein, 9 aa, Homo sapiens
  Table A; Target 90063; HLA-C*05:01; TRPM1; ENSG00000134160; TAA
LSDEELKRL

SEQ ID NO: 90064 - protein, 9 aa, Homo sapiens
  Table A; Target 90064; HLA-B*58:01; TRPM1; ENSG00000134160; TAA
LSNRMVNAL

SEQ ID NO: 90065 - protein, 9 aa, Homo sapiens
  Table A; Target 90065; HLA-C*01:02; TRPM1; ENSG00000134160; TAA
LSNRMVNAL

SEQ ID NO: 90066 - protein, 9 aa, Homo sapiens
  Table A; Target 90066; HLA-C*03:04; TRPM1; ENSG00000134160; TAA
LSNRMVNAL

SEQ ID NO: 90067 - protein, 9 aa, Homo sapiens
  Table A; Target 90067; HLA-C*07:04; TRPM1; ENSG00000134160; TAA
LSNRMVNAL

SEQ ID NO: 90068 - protein, 9 aa, Homo sapiens
  Table A; Target 90068; HLA-C*16:01; TRPM1; ENSG00000134160; TAA
LSNRMVNAL

SEQ ID NO: 90069 - protein, 9 aa, Homo sapiens
  Table A; Target 90069; HLA-C*03:03; TRPM1; ENSG00000134160; TAA
LSTSPGTGV

SEQ ID NO: 90070 - protein, 9 aa, Homo sapiens
  Table A; Target 90070; HLA-C*03:04; TRPM1; ENSG00000134160; TAA
LSTSPGTGV

SEQ ID NO: 90071 - protein, 9 aa, Homo sapiens
  Table A; Target 90071; HLA-C*05:01; TRPM1; ENSG00000134160; TAA
LSTSPGTGV

SEQ ID NO: 90072 - protein, 11 aa, Homo sapiens
  Table A; Target 90072; HLA-A*03:02; TRPM1; ENSG00000134160; TAA
LSTSPGTGVRK

SEQ ID NO: 90073 - protein, 11 aa, Homo sapiens
  Table A; Target 90073; HLA-A*11:01; TRPM1; ENSG00000134160; TAA
LSTSPGTGVRK

SEQ ID NO: 90074 - protein, 9 aa, Homo sapiens
  Table A; Target 90074; HLA-B*58:01; TRPM1; ENSG00000134160; TAA
LSVKPDQTL

SEQ ID NO: 90075 - protein, 9 aa, Homo sapiens
  Table A; Target 90075; HLA-C*03:03; TRPM1; ENSG00000134160; TAA
LSVKPDQTL

SEQ ID NO: 90076 - protein, 9 aa, Homo sapiens
  Table A; Target 90076; HLA-C*03:04; TRPM1; ENSG00000134160; TAA
LSVKPDQTL

SEQ ID NO: 90077 - protein, 11 aa, Homo sapiens
  Table A; Target 90077; HLA-B*57:01; TRPM1; ENSG00000134160; TAA
LSVKPDQTLGF

SEQ ID NO: 90078 - protein, 9 aa, Homo sapiens
  Table A; Target 90078; HLA-A*02:01; TRPM1; ENSG00000134160; TAA
LTIPRLEEL

SEQ ID NO: 90079 - protein, 9 aa, Homo sapiens
  Table A; Target 90079; HLA-A*02:03; TRPM1; ENSG00000134160; TAA
LTIPRLEEL

SEQ ID NO: 90080 - protein, 9 aa, Homo sapiens
  Table A; Target 90080; HLA-A*02:04; TRPM1; ENSG00000134160; TAA
LTIPRLEEL

SEQ ID NO: 90081 - protein, 9 aa, Homo sapiens
  Table A; Target 90081; HLA-A*02:07; TRPM1; ENSG00000134160; TAA
LTIPRLEEL

SEQ ID NO: 90082 - protein, 9 aa, Homo sapiens
  Table A; Target 90082; HLA-A*24:02; TRPM1; ENSG00000134160; TAA
LTIPRLEEL

SEQ ID NO: 90083 - protein, 9 aa, Homo sapiens
  Table A; Target 90083; HLA-A*25:01; TRPM1; ENSG00000134160; TAA
LTIPRLEEL

SEQ ID NO: 90084 - protein, 9 aa, Homo sapiens
  Table A; Target 90084; HLA-A*68:02; TRPM1; ENSG00000134160; TAA
LTIPRLEEL

SEQ ID NO: 90085 - protein, 9 aa, Homo sapiens
  Table A; Target 90085; HLA-B*46:01; TRPM1; ENSG00000134160; TAA
LTIPRLEEL

SEQ ID NO: 90086 - protein, 9 aa, Homo sapiens
  Table A; Target 90086; HLA-B*58:01; TRPM1; ENSG00000134160; TAA
LTIPRLEEL

SEQ ID NO: 90087 - protein, 9 aa, Homo sapiens
  Table A; Target 90087; HLA-C*02:02; TRPM1; ENSG00000134160; TAA
LTIPRLEEL

SEQ ID NO: 90088 - protein, 9 aa, Homo sapiens
  Table A; Target 90088; HLA-C*03:03; TRPM1; ENSG00000134160; TAA
LTIPRLEEL

SEQ ID NO: 90089 - protein, 9 aa, Homo sapiens
  Table A; Target 90089; HLA-C*03:04; TRPM1; ENSG00000134160; TAA
LTIPRLEEL

SEQ ID NO: 90090 - protein, 9 aa, Homo sapiens
  Table A; Target 90090; HLA-C*16:01; TRPM1; ENSG00000134160; TAA
LTIPRLEEL

SEQ ID NO: 90091 - protein, 9 aa, Homo sapiens
  Table A; Target 90091; HLA-C*16:02; TRPM1; ENSG00000134160; TAA
LTIPRLEEL

SEQ ID NO: 90092 - protein, 10 aa, Homo sapiens
  Table A; Target 90092; HLA-A*01:01; TRPM1; ENSG00000134160; TAA
LTIPRLEELY

SEQ ID NO: 90093 - protein, 10 aa, Homo sapiens
  Table A; Target 90093; HLA-B*57:01; TRPM1; ENSG00000134160; TAA
LTIPRLEELY

SEQ ID NO: 90094 - protein, 9 aa, Homo sapiens
  Table A; Target 90094; HLA-A*29:02; TRPM1; ENSG00000134160; TAA
LTPALMACY

SEQ ID NO: 90095 - protein, 9 aa, Homo sapiens
  Table A; Target 90095; HLA-A*30:02; TRPM1; ENSG00000134160; TAA
LTPALMACY

SEQ ID NO: 90096 - protein, 10 aa, Homo sapiens
  Table A; Target 90096; HLA-A*68:02; TRPM1; ENSG00000134160; TAA
LVANILLVNL

SEQ ID NO: 90097 - protein, 9 aa, Homo sapiens
  Table A; Target 90097; HLA-A*01:01; TRPM1; ENSG00000134160; TAA
LVDDISQDL

SEQ ID NO: 90098 - protein, 9 aa, Homo sapiens
  Table A; Target 90098; HLA-A*02:07; TRPM1; ENSG00000134160; TAA
LVDDISQDL

SEQ ID NO: 90099 - protein, 9 aa, Homo sapiens
  Table A; Target 90099; HLA-B*27:05; TRPM1; ENSG00000134160; TAA
LVDDISQDL

SEQ ID NO: 90100 - protein, 9 aa, Homo sapiens
  Table A; Target 90100; HLA-B*35:03; TRPM1; ENSG00000134160; TAA
LVDDISQDL

SEQ ID NO: 90101 - protein, 9 aa, Homo sapiens
  Table A; Target 90101; HLA-B*38:01; TRPM1; ENSG00000134160; TAA
LVDDISQDL

SEQ ID NO: 90102 - protein, 9 aa, Homo sapiens
  Table A; Target 90102; HLA-C*04:01; TRPM1; ENSG00000134160; TAA
LVDDISQDL

SEQ ID NO: 90103 - protein, 9 aa, Homo sapiens
  Table A; Target 90103; HLA-C*05:01; TRPM1; ENSG00000134160; TAA
LVDDISQDL

SEQ ID NO: 90104 - protein, 9 aa, Homo sapiens
  Table A; Target 90104; HLA-C*07:04; TRPM1; ENSG00000134160; TAA
LVDDISQDL

SEQ ID NO: 90105 - protein, 11 aa, Homo sapiens
  Table A; Target 90105; HLA-C*07:04; TRPM1; ENSG00000134160; TAA
LVGGVNQDVEY

SEQ ID NO: 90106 - protein, 9 aa, Homo sapiens
  Table A; Target 90106; HLA-B*46:01; TRPM1; ENSG00000134160; TAA
LVIVSGMTA

SEQ ID NO: 90107 - protein, 9 aa, Homo sapiens
  Table A; Target 90107; HLA-B*54:01; TRPM1; ENSG00000134160; TAA
LVIVSGMTA

SEQ ID NO: 90108 - protein, 9 aa, Homo sapiens
  Table A; Target 90108; HLA-C*01:02; TRPM1; ENSG00000134160; TAA
LVIVSGMTA

SEQ ID NO: 90109 - protein, 9 aa, Homo sapiens
  Table A; Target 90109; HLA-C*03:03; TRPM1; ENSG00000134160; TAA
LVIVSGMTA

SEQ ID NO: 90110 - protein, 9 aa, Homo sapiens
  Table A; Target 90110; HLA-C*03:04; TRPM1; ENSG00000134160; TAA
LVIVSGMTA

SEQ ID NO: 90111 - protein, 9 aa, Homo sapiens
  Table A; Target 90111; HLA-A*02:01; TRPM1; ENSG00000134160; TAA
LVLDRVDFV

SEQ ID NO: 90112 - protein, 9 aa, Homo sapiens
  Table A; Target 90112; HLA-A*02:03; TRPM1; ENSG00000134160; TAA
LVLDRVDFV

SEQ ID NO: 90113 - protein, 9 aa, Homo sapiens
  Table A; Target 90113; HLA-A*02:04; TRPM1; ENSG00000134160; TAA
LVLDRVDFV

SEQ ID NO: 90114 - protein, 9 aa, Homo sapiens
  Table A; Target 90114; HLA-A*02:07; TRPM1; ENSG00000134160; TAA
LVLDRVDFV

SEQ ID NO: 90115 - protein, 9 aa, Homo sapiens
  Table A; Target 90115; HLA-A*68:02; TRPM1; ENSG00000134160; TAA
LVLDRVDFV

SEQ ID NO: 90116 - protein, 9 aa, Homo sapiens
  Table A; Target 90116; HLA-B*35:01; TRPM1; ENSG00000134160; TAA
LVNLLIAVF

SEQ ID NO: 90117 - protein, 9 aa, Homo sapiens
  Table A; Target 90117; HLA-C*01:02; TRPM1; ENSG00000134160; TAA
LVPECQNSL

SEQ ID NO: 90118 - protein, 10 aa, Homo sapiens
  Table A; Target 90118; HLA-A*29:02; TRPM1; ENSG00000134160; TAA
LVTIQKTFNY

SEQ ID NO: 90119 - protein, 10 aa, Homo sapiens
  Table A; Target 90119; HLA-A*30:02; TRPM1; ENSG00000134160; TAA
LVTIQKTFNY

SEQ ID NO: 90120 - protein, 9 aa, Homo sapiens
  Table A; Target 90120; HLA-A*02:01; TRPM1; ENSG00000134160; TAA
LVVEGGPNV

SEQ ID NO: 90121 - protein, 9 aa, Homo sapiens
  Table A; Target 90121; HLA-A*02:07; TRPM1; ENSG00000134160; TAA
LVVEGGPNV

SEQ ID NO: 90122 - protein, 9 aa, Homo sapiens
  Table A; Target 90122; HLA-C*03:04; TRPM1; ENSG00000134160; TAA
LVVEGGPNV

SEQ ID NO: 90123 - protein, 10 aa, Homo sapiens
  Table A; Target 90123; HLA-B*35:03; TRPM1; ENSG00000134160; TAA
MAHESSESDL

SEQ ID NO: 90124 - protein, 10 aa, Homo sapiens
  Table A; Target 90124; HLA-C*03:03; TRPM1; ENSG00000134160; TAA
MAHESSESDL

SEQ ID NO: 90125 - protein, 10 aa, Homo sapiens
  Table A; Target 90125; HLA-C*03:04; TRPM1; ENSG00000134160; TAA
MAHESSESDL

SEQ ID NO: 90126 - protein, 8 aa, Homo sapiens
  Table A; Target 90126; HLA-B*51:01; TRPM1; ENSG00000134160; TAA
MAILTALL

SEQ ID NO: 90127 - protein, 8 aa, Homo sapiens
  Table A; Target 90127; HLA-B*08:01; TRPM1; ENSG00000134160; TAA
MAKALVAC

SEQ ID NO: 90128 - protein, 8 aa, Homo sapiens
  Table A; Target 90128; HLA-B*54:01; TRPM1; ENSG00000134160; TAA
MAKALVAC

SEQ ID NO: 90129 - protein, 9 aa, Homo sapiens
  Table A; Target 90129; HLA-A*33:03; TRPM1; ENSG00000134160; TAA
MAKALVACK

SEQ ID NO: 90130 - protein, 10 aa, Homo sapiens
  Table A; Target 90130; HLA-B*39:01; TRPM1; ENSG00000134160; TAA
MEDDEPPAKG

SEQ ID NO: 90131 - protein, 11 aa, Homo sapiens
  Table A; Target 90131; HLA-B*40:01; TRPM1; ENSG00000134160; TAA
MEINPPCGENL

SEQ ID NO: 90132 - protein, 8 aa, Homo sapiens
  Table A; Target 90132; HLA-B*18:01; TRPM1; ENSG00000134160; TAA
MENLLSVK

SEQ ID NO: 90133 - protein, 9 aa, Homo sapiens
  Table A; Target 90133; HLA-C*07:01; TRPM1; ENSG00000134160; TAA
MGGAYRCNY

SEQ ID NO: 90134 - protein, 9 aa, Homo sapiens
  Table A; Target 90134; HLA-B*51:01; TRPM1; ENSG00000134160; TAA
MGILLPPTI

SEQ ID NO: 90135 - protein, 11 aa, Homo sapiens
  Table A; Target 90135; HLA-B*55:01; TRPM1; ENSG00000134160; TAA
MGSEGQQDIEM

SEQ ID NO: 90136 - protein, 8 aa, Homo sapiens
  Table A; Target 90136; HLA-B*08:01; TRPM1; ENSG00000134160; TAA
MGYGRVIY

SEQ ID NO: 90137 - protein, 8 aa, Homo sapiens
  Table A; Target 90137; HLA-C*12:03; TRPM1; ENSG00000134160; TAA
MGYGRVIY

SEQ ID NO: 90138 - protein, 8 aa, Homo sapiens
  Table A; Target 90138; HLA-C*16:01; TRPM1; ENSG00000134160; TAA
MGYGRVIY

SEQ ID NO: 90139 - protein, 9 aa, Homo sapiens
  Table A; Target 90139; HLA-A*02:07; TRPM1; ENSG00000134160; TAA
MIDMLYFVV

SEQ ID NO: 90140 - protein, 8 aa, Homo sapiens
  Table A; Target 90140; HLA-A*02:04; TRPM1; ENSG00000134160; TAA
MIGAILRL

SEQ ID NO: 90141 - protein, 9 aa, Homo sapiens
  Table A; Target 90141; HLA-A*01:01; TRPM1; ENSG00000134160; TAA
MLDALVLDR

SEQ ID NO: 90142 - protein, 10 aa, Homo sapiens
  Table A; Target 90142; HLA-A*02:07; TRPM1; ENSG00000134160; TAA
MLDALVLDRV

SEQ ID NO: 90143 - protein, 11 aa, Homo sapiens
  Table A; Target 90143; HLA-A*02:04; TRPM1; ENSG00000134160; TAA
MLLTDMWMGRL

SEQ ID NO: 90144 - protein, 9 aa, Homo sapiens
  Table A; Target 90144; HLA-A*02:04; TRPM1; ENSG00000134160; TAA
MLYFVVIML

SEQ ID NO: 90145 - protein, 9 aa, Homo sapiens
  Table A; Target 90145; HLA-A*02:07; TRPM1; ENSG00000134160; TAA
MLYFVVIML

SEQ ID NO: 90146 - protein, 10 aa, Homo sapiens
  Table A; Target 90146; HLA-B*54:01; TRPM1; ENSG00000134160; TAA
MPYWMIYGEV

SEQ ID NO: 90147 - protein, 9 aa, Homo sapiens
  Table A; Target 90147; HLA-A*24:02; TRPM1; ENSG00000134160; TAA
MQPKLKQVF

SEQ ID NO: 90148 - protein, 9 aa, Homo sapiens
  Table A; Target 90148; HLA-B*27:02; TRPM1; ENSG00000134160; TAA
MRLEEINER

SEQ ID NO: 90149 - protein, 9 aa, Homo sapiens
  Table A; Target 90149; HLA-B*27:05; TRPM1; ENSG00000134160; TAA
MRLEEINER

SEQ ID NO: 90150 - protein, 9 aa, Homo sapiens
  Table A; Target 90150; HLA-A*01:01; TRPM1; ENSG00000134160; TAA
MSEPGKLSQ

SEQ ID NO: 90151 - protein, 10 aa, Homo sapiens
  Table A; Target 90151; HLA-A*01:01; TRPM1; ENSG00000134160; TAA
MSEPGKLSQK

SEQ ID NO: 90152 - protein, 9 aa, Homo sapiens
  Table A; Target 90152; HLA-B*54:01; TRPM1; ENSG00000134160; TAA
MSFGVARQA

SEQ ID NO: 90153 - protein, 9 aa, Homo sapiens
  Table A; Target 90153; HLA-B*56:01; TRPM1; ENSG00000134160; TAA
MSFGVARQA

SEQ ID NO: 90154 - protein, 9 aa, Homo sapiens
  Table A; Target 90154; HLA-C*16:01; TRPM1; ENSG00000134160; TAA
MSFGVARQA

SEQ ID NO: 90155 - protein, 8 aa, Homo sapiens
  Table A; Target 90155; HLA-B*08:01; TRPM1; ENSG00000134160; TAA
MSNPLSKL

SEQ ID NO: 90156 - protein, 8 aa, Homo sapiens
  Table A; Target 90156; HLA-C*03:04; TRPM1; ENSG00000134160; TAA
MSNPLSKL

SEQ ID NO: 90157 - protein, 8 aa, Homo sapiens
  Table A; Target 90157; HLA-C*16:01; TRPM1; ENSG00000134160; TAA
MSNPLSKL

SEQ ID NO: 90158 - protein, 10 aa, Homo sapiens
  Table A; Target 90158; HLA-B*54:01; TRPM1; ENSG00000134160; TAA
MSNPLSKLSV

SEQ ID NO: 90159 - protein, 10 aa, Homo sapiens
  Table A; Target 90159; HLA-C*16:04; TRPM1; ENSG00000134160; TAA
MSNPLSKLSV

SEQ ID NO: 90160 - protein, 9 aa, Homo sapiens
  Table A; Target 90160; HLA-A*11:01; TRPM1; ENSG00000134160; TAA
MTAEEKKVK

SEQ ID NO: 90161 - protein, 10 aa, Homo sapiens
  Table A; Target 90161; HLA-A*68:01; TRPM1; ENSG00000134160; TAA
MTAEEKKVKK

SEQ ID NO: 90162 - protein, 9 aa, Homo sapiens
  Table A; Target 90162; HLA-A*02:04; TRPM1; ENSG00000134160; TAA
MVKDWQLEL

SEQ ID NO: 90163 - protein, 9 aa, Homo sapiens
  Table A; Target 90163; HLA-B*54:01; TRPM1; ENSG00000134160; TAA
MVNALENLA

SEQ ID NO: 90164 - protein, 9 aa, Homo sapiens
  Table A; Target 90164; HLA-A*31:01; TRPM1; ENSG00000134160; TAA
MVWAVLMKR

SEQ ID NO: 90165 - protein, 8 aa, Homo sapiens
  Table A; Target 90165; HLA-C*05:01; TRPM1; ENSG00000134160; TAA
NADAGSRK

SEQ ID NO: 90166 - protein, 9 aa, Homo sapiens
  Table A; Target 90166; HLA-B*51:01; TRPM1; ENSG00000134160; TAA
NALENLAGI

SEQ ID NO: 90167 - protein, 11 aa, Homo sapiens
  Table A; Target 90167; HLA-C*07:06; TRPM1; ENSG00000134160; TAA
NALENLAGIDR

SEQ ID NO: 90168 - protein, 8 aa, Homo sapiens
  Table A; Target 90168; HLA-B*35:03; TRPM1; ENSG00000134160; TAA
NALEQAML

SEQ ID NO: 90169 - protein, 8 aa, Homo sapiens
  Table A; Target 90169; HLA-B*51:01; TRPM1; ENSG00000134160; TAA
NALEQAML

SEQ ID NO: 90170 - protein, 8 aa, Homo sapiens
  Table A; Target 90170; HLA-B*37:01; TRPM1; ENSG00000134160; TAA
NESLREQL

SEQ ID NO: 90171 - protein, 9 aa, Homo sapiens
  Table A; Target 90171; HLA-B*37:01; TRPM1; ENSG00000134160; TAA
NESLREQLL

SEQ ID NO: 90172 - protein, 9 aa, Homo sapiens
  Table A; Target 90172; HLA-B*40:01; TRPM1; ENSG00000134160; TAA
NESLREQLL

SEQ ID NO: 90173 - protein, 9 aa, Homo sapiens
  Table A; Target 90173; HLA-B*44:02; TRPM1; ENSG00000134160; TAA
NESLREQLL

SEQ ID NO: 90174 - protein, 9 aa, Homo sapiens
  Table A; Target 90174; HLA-A*02:01; TRPM1; ENSG00000134160; TAA
NGMENLLSV

SEQ ID NO: 90175 - protein, 9 aa, Homo sapiens
  Table A; Target 90175; HLA-B*13:02; TRPM1; ENSG00000134160; TAA
NGMENLLSV

SEQ ID NO: 90176 - protein, 9 aa, Homo sapiens
  Table A; Target 90176; HLA-B*51:01; TRPM1; ENSG00000134160; TAA
NGMENLLSV

SEQ ID NO: 90177 - protein, 9 aa, Homo sapiens
  Table A; Target 90177; HLA-B*54:01; TRPM1; ENSG00000134160; TAA
NGMENLLSV

SEQ ID NO: 90178 - protein, 9 aa, Homo sapiens
  Table A; Target 90178; HLA-B*56:01; TRPM1; ENSG00000134160; TAA
NGMENLLSV

SEQ ID NO: 90179 - protein, 10 aa, Homo sapiens
  Table A; Target 90179; HLA-A*11:01; TRPM1; ENSG00000134160; TAA
NGMENLLSVK

SEQ ID NO: 90180 - protein, 8 aa, Homo sapiens
  Table A; Target 90180; HLA-A*01:01; TRPM1; ENSG00000134160; TAA
NIEGTISY

SEQ ID NO: 90181 - protein, 11 aa, Homo sapiens
  Table A; Target 90181; HLA-A*25:01; TRPM1; ENSG00000134160; TAA
NITDLVAISTF

SEQ ID NO: 90182 - protein, 11 aa, Homo sapiens
  Table A; Target 90182; HLA-A*26:01; TRPM1; ENSG00000134160; TAA
NITDLVAISTF

SEQ ID NO: 90183 - protein, 9 aa, Homo sapiens
  Table A; Target 90183; HLA-B*15:03; TRPM1; ENSG00000134160; TAA
NKAQSHQLF

SEQ ID NO: 90184 - protein, 9 aa, Homo sapiens
  Table A; Target 90184; HLA-B*15:03; TRPM1; ENSG00000134160; TAA
NKYLGPYVM

SEQ ID NO: 90185 - protein, 9 aa, Homo sapiens
  Table A; Target 90185; HLA-A*03:01; TRPM1; ENSG00000134160; TAA
NLFGPKRPK

SEQ ID NO: 90186 - protein, 10 aa, Homo sapiens
  Table A; Target 90186; HLA-A*02:07; TRPM1; ENSG00000134160; TAA
NLPPDYHISL

SEQ ID NO: 90187 - protein, 8 aa, Homo sapiens
  Table A; Target 90187; HLA-B*08:01; TRPM1; ENSG00000134160; TAA
NPGLKVIM

SEQ ID NO: 90188 - protein, 8 aa, Homo sapiens
  Table A; Target 90188; HLA-B*08:01; TRPM1; ENSG00000134160; TAA
NPLSKLSV

SEQ ID NO: 90189 - protein, 8 aa, Homo sapiens
  Table A; Target 90189; HLA-B*51:01; TRPM1; ENSG00000134160; TAA
NPLSKLSV

SEQ ID NO: 90190 - protein, 9 aa, Homo sapiens
  Table A; Target 90190; HLA-B*07:02; TRPM1; ENSG00000134160; TAA
NPLSKLSVL

SEQ ID NO: 90191 - protein, 9 aa, Homo sapiens
  Table A; Target 90191; HLA-B*08:01; TRPM1; ENSG00000134160; TAA
NPLSKLSVL

SEQ ID NO: 90192 - protein, 9 aa, Homo sapiens
  Table A; Target 90192; HLA-B*35:01; TRPM1; ENSG00000134160; TAA
NPLSKLSVL

SEQ ID NO: 90193 - protein, 9 aa, Homo sapiens
  Table A; Target 90193; HLA-B*35:03; TRPM1; ENSG00000134160; TAA
NPLSKLSVL

SEQ ID NO: 90194 - protein, 9 aa, Homo sapiens
  Table A; Target 90194; HLA-B*51:01; TRPM1; ENSG00000134160; TAA
NPLSKLSVL

SEQ ID NO: 90195 - protein, 9 aa, Homo sapiens
  Table A; Target 90195; HLA-B*55:01; TRPM1; ENSG00000134160; TAA
NPLSKLSVL

SEQ ID NO: 90196 - protein, 9 aa, Homo sapiens
  Table A; Target 90196; HLA-B*56:01; TRPM1; ENSG00000134160; TAA
NPLSKLSVL

SEQ ID NO: 90197 - protein, 9 aa, Homo sapiens
  Table A; Target 90197; HLA-C*07:02; TRPM1; ENSG00000134160; TAA
NPLSKLSVL

SEQ ID NO: 90198 - protein, 9 aa, Homo sapiens
  Table A; Target 90198; HLA-B*38:01; TRPM1; ENSG00000134160; TAA
NQDVEYSSI

SEQ ID NO: 90199 - protein, 9 aa, Homo sapiens
  Table A; Target 90199; HLA-B*39:01; TRPM1; ENSG00000134160; TAA
NQDVEYSSI

SEQ ID NO: 90200 - protein, 9 aa, Homo sapiens
  Table A; Target 90200; HLA-C*05:01; TRPM1; ENSG00000134160; TAA
NQDVEYSSI

SEQ ID NO: 90201 - protein, 8 aa, Homo sapiens
  Table A; Target 90201; HLA-B*35:03; TRPM1; ENSG00000134160; TAA
NSADGYSL

SEQ ID NO: 90202 - protein, 8 aa, Homo sapiens
  Table A; Target 90202; HLA-B*39:01; TRPM1; ENSG00000134160; TAA
NSADGYSL

SEQ ID NO: 90203 - protein, 8 aa, Homo sapiens
  Table A; Target 90203; HLA-C*01:02; TRPM1; ENSG00000134160; TAA
NSADGYSL

SEQ ID NO: 90204 - protein, 8 aa, Homo sapiens
  Table A; Target 90204; HLA-C*03:03; TRPM1; ENSG00000134160; TAA
NSADGYSL

SEQ ID NO: 90205 - protein, 8 aa, Homo sapiens
  Table A; Target 90205; HLA-C*03:04; TRPM1; ENSG00000134160; TAA
NSADGYSL

SEQ ID NO: 90206 - protein, 8 aa, Homo sapiens
  Table A; Target 90206; HLA-C*05:01; TRPM1; ENSG00000134160; TAA
NSADGYSL

SEQ ID NO: 90207 - protein, 8 aa, Homo sapiens
  Table A; Target 90207; HLA-C*14:02; TRPM1; ENSG00000134160; TAA
NSADGYSL

SEQ ID NO: 90208 - protein, 8 aa, Homo sapiens
  Table A; Target 90208; HLA-C*16:01; TRPM1; ENSG00000134160; TAA
NSADGYSL

SEQ ID NO: 90209 - protein, 9 aa, Homo sapiens
  Table A; Target 90209; HLA-A*01:01; TRPM1; ENSG00000134160; TAA
NSADGYSLY

SEQ ID NO: 90210 - protein, 9 aa, Homo sapiens
  Table A; Target 90210; HLA-A*25:01; TRPM1; ENSG00000134160; TAA
NSADGYSLY

SEQ ID NO: 90211 - protein, 9 aa, Homo sapiens
  Table A; Target 90211; HLA-A*26:01; TRPM1; ENSG00000134160; TAA
NSADGYSLY

SEQ ID NO: 90212 - protein, 9 aa, Homo sapiens
  Table A; Target 90212; HLA-A*29:02; TRPM1; ENSG00000134160; TAA
NSADGYSLY

SEQ ID NO: 90213 - protein, 9 aa, Homo sapiens
  Table A; Target 90213; HLA-A*30:02; TRPM1; ENSG00000134160; TAA
NSADGYSLY

SEQ ID NO: 90214 - protein, 9 aa, Homo sapiens
  Table A; Target 90214; HLA-A*33:01; TRPM1; ENSG00000134160; TAA
NSADGYSLY

SEQ ID NO: 90215 - protein, 9 aa, Homo sapiens
  Table A; Target 90215; HLA-A*68:01; TRPM1; ENSG00000134160; TAA
NSADGYSLY

SEQ ID NO: 90216 - protein, 9 aa, Homo sapiens
  Table A; Target 90216; HLA-B*35:01; TRPM1; ENSG00000134160; TAA
NSADGYSLY

SEQ ID NO: 90217 - protein, 9 aa, Homo sapiens
  Table A; Target 90217; HLA-C*02:02; TRPM1; ENSG00000134160; TAA
NSADGYSLY

SEQ ID NO: 90218 - protein, 9 aa, Homo sapiens
  Table A; Target 90218; HLA-C*07:04; TRPM1; ENSG00000134160; TAA
NSADGYSLY

SEQ ID NO: 90219 - protein, 9 aa, Homo sapiens
  Table A; Target 90219; HLA-C*07:06; TRPM1; ENSG00000134160; TAA
NSADGYSLY

SEQ ID NO: 90220 - protein, 9 aa, Homo sapiens
  Table A; Target 90220; HLA-C*16:02; TRPM1; ENSG00000134160; TAA
NSADGYSLY

SEQ ID NO: 90221 - protein, 10 aa, Homo sapiens
  Table A; Target 90221; HLA-A*33:01; TRPM1; ENSG00000134160; TAA
NSADGYSLYR

SEQ ID NO: 90222 - protein, 10 aa, Homo sapiens
  Table A; Target 90222; HLA-A*33:03; TRPM1; ENSG00000134160; TAA
NSADGYSLYR

SEQ ID NO: 90223 - protein, 10 aa, Homo sapiens
  Table A; Target 90223; HLA-A*68:01; TRPM1; ENSG00000134160; TAA
NSADGYSLYR

SEQ ID NO: 90224 - protein, 10 aa, Homo sapiens
  Table A; Target 90224; HLA-C*07:06; TRPM1; ENSG00000134160; TAA
NSADGYSLYR

SEQ ID NO: 90225 - protein, 11 aa, Homo sapiens
  Table A; Target 90225; HLA-A*01:01; TRPM1; ENSG00000134160; TAA
NSADGYSLYRY

SEQ ID NO: 90226 - protein, 11 aa, Homo sapiens
  Table A; Target 90226; HLA-A*29:02; TRPM1; ENSG00000134160; TAA
NSADGYSLYRY

SEQ ID NO: 90227 - protein, 11 aa, Homo sapiens
  Table A; Target 90227; HLA-A*30:02; TRPM1; ENSG00000134160; TAA
NSADGYSLYRY

SEQ ID NO: 90228 - protein, 8 aa, Homo sapiens
  Table A; Target 90228; HLA-B*08:01; TRPM1; ENSG00000134160; TAA
NSHTHFIL

SEQ ID NO: 90229 - protein, 9 aa, Homo sapiens
  Table A; Target 90229; HLA-B*54:01; TRPM1; ENSG00000134160; TAA
NSHTHFILA

SEQ ID NO: 90230 - protein, 11 aa, Homo sapiens
  Table A; Target 90230; HLA-A*68:01; TRPM1; ENSG00000134160; TAA
NTDANADAGSR

SEQ ID NO: 90231 - protein, 9 aa, Homo sapiens
  Table A; Target 90231; HLA-A*02:03; TRPM1; ENSG00000134160; TAA
NTFFEVKSI

SEQ ID NO: 90232 - protein, 9 aa, Homo sapiens
  Table A; Target 90232; HLA-A*68:02; TRPM1; ENSG00000134160; TAA
NTFFEVKSI

SEQ ID NO: 90233 - protein, 9 aa, Homo sapiens
  Table A; Target 90233; HLA-B*51:01; TRPM1; ENSG00000134160; TAA
NTFFEVKSI

SEQ ID NO: 90234 - protein, 9 aa, Homo sapiens
  Table A; Target 90234; HLA-C*12:03; TRPM1; ENSG00000134160; TAA
NTFFEVKSI

SEQ ID NO: 90235 - protein, 9 aa, Homo sapiens
  Table A; Target 90235; HLA-C*16:02; TRPM1; ENSG00000134160; TAA
NTFFEVKSI

SEQ ID NO: 90236 - protein, 10 aa, Homo sapiens
  Table A; Target 90236; HLA-B*07:02; TRPM1; ENSG00000134160; TAA
NTRLGPPNTL

SEQ ID NO: 90237 - protein, 10 aa, Homo sapiens
  Table A; Target 90237; HLA-C*07:02; TRPM1; ENSG00000134160; TAA
NTRLGPPNTL

SEQ ID NO: 90238 - protein, 11 aa, Homo sapiens
  Table A; Target 90238; HLA-A*33:01; TRPM1; ENSG00000134160; TAA
NVKSIQGKLDR

SEQ ID NO: 90239 - protein, 10 aa, Homo sapiens
  Table A; Target 90239; HLA-C*07:06; TRPM1; ENSG00000134160; TAA
NVSAPDQLSL

SEQ ID NO: 90240 - protein, 9 aa, Homo sapiens
  Table A; Target 90240; HLA-A*01:01; TRPM1; ENSG00000134160; TAA
NVVSIVLEY

SEQ ID NO: 90241 - protein, 9 aa, Homo sapiens
  Table A; Target 90241; HLA-A*25:01; TRPM1; ENSG00000134160; TAA
NVVSIVLEY

SEQ ID NO: 90242 - protein, 9 aa, Homo sapiens
  Table A; Target 90242; HLA-A*26:01; TRPM1; ENSG00000134160; TAA
NVVSIVLEY

SEQ ID NO: 90243 - protein, 9 aa, Homo sapiens
  Table A; Target 90243; HLA-A*29:02; TRPM1; ENSG00000134160; TAA
NVVSIVLEY

SEQ ID NO: 90244 - protein, 9 aa, Homo sapiens
  Table A; Target 90244; HLA-A*30:02; TRPM1; ENSG00000134160; TAA
NVVSIVLEY

SEQ ID NO: 90245 - protein, 9 aa, Homo sapiens
  Table A; Target 90245; HLA-A*32:01; TRPM1; ENSG00000134160; TAA
NVVSIVLEY

SEQ ID NO: 90246 - protein, 9 aa, Homo sapiens
  Table A; Target 90246; HLA-A*68:01; TRPM1; ENSG00000134160; TAA
NVVSIVLEY

SEQ ID NO: 90247 - protein, 9 aa, Homo sapiens
  Table A; Target 90247; HLA-B*15:01; TRPM1; ENSG00000134160; TAA
NVVSIVLEY

SEQ ID NO: 90248 - protein, 9 aa, Homo sapiens
  Table A; Target 90248; HLA-B*18:01; TRPM1; ENSG00000134160; TAA
NVVSIVLEY

SEQ ID NO: 90249 - protein, 9 aa, Homo sapiens
  Table A; Target 90249; HLA-B*35:01; TRPM1; ENSG00000134160; TAA
NVVSIVLEY

SEQ ID NO: 90250 - protein, 9 aa, Homo sapiens
  Table A; Target 90250; HLA-B*44:03; TRPM1; ENSG00000134160; TAA
NVVSIVLEY

SEQ ID NO: 90251 - protein, 9 aa, Homo sapiens
  Table A; Target 90251; HLA-B*46:01; TRPM1; ENSG00000134160; TAA
NVVSIVLEY

SEQ ID NO: 90252 - protein, 9 aa, Homo sapiens
  Table A; Target 90252; HLA-C*02:02; TRPM1; ENSG00000134160; TAA
NVVSIVLEY

SEQ ID NO: 90253 - protein, 9 aa, Homo sapiens
  Table A; Target 90253; HLA-C*07:06; TRPM1; ENSG00000134160; TAA
NVVSIVLEY

SEQ ID NO: 90254 - protein, 9 aa, Homo sapiens
  Table A; Target 90254; HLA-C*12:03; TRPM1; ENSG00000134160; TAA
NVVSIVLEY

SEQ ID NO: 90255 - protein, 9 aa, Homo sapiens
  Table A; Target 90255; HLA-C*16:04; TRPM1; ENSG00000134160; TAA
NVVSIVLEY

SEQ ID NO: 90256 - protein, 10 aa, Homo sapiens
  Table A; Target 90256; HLA-A*68:02; TRPM1; ENSG00000134160; TAA
NVVSIVLEYL

SEQ ID NO: 90257 - protein, 8 aa, Homo sapiens
  Table A; Target 90257; HLA-C*14:02; TRPM1; ENSG00000134160; TAA
NYNKAQSH

SEQ ID NO: 90258 - protein, 10 aa, Homo sapiens
  Table A; Target 90258; HLA-A*23:01; TRPM1; ENSG00000134160; TAA
NYNKAQSHQL

SEQ ID NO: 90259 - protein, 10 aa, Homo sapiens
  Table A; Target 90259; HLA-A*24:02; TRPM1; ENSG00000134160; TAA
NYNKAQSHQL

SEQ ID NO: 90260 - protein, 11 aa, Homo sapiens
  Table A; Target 90260; HLA-A*23:01; TRPM1; ENSG00000134160; TAA
NYNKAQSHQLF

SEQ ID NO: 90261 - protein, 11 aa, Homo sapiens
  Table A; Target 90261; HLA-A*24:02; TRPM1; ENSG00000134160; TAA
NYNKAQSHQLF

SEQ ID NO: 90262 - protein, 8 aa, Homo sapiens
  Table A; Target 90262; HLA-B*37:01; TRPM1; ENSG00000134160; TAA
PDSLLHLM

SEQ ID NO: 90263 - protein, 8 aa, Homo sapiens
  Table A; Target 90263; HLA-B*07:02; TRPM1; ENSG00000134160; TAA
PGTGVRKK

SEQ ID NO: 90264 - protein, 8 aa, Homo sapiens
  Table A; Target 90264; HLA-C*06:02; TRPM1; ENSG00000134160; TAA
PGTGVRKK

SEQ ID NO: 90265 - protein, 8 aa, Homo sapiens
  Table A; Target 90265; HLA-C*07:02; TRPM1; ENSG00000134160; TAA
PGTGVRKK

SEQ ID NO: 90266 - protein, 10 aa, Homo sapiens
  Table A; Target 90266; HLA-A*01:01; TRPM1; ENSG00000134160; TAA
PLEETKITRY

SEQ ID NO: 90267 - protein, 10 aa, Homo sapiens
  Table A; Target 90267; HLA-A*01:01; TRPM1; ENSG00000134160; TAA
PTDSYGVLEF

SEQ ID NO: 90268 - protein, 9 aa, Homo sapiens
  Table A; Target 90268; HLA-C*14:02; TRPM1; ENSG00000134160; TAA
PYIVSEAAV

SEQ ID NO: 90269 - protein, 9 aa, Homo sapiens
  Table A; Target 90269; HLA-A*24:02; TRPM1; ENSG00000134160; TAA
PYMGYGRVI

SEQ ID NO: 90270 - protein, 9 aa, Homo sapiens
  Table A; Target 90270; HLA-B*35:03; TRPM1; ENSG00000134160; TAA
QAMLDALVL

SEQ ID NO: 90271 - protein, 9 aa, Homo sapiens
  Table A; Target 90271; HLA-B*39:01; TRPM1; ENSG00000134160; TAA
QAMLDALVL

SEQ ID NO: 90272 - protein, 9 aa, Homo sapiens
  Table A; Target 90272; HLA-C*03:03; TRPM1; ENSG00000134160; TAA
QAMLDALVL

SEQ ID NO: 90273 - protein, 9 aa, Homo sapiens
  Table A; Target 90273; HLA-C*03:04; TRPM1; ENSG00000134160; TAA
QAMLDALVL

SEQ ID NO: 90274 - protein, 11 aa, Homo sapiens
  Table A; Target 90274; HLA-B*27:02; TRPM1; ENSG00000134160; TAA
QAMLDALVLDR

SEQ ID NO: 90275 - protein, 9 aa, Homo sapiens
  Table A; Target 90275; HLA-A*31:01; TRPM1; ENSG00000134160; TAA
QCQVQKITR

SEQ ID NO: 90276 - protein, 9 aa, Homo sapiens
  Table A; Target 90276; HLA-A*30:01; TRPM1; ENSG00000134160; TAA
QEEPPIPVV

SEQ ID NO: 90277 - protein, 9 aa, Homo sapiens
  Table A; Target 90277; HLA-B*37:01; TRPM1; ENSG00000134160; TAA
QEEPPIPVV

SEQ ID NO: 90278 - protein, 9 aa, Homo sapiens
  Table A; Target 90278; HLA-B*40:01; TRPM1; ENSG00000134160; TAA
QEEPPIPVV

SEQ ID NO: 90279 - protein, 9 aa, Homo sapiens
  Table A; Target 90279; HLA-B*40:02; TRPM1; ENSG00000134160; TAA
QEEPPIPVV

SEQ ID NO: 90280 - protein, 9 aa, Homo sapiens
  Table A; Target 90280; HLA-B*44:02; TRPM1; ENSG00000134160; TAA
QEEPPIPVV

SEQ ID NO: 90281 - protein, 9 aa, Homo sapiens
  Table A; Target 90281; HLA-B*44:03; TRPM1; ENSG00000134160; TAA
QEEPPIPVV

SEQ ID NO: 90282 - protein, 9 aa, Homo sapiens
  Table A; Target 90282; HLA-B*49:01; TRPM1; ENSG00000134160; TAA
QEEPPIPVV

SEQ ID NO: 90283 - protein, 10 aa, Homo sapiens
  Table A; Target 90283; HLA-A*30:01; TRPM1; ENSG00000134160; TAA
QEEPPIPVVI

SEQ ID NO: 90284 - protein, 10 aa, Homo sapiens
  Table A; Target 90284; HLA-B*38:01; TRPM1; ENSG00000134160; TAA
QEEPPIPVVI

SEQ ID NO: 90285 - protein, 10 aa, Homo sapiens
  Table A; Target 90285; HLA-B*39:01; TRPM1; ENSG00000134160; TAA
QEEPPIPVVI

SEQ ID NO: 90286 - protein, 10 aa, Homo sapiens
  Table A; Target 90286; HLA-B*40:01; TRPM1; ENSG00000134160; TAA
QEEPPIPVVI

SEQ ID NO: 90287 - protein, 10 aa, Homo sapiens
  Table A; Target 90287; HLA-B*44:02; TRPM1; ENSG00000134160; TAA
QEEPPIPVVI

SEQ ID NO: 90288 - protein, 10 aa, Homo sapiens
  Table A; Target 90288; HLA-B*44:03; TRPM1; ENSG00000134160; TAA
QEEPPIPVVI

SEQ ID NO: 90289 - protein, 10 aa, Homo sapiens
  Table A; Target 90289; HLA-B*49:01; TRPM1; ENSG00000134160; TAA
QEEPPIPVVI

SEQ ID NO: 90290 - protein, 10 aa, Homo sapiens
  Table A; Target 90290; HLA-B*40:01; TRPM1; ENSG00000134160; TAA
QEERDRGLKL

SEQ ID NO: 90291 - protein, 8 aa, Homo sapiens
  Table A; Target 90291; HLA-B*18:01; TRPM1; ENSG00000134160; TAA
QEWIVISY

SEQ ID NO: 90292 - protein, 8 aa, Homo sapiens
  Table A; Target 90292; HLA-B*37:01; TRPM1; ENSG00000134160; TAA
QEWIVISY

SEQ ID NO: 90293 - protein, 8 aa, Homo sapiens
  Table A; Target 90293; HLA-B*44:02; TRPM1; ENSG00000134160; TAA
QEWIVISY

SEQ ID NO: 90294 - protein, 8 aa, Homo sapiens
  Table A; Target 90294; HLA-B*44:03; TRPM1; ENSG00000134160; TAA
QEWIVISY

SEQ ID NO: 90295 - protein, 9 aa, Homo sapiens
  Table A; Target 90295; HLA-B*44:02; TRPM1; ENSG00000134160; TAA
QEWIVISYI

SEQ ID NO: 90296 - protein, 9 aa, Homo sapiens
  Table A; Target 90296; HLA-B*49:01; TRPM1; ENSG00000134160; TAA
QEWIVISYI

SEQ ID NO: 90297 - protein, 9 aa, Homo sapiens
  Table A; Target 90297; HLA-A*30:01; TRPM1; ENSG00000134160; TAA
QEYWNITDL

SEQ ID NO: 90298 - protein, 9 aa, Homo sapiens
  Table A; Target 90298; HLA-B*37:01; TRPM1; ENSG00000134160; TAA
QEYWNITDL

SEQ ID NO: 90299 - protein, 9 aa, Homo sapiens
  Table A; Target 90299; HLA-B*40:01; TRPM1; ENSG00000134160; TAA
QEYWNITDL

SEQ ID NO: 90300 - protein, 9 aa, Homo sapiens
  Table A; Target 90300; HLA-B*49:01; TRPM1; ENSG00000134160; TAA
QEYWNITDL

SEQ ID NO: 90301 - protein, 10 aa, Homo sapiens
  Table A; Target 90301; HLA-B*49:01; TRPM1; ENSG00000134160; TAA
QEYWNITDLV

SEQ ID NO: 90302 - protein, 9 aa, Homo sapiens
  Table A; Target 90302; HLA-A*02:04; TRPM1; ENSG00000134160; TAA
QHFLTIPRL

SEQ ID NO: 90303 - protein, 9 aa, Homo sapiens
  Table A; Target 90303; HLA-B*38:01; TRPM1; ENSG00000134160; TAA
QHFLTIPRL

SEQ ID NO: 90304 - protein, 9 aa, Homo sapiens
  Table A; Target 90304; HLA-B*54:01; TRPM1; ENSG00000134160; TAA
QHIPPLPSA

SEQ ID NO: 90305 - protein, 9 aa, Homo sapiens
  Table A; Target 90305; HLA-B*56:01; TRPM1; ENSG00000134160; TAA
QHIPPLPSA

SEQ ID NO: 90306 - protein, 9 aa, Homo sapiens
  Table A; Target 90306; HLA-A*01:01; TRPM1; ENSG00000134160; TAA
QIAMKLLTY

SEQ ID NO: 90307 - protein, 9 aa, Homo sapiens
  Table A; Target 90307; HLA-A*03:01; TRPM1; ENSG00000134160; TAA
QIAMKLLTY

SEQ ID NO: 90308 - protein, 9 aa, Homo sapiens
  Table A; Target 90308; HLA-A*25:01; TRPM1; ENSG00000134160; TAA
QIAMKLLTY

SEQ ID NO: 90309 - protein, 9 aa, Homo sapiens
  Table A; Target 90309; HLA-A*26:01; TRPM1; ENSG00000134160; TAA
QIAMKLLTY

SEQ ID NO: 90310 - protein, 9 aa, Homo sapiens
  Table A; Target 90310; HLA-A*29:02; TRPM1; ENSG00000134160; TAA
QIAMKLLTY
